United States Patent Application Publication US 2019/0016770 A1 - sequence listing, part 2

SEQ ID NO: 7292 - protein, 35 aa, Artificial Sequence
  GFR-binding peptide
  MOD_RES (2)..(3): Xaa is C or S
  MOD_RES (17)..(18)..(19)..(20)..(21): Xaa is A or G
  MOD_RES (22)..(23)..(24)..(25): Xaa is A or G or is absent
PXXVPQDLSPISILYKXXXXXXXXXLKYHYMVVKS

SEQ ID NO: 7293 - protein, 35 aa, Artificial Sequence
  GFR-binding peptide
  MOD_RES (4)..(5): Xaa is C or S
PKAXXVPTELNAISMLYFDENEKVVLKKYRDMVVE

SEQ ID NO: 7294 - protein, 35 aa, Artificial Sequence
  GFR-binding peptide
  MOD_RES (33)..(35): Xaa is C or S
VPTKLSAISVLYLDDMGVPTLKNYQEGMSVAEXGX

SEQ ID NO: 7295 - protein, 41 aa, Artificial Sequence
  GFR-binding peptide
  MOD_RES (1)..(38)..(40): Xaa is C or S
XRPTQVQLSPISVLYKEIVRKKPIFLKYHYTLEDHLAXKXE

SEQ ID NO: 7296 - protein, 35 aa, Artificial Sequence
  GFR-binding peptide
  MOD_RES (2)..(34): Xaa is C or S
TXAPTKLSPISVLYKDDSSNVILKYHYNMVVRSXG

SEQ ID NO: 7297 - protein, 35 aa, Artificial Sequence
  GFR-binding peptide
  MOD_RES (1)..(2): Xaa is C or S
  MOD_RES (16)..(17)..(18)..(19)..(20): Xaa is A or G
  MOD_RES (21)..(22)..(23)..(24): Xaa is A or G or is absent
XXVPTELNAISMLYFXXXXXXXXXLKKYRDMVVEG

SEQ ID NO: 7298 - protein, 40 aa, Artificial Sequence
  GFR-binding peptide
  MOD_RES (4)..(5)..(38)..(40): Xaa is C or S
  MOD_RES (19)..(20)..(21)..(22)..(23): Xaa is A or G
  MOD_RES (24)..(25)..(26)..(27): Xaa is A or G or is absent
ASPXXVSQDLSPISILYKXXXXXXXXXLKYHYMIVKSXKX

SEQ ID NO: 7299 - protein, 40 aa, Artificial Sequence
  GFR-binding peptide
  MOD_RES (5)..(6)..(40): Xaa is C or S
  MOD_RES (20)..(21)..(22)..(23)..(24): Xaa is A or G
  MOD_RES (25)..(26)..(27)..(28): Xaa is A or G or is absent
IPKAXXVPTELSATSMLYYXXXXXXXXXLRKHRDMVVEGX

SEQ ID NO: 7300 - protein, 38 aa, Artificial Sequence
  GFR-binding peptide
  MOD_RES (1)..(2)..(35)..(37): Xaa is C or S
  MOD_RES (16)..(17)..(18)..(19)..(20): Xaa is A or G
  MOD_RES (21)..(22)..(23)..(24): Xaa is A or G or is absent
XXVPQDLSATSILYYXXXXXXXXXLRKHRMVVKSXKXS

SEQ ID NO: 7301 - protein, 38 aa, Artificial Sequence
  GFR-binding peptide
  MOD_RES (2)..(3)..(36)..(38): Xaa is C or S
  MOD_RES (17)..(18)..(19)..(20)..(21): Xaa is A or G
  MOD_RES (22)..(23)..(24)..(25): Xaa is A or G or is absent
PXXVPQDLSATSILYYXXXXXXXXXLRKHRMVVKSXKX

SEQ ID NO: 7302 - protein, 41 aa, Artificial Sequence
  GFR-binding peptide
  MOD_RES (5)..(6)..(39)..(41): Xaa is C or S
  MOD_RES (20)..(21)..(22)..(23)..(24): Xaa is A or G
  MOD_RES (25)..(26)..(27)..(28): Xaa is A or G or is absent
SAAPXXVPQALNAISILYFXXXXXXXXXLKKYRMIVRSXKX

SEQ ID NO: 7303 - protein, 37 aa, Artificial Sequence
  GFR-binding peptide
  MOD_RES (4)..(5): Xaa is C or S
  MOD_RES (19)..(20)..(21)..(22)..(23): Xaa is A or G
  MOD_RES (24)..(25)..(26)..(27): Xaa is A or G or is absent
PKPXXAPTKLSAISVLYLXXXXXXXXXLKNYQNMVVR

SEQ ID NO: 7304 - protein, 30 aa, Artificial Sequence
  GFR-binding peptide
VPQDLSPISILYKVGRTPKVLKYHYMVVKS

SEQ ID NO: 7305 - protein, 34 aa, Artificial Sequence
  GFR-binding peptide
  MOD_RES (1)..(2): Xaa is C or S
  MOD_RES (16)..(17)..(18)..(19)..(20): Xaa is A or G
  MOD_RES (21)..(22)..(23)..(24): Xaa is A or G or is absent
XXVPQDLNAISILYFXXXXXXXXXLKKYRMVVKS

SEQ ID NO: 7306 - protein, 32 aa, Artificial Sequence
  GFR-binding peptide
  MOD_RES (14)..(15)..(16)..(17)..(18): Xaa is A or G
  MOD_RES (19)..(20)..(21)..(22): Xaa is A or G or is absent
VSQDLSPISILYKXXXXXXXXXLKYHYMIVKS

SEQ ID NO: 7307 - protein, 33 aa, Artificial Sequence
  GFR-binding peptide
  MOD_RES (1)..(1): Xaa is C or S
  MOD_RES (15)..(16)..(17)..(18)..(19): Xaa is A or G
  MOD_RES (20)..(21)..(22)..(23): Xaa is A or G or is absent
XVSQDLSPISILYKXXXXXXXXXLKYHYMIVKS

SEQ ID NO: 7308 - protein, 39 aa, Artificial Sequence
  GFR-binding peptide
  MOD_RES (3)..(4)..(38): Xaa is C or S
  MOD_RES (18)..(19)..(20)..(21)..(22): Xaa is A or G
  MOD_RES (23)..(24)..(25)..(26): Xaa is A or G or is absent
KPXXAPTKLSAISVLYLXXXXXXXXXLKNYQNMVVRSXG

SEQ ID NO: 7309 - protein, 36 aa, Artificial Sequence
  GFR-binding peptide
  MOD_RES (2)..(3): Xaa is C or S
  MOD_RES (17)..(18)..(19)..(20)..(21): Xaa is A or G
  MOD_RES (22)..(23)..(24)..(25): Xaa is A or G or is absent
AXXAPTKLSPISVLYKXXXXXXXXXLKYHYNMVVKA

SEQ ID NO: 7310 - protein, 37 aa, Artificial Sequence
  GFR-binding peptide
  MOD_RES (3)..(4)..(35)..(37): Xaa is C or S
SPXXVPQDLSPISILYKVGRTPKVLKYHYMVVKSXKX

SEQ ID NO: 7311 - protein, 40 aa, Artificial Sequence
  GFR-binding peptide
  MOD_RES (5)..(6)..(37)..(39): Xaa is C or S
SASPXXVSQDLSATSILYYIGKTPKILRKHRMIVKSXKXS

SEQ ID NO: 7312 - protein, 38 aa, Artificial Sequence
  GFR-binding peptide
  MOD_RES (4)..(5)..(36)..(38): Xaa is C or S
AAPXXVPQALSPISILYKVGRKPKVLKYHYMIVRSXKX

SEQ ID NO: 7313 - protein, 40 aa, Artificial Sequence
  GFR-binding peptide
  MOD_RES (4)..(5)..(37)..(39): Xaa is C or S
PKPXXAPTKLSPISVLYKDDSSNVILKYHYNMVVRSXGXH

SEQ ID NO: 7314 - protein, 42 aa, Artificial Sequence
  GFR-binding peptide
  MOD_RES (4)..(5)..(39)..(41): Xaa is C or S
  MOD_RES (19)..(20)..(21)..(22)..(23): Xaa is A or G
  MOD_RES (24)..(25)..(26)..(27): Xaa is A or G or is absent
PKAXXAPTKLSPISVLYKXXXXXXXXXLKYHYNMVVKAXGXH

SEQ ID NO: 7315 - protein, 39 aa, Artificial Sequence
  GFR-binding peptide
  MOD_RES (5)..(39): Xaa is C or S
  MOD_RES (19)..(20)..(21)..(22)..(23): Xaa is A or G
  MOD_RES (24)..(25)..(26)..(27): Xaa is A or G or is absent
TKPTXAPTKLNAISVLYFXXXXXXXXXLKKYRNMVVRSX

SEQ ID NO: 7316 - protein, 35 aa, Artificial Sequence
  GFR-binding peptide
  MOD_RES (34)..(34): Xaa is C or S
  MOD_RES (14)..(15)..(16)..(17)..(18): Xaa is A or G
  MOD_RES (19)..(20)..(21)..(22): Xaa is A or G or is absent
VPTELSPISMLYKXXXXXXXXXLKYHYDMVVEGXG

SEQ ID NO: 7317 - protein, 43 aa, Artificial Sequence
  GFR-binding peptide
  MOD_RES (5)..(6)..(41)..(43): Xaa is C or S
  MOD_RES (20)..(21)..(22)..(23)..(24): Xaa is A or G
  MOD_RES (25)..(26)..(27)..(28): Xaa is A or G or is absent
VGKAXXVPTKLSPISVLYKXXXXXXXXXLKYHYEGMSVAEXGX

SEQ ID NO: 7318 - protein, 39 aa, Artificial Sequence
  GFR-binding peptide
  MOD_RES (5)..(39): Xaa is C or S
  MOD_RES (19)..(20)..(21)..(22)..(23): Xaa is A or G
  MOD_RES (24)..(25)..(26)..(27): Xaa is A or G or is absent
TKPTXAPTKLSPISVLYKXXXXXXXXXLKYHYNMVVRSX

SEQ ID NO: 7319 - protein, 34 aa, Artificial Sequence
  GFR-binding peptide
  MOD_RES (3)..(3): Xaa is C or S
PTXAPTKLSAISVLYLDDSSNVILKNYQNMVVRS

SEQ ID NO: 7320 - protein, 40 aa, Artificial Sequence
  GFR-binding peptide
  MOD_RES (1)..(38)..(40): Xaa is C or S
XRPTQVQLSAISVLYLEIVRKKPIFLKNYQTLEDHLAXKX

SEQ ID NO: 7321 - protein, 34 aa, Artificial Sequence
  GFR-binding peptide
  MOD_RES (1)..(1): Xaa is C or S
  MOD_RES (15)..(16)..(17)..(18)..(19): Xaa is A or G
  MOD_RES (20)..(21)..(22)..(23): Xaa is A or G or is absent
XVPTELNAISMLYFXXXXXXXXXLKKYRDMVVEG

SEQ ID NO: 7322 - protein, 37 aa, Artificial Sequence
  GFR-binding peptide
  MOD_RES (2)..(3)..(34)..(36): Xaa is C or S
PXXVSQDLNAISILYFIGKTPKILKKYRMIVKSXKXS

SEQ ID NO: 7323 - protein, 37 aa, Artificial Sequence
  GFR-binding peptide
  MOD_RES (1)..(2)..(35)..(37): Xaa is C or S
  MOD_RES (16)..(17)..(18)..(19)..(20): Xaa is A or G
  MOD_RES (21)..(22)..(23)..(24): Xaa is A or G or is absent
XXVPQALSAISILYLXXXXXXXXXLKNYQMIVRSXKX

SEQ ID NO: 7324 - protein, 34 aa, Artificial Sequence
  GFR-binding peptide
  MOD_RES (1)..(33): Xaa is C or S
XAPTQLSAISVLYLDDSSNVILKNYQNMVVRAXG

SEQ ID NO: 7325 - protein, 37 aa, Artificial Sequence
  GFR-binding peptide
  MOD_RES (3)..(37): Xaa is C or S
  MOD_RES (17)..(18)..(19)..(20)..(21): Xaa is A or G
  MOD_RES (22)..(23)..(24)..(25): Xaa is A or G or is absent
PTXAPTKLNAISVLYFXXXXXXXXXLKKYRNMVVRSX

SEQ ID NO: 7326 - protein, 38 aa, Artificial Sequence
  GFR-binding peptide
  MOD_RES (4)..(4): Xaa is C or S
NVQXRPTQVQLNAISVLYFEIVRKKPIFLKKYRTLEDH

SEQ ID NO: 7327 - protein, 41 aa, Artificial Sequence
  GFR-binding peptide
  MOD_RES (4)..(5)..(38)..(40): Xaa is C or S
  MOD_RES (19)..(20)..(21)..(22)..(23): Xaa is A or G
  MOD_RES (24)..(25)..(26)..(27): Xaa is A or G or is absent
ASPXXVPQDLNAISILYFXXXXXXXXXLKKYRMVVKSXKXS

SEQ ID NO: 7328 - protein, 40 aa, Artificial Sequence
  GFR-binding peptide
  MOD_RES (6)..(7)..(39): Xaa is C or S
AVPKAXXAPTKLNAISVLYFDSSNNVILKKYRNMVVKAXG

SEQ ID NO: 7329 - protein, 34 aa, Artificial Sequence
  GFR-binding peptide
  MOD_RES (2)..(3)..(34): Xaa is C or S
PXXVSQDLSAISILYLIGKTPKILKNYQMIVKSX

SEQ ID NO: 7330 - protein, 35 aa, Artificial Sequence
  GFR-binding peptide
  MOD_RES (35)..(35): Xaa is C or S
TQVQLNAISVLYFEIVRKKPIFLKKYRTLEDHLAX

SEQ ID NO: 7331 - protein, 32 aa, Artificial Sequence
  GFR-binding peptide
  MOD_RES (32)..(32): Xaa is C or S
APTQLSPISVLYKDDSSNVILKYHYNMVVRAX

SEQ ID NO: 7332 - protein, 36 aa, Artificial Sequence
  GFR-binding peptide
  MOD_RES (2)..(3)..(34)..(36): Xaa is C or S
PXXVSQDLNAISILYFIGKTPKILKKYRMIVKSXKX

SEQ ID NO: 7333 - protein, 38 aa, Artificial Sequence
  GFR-binding peptide
  MOD_RES (3)..(4)..(35)..(37): Xaa is C or S
SPXXVSQDLSAISILYLIGKTPKILKNYQMIVKSXKXS

SEQ ID NO: 7334 - protein, 38 aa, Artificial Sequence
  GFR-binding peptide
  MOD_RES (4)..(5): Xaa is C or S
  MOD_RES (19)..(20)..(21)..(22)..(23): Xaa is A or G
  MOD_RES (24)..(25)..(26)..(27): Xaa is A or G or is absent
PKAXXAPTKLSAISVLYLXXXXXXXXXLKNYQNMVVKA

SEQ ID NO: 7335 - protein, 36 aa, Artificial Sequence
  GFR-binding peptide
  MOD_RES (4)..(5): Xaa is C or S
PKAXXAPTKLSAISVLYLDSSNNVILKNYQNMVVKA

SEQ ID NO: 7336 - protein, 38 aa, Artificial Sequence
  GFR-binding peptide
  MOD_RES (4)..(5): Xaa is C or S
  MOD_RES (19)..(20)..(21)..(22)..(23): Xaa is A or G
  MOD_RES (24)..(25)..(26)..(27): Xaa is A or G or is absent
PKAXXAPTKLNAISVLYFXXXXXXXXXLKKYRNMVVKA

SEQ ID NO: 7337 - protein, 39 aa, Artificial Sequence
  GFR-binding peptide
  MOD_RES (3)..(3): Xaa is C or S
VQXRPTQVQLNAISVLYFEIVRKKPIFLKKYRTLEDHLA

SEQ ID NO: 7338 - protein, 35 aa, Artificial Sequence
  GFR-binding peptide
  MOD_RES (1)..(2)..(35): Xaa is C or S
  MOD_RES (16)..(17)..(18)..(19)..(20): Xaa is A or G
  MOD_RES (21)..(22)..(23)..(24): Xaa is A or G or is absent
XXVPQDLSPISILYKXXXXXXXXXLKYHYMVVKSX

SEQ ID NO: 7339 - protein, 36 aa, Artificial Sequence
  GFR-binding peptide
  MOD_RES (1)..(34)..(36): Xaa is C or S
  MOD_RES (15)..(16)..(17)..(18)..(19): Xaa is A or G
  MOD_RES (20)..(21)..(22)..(23): Xaa is A or G or is absent
XVPQDLSPISILYKXXXXXXXXXLKYHYMVVKSXKX

SEQ ID NO: 7340 - protein, 34 aa, Artificial Sequence
  GFR-binding peptide
  MOD_RES (1)..(34): Xaa is C or S
  MOD_RES (15)..(16)..(17)..(18)..(19): Xaa is A or G
  MOD_RES (20)..(21)..(22)..(23): Xaa is A or G or is absent
XVPQALSPISILYKXXXXXXXXXLKYHYMIVRSX

SEQ ID NO: 7341 - protein, 36 aa, Artificial Sequence
  GFR-binding peptide
  MOD_RES (4)..(5): Xaa is C or S
PKPXXAPTQLSAISVLYLDDSSNVILKNYQNMVVRA

SEQ ID NO: 7342 - protein, 35 aa, Artificial Sequence
  GFR-binding peptide
  MOD_RES (2)..(3)..(34): Xaa is C or S
PXXVPQALSATSILYYVGRKPKVLRKHRMIVRSXK

SEQ ID NO: 7343 - protein, 37 aa, Artificial Sequence
  GFR-binding peptide
  MOD_RES (2)..(3)..(36): Xaa is C or S
AXXVPTKLSAISVLYLDDMGVPTLKNYQEGMSVAEXG

SEQ ID NO: 7344 - protein, 41 aa, Artificial Sequence
  GFR-binding peptide
  MOD_RES (5)..(39)..(41): Xaa is C or S
  MOD_RES (19)..(20)..(21)..(22)..(23): Xaa is A or G
  MOD_RES (24)..(25)..(26)..(27): Xaa is A or G or is absent
TKPTXAPTKLSATSVLYYXXXXXXXXXLRKHRNMVVRSXGX

SEQ ID NO: 7345 - protein, 39 aa, Artificial Sequence
  GFR-binding peptide
  MOD_RES (36)..(38): Xaa is C or S
PTQVQLNAISVLYFEIVRKKPIFLKKYRTLEDHLAXKXE

SEQ ID NO: 7346 - protein, 38 aa, Artificial Sequence
  GFR-binding peptide
  MOD_RES (1)..(35)..(37): Xaa is C or S
  MOD_RES (15)..(16)..(17)..(18)..(19): Xaa is A or G
  MOD_RES (20)..(21)..(22)..(23): Xaa is A or G or is absent
XAPTKLSATSVLYYXXXXXXXXXLRKHRNMVVKAXGXH

SEQ ID NO: 7347 - protein, 38 aa, Artificial Sequence
  GFR-binding peptide
  MOD_RES (3)..(4)..(36)..(38): Xaa is C or S
KAXXAPTKLNAISVLYFDSSNNVILKKYRNMVVKAXGX

SEQ ID NO: 7348 - protein, 37 aa, Artificial Sequence
  GFR-binding peptide
  MOD_RES (1)..(2)..(36): Xaa is C or S
  MOD_RES (16)..(17)..(18)..(19)..(20): Xaa is A or G
  MOD_RES (21)..(22)..(23)..(24): Xaa is A or G or is absent
XXAPTKLSATSVLYYXXXXXXXXXLRKHRNMVVRSXG

SEQ ID NO: 7349 - protein, 35 aa, Artificial Sequence
  GFR-binding peptide
  MOD_RES (1)..(35): Xaa is C or S
  MOD_RES (15)..(16)..(17)..(18)..(19): Xaa is A or G
  MOD_RES (20)..(21)..(22)..(23): Xaa is A or G or is absent
XVPTELSATSMLYYXXXXXXXXXLRKHRDMVVEGX

SEQ ID NO: 7350 - protein, 34 aa, Artificial Sequence
  GFR-binding peptide
  MOD_RES (1)..(2)..(33): Xaa is C or S
XXVPQALSAISILYLVGRKPKVLKNYQMIVRSXK

SEQ ID NO: 7351 - protein, 39 aa, Artificial Sequence
  GFR-binding peptide
  MOD_RES (4)..(5)..(39): Xaa is C or S
  MOD_RES (19)..(20)..(21)..(22)..(23): Xaa is A or G
  MOD_RES (24)..(25)..(26)..(27): Xaa is A or G or is absent
PKAXXVPTELSAISMLYLXXXXXXXXXLKNYQEMVVEGX

SEQ ID NO: 7352 - protein, 34 aa, Artificial Sequence
  GFR-binding peptide
  MOD_RES (33)..(33): Xaa is C or S
  MOD_RES (14)..(15)..(16)..(17)..(18): Xaa is A or G
  MOD_RES (19)..(20)..(21)..(22): Xaa is A or G or is absent
VPQALNAISILYFXXXXXXXXXLKKYRMIVRSXK

SEQ ID NO: 7353 - protein, 40 aa, Artificial Sequence
  GFR-binding peptide
  MOD_RES (2)..(3)..(37)..(39): Xaa is C or S
  MOD_RES (17)..(18)..(19)..(20)..(21): Xaa is A or G
  MOD_RES (22)..(23)..(24)..(25): Xaa is A or G or is absent
AXXVPTELNAISMLYFXXXXXXXXXLKKYRDMVVEGXGXR

SEQ ID NO: 7354 - protein, 34 aa, Artificial Sequence
  GFR-binding peptide
  MOD_RES (2)..(3): Xaa is C or S
PXXAPTKLSAISVLYLDDSSNVILKNYQNMVVRS

SEQ ID NO: 7355 - protein, 37 aa, Artificial Sequence
  GFR-binding peptide
  MOD_RES (1)..(34)..(36): Xaa is C or S
XVPTKLNAISVLYFDDMGVPTLKKYREGMSVAEXGXR

SEQ ID NO: 7356 - protein, 33 aa, Artificial Sequence
  GFR-binding peptide
  MOD_RES (32)..(32): Xaa is C or S
APTKLSPISVLYKDSSNNVILKYHYNMVVKAXG

SEQ ID NO: 7357 - protein, 39 aa, Artificial Sequence
  GFR-binding peptide
  MOD_RES (6)..(7)..(39): Xaa is C or S
SIPKAXXVPTELSATSMLYYDEYDKVVLRKHREMVVEGX

SEQ ID NO: 7358 - protein, 41 aa, Artificial Sequence
  GFR-binding peptide
  MOD_RES (5)..(6)..(39)..(41): Xaa is C or S
VGKAXXVPTKLSAISVLYLDDMGVPTLKNYQEGMSVAEXGX

SEQ ID NO: 7359 - protein, 39 aa, Artificial Sequence
  GFR-binding peptide
  MOD_RES (6)..(7)..(38): Xaa is C or S
ASAAPXXVPQALNAISILYFVGRKPKVLKKYRMIVRSXK

SEQ ID NO: 7360 - protein, 35 aa, Artificial Sequence
  GFR-binding peptide
  MOD_RES (3)..(4): Xaa is C or S
KPXXAPTQLSPISVLYKDDSSNVILKYHYNMVVRA

SEQ ID NO: 7361 - protein, 33 aa, Artificial Sequence
  GFR-binding peptide
  MOD_RES (14)..(15)..(16)..(17)..(18): Xaa is A or G
  MOD_RES (19)..(20)..(21)..(22): Xaa is A or G or is absent
APTKLSPISVLYKXXXXXXXXXLKYHYNMVVKA

SEQ ID NO: 7362 - protein, 39 aa, Artificial Sequence
  GFR-binding peptide
  MOD_RES (3)..(4)..(36)..(38): Xaa is C or S
KAXXVPTELSATSMLYYDEYDKVVLRKHREMVVEGXGXR

SEQ ID NO: 7363 - protein, 39 aa, Artificial Sequence
  GFR-binding peptide
  MOD_RES (2)..(3)..(37)..(39): Xaa is C or S
  MOD_RES (17)..(18)..(19)..(20)..(21): Xaa is A or G
  MOD_RES (22)..(23)..(24)..(25): Xaa is A or G or is absent
AXXVPTELSAISMLYLXXXXXXXXXLKNYQEMVVEGXGX

SEQ ID NO: 7364 - protein, 33 aa, Artificial Sequence
  GFR-binding peptide
  MOD_RES (1)..(33): Xaa is C or S
XVPTELSPISMLYKDENEKVVLKYHYDMVVEGX

SEQ ID NO: 7365 - protein, 35 aa, Artificial Sequence
  GFR-binding peptide
  MOD_RES (32)..(34): Xaa is C or S
VPTELNAISMLYFDEYDKVVLKKYREMVVEGXGXR

SEQ ID NO: 7366 - protein, 36 aa, Artificial Sequence
  GFR-binding peptide
  MOD_RES (5)..(6): Xaa is C or S
SASPXXVSQDLNAISILYFIGKTPKILKKYRMIVKS

SEQ ID NO: 7367 - protein, 32 aa, Artificial Sequence
  GFR-binding peptide
  MOD_RES (14)..(15)..(16)..(17)..(18): Xaa is A or G
  MOD_RES (19)..(20)..(21)..(22): Xaa is A or G or is absent
VSQDLSATSILYYXXXXXXXXXLRKHRMIVKS

SEQ ID NO: 7368 - protein, 42 aa, Artificial Sequence
  GFR-binding peptide
  MOD_RES (5)..(39)..(41): Xaa is C or S
  MOD_RES (19)..(20)..(21)..(22)..(23): Xaa is A or G
  MOD_RES (24)..(25)..(26)..(27): Xaa is A or G or is absent
TKPTXAPTKLNAISVLYFXXXXXXXXXLKKYRNMVVRSXGXH

SEQ ID NO: 7369 - protein, 35 aa, Artificial Sequence
  GFR-binding peptide
  MOD_RES (3)..(35): Xaa is C or S
PTXAPTKLSATSVLYYDDSSNVILRKHRNMVVRSX

SEQ ID NO: 7370 - protein, 37 aa, Artificial Sequence
  GFR-binding peptide
  MOD_RES (4)..(5): Xaa is C or S
  MOD_RES (19)..(20)..(21)..(22)..(23): Xaa is A or G
  MOD_RES (24)..(25)..(26)..(27): Xaa is A or G or is absent
PKAXXAPTKLSAISVLYLXXXXXXXXXLKNYQNMVVK

SEQ ID NO: 7371 - protein, 34 aa, Artificial Sequence
  GFR-binding peptide
  MOD_RES (2)..(2): Xaa is C or S
  MOD_RES (16)..(17)..(18)..(19)..(20): Xaa is A or G
  MOD_RES (21)..(22)..(23)..(24): Xaa is A or G or is absent
TXAPTKLSATSVLYYXXXXXXXXXLRKHRNMVVR

SEQ ID NO: 7372 - protein, 35 aa, Artificial Sequence
  GFR-binding peptide
  MOD_RES (1)..(2)..(34): Xaa is C or S
XXAPTKLSATSVLYYDDSSNVILRKHRNMVVRSXG

SEQ ID NO: 7373 - protein, 30 aa, Artificial Sequence
  GFR-binding peptide
VSQDLNAISILYFIGKTPKILKKYRMIVKS

SEQ ID NO: 7374 - protein, 38 aa, Artificial Sequence
  GFR-binding peptide
  MOD_RES (1)..(35)..(37): Xaa is C or S
  MOD_RES (15)..(16)..(17)..(18)..(19): Xaa is A or G
  MOD_RES (20)..(21)..(22)..(23): Xaa is A or G or is absent
XAPTKLSPISVLYKXXXXXXXXXLKYHYNMVVRSXGXH

SEQ ID NO: 7375 - protein, 38 aa, Artificial Sequence
  GFR-binding peptide
  MOD_RES (3)..(4)..(35)..(37): Xaa is C or S
SPXXVSQDLNAISILYFIGKTPKILKKYRMIVKSXKXS

SEQ ID NO: 7376 - protein, 43 aa, Artificial Sequence
  GFR-binding peptide
  MOD_RES (5)..(42): Xaa is C or S
  MOD_RES (21)..(22)..(23)..(24)..(25): Xaa is A or G
  MOD_RES (26)..(27)..(28)..(29): Xaa is A or G or is absent
RNVQXRPTQVQLSAISVLYLXXXXXXXXXLKNYQTLEDHLAXK

SEQ ID NO: 7377 - protein, 36 aa, Artificial Sequence
  GFR-binding peptide
  MOD_RES (1)..(2)..(35): Xaa is C or S
  MOD_RES (16)..(17)..(18)..(19)..(20): Xaa is A or G
  MOD_RES (21)..(22)..(23)..(24): Xaa is A or G or is absent
XXVPQALSAISILYLXXXXXXXXXLKNYQMIVRSXK

SEQ ID NO: 7378 - protein, 40 aa, Artificial Sequence
  GFR-binding peptide
  MOD_RES (4)..(5)..(39): Xaa is C or S
  MOD_RES (19)..(20)..(21)..(22)..(23): Xaa is A or G
  MOD_RES (24)..(25)..(26)..(27): Xaa is A or G or is absent
PKAXXVPTELNAISMLYFXXXXXXXXXLKKYRDMVVEGXG

SEQ ID NO: 7379 - protein, 32 aa, Artificial Sequence
  GFR-binding peptide
  MOD_RES (32)..(32): Xaa is C or S
APTKLSATSVLYYDDSSNVILRKHRNMVVRSX

SEQ ID NO: 7380 - protein, 44 aa, Artificial Sequence
  GFR-binding peptide
  MOD_RES (5)..(42)..(44): Xaa is C or S
RNVQXRPTQVQLSATSVLYYEIVRKKPIFLRKHRTLEDHLAXKX

SEQ ID NO: 7381 - protein, 37 aa, Artificial Sequence
  GFR-binding peptide
  MOD_RES (1)..(2)..(36): Xaa is C or S
  MOD_RES (16)..(17)..(18)..(19)..(20): Xaa is A or G
  MOD_RES (21)..(22)..(23)..(24): Xaa is A or G or is absent
XXVPTELSPISMLYKXXXXXXXXXLKYHYDMVVEGXG

SEQ ID NO: 7382 - protein, 42 aa, Artificial Sequence
  GFR-binding peptide
  MOD_RES (6)..(7)..(42): Xaa is C or S
  MOD_RES (21)..(22)..(23)..(24)..(25): Xaa is A or G
  MOD_RES (26)..(27)..(28)..(29): Xaa is A or G or is absent
KVGKAXXVPTKLSPISVLYKXXXXXXXXXLKYHYEGMSVAEX

SEQ ID NO: 7383 - protein, 37 aa, Artificial Sequence
  GFR-binding peptide
  MOD_RES (3)..(4): Xaa is C or S
  MOD_RES (18)..(19)..(20)..(21)..(22): Xaa is A or G
  MOD_RES (23)..(24)..(25)..(26): Xaa is A or G or is absent
KAXXAPTKLNAISVLYFXXXXXXXXXLKKYRNMVVKA

SEQ ID NO: 7384 - protein, 38 aa, Artificial Sequence
  GFR-binding peptide
  MOD_RES (6)..(7): Xaa is C or S
TVPKPXXAPTQLSATSVLYYDDSSNVILRKHRNMVVRA

SEQ ID NO: 7385 - protein, 36 aa, Artificial Sequence
  GFR-binding peptide
  MOD_RES (2)..(2): Xaa is C or S
  MOD_RES (18)..(19)..(20)..(21)..(22): Xaa is A or G
  MOD_RES (23)..(24)..(25)..(26): Xaa is A or G or is absent
QXRPTQVQLSAISVLYLXXXXXXXXXLKNYQTLEDH

SEQ ID NO: 7386 - protein, 34 aa, Artificial Sequence
  GFR-binding peptide
  MOD_RES (1)..(2)..(34): Xaa is C or S
XXAPTQLSPISVLYKDDSSNVILKYHYNMVVRAX

SEQ ID NO: 7387 - protein, 39 aa, Artificial Sequence
  GFR-binding peptide
  MOD_RES (3)..(4)..(36)..(38): Xaa is C or S
KPXXAPTQLSATSVLYYDDSSNVILRKHRNMVVRAXGXH

SEQ ID NO: 7388 - protein, 38 aa, Artificial Sequence
  GFR-binding peptide
  MOD_RES (1)..(2)..(36)..(38): Xaa is C or S
  MOD_RES (16)..(17)..(18)..(19)..(20): Xaa is A or G
  MOD_RES (21)..(22)..(23)..(24): Xaa is A or G or is absent
XXVPTELSATSMLYYXXXXXXXXXLRKHRDMVVEGXGX

SEQ ID NO: 7389 - protein, 42 aa, Artificial Sequence
  GFR-binding peptide
  MOD_RES (3)..(40)..(42): Xaa is C or S
  MOD_RES (19)..(20)..(21)..(22)..(23): Xaa is A or G
  MOD_RES (24)..(25)..(26)..(27): Xaa is A or G or is absent
VQXRPTQVQLSPISVLYKXXXXXXXXXLKYHYTLEDHLAXKX

SEQ ID NO: 7390 - protein, 36 aa, Artificial Sequence
  GFR-binding peptide
  MOD_RES (1)..(34)..(36): Xaa is C or S
  MOD_RES (15)..(16)..(17)..(18)..(19): Xaa is A or G
  MOD_RES (20)..(21)..(22)..(23): Xaa is A or G or is absent
XVSQDLNAISILYFXXXXXXXXXLKKYRMIVKSXKX

SEQ ID NO: 7391 - protein, 39 aa, Artificial Sequence
  GFR-binding peptide
  MOD_RES (5)..(6)..(38): Xaa is C or S
VPKAXXAPTKLSAISVLYLDSSNNVILKNYQNMVVKAXG

SEQ ID NO: 7392 - protein, 40 aa, Artificial Sequence
  GFR-binding peptide
  MOD_RES (3)..(4)..(38)..(40): Xaa is C or S
  MOD_RES (18)..(19)..(20)..(21)..(22): Xaa is A or G
  MOD_RES (23)..(24)..(25)..(26): Xaa is A or G or is absent
KAXXVPTELSPISMLYKXXXXXXXXXLKYHYEMVVEGXGX

SEQ ID NO: 7393 - protein, 40 aa, Artificial Sequence
  GFR-binding peptide
  MOD_RES (6)..(7)..(38)..(40): Xaa is C or S
ASASPXXVSQDLSPISILYKIGKTPKILKYHYMIVKSXKX

SEQ ID NO: 7394 - protein, 41 aa, Artificial Sequence
  GFR-binding peptide
  MOD_RES (5)..(6)..(39)..(41): Xaa is C or S
VGKAXXVPTKLNAISVLYFDDMGVPTLKKYREGMSVAEXGX

SEQ ID NO: 7395 - protein, 40 aa, Artificial Sequence
  GFR-binding peptide
  MOD_RES (4)..(4): Xaa is C or S
  MOD_RES (20)..(21)..(22)..(23)..(24): Xaa is A or G
  MOD_RES (25)..(26)..(27)..(28): Xaa is A or G or is absent
NVQXRPTQVQLNAISVLYFXXXXXXXXXLKKYRTLEDHLA

SEQ ID NO: 7396 - protein, 42 aa, Artificial Sequence
  GFR-binding peptide
  MOD_RES (6)..(7)..(40)..(42): Xaa is C or S
  MOD_RES (21)..(22)..(23)..(24)..(25): Xaa is A or G
  MOD_RES (26)..(27)..(28)..(29): Xaa is A or G or is absent
ASASPXXVPQDLSATSILYYXXXXXXXXXLRKHRMVVKSXKX

SEQ ID NO: 7397 - protein, 38 aa, Artificial Sequence
  GFR-binding peptide
  MOD_RES (3)..(35)..(37): Xaa is C or S
PTXAPTKLSAISVLYLDDSSNVILKNYQNMVVRSXGXH

SEQ ID NO: 7398 - protein, 36 aa, Artificial Sequence
  GFR-binding peptide
  MOD_RES (1)..(2)..(34)..(36): Xaa is C or S
XXAPTKLSPISVLYKDSSNNVILKYHYNMVVKAXGX

SEQ ID NO: 7399 - protein, 34 aa, Artificial Sequence
  GFR-binding peptide
PTQVQLSPISVLYKEIVRKKPIFLKYHYTLEDHL

SEQ ID NO: 7400 - protein, 38 aa, Artificial Sequence
  GFR-binding peptide
  MOD_RES (2)..(3)..(36)..(38): Xaa is C or S
AXXVPTKLSATSVLYYDDMGVPTLRKHREGMSVAEXGX

SEQ ID NO: 7401 - protein, 42 aa, Artificial Sequence
  GFR-binding peptide
  MOD_RES (6)..(7)..(40)..(42): Xaa is C or S
  MOD_RES (21)..(22)..(23)..(24)..(25): Xaa is A or G
  MOD_RES (26)..(27)..(28)..(29): Xaa is A or G or is absent
ASASPXXVPQDLSAISILYLXXXXXXXXXLKNYQMVVKSXKX

SEQ ID NO: 7402 - protein, 43 aa, Artificial Sequence
  GFR-binding peptide
  MOD_RES (5)..(42): Xaa is C or S
  MOD_RES (21)..(22)..(23)..(24)..(25): Xaa is A or G
  MOD_RES (26)..(27)..(28)..(29): Xaa is A or G or is absent
RNVQXRPTQVQLSATSVLYYXXXXXXXXXLRKHRTLEDHLAXK

SEQ ID NO: 7403 - protein, 35 aa, Artificial Sequence
  GFR-binding peptide
  MOD_RES (33)..(35): Xaa is C or S
  MOD_RES (14)..(15)..(16)..(17)..(18): Xaa is A or G
  MOD_RES (19)..(20)..(21)..(22): Xaa is A or G or is absent
VPQALSATSILYYXXXXXXXXXLRKHRMIVRSXKX

SEQ ID NO: 7404 - protein, 39 aa, Artificial Sequence
  GFR-binding peptide
  MOD_RES (3)..(4)..(38): Xaa is C or S
  MOD_RES (18)..(19)..(20)..(21)..(22): Xaa is A or G
  MOD_RES (23)..(24)..(25)..(26): Xaa is A or G or is absent
KPXXAPTKLSATSVLYYXXXXXXXXXLRKHRNMVVRSXG

SEQ ID NO: 7405 - protein, 39 aa, Artificial Sequence
  GFR-binding peptide
  MOD_RES (1)..(2)..(36)..(38): Xaa is C or S
  MOD_RES (16)..(17)..(18)..(19)..(20): Xaa is A or G
  MOD_RES (21)..(22)..(23)..(24): Xaa is A or G or is absent
XXVPTELSATSMLYYXXXXXXXXXLRKHRDMVVEGXGXR

SEQ ID NO: 7406 - protein, 37 aa, Artificial Sequence
  GFR-binding peptide
  MOD_RES (1)..(35)..(37): Xaa is C or S
  MOD_RES (15)..(16)..(17)..(18)..(19): Xaa is A or G
  MOD_RES (20)..(21)..(22)..(23): Xaa is A or G or is absent
XVPTELSPISMLYKXXXXXXXXXLKYHYEMVVEGXGX

SEQ ID NO: 7407 - protein, 38 aa, Artificial Sequence
  GFR-binding peptide
  MOD_RES (4)..(5)..(38): Xaa is C or S
GKAXXVPTKLNAISVLYFDDMGVPTLKKYREGMSVAEX

SEQ ID NO: 7408 - protein, 39 aa, Artificial Sequence
  GFR-binding peptide
  MOD_RES (5)..(6)..(37)..(39): Xaa is C or S
SAAPXXVPQALNAISILYFVGRKPKVLKKYRMIVRSXKX

SEQ ID NO: 7409 - protein, 36 aa, Artificial Sequence
  GFR-binding peptide
  MOD_RES (5)..(6): Xaa is C or S
VPKPXXAPTKLSPISVLYKDDSSNVILKYHYNMVVR

SEQ ID NO: 7410 - protein, 35 aa, Artificial Sequence
  GFR-binding peptide
  MOD_RES (4)..(5): Xaa is C or S
PKAXXVPTELSATSMLYYDENEKVVLRKHRDMVVE

SEQ ID NO: 7411 - protein, 40 aa, Artificial Sequence
  GFR-binding peptide
  MOD_RES (2)..(3)..(37)..(39): Xaa is C or S
  MOD_RES (17)..(18)..(19)..(20)..(21): Xaa is A or G
  MOD_RES (22)..(23)..(24)..(25): Xaa is A or G or is absent
PXXAPTQLSATSVLYYXXXXXXXXXLRKHRNMVVRAXGXH

SEQ ID NO: 7412 - protein, 34 aa, Artificial Sequence
  GFR-binding peptide
TQVQLSAISVLYLEIVRKKPIFLKNYQTLEDHLA

SEQ ID NO: 7413 - protein, 34 aa, Artificial Sequence
  GFR-binding peptide
  MOD_RES (3)..(4): Xaa is C or S
SPXXVPQDLNAISILYFVGRTPKVLKKYRMVVKS

SEQ ID NO: 7414 - protein, 34 aa, Artificial Sequence
  GFR-binding peptide
TQVQLSATSVLYYEIVRKKPIFLRKHRTLEDHLA

SEQ ID NO: 7415 - protein, 42 aa, Artificial Sequence
  GFR-binding peptide
  MOD_RES (6)..(7)..(39)..(41): Xaa is C or S
SIPKAXXVPTELSPISMLYKDEYDKVVLKYHYEMVVEGXGXR

SEQ ID NO: 7416 - protein, 38 aa, Artificial Sequence
  GFR-binding peptide
  MOD_RES (5)..(6): Xaa is C or S
  MOD_RES (20)..(21)..(22)..(23)..(24): Xaa is A or G
  MOD_RES (25)..(26)..(27)..(28): Xaa is A or G or is absent
IPKAXXVPTELSAISMLYLXXXXXXXXXLKNYQEMVVE

SEQ ID NO: 7417 - protein, 35 aa, Artificial Sequence
  GFR-binding peptide
  MOD_RES (1)..(1): Xaa is C or S
  MOD_RES (17)..(18)..(19)..(20)..(21): Xaa is A or G
  MOD_RES (22)..(23)..(24)..(25): Xaa is A or G or is absent
XRPTQVQLSATSVLYYXXXXXXXXXLRKHRTLEDH

SEQ ID NO: 7418 - protein, 39 aa, Artificial Sequence
  GFR-binding peptide
  MOD_RES (3)..(4)..(36)..(38): Xaa is C or S
KAXXVPTELSPISMLYKDENEKVVLKYHYDMVVEGXGXR

SEQ ID NO: 7419 - protein, 40 aa, Artificial Sequence
  GFR-binding peptide
  MOD_RES (3)..(4)..(37)..(39): Xaa is C or S
  MOD_RES (18)..(19)..(20)..(21)..(22): Xaa is A or G
  MOD_RES (23)..(24)..(25)..(26): Xaa is A or G or is absent
SPXXVSQDLSAISILYLXXXXXXXXXLKNYQMIVKSXKXS

SEQ ID NO: 7420 - protein, 35 aa, Artificial Sequence
  GFR-binding peptide
  MOD_RES (1)..(34): Xaa is C or S
XVPTKLNAISVLYFDDMGVPTLKKYREGMSVAEXG

SEQ ID NO: 7421 - protein, 43 aa, Artificial Sequence
  GFR-binding peptide
  MOD_RES (5)..(42): Xaa is C or S
RNVQXRPTQVQLSATSVLYYEIVRKKPIFLRKHRTLEDHLAXK

SEQ ID NO: 7422 - protein, 33 aa, Artificial Sequence
  GFR-binding peptide
  MOD_RES (14)..(15)..(16)..(17)..(18): Xaa is A or G
  MOD_RES (19)..(20)..(21)..(22): Xaa is A or G or is absent
TQVQLSPISVLYKXXXXXXXXXLKYHYTLEDHL

SEQ ID NO: 7423 - protein, 33 aa, Artificial Sequence
  GFR-binding peptide
  MOD_RES (1)..(33): Xaa is C or S
XVPTELNAISMLYFDENEKVVLKKYRDMVVEGX

SEQ ID NO: 7424 - protein, 37 aa, Artificial Sequence
  GFR-binding peptide
  MOD_RES (1)..(2)..(35)..(37): Xaa is C or S
  MOD_RES (16)..(17)..(18)..(19)..(20): Xaa is A or G
  MOD_RES (21)..(22)..(23)..(24): Xaa is A or G or is absent
XXVSQDLSPISILYKXXXXXXXXXLKYHYMIVKSXKX

SEQ ID NO: 7425 - protein, 43 aa, Artificial Sequence
  GFR-binding peptide
  MOD_RES (6)..(7)..(41)..(43): Xaa is C or S
  MOD_RES (21)..(22)..(23)..(24)..(25): Xaa is A or G
  MOD_RES (26)..(27)..(28)..(29): Xaa is A or G or is absent
TVPKPXXAPTQLNAISVLYFXXXXXXXXXLKKYRNMVVRAXGX

SEQ ID NO: 7426 - protein, 37 aa, Artificial Sequence
  GFR-binding peptide
  MOD_RES (3)..(4)..(37): Xaa is C or S
  MOD_RES (18)..(19)..(20)..(21)..(22): Xaa is A or G
  MOD_RES (23)..(24)..(25)..(26): Xaa is A or G or is absent
SPXXVPQDLSATSILYYXXXXXXXXXLRKHRMVVKSX

SEQ ID NO: 7427 - protein, 38 aa, Artificial Sequence
  GFR-binding peptide
  MOD_RES (5)..(6): Xaa is C or S
  MOD_RES (20)..(21)..(22)..(23)..(24): Xaa is A or G
  MOD_RES (25)..(26)..(27)..(28): Xaa is A or G or is absent
IPKAXXVPTELNAISMLYFXXXXXXXXXLKKYRDMVVE

SEQ ID NO: 7428 - protein, 34 aa, Artificial Sequence
  GFR-binding peptide
  MOD_RES (1)..(2)..(34): Xaa is C or S
XXVPTELNAISMLYFDENEKVVLKKYRDMVVEGX

SEQ ID NO: 7429 - protein, 39 aa, Artificial Sequence
  GFR-binding peptide
  MOD_RES (6)..(7): Xaa is C or S
KVGKAXXVPTKLNAISVLYFDDMGVPTLKKYREGMSVAE

SEQ ID NO: 7430 - protein, 35 aa, Artificial Sequence
  GFR-binding peptide
  MOD_RES (1)..(2)..(34): Xaa is C or S
XXAPTQLSATSVLYYDDSSNVILRKHRNMVVRAXG

SEQ ID NO: 7431 - protein, 37 aa, Artificial Sequence
  GFR-binding peptide
  MOD_RES (3)..(4)..(35)..(37): Xaa is C or S
APXXVPQALSPISILYKVGRKPKVLKYHYMIVRSXKX

SEQ ID NO: 7432 - protein, 37 aa, Artificial Sequence
  GFR-binding peptide
  MOD_RES (2)..(3)..(36): Xaa is C or S
  MOD_RES (17)..(18)..(19)..(20)..(21): Xaa is A or G
  MOD_RES (22)..(23)..(24)..(25): Xaa is A or G or is absent
PXXVPQDLSATSILYYXXXXXXXXXLRKHRMVVKSXK

SEQ ID NO: 7433 - protein, 40 aa, Artificial Sequence
  GFR-binding peptide
  MOD_RES (6)..(7)..(40): Xaa is C or S
  MOD_RES (21)..(22)..(23)..(24)..(25): Xaa is A or G
  MOD_RES (26)..(27)..(28)..(29): Xaa is A or G or is absent
ASASPXXVPQDLSPISILYKXXXXXXXXXLKYHYMVVKSX

SEQ ID NO: 7434 - protein, 35 aa, Artificial Sequence
  GFR-binding peptide
  MOD_RES (1)..(34): Xaa is C or S
  MOD_RES (15)..(16)..(17)..(18)..(19): Xaa is A or G
  MOD_RES (20)..(21)..(22)..(23): Xaa is A or G or is absent
XVPQALNAISILYFXXXXXXXXXLKKYRMIVRSXK

SEQ ID NO: 7435 - protein, 34 aa, Artificial Sequence
  GFR-binding peptide
  MOD_RES (1)..(2)..(34): Xaa is C or S
XXVPTELSPISMLYKDENEKVVLKYHYDMVVEGX

SEQ ID NO: 7436 - protein, 36 aa, Artificial Sequence
  GFR-binding peptide
  MOD_RES (1)..(2)..(33)..(35): Xaa is C or S
XXVSQDLNAISILYFIGKTPKILKKYRMIVKSXKXS

SEQ ID NO: 7437 - protein, 36 aa, Artificial Sequence
  GFR-binding peptide
  MOD_RES (1)..(2)..(36): Xaa is C or S
  MOD_RES (16)..(17)..(18)..(19)..(20): Xaa is A or G
  MOD_RES (21)..(22)..(23)..(24): Xaa is A or G or is absent
XXVPTELNAISMLYFXXXXXXXXXLKKYRDMVVEGX

SEQ ID NO: 7438 - protein, 38 aa, Artificial Sequence
  GFR-binding peptide
  MOD_RES (1)..(36)..(38): Xaa is C or S
  MOD_RES (15)..(16)..(17)..(18)..(19): Xaa is A or G
  MOD_RES (20)..(21)..(22)..(23): Xaa is A or G or is absent
XVPTKLSPISVLYKXXXXXXXXXLKYHYEGMSVAEXGX

SEQ ID NO: 7439 - protein, 42 aa, Artificial Sequence
  GFR-binding peptide
  MOD_RES (4)..(5)..(39)..(41): Xaa is C or S
  MOD_RES (19)..(20)..(21)..(22)..(23): Xaa is A or G
  MOD_RES (24)..(25)..(26)..(27): Xaa is A or G or is absent
PKPXXAPTQLSATSVLYYXXXXXXXXXLRKHRNMVVRAXGXH

SEQ ID NO: 7440 - protein, 32 aa, Artificial Sequence
  GFR-binding peptide
  MOD_RES (32)..(32): Xaa is C or S
APTQLSAISVLYLDDSSNVILKNYQNMVVRAX

SEQ ID NO: 7441 - protein, 38 aa, Artificial Sequence
  GFR-binding peptide
  MOD_RES (5)..(6)..(38): Xaa is C or S
IPKAXXVPTELNAISMLYFDEYDKVVLKKYREMVVEGX

SEQ ID NO: 7442 - protein, 37 aa, Artificial Sequence
  GFR-binding peptide
  MOD_RES (6)..(7): Xaa is C or S
YVPKPXXAPTKLSAISVLYLDDSSNVILKNYQNMVVR

SEQ ID NO: 7443 - protein, 42 aa, Artificial Sequence
  GFR-binding peptide
  MOD_RES (6)..(7)..(41): Xaa is C or S
  MOD_RES (21)..(22)..(23)..(24)..(25): Xaa is A or G
  MOD_RES (26)..(27)..(28)..(29): Xaa is A or G or is absent
SIPKAXXVPTELSATSMLYYXXXXXXXXXLRKHREMVVEGXG

SEQ ID NO: 7444 - protein, 43 aa, Artificial Sequence
  GFR-binding peptide
  MOD_RES (5)..(6)..(40)..(42): Xaa is C or S
  MOD_RES (20)..(21)..(22)..(23)..(24): Xaa is A or G
  MOD_RES (25)..(26)..(27)..(28): Xaa is A or G or is absent
VPKPXXAPTQLSPISVLYKXXXXXXXXXLKYHYNMVVRAXGXH

SEQ ID NO: 7445 - protein, 38 aa, Artificial Sequence
  GFR-binding peptide
  MOD_RES (2)..(3)..(37): Xaa is C or S
  MOD_RES (17)..(18)..(19)..(20)..(21): Xaa is A or G
  MOD_RES (22)..(23)..(24)..(25): Xaa is A or G or is absent
AXXVPTELNAISMLYFXXXXXXXXXLKKYREMVVEGXG

SEQ ID NO: 7446 - protein, 37 aa, Artificial Sequence
  GFR-binding peptide
  MOD_RES (3)..(4)..(37): Xaa is C or S
  MOD_RES (18)..(19)..(20)..(21)..(22): Xaa is A or G
  MOD_RES (23)..(24)..(25)..(26): Xaa is A or G or is absent
SPXXVPQDLSAISILYLXXXXXXXXXLKNYQMVVKSX

SEQ ID NO: 7447 - protein, 39 aa, Artificial Sequence
  GFR-binding peptide
  MOD_RES (5)..(37)..(39): Xaa is C or S
TKPTXAPTKLSPISVLYKDDSSNVILKYHYNMVVRSXGX

SEQ ID NO: 7448 - protein, 35 aa, Artificial Sequence
  GFR-binding peptide
  MOD_RES (33)..(35): Xaa is C or S
  MOD_RES (14)..(15)..(16)..(17)..(18): Xaa is A or G
  MOD_RES (19)..(20)..(21)..(22): Xaa is A or G or is absent
VSQDLSPISILYKXXXXXXXXXLKYHYMIVKSXKX

SEQ ID NO: 7449 - protein, 44 aa, Artificial Sequence
  GFR-binding peptide
  MOD_RES (6)..(7)..(42)..(44): Xaa is C or S
  MOD_RES (21)..(22)..(23)..(24)..(25): Xaa is A or G
  MOD_RES (26)..(27)..(28)..(29): Xaa is A or G or is absent
KVGKAXXVPTKLSPISVLYKXXXXXXXXXLKYHYEGMSVAEXGX

SEQ ID NO: 7450 - protein, 39 aa, Artificial Sequence
  GFR-binding peptide
  MOD_RES (1)..(36)..(38): Xaa is C or S
  MOD_RES (15)..(16)..(17)..(18)..(19): Xaa is A or G
  MOD_RES (20)..(21)..(22)..(23): Xaa is A or G or is absent
XVPTKLSPISVLYKXXXXXXXXXLKYHYEGMSVAEXGXR

SEQ ID NO: 7451 - protein, 35 aa, Artificial Sequence
  GFR-binding peptide
  MOD_RES (3)..(4): Xaa is C or S
KAXXVPTELSATSMLYYDENEKVVLRKHRDMVVEG

SEQ ID NO: 7452 - protein, 40 aa, Artificial Sequence
  GFR-binding peptide
  MOD_RES (6)..(7)..(38)..(40): Xaa is C or S
ASASPXXVPQDLSATSILYYVGRTPKVLRKHRMVVKSXKX

SEQ ID NO: 7453 - protein, 39 aa, Artificial Sequence
  GFR-binding peptide
  MOD_RES (5)..(6)..(37)..(39): Xaa is C or S
SASPXXVPQDLSPISILYKVGRTPKVLKYHYMVVKSXKX

SEQ ID NO: 7454 - protein, 32 aa, Artificial Sequence
  GFR-binding peptide
  MOD_RES (1)..(1): Xaa is C or S
XVPTELSATSMLYYDEYDKVVLRKHREMVVEG

SEQ ID NO: 7455 - protein, 36 aa, Artificial Sequence
  GFR-binding peptide
  MOD_RES (1)..(2)..(34)..(36): Xaa is C or S
XXAPTQLSAISVLYLDDSSNVILKNYQNMVVRAXGX

SEQ ID NO: 7456 - protein, 34 aa, Artificial Sequence
  GFR-binding peptide
  MOD_RES (1)..(2): Xaa is C or S
  MOD_RES (16)..(17)..(18)..(19)..(20): Xaa is A or G
  MOD_RES (21)..(22)..(23)..(24): Xaa is A or G or is absent
XXAPTKLNAISVLYFXXXXXXXXXLKKYRNMVVK

SEQ ID NO: 7457 - protein, 37 aa, Artificial Sequence
  GFR-binding peptide
  MOD_RES (1)..(34)..(36): Xaa is C or S
  MOD_RES (15)..(16)..(17)..(18)..(19): Xaa is A or G
  MOD_RES (20)..(21)..(22)..(23): Xaa is A or G or is absent
XVPQDLSAISILYLXXXXXXXXXLKNYQMVVKSXKXS

SEQ ID NO: 7458 - protein, 37 aa, Artificial Sequence
  GFR-binding peptide
  MOD_RES (1)..(1): Xaa is C or S
  MOD_RES (17)..(18)..(19)..(20)..(21): Xaa is A or G
  MOD_RES (22)..(23)..(24)..(25): Xaa is A or G or is absent
XRPTQVQLNAISVLYFXXXXXXXXXLKKYRTLEDHLA

SEQ ID NO: 7459 - protein, 35 aa, Artificial Sequence
  GFR-binding peptide
  MOD_RES (1)..(2)..(35): Xaa is C or S
  MOD_RES (16)..(17)..(18)..(19)..(20): Xaa is A or G
  MOD_RES (21)..(22)..(23)..(24): Xaa is A or G or is absent
XXVSQDLSPISILYKXXXXXXXXXLKYHYMIVKSX

SEQ ID NO: 7460 - protein, 36 aa, Artificial Sequence
  GFR-binding peptide
  MOD_RES (5)..(5): Xaa is C or S
TKPTXAPTKLSPISVLYKDDSSNVILKYHYNMVVRS

SEQ ID NO: 7461 - protein, 39 aa, Artificial Sequence
  GFR-binding peptide
  MOD_RES (5)..(6): Xaa is C or S
  MOD_RES (20)..(21)..(22)..(23)..(24): Xaa is A or G
  MOD_RES (25)..(26)..(27)..(28): Xaa is A or G or is absent
VPKAXXAPTKLSPISVLYKXXXXXXXXXLKYHYNMVVKA

SEQ ID NO: 7462 - protein, 41 aa, Artificial Sequence
  GFR-binding peptide
  MOD_RES (6)..(7)..(39)..(41): Xaa is C or S
KIPKAXXVPTELNAISMLYFDENEKVVLKKYRDMVVEGXGX

SEQ ID NO: 7463 - protein, 34 aa, Artificial Sequence
  GFR-binding peptide
  MOD_RES (1)..(2): Xaa is C or S
  MOD_RES (16)..(17)..(18)..(19)..(20): Xaa is A or G
  MOD_RES (21)..(22)..(23)..(24): Xaa is A or G or is absent
XXAPTKLNAISVLYFXXXXXXXXXLKKYRNMVVR

SEQ ID NO: 7464 - protein, 34 aa, Artificial Sequence
  GFR-binding peptide
  MOD_RES (15)..(16)..(17)..(18)..(19): Xaa is A or G
  MOD_RES (20)..(21)..(22)..(23): Xaa is A or G or is absent
PTQVQLSATSVLYYXXXXXXXXXLRKHRTLEDHL

SEQ ID NO: 7465 - protein, 35 aa, Artificial Sequence
  GFR-binding peptide
  MOD_RES (1)..(2)..(34): Xaa is C or S
XXAPTKLSAISVLYLDSSNNVILKNYQNMVVKAXG

SEQ ID NO: 7466 - protein, 37 aa, Artificial Sequence
  GFR-binding peptide
  MOD_RES (1)..(35)..(37): Xaa is C or S
  MOD_RES (15)..(16)..(17)..(18)..(19): Xaa is A or G
  MOD_RES (20)..(21)..(22)..(23): Xaa is A or G or is absent
XVPTELSPISMLYKXXXXXXXXXLKYHYDMVVEGXGX

SEQ ID NO: 7467 - protein, 39 aa, Artificial Sequence
  GFR-binding peptide
  MOD_RES (4)..(5)..(39): Xaa is C or S
  MOD_RES (19)..(20)..(21)..(22)..(23): Xaa is A or G
  MOD_RES (24)..(25)..(26)..(27): Xaa is A or G or is absent
PKAXXAPTKLSAISVLYLXXXXXXXXXLKNYQNMVVKAX

SEQ ID NO: 7468 - protein, 40 aa, Artificial Sequence
  GFR-binding peptide
  MOD_RES (5)..(6)..(40): Xaa is C or S
  MOD_RES (20)..(21)..(22)..(23)..(24): Xaa is A or G
  MOD_RES (25)..(26)..(27)..(28): Xaa is A or G or is absent
IPKAXXVPTELSAISMLYLXXXXXXXXXLKNYQDMVVEGX

SEQ ID NO: 7469 - protein, 40 aa, Artificial Sequence
  GFR-binding peptide
  MOD_RES (5)..(6)..(38)..(40): Xaa is C or S
IPKAXXVPTELSATSMLYYDEYDKVVLRKHREMVVEGXGX

SEQ ID NO: 7470 - protein, 39 aa, Artificial Sequence
  GFR-binding peptide
  MOD_RES (2)..(3)..(37)..(39): Xaa is C or S
  MOD_RES (17)..(18)..(19)..(20)..(21): Xaa is A or G
  MOD_RES (22)..(23)..(24)..(25): Xaa is A or G or is absent
AXXVPTELSPISMLYKXXXXXXXXXLKYHYDMVVEGXGX

SEQ ID NO: 7471 - protein, 41 aa, Artificial Sequence
  GFR-binding peptide
  MOD_RES (4)..(5)..(39)..(41): Xaa is C or S
  MOD_RES (19)..(20)..(21)..(22)..(23): Xaa is A or G
  MOD_RES (24)..(25)..(26)..(27): Xaa is A or G or is absent
PKPXXAPTQLSPISVLYKXXXXXXXXXLKYHYNMVVRAXGX

SEQ ID NO: 7472 - protein, 41 aa, Artificial Sequence
  GFR-binding peptide
  MOD_RES (1)..(38)..(40): Xaa is C or S
XRPTQVQLSAISVLYLEIVRKKPIFLKNYQTLEDHLAXKXE

SEQ ID NO: 7473 - protein, 36 aa, Artificial Sequence
  GFR-binding peptide
  MOD_RES (2)..(3): Xaa is C or S
  MOD_RES (17)..(18)..(19)..(20)..(21): Xaa is A or G
  MOD_RES (22)..(23)..(24)..(25): Xaa is A or G or is absent
AXXVPTELSATSMLYYXXXXXXXXXLRKHREMVVEG

SEQ ID NO: 7474 - protein, 39 aa, Artificial Sequence
  GFR-binding peptide
  MOD_RES (4)..(5)..(39): Xaa is C or S
  MOD_RES (19)..(20)..(21)..(22)..(23): Xaa is A or G
  MOD_RES (24)..(25)..(26)..(27): Xaa is A or G or is absent
PKPXXAPTKLSPISVLYKXXXXXXXXXLKYHYNMVVRSX

SEQ ID NO: 7475 - protein, 34 aa, Artificial Sequence
  GFR-binding peptide
  MOD_RES (2)..(3)..(34): Xaa is C or S
PXXVSQDLNAISILYFIGKTPKILKKYRMIVKSX

SEQ ID NO: 7476 - protein, 35 aa, Artificial Sequence
  GFR-binding peptide
  MOD_RES (2)..(3): Xaa is C or S
  MOD_RES (17)..(18)..(19)..(20)..(21): Xaa is A or G
  MOD_RES (22)..(23)..(24)..(25): Xaa is A or G or is absent
PXXVPQDLSATSILYYXXXXXXXXXLRKHRMVVKS

SEQ ID NO: 7477 - protein, 38 aa, Artificial Sequence
  GFR-binding peptide
  MOD_RES (5)..(6)..(37): Xaa is C or S
SASPXXVSQDLSATSILYYIGKTPKILRKHRMIVKSXK

SEQ ID NO: 7478 - protein, 35 aa, Artificial Sequence
  GFR-binding peptide
  MOD_RES (2)..(3): Xaa is C or S
  MOD_RES (17)..(18)..(19)..(20)..(21): Xaa is A or G
  MOD_RES (22)..(23)..(24)..(25): Xaa is A or G or is absent
AXXVPTELSAISMLYLXXXXXXXXXLKNYQEMVVE

SEQ ID NO: 7479 - protein, 37 aa, Artificial Sequence
  GFR-binding peptide
  MOD_RES (4)..(5): Xaa is C or S
  MOD_RES (19)..(20)..(21)..(22)..(23): Xaa is A or G
  MOD_RES (24)..(25)..(26)..(27): Xaa is A or G or is absent
AAPXXVPQALSPISILYKXXXXXXXXXLKYHYMIVRS

SEQ ID NO: 7480 - protein, 38 aa, Artificial Sequence
  GFR-binding peptide
  MOD_RES (1)..(2)..(36)..(38): Xaa is C or S
  MOD_RES (16)..(17)..(18)..(19)..(20): Xaa is A or G
  MOD_RES (21)..(22)..(23)..(24): Xaa is A or G or is absent
XXVPTELNAISMLYFXXXXXXXXXLKKYREMVVEGXGX

SEQ ID NO: 7481 - protein, 38 aa, Artificial Sequence
  GFR-binding peptide
  MOD_RES (3)..(4)..(37): Xaa is C or S
  MOD_RES (18)..(19)..(20)..(21)..(22): Xaa is A or G
  MOD_RES (23)..(24)..(25)..(26): Xaa is A or G or is absent
APXXVPQALSAISILYLXXXXXXXXXLKNYQMIVRSXK

SEQ ID NO: 7482 - protein, 41 aa, Artificial Sequence
  GFR-binding peptide
  MOD_RES (6)..(7)..(38)..(40): Xaa is C or S
ASASPXXVSQDLSAISILYLIGKTPKILKNYQMIVKSXKXS

SEQ ID NO: 7483 - protein, 41 aa, Artificial Sequence
  GFR-binding peptide
  MOD_RES (6)..(7)..(41): Xaa is C or S
  MOD_RES (21)..(22)..(23)..(24)..(25): Xaa is A or G
  MOD_RES (26)..(27)..(28)..(29): Xaa is A or G or is absent
YVPKPXXAPTKLSPISVLYKXXXXXXXXXLKYHYNMVVRSX

SEQ ID NO: 7484 - protein, 40 aa, Artificial Sequence
  GFR-binding peptide
  MOD_RES (6)..(7)..(38)..(40): Xaa is C or S
ASAAPXXVPQALSAISILYLVGRKPKVLKNYQMIVRSXKX

SEQ ID NO: 7485 - protein, 34 aa, Artificial Sequence
  GFR-binding peptide
  MOD_RES (1)..(33): Xaa is C or S
XVPTELNAISMLYFDEYDKVVLKKYREMVVEGXG

SEQ ID NO: 7486 - protein, 38 aa, Artificial Sequence
  GFR-binding peptide
  MOD_RES (1)..(2)..(36)..(38): Xaa is C or S
  MOD_RES (16)..(17)..(18)..(19)..(20): Xaa is A or G
  MOD_RES (21)..(22)..(23)..(24): Xaa is A or G or is absent
XXVPTELSATSMLYYXXXXXXXXXLRKHREMVVEGXGX

SEQ ID NO: 7487 - protein, 33 aa, Artificial Sequence
  GFR-binding peptide
  MOD_RES (14)..(15)..(16)..(17)..(18): Xaa is A or G
  MOD_RES (19)..(20)..(21)..(22): Xaa is A or G or is absent
APTQLSATSVLYYXXXXXXXXXLRKHRNMVVRA

SEQ ID NO: 7488 - protein, 41 aa, Artificial Sequence
  GFR-binding peptide
  MOD_RES (6)..(7)..(40): Xaa is C or S
  MOD_RES (21)..(22)..(23)..(24)..(25): Xaa is A or G
  MOD_RES (26)..(27)..(28)..(29): Xaa is A or G or is absent
ASASPXXVPQDLSAISILYLXXXXXXXXXLKNYQMVVKSXK

SEQ ID NO: 7489 - protein, 37 aa, Artificial Sequence
  GFR-binding peptide
  MOD_RES (6)..(7): Xaa is C or S
ASAAPXXVPQALNAISILYFVGRKPKVLKKYRMIVRS

SEQ ID NO: 7490 - protein, 36 aa, Artificial Sequence
  GFR-binding peptide
  MOD_RES (1)..(36): Xaa is C or S
  MOD_RES (15)..(16)..(17)..(18)..(19): Xaa is A or G
  MOD_RES (20)..(21)..(22)..(23): Xaa is A or G or is absent
XVPTKLNAISVLYFXXXXXXXXXLKKYREGMSVAEX

SEQ ID NO: 7491 - protein, 41 aa, Artificial Sequence
  GFR-binding peptide
  MOD_RES (4)..(5)..(38)..(40): Xaa is C or S
GKAXXVPTKLNAISVLYFDDMGVPTLKKYREGMSVAEXGXR

SEQ ID NO: 7492 - protein, 42 aa, Artificial Sequence
  GFR-binding peptide
  MOD_RES (6)..(7)..(41): Xaa is C or S
  MOD_RES (21)..(22)..(23)..(24)..(25): Xaa is A or G
  MOD_RES (26)..(27)..(28)..(29): Xaa is A or G or is absent
TVPKPXXAPTQLSAISVLYLXXXXXXXXXLKNYQNMVVRAXG

SEQ ID NO: 7493 - protein, 40 aa, Artificial Sequence
  GFR-binding peptide
  MOD_RES (3)..(40): Xaa is C or S
  MOD_RES (19)..(20)..(21)..(22)..(23): Xaa is A or G
  MOD_RES (24)..(25)..(26)..(27): Xaa is A or G or is absent
VQXRPTQVQLSAISVLYLXXXXXXXXXLKNYQTLEDHLAX

SEQ ID NO: 7494 - protein, 36 aa, Artificial Sequence
  GFR-binding peptide
  MOD_RES (1)..(2)..(33)..(35): Xaa is C or S
XXVSQDLSAISILYLIGKTPKILKNYQMIVKSXKXS

SEQ ID NO: 7495 - protein, 31 aa, Artificial Sequence
  GFR-binding peptide
APTQLSPISVLYKDDSSNVILKYHYNMVVRA

SEQ ID NO: 7496 - protein, 36 aa, Artificial Sequence
  GFR-binding peptide
  MOD_RES (5)..(6): Xaa is C or S
VPKPXXAPTKLSAISVLYLDDSSNVILKNYQNMVVR

SEQ ID NO: 7497 - protein, 33 aa, Artificial Sequence
  GFR-binding peptide
  MOD_RES (1)..(2): Xaa is C or S
XXVPTELNAISMLYFDEYDKVVLKKYREMVVEG

SEQ ID NO: 7498 - protein, 36 aa, Artificial Sequence
  GFR-binding peptide
  MOD_RES (3)..(4): Xaa is C or S
  MOD_RES (18)..(19)..(20)..(21)..(22): Xaa is A or G
  MOD_RES (23)..(24)..(25)..(26): Xaa is A or G or is absent
KPXXAPTQLSAISVLYLXXXXXXXXXLKNYQNMVVR

SEQ ID NO: 7499 - protein, 33 aa, Artificial Sequence
  GFR-binding peptide
  MOD_RES (1)..(1): Xaa is C or S
  MOD_RES (15)..(16)..(17)..(18)..(19): Xaa is A or G
  MOD_RES (20)..(21)..(22)..(23): Xaa is A or G or is absent
XVPTELSATSMLYYXXXXXXXXXLRKHRDMVVE

SEQ ID NO: 7500 - protein, 42 aa, Artificial Sequence
  GFR-binding peptide
  MOD_RES (3)..(4)..(39)..(41): Xaa is C or S
  MOD_RES (18)..(19)..(20)..(21)..(22): Xaa is A or G
  MOD_RES (23)..(24)..(25)..(26): Xaa is A or G or is absent
KAXXVPTKLSPISVLYKXXXXXXXXXLKYHYEGMSVAEXGXR

SEQ ID NO: 7501 - protein, 37 aa, Artificial Sequence
  GFR-binding peptide
  MOD_RES (1)..(2)..(34)..(36): Xaa is C or S
XXVPTELNAISMLYFDENEKVVLKKYRDMVVEGXGXR

SEQ ID NO: 7502 - protein, 38 aa, Artificial Sequence
  GFR-binding peptide
  MOD_RES (2)..(3)..(36)..(38): Xaa is C or S
  MOD_RES (17)..(18)..(19)..(20)..(21): Xaa is A or G
  MOD_RES (22)..(23)..(24)..(25): Xaa is A or G or is absent
PXXVSQDLSAISILYLXXXXXXXXXLKNYQMIVKSXKX

SEQ ID NO: 7503 - protein, 38 aa, Artificial Sequence
  GFR-binding peptide
  MOD_RES (2)..(3)..(35)..(37): Xaa is C or S
PXXAPTKLSATSVLYYDDSSNVILRKHRNMVVRSXGXH

SEQ ID NO: 7504 - protein, 45 aa, Artificial Sequence
  GFR-binding peptide
  MOD_RES (6)..(7)..(42)..(44): Xaa is C or S
  MOD_RES (21)..(22)..(23)..(24)..(25): Xaa is A or G
  MOD_RES (26)..(27)..(28)..(29): Xaa is A or G or is absent
KVGKAXXVPTKLSPISVLYKXXXXXXXXXLKYHYEGMSVAEXGXR

SEQ ID NO: 7505 - protein, 35 aa, Artificial Sequence
  GFR-binding peptide
  MOD_RES (1)..(2): Xaa is C or S
  MOD_RES (16)..(17)..(18)..(19)..(20): Xaa is A or G
  MOD_RES (21)..(22)..(23)..(24): Xaa is A or G or is absent
XXAPTKLSATSVLYYXXXXXXXXXLRKHRNMVVKA

SEQ ID NO: 7506 - protein, 37 aa, Artificial Sequence
  GFR-binding peptide
  MOD_RES (35)..(37): Xaa is C or S
TQVQLSATSVLYYEIVRKKPIFLRKHRTLEDHLAXKX

SEQ ID NO: 7507 - protein, 36 aa, Artificial Sequence
  GFR-binding peptide
  MOD_RES (5)..(6): Xaa is C or S
SASPXXVPQDLNAISILYFVGRTPKVLKKYRMVVKS

SEQ ID NO: 7508 - protein, 35 aa, Artificial Sequence
  GFR-binding peptide
  MOD_RES (1)..(32)..(34): Xaa is C or S
XVPQALSATSILYYVGRKPKVLRKHRMIVRSXKXS

SEQ ID NO: 7509 - protein, 35 aa, Artificial Sequence
  GFR-binding peptide
  MOD_RES (1)..(33)..(35): Xaa is C or S
XVPTELSATSMLYYDEYDKVVLRKHREMVVEGXGX

SEQ ID NO: 7510 - protein, 35 aa, Artificial Sequence
  GFR-binding peptide
  MOD_RES (1)..(32)..(34): Xaa is C or S
XVPQALSPISILYKVGRKPKVLKYHYMIVRSXKXS

SEQ ID NO: 7511 - protein, 39 aa, Artificial Sequence
  GFR-binding peptide
  MOD_RES (1)..(2)..(36)..(38): Xaa is C or S
  MOD_RES (16)..(17)..(18)..(19)..(20): Xaa is A or G
  MOD_RES (21)..(22)..(23)..(24): Xaa is A or G or is absent
XXAPTQLSPISVLYKXXXXXXXXXLKYHYNMVVRAXGXH

SEQ ID NO: 7512 - protein, 39 aa, Artificial Sequence
  GFR-binding peptide
  MOD_RES (5)..(6)..(37)..(39): Xaa is C or S
SASPXXVSQDLSPISILYKIGKTPKILKYHYMIVKSXKX

SEQ ID NO: 7513 - protein, 39 aa, Artificial Sequence
  GFR-binding peptide
  MOD_RES (5)..(6)..(38): Xaa is C or S
IPKAXXVPTELSPISMLYKDENEKVVLKYHYDMVVEGXG

SEQ ID NO: 7514 - protein, 38 aa, Artificial Sequence
  GFR-binding peptide
  MOD_RES (3)..(4)..(37): Xaa is C or S
  MOD_RES (18)..(19)..(20)..(21)..(22): Xaa is A or G
  MOD_RES (23)..(24)..(25)..(26): Xaa is A or G or is absent
SPXXVSQDLSAISILYLXXXXXXXXXLKNYQMIVKSXK

SEQ ID NO: 7515 - protein, 39 aa, Artificial Sequence
  GFR-binding peptide
  MOD_RES (6)..(7)..(38): Xaa is C or S
ASAAPXXVPQALSPISILYKVGRKPKVLKYHYMIVRSXK

SEQ ID NO: 7516 - protein, 39 aa, Artificial Sequence
  GFR-binding peptide
  MOD_RES (4)..(5)..(38): Xaa is C or S
  MOD_RES (19)..(20)..(21)..(22)..(23): Xaa is A or G
  MOD_RES (24)..(25)..(26)..(27): Xaa is A or G or is absent
AAPXXVPQALSATSILYYXXXXXXXXXLRKHRMIVRSXK

SEQ ID NO: 7517 - protein, 34 aa, Artificial Sequence
  GFR-binding peptide
  MOD_RES (33)..(33): Xaa is C or S
  MOD_RES (14)..(15)..(16)..(17)..(18): Xaa is A or G
  MOD_RES (19)..(20)..(21)..(22): Xaa is A or G or is absent
VSQDLSATSILYYXXXXXXXXXLRKHRMIVKSXK

SEQ ID NO: 7518 - protein, 40 aa, Artificial Sequence
  GFR-binding peptide
  MOD_RES (6)..(38)..(40): Xaa is C or S
VTKPTXAPTKLSPISVLYKDDSSNVILKYHYNMVVRSXGX

SEQ ID NO: 7519 - protein, 42 aa, Artificial Sequence
  GFR-binding peptide
  MOD_RES (5)..(6)..(41): Xaa is C or S
  MOD_RES (20)..(21)..(22)..(23)..(24): Xaa is A or G
  MOD_RES (25)..(26)..(27)..(28): Xaa is A or G or is absent
VGKAXXVPTKLSPISVLYKXXXXXXXXXLKYHYEGMSVAEXG

SEQ ID NO: 7520 - protein, 40 aa, Artificial Sequence
  GFR-binding peptide
  MOD_RES (4)..(5)..(37)..(39): Xaa is C or S
PKAXXVPTELSATSMLYYDEYDKVVLRKHREMVVEGXGXR

SEQ ID NO: 7521 - protein, 38 aa, Artificial Sequence
  GFR-binding peptide
  MOD_RES (3)..(4)..(38): Xaa is C or S
  MOD_RES (18)..(19)..(20)..(21)..(22): Xaa is A or G
  MOD_RES (23)..(24)..(25)..(26): Xaa is A or G or is absent
KPXXAPTQLNAISVLYFXXXXXXXXXLKKYRNMVVRAX

SEQ ID NO: 7522 - protein, 39 aa, Artificial Sequence
  GFR-binding peptide
  MOD_RES (6)..(7): Xaa is C or S
  MOD_RES (21)..(22)..(23)..(24)..(25): Xaa is A or G
  MOD_RES (26)..(27)..(28)..(29): Xaa is A or G or is absent
SIPKAXXVPTELNAISMLYFXXXXXXXXXLKKYREMVVE

SEQ ID NO: 7523 - protein, 37 aa, Artificial Sequence
  GFR-binding peptide
  MOD_RES (1)..(2)..(36): Xaa is C or S
  MOD_RES (16)..(17)..(18)..(19)..(20): Xaa is A or G
  MOD_RES (21)..(22)..(23)..(24): Xaa is A or G or is absent
XXAPTKLSPISVLYKXXXXXXXXXLKYHYNMVVKAXG

SEQ ID NO: 7524 - protein, 40 aa, Artificial Sequence
  GFR-binding peptide
  MOD_RES (4)..(5)..(39): Xaa is C or S
  MOD_RES (19)..(20)..(21)..(22)..(23): Xaa is A or G
  MOD_RES (24)..(25)..(26)..(27): Xaa is A or G or is absent
PKAXXAPTKLNAISVLYFXXXXXXXXXLKKYRNMVVKAXG

SEQ ID NO: 7525 - protein, 37 aa, Artificial Sequence
  GFR-binding peptide
  MOD_RES (7)..(7): Xaa is C or S
HVTKPTXAPTKLSPISVLYKDDSSNVILKYHYNMVVR

SEQ ID NO: 7526 - protein, 33 aa, Artificial Sequence
  GFR-binding peptide
  MOD_RES (33)..(33): Xaa is C or S
VPTKLNAISVLYFDDMGVPTLKKYREGMSVAEX

SEQ ID NO: 7527 - protein, 39 aa, Artificial Sequence
  GFR-binding peptide
  MOD_RES (5)..(6): Xaa is C or S
  MOD_RES (20)..(21)..(22)..(23)..(24): Xaa is A or G
  MOD_RES (25)..(26)..(27)..(28): Xaa is A or G or is absent
IPKAXXVPTELNAISMLYFXXXXXXXXXLKKYRDMVVEG

SEQ ID NO: 7528 - protein, 37 aa, Artificial Sequence
  GFR-binding peptide
  MOD_RES (2)..(3): Xaa is C or S
  MOD_RES (17)..(18)..(19)..(20)..(21): Xaa is A or G
  MOD_RES (22)..(23)..(24)..(25): Xaa is A or G or is absent
AXXVPTKLSPISVLYKXXXXXXXXXLKYHYEGMSVAE

SEQ ID NO: 7529 - protein, 40 aa, Artificial Sequence
  GFR-binding peptide
  MOD_RES (6)..(7)..(40): Xaa is C or S
KVGKAXXVPTKLSAISVLYLDDMGVPTLKNYQEGMSVAEX

SEQ ID NO: 7530 - protein, 37 aa, Artificial Sequence
  GFR-binding peptide
  MOD_RES (3)..(4): Xaa is C or S
  MOD_RES (18)..(19)..(20)..(21)..(22): Xaa is A or G
  MOD_RES (23)..(24)..(25)..(26): Xaa is A or G or is absent
KAXXAPTKLSAISVLYLXXXXXXXXXLKNYQNMVVKA

SEQ ID NO: 7531 - protein, 45 aa, Artificial Sequence
  GFR-binding peptide
  MOD_RES (5)..(42)..(44): Xaa is C or S
RNVQXRPTQVQLSAISVLYLEIVRKKPIFLKNYQTLEDHLAXKXE

SEQ ID NO: 7532 - protein, 37 aa, Artificial Sequence
  GFR-binding peptide
  MOD_RES (6)..(7): Xaa is C or S
YVPKPXXAPTKLSPISVLYKDDSSNVILKYHYNMVVR

SEQ ID NO: 7533 - protein, 32 aa, Artificial Sequence
  GFR-binding peptide
  MOD_RES (31)..(31): Xaa is C or S
VPQDLSATSILYYVGRTPKVLRKHRMVVKSXK

SEQ ID NO: 7534 - protein, 38 aa, Artificial Sequence
  GFR-binding peptide
  MOD_RES (6)..(7): Xaa is C or S
SIPKAXXVPTELSPISMLYKDEYDKVVLKYHYEMVVEG

SEQ ID NO: 7535 - protein, 36 aa, Artificial Sequence
  GFR-binding peptide
  MOD_RES (34)..(36): Xaa is C or S
  MOD_RES (14)..(15)..(16)..(17)..(18): Xaa is A or G
  MOD_RES (19)..(20)..(21)..(22): Xaa is A or G or is absent
APTQLSAISVLYLXXXXXXXXXLKNYQNMVVRAXGX

SEQ ID NO: 7536 - protein, 38 aa, Artificial Sequence
  GFR-binding peptide
  MOD_RES (3)..(4): Xaa is C or S
  MOD_RES (18)..(19)..(20)..(21)..(22): Xaa is A or G
  MOD_RES (23)..(24)..(25)..(26): Xaa is A or G or is absent
KAXXVPTKLNAISVLYFXXXXXXXXXLKKYREGMSVAE

SEQ ID NO: 7537 - protein, 37 aa, Artificial Sequence
  GFR-binding peptide
  MOD_RES (1)..(34)..(36): Xaa is C or S
  MOD_RES (15)..(16)..(17)..(18)..(19): Xaa is A or G
  MOD_RES (20)..(21)..(22)..(23): Xaa is A or G or is absent
XVPQALNAISILYFXXXXXXXXXLKKYRMIVRSXKXS

SEQ ID NO: 7538 - protein, 39 aa, Artificial Sequence
  GFR-binding peptide
  MOD_RES (5)..(6)..(37)..(39): Xaa is C or S
SASPXXVSQDLNAISILYFIGKTPKILKKYRMIVKSXKX

SEQ ID NO: 7539 - protein, 36 aa, Artificial Sequence
  GFR-binding peptide
RPTQVQLSAISVLYLEIVRKKPIFLKNYQTLEDHLA

SEQ ID NO: 7540 - protein, 37 aa, Artificial Sequence
  GFR-binding peptide
  MOD_RES (2)..(3)..(37): Xaa is C or S
  MOD_RES (17)..(18)..(19)..(20)..(21): Xaa is A or G
  MOD_RES (22)..(23)..(24)..(25): Xaa is A or G or is absent
PXXAPTQLSAISVLYLXXXXXXXXXLKNYQNMVVRAX

SEQ ID NO: 7541 - protein, 34 aa, Artificial Sequence
  GFR-binding peptide
  MOD_RES (32)..(34): Xaa is C or S
APTQLSPISVLYKDDSSNVILKYHYNMVVRAXGX

SEQ ID NO: 7542 - protein, 33 aa, Artificial Sequence
  GFR-binding peptide
  MOD_RES (15)..(16)..(17)..(18)..(19): Xaa is A or G
  MOD_RES (20)..(21)..(22)..(23): Xaa is A or G or is absent
PTQVQLSPISVLYKXXXXXXXXXLKYHYTLEDH

SEQ ID NO: 7543 - protein, 38 aa, Artificial Sequence
  GFR-binding peptide
  MOD_RES (2)..(3)..(37): Xaa is C or S
  MOD_RES (17)..(18)..(19)..(20)..(21): Xaa is A or G
  MOD_RES (22)..(23)..(24)..(25): Xaa is A or G or is absent
PXXAPTQLNAISVLYFXXXXXXXXXLKKYRNMVVRAXG

SEQ ID NO: 7544 - protein, 37 aa, Artificial Sequence
  GFR-binding peptide
  MOD_RES (3)..(4): Xaa is C or S
  MOD_RES (18)..(19)..(20)..(21)..(22): Xaa is A or G
  MOD_RES (23)..(24)..(25)..(26): Xaa is A or G or is absent
KPXXAPTKLSAISVLYLXXXXXXXXXLKNYQNMVVRS

SEQ ID NO: 7545 - protein, 40 aa, Artificial Sequence
  GFR-binding peptide
  MOD_RES (3)..(4)..(38)..(40): Xaa is C or S
  MOD_RES (18)..(19)..(20)..(21)..(22): Xaa is A or G
  MOD_RES (23)..(24)..(25)..(26): Xaa is A or G or is absent
KAXXAPTKLNAISVLYFXXXXXXXXXLKKYRNMVVKAXGX

SEQ ID NO: 7546 - protein, 38 aa, Artificial Sequence
  GFR-binding peptide
  MOD_RES (1)..(35)..(37): Xaa is C or S
  MOD_RES (15)..(16)..(17)..(18)..(19): Xaa is A or G
  MOD_RES (20)..(21)..(22)..(23): Xaa is A or G or is absent
XVPTELNAISMLYFXXXXXXXXXLKKYREMVVEGXGXR

SEQ ID NO: 7547 - protein, 41 aa, Artificial Sequence
  GFR-binding peptide
  MOD_RES (1)..(38)..(40): Xaa is C or S
  MOD_RES (17)..(18)..(19)..(20)..(21): Xaa is A or G
  MOD_RES (22)..(23)..(24)..(25): Xaa is A or G or is absent
XRPTQVQLSAISVLYLXXXXXXXXXLKNYQTLEDHLAXKXE

SEQ ID NO: 7548 - protein, 36 aa, Artificial Sequence
  GFR-binding peptide
  MOD_RES (1)..(2)..(35): Xaa is C or S
  MOD_RES (16)..(17)..(18)..(19)..(20): Xaa is A or G
  MOD_RES (21)..(22)..(23)..(24): Xaa is A or G or is absent
XXVPQDLSAISILYLXXXXXXXXXLKNYQMVVKSXK

SEQ ID NO: 7549 - protein, 37 aa, Artificial Sequence
  GFR-binding peptide
  MOD_RES (6)..(7): Xaa is C or S
SIPKAXXVPTELNAISMLYFDEYDKVVLKKYREMVVE

SEQ ID NO: 7550 - protein, 37 aa, Artificial Sequence
  GFR-binding peptide
  MOD_RES (3)..(4): Xaa is C or S
  MOD_RES (18)..(19)..(20)..(21)..(22): Xaa is A or G
  MOD_RES (23)..(24)..(25)..(26): Xaa is A or G or is absent
KPXXAPTKLNAISVLYFXXXXXXXXXLKKYRNMVVRS

SEQ ID NO: 7551 - protein, 35 aa, Artificial Sequence
  GFR-binding peptide
  MOD_RES (32)..(34): Xaa is C or S
APTKLNAISVLYFDSSNNVILKKYRNMVVKAXGXH

SEQ ID NO: 7552 - protein, 38 aa, Artificial Sequence
  GFR-binding peptide
  MOD_RES (4)..(4): Xaa is C or S
  MOD_RES (20)..(21)..(22)..(23)..(24): Xaa is A or G
  MOD_RES (25)..(26)..(27)..(28): Xaa is A or G or is absent
NVQXRPTQVQLNAISVLYFXXXXXXXXXLKKYRTLEDH

SEQ ID NO: 7553 - protein, 41 aa, Artificial Sequence
  GFR-binding peptide
  MOD_RES (5)..(6)..(40): Xaa is C or S
  MOD_RES (20)..(21)..(22)..(23)..(24): Xaa is A or G
  MOD_RES (25)..(26)..(27)..(28): Xaa is A or G or is absent
VPKPXXAPTQLNAISVLYFXXXXXXXXXLKKYRNMVVRAXG

SEQ ID NO: 7554 - protein, 38 aa, Artificial Sequence
  GFR-binding peptide
  MOD_RES (35)..(37): Xaa is C or S
  MOD_RES (14)..(15)..(16)..(17)..(18): Xaa is A or G
  MOD_RES (19)..(20)..(21)..(22): Xaa is A or G or is absent
VPTKLSATSVLYYXXXXXXXXXLRKHREGMSVAEXGXR

SEQ ID NO: 7555 - protein, 35 aa, Artificial Sequence
  GFR-binding peptide
  MOD_RES (1)..(34): Xaa is C or S
  MOD_RES (15)..(16)..(17)..(18)..(19): Xaa is A or G
  MOD_RES (20)..(21)..(22)..(23): Xaa is A or G or is absent
XVSQDLSPISILYKXXXXXXXXXLKYHYMIVKSXK

SEQ ID NO: 7556 - protein, 37 aa, Artificial Sequence
  GFR-binding peptide
  MOD_RES (4)..(5): Xaa is C or S
  MOD_RES (19)..(20)..(21)..(22)..(23): Xaa is A or G
  MOD_RES (24)..(25)..(26)..(27): Xaa is A or G or is absent
ASPXXVPQDLNAISILYFXXXXXXXXXLKKYRMVVKS

SEQ ID NO: 7557 - protein, 40 aa, Artificial Sequence
  GFR-binding peptide
  MOD_RES (5)..(6): Xaa is C or S
  MOD_RES (20)..(21)..(22)..(23)..(24): Xaa is A or G
  MOD_RES (25)..(26)..(27)..(28): Xaa is A or G or is absent
VGKAXXVPTKLSPISVLYKXXXXXXXXXLKYHYEGMSVAE

SEQ ID NO: 7558 - protein, 38 aa, Artificial Sequence
  GFR-binding peptide
  MOD_RES (4)..(5)..(37): Xaa is C or S
PKPXXAPTKLSAISVLYLDDSSNVILKNYQNMVVRSXG

SEQ ID NO: 7559 - protein, 34 aa, Artificial Sequence
  GFR-binding peptide
  MOD_RES (1)..(2): Xaa is C or S
  MOD_RES (16)..(17)..(18)..(19)..(20): Xaa is A or G
  MOD_RES (21)..(22)..(23)..(24): Xaa is A or G or is absent
XXAPTQLSAISVLYLXXXXXXXXXLKNYQNMVVR

SEQ ID NO: 7560 - protein, 38 aa, Artificial Sequence
  GFR-binding peptide
  MOD_RES (3)..(4)..(37): Xaa is C or S
  MOD_RES (18)..(19)..(20)..(21)..(22): Xaa is A or G
  MOD_RES (23)..(24)..(25)..(26): Xaa is A or G or is absent
APXXVPQALSATSILYYXXXXXXXXXLRKHRMIVRSXK

SEQ ID NO: 7561 - protein, 38 aa, Artificial Sequence
  GFR-binding peptide
  MOD_RES (4)..(5)..(37): Xaa is C or S
PKPXXAPTKLSPISVLYKDDSSNVILKYHYNMVVRSXG

SEQ ID NO: 7562 - protein, 36 aa, Artificial Sequence
  GFR-binding peptide
RPTQVQLSATSVLYYEIVRKKPIFLRKHRTLEDHLA

SEQ ID NO: 7563 - protein, 40 aa, Artificial Sequence
  GFR-binding peptide
  MOD_RES (5)..(6)..(38)..(40): Xaa is C or S
IPKAXXVPTELSATSMLYYDENEKVVLRKHRDMVVEGXGX

SEQ ID NO: 7564 - protein, 36 aa, Artificial Sequence
  GFR-binding peptide
  MOD_RES (1)..(2)..(36): Xaa is C or S
  MOD_RES (16)..(17)..(18)..(19)..(20): Xaa is A or G
  MOD_RES (21)..(22)..(23)..(24): Xaa is A or G or is absent
XXVPTELSAISMLYLXXXXXXXXXLKNYQEMVVEGX

SEQ ID NO: 7565 - protein, 31 aa, Artificial Sequence
  GFR-binding peptide
  MOD_RES (31)..(31): Xaa is C or S
VPQALSAISILYLVGRKPKVLKNYQMIVRSX

SEQ ID NO: 7566 - protein, 44 aa, Artificial Sequence
  GFR-binding peptide
  MOD_RES (4)..(41)..(43): Xaa is C or S
NVQXRPTQVQLNAISVLYFEIVRKKPIFLKKYRTLEDHLAXKXE

SEQ ID NO: 7567 - protein, 39 aa, Artificial Sequence
  GFR-binding peptide
  MOD_RES (3)..(4)..(37)..(39): Xaa is C or S
  MOD_RES (18)..(19)..(20)..(21)..(22): Xaa is A or G
  MOD_RES (23)..(24)..(25)..(26): Xaa is A or G or is absent
SPXXVPQDLSAISILYLXXXXXXXXXLKNYQMVVKSXKX

SEQ ID NO: 7568 - protein, 42 aa, Artificial Sequence
  GFR-binding peptide
  MOD_RES (6)..(7)..(41): Xaa is C or S
  MOD_RES (21)..(22)..(23)..(24)..(25): Xaa is A or G
  MOD_RES (26)..(27)..(28)..(29): Xaa is A or G or is absent
AVPKAXXAPTKLSPISVLYKXXXXXXXXXLKYHYNMVVKAXG

SEQ ID NO: 7569 - protein, 34 aa, Artificial Sequence
  GFR-binding peptide
  MOD_RES (1)..(34): Xaa is C or S
XVPTKLNAISVLYFDDMGVPTLKKYREGMSVAEX

SEQ ID NO: 7570 - protein, 41 aa, Artificial Sequence
  GFR-binding peptide
  MOD_RES (5)..(6)..(38)..(40): Xaa is C or S
IPKAXXVPTELSPISMLYKDENEKVVLKYHYDMVVEGXGXR

SEQ ID NO: 7571 - protein, 35 aa, Artificial Sequence
  GFR-binding peptide
  MOD_RES (1)..(33)..(35): Xaa is C or S
XAPTQLSATSVLYYDDSSNVILRKHRNMVVRAXGX

SEQ ID NO: 7572 - protein, 36 aa, Artificial Sequence
  GFR-binding peptide
  MOD_RES (34)..(36): Xaa is C or S
  MOD_RES (14)..(15)..(16)..(17)..(18): Xaa is A or G
  MOD_RES (19)..(20)..(21)..(22): Xaa is A or G or is absent
VPTELNAISMLYFXXXXXXXXXLKKYREMVVEGXGX

SEQ ID NO: 7573 - protein, 35 aa, Artificial Sequence
  GFR-binding peptide
  MOD_RES (1)..(33)..(35): Xaa is C or S
XAPTKLSATSVLYYDDSSNVILRKHRNMVVRSXGX

SEQ ID NO: 7574 - protein, 35 aa, Artificial Sequence
  GFR-binding peptide
  MOD_RES (34)..(34): Xaa is C or S
  MOD_RES (14)..(15)..(16)..(17)..(18): Xaa is A or G
  MOD_RES (19)..(20)..(21)..(22): Xaa is A or G or is absent
VPTELSAISMLYLXXXXXXXXXLKNYQDMVVEGXG

SEQ ID NO: 7575 - protein, 38 aa, Artificial Sequence
  GFR-binding peptide
  MOD_RES (3)..(37): Xaa is C or S
  MOD_RES (17)..(18)..(19)..(20)..(21): Xaa is A or G
  MOD_RES (22)..(23)..(24)..(25): Xaa is A or G or is absent
PTXAPTKLNAISVLYFXXXXXXXXXLKKYRNMVVRSXG

SEQ ID NO: 7576 - protein, 37 aa, Artificial Sequence
  GFR-binding peptide
  MOD_RES (2)..(3)..(35)..(37): Xaa is C or S
AXXAPTKLSPISVLYKDSSNNVILKYHYNMVVKAXGX

SEQ ID NO: 7577 - protein, 33 aa, Artificial Sequence
  GFR-binding peptide
  MOD_RES (1)..(33): Xaa is C or S
XAPTKLSAISVLYLDSSNNVILKNYQNMVVKAX

SEQ ID NO: 7578 - protein, 38 aa, Artificial Sequence
  GFR-binding peptide
  MOD_RES (5)..(6): Xaa is C or S
  MOD_RES (20)..(21)..(22)..(23)..(24): Xaa is A or G
  MOD_RES (25)..(26)..(27)..(28): Xaa is A or G or is absent
VPKAXXAPTKLNAISVLYFXXXXXXXXXLKKYRNMVVK

SEQ ID NO: 7579 - protein, 31 aa, Artificial Sequence
  GFR-binding peptide
APTKLSAISVLYLDSSNNVILKNYQNMVVKA

SEQ ID NO: 7580 - protein, 40 aa, Artificial Sequence
  GFR-binding peptide
  MOD_RES (4)..(5)..(39): Xaa is C or S
  MOD_RES (19)..(20)..(21)..(22)..(23): Xaa is A or G
  MOD_RES (24)..(25)..(26)..(27): Xaa is A or G or is absent
PKAXXVPTELNAISMLYFXXXXXXXXXLKKYREMVVEGXG

SEQ ID NO: 7581 - protein, 43 aa, Artificial Sequence
  GFR-binding peptide
  MOD_RES (6)..(7)..(41)..(43): Xaa is C or S
  MOD_RES (21)..(22)..(23)..(24)..(25): Xaa is A or G
  MOD_RES (26)..(27)..(28)..(29): Xaa is A or G or is absent
KIPKAXXVPTELSPISMLYKXXXXXXXXXLKYHYDMVVEGXGX

SEQ ID NO: 7582 - protein, 40 aa, Artificial Sequence
  GFR-binding peptide
  MOD_RES (5)..(6)..(37)..(39): Xaa is C or S
SAAPXXVPQALSPISILYKVGRKPKVLKYHYMIVRSXKXS

SEQ ID NO: 7583 - protein, 33 aa, Artificial Sequence
  GFR-binding peptide
  MOD_RES (1)..(1): Xaa is C or S
  MOD_RES (15)..(16)..(17)..(18)..(19): Xaa is A or G
  MOD_RES (20)..(21)..(22)..(23): Xaa is A or G or is absent
XVPTELSPISMLYKXXXXXXXXXLKYHYDMVVE

SEQ ID NO: 7584 - protein, 34 aa, Artificial Sequence
  GFR-binding peptide
  MOD_RES (2)..(2): Xaa is C or S
  MOD_RES (16)..(17)..(18)..(19)..(20): Xaa is A or G
  MOD_RES (21)..(22)..(23)..(24): Xaa is A or G or is absent
TXAPTKLSPISVLYKXXXXXXXXXLKYHYNMVVR

SEQ ID NO: 7585 - protein, 39 aa, Artificial Sequence
  GFR-binding peptide
  MOD_RES (6)..(7): Xaa is C or S
  MOD_RES (21)..(22)..(23)..(24)..(25): Xaa is A or G
  MOD_RES (26)..(27)..(28)..(29): Xaa is A or G or is absent
TVPKPXXAPTQLNAISVLYFXXXXXXXXXLKKYRNMVVR

SEQ ID NO: 7586 - protein, 35 aa, Artificial Sequence
  GFR-binding peptide
  MOD_RES (32)..(34): Xaa is C or S
APTQLSATSVLYYDDSSNVILRKHRNMVVRAXGXH

SEQ ID NO: 7587 - protein, 42 aa, Artificial Sequence
  GFR-binding peptide
  MOD_RES (2)..(39)..(41): Xaa is C or S
QXRPTQVQLSPISVLYKEIVRKKPIFLKYHYTLEDHLAXKXE

SEQ ID NO: 7588 - protein, 39 aa, Artificial Sequence
  GFR-binding peptide
  MOD_RES (2)..(3)..(36)..(38): Xaa is C or S
  MOD_RES (17)..(18)..(19)..(20)..(21): Xaa is A or G
  MOD_RES (22)..(23)..(24)..(25): Xaa is A or G or is absent
PXXVSQDLSAISILYLXXXXXXXXXLKNYQMIVKSXKXS

SEQ ID NO: 7589 - protein, 38 aa, Artificial Sequence
  GFR-binding peptide
  MOD_RES (36)..(38): Xaa is C or S
  MOD_RES (15)..(16)..(17)..(18)..(19): Xaa is A or G
  MOD_RES (20)..(21)..(22)..(23): Xaa is A or G or is absent
PTQVQLSATSVLYYXXXXXXXXXLRKHRTLEDHLAXKX

SEQ ID NO: 7590 - protein, 35 aa, Artificial Sequence
  GFR-binding peptide
  MOD_RES (3)..(4)..(35): Xaa is C or S
SPXXVPQDLSATSILYYVGRTPKVLRKHRMVVKSX

SEQ ID NO: 7591 - protein, 36 aa, Artificial Sequence
  GFR-binding peptide
  MOD_RES (2)..(3)..(34)..(36): Xaa is C or S
PXXVPQALSPISILYKVGRKPKVLKYHYMIVRSXKX

SEQ ID NO: 7592 - protein, 35 aa, Artificial Sequence
  GFR-binding peptide
  MOD_RES (1)..(2)..(35): Xaa is C or S
  MOD_RES (16)..(17)..(18)..(19)..(20): Xaa is A or G
  MOD_RES (21)..(22)..(23)..(24): Xaa is A or G or is absent
XXVSQDLNAISILYFXXXXXXXXXLKKYRMIVKSX

SEQ ID NO: 7593 - protein, 33 aa, Artificial Sequence
  GFR-binding peptide
  MOD_RES (32)..(32): Xaa is C or S
VPTELSATSMLYYDENEKVVLRKHRDMVVEGXG

SEQ ID NO: 7594 - protein, 42 aa, Artificial Sequence
  GFR-binding peptide
  MOD_RES (3)..(40)..(42): Xaa is C or S
  MOD_RES (19)..(20)..(21)..(22)..(23): Xaa is A or G
  MOD_RES (24)..(25)..(26)..(27): Xaa is A or G or is absent
VQXRPTQVQLNAISVLYFXXXXXXXXXLKKYRTLEDHLAXKX

SEQ ID NO: 7595 - protein, 39 aa, Artificial Sequence
  GFR-binding peptide
  MOD_RES (5)..(39): Xaa is C or S
  MOD_RES (19)..(20)..(21)..(22)..(23): Xaa is A or G
  MOD_RES (24)..(25)..(26)..(27): Xaa is A or G or is absent
TKPTXAPTKLSATSVLYYXXXXXXXXXLRKHRNMVVRSX

SEQ ID NO: 7596 - protein, 38 aa, Artificial Sequence
  GFR-binding peptide
  MOD_RES (5)..(6)..(37): Xaa is C or S
SASPXXVPQDLSATSILYYVGRTPKVLRKHRMVVKSXK

SEQ ID NO: 7597 - protein, 40 aa, Artificial Sequence
  GFR-binding peptide
  MOD_RES (5)..(6)..(38)..(40): Xaa is C or S
VPKAXXAPTKLSPISVLYKDSSNNVILKYHYNMVVKAXGX

SEQ ID NO: 7598 - protein, 37 aa, Artificial Sequence
  GFR-binding peptide
  MOD_RES (3)..(4): Xaa is C or S
  MOD_RES (18)..(19)..(20)..(21)..(22): Xaa is A or G
  MOD_RES (23)..(24)..(25)..(26): Xaa is A or G or is absent
KAXXVPTELSPISMLYKXXXXXXXXXLKYHYDMVVEG

SEQ ID NO: 7599 - protein, 38 aa, Artificial Sequence
  GFR-binding peptide
  MOD_RES (2)..(3)..(35)..(37): Xaa is C or S
AXXAPTKLSAISVLYLDSSNNVILKNYQNMVVKAXGXH

SEQ ID NO: 7600 - protein, 38 aa, Artificial Sequence
  GFR-binding peptide
  MOD_RES (2)..(3)..(36)..(38): Xaa is C or S
  MOD_RES (17)..(18)..(19)..(20)..(21): Xaa is A or G
  MOD_RES (22)..(23)..(24)..(25): Xaa is A or G or is absent
PXXVPQALSAISILYLXXXXXXXXXLKNYQMIVRSXKX

SEQ ID NO: 7601 - protein, 39 aa, Artificial Sequence
  GFR-binding peptide
  MOD_RES (6)..(7)..(39): Xaa is C or S
YVPKPXXAPTKLSAISVLYLDDSSNVILKNYQNMVVRSX

SEQ ID NO: 7602 - protein, 40 aa, Artificial Sequence
  GFR-binding peptide
  MOD_RES (5)..(5): Xaa is C or S
  MOD_RES (21)..(22)..(23)..(24)..(25): Xaa is A or G
  MOD_RES (26)..(27)..(28)..(29): Xaa is A or G or is absent
RNVQXRPTQVQLSAISVLYLXXXXXXXXXLKNYQTLEDHL

SEQ ID NO: 7603 - protein, 35 aa, Artificial Sequence
  GFR-binding peptide
  MOD_RES (2)..(3)..(34): Xaa is C or S
PXXVPQALNAISILYFVGRKPKVLKKYRMIVRSXK

SEQ ID NO: 7604 - protein, 31 aa, Artificial Sequence
  GFR-binding peptide
APTKLNAISVLYFDSSNNVILKKYRNMVVKA

SEQ ID NO: 7605 - protein, 38 aa, Artificial Sequence
  GFR-binding peptide
  MOD_RES (6)..(7)..(38): Xaa is C or S
ASAAPXXVPQALSPISILYKVGRKPKVLKYHYMIVRSX

SEQ ID NO: 7606 - protein, 34 aa, Artificial Sequence
  GFR-binding peptide
  MOD_RES (32)..(34): Xaa is C or S
APTKLSPISVLYKDDSSNVILKYHYNMVVRSXGX

SEQ ID NO: 7607 - protein, 35 aa, Artificial Sequence
  GFR-binding peptide
  MOD_RES (4)..(5): Xaa is C or S
PKAXXVPTELNAISMLYFDEYDKVVLKKYREMVVE

SEQ ID NO: 7608 - protein, 35 aa, Artificial Sequence
  GFR-binding peptide
  MOD_RES (2)..(3)..(34): Xaa is C or S
PXXVPQALSPISILYKVGRKPKVLKYHYMIVRSXK

SEQ ID NO: 7609 - protein, 40 aa, Artificial Sequence
  GFR-binding peptide
  MOD_RES (3)..(40): Xaa is C or S
  MOD_RES (19)..(20)..(21)..(22)..(23): Xaa is A or G
  MOD_RES (24)..(25)..(26)..(27): Xaa is A or G or is absent
VQXRPTQVQLSPISVLYKXXXXXXXXXLKYHYTLEDHLAX

SEQ ID NO: 7610 - protein, 37 aa, Artificial Sequence
  GFR-binding peptide
  MOD_RES (4)..(5): Xaa is C or S
  MOD_RES (19)..(20)..(21)..(22)..(23): Xaa is A or G
  MOD_RES (24)..(25)..(26)..(27): Xaa is A or G or is absent
PKAXXVPTELSPISMLYKXXXXXXXXXLKYHYEMVVE

SEQ ID NO: 7611 - protein, 32 aa, Artificial Sequence
  GFR-binding peptide
  MOD_RES (32)..(32): Xaa is C or S
VPTELNAISMLYFDENEKVVLKKYRDMVVEGX

SEQ ID NO: 7612 - protein, 35 aa, Artificial Sequence
  GFR-binding peptide
  MOD_RES (1)..(2): Xaa is C or S
  MOD_RES (16)..(17)..(18)..(19)..(20): Xaa is A or G
  MOD_RES (21)..(22)..(23)..(24): Xaa is A or G or is absent
XXAPTKLSATSVLYYXXXXXXXXXLRKHRNMVVRS

SEQ ID NO: 7613 - protein, 35 aa, Artificial Sequence
  GFR-binding peptide
  MOD_RES (1)..(2)..(34): Xaa is C or S
XXAPTKLSPISVLYKDSSNNVILKYHYNMVVKAXG

SEQ ID NO: 7614 - protein, 43 aa, Artificial Sequence
  GFR-binding peptide
  MOD_RES (6)..(7)..(41)..(43): Xaa is C or S
  MOD_RES (21)..(22)..(23)..(24)..(25): Xaa is A or G
  MOD_RES (26)..(27)..(28)..(29): Xaa is A or G or is absent
SIPKAXXVPTELSAISMLYLXXXXXXXXXLKNYQEMVVEGXGX

SEQ ID NO: 7615 - protein, 36 aa, Artificial Sequence
  GFR-binding peptide
  MOD_RES (1)..(2)..(36): Xaa is C or S
  MOD_RES (16)..(17)..(18)..(19)..(20): Xaa is A or G
  MOD_RES (21)..(22)..(23)..(24): Xaa is A or G or is absent
XXAPTQLSPISVLYKXXXXXXXXXLKYHYNMVVRAX

SEQ ID NO: 7616 - protein, 39 aa, Artificial Sequence
  GFR-binding peptide
  MOD_RES (6)..(7): Xaa is C or S
  MOD_RES (21)..(22)..(23)..(24)..(25): Xaa is A or G
  MOD_RES (26)..(27)..(28)..(29): Xaa is A or G or is absent
KIPKAXXVPTELSATSMLYYXXXXXXXXXLRKHRDMVVE

SEQ ID NO: 7617 - protein, 41 aa, Artificial Sequence
  GFR-binding peptide
  MOD_RES (3)..(40): Xaa is C or S
  MOD_RES (19)..(20)..(21)..(22)..(23): Xaa is A or G
  MOD_RES (24)..(25)..(26)..(27): Xaa is A or G or is absent
VQXRPTQVQLNAISVLYFXXXXXXXXXLKKYRTLEDHLAXK

SEQ ID NO: 7618 - protein, 36 aa, Artificial Sequence
  GFR-binding peptide
  MOD_RES (4)..(5): Xaa is C or S
PKAXXVPTELSATSMLYYDENEKVVLRKHRDMVVEG

SEQ ID NO: 7619 - protein, 38 aa, Artificial Sequence
  GFR-binding peptide
  MOD_RES (5)..(6)..(38): Xaa is C or S
IPKAXXVPTELSPISMLYKDEYDKVVLKYHYEMVVEGX

SEQ ID NO: 7620 - protein, 39 aa, Artificial Sequence
  GFR-binding peptide
  MOD_RES (6)..(38): Xaa is C or S
VTKPTXAPTKLSAISVLYLDDSSNVILKNYQNMVVRSXG

SEQ ID NO: 7621 - protein, 39 aa, Artificial Sequence
  GFR-binding peptide
  MOD_RES (5)..(5): Xaa is C or S
RNVQXRPTQVQLSATSVLYYEIVRKKPIFLRKHRTLEDH

SEQ ID NO: 7622 - protein, 39 aa, Artificial Sequence
  GFR-binding peptide
  MOD_RES (3)..(3): Xaa is C or S
VQXRPTQVQLSPISVLYKEIVRKKPIFLKYHYTLEDHLA

SEQ ID NO: 7623 - protein, 42 aa, Artificial Sequence
  GFR-binding peptide
  MOD_RES (6)..(7)..(40)..(42): Xaa is C or S
  MOD_RES (21)..(22)..(23)..(24)..(25): Xaa is A or G
  MOD_RES (26)..(27)..(28)..(29): Xaa is A or G or is absent
ASASPXXVSQDLSPISILYKXXXXXXXXXLKYHYMIVKSXKX

SEQ ID NO: 7624 - protein, 35 aa, Artificial Sequence
  GFR-binding peptide
  MOD_RES (3)..(35): Xaa is C or S
PTXAPTKLSPISVLYKDDSSNVILKYHYNMVVRSX

SEQ ID NO: 7625 - protein, 40 aa, Artificial Sequence
  GFR-binding peptide
  MOD_RES (6)..(7)..(39): Xaa is C or S
TVPKPXXAPTQLSAISVLYLDDSSNVILKNYQNMVVRAXG

SEQ ID NO: 7626 - protein, 34 aa, Artificial Sequence
  GFR-binding peptide
  MOD_RES (1)..(2)..(33): Xaa is C or S
XXVPQALNAISILYFVGRKPKVLKKYRMIVRSXK

SEQ ID NO: 7627 - protein, 39 aa, Artificial Sequence
  GFR-binding peptide
  MOD_RES (3)..(4)..(37)..(39): Xaa is C or S
  MOD_RES (18)..(19)..(20)..(21)..(22): Xaa is A or G
  MOD_RES (23)..(24)..(25)..(26): Xaa is A or G or is absent
SPXXVSQDLSPISILYKXXXXXXXXXLKYHYMIVKSXKX

SEQ ID NO: 7628 - protein, 42 aa, Artificial Sequence
  GFR-binding peptide
  MOD_RES (5)..(6)..(40)..(42): Xaa is C or S
  MOD_RES (20)..(21)..(22)..(23)..(24): Xaa is A or G
  MOD_RES (25)..(26)..(27)..(28): Xaa is A or G or is absent
VPKPXXAPTQLSPISVLYKXXXXXXXXXLKYHYNMVVRAXGX

SEQ ID NO: 7629 - protein, 36 aa, Artificial Sequence
  GFR-binding peptide
  MOD_RES (3)..(4): Xaa is C or S
  MOD_RES (18)..(19)..(20)..(21)..(22): Xaa is A or G
  MOD_RES (23)..(24)..(25)..(26): Xaa is A or G or is absent
KAXXVPTELNAISMLYFXXXXXXXXXLKKYREMVVE

SEQ ID NO: 7630 - protein, 41 aa, Artificial Sequence
  GFR-binding peptide
  MOD_RES (5)..(6)..(40): Xaa is C or S
  MOD_RES (20)..(21)..(22)..(23)..(24): Xaa is A or G
  MOD_RES (25)..(26)..(27)..(28): Xaa is A or G or is absent
VPKPXXAPTKLSATSVLYYXXXXXXXXXLRKHRNMVVRSXG

SEQ ID NO: 7631 - protein, 40 aa, Artificial Sequence
  GFR-binding peptide
  MOD_RES (5)..(5): Xaa is C or S
RNVQXRPTQVQLSATSVLYYEIVRKKPIFLRKHRTLEDHL

SEQ ID NO: 7632 - protein, 37 aa, Artificial Sequence
  GFR-binding peptide
  MOD_RES (1)..(1): Xaa is C or S
XRPTQVQLSPISVLYKEIVRKKPIFLKYHYTLEDHLA

SEQ ID NO: 7633 - protein, 31 aa, Artificial Sequence
  GFR-binding peptide
  MOD_RES (1)..(1): Xaa is C or S
XVPTELSATSMLYYDEYDKVVLRKHREMVVE

SEQ ID NO: 7634 - protein, 37 aa, Artificial Sequence
  GFR-binding peptide
  MOD_RES (2)..(3)..(37): Xaa is C or S
  MOD_RES (17)..(18)..(19)..(20)..(21): Xaa is A or G
  MOD_RES (22)..(23)..(24)..(25): Xaa is A or G or is absent
AXXAPTKLNAISVLYFXXXXXXXXXLKKYRNMVVKAX

SEQ ID NO: 7635 - protein, 36 aa, Artificial Sequence
  GFR-binding peptide
  MOD_RES (2)..(3)..(34)..(36): Xaa is C or S
PXXVPQDLNAISILYFVGRTPKVLKKYRMVVKSXKX

SEQ ID NO: 7636 - protein, 37 aa, Artificial Sequence
  GFR-binding peptide
  MOD_RES (3)..(4)..(36): Xaa is C or S
KPXXAPTQLSPISVLYKDDSSNVILKYHYNMVVRAXG

SEQ ID NO: 7637 - protein, 38 aa, Artificial Sequence
  GFR-binding peptide
  MOD_RES (2)..(3)..(37): Xaa is C or S
  MOD_RES (17)..(18)..(19)..(20)..(21): Xaa is A or G
  MOD_RES (22)..(23)..(24)..(25): Xaa is A or G or is absent
PXXAPTQLSPISVLYKXXXXXXXXXLKYHYNMVVRAXG

SEQ ID NO: 7638 - protein, 39 aa, Artificial Sequence
  GFR-binding peptide
  MOD_RES (1)..(38): Xaa is C or S
XRPTQVQLNAISVLYFEIVRKKPIFLKKYRTLEDHLAXK

SEQ ID NO: 7639 - protein, 38 aa, Artificial Sequence
  GFR-binding peptide
  MOD_RES (4)..(5): Xaa is C or S
  MOD_RES (19)..(20)..(21)..(22)..(23): Xaa is A or G
  MOD_RES (24)..(25)..(26)..(27): Xaa is A or G or is absent
PKAXXVPTELNAISMLYFXXXXXXXXXLKKYREMVVEG

SEQ ID NO: 7640 - protein, 41 aa, Artificial Sequence
  GFR-binding peptide
  MOD_RES (3)..(4)..(38)..(40): Xaa is C or S
  MOD_RES (18)..(19)..(20)..(21)..(22): Xaa is A or G
  MOD_RES (23)..(24)..(25)..(26): Xaa is A or G or is absent
KAXXAPTKLNAISVLYFXXXXXXXXXLKKYRNMVVKAXGXH

SEQ ID NO: 7641 - protein, 40 aa, Artificial Sequence
  GFR-binding peptide
  MOD_RES (6)..(7): Xaa is C or S
  MOD_RES (21)..(22)..(23)..(24)..(25): Xaa is A or G
  MOD_RES (26)..(27)..(28)..(29): Xaa is A or G or is absent
KIPKAXXVPTELNAISMLYFXXXXXXXXXLKKYRDMVVEG

SEQ ID NO: 7642 - protein, 34 aa, Artificial Sequence
  GFR-binding peptide
  MOD_RES (3)..(4): Xaa is C or S
KAXXVPTELSATSMLYYDEYDKVVLRKHREMVVE

SEQ ID NO: 7643 - protein, 42 aa, Artificial Sequence
  GFR-binding peptide
  MOD_RES (6)..(7)..(41): Xaa is C or S
  MOD_RES (21)..(22)..(23)..(24)..(25): Xaa is A or G
  MOD_RES (26)..(27)..(28)..(29): Xaa is A or G or is absent
AVPKAXXAPTKLNAISVLYFXXXXXXXXXLKKYRNMVVKAXG

SEQ ID NO: 7644 - protein, 38 aa, Artificial Sequence
  GFR-binding peptide
  MOD_RES (5)..(6): Xaa is C or S
  MOD_RES (20)..(21)..(22)..(23)..(24): Xaa is A or G
  MOD_RES (25)..(26)..(27)..(28): Xaa is A or G or is absent
SASPXXVPQDLSATSILYYXXXXXXXXXLRKHRMVVKS

SEQ ID NO: 7645 - protein, 42 aa, Artificial Sequence
  GFR-binding peptide
  MOD_RES (5)..(6)..(39)..(41): Xaa is C or S
  MOD_RES (20)..(21)..(22)..(23)..(24): Xaa is A or G
  MOD_RES (25)..(26)..(27)..(28): Xaa is A or G or is absent
SAAPXXVPQALSPISILYKXXXXXXXXXLKYHYMIVRSXKXS

SEQ ID NO: 7646 - protein, 37 aa, Artificial Sequence
  GFR-binding peptide
  MOD_RES (37)..(37): Xaa is C or S
  MOD_RES (16)..(17)..(18)..(19)..(20): Xaa is A or G
  MOD_RES (21)..(22)..(23)..(24): Xaa is A or G or is absent
RPTQVQLSAISVLYLXXXXXXXXXLKNYQTLEDHLAX

SEQ ID NO: 7647 - protein, 38 aa, Artificial Sequence
  GFR-binding peptide
  MOD_RES (3)..(4)..(36)..(38): Xaa is C or S
KPXXAPTQLSAISVLYLDDSSNVILKNYQNMVVRAXGX

SEQ ID NO: 7648 - protein, 33 aa, Artificial Sequence
  GFR-binding peptide
  MOD_RES (1)..(32): Xaa is C or S
XVPQDLSATSILYYVGRTPKVLRKHRMVVKSXK

SEQ ID NO: 7649 - protein, 39 aa, Artificial Sequence
  GFR-binding peptide
  MOD_RES (4)..(5)..(37)..(39): Xaa is C or S
PKAXXVPTELSATSMLYYDENEKVVLRKHRDMVVEGXGX

SEQ ID NO: 7650 - protein, 37 aa, Artificial Sequence
  GFR-binding peptide
  MOD_RES (37)..(37): Xaa is C or S
RPTQVQLSATSVLYYEIVRKKPIFLRKHRTLEDHLAX

SEQ ID NO: 7651 - protein, 41 aa, Artificial Sequence
  GFR-binding peptide
  MOD_RES (5)..(6)..(40): Xaa is C or S
  MOD_RES (20)..(21)..(22)..(23)..(24): Xaa is A or G
  MOD_RES (25)..(26)..(27)..(28): Xaa is A or G or is absent
VPKAXXAPTKLNAISVLYFXXXXXXXXXLKKYRNMVVKAXG

SEQ ID NO: 7652 - protein, 35 aa, Artificial Sequence
  GFR-binding peptide
  MOD_RES (35)..(35): Xaa is C or S
TQVQLSPISVLYKEIVRKKPIFLKYHYTLEDHLAX

SEQ ID NO: 7653 - protein, 37 aa, Artificial Sequence
  GFR-binding peptide
  MOD_RES (1)..(2)..(35)..(37): Xaa is C or S
  MOD_RES (16)..(17)..(18)..(19)..(20): Xaa is A or G
  MOD_RES (21)..(22)..(23)..(24): Xaa is A or G or is absent
XXVPQDLSPISILYKXXXXXXXXXLKYHYMVVKSXKX

SEQ ID NO: 7654 - protein, 42 aa, Artificial Sequence
  GFR-binding peptide
  MOD_RES (5)..(6)..(39)..(41): Xaa is C or S
  MOD_RES (20)..(21)..(22)..(23)..(24): Xaa is A or G
  MOD_RES (25)..(26)..(27)..(28): Xaa is A or G or is absent
SASPXXVPQDLSAISILYLXXXXXXXXXLKNYQMVVKSXKXS

SEQ ID NO: 7655 - protein, 39 aa, Artificial Sequence
  GFR-binding peptide
  MOD_RES (4)..(4): Xaa is C or S
NVQXRPTQVQLNAISVLYFEIVRKKPIFLKKYRTLEDHL

SEQ ID NO: 7656 - protein, 37 aa, Artificial Sequence
  GFR-binding peptide
  MOD_RES (3)..(4)..(37): Xaa is C or S
KAXXVPTKLSAISVLYLDDMGVPTLKNYQEGMSVAEX

SEQ ID NO: 7657 - protein, 36 aa, Artificial Sequence
  GFR-binding peptide
  MOD_RES (2)..(2): Xaa is C or S
QXRPTQVQLNAISVLYFEIVRKKPIFLKKYRTLEDH

SEQ ID NO: 7658 - protein, 36 aa, Artificial Sequence
  GFR-binding peptide
  MOD_RES (5)..(6): Xaa is C or S
VPKAXXAPTKLNAISVLYFDSSNNVILKKYRNMVVK

SEQ ID NO: 7659 - protein, 39 aa, Artificial Sequence
  GFR-binding peptide
  MOD_RES (4)..(5)..(37)..(39): Xaa is C or S
PKPXXAPTQLSAISVLYLDDSSNVILKNYQNMVVRAXGX

SEQ ID NO: 7660 - protein, 40 aa, Artificial Sequence
  GFR-binding peptide
  MOD_RES (3)..(4)..(38)..(40): Xaa is C or S
  MOD_RES (18)..(19)..(20)..(21)..(22): Xaa is A or G
  MOD_RES (23)..(24)..(25)..(26): Xaa is A or G or is absent
KAXXVPTELSPISMLYKXXXXXXXXXLKYHYDMVVEGXGX

SEQ ID NO: 7661 - protein, 38 aa, Artificial Sequence
  GFR-binding peptide
  MOD_RES (3)..(4)..(36)..(38): Xaa is C or S
KAXXVPTELSATSMLYYDENEKVVLRKHRDMVVEGXGX

SEQ ID NO: 7662 - protein, 40 aa, Artificial Sequence
  GFR-binding peptide
  MOD_RES (5)..(6): Xaa is C or S
  MOD_RES (20)..(21)..(22)..(23)..(24): Xaa is A or G
  MOD_RES (25)..(26)..(27)..(28): Xaa is A or G or is absent
VGKAXXVPTKLNAISVLYFXXXXXXXXXLKKYREGMSVAE

SEQ ID NO: 7663 - protein, 38 aa, Artificial Sequence
  GFR-binding peptide
  MOD_RES (4)..(5)..(36)..(38): Xaa is C or S
AAPXXVPQALNAISILYFVGRKPKVLKKYRMIVRSXKX

SEQ ID NO: 7664 - protein, 34 aa, Artificial Sequence
  GFR-binding peptide
  MOD_RES (34)..(34): Xaa is C or S
  MOD_RES (14)..(15)..(16)..(17)..(18): Xaa is A or G
  MOD_RES (19)..(20)..(21)..(22): Xaa is A or G or is absent
APTKLSATSVLYYXXXXXXXXXLRKHRNMVVRSX

SEQ ID NO: 7665 - protein, 38 aa, Artificial Sequence
  GFR-binding peptide
  MOD_RES (4)..(38): Xaa is C or S
  MOD_RES (18)..(19)..(20)..(21)..(22): Xaa is A or G
  MOD_RES (23)..(24)..(25)..(26): Xaa is A or G or is absent
KPTXAPTKLSATSVLYYXXXXXXXXXLRKHRNMVVRSX

SEQ ID NO: 7666 - protein, 37 aa, Artificial Sequence
  GFR-binding peptide
  MOD_RES (2)..(3)..(34)..(36): Xaa is C or S
PXXVPQDLSPISILYKVGRTPKVLKYHYMVVKSXKXS

SEQ ID NO: 7667 - protein, 41 aa, Artificial Sequence
  GFR-binding peptide
  MOD_RES (5)..(5): Xaa is C or S
  MOD_RES (21)..(22)..(23)..(24)..(25): Xaa is A or G
  MOD_RES (26)..(27)..(28)..(29): Xaa is A or G or is absent
RNVQXRPTQVQLNAISVLYFXXXXXXXXXLKKYRTLEDHLA

SEQ ID NO: 7668 - protein, 42 aa, Artificial Sequence
  GFR-binding peptide
  MOD_RES (3)..(4)..(39)..(41): Xaa is C or S
  MOD_RES (18)..(19)..(20)..(21)..(22): Xaa is A or G
  MOD_RES (23)..(24)..(25)..(26): Xaa is A or G or is absent
KAXXVPTKLSATSVLYYXXXXXXXXXLRKHREGMSVAEXGXR

SEQ ID NO: 7669 - protein, 34 aa, Artificial Sequence
  GFR-binding peptide
  MOD_RES (1)..(2): Xaa is C or S
  MOD_RES (16)..(17)..(18)..(19)..(20): Xaa is A or G
  MOD_RES (21)..(22)..(23)..(24): Xaa is A or G or is absent
XXAPTQLSPISVLYKXXXXXXXXXLKYHYNMVVR

SEQ ID NO: 7670 - protein, 40 aa, Artificial Sequence
  GFR-binding peptide
  MOD_RES (5)..(6)..(38)..(40): Xaa is C or S
VPKPXXAPTKLSAISVLYLDDSSNVILKNYQNMVVRSXGX

SEQ ID NO: 7671 - protein, 34 aa, Artificial Sequence
  GFR-binding peptide
  MOD_RES (32)..(34): Xaa is C or S
VPTELNAISMLYFDENEKVVLKKYRDMVVEGXGX

SEQ ID NO: 7672 - protein, 37 aa, Artificial Sequence
  GFR-binding peptide
  MOD_RES (5)..(6): Xaa is C or S
IPKAXXVPTELSATSMLYYDEYDKVVLRKHREMVVEG

SEQ ID NO: 7673 - protein, 36 aa, Artificial Sequence
  GFR-binding peptide
  MOD_RES (2)..(3)..(35): Xaa is C or S
AXXVPTELNAISMLYFDEYDKVVLKKYREMVVEGXG

SEQ ID NO: 7674 - protein, 35 aa, Artificial Sequence
  GFR-binding peptide
  MOD_RES (1)..(1): Xaa is C or S
  MOD_RES (17)..(18)..(19)..(20)..(21): Xaa is A or G
  MOD_RES (22)..(23)..(24)..(25): Xaa is A or G or is absent
XRPTQVQLSAISVLYLXXXXXXXXXLKNYQTLEDH

SEQ ID NO: 7675 - protein, 37 aa, Artificial Sequence
  GFR-binding peptide
  MOD_RES (2)..(3)..(34)..(36): Xaa is C or S
PXXVPQALSAISILYLVGRKPKVLKNYQMIVRSXKXS

SEQ ID NO: 7676 - protein, 36 aa, Artificial Sequence
  GFR-binding peptide
  MOD_RES (5)..(6): Xaa is C or S
VPKPXXAPTQLSPISVLYKDDSSNVILKYHYNMVVR

SEQ ID NO: 7677 - protein, 34 aa, Artificial Sequence
  GFR-binding peptide
  MOD_RES (1)..(2)..(34): Xaa is C or S
XXAPTKLSPISVLYKDDSSNVILKYHYNMVVRSX

SEQ ID NO: 7678 - protein, 32 aa, Artificial Sequence
  GFR-binding peptide
  MOD_RES (32)..(32): Xaa is C or S
VPTELSPISMLYKDENEKVVLKYHYDMVVEGX

SEQ ID NO: 7679 - protein, 39 aa, Artificial Sequence
  GFR-binding peptide
  MOD_RES (3)..(4)..(37)..(39): Xaa is C or S
  MOD_RES (18)..(19)..(20)..(21)..(22): Xaa is A or G
  MOD_RES (23)..(24)..(25)..(26): Xaa is A or G or is absent
APXXVPQALSPISILYKXXXXXXXXXLKYHYMIVRSXKX

SEQ ID NO: 7680 - protein, 37 aa, Artificial Sequence
  GFR-binding peptide
  MOD_RES (1)..(35)..(37): Xaa is C or S
  MOD_RES (15)..(16)..(17)..(18)..(19): Xaa is A or G
  MOD_RES (20)..(21)..(22)..(23): Xaa is A or G or is absent
XVPTELNAISMLYFXXXXXXXXXLKKYRDMVVEGXGX

SEQ ID NO: 7681 - protein, 37 aa, Artificial Sequence
  GFR-binding peptide
  MOD_RES (2)..(3)..(36): Xaa is C or S
  MOD_RES (17)..(18)..(19)..(20)..(21): Xaa is A or G
  MOD_RES (22)..(23)..(24)..(25): Xaa is A or G or is absent
PXXVPQALSATSILYYXXXXXXXXXLRKHRMIVRSXK

SEQ ID NO: 7682 - protein, 35 aa, Artificial Sequence
  GFR-binding peptide
  MOD_RES (4)..(5): Xaa is C or S
AAPXXVPQALNAISILYFVGRKPKVLKKYRMIVRS

SEQ ID NO: 7683 - protein, 41 aa, Artificial Sequence
  GFR-binding peptide
  MOD_RES (6)..(7)..(40): Xaa is C or S
  MOD_RES (21)..(22)..(23)..(24)..(25): Xaa is A or G
  MOD_RES (26)..(27)..(28)..(29): Xaa is A or G or is absent
ASASPXXVPQDLNAISILYFXXXXXXXXXLKKYRMVVKSXK

SEQ ID NO: 7684 - protein, 41 aa, Artificial Sequence
  GFR-binding peptide
  MOD_RES (6)..(7)..(40): Xaa is C or S
  MOD_RES (21)..(22)..(23)..(24)..(25): Xaa is A or G
  MOD_RES (26)..(27)..(28)..(29): Xaa is A or G or is absent
ASASPXXVPQDLSPISILYKXXXXXXXXXLKYHYMVVKSXK

SEQ ID NO: 7685 - protein, 33 aa, Artificial Sequence
  GFR-binding peptide
  MOD_RES (2)..(3): Xaa is C or S
AXXAPTKLSPISVLYKDSSNNVILKYHYNMVVK

SEQ ID NO: 7686 - protein, 40 aa, Artificial Sequence
  GFR-binding peptide
  MOD_RES (5)..(6)..(39): Xaa is C or S
VGKAXXVPTKLNAISVLYFDDMGVPTLKKYREGMSVAEXG

SEQ ID NO: 7687 - protein, 40 aa, Artificial Sequence
  GFR-binding peptide
  MOD_RES (5)..(5): Xaa is C or S
  MOD_RES (21)..(22)..(23)..(24)..(25): Xaa is A or G
  MOD_RES (26)..(27)..(28)..(29): Xaa is A or G or is absent
RNVQXRPTQVQLNAISVLYFXXXXXXXXXLKKYRTLEDHL

SEQ ID NO: 7688 - protein, 35 aa, Artificial Sequence
  GFR-binding peptide
  MOD_RES (1)..(2)..(35): Xaa is C or S
XXVPTKLSATSVLYYDDMGVPTLRKHREGMSVAEX

SEQ ID NO: 7689 - protein, 37 aa, Artificial Sequence
  GFR-binding peptide
  MOD_RES (4)..(5): Xaa is C or S
  MOD_RES (19)..(20)..(21)..(22)..(23): Xaa is A or G
  MOD_RES (24)..(25)..(26)..(27): Xaa is A or G or is absent
AAPXXVPQALSATSILYYXXXXXXXXXLRKHRMIVRS

SEQ ID NO: 7690 - protein, 39 aa, Artificial Sequence
  GFR-binding peptide
  MOD_RES (6)..(7): Xaa is C or S
  MOD_RES (21)..(22)..(23)..(24)..(25): Xaa is A or G
  MOD_RES (26)..(27)..(28)..(29): Xaa is A or G or is absent
ASASPXXVSQDLNAISILYFXXXXXXXXXLKKYRMIVKS

SEQ ID NO: 7691 - protein, 34 aa, Artificial Sequence
  GFR-binding peptide
  MOD_RES (1)..(2)..(33): Xaa is C or S
XXVPQALSPISILYKVGRKPKVLKYHYMIVRSXK

SEQ ID NO: 7692 - protein, 41 aa, Artificial Sequence
  GFR-binding peptide
  MOD_RES (5)..(6)..(41): Xaa is C or S
  MOD_RES (20)..(21)..(22)..(23)..(24): Xaa is A or G
  MOD_RES (25)..(26)..(27)..(28): Xaa is A or G or is absent
VGKAXXVPTKLSATSVLYYXXXXXXXXXLRKHREGMSVAEX

SEQ ID NO: 7693 - protein, 43 aa, Artificial Sequence
  GFR-binding peptide
  MOD_RES (6)..(40)..(42): Xaa is C or S
  MOD_RES (20)..(21)..(22)..(23)..(24): Xaa is A or G
  MOD_RES (25)..(26)..(27)..(28): Xaa is A or G or is absent
VTKPTXAPTKLNAISVLYFXXXXXXXXXLKKYRNMVVRSXGXH

SEQ ID NO: 7694 - protein, 37 aa, Artificial Sequence
  GFR-binding peptide
  MOD_RES (2)..(34)..(36): Xaa is C or S
TXAPTKLSAISVLYLDDSSNVILKNYQNMVVRSXGXH

SEQ ID NO: 7695 - protein, 36 aa, Artificial Sequence
  GFR-binding peptide
  MOD_RES (1)..(2)..(36): Xaa is C or S
  MOD_RES (16)..(17)..(18)..(19)..(20): Xaa is A or G
  MOD_RES (21)..(22)..(23)..(24): Xaa is A or G or is absent
XXAPTKLSATSVLYYXXXXXXXXXLRKHRNMVVKAX

SEQ ID NO: 7696 - protein, 36 aa, Artificial Sequence
  GFR-binding peptide
  MOD_RES (5)..(6): Xaa is C or S
VPKPXXAPTKLSATSVLYYDDSSNVILRKHRNMVVR

SEQ ID NO: 7697 - protein, 40 aa, Artificial Sequence
  GFR-binding peptide
  MOD_RES (2)..(3)..(37)..(39): Xaa is C or S
  MOD_RES (17)..(18)..(19)..(20)..(21): Xaa is A or G
  MOD_RES (22)..(23)..(24)..(25): Xaa is A or G or is absent
AXXAPTKLSPISVLYKXXXXXXXXXLKYHYNMVVKAXGXH

SEQ ID NO: 7698 - protein, 38 aa, Artificial Sequence
  GFR-binding peptide
  MOD_RES (5)..(6): Xaa is C or S
  MOD_RES (20)..(21)..(22)..(23)..(24): Xaa is A or G
  MOD_RES (25)..(26)..(27)..(28): Xaa is A or G or is absent
VPKPXXAPTQLNAISVLYFXXXXXXXXXLKKYRNMVVR

SEQ ID NO: 7699 - protein, 41 aa, Artificial Sequence
  GFR-binding peptide
  MOD_RES (6)..(40): Xaa is C or S
  MOD_RES (20)..(21)..(22)..(23)..(24): Xaa is A or G
  MOD_RES (25)..(26)..(27)..(28): Xaa is A or G or is absent
VTKPTXAPTKLNAISVLYFXXXXXXXXXLKKYRNMVVRSXG

SEQ ID NO: 7700 - protein, 42 aa, Artificial Sequence
  GFR-binding peptide
  MOD_RES (5)..(39)..(41): Xaa is C or S
  MOD_RES (19)..(20)..(21)..(22)..(23): Xaa is A or G
  MOD_RES (24)..(25)..(26)..(27): Xaa is A or G or is absent
TKPTXAPTKLSPISVLYKXXXXXXXXXLKYHYNMVVRSXGXH

SEQ ID NO: 7701 - protein, 35 aa, Artificial Sequence
  GFR-binding peptide
  MOD_RES (2)..(3)..(35): Xaa is C or S
AXXVPTELNAISMLYFDENEKVVLKKYRDMVVEGX

SEQ ID NO: 7702 - protein, 35 aa, Artificial Sequence
  GFR-binding peptide
  MOD_RES (2)..(3): Xaa is C or S
  MOD_RES (17)..(18)..(19)..(20)..(21): Xaa is A or G
  MOD_RES (22)..(23)..(24)..(25): Xaa is A or G or is absent
AXXVPTELNAISMLYFXXXXXXXXXLKKYRDMVVE

SEQ ID NO: 7703 - protein, 35 aa, Artificial Sequence
  GFR-binding peptide
  MOD_RES (2)..(3)..(35): Xaa is C or S
AXXVPTELSPISMLYKDENEKVVLKYHYDMVVEGX

SEQ ID NO: 7704 - protein, 35 aa, Artificial Sequence
  GFR-binding peptide
  MOD_RES (1)..(2)..(33)..(35): Xaa is C or S
XXVSQDLNAISILYFIGKTPKILKKYRMIVKSXKX

SEQ ID NO: 7705 - protein, 34 aa, Artificial Sequence
  GFR-binding peptide
  MOD_RES (34)..(34): Xaa is C or S
  MOD_RES (14)..(15)..(16)..(17)..(18): Xaa is A or G
  MOD_RES (19)..(20)..(21)..(22): Xaa is A or G or is absent
APTKLSPISVLYKXXXXXXXXXLKYHYNMVVRSX

SEQ ID NO: 7706 - protein, 44 aa, Artificial Sequence
  GFR-binding peptide
  MOD_RES (7)..(41)..(43): Xaa is C or S
  MOD_RES (21)..(22)..(23)..(24)..(25): Xaa is A or G
  MOD_RES (26)..(27)..(28)..(29): Xaa is A or G or is absent
HVTKPTXAPTKLSATSVLYYXXXXXXXXXLRKHRNMVVRSXGXH

SEQ ID NO: 7707 - protein, 32 aa, Artificial Sequence
  GFR-binding peptide
  MOD_RES (1)..(2): Xaa is C or S
XXVPTELSATSMLYYDEYDKVVLRKHREMVVE

SEQ ID NO: 7708 - protein, 39 aa, Artificial Sequence
  GFR-binding peptide
  MOD_RES (1)..(38): Xaa is C or S
  MOD_RES (17)..(18)..(19)..(20)..(21): Xaa is A or G
  MOD_RES (22)..(23)..(24)..(25): Xaa is A or G or is absent
XRPTQVQLNAISVLYFXXXXXXXXXLKKYRTLEDHLAXK

SEQ ID NO: 7709 - protein, 34 aa, Artificial Sequence
  GFR-binding peptide
  MOD_RES (1)..(2): Xaa is C or S
  MOD_RES (16)..(17)..(18)..(19)..(20): Xaa is A or G
  MOD_RES (21)..(22)..(23)..(24): Xaa is A or G or is absent
XXVPTELSATSMLYYXXXXXXXXXLRKHRDMVVE

SEQ ID NO: 7710 - protein, 43 aa, Artificial Sequence
  GFR-binding peptide
  MOD_RES (4)..(41)..(43): Xaa is C or S
NVQXRPTQVQLNAISVLYFEIVRKKPIFLKKYRTLEDHLAXKX

SEQ ID NO: 7711 - protein, 33 aa, Artificial Sequence
  GFR-binding peptide
  MOD_RES (1)..(2)..(33): Xaa is C or S
XXVPQALSPISILYKVGRKPKVLKYHYMIVRSX

SEQ ID NO: 7712 - protein, 38 aa, Artificial Sequence
  GFR-binding peptide
  MOD_RES (6)..(38): Xaa is C or S
VTKPTXAPTKLSAISVLYLDDSSNVILKNYQNMVVRSX

SEQ ID NO: 7713 - protein, 38 aa, Artificial Sequence
  GFR-binding peptide
  MOD_RES (1)..(2)..(35)..(37): Xaa is C or S
  MOD_RES (16)..(17)..(18)..(19)..(20): Xaa is A or G
  MOD_RES (21)..(22)..(23)..(24): Xaa is A or G or is absent
XXVSQDLSAISILYLXXXXXXXXXLKNYQMIVKSXKXS

SEQ ID NO: 7714 - protein, 35 aa, Artificial Sequence
  GFR-binding peptide
  MOD_RES (1)..(2)..(33)..(35): Xaa is C or S
XXVPQALNAISILYFVGRKPKVLKKYRMIVRSXKX

SEQ ID NO: 7715 - protein, 40 aa, Artificial Sequence
  GFR-binding peptide
  MOD_RES (5)..(6)..(40): Xaa is C or S
  MOD_RES (20)..(21)..(22)..(23)..(24): Xaa is A or G
  MOD_RES (25)..(26)..(27)..(28): Xaa is A or G or is absent
VPKPXXAPTKLSATSVLYYXXXXXXXXXLRKHRNMVVRSX

SEQ ID NO: 7716 - protein, 44 aa, Artificial Sequence
  GFR-binding peptide
  MOD_RES (5)..(42)..(44): Xaa is C or S
RNVQXRPTQVQLSAISVLYLEIVRKKPIFLKNYQTLEDHLAXKX

SEQ ID NO: 7717 - protein, 40 aa, Artificial Sequence
  GFR-binding peptide
  MOD_RES (4)..(5)..(38)..(40): Xaa is C or S
  MOD_RES (19)..(20)..(21)..(22)..(23): Xaa is A or G
  MOD_RES (24)..(25)..(26)..(27): Xaa is A or G or is absent
ASPXXVPQDLSATSILYYXXXXXXXXXLRKHRMVVKSXKX

SEQ ID NO: 7718 - protein, 41 aa, Artificial Sequence
  GFR-binding peptide
  MOD_RES (7)..(39)..(41): Xaa is C or S
HVTKPTXAPTKLSAISVLYLDDSSNVILKNYQNMVVRSXGX

SEQ ID NO: 7719 - protein, 39 aa, Artificial Sequence
  GFR-binding peptide
  MOD_RES (2)..(3)..(37)..(39): Xaa is C or S
  MOD_RES (17)..(18)..(19)..(20)..(21): Xaa is A or G
  MOD_RES (22)..(23)..(24)..(25): Xaa is A or G or is absent
AXXVPTELSAISMLYLXXXXXXXXXLKNYQDMVVEGXGX

SEQ ID NO: 7720 - protein, 39 aa, Artificial Sequence
  GFR-binding peptide
  MOD_RES (3)..(4)..(38): Xaa is C or S
  MOD_RES (18)..(19)..(20)..(21)..(22): Xaa is A or G
  MOD_RES (23)..(24)..(25)..(26): Xaa is A or G or is absent
KAXXVPTELNAISMLYFXXXXXXXXXLKKYREMVVEGXG

SEQ ID NO: 7721 - protein, 34 aa, Artificial Sequence
  GFR-binding peptide
  MOD_RES (32)..(34): Xaa is C or S
VPTELNAISMLYFDEYDKVVLKKYREMVVEGXGX

SEQ ID NO: 7722 - protein, 36 aa, Artificial Sequence
  GFR-binding peptide
  MOD_RES (2)..(3): Xaa is C or S
  MOD_RES (17)..(18)..(19)..(20)..(21): Xaa is A or G
  MOD_RES (22)..(23)..(24)..(25): Xaa is A or G or is absent
PXXAPTQLSATSVLYYXXXXXXXXXLRKHRNMVVRA

SEQ ID NO: 7723 - protein, 40 aa, Artificial Sequence
  GFR-binding peptide
  MOD_RES (6)..(7): Xaa is C or S
  MOD_RES (21)..(22)..(23)..(24)..(25): Xaa is A or G
  MOD_RES (26)..(27)..(28)..(29): Xaa is A or G or is absent
KIPKAXXVPTELSAISMLYLXXXXXXXXXLKNYQDMVVEG

SEQ ID NO: 7724 - protein, 34 aa, Artificial Sequence
  GFR-binding peptide
  MOD_RES (3)..(4): Xaa is C or S
SPXXVSQDLSATSILYYIGKTPKILRKHRMIVKS

SEQ ID NO: 7725 - protein, 38 aa, Artificial Sequence
  GFR-binding peptide
  MOD_RES (37)..(37): Xaa is C or S
RPTQVQLSAISVLYLEIVRKKPIFLKNYQTLEDHLAXK

SEQ ID NO: 7726 - protein, 39 aa, Artificial Sequence
  GFR-binding peptide
  MOD_RES (3)..(4)..(36)..(38): Xaa is C or S
KAXXVPTELNAISMLYFDENEKVVLKKYRDMVVEGXGXR

SEQ ID NO: 7727 - protein, 43 aa, Artificial Sequence
  GFR-binding peptide
  MOD_RES (6)..(7)..(40)..(42): Xaa is C or S
  MOD_RES (21)..(22)..(23)..(24)..(25): Xaa is A or G
  MOD_RES (26)..(27)..(28)..(29): Xaa is A or G or is absent
ASAAPXXVPQALSAISILYLXXXXXXXXXLKNYQMIVRSXKXS

SEQ ID NO: 7728 - protein, 37 aa, Artificial Sequence
  GFR-binding peptide
  MOD_RES (34)..(36): Xaa is C or S
  MOD_RES (14)..(15)..(16)..(17)..(18): Xaa is A or G
  MOD_RES (19)..(20)..(21)..(22): Xaa is A or G or is absent
APTKLSPISVLYKXXXXXXXXXLKYHYNMVVKAXGXH

SEQ ID NO: 7729 - protein, 41 aa, Artificial Sequence
  GFR-binding peptide
  MOD_RES (6)..(7)..(39)..(41): Xaa is C or S
SIPKAXXVPTELSPISMLYKDEYDKVVLKYHYEMVVEGXGX

SEQ ID NO: 7730 - protein, 38 aa, Artificial Sequence
  GFR-binding peptide
  MOD_RES (5)..(6): Xaa is C or S
  MOD_RES (20)..(21)..(22)..(23)..(24): Xaa is A or G
  MOD_RES (25)..(26)..(27)..(28): Xaa is A or G or is absent
SASPXXVPQDLSAISILYLXXXXXXXXXLKNYQMVVKS

SEQ ID NO: 7731 - protein, 37 aa, Artificial Sequence
  GFR-binding peptide
  MOD_RES (1)..(1): Xaa is C or S
XRPTQVQLNAISVLYFEIVRKKPIFLKKYRTLEDHLA

SEQ ID NO: 7732 - protein, 36 aa, Artificial Sequence
  GFR-binding peptide
  MOD_RES (34)..(36): Xaa is C or S
  MOD_RES (14)..(15)..(16)..(17)..(18): Xaa is A or G
  MOD_RES (19)..(20)..(21)..(22): Xaa is A or G or is absent
VPTELSATSMLYYXXXXXXXXXLRKHRDMVVEGXGX

SEQ ID NO: 7733 - protein, 37 aa, Artificial Sequence
  GFR-binding peptide
  MOD_RES (3)..(4)..(36): Xaa is C or S
KPXXAPTKLSPISVLYKDDSSNVILKYHYNMVVRSXG

SEQ ID NO: 7734 - protein, 39 aa, Artificial Sequence
  GFR-binding peptide
  MOD_RES (4)..(4): Xaa is C or S
NVQXRPTQVQLSAISVLYLEIVRKKPIFLKNYQTLEDHL

SEQ ID NO: 7735 - protein, 34 aa, Artificial Sequence
  GFR-binding peptide
  MOD_RES (1)..(34): Xaa is C or S
  MOD_RES (15)..(16)..(17)..(18)..(19): Xaa is A or G
  MOD_RES (20)..(21)..(22)..(23): Xaa is A or G or is absent
XVSQDLSATSILYYXXXXXXXXXLRKHRMIVKSX

SEQ ID NO: 7736 - protein, 35 aa, Artificial Sequence
  GFR-binding peptide
  MOD_RES (1)..(35): Xaa is C or S
  MOD_RES (15)..(16)..(17)..(18)..(19): Xaa is A or G
  MOD_RES (20)..(21)..(22)..(23): Xaa is A or G or is absent
XAPTKLSPISVLYKXXXXXXXXXLKYHYNMVVRSX

SEQ ID NO: 7737 - protein, 34 aa, Artificial Sequence
  GFR-binding peptide
  MOD_RES (1)..(34): Xaa is C or S
  MOD_RES (15)..(16)..(17)..(18)..(19): Xaa is A or G
  MOD_RES (20)..(21)..(22)..(23): Xaa is A or G or is absent
XVSQDLSAISILYLXXXXXXXXXLKNYQMIVKSX

SEQ ID NO: 7738 - protein, 39 aa, Artificial Sequence
  GFR-binding peptide
  MOD_RES (2)..(3)..(37)..(39): Xaa is C or S
  MOD_RES (17)..(18)..(19)..(20)..(21): Xaa is A or G
  MOD_RES (22)..(23)..(24)..(25): Xaa is A or G or is absent
AXXAPTKLSPISVLYKXXXXXXXXXLKYHYNMVVKAXGX

SEQ ID NO: 7739 - protein, 41 aa, Artificial Sequence
  GFR-binding peptide
  MOD_RES (4)..(5)..(38)..(40): Xaa is C or S
  MOD_RES (19)..(20)..(21)..(22)..(23): Xaa is A or G
  MOD_RES (24)..(25)..(26)..(27): Xaa is A or G or is absent
AAPXXVPQALSATSILYYXXXXXXXXXLRKHRMIVRSXKXS

SEQ ID NO: 7740 - protein, 39 aa, Artificial Sequence
  GFR-binding peptide
  MOD_RES (6)..(7): Xaa is C or S
  MOD_RES (21)..(22)..(23)..(24)..(25): Xaa is A or G
  MOD_RES (26)..(27)..(28)..(29): Xaa is A or G or is absent
ASASPXXVPQDLSAISILYLXXXXXXXXXLKNYQMVVKS

SEQ ID NO: 7741 - protein, 36 aa, Artificial Sequence
  GFR-binding peptide
  MOD_RES (16)..(17)..(18)..(19)..(20): Xaa is A or G
  MOD_RES (21)..(22)..(23)..(24): Xaa is A or G or is absent
RPTQVQLSATSVLYYXXXXXXXXXLRKHRTLEDHLA

SEQ ID NO: 7742 - protein, 37 aa, Artificial Sequence
  GFR-binding peptide
  MOD_RES (1)..(34)..(36): Xaa is C or S
  MOD_RES (15)..(16)..(17)..(18)..(19): Xaa is A or G
  MOD_RES (20)..(21)..(22)..(23): Xaa is A or G or is absent
XVSQDLSATSILYYXXXXXXXXXLRKHRMIVKSXKXS

SEQ ID NO: 7743 - protein, 34 aa, Artificial Sequence
  GFR-binding peptide
  MOD_RES (3)..(4): Xaa is C or S
SPXXVSQDLNAISILYFIGKTPKILKKYRMIVKS

SEQ ID NO: 7744 - protein, 42 aa, Artificial Sequence
  GFR-binding peptide
  MOD_RES (3)..(40)..(42): Xaa is C or S
VQXRPTQVQLSPISVLYKEIVRKKPIFLKYHYTLEDHLAXKX

SEQ ID NO: 7745 - protein, 36 aa, Artificial Sequence
  GFR-binding peptide
  MOD_RES (2)..(3)..(34)..(36): Xaa is C or S
PXXVPQALNAISILYFVGRKPKVLKKYRMIVRSXKX

SEQ ID NO: 7746 - protein, 34 aa, Artificial Sequence
  GFR-binding peptide
  MOD_RES (32)..(34): Xaa is C or S
APTKLSAISVLYLDSSNNVILKNYQNMVVKAXGX

SEQ ID NO: 7747 - protein, 36 aa, Artificial Sequence
  GFR-binding peptide
  MOD_RES (16)..(17)..(18)..(19)..(20): Xaa is A or G
  MOD_RES (21)..(22)..(23)..(24): Xaa is A or G or is absent
RPTQVQLSAISVLYLXXXXXXXXXLKNYQTLEDHLA

SEQ ID NO: 7748 - protein, 41 aa, Artificial Sequence
  GFR-binding peptide
  MOD_RES (4)..(5)..(39)..(41): Xaa is C or S
  MOD_RES (19)..(20)..(21)..(22)..(23): Xaa is A or G
  MOD_RES (24)..(25)..(26)..(27): Xaa is A or G or is absent
PKAXXVPTELNAISMLYFXXXXXXXXXLKKYRDMVVEGXGX

SEQ ID NO: 7749 - protein, 39 aa, Artificial Sequence
  GFR-binding peptide
  MOD_RES (4)..(5)..(38): Xaa is C or S
  MOD_RES (19)..(20)..(21)..(22)..(23): Xaa is A or G
  MOD_RES (24)..(25)..(26)..(27): Xaa is A or G or is absent
ASPXXVPQDLNAISILYFXXXXXXXXXLKKYRMVVKSXK

SEQ ID NO: 7750 - protein, 38 aa, Artificial Sequence
  GFR-binding peptide
  MOD_RES (4)..(38): Xaa is C or S
  MOD_RES (18)..(19)..(20)..(21)..(22): Xaa is A or G
  MOD_RES (23)..(24)..(25)..(26): Xaa is A or G or is absent
KPTXAPTKLSAISVLYLXXXXXXXXXLKNYQNMVVRSX

SEQ ID NO: 7751 - protein, 38 aa, Artificial Sequence
  GFR-binding peptide
  MOD_RES (5)..(6): Xaa is C or S
  MOD_RES (20)..(21)..(22)..(23)..(24): Xaa is A or G
  MOD_RES (25)..(26)..(27)..(28): Xaa is A or G or is absent
SASPXXVPQDLSPISILYKXXXXXXXXXLKYHYMVVKS

SEQ ID NO: 7752 - protein, 36 aa, Artificial Sequence
  GFR-binding peptide
  MOD_RES (2)..(3)..(36): Xaa is C or S
  MOD_RES (17)..(18)..(19)..(20)..(21): Xaa is A or G
  MOD_RES (22)..(23)..(24)..(25): Xaa is A or G or is absent
PXXVPQALNAISILYFXXXXXXXXXLKKYRMIVRSX

SEQ ID NO: 7753 - protein, 32 aa, Artificial Sequence
  GFR-binding peptide
  MOD_RES (1)..(1): Xaa is C or S
XVPTELSPISMLYKDENEKVVLKYHYDMVVEG

SEQ ID NO: 7754 - protein, 40 aa, Artificial Sequence
  GFR-binding peptide
  MOD_RES (3)..(4)..(38)..(40): Xaa is C or S
  MOD_RES (18)..(19)..(20)..(21)..(22): Xaa is A or G
  MOD_RES (23)..(24)..(25)..(26): Xaa is A or G or is absent
KPXXAPTKLSATSVLYYXXXXXXXXXLRKHRNMVVRSXGX

SEQ ID NO: 7755 - protein, 33 aa, Artificial Sequence
  GFR-binding peptide
  MOD_RES (2)..(3): Xaa is C or S
AXXAPTKLSAISVLYLDSSNNVILKNYQNMVVK

SEQ ID NO: 7756 - protein, 39 aa, Artificial Sequence
  GFR-binding peptide
  MOD_RES (5)..(39): Xaa is C or S
  MOD_RES (19)..(20)..(21)..(22)..(23): Xaa is A or G
  MOD_RES (24)..(25)..(26)..(27): Xaa is A or G or is absent
TKPTXAPTKLSAISVLYLXXXXXXXXXLKNYQNMVVRSX

SEQ ID NO: 7757 - protein, 38 aa, Artificial Sequence
  GFR-binding peptide
  MOD_RES (3)..(4)..(35)..(37): Xaa is C or S
SPXXVPQDLSPISILYKVGRTPKVLKYHYMVVKSXKXS

SEQ ID NO: 7758 - protein, 37 aa, Artificial Sequence
  GFR-binding peptide
  MOD_RES (4)..(5): Xaa is C or S
  MOD_RES (19)..(20)..(21)..(22)..(23): Xaa is A or G
  MOD_RES (24)..(25)..(26)..(27): Xaa is A or G or is absent
PKAXXAPTKLSATSVLYYXXXXXXXXXLRKHRNMVVK

SEQ ID NO: 7759 - protein, 36 aa, Artificial Sequence
  GFR-binding peptide
  MOD_RES (36)..(36): Xaa is C or S
PTQVQLNAISVLYFEIVRKKPIFLKKYRTLEDHLAX

SEQ ID NO: 7760 - protein, 39 aa, Artificial Sequence
  GFR-binding peptide
  MOD_RES (2)..(3)..(36)..(38): Xaa is C or S
AXXVPTKLSATSVLYYDDMGVPTLRKHREGMSVAEXGXR

SEQ ID NO: 7761 - protein, 32 aa, Artificial Sequence
  GFR-binding peptide
  MOD_RES (1)..(1): Xaa is C or S
XAPTKLSPISVLYKDDSSNVILKYHYNMVVRS

SEQ ID NO: 7762 - protein, 35 aa, Artificial Sequence
  GFR-binding peptide
  MOD_RES (2)..(2): Xaa is C or S
  MOD_RES (16)..(17)..(18)..(19)..(20): Xaa is A or G
  MOD_RES (21)..(22)..(23)..(24): Xaa is A or G or is absent
TXAPTKLSATSVLYYXXXXXXXXXLRKHRNMVVRS

SEQ ID NO: 7763 - protein, 36 aa, Artificial Sequence
  GFR-binding peptide
  MOD_RES (2)..(3): Xaa is C or S
  MOD_RES (17)..(18)..(19)..(20)..(21): Xaa is A or G
  MOD_RES (22)..(23)..(24)..(25): Xaa is A or G or is absent
AXXVPTELSATSMLYYXXXXXXXXXLRKHRDMVVEG

SEQ ID NO: 7764 - protein, 38 aa, Artificial Sequence
  GFR-binding peptide
  MOD_RES (4)..(5)..(36)..(38): Xaa is C or S
ASPXXVSQDLSPISILYKIGKTPKILKYHYMIVKSXKX

SEQ ID NO: 7765 - protein, 41 aa, Artificial Sequence
  GFR-binding peptide
  MOD_RES (6)..(7)..(38)..(40): Xaa is C or S
ASAAPXXVPQALSATSILYYVGRKPKVLRKHRMIVRSXKXS

SEQ ID NO: 7766 - protein, 37 aa, Artificial Sequence
  GFR-binding peptide
  MOD_RES (34)..(36): Xaa is C or S
  MOD_RES (14)..(15)..(16)..(17)..(18): Xaa is A or G
  MOD_RES (19)..(20)..(21)..(22): Xaa is A or G or is absent
VPTELSATSMLYYXXXXXXXXXLRKHRDMVVEGXGXR

SEQ ID NO: 7767 - protein, 39 aa, Artificial Sequence
  GFR-binding peptide
  MOD_RES (4)..(5)..(37)..(39): Xaa is C or S
PKPXXAPTKLSAISVLYLDDSSNVILKNYQNMVVRSXGX

SEQ ID NO: 7768 - protein, 40 aa, Artificial Sequence
  GFR-binding peptide
  MOD_RES (3)..(4)..(38)..(40): Xaa is C or S
  MOD_RES (18)..(19)..(20)..(21)..(22): Xaa is A or G
  MOD_RES (23)..(24)..(25)..(26): Xaa is A or G or is absent
KAXXVPTELSAISMLYLXXXXXXXXXLKNYQEMVVEGXGX

SEQ ID NO: 7769 - protein, 37 aa, Artificial Sequence
  GFR-binding peptide
  MOD_RES (4)..(5): Xaa is C or S
  MOD_RES (19)..(20)..(21)..(22)..(23): Xaa is A or G
  MOD_RES (24)..(25)..(26)..(27): Xaa is A or G or is absent
PKAXXVPTELSATSMLYYXXXXXXXXXLRKHREMVVE

SEQ ID NO: 7770 - protein, 37 aa, Artificial Sequence
  GFR-binding peptide
  MOD_RES (3)..(4)..(35)..(37): Xaa is C or S
SPXXVSQDLSPISILYKIGKTPKILKYHYMIVKSXKX

SEQ ID NO: 7771 - protein, 36 aa, Artificial Sequence
  GFR-binding peptide
  MOD_RES (4)..(5)..(36): Xaa is C or S
AAPXXVPQALNAISILYFVGRKPKVLKKYRMIVRSX

SEQ ID NO: 7772 - protein, 42 aa, Artificial Sequence
  GFR-binding peptide
  MOD_RES (6)..(7)..(40)..(42): Xaa is C or S
KVGKAXXVPTKLSATSVLYYDDMGVPTLRKHREGMSVAEXGX

SEQ ID NO: 7773 - protein, 36 aa, Artificial Sequence
  GFR-binding peptide
  MOD_RES (1)..(2)..(36): Xaa is C or S
  MOD_RES (16)..(17)..(18)..(19)..(20): Xaa is A or G
  MOD_RES (21)..(22)..(23)..(24): Xaa is A or G or is absent
XXAPTQLSATSVLYYXXXXXXXXXLRKHRNMVVRAX

SEQ ID NO: 7774 - protein, 41 aa, Artificial Sequence
  GFR-binding peptide
  MOD_RES (2)..(3)..(38)..(40): Xaa is C or S
  MOD_RES (17)..(18)..(19)..(20)..(21): Xaa is A or G
  MOD_RES (22)..(23)..(24)..(25): Xaa is A or G or is absent
AXXVPTKLNAISVLYFXXXXXXXXXLKKYREGMSVAEXGXR

SEQ ID NO: 7775 - protein, 36 aa, Artificial Sequence
  GFR-binding peptide
  MOD_RES (2)..(3)..(35): Xaa is C or S
AXXAPTKLNAISVLYFDSSNNVILKKYRNMVVKAXG

SEQ ID NO: 7776 - protein, 38 aa, Artificial Sequence
  GFR-binding peptide
  MOD_RES (5)..(6)..(37): Xaa is C or S
SAAPXXVPQALSPISILYKVGRKPKVLKYHYMIVRSXK

SEQ ID NO: 7777 - protein, 34 aa, Artificial Sequence
  GFR-binding peptide
  MOD_RES (33)..(33): Xaa is C or S
  MOD_RES (14)..(15)..(16)..(17)..(18): Xaa is A or G
  MOD_RES (19)..(20)..(21)..(22): Xaa is A or G or is absent
VSQDLSAISILYLXXXXXXXXXLKNYQMIVKSXK

SEQ ID NO: 7778 - protein, 38 aa, Artificial Sequence
  GFR-binding peptide
  MOD_RES (3)..(4)..(36)..(38): Xaa is C or S
KPXXAPTKLSAISVLYLDDSSNVILKNYQNMVVRSXGX

SEQ ID NO: 7779 - protein, 39 aa, Artificial Sequence
  GFR-binding peptide
  MOD_RES (6)..(7): Xaa is C or S
  MOD_RES (21)..(22)..(23)..(24)..(25): Xaa is A or G
  MOD_RES (26)..(27)..(28)..(29): Xaa is A or G or is absent
ASASPXXVPQDLSATSILYYXXXXXXXXXLRKHRMVVKS

SEQ ID NO: 7780 - protein, 37 aa, Artificial Sequence
  GFR-binding peptide
  MOD_RES (5)..(6)..(37): Xaa is C or S
SASPXXVPQDLSAISILYLVGRTPKVLKNYQMVVKSX

SEQ ID NO: 7781 - protein, 39 aa, Artificial Sequence
  GFR-binding peptide
  MOD_RES (4)..(5)..(39): Xaa is C or S
  MOD_RES (19)..(20)..(21)..(22)..(23): Xaa is A or G
  MOD_RES (24)..(25)..(26)..(27): Xaa is A or G or is absent
PKPXXAPTKLNAISVLYFXXXXXXXXXLKKYRNMVVRSX

SEQ ID NO: 7782 - protein, 42 aa, Artificial Sequence
  GFR-binding peptide
  MOD_RES (5)..(6)..(39)..(41): Xaa is C or S
  MOD_RES (20)..(21)..(22)..(23)..(24): Xaa is A or G
  MOD_RES (25)..(26)..(27)..(28): Xaa is A or G or is absent
SASPXXVSQDLSATSILYYXXXXXXXXXLRKHRMIVKSXKXS

SEQ ID NO: 7783 - protein, 38 aa, Artificial Sequence
  GFR-binding peptide
  MOD_RES (1)..(38): Xaa is C or S
XRPTQVQLSPISVLYKEIVRKKPIFLKYHYTLEDHLAX

SEQ ID NO: 7784 - protein, 34 aa, Artificial Sequence
  GFR-binding peptide
  MOD_RES (2)..(2): Xaa is C or S
  MOD_RES (16)..(17)..(18)..(19)..(20): Xaa is A or G
  MOD_RES (21)..(22)..(23)..(24): Xaa is A or G or is absent
TXAPTKLSAISVLYLXXXXXXXXXLKNYQNMVVR

SEQ ID NO: 7785 - protein, 37 aa, Artificial Sequence
  GFR-binding peptide
  MOD_RES (3)..(4)..(35)..(37): Xaa is C or S
SPXXVSQDLSATSILYYIGKTPKILRKHRMIVKSXKX

SEQ ID NO: 7786 - protein, 36 aa, Artificial Sequence
  GFR-binding peptide
  MOD_RES (1)..(2)..(36): Xaa is C or S
  MOD_RES (16)..(17)..(18)..(19)..(20): Xaa is A or G
  MOD_RES (21)..(22)..(23)..(24): Xaa is A or G or is absent
XXVPTELSATSMLYYXXXXXXXXXLRKHREMVVEGX

SEQ ID NO: 7787 - protein, 37 aa, Artificial Sequence
  GFR-binding peptide
  MOD_RES (1)..(2)..(36): Xaa is C or S
  MOD_RES (16)..(17)..(18)..(19)..(20): Xaa is A or G
  MOD_RES (21)..(22)..(23)..(24): Xaa is A or G or is absent
XXAPTQLNAISVLYFXXXXXXXXXLKKYRNMVVRAXG

SEQ ID NO: 7788 - protein, 40 aa, Artificial Sequence
  GFR-binding peptide
  MOD_RES (4)..(4): Xaa is C or S
NVQXRPTQVQLSATSVLYYEIVRKKPIFLRKHRTLEDHLA

SEQ ID NO: 7789 - protein, 33 aa, Artificial Sequence
  GFR-binding peptide
  MOD_RES (15)..(16)..(17)..(18)..(19): Xaa is A or G
  MOD_RES (20)..(21)..(22)..(23): Xaa is A or G or is absent
PTQVQLSAISVLYLXXXXXXXXXLKNYQTLEDH

SEQ ID NO: 7790 - protein, 36 aa, Artificial Sequence
  GFR-binding peptide
  MOD_RES (1)..(36): Xaa is C or S
  MOD_RES (15)..(16)..(17)..(18)..(19): Xaa is A or G
  MOD_RES (20)..(21)..(22)..(23): Xaa is A or G or is absent
XVPTKLSPISVLYKXXXXXXXXXLKYHYEGMSVAEX

SEQ ID NO: 7791 - protein, 32 aa, Artificial Sequence
  GFR-binding peptide
  MOD_RES (32)..(32): Xaa is C or S
APTKLSAISVLYLDSSNNVILKNYQNMVVKAX

SEQ ID NO: 7792 - protein, 34 aa, Artificial Sequence
  GFR-binding peptide
  MOD_RES (1)..(33): Xaa is C or S
XVPTELSATSMLYYDEYDKVVLRKHREMVVEGXG

SEQ ID NO: 7793 - protein, 41 aa, Artificial Sequence
  GFR-binding peptide
  MOD_RES (4)..(5)..(39)..(41): Xaa is C or S
  MOD_RES (19)..(20)..(21)..(22)..(23): Xaa is A or G
  MOD_RES (24)..(25)..(26)..(27): Xaa is A or G or is absent
PKPXXAPTQLNAISVLYFXXXXXXXXXLKKYRNMVVRAXGX

SEQ ID NO: 7794 - protein, 33 aa, Artificial Sequence
  GFR-binding peptide
  MOD_RES (33)..(33): Xaa is C or S
  MOD_RES (14)..(15)..(16)..(17)..(18): Xaa is A or G
  MOD_RES (19)..(20)..(21)..(22): Xaa is A or G or is absent
VPQALSPISILYKXXXXXXXXXLKYHYMIVRSX

SEQ ID NO: 7795 - protein, 35 aa, Artificial Sequence
  GFR-binding peptide
  MOD_RES (2)..(3): Xaa is C or S
  MOD_RES (17)..(18)..(19)..(20)..(21): Xaa is A or G
  MOD_RES (22)..(23)..(24)..(25): Xaa is A or G or is absent
PXXAPTQLSPISVLYKXXXXXXXXXLKYHYNMVVR

SEQ ID NO: 7796 - protein, 37 aa, Artificial Sequence
  GFR-binding peptide
  MOD_RES (2)..(3)..(36): Xaa is C or S
  MOD_RES (17)..(18)..(19)..(20)..(21): Xaa is A or G
  MOD_RES (22)..(23)..(24)..(25): Xaa is A or G or is absent
PXXVPQDLSPISILYKXXXXXXXXXLKYHYMVVKSXK

SEQ ID NO: 7797 - protein, 44 aa, Artificial Sequence
  GFR-binding peptide
  MOD_RES (6)..(7)..(41)..(43): Xaa is C or S
  MOD_RES (21)..(22)..(23)..(24)..(25): Xaa is A or G
  MOD_RES (26)..(27)..(28)..(29): Xaa is A or G or is absent
KIPKAXXVPTELSATSMLYYXXXXXXXXXLRKHRDMVVEGXGXR

SEQ ID NO: 7798 - protein, 39 aa, Artificial Sequence
  GFR-binding peptide
  MOD_RES (5)..(6)..(39): Xaa is C or S
VGKAXXVPTKLSAISVLYLDDMGVPTLKNYQEGMSVAEX

SEQ ID NO: 7799 - protein, 43 aa, Artificial Sequence
  GFR-binding peptide
  MOD_RES (6)..(7)..(41)..(43): Xaa is C or S
  MOD_RES (21)..(22)..(23)..(24)..(25): Xaa is A or G
  MOD_RES (26)..(27)..(28)..(29): Xaa is A or G or is absent
YVPKPXXAPTKLSATSVLYYXXXXXXXXXLRKHRNMVVRSXGX

SEQ ID NO: 7800 - protein, 38 aa, Artificial Sequence
  GFR-binding peptide
  MOD_RES (4)..(5)..(38): Xaa is C or S
  MOD_RES (19)..(20)..(21)..(22)..(23): Xaa is A or G
  MOD_RES (24)..(25)..(26)..(27): Xaa is A or G or is absent
AAPXXVPQALSPISILYKXXXXXXXXXLKYHYMIVRSX

SEQ ID NO: 7801 - protein, 42 aa, Artificial Sequence
  GFR-binding peptide
  MOD_RES (4)..(5)..(39)..(41): Xaa is C or S
  MOD_RES (19)..(20)..(21)..(22)..(23): Xaa is A or G
  MOD_RES (24)..(25)..(26)..(27): Xaa is A or G or is absent
PKAXXVPTELSAISMLYLXXXXXXXXXLKNYQDMVVEGXGXR

SEQ ID NO: 7802 - protein, 36 aa, Artificial Sequence
  GFR-binding peptide
  MOD_RES (1)..(1): Xaa is C or S
XRPTQVQLSAISVLYLEIVRKKPIFLKNYQTLEDHL

SEQ ID NO: 7803 - protein, 33 aa, Artificial Sequence
  GFR-binding peptide
  MOD_RES (1)..(2)..(33): Xaa is C or S
XXVPQALSATSILYYVGRKPKVLRKHRMIVRSX

SEQ ID NO: 7804 - protein, 36 aa, Artificial Sequence
  GFR-binding peptide
  MOD_RES (35)..(35): Xaa is C or S
  MOD_RES (14)..(15)..(16)..(17)..(18): Xaa is A or G
  MOD_RES (19)..(20)..(21)..(22): Xaa is A or G or is absent
VPTKLSPISVLYKXXXXXXXXXLKYHYEGMSVAEXG

SEQ ID NO: 7805 - protein, 37 aa, Artificial Sequence
  GFR-binding peptide
  MOD_RES (1)..(2)..(35)..(37): Xaa is C or S
XXVPTKLSATSVLYYDDMGVPTLRKHREGMSVAEXGX

SEQ ID NO: 7806 - protein, 40 aa, Artificial Sequence
  GFR-binding peptide
  MOD_RES (2)..(3)..(37)..(39): Xaa is C or S
  MOD_RES (17)..(18)..(19)..(20)..(21): Xaa is A or G
  MOD_RES (22)..(23)..(24)..(25): Xaa is A or G or is absent
AXXVPTELSAISMLYLXXXXXXXXXLKNYQDMVVEGXGXR

SEQ ID NO: 7807 - protein, 37 aa, Artificial Sequence
  GFR-binding peptide
  MOD_RES (1)..(1): Xaa is C or S
  MOD_RES (17)..(18)..(19)..(20)..(21): Xaa is A or G
  MOD_RES (22)..(23)..(24)..(25): Xaa is A or G or is absent
XRPTQVQLSPISVLYKXXXXXXXXXLKYHYTLEDHLA

SEQ ID NO: 7808 - protein, 40 aa, Artificial Sequence
  GFR-binding peptide
  MOD_RES (5)..(6)..(40): Xaa is C or S
  MOD_RES (20)..(21)..(22)..(23)..(24): Xaa is A or G
  MOD_RES (25)..(26)..(27)..(28): Xaa is A or G or is absent
VPKPXXAPTKLSAISVLYLXXXXXXXXXLKNYQNMVVRSX

SEQ ID NO: 7809 - protein, 40 aa, Artificial Sequence
  GFR-binding peptide
  MOD_RES (5)..(6)..(39): Xaa is C or S
  MOD_RES (20)..(21)..(22)..(23)..(24): Xaa is A or G
  MOD_RES (25)..(26)..(27)..(28): Xaa is A or G or is absent
SASPXXVPQDLNAISILYFXXXXXXXXXLKKYRMVVKSXK

SEQ ID NO: 7810 - protein, 41 aa, Artificial Sequence
  GFR-binding peptide
  MOD_RES (3)..(40): Xaa is C or S
VQXRPTQVQLNAISVLYFEIVRKKPIFLKKYRTLEDHLAXK

SEQ ID NO: 7811 - protein, 35 aa, Artificial Sequence
  GFR-binding peptide
  MOD_RES (1)..(2): Xaa is C or S
  MOD_RES (16)..(17)..(18)..(19)..(20): Xaa is A or G
  MOD_RES (21)..(22)..(23)..(24): Xaa is A or G or is absent
XXVPTELSATSMLYYXXXXXXXXXLRKHREMVVEG

SEQ ID NO: 7812 - protein, 36 aa, Artificial Sequence
  GFR-binding peptide
  MOD_RES (1)..(35): Xaa is C or S
  MOD_RES (15)..(16)..(17)..(18)..(19): Xaa is A or G
  MOD_RES (20)..(21)..(22)..(23): Xaa is A or G or is absent
XVPTELSATSMLYYXXXXXXXXXLRKHREMVVEGXG

SEQ ID NO: 7813 - protein, 39 aa, Artificial Sequence
  GFR-binding peptide
  MOD_RES (6)..(7): Xaa is C or S
  MOD_RES (21)..(22)..(23)..(24)..(25): Xaa is A or G
  MOD_RES (26)..(27)..(28)..(29): Xaa is A or G or is absent
AVPKAXXAPTKLNAISVLYFXXXXXXXXXLKKYRNMVVK

SEQ ID NO: 7814 - protein, 42 aa, Artificial Sequence
  GFR-binding peptide
  MOD_RES (6)..(7)..(42): Xaa is C or S
  MOD_RES (21)..(22)..(23)..(24)..(25): Xaa is A or G
  MOD_RES (26)..(27)..(28)..(29): Xaa is A or G or is absent
KVGKAXXVPTKLNAISVLYFXXXXXXXXXLKKYREGMSVAEX

SEQ ID NO: 7815 - protein, 40 aa, Artificial Sequence
  GFR-binding peptide
  MOD_RES (6)..(7)..(40): Xaa is C or S
  MOD_RES (21)..(22)..(23)..(24)..(25): Xaa is A or G
  MOD_RES (26)..(27)..(28)..(29): Xaa is A or G or is absent
ASAAPXXVPQALSATSILYYXXXXXXXXXLRKHRMIVRSX

SEQ ID NO: 7816 - protein, 35 aa, Artificial Sequence
  GFR-binding peptide
  MOD_RES (33)..(35): Xaa is C or S
  MOD_RES (14)..(15)..(16)..(17)..(18): Xaa is A or G
  MOD_RES (19)..(20)..(21)..(22): Xaa is A or G or is absent
VPQALSAISILYLXXXXXXXXXLKNYQMIVRSXKX

SEQ ID NO: 7817 - protein, 38 aa, Artificial Sequence
  GFR-binding peptide
  MOD_RES (2)..(3)..(35)..(37): Xaa is C or S
AXXVPTELNAISMLYFDENEKVVLKKYRDMVVEGXGXR

SEQ ID NO: 7818 - protein, 36 aa, Artificial Sequence
  GFR-binding peptide
  MOD_RES (33)..(35): Xaa is C or S
  MOD_RES (14)..(15)..(16)..(17)..(18): Xaa is A or G
  MOD_RES (19)..(20)..(21)..(22): Xaa is A or G or is absent
VSQDLSAISILYLXXXXXXXXXLKNYQMIVKSXKXS

SEQ ID NO: 7819 - protein, 35 aa, Artificial Sequence
  GFR-binding peptide
  MOD_RES (2)..(34): Xaa is C or S
TXAPTKLSAISVLYLDDSSNVILKNYQNMVVRSXG

SEQ ID NO: 7820 - protein, 34 aa, Artificial Sequence
  GFR-binding peptide
  MOD_RES (4)..(4): Xaa is C or S
KPTXAPTKLSATSVLYYDDSSNVILRKHRNMVVR

SEQ ID NO: 7821 - protein, 40 aa, Artificial Sequence
  GFR-binding peptide
  MOD_RES (3)..(4)..(38)..(40): Xaa is C or S
  MOD_RES (18)..(19)..(20)..(21)..(22): Xaa is A or G
  MOD_RES (23)..(24)..(25)..(26): Xaa is A or G or is absent
KPXXAPTQLSPISVLYKXXXXXXXXXLKYHYNMVVRAXGX

SEQ ID NO: 7822 - protein, 37 aa, Artificial Sequence
  GFR-binding peptide
  MOD_RES (3)..(4)..(37): Xaa is C or S
  MOD_RES (18)..(19)..(20)..(21)..(22): Xaa is A or G
  MOD_RES (23)..(24)..(25)..(26): Xaa is A or G or is absent
APXXVPQALSPISILYKXXXXXXXXXLKYHYMIVRSX

SEQ ID NO: 7823 - protein, 32 aa, Artificial Sequence
  GFR-binding peptide
  MOD_RES (31)..(31): Xaa is C or S
VPQALNAISILYFVGRKPKVLKKYRMIVRSXK

SEQ ID NO: 7824 - protein, 33 aa, Artificial Sequence
  GFR-binding peptide
  MOD_RES (1)..(1): Xaa is C or S
  MOD_RES (15)..(16)..(17)..(18)..(19): Xaa is A or G
  MOD_RES (20)..(21)..(22)..(23): Xaa is A or G or is absent
XVPTELSAISMLYLXXXXXXXXXLKNYQDMVVE

SEQ ID NO: 7825 - protein, 35 aa, Artificial Sequence
  GFR-binding peptide
  MOD_RES (3)..(4)..(35): Xaa is C or S
SPXXVSQDLSPISILYKIGKTPKILKYHYMIVKSX

SEQ ID NO: 7826 - protein, 35 aa, Artificial Sequence
  GFR-binding peptide
  MOD_RES (3)..(4): Xaa is C or S
KAXXAPTKLSAISVLYLDSSNNVILKNYQNMVVKA

SEQ ID NO: 7827 - protein, 34 aa, Artificial Sequence
  GFR-binding peptide
  MOD_RES (1)..(1): Xaa is C or S
  MOD_RES (15)..(16)..(17)..(18)..(19): Xaa is A or G
  MOD_RES (20)..(21)..(22)..(23): Xaa is A or G or is absent
XVPTELSATSMLYYXXXXXXXXXLRKHREMVVEG

SEQ ID NO: 7828 - protein, 35 aa, Artificial Sequence
  GFR-binding peptide
  MOD_RES (2)..(3): Xaa is C or S
  MOD_RES (17)..(18)..(19)..(20)..(21): Xaa is A or G
  MOD_RES (22)..(23)..(24)..(25): Xaa is A or G or is absent
AXXAPTKLSPISVLYKXXXXXXXXXLKYHYNMVVK

SEQ ID NO: 7829 - protein, 40 aa, Artificial Sequence
  GFR-binding peptide
  MOD_RES (2)..(3)..(37)..(39): Xaa is C or S
  MOD_RES (17)..(18)..(19)..(20)..(21): Xaa is A or G
  MOD_RES (22)..(23)..(24)..(25): Xaa is A or G or is absent
PXXAPTKLSAISVLYLXXXXXXXXXLKNYQNMVVRSXGXH

SEQ ID NO: 7830 - protein, 35 aa, Artificial Sequence
  GFR-binding peptide
  MOD_RES (3)..(4): Xaa is C or S
KPXXAPTKLSATSVLYYDDSSNVILRKHRNMVVRS

SEQ ID NO: 7831 - protein, 33 aa, Artificial Sequence
  GFR-binding peptide
TQVQLNAISVLYFEIVRKKPIFLKKYRTLEDHL

SEQ ID NO: 7832 - protein, 39 aa, Artificial Sequence
  GFR-binding peptide
  MOD_RES (4)..(5)..(39): Xaa is C or S
  MOD_RES (19)..(20)..(21)..(22)..(23): Xaa is A or G
  MOD_RES (24)..(25)..(26)..(27): Xaa is A or G or is absent
PKAXXVPTELNAISMLYFXXXXXXXXXLKKYRDMVVEGX

SEQ ID NO: 7833 - protein, 38 aa, Artificial Sequence
  GFR-binding peptide
  MOD_RES (35)..(37): Xaa is C or S
  MOD_RES (14)..(15)..(16)..(17)..(18): Xaa is A or G
  MOD_RES (19)..(20)..(21)..(22): Xaa is A or G or is absent
VPTKLSAISVLYLXXXXXXXXXLKNYQEGMSVAEXGXR

SEQ ID NO: 7834 - protein, 43 aa, Artificial Sequence
  GFR-binding peptide
  MOD_RES (3)..(40)..(42): Xaa is C or S
VQXRPTQVQLSPISVLYKEIVRKKPIFLKYHYTLEDHLAXKXE

SEQ ID NO: 7835 - protein, 37 aa, Artificial Sequence
  GFR-binding peptide
  MOD_RES (5)..(6)..(37): Xaa is C or S
SAAPXXVPQALSPISILYKVGRKPKVLKYHYMIVRSX

SEQ ID NO: 7836 - protein, 39 aa, Artificial Sequence
  GFR-binding peptide
  MOD_RES (3)..(4)..(37)..(39): Xaa is C or S
  MOD_RES (18)..(19)..(20)..(21)..(22): Xaa is A or G
  MOD_RES (23)..(24)..(25)..(26): Xaa is A or G or is absent
SPXXVPQDLSATSILYYXXXXXXXXXLRKHRMVVKSXKX

SEQ ID NO: 7837 - protein, 39 aa, Artificial Sequence
  GFR-binding peptide
  MOD_RES (1)..(2)..(36)..(38): Xaa is C or S
  MOD_RES (16)..(17)..(18)..(19)..(20): Xaa is A or G
  MOD_RES (21)..(22)..(23)..(24): Xaa is A or G or is absent
XXAPTKLSPISVLYKXXXXXXXXXLKYHYNMVVKAXGXH

SEQ ID NO: 7838 - protein, 41 aa, Artificial Sequence
  GFR-binding peptide
  MOD_RES (6)..(7): Xaa is C or S
  MOD_RES (21)..(22)..(23)..(24)..(25): Xaa is A or G
  MOD_RES (26)..(27)..(28)..(29): Xaa is A or G or is absent
KVGKAXXVPTKLNAISVLYFXXXXXXXXXLKKYREGMSVAE

SEQ ID NO: 7839 - protein, 35 aa, Artificial Sequence
  GFR-binding peptide
  MOD_RES (2)..(3): Xaa is C or S
  MOD_RES (17)..(18)..(19)..(20)..(21): Xaa is A or G
  MOD_RES (22)..(23)..(24)..(25): Xaa is A or G or is absent
PXXVPQDLSAISILYLXXXXXXXXXLKNYQMVVKS

SEQ ID NO: 7840 - protein, 38 aa, Artificial Sequence
  GFR-binding peptide
  MOD_RES (4)..(5)..(36)..(38): Xaa is C or S
ASPXXVSQDLSATSILYYIGKTPKILRKHRMIVKSXKX

SEQ ID NO: 7841 - protein, 37 aa, Artificial Sequence
  GFR-binding peptide
  MOD_RES (34)..(36): Xaa is C or S
  MOD_RES (14)..(15)..(16)..(17)..(18): Xaa is A or G
  MOD_RES (19)..(20)..(21)..(22): Xaa is A or G or is absent
APTQLSPISVLYKXXXXXXXXXLKYHYNMVVRAXGXH

SEQ ID NO: 7842 - protein, 33 aa, Artificial Sequence
  GFR-binding peptide
  MOD_RES (14)..(15)..(16)..(17)..(18): Xaa is A or G
  MOD_RES (19)..(20)..(21)..(22): Xaa is A or G or is absent
VPTELSATSMLYYXXXXXXXXXLRKHREMVVEG

SEQ ID NO: 7843 - protein, 36 aa, Artificial Sequence
  GFR-binding peptide
  MOD_RES (34)..(36): Xaa is C or S
  MOD_RES (14)..(15)..(16)..(17)..(18): Xaa is A or G
  MOD_RES (19)..(20)..(21)..(22): Xaa is A or G or is absent
APTKLNAISVLYFXXXXXXXXXLKKYRNMVVRSXGX

SEQ ID NO: 7844 - protein, 38 aa, Artificial Sequence
  GFR-binding peptide
  MOD_RES (4)..(5): Xaa is C or S
  MOD_RES (19)..(20)..(21)..(22)..(23): Xaa is A or G
  MOD_RES (24)..(25)..(26)..(27): Xaa is A or G or is absent
PKAXXVPTELSAISMLYLXXXXXXXXXLKNYQEMVVEG

SEQ ID NO: 7845 - protein, 30 aa, Artificial Sequence
  GFR-binding peptide
VSQDLSAISILYLIGKTPKILKNYQMIVKS

SEQ ID NO: 7846 - protein, 38 aa, Artificial Sequence
  GFR-binding peptide
  MOD_RES (1)..(2)..(36)..(38): Xaa is C or S
  MOD_RES (16)..(17)..(18)..(19)..(20): Xaa is A or G
  MOD_RES (21)..(22)..(23)..(24): Xaa is A or G or is absent
XXAPTQLSAISVLYLXXXXXXXXXLKNYQNMVVRAXGX

SEQ ID NO: 7847 - protein, 36 aa, Artificial Sequence
  GFR-binding peptide
  MOD_RES (3)..(4): Xaa is C or S
  MOD_RES (18)..(19)..(20)..(21)..(22): Xaa is A or G
  MOD_RES (23)..(24)..(25)..(26): Xaa is A or G or is absent
APXXVPQALNAISILYFXXXXXXXXXLKKYRMIVRS

SEQ ID NO: 7848 - protein, 39 aa, Artificial Sequence
  GFR-binding peptide
  MOD_RES (6)..(38): Xaa is C or S
VTKPTXAPTKLSPISVLYKDDSSNVILKYHYNMVVRSXG

SEQ ID NO: 7849 - protein, 35 aa, Artificial Sequence
  GFR-binding peptide
  MOD_RES (4)..(4): Xaa is C or S
KPTXAPTKLSATSVLYYDDSSNVILRKHRNMVVRS

SEQ ID NO: 7850 - protein, 38 aa, Artificial Sequence
  GFR-binding peptide
  MOD_RES (2)..(3)..(35)..(37): Xaa is C or S
PXXAPTQLSATSVLYYDDSSNVILRKHRNMVVRAXGXH

SEQ ID NO: 7851 - protein, 41 aa, Artificial Sequence
  GFR-binding peptide
  MOD_RES (4)..(41): Xaa is C or S
NVQXRPTQVQLSAISVLYLEIVRKKPIFLKNYQTLEDHLAX

SEQ ID NO: 7852 - protein, 40 aa, Artificial Sequence
  GFR-binding peptide
  MOD_RES (4)..(5)..(40): Xaa is C or S
  MOD_RES (19)..(20)..(21)..(22)..(23): Xaa is A or G
  MOD_RES (24)..(25)..(26)..(27): Xaa is A or G or is absent
GKAXXVPTKLSATSVLYYXXXXXXXXXLRKHREGMSVAEX

SEQ ID NO: 7853 - protein, 42 aa, Artificial Sequence
  GFR-binding peptide
  MOD_RES (2)..(39)..(41): Xaa is C or S
  MOD_RES (18)..(19)..(20)..(21)..(22): Xaa is A or G
  MOD_RES (23)..(24)..(25)..(26): Xaa is A or G or is absent
QXRPTQVQLSPISVLYKXXXXXXXXXLKYHYTLEDHLAXKXE

SEQ ID NO: 7854 - protein, 40 aa, Artificial Sequence
  GFR-binding peptide
  MOD_RES (6)..(7)..(38)..(40): Xaa is C or S
ASASPXXVSQDLNAISILYFIGKTPKILKKYRMIVKSXKX

SEQ ID NO: 7855 - protein, 38 aa, Artificial Sequence
  GFR-binding peptide
  MOD_RES (5)..(6)..(38): Xaa is C or S
VPKAXXAPTKLSAISVLYLDSSNNVILKNYQNMVVKAX

SEQ ID NO: 7856 - protein, 34 aa, Artificial Sequence
  GFR-binding peptide
  MOD_RES (1)..(34): Xaa is C or S
  MOD_RES (15)..(16)..(17)..(18)..(19): Xaa is A or G
  MOD_RES (20)..(21)..(22)..(23): Xaa is A or G or is absent
XVPQALNAISILYFXXXXXXXXXLKKYRMIVRSX

SEQ ID NO: 7857 - protein, 38 aa, Artificial Sequence
  GFR-binding peptide
  MOD_RES (6)..(7)..(38): Xaa is C or S
ASASPXXVSQDLNAISILYFIGKTPKILKKYRMIVKSX

SEQ ID NO: 7858 - protein, 37 aa, Artificial Sequence
  GFR-binding peptide
  MOD_RES (1)..(36): Xaa is C or S
  MOD_RES (15)..(16)..(17)..(18)..(19): Xaa is A or G
  MOD_RES (20)..(21)..(22)..(23): Xaa is A or G or is absent
XVPTKLNAISVLYFXXXXXXXXXLKKYREGMSVAEXG

SEQ ID NO: 7859 - protein, 36 aa, Artificial Sequence
  GFR-binding peptide
  MOD_RES (1)..(2)..(36): Xaa is C or S
  MOD_RES (16)..(17)..(18)..(19)..(20): Xaa is A or G
  MOD_RES (21)..(22)..(23)..(24): Xaa is A or G or is absent
XXAPTKLSAISVLYLXXXXXXXXXLKNYQNMVVKAX

SEQ ID NO: 7860 - protein, 39 aa, Artificial Sequence
  GFR-binding peptide
  MOD_RES (5)..(6)..(37)..(39): Xaa is C or S
SASPXXVPQDLNAISILYFVGRTPKVLKKYRMVVKSXKX

SEQ ID NO: 7861 - protein, 38 aa, Artificial Sequence
  GFR-binding peptide
  MOD_RES (3)..(4)..(37): Xaa is C or S
KAXXVPTKLNAISVLYFDDMGVPTLKKYREGMSVAEXG

SEQ ID NO: 7862 - protein, 37 aa, Artificial Sequence
  GFR-binding peptide
  MOD_RES (2)..(2): Xaa is C or S
  MOD_RES (18)..(19)..(20)..(21)..(22): Xaa is A or G
  MOD_RES (23)..(24)..(25)..(26): Xaa is A or G or is absent
QXRPTQVQLSPISVLYKXXXXXXXXXLKYHYTLEDHL

SEQ ID NO: 7863 - protein, 34 aa, Artificial Sequence
  GFR-binding peptide
  MOD_RES (3)..(4): Xaa is C or S
SPXXVPQDLSAISILYLVGRTPKVLKNYQMVVKS

SEQ ID NO: 7864 - protein, 38 aa, Artificial Sequence
  GFR-binding peptide
  MOD_RES (2)..(2): Xaa is C or S
  MOD_RES (18)..(19)..(20)..(21)..(22): Xaa is A or G
  MOD_RES (23)..(24)..(25)..(26): Xaa is A or G or is absent
QXRPTQVQLSAISVLYLXXXXXXXXXLKNYQTLEDHLA

SEQ ID NO: 7865 - protein, 42 aa, Artificial Sequence
  GFR-binding peptide
  MOD_RES (5)..(6)..(40)..(42): Xaa is C or S
  MOD_RES (20)..(21)..(22)..(23)..(24): Xaa is A or G
  MOD_RES (25)..(26)..(27)..(28): Xaa is A or G or is absent
IPKAXXVPTELSAISMLYLXXXXXXXXXLKNYQEMVVEGXGX

SEQ ID NO: 7866 - protein, 41 aa, Artificial Sequence
  GFR-binding peptide
  MOD_RES (5)..(6)..(40): Xaa is C or S
  MOD_RES (20)..(21)..(22)..(23)..(24): Xaa is A or G
  MOD_RES (25)..(26)..(27)..(28): Xaa is A or G or is absent
IPKAXXVPTELNAISMLYFXXXXXXXXXLKKYREMVVEGXG

SEQ ID NO: 7867 - protein, 38 aa, Artificial Sequence
  GFR-binding peptide
  MOD_RES (4)..(5)..(36)..(38): Xaa is C or S
ASPXXVPQDLSPISILYKVGRTPKVLKYHYMVVKSXKX

SEQ ID NO: 7868 - protein, 35 aa, Artificial Sequence
  GFR-binding peptide
  MOD_RES (2)..(3): Xaa is C or S
  MOD_RES (17)..(18)..(19)..(20)..(21): Xaa is A or G
  MOD_RES (22)..(23)..(24)..(25): Xaa is A or G or is absent
AXXAPTKLSAISVLYLXXXXXXXXXLKNYQNMVVK

SEQ ID NO: 7869 - protein, 44 aa, Artificial Sequence
  GFR-binding peptide
  MOD_RES (5)..(42)..(44): Xaa is C or S
  MOD_RES (21)..(22)..(23)..(24)..(25): Xaa is A or G
  MOD_RES (26)..(27)..(28)..(29): Xaa is A or G or is absent
RNVQXRPTQVQLSATSVLYYXXXXXXXXXLRKHRTLEDHLAXKX

SEQ ID NO: 7870 - protein, 37 aa, Artificial Sequence
  GFR-binding peptide
  MOD_RES (4)..(5)..(37): Xaa is C or S
PKAXXVPTELSPISMLYKDEYDKVVLKYHYEMVVEGX

SEQ ID NO: 7871 - protein, 38 aa, Artificial Sequence
  GFR-binding peptide
  MOD_RES (2)..(2): Xaa is C or S
  MOD_RES (18)..(19)..(20)..(21)..(22): Xaa is A or G
  MOD_RES (23)..(24)..(25)..(26): Xaa is A or G or is absent
QXRPTQVQLSATSVLYYXXXXXXXXXLRKHRTLEDHLA

SEQ ID NO: 7872 - protein, 37 aa, Artificial Sequence
  GFR-binding peptide
  MOD_RES (5)..(5): Xaa is C or S
  MOD_RES (19)..(20)..(21)..(22)..(23): Xaa is A or G
  MOD_RES (24)..(25)..(26)..(27): Xaa is A or G or is absent
TKPTXAPTKLSATSVLYYXXXXXXXXXLRKHRNMVVR

SEQ ID NO: 7873 - protein, 37 aa, Artificial Sequence
  GFR-binding peptide
  MOD_RES (5)..(37): Xaa is C or S
TKPTXAPTKLSATSVLYYDDSSNVILRKHRNMVVRSX

SEQ ID NO: 7874 - protein, 36 aa, Artificial Sequence
  GFR-binding peptide
  MOD_RES (1)..(2)..(33)..(35): Xaa is C or S
XXVPQALSAISILYLVGRKPKVLKNYQMIVRSXKXS

SEQ ID NO: 7875 - protein, 36 aa, Artificial Sequence
  GFR-binding peptide
  MOD_RES (3)..(4)..(36): Xaa is C or S
KAXXVPTELNAISMLYFDEYDKVVLKKYREMVVEGX

SEQ ID NO: 7876 - protein, 37 aa, Artificial Sequence
  GFR-binding peptide
  MOD_RES (35)..(37): Xaa is C or S
TQVQLSAISVLYLEIVRKKPIFLKNYQTLEDHLAXKX

SEQ ID NO: 7877 - protein, 36 aa, Artificial Sequence
  GFR-binding peptide
  MOD_RES (5)..(6): Xaa is C or S
VPKPXXAPTQLSAISVLYLDDSSNVILKNYQNMVVR

SEQ ID NO: 7878 - protein, 40 aa, Artificial Sequence
  GFR-binding peptide
  MOD_RES (1)..(2)..(37)..(39): Xaa is C or S
  MOD_RES (16)..(17)..(18)..(19)..(20): Xaa is A or G
  MOD_RES (21)..(22)..(23)..(24): Xaa is A or G or is absent
XXVPTKLSAISVLYLXXXXXXXXXLKNYQEGMSVAEXGXR

SEQ ID NO: 7879 - protein, 37 aa, Artificial Sequence
  GFR-binding peptide
  MOD_RES (1)..(2)..(34)..(36): Xaa is C or S
XXVPTELSPISMLYKDENEKVVLKYHYDMVVEGXGXR

SEQ ID NO: 7880 - protein, 35 aa, Artificial Sequence
  GFR-binding peptide
  MOD_RES (3)..(4)..(35): Xaa is C or S
SPXXVPQDLSPISILYKVGRTPKVLKYHYMVVKSX

SEQ ID NO: 7881 - protein, 35 aa, Artificial Sequence
  GFR-binding peptide
  MOD_RES (4)..(5): Xaa is C or S
AAPXXVPQALSAISILYLVGRKPKVLKNYQMIVRS

SEQ ID NO: 7882 - protein, 35 aa, Artificial Sequence
  GFR-binding peptide
RPTQVQLNAISVLYFEIVRKKPIFLKKYRTLEDHL

SEQ ID NO: 7883 - protein, 38 aa, Artificial Sequence
  GFR-binding peptide
  MOD_RES (4)..(5): Xaa is C or S
  MOD_RES (19)..(20)..(21)..(22)..(23): Xaa is A or G
  MOD_RES (24)..(25)..(26)..(27): Xaa is A or G or is absent
PKPXXAPTQLSPISVLYKXXXXXXXXXLKYHYNMVVRA

SEQ ID NO: 7884 - protein, 37 aa, Artificial Sequence
  GFR-binding peptide
  MOD_RES (5)..(6)..(37): Xaa is C or S
SASPXXVPQDLNAISILYFVGRTPKVLKKYRMVVKSX

SEQ ID NO: 7885 - protein, 34 aa, Artificial Sequence
  GFR-binding peptide
  MOD_RES (14)..(15)..(16)..(17)..(18): Xaa is A or G
  MOD_RES (19)..(20)..(21)..(22): Xaa is A or G or is absent
TQVQLNAISVLYFXXXXXXXXXLKKYRTLEDHLA

SEQ ID NO: 7886 - protein, 39 aa, Artificial Sequence
  GFR-binding peptide
  MOD_RES (2)..(3)..(36)..(38): Xaa is C or S
AXXVPTKLSAISVLYLDDMGVPTLKNYQEGMSVAEXGXR

SEQ ID NO: 7887 - protein, 40 aa, Artificial Sequence
  GFR-binding peptide
  MOD_RES (3)..(4)..(37)..(39): Xaa is C or S
  MOD_RES (18)..(19)..(20)..(21)..(22): Xaa is A or G
  MOD_RES (23)..(24)..(25)..(26): Xaa is A or G or is absent
SPXXVPQDLSATSILYYXXXXXXXXXLRKHRMVVKSXKXS

SEQ ID NO: 7888 - protein, 37 aa, Artificial Sequence
  GFR-binding peptide
  MOD_RES (4)..(5)..(37): Xaa is C or S
PKAXXVPTELNAISMLYFDEYDKVVLKKYREMVVEGX

SEQ ID NO: 7889 - protein, 41 aa, Artificial Sequence
  GFR-binding peptide
  MOD_RES (4)..(5)..(38)..(40): Xaa is C or S
  MOD_RES (19)..(20)..(21)..(22)..(23): Xaa is A or G
  MOD_RES (24)..(25)..(26)..(27): Xaa is A or G or is absent
ASPXXVSQDLSAISILYLXXXXXXXXXLKNYQMIVKSXKXS

SEQ ID NO: 7890 - protein, 37 aa, Artificial Sequence
  GFR-binding peptide
  MOD_RES (1)..(2)..(36): Xaa is C or S
  MOD_RES (16)..(17)..(18)..(19)..(20): Xaa is A or G
  MOD_RES (21)..(22)..(23)..(24): Xaa is A or G or is absent
XXAPTKLNAISVLYFXXXXXXXXXLKKYRNMVVKAXG

SEQ ID NO: 7891 - protein, 38 aa, Artificial Sequence
  GFR-binding peptide
  MOD_RES (4)..(5)..(37): Xaa is C or S
PKPXXAPTQLSPISVLYKDDSSNVILKYHYNMVVRAXG

SEQ ID NO: 7892 - protein, 36 aa, Artificial Sequence
  GFR-binding peptide
  MOD_RES (4)..(4): Xaa is C or S
  MOD_RES (18)..(19)..(20)..(21)..(22): Xaa is A or G
  MOD_RES (23)..(24)..(25)..(26): Xaa is A or G or is absent
KPTXAPTKLNAISVLYFXXXXXXXXXLKKYRNMVVR

SEQ ID NO: 7893 - protein, 39 aa, Artificial Sequence
  GFR-binding peptide
  MOD_RES (5)..(6)..(38): Xaa is C or S
VPKPXXAPTQLSATSVLYYDDSSNVILRKHRNMVVRAXG

SEQ ID NO: 7894 - protein, 40 aa, Artificial Sequence
  GFR-binding peptide
  MOD_RES (3)..(4)..(39): Xaa is C or S
  MOD_RES (18)..(19)..(20)..(21)..(22): Xaa is A or G
  MOD_RES (23)..(24)..(25)..(26): Xaa is A or G or is absent
KAXXVPTKLNAISVLYFXXXXXXXXXLKKYREGMSVAEXG

SEQ ID NO: 7895 - protein, 43 aa, Artificial Sequence
  GFR-binding peptide
  MOD_RES (5)..(6)..(40)..(42): Xaa is C or S
  MOD_RES (20)..(21)..(22)..(23)..(24): Xaa is A or G
  MOD_RES (25)..(26)..(27)..(28): Xaa is A or G or is absent
VPKAXXAPTKLSATSVLYYXXXXXXXXXLRKHRNMVVKAXGXH

SEQ ID NO: 7896 - protein, 38 aa, Artificial Sequence
  GFR-binding peptide
  MOD_RES (4)..(5)..(36)..(38): Xaa is C or S
ASPXXVPQDLSATSILYYVGRTPKVLRKHRMVVKSXKX

SEQ ID NO: 7897 - protein, 36 aa, Artificial Sequence
  GFR-binding peptide
  MOD_RES (1)..(2)..(35): Xaa is C or S
  MOD_RES (16)..(17)..(18)..(19)..(20): Xaa is A or G
  MOD_RES (21)..(22)..(23)..(24): Xaa is A or G or is absent
XXVPQALSATSILYYXXXXXXXXXLRKHRMIVRSXK

SEQ ID NO: 7898 - protein, 40 aa, Artificial Sequence
  GFR-binding peptide
  MOD_RES (6)..(7)..(40): Xaa is C or S
  MOD_RES (21)..(22)..(23)..(24)..(25): Xaa is A or G
  MOD_RES (26)..(27)..(28)..(29): Xaa is A or G or is absent
ASAAPXXVPQALSAISILYLXXXXXXXXXLKNYQMIVRSX

SEQ ID NO: 7899 - protein, 35 aa, Artificial Sequence
  GFR-binding peptide
  MOD_RES (3)..(4)..(35): Xaa is C or S
SPXXVSQDLSATSILYYIGKTPKILRKHRMIVKSX

SEQ ID NO: 7900 - protein, 38 aa, Artificial Sequence
  GFR-binding peptide
  MOD_RES (4)..(5): Xaa is C or S
  MOD_RES (19)..(20)..(21)..(22)..(23): Xaa is A or G
  MOD_RES (24)..(25)..(26)..(27): Xaa is A or G or is absent
PKAXXVPTELSPISMLYKXXXXXXXXXLKYHYDMVVEG

SEQ ID NO: 7901 - protein, 34 aa, Artificial Sequence
  GFR-binding peptide
  MOD_RES (34)..(34): Xaa is C or S
  MOD_RES (14)..(15)..(16)..(17)..(18): Xaa is A or G
  MOD_RES (19)..(20)..(21)..(22): Xaa is A or G or is absent
APTKLSAISVLYLXXXXXXXXXLKNYQNMVVRSX

SEQ ID NO: 7902 - protein, 43 aa, Artificial Sequence
  GFR-binding peptide
  MOD_RES (4)..(41)..(43): Xaa is C or S
  MOD_RES (20)..(21)..(22)..(23)..(24): Xaa is A or G
  MOD_RES (25)..(26)..(27)..(28): Xaa is A or G or is absent
NVQXRPTQVQLSAISVLYLXXXXXXXXXLKNYQTLEDHLAXKX

SEQ ID NO: 7903 - protein, 37 aa, Artificial Sequence
  GFR-binding peptide
  MOD_RES (1)..(2)..(34)..(36): Xaa is C or S
XXAPTKLSAISVLYLDSSNNVILKNYQNMVVKAXGXH

SEQ ID NO: 7904 - protein, 40 aa, Artificial Sequence
  GFR-binding peptide
  MOD_RES (6)..(7)..(40): Xaa is C or S
  MOD_RES (21)..(22)..(23)..(24)..(25): Xaa is A or G
  MOD_RES (26)..(27)..(28)..(29): Xaa is A or G or is absent
ASASPXXVSQDLNAISILYFXXXXXXXXXLKKYRMIVKSX

SEQ ID NO: 7905 - protein, 35 aa, Artificial Sequence
  GFR-binding peptide
  MOD_RES (1)..(33)..(35): Xaa is C or S
XAPTKLNAISVLYFDSSNNVILKKYRNMVVKAXGX

SEQ ID NO: 7906 - protein, 34 aa, Artificial Sequence
  GFR-binding peptide
  MOD_RES (33)..(33): Xaa is C or S
  MOD_RES (14)..(15)..(16)..(17)..(18): Xaa is A or G
  MOD_RES (19)..(20)..(21)..(22): Xaa is A or G or is absent
VSQDLSPISILYKXXXXXXXXXLKYHYMIVKSXK

SEQ ID NO: 7907 - protein, 32 aa, Artificial Sequence
  GFR-binding peptide
  MOD_RES (31)..(31): Xaa is C or S
VPQALSPISILYKVGRKPKVLKYHYMIVRSXK

SEQ ID NO: 7908 - protein, 36 aa, Artificial Sequence
  GFR-binding peptide
  MOD_RES (36)..(36): Xaa is C or S
  MOD_RES (15)..(16)..(17)..(18)..(19): Xaa is A or G
  MOD_RES (20)..(21)..(22)..(23): Xaa is A or G or is absent
PTQVQLSATSVLYYXXXXXXXXXLRKHRTLEDHLAX

SEQ ID NO: 7909 - protein, 36 aa, Artificial Sequence
  GFR-binding peptide
  MOD_RES (5)..(6): Xaa is C or S
VPKAXXAPTKLSAISVLYLDSSNNVILKNYQNMVVK

SEQ ID NO: 7910 - protein, 35 aa, Artificial Sequence
  GFR-binding peptide
  MOD_RES (2)..(3)..(35): Xaa is C or S
PXXAPTKLSATSVLYYDDSSNVILRKHRNMVVRSX

SEQ ID NO: 7911 - protein, 39 aa, Artificial Sequence
  GFR-binding peptide
  MOD_RES (4)..(36)..(38): Xaa is C or S
KPTXAPTKLSAISVLYLDDSSNVILKNYQNMVVRSXGXH

SEQ ID NO: 7912 - protein, 38 aa, Artificial Sequence
  GFR-binding peptide
  MOD_RES (2)..(3)..(37): Xaa is C or S
  MOD_RES (17)..(18)..(19)..(20)..(21): Xaa is A or G
  MOD_RES (22)..(23)..(24)..(25): Xaa is A or G or is absent
AXXAPTKLNAISVLYFXXXXXXXXXLKKYRNMVVKAXG

SEQ ID NO: 7913 - protein, 40 aa, Artificial Sequence
  GFR-binding peptide
  MOD_RES (6)..(7)..(39): Xaa is C or S
KIPKAXXVPTELSPISMLYKDENEKVVLKYHYDMVVEGXG

SEQ ID NO: 7914 - protein, 37 aa, Artificial Sequence
  GFR-binding peptide
  MOD_RES (1)..(2)..(34)..(36): Xaa is C or S
XXAPTKLSPISVLYKDDSSNVILKYHYNMVVRSXGXH

SEQ ID NO: 7915 - protein, 35 aa, Artificial Sequence
  GFR-binding peptide
  MOD_RES (4)..(5): Xaa is C or S
AAPXXVPQALSPISILYKVGRKPKVLKYHYMIVRS

SEQ ID NO: 7916 - protein, 40 aa, Artificial Sequence
  GFR-binding peptide
  MOD_RES (5)..(39): Xaa is C or S
  MOD_RES (19)..(20)..(21)..(22)..(23): Xaa is A or G
  MOD_RES (24)..(25)..(26)..(27): Xaa is A or G or is absent
TKPTXAPTKLSPISVLYKXXXXXXXXXLKYHYNMVVRSXG

SEQ ID NO: 7917 - protein, 42 aa, Artificial Sequence
  GFR-binding peptide
  MOD_RES (4)..(41): Xaa is C or S
NVQXRPTQVQLNAISVLYFEIVRKKPIFLKKYRTLEDHLAXK

SEQ ID NO: 7918 - protein, 37 aa, Artificial Sequence
  GFR-binding peptide
  MOD_RES (5)..(6)..(37): Xaa is C or S
SAAPXXVPQALSATSILYYVGRKPKVLRKHRMIVRSX

SEQ ID NO: 7919 - protein, 40 aa, Artificial Sequence
  GFR-binding peptide
  MOD_RES (4)..(4): Xaa is C or S
NVQXRPTQVQLSAISVLYLEIVRKKPIFLKNYQTLEDHLA

SEQ ID NO: 7920 - protein, 39 aa, Artificial Sequence
  GFR-binding peptide
  MOD_RES (1)..(2)..(36)..(38): Xaa is C or S
  MOD_RES (16)..(17)..(18)..(19)..(20): Xaa is A or G
  MOD_RES (21)..(22)..(23)..(24): Xaa is A or G or is absent
XXVPTELSAISMLYLXXXXXXXXXLKNYQDMVVEGXGXR

SEQ ID NO: 7921 - protein, 35 aa, Artificial Sequence
  GFR-binding peptide
  MOD_RES (34)..(34): Xaa is C or S
  MOD_RES (14)..(15)..(16)..(17)..(18): Xaa is A or G
  MOD_RES (19)..(20)..(21)..(22): Xaa is A or G or is absent
APTQLSAISVLYLXXXXXXXXXLKNYQNMVVRAXG

SEQ ID NO: 7922 - protein, 34 aa, Artificial Sequence
  GFR-binding peptide
  MOD_RES (1)..(2): Xaa is C or S
XXVPTKLNAISVLYFDDMGVPTLKKYREGMSVAE

SEQ ID NO: 7923 - protein, 35 aa, Artificial Sequence
  GFR-binding peptide
  MOD_RES (3)..(4): Xaa is C or S
KAXXAPTKLNAISVLYFDSSNNVILKKYRNMVVKA

SEQ ID NO: 7924 - protein, 40 aa, Artificial Sequence
  GFR-binding peptide
  MOD_RES (7)..(7): Xaa is C or S
  MOD_RES (21)..(22)..(23)..(24)..(25): Xaa is A or G
  MOD_RES (26)..(27)..(28)..(29): Xaa is A or G or is absent
HVTKPTXAPTKLNAISVLYFXXXXXXXXXLKKYRNMVVRS

SEQ ID NO: 7925 - protein, 38 aa, Artificial Sequence
  GFR-binding peptide
  MOD_RES (1)..(35)..(37): Xaa is C or S
  MOD_RES (15)..(16)..(17)..(18)..(19): Xaa is A or G
  MOD_RES (20)..(21)..(22)..(23): Xaa is A or G or is absent
XAPTQLNAISVLYFXXXXXXXXXLKKYRNMVVRAXGXH

SEQ ID NO: 7926 - protein, 35 aa, Artificial Sequence
  GFR-binding peptide
  MOD_RES (1)..(35): Xaa is C or S
  MOD_RES (15)..(16)..(17)..(18)..(19): Xaa is A or G
  MOD_RES (20)..(21)..(22)..(23): Xaa is A or G or is absent
XAPTKLSAISVLYLXXXXXXXXXLKNYQNMVVRSX

SEQ ID NO: 7927 - protein, 37 aa, Artificial Sequence
  GFR-binding peptide
  MOD_RES (2)..(3)..(37): Xaa is C or S
  MOD_RES (17)..(18)..(19)..(20)..(21): Xaa is A or G
  MOD_RES (22)..(23)..(24)..(25): Xaa is A or G or is absent
PXXAPTQLSATSVLYYXXXXXXXXXLRKHRNMVVRAX

SEQ ID NO: 7928 - protein, 38 aa, Artificial Sequence
  GFR-binding peptide
  MOD_RES (2)..(36)..(38): Xaa is C or S
  MOD_RES (16)..(17)..(18)..(19)..(20): Xaa is A or G
  MOD_RES (21)..(22)..(23)..(24): Xaa is A or G or is absent
TXAPTKLSAISVLYLXXXXXXXXXLKNYQNMVVRSXGX

SEQ ID NO: 7929 - protein, 43 aa, Artificial Sequence
  GFR-binding peptide
  MOD_RES (5)..(6)..(40)..(42): Xaa is C or S
  MOD_RES (20)..(21)..(22)..(23)..(24): Xaa is A or G
  MOD_RES (25)..(26)..(27)..(28): Xaa is A or G or is absent
IPKAXXVPTELSPISMLYKXXXXXXXXXLKYHYEMVVEGXGXR

SEQ ID NO: 7930 - protein, 41 aa, Artificial Sequence
  GFR-binding peptide
  MOD_RES (6)..(7)..(41): Xaa is C or S
  MOD_RES (21)..(22)..(23)..(24)..(25): Xaa is A or G
  MOD_RES (26)..(27)..(28)..(29): Xaa is A or G or is absent
YVPKPXXAPTKLNAISVLYFXXXXXXXXXLKKYRNMVVRSX

SEQ ID NO: 7931 - protein, 39 aa, Artificial Sequence
  GFR-binding peptide
  MOD_RES (5)..(6)..(39): Xaa is C or S
  MOD_RES (20)..(21)..(22)..(23)..(24): Xaa is A or G
  MOD_RES (25)..(26)..(27)..(28): Xaa is A or G or is absent
SAAPXXVPQALSPISILYKXXXXXXXXXLKYHYMIVRSX

SEQ ID NO: 7932 - protein, 38 aa, Artificial Sequence
  GFR-binding peptide
  MOD_RES (3)..(4)..(35)..(37): Xaa is C or S
APXXVPQALSAISILYLVGRKPKVLKNYQMIVRSXKXS

SEQ ID NO: 7933 - protein, 38 aa, Artificial Sequence
  GFR-binding peptide
  MOD_RES (3)..(4)..(38): Xaa is C or S
  MOD_RES (18)..(19)..(20)..(21)..(22): Xaa is A or G
  MOD_RES (23)..(24)..(25)..(26): Xaa is A or G or is absent
KPXXAPTKLSATSVLYYXXXXXXXXXLRKHRNMVVRSX

SEQ ID NO: 7934 - protein, 38 aa, Artificial Sequence
  GFR-binding peptide
  MOD_RES (6)..(7)..(38): Xaa is C or S
ASASPXXVPQDLNAISILYFVGRTPKVLKKYRMVVKSX

SEQ ID NO: 7935 - protein, 39 aa, Artificial Sequence
  GFR-binding peptide
  MOD_RES (37)..(39): Xaa is C or S
  MOD_RES (16)..(17)..(18)..(19)..(20): Xaa is A or G
  MOD_RES (21)..(22)..(23)..(24): Xaa is A or G or is absent
RPTQVQLSPISVLYKXXXXXXXXXLKYHYTLEDHLAXKX

SEQ ID NO: 7936 - protein, 44 aa, Artificial Sequence
  GFR-binding peptide
  MOD_RES (5)..(6)..(41)..(43): Xaa is C or S
  MOD_RES (20)..(21)..(22)..(23)..(24): Xaa is A or G
  MOD_RES (25)..(26)..(27)..(28): Xaa is A or G or is absent
VGKAXXVPTKLSPISVLYKXXXXXXXXXLKYHYEGMSVAEXGXR

SEQ ID NO: 7937 - protein, 34 aa, Artificial Sequence
  GFR-binding peptide
  MOD_RES (2)..(3): Xaa is C or S
AXXVPTELNAISMLYFDENEKVVLKKYRDMVVEG

SEQ ID NO: 7938 - protein, 42 aa, Artificial Sequence
  GFR-binding peptide
  MOD_RES (4)..(41): Xaa is C or S
  MOD_RES (20)..(21)..(22)..(23)..(24): Xaa is A or G
  MOD_RES (25)..(26)..(27)..(28): Xaa is A or G or is absent
NVQXRPTQVQLNAISVLYFXXXXXXXXXLKKYRTLEDHLAXK

SEQ ID NO: 7939 - protein, 36 aa, Artificial Sequence
  GFR-binding peptide
  MOD_RES (5)..(6): Xaa is C or S
VPKAXXAPTKLSPISVLYKDSSNNVILKYHYNMVVK

SEQ ID NO: 7940 - protein, 40 aa, Artificial Sequence
  GFR-binding peptide
  MOD_RES (6)..(7): Xaa is C or S
  MOD_RES (21)..(22)..(23)..(24)..(25): Xaa is A or G
  MOD_RES (26)..(27)..(28)..(29): Xaa is A or G or is absent
TVPKPXXAPTQLSATSVLYYXXXXXXXXXLRKHRNMVVRA

SEQ ID NO: 7941 - protein, 41 aa, Artificial Sequence
  GFR-binding peptide
  MOD_RES (4)..(5)..(39)..(41): Xaa is C or S
  MOD_RES (19)..(20)..(21)..(22)..(23): Xaa is A or G
  MOD_RES (24)..(25)..(26)..(27): Xaa is A or G or is absent
PKAXXVPTELSPISMLYKXXXXXXXXXLKYHYEMVVEGXGX

SEQ ID NO: 7942 - protein, 37 aa, Artificial Sequence
  GFR-binding peptide
  MOD_RES (3)..(4)..(36): Xaa is C or S
KAXXVPTELSPISMLYKDENEKVVLKYHYDMVVEGXG

SEQ ID NO: 7943 - protein, 42 aa, Artificial Sequence
  GFR-binding peptide
  MOD_RES (6)..(7)..(40)..(42): Xaa is C or S
  MOD_RES (21)..(22)..(23)..(24)..(25): Xaa is A or G
  MOD_RES (26)..(27)..(28)..(29): Xaa is A or G or is absent
ASAAPXXVPQALSPISILYKXXXXXXXXXLKYHYMIVRSXKX

SEQ ID NO: 7944 - protein, 38 aa, Artificial Sequence
  GFR-binding peptide
  MOD_RES (4)..(36)..(38): Xaa is C or S
KPTXAPTKLSATSVLYYDDSSNVILRKHRNMVVRSXGX

SEQ ID NO: 7945 - protein, 36 aa, Artificial Sequence
  GFR-binding peptide
  MOD_RES (1)..(2): Xaa is C or S
  MOD_RES (16)..(17)..(18)..(19)..(20): Xaa is A or G
  MOD_RES (21)..(22)..(23)..(24): Xaa is A or G or is absent
XXVPTKLSAISVLYLXXXXXXXXXLKNYQEGMSVAE

SEQ ID NO: 7946 - protein, 35 aa, Artificial Sequence
  GFR-binding peptide
  MOD_RES (2)..(3)..(35): Xaa is C or S
PXXAPTQLSPISVLYKDDSSNVILKYHYNMVVRAX

SEQ ID NO: 7947 - protein, 33 aa, Artificial Sequence
  GFR-binding peptide
  MOD_RES (2)..(3): Xaa is C or S
PXXAPTQLSATSVLYYDDSSNVILRKHRNMVVR

SEQ ID NO: 7948 - protein, 41 aa, Artificial Sequence
  GFR-binding peptide
  MOD_RES (6)..(7)..(38)..(40): Xaa is C or S
ASASPXXVPQDLNAISILYFVGRTPKVLKKYRMVVKSXKXS

SEQ ID NO: 7949 - protein, 32 aa, Artificial Sequence
  GFR-binding peptide
  MOD_RES (14)..(15)..(16)..(17)..(18): Xaa is A or G
  MOD_RES (19)..(20)..(21)..(22): Xaa is A or G or is absent
VPQDLNAISILYFXXXXXXXXXLKKYRMVVKS

SEQ ID NO: 7950 - protein, 38 aa, Artificial Sequence
  GFR-binding peptide
  MOD_RES (5)..(6): Xaa is C or S
VGKAXXVPTKLSATSVLYYDDMGVPTLRKHREGMSVAE

SEQ ID NO: 7951 - protein, 34 aa, Artificial Sequence
  GFR-binding peptide
  MOD_RES (3)..(4): Xaa is C or S
SPXXVPQDLSPISILYKVGRTPKVLKYHYMVVKS

SEQ ID NO: 7952 - protein, 37 aa, Artificial Sequence
  GFR-binding peptide
  MOD_RES (1)..(35)..(37): Xaa is C or S
  MOD_RES (15)..(16)..(17)..(18)..(19): Xaa is A or G
  MOD_RES (20)..(21)..(22)..(23): Xaa is A or G or is absent
XAPTKLNAISVLYFXXXXXXXXXLKKYRNMVVKAXGX

SEQ ID NO: 7953 - protein, 35 aa, Artificial Sequence
  GFR-binding peptide
  MOD_RES (33)..(35): Xaa is C or S
  MOD_RES (14)..(15)..(16)..(17)..(18): Xaa is A or G
  MOD_RES (19)..(20)..(21)..(22): Xaa is A or G or is absent
VPQDLSATSILYYXXXXXXXXXLRKHRMVVKSXKX

SEQ ID NO: 7954 - protein, 38 aa, Artificial Sequence
  GFR-binding peptide
  MOD_RES (2)..(3)..(37): Xaa is C or S
  MOD_RES (17)..(18)..(19)..(20)..(21): Xaa is A or G
  MOD_RES (22)..(23)..(24)..(25): Xaa is A or G or is absent
AXXVPTELNAISMLYFXXXXXXXXXLKKYRDMVVEGXG

SEQ ID NO: 7955 - protein, 36 aa, Artificial Sequence
  GFR-binding peptide
  MOD_RES (1)..(2): Xaa is C or S
  MOD_RES (16)..(17)..(18)..(19)..(20): Xaa is A or G
  MOD_RES (21)..(22)..(23)..(24): Xaa is A or G or is absent
XXVPTKLSATSVLYYXXXXXXXXXLRKHREGMSVAE

SEQ ID NO: 7956 - protein, 41 aa, Artificial Sequence
  GFR-binding peptide
  MOD_RES (1)..(38)..(40): Xaa is C or S
XRPTQVQLSATSVLYYEIVRKKPIFLRKHRTLEDHLAXKXE

SEQ ID NO: 7957 - protein, 38 aa, Artificial Sequence
  GFR-binding peptide
  MOD_RES (3)..(4)..(38): Xaa is C or S
  MOD_RES (18)..(19)..(20)..(21)..(22): Xaa is A or G
  MOD_RES (23)..(24)..(25)..(26): Xaa is A or G or is absent
KAXXVPTELSATSMLYYXXXXXXXXXLRKHRDMVVEGX

SEQ ID NO: 7958 - protein, 33 aa, Artificial Sequence
  GFR-binding peptide
  MOD_RES (1)..(1): Xaa is C or S
  MOD_RES (15)..(16)..(17)..(18)..(19): Xaa is A or G
  MOD_RES (20)..(21)..(22)..(23): Xaa is A or G or is absent
XVPQDLNAISILYFXXXXXXXXXLKKYRMVVKS

SEQ ID NO: 7959 - protein, 38 aa, Artificial Sequence
  GFR-binding peptide
  MOD_RES (2)..(3)..(37): Xaa is C or S
  MOD_RES (17)..(18)..(19)..(20)..(21): Xaa is A or G
  MOD_RES (22)..(23)..(24)..(25): Xaa is A or G or is absent
PXXAPTKLSATSVLYYXXXXXXXXXLRKHRNMVVRSXG

SEQ ID NO: 7960 - protein, 36 aa, Artificial Sequence
  GFR-binding peptide
  MOD_RES (1)..(2)..(35): Xaa is C or S
  MOD_RES (16)..(17)..(18)..(19)..(20): Xaa is A or G
  MOD_RES (21)..(22)..(23)..(24): Xaa is A or G or is absent
XXVPQDLSPISILYKXXXXXXXXXLKYHYMVVKSXK

SEQ ID NO: 7961 - protein, 35 aa, Artificial Sequence
  GFR-binding peptide
  MOD_RES (34)..(34): Xaa is C or S
  MOD_RES (14)..(15)..(16)..(17)..(18): Xaa is A or G
  MOD_RES (19)..(20)..(21)..(22): Xaa is A or G or is absent
APTKLSAISVLYLXXXXXXXXXLKNYQNMVVKAXG

SEQ ID NO: 7962 - protein, 37 aa, Artificial Sequence
  GFR-binding peptide
  MOD_RES (2)..(3)..(37): Xaa is C or S
  MOD_RES (17)..(18)..(19)..(20)..(21): Xaa is A or G
  MOD_RES (22)..(23)..(24)..(25): Xaa is A or G or is absent
AXXVPTELNAISMLYFXXXXXXXXXLKKYREMVVEGX

SEQ ID NO: 7963 - protein, 38 aa, Artificial Sequence
  GFR-binding peptide
  MOD_RES (6)..(7)..(38): Xaa is C or S
ASAAPXXVPQALSATSILYYVGRKPKVLRKHRMIVRSX

SEQ ID NO: 7964 - protein, 30 aa, Artificial Sequence
  GFR-binding peptide
VSQDLSPISILYKIGKTPKILKYHYMIVKS

SEQ ID NO: 7965 - protein, 36 aa, Artificial Sequence
  GFR-binding peptide
  MOD_RES (1)..(1): Xaa is C or S
XRPTQVQLNAISVLYFEIVRKKPIFLKKYRTLEDHL

SEQ ID NO: 7966 - protein, 32 aa, Artificial Sequence
  GFR-binding peptide
  MOD_RES (1)..(32): Xaa is C or S
XVPQALNAISILYFVGRKPKVLKKYRMIVRSX

SEQ ID NO: 7967 - protein, 31 aa, Artificial Sequence
  GFR-binding peptide
  MOD_RES (31)..(31): Xaa is C or S
VPQALNAISILYFVGRKPKVLKKYRMIVRSX

SEQ ID NO: 7968 - protein, 41 aa, Artificial Sequence
  GFR-binding peptide
  MOD_RES (4)..(41): Xaa is C or S
  MOD_RES (20)..(21)..(22)..(23)..(24): Xaa is A or G
  MOD_RES (25)..(26)..(27)..(28): Xaa is A or G or is absent
NVQXRPTQVQLNAISVLYFXXXXXXXXXLKKYRTLEDHLAX

SEQ ID NO: 7969 - protein, 37 aa, Artificial Sequence
  GFR-binding peptide
  MOD_RES (1)..(2)..(36): Xaa is C or S
  MOD_RES (16)..(17)..(18)..(19)..(20): Xaa is A or G
  MOD_RES (21)..(22)..(23)..(24): Xaa is A or G or is absent
XXVPTELNAISMLYFXXXXXXXXXLKKYRDMVVEGXG

SEQ ID NO: 7970 - protein, 36 aa, Artificial Sequence
  GFR-binding peptide
  MOD_RES (1)..(2)..(33)..(35): Xaa is C or S
XXVPQDLSPISILYKVGRTPKVLKYHYMVVKSXKXS

SEQ ID NO: 7971 - protein, 35 aa, Artificial Sequence
  GFR-binding peptide
  MOD_RES (1)..(32)..(34): Xaa is C or S
XVSQDLSATSILYYIGKTPKILRKHRMIVKSXKXS

SEQ ID NO: 7972 - protein, 40 aa, Artificial Sequence
  GFR-binding peptide
  MOD_RES (6)..(7)..(38)..(40): Xaa is C or S
ASASPXXVPQDLNAISILYFVGRTPKVLKKYRMVVKSXKX

SEQ ID NO: 7973 - protein, 38 aa, Artificial Sequence
  GFR-binding peptide
  MOD_RES (4)..(5)..(38): Xaa is C or S
  MOD_RES (19)..(20)..(21)..(22)..(23): Xaa is A or G
  MOD_RES (24)..(25)..(26)..(27): Xaa is A or G or is absent
ASPXXVSQDLNAISILYFXXXXXXXXXLKKYRMIVKSX

SEQ ID NO: 7974 - protein, 37 aa, Artificial Sequence
  GFR-binding peptide
  MOD_RES (2)..(3)..(34)..(36): Xaa is C or S
PXXVPQALNAISILYFVGRKPKVLKKYRMIVRSXKXS

SEQ ID NO: 7975 - protein, 42 aa, Artificial Sequence
  GFR-binding peptide
  MOD_RES (5)..(42): Xaa is C or S
  MOD_RES (21)..(22)..(23)..(24)..(25): Xaa is A or G
  MOD_RES (26)..(27)..(28)..(29): Xaa is A or G or is absent
RNVQXRPTQVQLNAISVLYFXXXXXXXXXLKKYRTLEDHLAX

SEQ ID NO: 7976 - protein, 35 aa, Artificial Sequence
  GFR-binding peptide
  MOD_RES (1)..(2)..(33)..(35): Xaa is C or S
XXVSQDLSPISILYKIGKTPKILKYHYMIVKSXKX

SEQ ID NO: 7977 - protein, 42 aa, Artificial Sequence
  GFR-binding peptide
  MOD_RES (5)..(6)..(39)..(41): Xaa is C or S
  MOD_RES (20)..(21)..(22)..(23)..(24): Xaa is A or G
  MOD_RES (25)..(26)..(27)..(28): Xaa is A or G or is absent
SAAPXXVPQALNAISILYFXXXXXXXXXLKKYRMIVRSXKXS

SEQ ID NO: 7978 - protein, 36 aa, Artificial Sequence
  GFR-binding peptide
  MOD_RES (1)..(33)..(35): Xaa is C or S
XVPTELSATSMLYYDENEKVVLRKHRDMVVEGXGXR

SEQ ID NO: 7979 - protein, 38 aa, Artificial Sequence
  GFR-binding peptide
  MOD_RES (5)..(6)..(38): Xaa is C or S
VPKAXXAPTKLNAISVLYFDSSNNVILKKYRNMVVKAX

SEQ ID NO: 7980 - protein, 39 aa, Artificial Sequence
  GFR-binding peptide
  MOD_RES (3)..(37)..(39): Xaa is C or S
  MOD_RES (17)..(18)..(19)..(20)..(21): Xaa is A or G
  MOD_RES (22)..(23)..(24)..(25): Xaa is A or G or is absent
PTXAPTKLSATSVLYYXXXXXXXXXLRKHRNMVVRSXGX

SEQ ID NO: 7981 - protein, 43 aa, Artificial Sequence
  GFR-binding peptide
  MOD_RES (7)..(41)..(43): Xaa is C or S
  MOD_RES (21)..(22)..(23)..(24)..(25): Xaa is A or G
  MOD_RES (26)..(27)..(28)..(29): Xaa is A or G or is absent
HVTKPTXAPTKLSAISVLYLXXXXXXXXXLKNYQNMVVRSXGX

SEQ ID NO: 7982 - protein, 33 aa, Artificial Sequence
  GFR-binding peptide
  MOD_RES (15)..(16)..(17)..(18)..(19): Xaa is A or G
  MOD_RES (20)..(21)..(22)..(23): Xaa is A or G or is absent
PTQVQLNAISVLYFXXXXXXXXXLKKYRTLEDH

SEQ ID NO: 7983 - protein, 37 aa, Artificial Sequence
  GFR-binding peptide
  MOD_RES (2)..(3)..(35)..(37): Xaa is C or S
AXXVPTELSATSMLYYDENEKVVLRKHRDMVVEGXGX

SEQ ID NO: 7984 - protein, 37 aa, Artificial Sequence
  GFR-binding peptide
  MOD_RES (36)..(36): Xaa is C or S
  MOD_RES (15)..(16)..(17)..(18)..(19): Xaa is A or G
  MOD_RES (20)..(21)..(22)..(23): Xaa is A or G or is absent
PTQVQLSATSVLYYXXXXXXXXXLRKHRTLEDHLAXK

SEQ ID NO: 7985 - protein, 36 aa, Artificial Sequence
  GFR-binding peptide
  MOD_RES (1)..(1): Xaa is C or S
  MOD_RES (17)..(18)..(19)..(20)..(21): Xaa is A or G
  MOD_RES (22)..(23)..(24)..(25): Xaa is A or G or is absent
XRPTQVQLSATSVLYYXXXXXXXXXLRKHRTLEDHL

SEQ ID NO: 7986 - protein, 44 aa, Artificial Sequence
  GFR-binding peptide
  MOD_RES (6)..(7)..(41)..(43): Xaa is C or S
  MOD_RES (21)..(22)..(23)..(24)..(25): Xaa is A or G
  MOD_RES (26)..(27)..(28)..(29): Xaa is A or G or is absent
TVPKPXXAPTQLSAISVLYLXXXXXXXXXLKNYQNMVVRAXGXH

SEQ ID NO: 7987 - protein, 41 aa, Artificial Sequence
  GFR-binding peptide
  MOD_RES (3)..(4)..(39)..(41): Xaa is C or S
  MOD_RES (18)..(19)..(20)..(21)..(22): Xaa is A or G
  MOD_RES (23)..(24)..(25)..(26): Xaa is A or G or is absent
KAXXVPTKLSATSVLYYXXXXXXXXXLRKHREGMSVAEXGX

SEQ ID NO: 7988 - protein, 38 aa, Artificial Sequence
  GFR-binding peptide
  MOD_RES (3)..(4)..(37): Xaa is C or S
KAXXVPTKLSATSVLYYDDMGVPTLRKHREGMSVAEXG

SEQ ID NO: 7989 - protein, 37 aa, Artificial Sequence
  GFR-binding peptide
  MOD_RES (2)..(3)..(36): Xaa is C or S
  MOD_RES (17)..(18)..(19)..(20)..(21): Xaa is A or G
  MOD_RES (22)..(23)..(24)..(25): Xaa is A or G or is absent
PXXVPQALSPISILYKXXXXXXXXXLKYHYMIVRSXK

SEQ ID NO: 7990 - protein, 39 aa, Artificial Sequence
  GFR-binding peptide
  MOD_RES (3)..(4)..(38): Xaa is C or S
  MOD_RES (18)..(19)..(20)..(21)..(22): Xaa is A or G
  MOD_RES (23)..(24)..(25)..(26): Xaa is A or G or is absent
KAXXVPTELSATSMLYYXXXXXXXXXLRKHRDMVVEGXG

SEQ ID NO: 7991 - protein, 31 aa, Artificial Sequence
  GFR-binding peptide
  MOD_RES (1)..(1): Xaa is C or S
XVSQDLSATSILYYIGKTPKILRKHRMIVKS

SEQ ID NO: 7992 - protein, 38 aa, Artificial Sequence
  GFR-binding peptide
  MOD_RES (6)..(38): Xaa is C or S
VTKPTXAPTKLSPISVLYKDDSSNVILKYHYNMVVRSX

SEQ ID NO: 7993 - protein, 37 aa, Artificial Sequence
  GFR-binding peptide
  MOD_RES (2)..(36): Xaa is C or S
  MOD_RES (16)..(17)..(18)..(19)..(20): Xaa is A or G
  MOD_RES (21)..(22)..(23)..(24): Xaa is A or G or is absent
TXAPTKLNAISVLYFXXXXXXXXXLKKYRNMVVRSXG

SEQ ID NO: 7994 - protein, 35 aa, Artificial Sequence
  GFR-binding peptide
  MOD_RES (1)..(32)..(34): Xaa is C or S
XVPQDLNAISILYFVGRTPKVLKKYRMVVKSXKXS

SEQ ID NO: 7995 - protein, 35 aa, Artificial Sequence
  GFR-binding peptide
  MOD_RES (1)..(33)..(35): Xaa is C or S
XVPTELSPISMLYKDEYDKVVLKYHYEMVVEGXGX

SEQ ID NO: 7996 - protein, 35 aa, Artificial Sequence
  GFR-binding peptide
  MOD_RES (1)..(34): Xaa is C or S
XVPTKLSAISVLYLDDMGVPTLKNYQEGMSVAEXG

SEQ ID NO: 7997 - protein, 37 aa, Artificial Sequence
  GFR-binding peptide
  MOD_RES (6)..(7): Xaa is C or S
KIPKAXXVPTELSATSMLYYDENEKVVLRKHRDMVVE

SEQ ID NO: 7998 - protein, 41 aa, Artificial Sequence
  GFR-binding peptide
  MOD_RES (4)..(41): Xaa is C or S
NVQXRPTQVQLSPISVLYKEIVRKKPIFLKYHYTLEDHLAX

SEQ ID NO: 7999 - protein, 41 aa, Artificial Sequence
  GFR-binding peptide
  MOD_RES (5)..(6)..(38)..(40): Xaa is C or S
IPKAXXVPTELNAISMLYFDEYDKVVLKKYREMVVEGXGXR

SEQ ID NO: 8000 - protein, 39 aa, Artificial Sequence
  GFR-binding peptide
  MOD_RES (5)..(6): Xaa is C or S
  MOD_RES (20)..(21)..(22)..(23)..(24): Xaa is A or G
  MOD_RES (25)..(26)..(27)..(28): Xaa is A or G or is absent
VPKPXXAPTKLSPISVLYKXXXXXXXXXLKYHYNMVVRS

SEQ ID NO: 8001 - protein, 37 aa, Artificial Sequence
  GFR-binding peptide
  MOD_RES (2)..(3)..(34)..(36): Xaa is C or S
PXXVPQDLSATSILYYVGRTPKVLRKHRMVVKSXKXS

SEQ ID NO: 8002 - protein, 44 aa, Artificial Sequence
  GFR-binding peptide
  MOD_RES (4)..(41)..(43): Xaa is C or S
NVQXRPTQVQLSATSVLYYEIVRKKPIFLRKHRTLEDHLAXKXE

SEQ ID NO: 8003 - protein, 41 aa, Artificial Sequence
  GFR-binding peptide
  MOD_RES (4)..(41): Xaa is C or S
  MOD_RES (20)..(21)..(22)..(23)..(24): Xaa is A or G
  MOD_RES (25)..(26)..(27)..(28): Xaa is A or G or is absent
NVQXRPTQVQLSPISVLYKXXXXXXXXXLKYHYTLEDHLAX

SEQ ID NO: 8004 - protein, 39 aa, Artificial Sequence
  GFR-binding peptide
  MOD_RES (7)..(7): Xaa is C or S
  MOD_RES (21)..(22)..(23)..(24)..(25): Xaa is A or G
  MOD_RES (26)..(27)..(28)..(29): Xaa is A or G or is absent
HVTKPTXAPTKLSPISVLYKXXXXXXXXXLKYHYNMVVR

SEQ ID NO: 8005 - protein, 37 aa, Artificial Sequence
  GFR-binding peptide
  MOD_RES (4)..(4): Xaa is C or S
  MOD_RES (18)..(19)..(20)..(21)..(22): Xaa is A or G
  MOD_RES (23)..(24)..(25)..(26): Xaa is A or G or is absent
KPTXAPTKLSAISVLYLXXXXXXXXXLKNYQNMVVRS

SEQ ID NO: 8006 - protein, 34 aa, Artificial Sequence
  GFR-binding peptide
  MOD_RES (1)..(32)..(34): Xaa is C or S
XVSQDLSPISILYKIGKTPKILKYHYMIVKSXKX

SEQ ID NO: 8007 - protein, 36 aa, Artificial Sequence
  GFR-binding peptide
  MOD_RES (3)..(4)..(35): Xaa is C or S
APXXVPQALSAISILYLVGRKPKVLKNYQMIVRSXK

SEQ ID NO: 8008 - protein, 36 aa, Artificial Sequence
  GFR-binding peptide
  MOD_RES (1)..(2)..(35): Xaa is C or S
XXVPTKLSAISVLYLDDMGVPTLKNYQEGMSVAEXG

SEQ ID NO: 8009 - protein, 38 aa, Artificial Sequence
  GFR-binding peptide
  MOD_RES (4)..(4): Xaa is C or S
  MOD_RES (20)..(21)..(22)..(23)..(24): Xaa is A or G
  MOD_RES (25)..(26)..(27)..(28): Xaa is A or G or is absent
NVQXRPTQVQLSPISVLYKXXXXXXXXXLKYHYTLEDH

SEQ ID NO: 8010 - protein, 39 aa, Artificial Sequence
  GFR-binding peptide
  MOD_RES (5)..(5): Xaa is C or S
  MOD_RES (21)..(22)..(23)..(24)..(25): Xaa is A or G
  MOD_RES (26)..(27)..(28)..(29): Xaa is A or G or is absent
RNVQXRPTQVQLSPISVLYKXXXXXXXXXLKYHYTLEDH

SEQ ID NO: 8011 - protein, 35 aa, Artificial Sequence
  GFR-binding peptide
PTQVQLNAISVLYFEIVRKKPIFLKKYRTLEDHLA

SEQ ID NO: 8012 - protein, 42 aa, Artificial Sequence
  GFR-binding peptide
  MOD_RES (5)..(42): Xaa is C or S
RNVQXRPTQVQLNAISVLYFEIVRKKPIFLKKYRTLEDHLAX

SEQ ID NO: 8013 - protein, 42 aa, Artificial Sequence
  GFR-binding peptide
  MOD_RES (5)..(6)..(40)..(42): Xaa is C or S
  MOD_RES (20)..(21)..(22)..(23)..(24): Xaa is A or G
  MOD_RES (25)..(26)..(27)..(28): Xaa is A or G or is absent
VPKPXXAPTQLSAISVLYLXXXXXXXXXLKNYQNMVVRAXGX

SEQ ID NO: 8014 - protein, 34 aa, Artificial Sequence
  GFR-binding peptide
  MOD_RES (2)..(3)..(34): Xaa is C or S
PXXVPQDLSAISILYLVGRTPKVLKNYQMVVKSX

SEQ ID NO: 8015 - protein, 40 aa, Artificial Sequence
  GFR-binding peptide
  MOD_RES (5)..(5): Xaa is C or S
  MOD_RES (21)..(22)..(23)..(24)..(25): Xaa is A or G
  MOD_RES (26)..(27)..(28)..(29): Xaa is A or G or is absent
RNVQXRPTQVQLSATSVLYYXXXXXXXXXLRKHRTLEDHL

SEQ ID NO: 8016 - protein, 42 aa, Artificial Sequence
  GFR-binding peptide
  MOD_RES (5)..(6)..(39)..(41): Xaa is C or S
VGKAXXVPTKLNAISVLYFDDMGVPTLKKYREGMSVAEXGXR

SEQ ID NO: 8017 - protein, 39 aa, Artificial Sequence
  GFR-binding peptide
  MOD_RES (3)..(4)..(38): Xaa is C or S
  MOD_RES (18)..(19)..(20)..(21)..(22): Xaa is A or G
  MOD_RES (23)..(24)..(25)..(26): Xaa is A or G or is absent
KPXXAPTQLSAISVLYLXXXXXXXXXLKNYQNMVVRAXG

SEQ ID NO: 8018 - protein, 36 aa, Artificial Sequence
  GFR-binding peptide
  MOD_RES (2)..(36): Xaa is C or S
  MOD_RES (16)..(17)..(18)..(19)..(20): Xaa is A or G
  MOD_RES (21)..(22)..(23)..(24): Xaa is A or G or is absent
TXAPTKLSPISVLYKXXXXXXXXXLKYHYNMVVRSX

SEQ ID NO: 8019 - protein, 34 aa, Artificial Sequence
  GFR-binding peptide
  MOD_RES (34)..(34): Xaa is C or S
  MOD_RES (14)..(15)..(16)..(17)..(18): Xaa is A or G
  MOD_RES (19)..(20)..(21)..(22): Xaa is A or G or is absent
VPTELNAISMLYFXXXXXXXXXLKKYREMVVEGX

SEQ ID NO: 8020 - protein, 39 aa, Artificial Sequence
  GFR-binding peptide
  MOD_RES (7)..(39): Xaa is C or S
HVTKPTXAPTKLSAISVLYLDDSSNVILKNYQNMVVRSX

SEQ ID NO: 8021 - protein, 37 aa, Artificial Sequence
  GFR-binding peptide
  MOD_RES (2)..(34)..(36): Xaa is C or S
TXAPTKLSATSVLYYDDSSNVILRKHRNMVVRSXGXH

SEQ ID NO: 8022 - protein, 40 aa, Artificial Sequence
  GFR-binding peptide
  MOD_RES (7)..(7): Xaa is C or S
  MOD_RES (21)..(22)..(23)..(24)..(25): Xaa is A or G
  MOD_RES (26)..(27)..(28)..(29): Xaa is A or G or is absent
HVTKPTXAPTKLSAISVLYLXXXXXXXXXLKNYQNMVVRS

SEQ ID NO: 8023 - protein, 33 aa, Artificial Sequence
  GFR-binding peptide
  MOD_RES (3)..(3): Xaa is C or S
PTXAPTKLSPISVLYKDDSSNVILKYHYNMVVR

SEQ ID NO: 8024 - protein, 44 aa, Artificial Sequence
  GFR-binding peptide
  MOD_RES (6)..(7)..(41)..(43): Xaa is C or S
  MOD_RES (21)..(22)..(23)..(24)..(25): Xaa is A or G
  MOD_RES (26)..(27)..(28)..(29): Xaa is A or G or is absent
YVPKPXXAPTKLSPISVLYKXXXXXXXXXLKYHYNMVVRSXGXH

SEQ ID NO: 8025 - protein, 39 aa, Artificial Sequence
  GFR-binding peptide
  MOD_RES (6)..(7)..(38): Xaa is C or S
ASAAPXXVPQALSAISILYLVGRKPKVLKNYQMIVRSXK

SEQ ID NO: 8026 - protein, 35 aa, Artificial Sequence
  GFR-binding peptide
  MOD_RES (1)..(2)..(33)..(35): Xaa is C or S
XXVPQALSATSILYYVGRKPKVLRKHRMIVRSXKX

SEQ ID NO: 8027 - protein, 44 aa, Artificial Sequence
  GFR-binding peptide
  MOD_RES (6)..(7)..(41)..(43): Xaa is C or S
  MOD_RES (21)..(22)..(23)..(24)..(25): Xaa is A or G
  MOD_RES (26)..(27)..(28)..(29): Xaa is A or G or is absent
YVPKPXXAPTKLSATSVLYYXXXXXXXXXLRKHRNMVVRSXGXH

SEQ ID NO: 8028 - protein, 37 aa, Artificial Sequence
  GFR-binding peptide
  MOD_RES (1)..(35)..(37): Xaa is C or S
  MOD_RES (15)..(16)..(17)..(18)..(19): Xaa is A or G
  MOD_RES (20)..(21)..(22)..(23): Xaa is A or G or is absent
XAPTQLSAISVLYLXXXXXXXXXLKNYQNMVVRAXGX

SEQ ID NO: 8029 - protein, 38 aa, Artificial Sequence
  GFR-binding peptide
  MOD_RES (3)..(3): Xaa is C or S
  MOD_RES (19)..(20)..(21)..(22)..(23): Xaa is A or G
  MOD_RES (24)..(25)..(26)..(27): Xaa is A or G or is absent
VQXRPTQVQLNAISVLYFXXXXXXXXXLKKYRTLEDHL

SEQ ID NO: 8030 - protein, 43 aa, Artificial Sequence
  GFR-binding peptide
  MOD_RES (6)..(7)..(41)..(43): Xaa is C or S
  MOD_RES (21)..(22)..(23)..(24)..(25): Xaa is A or G
  MOD_RES (26)..(27)..(28)..(29): Xaa is A or G or is absent
SIPKAXXVPTELSPISMLYKXXXXXXXXXLKYHYEMVVEGXGX

SEQ ID NO: 8031 - protein, 40 aa, Artificial Sequence
  GFR-binding peptide
  MOD_RES (2)..(39): Xaa is C or S
  MOD_RES (18)..(19)..(20)..(21)..(22): Xaa is A or G
  MOD_RES (23)..(24)..(25)..(26): Xaa is A or G or is absent
QXRPTQVQLSPISVLYKXXXXXXXXXLKYHYTLEDHLAXK

SEQ ID NO: 8032 - protein, 40 aa, Artificial Sequence
  GFR-binding peptide
  MOD_RES (5)..(6)..(39): Xaa is C or S
  MOD_RES (20)..(21)..(22)..(23)..(24): Xaa is A or G
  MOD_RES (25)..(26)..(27)..(28): Xaa is A or G or is absent
SASPXXVPQDLSPISILYKXXXXXXXXXLKYHYMVVKSXK

SEQ ID NO: 8033 - protein, 40 aa, Artificial Sequence
  GFR-binding peptide
  MOD_RES (4)..(5)..(37)..(39): Xaa is C or S
PKAXXAPTKLSAISVLYLDSSNNVILKNYQNMVVKAXGXH

SEQ ID NO: 8034 - protein, 37 aa, Artificial Sequence
  GFR-binding peptide
  MOD_RES (3)..(4): Xaa is C or S
  MOD_RES (18)..(19)..(20)..(21)..(22): Xaa is A or G
  MOD_RES (23)..(24)..(25)..(26): Xaa is A or G or is absent
KPXXAPTQLSPISVLYKXXXXXXXXXLKYHYNMVVRA

SEQ ID NO: 8035 - protein, 41 aa, Artificial Sequence
  GFR-binding peptide
  MOD_RES (4)..(5)..(40): Xaa is C or S
  MOD_RES (19)..(20)..(21)..(22)..(23): Xaa is A or G
  MOD_RES (24)..(25)..(26)..(27): Xaa is A or G or is absent
GKAXXVPTKLSPISVLYKXXXXXXXXXLKYHYEGMSVAEXG

SEQ ID NO: 8036 - protein, 38 aa, Artificial Sequence
  GFR-binding peptide
  MOD_RES (5)..(6): Xaa is C or S
  MOD_RES (20)..(21)..(22)..(23)..(24): Xaa is A or G
  MOD_RES (25)..(26)..(27)..(28): Xaa is A or G or is absent
IPKAXXVPTELNAISMLYFXXXXXXXXXLKKYREMVVE

SEQ ID NO: 8037 - protein, 33 aa, Artificial Sequence
  GFR-binding peptide
  MOD_RES (1)..(32): Xaa is C or S
XVPQDLNAISILYFVGRTPKVLKKYRMVVKSXK

SEQ ID NO: 8038 - protein, 39 aa, Artificial Sequence
  GFR-binding peptide
  MOD_RES (1)..(2)..(36)..(38): Xaa is C or S
  MOD_RES (16)..(17)..(18)..(19)..(20): Xaa is A or G
  MOD_RES (21)..(22)..(23)..(24): Xaa is A or G or is absent
XXVPTELNAISMLYFXXXXXXXXXLKKYREMVVEGXGXR

SEQ ID NO: 8039 - protein, 33 aa, Artificial Sequence
  GFR-binding peptide
  MOD_RES (1)..(32): Xaa is C or S
XVSQDLNAISILYFIGKTPKILKKYRMIVKSXK

SEQ ID NO: 8040 - protein, 37 aa, Artificial Sequence
  GFR-binding peptide
  MOD_RES (1)..(2)..(36): Xaa is C or S
  MOD_RES (16)..(17)..(18)..(19)..(20): Xaa is A or G
  MOD_RES (21)..(22)..(23)..(24): Xaa is A or G or is absent
XXVPTELNAISMLYFXXXXXXXXXLKKYREMVVEGXG

SEQ ID NO: 8041 - protein, 36 aa, Artificial Sequence
  GFR-binding peptide
  MOD_RES (3)..(4)..(35): Xaa is C or S
SPXXVPQDLSATSILYYVGRTPKVLRKHRMVVKSXK

SEQ ID NO: 8042 - protein, 40 aa, Artificial Sequence
  GFR-binding peptide
  MOD_RES (7)..(39): Xaa is C or S
HVTKPTXAPTKLSPISVLYKDDSSNVILKYHYNMVVRSXG

SEQ ID NO: 8043 - protein, 36 aa, Artificial Sequence
  GFR-binding peptide
  MOD_RES (2)..(3): Xaa is C or S
  MOD_RES (17)..(18)..(19)..(20)..(21): Xaa is A or G
  MOD_RES (22)..(23)..(24)..(25): Xaa is A or G or is absent
AXXVPTELSPISMLYKXXXXXXXXXLKYHYDMVVEG

SEQ ID NO: 8044 - protein, 38 aa, Artificial Sequence
  GFR-binding peptide
  MOD_RES (3)..(4)..(38): Xaa is C or S
  MOD_RES (18)..(19)..(20)..(21)..(22): Xaa is A or G
  MOD_RES (23)..(24)..(25)..(26): Xaa is A or G or is absent
KPXXAPTKLSAISVLYLXXXXXXXXXLKNYQNMVVRSX

SEQ ID NO: 8045 - protein, 40 aa, Artificial Sequence
  GFR-binding peptide
  MOD_RES (4)..(5)..(37)..(39): Xaa is C or S
PKAXXVPTELNAISMLYFDEYDKVVLKKYREMVVEGXGXR

SEQ ID NO: 8046 - protein, 36 aa, Artificial Sequence
  GFR-binding peptide
  MOD_RES (1)..(2)..(33)..(35): Xaa is C or S
XXVPQDLSAISILYLVGRTPKVLKNYQMVVKSXKXS

SEQ ID NO: 8047 - protein, 40 aa, Artificial Sequence
  GFR-binding peptide
  MOD_RES (5)..(6)..(39): Xaa is C or S
VGKAXXVPTKLSATSVLYYDDMGVPTLRKHREGMSVAEXG

SEQ ID NO: 8048 - protein, 32 aa, Artificial Sequence
  GFR-binding peptide
  MOD_RES (1)..(2): Xaa is C or S
XXVPTELNAISMLYFDEYDKVVLKKYREMVVE

SEQ ID NO: 8049 - protein, 36 aa, Artificial Sequence
  GFR-binding peptide
  MOD_RES (2)..(2): Xaa is C or S
  MOD_RES (18)..(19)..(20)..(21)..(22): Xaa is A or G
  MOD_RES (23)..(24)..(25)..(26): Xaa is A or G or is absent
QXRPTQVQLNAISVLYFXXXXXXXXXLKKYRTLEDH

SEQ ID NO: 8050 - protein, 33 aa, Artificial Sequence
  GFR-binding peptide
  MOD_RES (1)..(1): Xaa is C or S
  MOD_RES (15)..(16)..(17)..(18)..(19): Xaa is A or G
  MOD_RES (20)..(21)..(22)..(23): Xaa is A or G or is absent
XVSQDLSAISILYLXXXXXXXXXLKNYQMIVKS

SEQ ID NO: 8051 - protein, 41 aa, Artificial Sequence
  GFR-binding peptide
  MOD_RES (6)..(7)..(41): Xaa is C or S
  MOD_RES (21)..(22)..(23)..(24)..(25): Xaa is A or G
  MOD_RES (26)..(27)..(28)..(29): Xaa is A or G or is absent
TVPKPXXAPTQLSPISVLYKXXXXXXXXXLKYHYNMVVRAX

SEQ ID NO: 8052 - protein, 36 aa, Artificial Sequence
  GFR-binding peptide
  MOD_RES (2)..(3)..(36): Xaa is C or S
AXXVPTKLSATSVLYYDDMGVPTLRKHREGMSVAEX

SEQ ID NO: 8053 - protein, 32 aa, Artificial Sequence
  GFR-binding peptide
  MOD_RES (32)..(32): Xaa is C or S
VPTELNAISMLYFDEYDKVVLKKYREMVVEGX

SEQ ID NO: 8054 - protein, 39 aa, Artificial Sequence
  GFR-binding peptide
  MOD_RES (6)..(7)..(38): Xaa is C or S
ASASPXXVPQDLSATSILYYVGRTPKVLRKHRMVVKSXK

SEQ ID NO: 8055 - protein, 38 aa, Artificial Sequence
  GFR-binding peptide
  MOD_RES (3)..(4)..(36)..(38): Xaa is C or S
KAXXVPTELSPISMLYKDENEKVVLKYHYDMVVEGXGX

SEQ ID NO: 8056 - protein, 39 aa, Artificial Sequence
  GFR-binding peptide
  MOD_RES (4)..(5): Xaa is C or S
  MOD_RES (19)..(20)..(21)..(22)..(23): Xaa is A or G
  MOD_RES (24)..(25)..(26)..(27): Xaa is A or G or is absent
GKAXXVPTKLSPISVLYKXXXXXXXXXLKYHYEGMSVAE

SEQ ID NO: 8057 - protein, 41 aa, Artificial Sequence
  GFR-binding peptide
  MOD_RES (7)..(41): Xaa is C or S
  MOD_RES (21)..(22)..(23)..(24)..(25): Xaa is A or G
  MOD_RES (26)..(27)..(28)..(29): Xaa is A or G or is absent
HVTKPTXAPTKLSPISVLYKXXXXXXXXXLKYHYNMVVRSX

SEQ ID NO: 8058 - protein, 36 aa, Artificial Sequence
  GFR-binding peptide
  MOD_RES (1)..(2)..(34)..(36): Xaa is C or S
XXAPTKLSATSVLYYDDSSNVILRKHRNMVVRSXGX

SEQ ID NO: 8059 - protein, 36 aa, Artificial Sequence
  GFR-binding peptide
  MOD_RES (1)..(35): Xaa is C or S
  MOD_RES (15)..(16)..(17)..(18)..(19): Xaa is A or G
  MOD_RES (20)..(21)..(22)..(23): Xaa is A or G or is absent
XAPTKLNAISVLYFXXXXXXXXXLKKYRNMVVKAXG

SEQ ID NO: 8060 - protein, 38 aa, Artificial Sequence
  GFR-binding peptide
  MOD_RES (4)..(38): Xaa is C or S
  MOD_RES (18)..(19)..(20)..(21)..(22): Xaa is A or G
  MOD_RES (23)..(24)..(25)..(26): Xaa is A or G or is absent
KPTXAPTKLSPISVLYKXXXXXXXXXLKYHYNMVVRSX

SEQ ID NO: 8061 - protein, 38 aa, Artificial Sequence
  GFR-binding peptide
  MOD_RES (5)..(6): Xaa is C or S
  MOD_RES (20)..(21)..(22)..(23)..(24): Xaa is A or G
  MOD_RES (25)..(26)..(27)..(28): Xaa is A or G or is absent
VPKPXXAPTKLSAISVLYLXXXXXXXXXLKNYQNMVVR

SEQ ID NO: 8062 - protein, 34 aa, Artificial Sequence
  GFR-binding peptide
  MOD_RES (1)..(33): Xaa is C or S
XAPTQLSATSVLYYDDSSNVILRKHRNMVVRAXG

SEQ ID NO: 8063 - protein, 38 aa, Artificial Sequence
  GFR-binding peptide
  MOD_RES (4)..(5)..(37): Xaa is C or S
PKAXXAPTKLNAISVLYFDSSNNVILKKYRNMVVKAXG

SEQ ID NO: 8064 - protein, 37 aa, Artificial Sequence
  GFR-binding peptide
  MOD_RES (6)..(7): Xaa is C or S
AVPKAXXAPTKLSPISVLYKDSSNNVILKYHYNMVVK

SEQ ID NO: 8065 - protein, 33 aa, Artificial Sequence
  GFR-binding peptide
  MOD_RES (2)..(3): Xaa is C or S
PXXVPQALSPISILYKVGRKPKVLKYHYMIVRS

SEQ ID NO: 8066 - protein, 35 aa, Artificial Sequence
  GFR-binding peptide
  MOD_RES (4)..(5): Xaa is C or S
AAPXXVPQALSATSILYYVGRKPKVLRKHRMIVRS

SEQ ID NO: 8067 - protein, 38 aa, Artificial Sequence
  GFR-binding peptide
  MOD_RES (2)..(3)..(36)..(38): Xaa is C or S
  MOD_RES (17)..(18)..(19)..(20)..(21): Xaa is A or G
  MOD_RES (22)..(23)..(24)..(25): Xaa is A or G or is absent
PXXVPQDLSPISILYKXXXXXXXXXLKYHYMVVKSXKX

SEQ ID NO: 8068 - protein, 37 aa, Artificial Sequence
  GFR-binding peptide
  MOD_RES (2)..(3)..(34)..(36): Xaa is C or S
PXXVSQDLSPISILYKIGKTPKILKYHYMIVKSXKXS

SEQ ID NO: 8069 - protein, 35 aa, Artificial Sequence
  GFR-binding peptide
  MOD_RES (1)..(2): Xaa is C or S
  MOD_RES (16)..(17)..(18)..(19)..(20): Xaa is A or G
  MOD_RES (21)..(22)..(23)..(24): Xaa is A or G or is absent
XXAPTQLNAISVLYFXXXXXXXXXLKKYRNMVVRA

SEQ ID NO: 8070 - protein, 36 aa, Artificial Sequence
  GFR-binding peptide
  MOD_RES (1)..(35): Xaa is C or S
  MOD_RES (15)..(16)..(17)..(18)..(19): Xaa is A or G
  MOD_RES (20)..(21)..(22)..(23): Xaa is A or G or is absent
XAPTKLSAISVLYLXXXXXXXXXLKNYQNMVVRSXG

SEQ ID NO: 8071 - protein, 35 aa, Artificial Sequence
  GFR-binding peptide
  MOD_RES (16)..(17)..(18)..(19)..(20): Xaa is A or G
  MOD_RES (21)..(22)..(23)..(24): Xaa is A or G or is absent
RPTQVQLSPISVLYKXXXXXXXXXLKYHYTLEDHL

SEQ ID NO: 8072 - protein, 39 aa, Artificial Sequence
  GFR-binding peptide
  MOD_RES (2)..(39): Xaa is C or S
  MOD_RES (18)..(19)..(20)..(21)..(22): Xaa is A or G
  MOD_RES (23)..(24)..(25)..(26): Xaa is A or G or is absent
QXRPTQVQLSPISVLYKXXXXXXXXXLKYHYTLEDHLAX

SEQ ID NO: 8073 - protein, 33 aa, Artificial Sequence
  GFR-binding peptide
  MOD_RES (33)..(33): Xaa is C or S
  MOD_RES (14)..(15)..(16)..(17)..(18): Xaa is A or G
  MOD_RES (19)..(20)..(21)..(22): Xaa is A or G or is absent
VPQDLNAISILYFXXXXXXXXXLKKYRMVVKSX

SEQ ID NO: 8074 - protein, 39 aa, Artificial Sequence
  GFR-binding peptide
  MOD_RES (1)..(38): Xaa is C or S
XRPTQVQLSATSVLYYEIVRKKPIFLRKHRTLEDHLAXK

SEQ ID NO: 8075 - protein, 35 aa, Artificial Sequence
  GFR-binding peptide
  MOD_RES (34)..(34): Xaa is C or S
  MOD_RES (14)..(15)..(16)..(17)..(18): Xaa is A or G
  MOD_RES (19)..(20)..(21)..(22): Xaa is A or G or is absent
VPTELSAISMLYLXXXXXXXXXLKNYQEMVVEGXG

SEQ ID NO: 8076 - protein, 34 aa, Artificial Sequence
  GFR-binding peptide
  MOD_RES (1)..(34): Xaa is C or S
  MOD_RES (15)..(16)..(17)..(18)..(19): Xaa is A or G
  MOD_RES (20)..(21)..(22)..(23): Xaa is A or G or is absent
XVSQDLNAISILYFXXXXXXXXXLKKYRMIVKSX

SEQ ID NO: 8077 - protein, 36 aa, Artificial Sequence
  GFR-binding peptide
  MOD_RES (4)..(5): Xaa is C or S
PKAXXVPTELSPISMLYKDEYDKVVLKYHYEMVVEG

SEQ ID NO: 8078 - protein, 39 aa, Artificial Sequence
  GFR-binding peptide
  MOD_RES (6)..(7)..(38): Xaa is C or S
ASASPXXVSQDLSATSILYYIGKTPKILRKHRMIVKSXK

SEQ ID NO: 8079 - protein, 37 aa, Artificial Sequence
  GFR-binding peptide
  MOD_RES (1)..(1): Xaa is C or S
XRPTQVQLSATSVLYYEIVRKKPIFLRKHRTLEDHLA

SEQ ID NO: 8080 - protein, 36 aa, Artificial Sequence
  GFR-binding peptide
  MOD_RES (2)..(3)..(35): Xaa is C or S
AXXVPTELSPISMLYKDEYDKVVLKYHYEMVVEGXG

SEQ ID NO: 8081 - protein, 42 aa, Artificial Sequence
  GFR-binding peptide
  MOD_RES (2)..(39)..(41): Xaa is C or S
  MOD_RES (18)..(19)..(20)..(21)..(22): Xaa is A or G
  MOD_RES (23)..(24)..(25)..(26): Xaa is A or G or is absent
QXRPTQVQLNAISVLYFXXXXXXXXXLKKYRTLEDHLAXKXE

SEQ ID NO: 8082 - protein, 36 aa, Artificial Sequence
  GFR-binding peptide
  MOD_RES (4)..(5)..(36): Xaa is C or S
ASPXXVSQDLSPISILYKIGKTPKILKYHYMIVKSX

SEQ ID NO: 8083 - protein, 37 aa, Artificial Sequence
  GFR-binding peptide
  MOD_RES (1)..(35)..(37): Xaa is C or S
  MOD_RES (15)..(16)..(17)..(18)..(19): Xaa is A or G
  MOD_RES (20)..(21)..(22)..(23): Xaa is A or G or is absent
XVPTELSATSMLYYXXXXXXXXXLRKHREMVVEGXGX

SEQ ID NO: 8084 - protein, 32 aa, Artificial Sequence
  GFR-binding peptide
  MOD_RES (14)..(15)..(16)..(17)..(18): Xaa is A or G
  MOD_RES (19)..(20)..(21)..(22): Xaa is A or G or is absent
VPQDLSAISILYLXXXXXXXXXLKNYQMVVKS

SEQ ID NO: 8085 - protein, 40 aa, Artificial Sequence
  GFR-binding peptide
  MOD_RES (3)..(4)..(37)..(39): Xaa is C or S
  MOD_RES (18)..(19)..(20)..(21)..(22): Xaa is A or G
  MOD_RES (23)..(24)..(25)..(26): Xaa is A or G or is absent
SPXXVPQDLSPISILYKXXXXXXXXXLKYHYMVVKSXKXS

SEQ ID NO: 8086 - protein, 35 aa, Artificial Sequence
  GFR-binding peptide
  MOD_RES (1)..(1): Xaa is C or S
XRPTQVQLNAISVLYFEIVRKKPIFLKKYRTLEDH

SEQ ID NO: 8087 - protein, 39 aa, Artificial Sequence
  GFR-binding peptide
  MOD_RES (2)..(3)..(37)..(39): Xaa is C or S
  MOD_RES (17)..(18)..(19)..(20)..(21): Xaa is A or G
  MOD_RES (22)..(23)..(24)..(25): Xaa is A or G or is absent
PXXAPTQLSAISVLYLXXXXXXXXXLKNYQNMVVRAXGX

SEQ ID NO: 8088 - protein, 33 aa, Artificial Sequence
  GFR-binding peptide
  MOD_RES (1)..(1): Xaa is C or S
  MOD_RES (15)..(16)..(17)..(18)..(19): Xaa is A or G
  MOD_RES (20)..(21)..(22)..(23): Xaa is A or G or is absent
XAPTQLNAISVLYFXXXXXXXXXLKKYRNMVVR

SEQ ID NO: 8089 - protein, 34 aa, Artificial Sequence
  GFR-binding peptide
  MOD_RES (2)..(3)..(34): Xaa is C or S
PXXVPQDLNAISILYFVGRTPKVLKKYRMVVKSX

SEQ ID NO: 8090 - protein, 38 aa, Artificial Sequence
  GFR-binding peptide
  MOD_RES (2)..(2): Xaa is C or S
QXRPTQVQLSAISVLYLEIVRKKPIFLKNYQTLEDHLA

SEQ ID NO: 8091 - protein, 37 aa, Artificial Sequence
  GFR-binding peptide
  MOD_RES (1)..(2)..(34)..(36): Xaa is C or S
XXAPTKLSPISVLYKDSSNNVILKYHYNMVVKAXGXH

SEQ ID NO: 8092 - protein, 33 aa, Artificial Sequence
  GFR-binding peptide
  MOD_RES (33)..(33): Xaa is C or S
VPTKLSAISVLYLDDMGVPTLKNYQEGMSVAEX

SEQ ID NO: 8093 - protein, 37 aa, Artificial Sequence
  GFR-binding peptide
  MOD_RES (1)..(2)..(34)..(36): Xaa is C or S
XXVPTELSATSMLYYDENEKVVLRKHRDMVVEGXGXR

SEQ ID NO: 8094 - protein, 37 aa, Artificial Sequence
  GFR-binding peptide
  MOD_RES (34)..(36): Xaa is C or S
  MOD_RES (14)..(15)..(16)..(17)..(18): Xaa is A or G
  MOD_RES (19)..(20)..(21)..(22): Xaa is A or G or is absent
VPTELNAISMLYFXXXXXXXXXLKKYRDMVVEGXGXR

SEQ ID NO: 8095 - protein, 36 aa, Artificial Sequence
  GFR-binding peptide
  MOD_RES (1)..(35): Xaa is C or S
  MOD_RES (15)..(16)..(17)..(18)..(19): Xaa is A or G
  MOD_RES (20)..(21)..(22)..(23): Xaa is A or G or is absent
XVPTELSAISMLYLXXXXXXXXXLKNYQDMVVEGXG

SEQ ID NO: 8096 - protein, 42 aa, Artificial Sequence
  GFR-binding peptide
  MOD_RES (4)..(5)..(39)..(41): Xaa is C or S
  MOD_RES (19)..(20)..(21)..(22)..(23): Xaa is A or G
  MOD_RES (24)..(25)..(26)..(27): Xaa is A or G or is absent
PKAXXVPTELNAISMLYFXXXXXXXXXLKKYRDMVVEGXGXR

SEQ ID NO: 8097 - protein, 42 aa, Artificial Sequence
  GFR-binding peptide
  MOD_RES (6)..(7)..(41): Xaa is C or S
  MOD_RES (21)..(22)..(23)..(24)..(25): Xaa is A or G
  MOD_RES (26)..(27)..(28)..(29): Xaa is A or G or is absent
KIPKAXXVPTELNAISMLYFXXXXXXXXXLKKYRDMVVEGXG

SEQ ID NO: 8098 - protein, 35 aa, Artificial Sequence
  GFR-binding peptide
  MOD_RES (4)..(5): Xaa is C or S
ASPXXVPQDLSPISILYKVGRTPKVLKYHYMVVKS

SEQ ID NO: 8099 - protein, 32 aa, Artificial Sequence
  GFR-binding peptide
  MOD_RES (1)..(1): Xaa is C or S
XAPTQLSPISVLYKDDSSNVILKYHYNMVVRA

SEQ ID NO: 8100 - protein, 40 aa, Artificial Sequence
  GFR-binding peptide
  MOD_RES (5)..(6)..(38)..(40): Xaa is C or S
VPKPXXAPTKLSPISVLYKDDSSNVILKYHYNMVVRSXGX

SEQ ID NO: 8101 - protein, 34 aa, Artificial Sequence
  GFR-binding peptide
  MOD_RES (34)..(34): Xaa is C or S
  MOD_RES (14)..(15)..(16)..(17)..(18): Xaa is A or G
  MOD_RES (19)..(20)..(21)..(22): Xaa is A or G or is absent
APTKLNAISVLYFXXXXXXXXXLKKYRNMVVRSX

SEQ ID NO: 8102 - protein, 39 aa, Artificial Sequence
  GFR-binding peptide
  MOD_RES (4)..(5)..(39): Xaa is C or S
  MOD_RES (19)..(20)..(21)..(22)..(23): Xaa is A or G
  MOD_RES (24)..(25)..(26)..(27): Xaa is A or G or is absent
PKAXXVPTELSAISMLYLXXXXXXXXXLKNYQDMVVEGX

SEQ ID NO: 8103 - protein, 38 aa, Artificial Sequence
  GFR-binding peptide
  MOD_RES (2)..(2): Xaa is C or S
QXRPTQVQLSATSVLYYEIVRKKPIFLRKHRTLEDHLA

SEQ ID NO: 8104 - protein, 36 aa, Artificial Sequence
  GFR-binding peptide
  MOD_RES (16)..(17)..(18)..(19)..(20): Xaa is A or G
  MOD_RES (21)..(22)..(23)..(24): Xaa is A or G or is absent
RPTQVQLSPISVLYKXXXXXXXXXLKYHYTLEDHLA

SEQ ID NO: 8105 - protein, 39 aa, Artificial Sequence
  GFR-binding peptide
  MOD_RES (4)..(5)..(38): Xaa is C or S
GKAXXVPTKLSAISVLYLDDMGVPTLKNYQEGMSVAEXG

SEQ ID NO: 8106 - protein, 35 aa, Artificial Sequence
  GFR-binding peptide
  MOD_RES (2)..(3): Xaa is C or S
  MOD_RES (17)..(18)..(19)..(20)..(21): Xaa is A or G
  MOD_RES (22)..(23)..(24)..(25): Xaa is A or G or is absent
PXXAPTKLNAISVLYFXXXXXXXXXLKKYRNMVVR

SEQ ID NO: 8107 - protein, 39 aa, Artificial Sequence
  GFR-binding peptide
  MOD_RES (4)..(38): Xaa is C or S
  MOD_RES (18)..(19)..(20)..(21)..(22): Xaa is A or G
  MOD_RES (23)..(24)..(25)..(26): Xaa is A or G or is absent
KPTXAPTKLSAISVLYLXXXXXXXXXLKNYQNMVVRSXG

SEQ ID NO: 8108 - protein, 39 aa, Artificial Sequence
  GFR-binding peptide
  MOD_RES (5)..(6): Xaa is C or S
  MOD_RES (20)..(21)..(22)..(23)..(24): Xaa is A or G
  MOD_RES (25)..(26)..(27)..(28): Xaa is A or G or is absent
IPKAXXVPTELSAISMLYLXXXXXXXXXLKNYQEMVVEG

SEQ ID NO: 8109 - protein, 35 aa, Artificial Sequence
  GFR-binding peptide
  MOD_RES (1)..(1): Xaa is C or S
  MOD_RES (15)..(16)..(17)..(18)..(19): Xaa is A or G
  MOD_RES (20)..(21)..(22)..(23): Xaa is A or G or is absent
XVPTKLNAISVLYFXXXXXXXXXLKKYREGMSVAE

SEQ ID NO: 8110 - protein, 36 aa, Artificial Sequence
  GFR-binding peptide
  MOD_RES (3)..(35): Xaa is C or S
PTXAPTKLSAISVLYLDDSSNVILKNYQNMVVRSXG

SEQ ID NO: 8111 - protein, 37 aa, Artificial Sequence
  GFR-binding peptide
  MOD_RES (1)..(1): Xaa is C or S
XRPTQVQLSAISVLYLEIVRKKPIFLKNYQTLEDHLA

SEQ ID NO: 8112 - protein, 39 aa, Artificial Sequence
  GFR-binding peptide
  MOD_RES (6)..(7)..(39): Xaa is C or S
AVPKAXXAPTKLSAISVLYLDSSNNVILKNYQNMVVKAX

SEQ ID NO: 8113 - protein, 39 aa, Artificial Sequence
  GFR-binding peptide
  MOD_RES (3)..(4)..(37)..(39): Xaa is C or S
KAXXVPTKLSATSVLYYDDMGVPTLRKHREGMSVAEXGX

SEQ ID NO: 8114 - protein, 41 aa, Artificial Sequence
  GFR-binding peptide
  MOD_RES (4)..(38)..(40): Xaa is C or S
  MOD_RES (18)..(19)..(20)..(21)..(22): Xaa is A or G
  MOD_RES (23)..(24)..(25)..(26): Xaa is A or G or is absent
KPTXAPTKLNAISVLYFXXXXXXXXXLKKYRNMVVRSXGXH

SEQ ID NO: 8115 - protein, 39 aa, Artificial Sequence
  GFR-binding peptide
  MOD_RES (4)..(5)..(36)..(38): Xaa is C or S
ASPXXVSQDLSATSILYYIGKTPKILRKHRMIVKSXKXS

SEQ ID NO: 8116 - protein, 35 aa, Artificial Sequence
  GFR-binding peptide
  MOD_RES (33)..(35): Xaa is C or S
  MOD_RES (14)..(15)..(16)..(17)..(18): Xaa is A or G
  MOD_RES (19)..(20)..(21)..(22): Xaa is A or G or is absent
VPQDLSAISILYLXXXXXXXXXLKNYQMVVKSXKX

SEQ ID NO: 8117 - protein, 37 aa, Artificial Sequence
  GFR-binding peptide
  MOD_RES (1)..(35)..(37): Xaa is C or S
  MOD_RES (15)..(16)..(17)..(18)..(19): Xaa is A or G
  MOD_RES (20)..(21)..(22)..(23): Xaa is A or G or is absent
XVPTELSATSMLYYXXXXXXXXXLRKHRDMVVEGXGX

SEQ ID NO: 8118 - protein, 40 aa, Artificial Sequence
  GFR-binding peptide
  MOD_RES (3)..(4)..(37)..(39): Xaa is C or S
  MOD_RES (18)..(19)..(20)..(21)..(22): Xaa is A or G
  MOD_RES (23)..(24)..(25)..(26): Xaa is A or G or is absent
SPXXVSQDLSATSILYYXXXXXXXXXLRKHRMIVKSXKXS

SEQ ID NO: 8119 - protein, 40 aa, Artificial Sequence
  GFR-binding peptide
  MOD_RES (2)..(3)..(37)..(39): Xaa is C or S
  MOD_RES (17)..(18)..(19)..(20)..(21): Xaa is A or G
  MOD_RES (22)..(23)..(24)..(25): Xaa is A or G or is absent
AXXAPTKLSAISVLYLXXXXXXXXXLKNYQNMVVKAXGXH

SEQ ID NO: 8120 - protein, 36 aa, Artificial Sequence
  GFR-binding peptide
  MOD_RES (1)..(35): Xaa is C or S
  MOD_RES (15)..(16)..(17)..(18)..(19): Xaa is A or G
  MOD_RES (20)..(21)..(22)..(23): Xaa is A or G or is absent
XAPTKLSATSVLYYXXXXXXXXXLRKHRNMVVKAXG

SEQ ID NO: 8121 - protein, 36 aa, Artificial Sequence
  GFR-binding peptide
  MOD_RES (33)..(35): Xaa is C or S
  MOD_RES (14)..(15)..(16)..(17)..(18): Xaa is A or G
  MOD_RES (19)..(20)..(21)..(22): Xaa is A or G or is absent
VPQALNAISILYFXXXXXXXXXLKKYRMIVRSXKXS

SEQ ID NO: 8122 - protein, 42 aa, Artificial Sequence
  GFR-binding peptide
  MOD_RES (5)..(39)..(41): Xaa is C or S
  MOD_RES (19)..(20)..(21)..(22)..(23): Xaa is A or G
  MOD_RES (24)..(25)..(26)..(27): Xaa is A or G or is absent
TKPTXAPTKLSAISVLYLXXXXXXXXXLKNYQNMVVRSXGXH

SEQ ID NO: 8123 - protein, 42 aa, Artificial Sequence
  GFR-binding peptide
  MOD_RES (4)..(5)..(39)..(41): Xaa is C or S
  MOD_RES (19)..(20)..(21)..(22)..(23): Xaa is A or G
  MOD_RES (24)..(25)..(26)..(27): Xaa is A or G or is absent
PKAXXVPTELNAISMLYFXXXXXXXXXLKKYREMVVEGXGXR

SEQ ID NO: 8124 - protein, 33 aa, Artificial Sequence
  GFR-binding peptide
  MOD_RES (1)..(2): Xaa is C or S
XXAPTKLSAISVLYLDSSNNVILKNYQNMVVKA

SEQ ID NO: 8125 - protein, 33 aa, Artificial Sequence
  GFR-binding peptide
  MOD_RES (31)..(33): Xaa is C or S
VPQDLSAISILYLVGRTPKVLKNYQMVVKSXKX

SEQ ID NO: 8126 - protein, 34 aa, Artificial Sequence
  GFR-binding peptide
PTQVQLSAISVLYLEIVRKKPIFLKNYQTLEDHL

SEQ ID NO: 8127 - protein, 37 aa, Artificial Sequence
  GFR-binding peptide
  MOD_RES (3)..(3): Xaa is C or S
VQXRPTQVQLNAISVLYFEIVRKKPIFLKKYRTLEDH

SEQ ID NO: 8128 - protein, 33 aa, Artificial Sequence
  GFR-binding peptide
  MOD_RES (1)..(2): Xaa is C or S
XXAPTKLSPISVLYKDDSSNVILKYHYNMVVRS

SEQ ID NO: 8129 - protein, 38 aa, Artificial Sequence
  GFR-binding peptide
  MOD_RES (5)..(6): Xaa is C or S
  MOD_RES (20)..(21)..(22)..(23)..(24): Xaa is A or G
  MOD_RES (25)..(26)..(27)..(28): Xaa is A or G or is absent
SAAPXXVPQALSAISILYLXXXXXXXXXLKNYQMIVRS

SEQ ID NO: 8130 - protein, 35 aa, Artificial Sequence
  GFR-binding peptide
  MOD_RES (2)..(3)..(34): Xaa is C or S
PXXVPQDLSATSILYYVGRTPKVLRKHRMVVKSXK

SEQ ID NO: 8131 - protein, 40 aa, Artificial Sequence
  GFR-binding peptide
  MOD_RES (6)..(7): Xaa is C or S
  MOD_RES (21)..(22)..(23)..(24)..(25): Xaa is A or G
  MOD_RES (26)..(27)..(28)..(29): Xaa is A or G or is absent
AVPKAXXAPTKLSPISVLYKXXXXXXXXXLKYHYNMVVKA

SEQ ID NO: 8132 - protein, 39 aa, Artificial Sequence
  GFR-binding peptide
  MOD_RES (6)..(7): Xaa is C or S
  MOD_RES (21)..(22)..(23)..(24)..(25): Xaa is A or G
  MOD_RES (26)..(27)..(28)..(29): Xaa is A or G or is absent
SIPKAXXVPTELSAISMLYLXXXXXXXXXLKNYQEMVVE

SEQ ID NO: 8133 - protein, 41 aa, Artificial Sequence
  GFR-binding peptide
  MOD_RES (5)..(6)..(38)..(40): Xaa is C or S
VPKPXXAPTQLSATSVLYYDDSSNVILRKHRNMVVRAXGXH

SEQ ID NO: 8134 - protein, 33 aa, Artificial Sequence
  GFR-binding peptide
  MOD_RES (1)..(33): Xaa is C or S
XAPTKLSPISVLYKDDSSNVILKYHYNMVVRSX

SEQ ID NO: 8135 - protein, 38 aa, Artificial Sequence
  GFR-binding peptide
  MOD_RES (1)..(38): Xaa is C or S
  MOD_RES (17)..(18)..(19)..(20)..(21): Xaa is A or G
  MOD_RES (22)..(23)..(24)..(25): Xaa is A or G or is absent
XRPTQVQLSAISVLYLXXXXXXXXXLKNYQTLEDHLAX

SEQ ID NO: 8136 - protein, 38 aa, Artificial Sequence
  GFR-binding peptide
  MOD_RES (4)..(5)..(36)..(38): Xaa is C or S
AAPXXVPQALSATSILYYVGRKPKVLRKHRMIVRSXKX

SEQ ID NO: 8137 - protein, 34 aa, Artificial Sequence
  GFR-binding peptide
  MOD_RES (32)..(34): Xaa is C or S
APTKLNAISVLYFDSSNNVILKKYRNMVVKAXGX

SEQ ID NO: 8138 - protein, 35 aa, Artificial Sequence
  GFR-binding peptide
  MOD_RES (35)..(35): Xaa is C or S
  MOD_RES (14)..(15)..(16)..(17)..(18): Xaa is A or G
  MOD_RES (19)..(20)..(21)..(22): Xaa is A or G or is absent
VPTKLSPISVLYKXXXXXXXXXLKYHYEGMSVAEX

SEQ ID NO: 8139 - protein, 34 aa, Artificial Sequence
  GFR-binding peptide
  MOD_RES (3)..(4): Xaa is C or S
KPXXAPTQLSATSVLYYDDSSNVILRKHRNMVVR

SEQ ID NO: 8140 - protein, 43 aa, Artificial Sequence
  GFR-binding peptide
  MOD_RES (6)..(7)..(42): Xaa is C or S
  MOD_RES (21)..(22)..(23)..(24)..(25): Xaa is A or G
  MOD_RES (26)..(27)..(28)..(29): Xaa is A or G or is absent
KVGKAXXVPTKLNAISVLYFXXXXXXXXXLKKYREGMSVAEXG

SEQ ID NO: 8141 - protein, 43 aa, Artificial Sequence
  GFR-binding peptide
  MOD_RES (5)..(42): Xaa is C or S
RNVQXRPTQVQLSPISVLYKEIVRKKPIFLKYHYTLEDHLAXK

SEQ ID NO: 8142 - protein, 34 aa, Artificial Sequence
  GFR-binding peptide
  MOD_RES (1)..(33): Xaa is C or S
XVPTELNAISMLYFDENEKVVLKKYRDMVVEGXG

SEQ ID NO: 8143 - protein, 38 aa, Artificial Sequence
  GFR-binding peptide
  MOD_RES (5)..(6): Xaa is C or S
  MOD_RES (20)..(21)..(22)..(23)..(24): Xaa is A or G
  MOD_RES (25)..(26)..(27)..(28): Xaa is A or G or is absent
VPKAXXAPTKLSAISVLYLXXXXXXXXXLKNYQNMVVK

SEQ ID NO: 8144 - protein, 42 aa, Artificial Sequence
  GFR-binding peptide
  MOD_RES (5)..(42): Xaa is C or S
  MOD_RES (21)..(22)..(23)..(24)..(25): Xaa is A or G
  MOD_RES (26)..(27)..(28)..(29): Xaa is A or G or is absent
RNVQXRPTQVQLSATSVLYYXXXXXXXXXLRKHRTLEDHLAX

SEQ ID NO: 8145 - protein, 35 aa, Artificial Sequence
  GFR-binding peptide
  MOD_RES (2)..(3)..(34): Xaa is C or S
PXXVPQALSAISILYLVGRKPKVLKNYQMIVRSXK

SEQ ID NO: 8146 - protein, 33 aa, Artificial Sequence
  GFR-binding peptide
  MOD_RES (1)..(2)..(33): Xaa is C or S
XXVPQDLSPISILYKVGRTPKVLKYHYMVVKSX

SEQ ID NO: 8147 - protein, 35 aa, Artificial Sequence
  GFR-binding peptide
  MOD_RES (1)..(2)..(33)..(35): Xaa is C or S
XXVPQDLNAISILYFVGRTPKVLKKYRMVVKSXKX

SEQ ID NO: 8148 - protein, 35 aa, Artificial Sequence
  GFR-binding peptide
  MOD_RES (4)..(5): Xaa is C or S
PKAXXAPTKLNAISVLYFDSSNNVILKKYRNMVVK

SEQ ID NO: 8149 - protein, 40 aa, Artificial Sequence
  GFR-binding peptide
  MOD_RES (5)..(6): Xaa is C or S
  MOD_RES (20)..(21)..(22)..(23)..(24): Xaa is A or G
  MOD_RES (25)..(26)..(27)..(28): Xaa is A or G or is absent
VGKAXXVPTKLSATSVLYYXXXXXXXXXLRKHREGMSVAE

SEQ ID NO: 8150 - protein, 33 aa, Artificial Sequence
  GFR-binding peptide
  MOD_RES (2)..(3): Xaa is C or S
PXXVPQDLNAISILYFVGRTPKVLKKYRMVVKS

SEQ ID NO: 8151 - protein, 36 aa, Artificial Sequence
  GFR-binding peptide
  MOD_RES (1)..(2)..(35): Xaa is C or S
  MOD_RES (16)..(17)..(18)..(19)..(20): Xaa is A or G
  MOD_RES (21)..(22)..(23)..(24): Xaa is A or G or is absent
XXVSQDLNAISILYFXXXXXXXXXLKKYRMIVKSXK

SEQ ID NO: 8152 - protein, 33 aa, Artificial Sequence
  GFR-binding peptide
  MOD_RES (2)..(3): Xaa is C or S
PXXVPQALSAISILYLVGRKPKVLKNYQMIVRS

SEQ ID NO: 8153 - protein, 40 aa, Artificial Sequence
  GFR-binding peptide
  MOD_RES (5)..(6): Xaa is C or S
  MOD_RES (20)..(21)..(22)..(23)..(24): Xaa is A or G
  MOD_RES (25)..(26)..(27)..(28): Xaa is A or G or is absent
VGKAXXVPTKLSAISVLYLXXXXXXXXXLKNYQEGMSVAE

SEQ ID NO: 8154 - protein, 34 aa, Artificial Sequence
  GFR-binding peptide
  MOD_RES (31)..(33): Xaa is C or S
VPQALSATSILYYVGRKPKVLRKHRMIVRSXKXS

SEQ ID NO: 8155 - protein, 40 aa, Artificial Sequence
  GFR-binding peptide
  MOD_RES (5)..(39): Xaa is C or S
  MOD_RES (19)..(20)..(21)..(22)..(23): Xaa is A or G
  MOD_RES (24)..(25)..(26)..(27): Xaa is A or G or is absent
TKPTXAPTKLSAISVLYLXXXXXXXXXLKNYQNMVVRSXG

SEQ ID NO: 8156 - protein, 34 aa, Artificial Sequence
  GFR-binding peptide
  MOD_RES (1)..(34): Xaa is C or S
  MOD_RES (15)..(16)..(17)..(18)..(19): Xaa is A or G
  MOD_RES (20)..(21)..(22)..(23): Xaa is A or G or is absent
XVPQDLSPISILYKXXXXXXXXXLKYHYMVVKSX

SEQ ID NO: 8157 - protein, 41 aa, Artificial Sequence
  GFR-binding peptide
  MOD_RES (4)..(5)..(39)..(41): Xaa is C or S
  MOD_RES (19)..(20)..(21)..(22)..(23): Xaa is A or G
  MOD_RES (24)..(25)..(26)..(27): Xaa is A or G or is absent
PKPXXAPTKLSPISVLYKXXXXXXXXXLKYHYNMVVRSXGX

SEQ ID NO: 8158 - protein, 36 aa, Artificial Sequence
  GFR-binding peptide
  MOD_RES (33)..(35): Xaa is C or S
VPTKLNAISVLYFDDMGVPTLKKYREGMSVAEXGXR

SEQ ID NO: 8159 - protein, 33 aa, Artificial Sequence
  GFR-binding peptide
  MOD_RES (2)..(3): Xaa is C or S
PXXAPTKLSAISVLYLDDSSNVILKNYQNMVVR

SEQ ID NO: 8160 - protein, 41 aa, Artificial Sequence
  GFR-binding peptide
  MOD_RES (5)..(6)..(40): Xaa is C or S
  MOD_RES (20)..(21)..(22)..(23)..(24): Xaa is A or G
  MOD_RES (25)..(26)..(27)..(28): Xaa is A or G or is absent
IPKAXXVPTELSAISMLYLXXXXXXXXXLKNYQDMVVEGXG

SEQ ID NO: 8161 - protein, 38 aa, Artificial Sequence
  GFR-binding peptide
  MOD_RES (5)..(6)..(37): Xaa is C or S
SAAPXXVPQALNAISILYFVGRKPKVLKKYRMIVRSXK

SEQ ID NO: 8162 - protein, 36 aa, Artificial Sequence
  GFR-binding peptide
  MOD_RES (2)..(3)..(36): Xaa is C or S
  MOD_RES (17)..(18)..(19)..(20)..(21): Xaa is A or G
  MOD_RES (22)..(23)..(24)..(25): Xaa is A or G or is absent
PXXVPQDLNAISILYFXXXXXXXXXLKKYRMVVKSX

SEQ ID NO: 8163 - protein, 36 aa, Artificial Sequence
  GFR-binding peptide
  MOD_RES (3)..(4): Xaa is C or S
  MOD_RES (18)..(19)..(20)..(21)..(22): Xaa is A or G
  MOD_RES (23)..(24)..(25)..(26): Xaa is A or G or is absent
KPXXAPTQLNAISVLYFXXXXXXXXXLKKYRNMVVR

SEQ ID NO: 8164 - protein, 35 aa, Artificial Sequence
  GFR-binding peptide
  MOD_RES (32)..(34): Xaa is C or S
VPTELSATSMLYYDENEKVVLRKHRDMVVEGXGXR

SEQ ID NO: 8165 - protein, 34 aa, Artificial Sequence
  GFR-binding peptide
  MOD_RES (33)..(33): Xaa is C or S
  MOD_RES (14)..(15)..(16)..(17)..(18): Xaa is A or G
  MOD_RES (19)..(20)..(21)..(22): Xaa is A or G or is absent
VPQDLNAISILYFXXXXXXXXXLKKYRMVVKSXK

SEQ ID NO: 8166 - protein, 34 aa, Artificial Sequence
  GFR-binding peptide
  MOD_RES (1)..(2)..(34): Xaa is C or S
XXVPTELSATSMLYYDEYDKVVLRKHREMVVEGX

SEQ ID NO: 8167 - protein, 35 aa, Artificial Sequence
  GFR-binding peptide
  MOD_RES (1)..(2)..(34): Xaa is C or S
XXVPTELSPISMLYKDEYDKVVLKYHYEMVVEGXG

SEQ ID NO: 8168 - protein, 33 aa, Artificial Sequence
  GFR-binding peptide
  MOD_RES (1)..(2)..(33): Xaa is C or S
XXVPQALNAISILYFVGRKPKVLKKYRMIVRSX

SEQ ID NO: 8169 - protein, 36 aa, Artificial Sequence
  GFR-binding peptide
  MOD_RES (36)..(36): Xaa is C or S
  MOD_RES (15)..(16)..(17)..(18)..(19): Xaa is A or G
  MOD_RES (20)..(21)..(22)..(23): Xaa is A or G or is absent
PTQVQLNAISVLYFXXXXXXXXXLKKYRTLEDHLAX

SEQ ID NO: 8170 - protein, 38 aa, Artificial Sequence
  GFR-binding peptide
  MOD_RES (2)..(3)..(36)..(38): Xaa is C or S
AXXVPTKLNAISVLYFDDMGVPTLKKYREGMSVAEXGX

SEQ ID NO: 8171 - protein, 41 aa, Artificial Sequence
  GFR-binding peptide
  MOD_RES (5)..(6)..(40): Xaa is C or S
  MOD_RES (20)..(21)..(22)..(23)..(24): Xaa is A or G
  MOD_RES (25)..(26)..(27)..(28): Xaa is A or G or is absent
VPKAXXAPTKLSAISVLYLXXXXXXXXXLKNYQNMVVKAXG

SEQ ID NO: 8172 - protein, 36 aa, Artificial Sequence
  GFR-binding peptide
  MOD_RES (4)..(5): Xaa is C or S
PKAXXVPTELSPISMLYKDENEKVVLKYHYDMVVEG

SEQ ID NO: 8173 - protein, 39 aa, Artificial Sequence
  GFR-binding peptide
  MOD_RES (5)..(6)..(38): Xaa is C or S
IPKAXXVPTELSATSMLYYDENEKVVLRKHRDMVVEGXG

SEQ ID NO: 8174 - protein, 35 aa, Artificial Sequence
  GFR-binding peptide
  MOD_RES (2)..(3): Xaa is C or S
  MOD_RES (17)..(18)..(19)..(20)..(21): Xaa is A or G
  MOD_RES (22)..(23)..(24)..(25): Xaa is A or G or is absent
PXXAPTQLSATSVLYYXXXXXXXXXLRKHRNMVVR

SEQ ID NO: 8175 - protein, 32 aa, Artificial Sequence
  GFR-binding peptide
  MOD_RES (31)..(31): Xaa is C or S
VSQDLSAISILYLIGKTPKILKNYQMIVKSXK

SEQ ID NO: 8176 - protein, 34 aa, Artificial Sequence
  GFR-binding peptide
  MOD_RES (1)..(2): Xaa is C or S
XXVPTKLSAISVLYLDDMGVPTLKNYQEGMSVAE

SEQ ID NO: 8177 - protein, 39 aa, Artificial Sequence
  GFR-binding peptide
  MOD_RES (7)..(7): Xaa is C or S
  MOD_RES (21)..(22)..(23)..(24)..(25): Xaa is A or G
  MOD_RES (26)..(27)..(28)..(29): Xaa is A or G or is absent
HVTKPTXAPTKLSATSVLYYXXXXXXXXXLRKHRNMVVR

SEQ ID NO: 8178 - protein, 38 aa, Artificial Sequence
  GFR-binding peptide
  MOD_RES (4)..(5): Xaa is C or S
  MOD_RES (19)..(20)..(21)..(22)..(23): Xaa is A or G
  MOD_RES (24)..(25)..(26)..(27): Xaa is A or G or is absent
PKPXXAPTKLNAISVLYFXXXXXXXXXLKKYRNMVVRS

SEQ ID NO: 8179 - protein, 36 aa, Artificial Sequence
  GFR-binding peptide
  MOD_RES (5)..(6): Xaa is C or S
VPKPXXAPTQLSATSVLYYDDSSNVILRKHRNMVVR

SEQ ID NO: 8180 - protein, 38 aa, Artificial Sequence
  GFR-binding peptide
  MOD_RES (4)..(5)..(37): Xaa is C or S
PKPXXAPTQLSAISVLYLDDSSNVILKNYQNMVVRAXG

SEQ ID NO: 8181 - protein, 41 aa, Artificial Sequence
  GFR-binding peptide
  MOD_RES (3)..(4)..(39)..(41): Xaa is C or S
  MOD_RES (18)..(19)..(20)..(21)..(22): Xaa is A or G
  MOD_RES (23)..(24)..(25)..(26): Xaa is A or G or is absent
KAXXVPTKLSPISVLYKXXXXXXXXXLKYHYEGMSVAEXGX

SEQ ID NO: 8182 - protein, 39 aa, Artificial Sequence
  GFR-binding peptide
  MOD_RES (4)..(5)..(36)..(38): Xaa is C or S
ASPXXVSQDLSAISILYLIGKTPKILKNYQMIVKSXKXS

SEQ ID NO: 8183 - protein, 35 aa, Artificial Sequence
  GFR-binding peptide
  MOD_RES (2)..(3): Xaa is C or S
  MOD_RES (17)..(18)..(19)..(20)..(21): Xaa is A or G
  MOD_RES (22)..(23)..(24)..(25): Xaa is A or G or is absent
AXXAPTKLNAISVLYFXXXXXXXXXLKKYRNMVVK

SEQ ID NO: 8184 - protein, 33 aa, Artificial Sequence
  GFR-binding peptide
  MOD_RES (2)..(3): Xaa is C or S
AXXVPTELSATSMLYYDENEKVVLRKHRDMVVE

SEQ ID NO: 8185 - protein, 32 aa, Artificial Sequence
  GFR-binding peptide
  MOD_RES (14)..(15)..(16)..(17)..(18): Xaa is A or G
  MOD_RES (19)..(20)..(21)..(22): Xaa is A or G or is absent
VPTELNAISMLYFXXXXXXXXXLKKYREMVVE

SEQ ID NO: 8186 - protein, 43 aa, Artificial Sequence
  GFR-binding peptide
  MOD_RES (6)..(7)..(40)..(42): Xaa is C or S
  MOD_RES (21)..(22)..(23)..(24)..(25): Xaa is A or G
  MOD_RES (26)..(27)..(28)..(29): Xaa is A or G or is absent
ASASPXXVSQDLNAISILYFXXXXXXXXXLKKYRMIVKSXKXS

SEQ ID NO: 8187 - protein, 39 aa, Artificial Sequence
  GFR-binding peptide
  MOD_RES (37)..(39): Xaa is C or S
RPTQVQLSPISVLYKEIVRKKPIFLKYHYTLEDHLAXKX

SEQ ID NO: 8188 - protein, 38 aa, Artificial Sequence
  GFR-binding peptide
  MOD_RES (4)..(5)..(38): Xaa is C or S
GKAXXVPTKLSAISVLYLDDMGVPTLKNYQEGMSVAEX

SEQ ID NO: 8189 - protein, 39 aa, Artificial Sequence
  GFR-binding peptide
  MOD_RES (5)..(6)..(38): Xaa is C or S
VPKPXXAPTQLSAISVLYLDDSSNVILKNYQNMVVRAXG

SEQ ID NO: 8190 - protein, 41 aa, Artificial Sequence
  GFR-binding peptide
  MOD_RES (5)..(6)..(40): Xaa is C or S
  MOD_RES (20)..(21)..(22)..(23)..(24): Xaa is A or G
  MOD_RES (25)..(26)..(27)..(28): Xaa is A or G or is absent
VPKPXXAPTQLSAISVLYLXXXXXXXXXLKNYQNMVVRAXG

SEQ ID NO: 8191 - protein, 36 aa, Artificial Sequence
  GFR-binding peptide
  MOD_RES (33)..(35): Xaa is C or S
  MOD_RES (14)..(15)..(16)..(17)..(18): Xaa is A or G
  MOD_RES (19)..(20)..(21)..(22): Xaa is A or G or is absent
VPQDLNAISILYFXXXXXXXXXLKKYRMVVKSXKXS

SEQ ID NO: 8192 - protein, 36 aa, Artificial Sequence
  GFR-binding peptide
  MOD_RES (2)..(3)..(36): Xaa is C or S
  MOD_RES (17)..(18)..(19)..(20)..(21): Xaa is A or G
  MOD_RES (22)..(23)..(24)..(25): Xaa is A or G or is absent
PXXVSQDLSATSILYYXXXXXXXXXLRKHRMIVKSX

SEQ ID NO: 8193 - protein, 34 aa, Artificial Sequence
  GFR-binding peptide
  MOD_RES (1)..(32)..(34): Xaa is C or S
XVSQDLNAISILYFIGKTPKILKKYRMIVKSXKX

SEQ ID NO: 8194 - protein, 34 aa, Artificial Sequence
  GFR-binding peptide
  MOD_RES (14)..(15)..(16)..(17)..(18): Xaa is A or G
  MOD_RES (19)..(20)..(21)..(22): Xaa is A or G or is absent
VPTKLSAISVLYLXXXXXXXXXLKNYQEGMSVAE

SEQ ID NO: 8195 - protein, 40 aa, Artificial Sequence
  GFR-binding peptide
  MOD_RES (3)..(4)..(37)..(39): Xaa is C or S
  MOD_RES (18)..(19)..(20)..(21)..(22): Xaa is A or G
  MOD_RES (23)..(24)..(25)..(26): Xaa is A or G or is absent
SPXXVPQDLSAISILYLXXXXXXXXXLKNYQMVVKSXKXS

SEQ ID NO: 8196 - protein, 35 aa, Artificial Sequence
  GFR-binding peptide
  MOD_RES (2)..(3)..(35): Xaa is C or S
AXXVPTELSPISMLYKDEYDKVVLKYHYEMVVEGX

SEQ ID NO: 8197 - protein, 44 aa, Artificial Sequence
  GFR-binding peptide
  MOD_RES (6)..(7)..(41)..(43): Xaa is C or S
  MOD_RES (21)..(22)..(23)..(24)..(25): Xaa is A or G
  MOD_RES (26)..(27)..(28)..(29): Xaa is A or G or is absent
YVPKPXXAPTKLSAISVLYLXXXXXXXXXLKNYQNMVVRSXGXH

SEQ ID NO: 8198 - protein, 34 aa, Artificial Sequence
  GFR-binding peptide
  MOD_RES (14)..(15)..(16)..(17)..(18): Xaa is A or G
  MOD_RES (19)..(20)..(21)..(22): Xaa is A or G or is absent
VPTKLSATSVLYYXXXXXXXXXLRKHREGMSVAE

SEQ ID NO: 8199 - protein, 38 aa, Artificial Sequence
  GFR-binding peptide
  MOD_RES (3)..(4)..(37): Xaa is C or S
  MOD_RES (18)..(19)..(20)..(21)..(22): Xaa is A or G
  MOD_RES (23)..(24)..(25)..(26): Xaa is A or G or is absent
SPXXVPQDLNAISILYFXXXXXXXXXLKKYRMVVKSXK

SEQ ID NO: 8200 - protein, 39 aa, Artificial Sequence
  GFR-binding peptide
  MOD_RES (5)..(6): Xaa is C or S
  MOD_RES (20)..(21)..(22)..(23)..(24): Xaa is A or G
  MOD_RES (25)..(26)..(27)..(28): Xaa is A or G or is absent
VPKPXXAPTKLSATSVLYYXXXXXXXXXLRKHRNMVVRS

SEQ ID NO: 8201 - protein, 37 aa, Artificial Sequence
  GFR-binding peptide
  MOD_RES (3)..(4)..(36): Xaa is C or S
KPXXAPTKLSAISVLYLDDSSNVILKNYQNMVVRSXG

SEQ ID NO: 8202 - protein, 33 aa, Artificial Sequence
  GFR-binding peptide
  MOD_RES (32)..(32): Xaa is C or S
VPTELSATSMLYYDEYDKVVLRKHREMVVEGXG

SEQ ID NO: 8203 - protein, 40 aa, Artificial Sequence
  GFR-binding peptide
  MOD_RES (1)..(2)..(37)..(39): Xaa is C or S
  MOD_RES (16)..(17)..(18)..(19)..(20): Xaa is A or G
  MOD_RES (21)..(22)..(23)..(24): Xaa is A or G or is absent
XXVPTKLNAISVLYFXXXXXXXXXLKKYREGMSVAEXGXR

SEQ ID NO: 8204 - protein, 39 aa, Artificial Sequence
  GFR-binding peptide
  MOD_RES (5)..(6)..(39): Xaa is C or S
  MOD_RES (20)..(21)..(22)..(23)..(24): Xaa is A or G
  MOD_RES (25)..(26)..(27)..(28): Xaa is A or G or is absent
SASPXXVSQDLSPISILYKXXXXXXXXXLKYHYMIVKSX

SEQ ID NO: 8205 - protein, 36 aa, Artificial Sequence
  GFR-binding peptide
  MOD_RES (3)..(4): Xaa is C or S
  MOD_RES (18)..(19)..(20)..(21)..(22): Xaa is A or G
  MOD_RES (23)..(24)..(25)..(26): Xaa is A or G or is absent
KPXXAPTQLSPISVLYKXXXXXXXXXLKYHYNMVVR

SEQ ID NO: 8206 - protein, 38 aa, Artificial Sequence
  GFR-binding peptide
  MOD_RES (1)..(35)..(37): Xaa is C or S
  MOD_RES (15)..(16)..(17)..(18)..(19): Xaa is A or G
  MOD_RES (20)..(21)..(22)..(23): Xaa is A or G or is absent
XVPTELSPISMLYKXXXXXXXXXLKYHYEMVVEGXGXR

SEQ ID NO: 8207 - protein, 38 aa, Artificial Sequence
  GFR-binding peptide
  MOD_RES (37)..(37): Xaa is C or S
RPTQVQLSATSVLYYEIVRKKPIFLRKHRTLEDHLAXK

SEQ ID NO: 8208 - protein, 34 aa, Artificial Sequence
  GFR-binding peptide
  MOD_RES (1)..(2): Xaa is C or S
  MOD_RES (16)..(17)..(18)..(19)..(20): Xaa is A or G
  MOD_RES (21)..(22)..(23)..(24): Xaa is A or G or is absent
XXVPQDLSAISILYLXXXXXXXXXLKNYQMVVKS

SEQ ID NO: 8209 - protein, 35 aa, Artificial Sequence
  GFR-binding peptide
  MOD_RES (4)..(5): Xaa is C or S
ASPXXVPQDLSATSILYYVGRTPKVLRKHRMVVKS

SEQ ID NO: 8210 - protein, 38 aa, Artificial Sequence
  GFR-binding peptide
  MOD_RES (1)..(2)..(36)..(38): Xaa is C or S
  MOD_RES (16)..(17)..(18)..(19)..(20): Xaa is A or G
  MOD_RES (21)..(22)..(23)..(24): Xaa is A or G or is absent
XXAPTKLSATSVLYYXXXXXXXXXLRKHRNMVVKAXGX

SEQ ID NO: 8211 - protein, 40 aa, Artificial Sequence
  GFR-binding peptide
  MOD_RES (5)..(6)..(39): Xaa is C or S
  MOD_RES (20)..(21)..(22)..(23)..(24): Xaa is A or G
  MOD_RES (25)..(26)..(27)..(28): Xaa is A or G or is absent
SASPXXVSQDLSPISILYKXXXXXXXXXLKYHYMIVKSXK

SEQ ID NO: 8212 - protein, 39 aa, Artificial Sequence
  GFR-binding peptide
  MOD_RES (5)..(6)..(39): Xaa is C or S
  MOD_RES (20)..(21)..(22)..(23)..(24): Xaa is A or G
  MOD_RES (25)..(26)..(27)..(28): Xaa is A or G or is absent
SAAPXXVPQALNAISILYFXXXXXXXXXLKKYRMIVRSX

SEQ ID NO: 8213 - protein, 39 aa, Artificial Sequence
  GFR-binding peptide
  MOD_RES (6)..(7): Xaa is C or S
  MOD_RES (21)..(22)..(23)..(24)..(25): Xaa is A or G
  MOD_RES (26)..(27)..(28)..(29): Xaa is A or G or is absent
ASASPXXVSQDLSPISILYKXXXXXXXXXLKYHYMIVKS

SEQ ID NO: 8214 - protein, 37 aa, Artificial Sequence
  GFR-binding peptide
  MOD_RES (4)..(5)..(36): Xaa is C or S
ASPXXVSQDLSPISILYKIGKTPKILKYHYMIVKSXK

SEQ ID NO: 8215 - protein, 34 aa, Artificial Sequence
  GFR-binding peptide
  MOD_RES (1)..(2)..(33): Xaa is C or S
XXVSQDLSAISILYLIGKTPKILKNYQMIVKSXK

SEQ ID NO: 8216 - protein, 36 aa, Artificial Sequence
  GFR-binding peptide
  MOD_RES (3)..(4): Xaa is C or S
  MOD_RES (18)..(19)..(20)..(21)..(22): Xaa is A or G
  MOD_RES (23)..(24)..(25)..(26): Xaa is A or G or is absent
APXXVPQALSATSILYYXXXXXXXXXLRKHRMIVRS

SEQ ID NO: 8217 - protein, 41 aa, Artificial Sequence
  GFR-binding peptide
  MOD_RES (6)..(7)..(39)..(41): Xaa is C or S
YVPKPXXAPTKLSAISVLYLDDSSNVILKNYQNMVVRSXGX

SEQ ID NO: 8218 - protein, 38 aa, Artificial Sequence
  GFR-binding peptide
  MOD_RES (6)..(7)..(38): Xaa is C or S
ASASPXXVSQDLSAISILYLIGKTPKILKNYQMIVKSX

SEQ ID NO: 8219 - protein, 35 aa, Artificial Sequence
  GFR-binding peptide
  MOD_RES (2)..(3)..(35): Xaa is C or S
AXXAPTKLSPISVLYKDSSNNVILKYHYNMVVKAX

SEQ ID NO: 8220 - protein, 38 aa, Artificial Sequence
  GFR-binding peptide
  MOD_RES (4)..(5)..(36)..(38): Xaa is C or S
ASPXXVPQDLSAISILYLVGRTPKVLKNYQMVVKSXKX

SEQ ID NO: 8221 - protein, 41 aa, Artificial Sequence
  GFR-binding peptide
  MOD_RES (6)..(7)..(39)..(41): Xaa is C or S
YVPKPXXAPTKLSPISVLYKDDSSNVILKYHYNMVVRSXGX

SEQ ID NO: 8222 - protein, 38 aa, Artificial Sequence
  GFR-binding peptide
  MOD_RES (36)..(38): Xaa is C or S
  MOD_RES (15)..(16)..(17)..(18)..(19): Xaa is A or G
  MOD_RES (20)..(21)..(22)..(23): Xaa is A or G or is absent
PTQVQLSAISVLYLXXXXXXXXXLKNYQTLEDHLAXKX

SEQ ID NO: 8223 - protein, 36 aa, Artificial Sequence
  GFR-binding peptide
  MOD_RES (2)..(3)..(36): Xaa is C or S
  MOD_RES (17)..(18)..(19)..(20)..(21): Xaa is A or G
  MOD_RES (22)..(23)..(24)..(25): Xaa is A or G or is absent
PXXVSQDLSAISILYLXXXXXXXXXLKNYQMIVKSX

SEQ ID NO: 8224 - protein, 42 aa, Artificial Sequence
  GFR-binding peptide
  MOD_RES (6)..(7)..(40)..(42): Xaa is C or S
  MOD_RES (21)..(22)..(23)..(24)..(25): Xaa is A or G
  MOD_RES (26)..(27)..(28)..(29): Xaa is A or G or is absent
ASASPXXVPQDLSPISILYKXXXXXXXXXLKYHYMVVKSXKX

SEQ ID NO: 8225 - protein, 40 aa, Artificial Sequence
  GFR-binding peptide
  MOD_RES (4)..(5)..(39): Xaa is C or S
  MOD_RES (19)..(20)..(21)..(22)..(23): Xaa is A or G
  MOD_RES (24)..(25)..(26)..(27): Xaa is A or G or is absent
PKPXXAPTKLSATSVLYYXXXXXXXXXLRKHRNMVVRSXG

SEQ ID NO: 8226 - protein, 40 aa, Artificial Sequence
  GFR-binding peptide
  MOD_RES (5)..(6)..(39): Xaa is C or S
  MOD_RES (20)..(21)..(22)..(23)..(24): Xaa is A or G
  MOD_RES (25)..(26)..(27)..(28): Xaa is A or G or is absent
SASPXXVPQDLSAISILYLXXXXXXXXXLKNYQMVVKSXK

SEQ ID NO: 8227 - protein, 37 aa, Artificial Sequence
  GFR-binding peptide
  MOD_RES (3)..(4)..(36): Xaa is C or S
KAXXVPTELNAISMLYFDEYDKVVLKKYREMVVEGXG

SEQ ID NO: 8228 - protein, 39 aa, Artificial Sequence
  GFR-binding peptide
  MOD_RES (5)..(6): Xaa is C or S
  MOD_RES (20)..(21)..(22)..(23)..(24): Xaa is A or G
  MOD_RES (25)..(26)..(27)..(28): Xaa is A or G or is absent
IPKAXXVPTELSPISMLYKXXXXXXXXXLKYHYDMVVEG

SEQ ID NO: 8229 - protein, 34 aa, Artificial Sequence
  GFR-binding peptide
  MOD_RES (33)..(33): Xaa is C or S
  MOD_RES (14)..(15)..(16)..(17)..(18): Xaa is A or G
  MOD_RES (19)..(20)..(21)..(22): Xaa is A or G or is absent
VSQDLNAISILYFXXXXXXXXXLKKYRMIVKSXK

SEQ ID NO: 8230 - protein, 40 aa, Artificial Sequence
  GFR-binding peptide
  MOD_RES (4)..(5)..(39): Xaa is C or S
  MOD_RES (19)..(20)..(21)..(22)..(23): Xaa is A or G
  MOD_RES (24)..(25)..(26)..(27): Xaa is A or G or is absent
PKAXXVPTELSAISMLYLXXXXXXXXXLKNYQEMVVEGXG

SEQ ID NO: 8231 - protein, 39 aa, Artificial Sequence
  GFR-binding peptide
  MOD_RES (6)..(7)..(39): Xaa is C or S
TVPKPXXAPTQLSATSVLYYDDSSNVILRKHRNMVVRAX

SEQ ID NO: 8232 - protein, 37 aa, Artificial Sequence
  GFR-binding peptide
  MOD_RES (2)..(3)..(34)..(36): Xaa is C or S
PXXVPQDLSAISILYLVGRTPKVLKNYQMVVKSXKXS

SEQ ID NO: 8233 - protein, 43 aa, Artificial Sequence
  GFR-binding peptide
  MOD_RES (4)..(5)..(40)..(42): Xaa is C or S
  MOD_RES (19)..(20)..(21)..(22)..(23): Xaa is A or G
  MOD_RES (24)..(25)..(26)..(27): Xaa is A or G or is absent
GKAXXVPTKLSAISVLYLXXXXXXXXXLKNYQEGMSVAEXGXR

SEQ ID NO: 8234 - protein, 41 aa, Artificial Sequence
  GFR-binding peptide
  MOD_RES (6)..(7)..(39)..(41): Xaa is C or S
KIPKAXXVPTELSATSMLYYDENEKVVLRKHRDMVVEGXGX

SEQ ID NO: 8235 - protein, 42 aa, Artificial Sequence
  GFR-binding peptide
  MOD_RES (5)..(6)..(40)..(42): Xaa is C or S
  MOD_RES (20)..(21)..(22)..(23)..(24): Xaa is A or G
  MOD_RES (25)..(26)..(27)..(28): Xaa is A or G or is absent
VPKPXXAPTKLSATSVLYYXXXXXXXXXLRKHRNMVVRSXGX

SEQ ID NO: 8236 - protein, 36 aa, Artificial Sequence
  GFR-binding peptide
  MOD_RES (2)..(36): Xaa is C or S
  MOD_RES (16)..(17)..(18)..(19)..(20): Xaa is A or G
  MOD_RES (21)..(22)..(23)..(24): Xaa is A or G or is absent
TXAPTKLSAISVLYLXXXXXXXXXLKNYQNMVVRSX

SEQ ID NO: 8237 - protein, 41 aa, Artificial Sequence
  GFR-binding peptide
  MOD_RES (4)..(41): Xaa is C or S
  MOD_RES (20)..(21)..(22)..(23)..(24): Xaa is A or G
  MOD_RES (25)..(26)..(27)..(28): Xaa is A or G or is absent
NVQXRPTQVQLSAISVLYLXXXXXXXXXLKNYQTLEDHLAX

SEQ ID NO: 8238 - protein, 37 aa, Artificial Sequence
  GFR-binding peptide
  MOD_RES (2)..(3)..(36): Xaa is C or S
  MOD_RES (17)..(18)..(19)..(20)..(21): Xaa is A or G
  MOD_RES (22)..(23)..(24)..(25): Xaa is A or G or is absent
PXXVSQDLSATSILYYXXXXXXXXXLRKHRMIVKSXK

SEQ ID NO: 8239 - protein, 34 aa, Artificial Sequence
  GFR-binding peptide
  MOD_RES (34)..(34): Xaa is C or S
  MOD_RES (14)..(15)..(16)..(17)..(18): Xaa is A or G
  MOD_RES (19)..(20)..(21)..(22): Xaa is A or G or is absent
APTKLSAISVLYLXXXXXXXXXLKNYQNMVVKAX

SEQ ID NO: 8240 - protein, 35 aa, Artificial Sequence
  GFR-binding peptide
  MOD_RES (1)..(2): Xaa is C or S
  MOD_RES (16)..(17)..(18)..(19)..(20): Xaa is A or G
  MOD_RES (21)..(22)..(23)..(24): Xaa is A or G or is absent
XXVPTELNAISMLYFXXXXXXXXXLKKYREMVVEG

SEQ ID NO: 8241 - protein, 39 aa, Artificial Sequence
  GFR-binding peptide
  MOD_RES (3)..(4)..(38): Xaa is C or S
  MOD_RES (18)..(19)..(20)..(21)..(22): Xaa is A or G
  MOD_RES (23)..(24)..(25)..(26): Xaa is A or G or is absent
KAXXVPTELNAISMLYFXXXXXXXXXLKKYRDMVVEGXG

SEQ ID NO: 8242 - protein, 37 aa, Artificial Sequence
  GFR-binding peptide
  MOD_RES (4)..(36): Xaa is C or S
KPTXAPTKLSATSVLYYDDSSNVILRKHRNMVVRSXG

SEQ ID NO: 8243 - protein, 37 aa, Artificial Sequence
  GFR-binding peptide
  MOD_RES (4)..(5): Xaa is C or S
  MOD_RES (19)..(20)..(21)..(22)..(23): Xaa is A or G
  MOD_RES (24)..(25)..(26)..(27): Xaa is A or G or is absent
ASPXXVPQDLSATSILYYXXXXXXXXXLRKHRMVVKS

SEQ ID NO: 8244 - protein, 43 aa, Artificial Sequence
  GFR-binding peptide
  MOD_RES (6)..(40)..(42): Xaa is C or S
  MOD_RES (20)..(21)..(22)..(23)..(24): Xaa is A or G
  MOD_RES (25)..(26)..(27)..(28): Xaa is A or G or is absent
VTKPTXAPTKLSATSVLYYXXXXXXXXXLRKHRNMVVRSXGXH

SEQ ID NO: 8245 - protein, 37 aa, Artificial Sequence
  GFR-binding peptide
  MOD_RES (2)..(3)..(35)..(37): Xaa is C or S
PXXAPTKLSATSVLYYDDSSNVILRKHRNMVVRSXGX

SEQ ID NO: 8246 - protein, 33 aa, Artificial Sequence
  GFR-binding peptide
  MOD_RES (2)..(3): Xaa is C or S
PXXAPTKLSATSVLYYDDSSNVILRKHRNMVVR

SEQ ID NO: 8247 - protein, 37 aa, Artificial Sequence
  GFR-binding peptide
  MOD_RES (3)..(4): Xaa is C or S
  MOD_RES (18)..(19)..(20)..(21)..(22): Xaa is A or G
  MOD_RES (23)..(24)..(25)..(26): Xaa is A or G or is absent
KPXXAPTQLSATSVLYYXXXXXXXXXLRKHRNMVVRA

SEQ ID NO: 8248 - protein, 36 aa, Artificial Sequence
  GFR-binding peptide
  MOD_RES (4)..(36): Xaa is C or S
KPTXAPTKLSAISVLYLDDSSNVILKNYQNMVVRSX

SEQ ID NO: 8249 - protein, 35 aa, Artificial Sequence
  GFR-binding peptide
  MOD_RES (2)..(3): Xaa is C or S
  MOD_RES (17)..(18)..(19)..(20)..(21): Xaa is A or G
  MOD_RES (22)..(23)..(24)..(25): Xaa is A or G or is absent
PXXVSQDLNAISILYFXXXXXXXXXLKKYRMIVKS

SEQ ID NO: 8250 - protein, 36 aa, Artificial Sequence
  GFR-binding peptide
  MOD_RES (34)..(36): Xaa is C or S
  MOD_RES (14)..(15)..(16)..(17)..(18): Xaa is A or G
  MOD_RES (19)..(20)..(21)..(22): Xaa is A or G or is absent
APTQLSATSVLYYXXXXXXXXXLRKHRNMVVRAXGX

SEQ ID NO: 8251 - protein, 34 aa, Artificial Sequence
  GFR-binding peptide
  MOD_RES (16)..(17)..(18)..(19)..(20): Xaa is A or G
  MOD_RES (21)..(22)..(23)..(24): Xaa is A or G or is absent
RPTQVQLNAISVLYFXXXXXXXXXLKKYRTLEDH

SEQ ID NO: 8252 - protein, 35 aa, Artificial Sequence
  GFR-binding peptide
  MOD_RES (3)..(4): Xaa is C or S
KAXXVPTELSATSMLYYDEYDKVVLRKHREMVVEG

SEQ ID NO: 8253 - protein, 37 aa, Artificial Sequence
  GFR-binding peptide
  MOD_RES (1)..(35)..(37): Xaa is C or S
  MOD_RES (15)..(16)..(17)..(18)..(19): Xaa is A or G
  MOD_RES (20)..(21)..(22)..(23): Xaa is A or G or is absent
XAPTQLSPISVLYKXXXXXXXXXLKYHYNMVVRAXGX

SEQ ID NO: 8254 - protein, 38 aa, Artificial Sequence
  GFR-binding peptide
  MOD_RES (2)..(3)..(35)..(37): Xaa is C or S
AXXAPTKLSPISVLYKDSSNNVILKYHYNMVVKAXGXH

SEQ ID NO: 8255 - protein, 34 aa, Artificial Sequence
  GFR-binding peptide
  MOD_RES (31)..(33): Xaa is C or S
VPQALSAISILYLVGRKPKVLKNYQMIVRSXKXS

SEQ ID NO: 8256 - protein, 37 aa, Artificial Sequence
  GFR-binding peptide
  MOD_RES (5)..(5): Xaa is C or S
  MOD_RES (19)..(20)..(21)..(22)..(23): Xaa is A or G
  MOD_RES (24)..(25)..(26)..(27): Xaa is A or G or is absent
TKPTXAPTKLSAISVLYLXXXXXXXXXLKNYQNMVVR

SEQ ID NO: 8257 - protein, 41 aa, Artificial Sequence
  GFR-binding peptide
  MOD_RES (2)..(3)..(38)..(40): Xaa is C or S
  MOD_RES (17)..(18)..(19)..(20)..(21): Xaa is A or G
  MOD_RES (22)..(23)..(24)..(25): Xaa is A or G or is absent
AXXVPTKLSATSVLYYXXXXXXXXXLRKHREGMSVAEXGXR

SEQ ID NO: 8258 - protein, 39 aa, Artificial Sequence
  GFR-binding peptide
  MOD_RES (4)..(5)..(39): Xaa is C or S
  MOD_RES (19)..(20)..(21)..(22)..(23): Xaa is A or G
  MOD_RES (24)..(25)..(26)..(27): Xaa is A or G or is absent
PKAXXVPTELSPISMLYKXXXXXXXXXLKYHYDMVVEGX

SEQ ID NO: 8259 - protein, 38 aa, Artificial Sequence
  GFR-binding peptide
  MOD_RES (3)..(35)..(37): Xaa is C or S
PTXAPTKLSATSVLYYDDSSNVILRKHRNMVVRSXGXH

SEQ ID NO: 8260 - protein, 43 aa, Artificial Sequence
  GFR-binding peptide
  MOD_RES (3)..(40)..(42): Xaa is C or S
  MOD_RES (19)..(20)..(21)..(22)..(23): Xaa is A or G
  MOD_RES (24)..(25)..(26)..(27): Xaa is A or G or is absent
VQXRPTQVQLSATSVLYYXXXXXXXXXLRKHRTLEDHLAXKXE

SEQ ID NO: 8261 - protein, 35 aa, Artificial Sequence
  GFR-binding peptide
  MOD_RES (32)..(34): Xaa is C or S
APTKLSPISVLYKDSSNNVILKYHYNMVVKAXGXH

SEQ ID NO: 8262 - protein, 34 aa, Artificial Sequence
  GFR-binding peptide
  MOD_RES (1)..(2)..(33): Xaa is C or S
XXVSQDLNAISILYFIGKTPKILKKYRMIVKSXK

SEQ ID NO: 8263 - protein, 34 aa, Artificial Sequence
  GFR-binding peptide
  MOD_RES (2)..(3): Xaa is C or S
AXXAPTKLSPISVLYKDSSNNVILKYHYNMVVKA

SEQ ID NO: 8264 - protein, 34 aa, Artificial Sequence
  GFR-binding peptide
  MOD_RES (1)..(33): Xaa is C or S
XAPTKLNAISVLYFDSSNNVILKKYRNMVVKAXG

SEQ ID NO: 8265 - protein, 37 aa, Artificial Sequence
  GFR-binding peptide
  MOD_RES (4)..(4): Xaa is C or S
  MOD_RES (18)..(19)..(20)..(21)..(22): Xaa is A or G
  MOD_RES (23)..(24)..(25)..(26): Xaa is A or G or is absent
KPTXAPTKLSATSVLYYXXXXXXXXXLRKHRNMVVRS

SEQ ID NO: 8266 - protein, 38 aa, Artificial Sequence
  GFR-binding peptide
  MOD_RES (5)..(37): Xaa is C or S
TKPTXAPTKLSAISVLYLDDSSNVILKNYQNMVVRSXG

SEQ ID NO: 8267 - protein, 40 aa, Artificial Sequence
  GFR-binding peptide
  MOD_RES (6)..(7)..(38)..(40): Xaa is C or S
ASASPXXVSQDLSATSILYYIGKTPKILRKHRMIVKSXKX

SEQ ID NO: 8268 - protein, 39 aa, Artificial Sequence
  GFR-binding peptide
  MOD_RES (3)..(4)..(36)..(38): Xaa is C or S
KPXXAPTQLSAISVLYLDDSSNVILKNYQNMVVRAXGXH

SEQ ID NO: 8269 - protein, 41 aa, Artificial Sequence
  GFR-binding peptide
  MOD_RES (3)..(4)..(38)..(40): Xaa is C or S
  MOD_RES (18)..(19)..(20)..(21)..(22): Xaa is A or G
  MOD_RES (23)..(24)..(25)..(26): Xaa is A or G or is absent
KPXXAPTKLSATSVLYYXXXXXXXXXLRKHRNMVVRSXGXH

SEQ ID NO: 8270 - protein, 39 aa, Artificial Sequence
  GFR-binding peptide
  MOD_RES (3)..(3): Xaa is C or S
  MOD_RES (19)..(20)..(21)..(22)..(23): Xaa is A or G
  MOD_RES (24)..(25)..(26)..(27): Xaa is A or G or is absent
VQXRPTQVQLSPISVLYKXXXXXXXXXLKYHYTLEDHLA

SEQ ID NO: 8271 - protein, 41 aa, Artificial Sequence
  GFR-binding peptide
  MOD_RES (7)..(41): Xaa is C or S
  MOD_RES (21)..(22)..(23)..(24)..(25): Xaa is A or G
  MOD_RES (26)..(27)..(28)..(29): Xaa is A or G or is absent
HVTKPTXAPTKLSAISVLYLXXXXXXXXXLKNYQNMVVRSX

SEQ ID NO: 8272 - protein, 38 aa, Artificial Sequence
  GFR-binding peptide
  MOD_RES (3)..(4)..(38): Xaa is C or S
  MOD_RES (18)..(19)..(20)..(21)..(22): Xaa is A or G
  MOD_RES (23)..(24)..(25)..(26): Xaa is A or G or is absent
KAXXVPTELSATSMLYYXXXXXXXXXLRKHREMVVEGX

SEQ ID NO: 8273 - protein, 40 aa, Artificial Sequence
  GFR-binding peptide
  MOD_RES (5)..(6)..(40): Xaa is C or S
  MOD_RES (20)..(21)..(22)..(23)..(24): Xaa is A or G
  MOD_RES (25)..(26)..(27)..(28): Xaa is A or G or is absent
IPKAXXVPTELSATSMLYYXXXXXXXXXLRKHREMVVEGX

SEQ ID NO: 8274 - protein, 34 aa, Artificial Sequence
  GFR-binding peptide
  MOD_RES (3)..(4): Xaa is C or S
KAXXVPTELSPISMLYKDEYDKVVLKYHYEMVVE

SEQ ID NO: 8275 - protein, 40 aa, Artificial Sequence
  GFR-binding peptide
  MOD_RES (6)..(7): Xaa is C or S
  MOD_RES (21)..(22)..(23)..(24)..(25): Xaa is A or G
  MOD_RES (26)..(27)..(28)..(29): Xaa is A or G or is absent
SIPKAXXVPTELNAISMLYFXXXXXXXXXLKKYREMVVEG

SEQ ID NO: 8276 - protein, 33 aa, Artificial Sequence
  GFR-binding peptide
  MOD_RES (1)..(1): Xaa is C or S
  MOD_RES (15)..(16)..(17)..(18)..(19): Xaa is A or G
  MOD_RES (20)..(21)..(22)..(23): Xaa is A or G or is absent
XAPTKLSAISVLYLXXXXXXXXXLKNYQNMVVR

SEQ ID NO: 8277 - protein, 33 aa, Artificial Sequence
  GFR-binding peptide
  MOD_RES (1)..(1): Xaa is C or S
  MOD_RES (15)..(16)..(17)..(18)..(19): Xaa is A or G
  MOD_RES (20)..(21)..(22)..(23): Xaa is A or G or is absent
XAPTKLSAISVLYLXXXXXXXXXLKNYQNMVVK

SEQ ID NO: 8278 - protein, 35 aa, Artificial Sequence
  GFR-binding peptide
  MOD_RES (34)..(34): Xaa is C or S
  MOD_RES (14)..(15)..(16)..(17)..(18): Xaa is A or G
  MOD_RES (19)..(20)..(21)..(22): Xaa is A or G or is absent
APTQLNAISVLYFXXXXXXXXXLKKYRNMVVRAXG

SEQ ID NO: 8279 - protein, 38 aa, Artificial Sequence
  GFR-binding peptide
  MOD_RES (2)..(3)..(36)..(38): Xaa is C or S
  MOD_RES (17)..(18)..(19)..(20)..(21): Xaa is A or G
  MOD_RES (22)..(23)..(24)..(25): Xaa is A or G or is absent
PXXVPQALSATSILYYXXXXXXXXXLRKHRMIVRSXKX

SEQ ID NO: 8280 - protein, 39 aa, Artificial Sequence
  GFR-binding peptide
  MOD_RES (2)..(3)..(36)..(38): Xaa is C or S
  MOD_RES (17)..(18)..(19)..(20)..(21): Xaa is A or G
  MOD_RES (22)..(23)..(24)..(25): Xaa is A or G or is absent
PXXVPQDLSATSILYYXXXXXXXXXLRKHRMVVKSXKXS

SEQ ID NO: 8281 - protein, 38 aa, Artificial Sequence
  GFR-binding peptide
  MOD_RES (5)..(6)..(38): Xaa is C or S
VPKPXXAPTKLSATSVLYYDDSSNVILRKHRNMVVRSX

SEQ ID NO: 8282 - protein, 37 aa, Artificial Sequence
  GFR-binding peptide
  MOD_RES (2)..(3)..(37): Xaa is C or S
  MOD_RES (17)..(18)..(19)..(20)..(21): Xaa is A or G
  MOD_RES (22)..(23)..(24)..(25): Xaa is A or G or is absent
AXXAPTKLSPISVLYKXXXXXXXXXLKYHYNMVVKAX

SEQ ID NO: 8283 - protein, 33 aa, Artificial Sequence
  GFR-binding peptide
  MOD_RES (15)..(16)..(17)..(18)..(19): Xaa is A or G
  MOD_RES (20)..(21)..(22)..(23): Xaa is A or G or is absent
PTQVQLSATSVLYYXXXXXXXXXLRKHRTLEDH

SEQ ID NO: 8284 - protein, 39 aa, Artificial Sequence
  GFR-binding peptide
  MOD_RES (37)..(39): Xaa is C or S
RPTQVQLSATSVLYYEIVRKKPIFLRKHRTLEDHLAXKX

SEQ ID NO: 8285 - protein, 36 aa, Artificial Sequence
  GFR-binding peptide
  MOD_RES (3)..(3): Xaa is C or S
  MOD_RES (17)..(18)..(19)..(20)..(21): Xaa is A or G
  MOD_RES (22)..(23)..(24)..(25): Xaa is A or G or is absent
PTXAPTKLSATSVLYYXXXXXXXXXLRKHRNMVVRS

SEQ ID NO: 8286 - protein, 38 aa, Artificial Sequence
  GFR-binding peptide
  MOD_RES (2)..(3)..(36)..(38): Xaa is C or S
  MOD_RES (17)..(18)..(19)..(20)..(21): Xaa is A or G
  MOD_RES (22)..(23)..(24)..(25): Xaa is A or G or is absent
PXXVSQDLNAISILYFXXXXXXXXXLKKYRMIVKSXKX

SEQ ID NO: 8287 - protein, 37 aa, Artificial Sequence
  GFR-binding peptide
  MOD_RES (1)..(35)..(37): Xaa is C or S
  MOD_RES (15)..(16)..(17)..(18)..(19): Xaa is A or G
  MOD_RES (20)..(21)..(22)..(23): Xaa is A or G or is absent
XAPTKLSATSVLYYXXXXXXXXXLRKHRNMVVRSXGX

SEQ ID NO: 8288 - protein, 36 aa, Artificial Sequence
  GFR-binding peptide
  MOD_RES (3)..(4)..(35): Xaa is C or S
SPXXVSQDLSATSILYYIGKTPKILRKHRMIVKSXK

SEQ ID NO: 8289 - protein, 37 aa, Artificial Sequence
  GFR-binding peptide
  MOD_RES (36)..(36): Xaa is C or S
  MOD_RES (15)..(16)..(17)..(18)..(19): Xaa is A or G
  MOD_RES (20)..(21)..(22)..(23): Xaa is A or G or is absent
PTQVQLSAISVLYLXXXXXXXXXLKNYQTLEDHLAXK

SEQ ID NO: 8290 - protein, 39 aa, Artificial Sequence
  GFR-binding peptide
  MOD_RES (4)..(5)..(37)..(39): Xaa is C or S
PKAXXVPTELNAISMLYFDEYDKVVLKKYREMVVEGXGX

SEQ ID NO: 8291 - protein, 43 aa, Artificial Sequence
  GFR-binding peptide
  MOD_RES (5)..(6)..(40)..(42): Xaa is C or S
  MOD_RES (20)..(21)..(22)..(23)..(24): Xaa is A or G
  MOD_RES (25)..(26)..(27)..(28): Xaa is A or G or is absent
VPKAXXAPTKLSAISVLYLXXXXXXXXXLKNYQNMVVKAXGXH

SEQ ID NO: 8292 - protein, 37 aa, Artificial Sequence
  GFR-binding peptide
  MOD_RES (34)..(36): Xaa is C or S
  MOD_RES (14)..(15)..(16)..(17)..(18): Xaa is A or G
  MOD_RES (19)..(20)..(21)..(22): Xaa is A or G or is absent
VPTELSPISMLYKXXXXXXXXXLKYHYEMVVEGXGXR

SEQ ID NO: 8293 - protein, 37 aa, Artificial Sequence
  GFR-binding peptide
  MOD_RES (3)..(4): Xaa is C or S
  MOD_RES (18)..(19)..(20)..(21)..(22): Xaa is A or G
  MOD_RES (23)..(24)..(25)..(26): Xaa is A or G or is absent
KPXXAPTKLSATSVLYYXXXXXXXXXLRKHRNMVVRS

SEQ ID NO: 8294 - protein, 41 aa, Artificial Sequence
  GFR-binding peptide
  MOD_RES (2)..(39)..(41): Xaa is C or S
  MOD_RES (18)..(19)..(20)..(21)..(22): Xaa is A or G
  MOD_RES (23)..(24)..(25)..(26): Xaa is A or G or is absent
QXRPTQVQLNAISVLYFXXXXXXXXXLKKYRTLEDHLAXKX

SEQ ID NO: 8295 - protein, 41 aa, Artificial Sequence
  GFR-binding peptide
  MOD_RES (6)..(7)..(39)..(41): Xaa is C or S
KIPKAXXVPTELSPISMLYKDENEKVVLKYHYDMVVEGXGX

SEQ ID NO: 8296 - protein, 40 aa, Artificial Sequence
  GFR-binding peptide
  MOD_RES (3)..(37)..(39): Xaa is C or S
  MOD_RES (17)..(18)..(19)..(20)..(21): Xaa is A or G
  MOD_RES (22)..(23)..(24)..(25): Xaa is A or G or is absent
PTXAPTKLNAISVLYFXXXXXXXXXLKKYRNMVVRSXGXH

SEQ ID NO: 8297 - protein, 39 aa, Artificial Sequence
  GFR-binding peptide
  MOD_RES (5)..(5): Xaa is C or S
  MOD_RES (21)..(22)..(23)..(24)..(25): Xaa is A or G
  MOD_RES (26)..(27)..(28)..(29): Xaa is A or G or is absent
RNVQXRPTQVQLSATSVLYYXXXXXXXXXLRKHRTLEDH

SEQ ID NO: 8298 - protein, 40 aa, Artificial Sequence
  GFR-binding peptide
  MOD_RES (4)..(5)..(38)..(40): Xaa is C or S
  MOD_RES (19)..(20)..(21)..(22)..(23): Xaa is A or G
  MOD_RES (24)..(25)..(26)..(27): Xaa is A or G or is absent
ASPXXVPQDLSAISILYLXXXXXXXXXLKNYQMVVKSXKX

SEQ ID NO: 8299 - protein, 38 aa, Artificial Sequence
  GFR-binding peptide
  MOD_RES (6)..(7): Xaa is C or S
KIPKAXXVPTELSPISMLYKDENEKVVLKYHYDMVVEG

SEQ ID NO: 8300 - protein, 32 aa, Artificial Sequence
  GFR-binding peptide
  MOD_RES (14)..(15)..(16)..(17)..(18): Xaa is A or G
  MOD_RES (19)..(20)..(21)..(22): Xaa is A or G or is absent
VPQALSATSILYYXXXXXXXXXLRKHRMIVRS

SEQ ID NO: 8301 - protein, 37 aa, Artificial Sequence
  GFR-binding peptide
  MOD_RES (2)..(2): Xaa is C or S
  MOD_RES (18)..(19)..(20)..(21)..(22): Xaa is A or G
  MOD_RES (23)..(24)..(25)..(26): Xaa is A or G or is absent
QXRPTQVQLSATSVLYYXXXXXXXXXLRKHRTLEDHL

SEQ ID NO: 8302 - protein, 35 aa, Artificial Sequence
  GFR-binding peptide
  MOD_RES (2)..(2): Xaa is C or S
  MOD_RES (16)..(17)..(18)..(19)..(20): Xaa is A or G
  MOD_RES (21)..(22)..(23)..(24): Xaa is A or G or is absent
TXAPTKLNAISVLYFXXXXXXXXXLKKYRNMVVRS

SEQ ID NO: 8303 - protein, 37 aa, Artificial Sequence
  GFR-binding peptide
  MOD_RES (2)..(3)..(36): Xaa is C or S
  MOD_RES (17)..(18)..(19)..(20)..(21): Xaa is A or G
  MOD_RES (22)..(23)..(24)..(25): Xaa is A or G or is absent
PXXVPQALSAISILYLXXXXXXXXXLKNYQMIVRSXK

SEQ ID NO: 8304 - protein, 35 aa, Artificial Sequence
  GFR-binding peptide
  MOD_RES (34)..(34): Xaa is C or S
  MOD_RES (14)..(15)..(16)..(17)..(18): Xaa is A or G
  MOD_RES (19)..(20)..(21)..(22): Xaa is A or G or is absent
APTQLSATSVLYYXXXXXXXXXLRKHRNMVVRAXG

SEQ ID NO: 8305 - protein, 31 aa, Artificial Sequence
  GFR-binding peptide
APTKLSAISVLYLDDSSNVILKNYQNMVVRS

SEQ ID NO: 8306 - protein, 41 aa, Artificial Sequence
  GFR-binding peptide
  MOD_RES (5)..(5): Xaa is C or S
RNVQXRPTQVQLNAISVLYFEIVRKKPIFLKKYRTLEDHLA

SEQ ID NO: 8307 - protein, 38 aa, Artificial Sequence
  GFR-binding peptide
  MOD_RES (1)..(35)..(37): Xaa is C or S
  MOD_RES (15)..(16)..(17)..(18)..(19): Xaa is A or G
  MOD_RES (20)..(21)..(22)..(23): Xaa is A or G or is absent
XVPTELSATSMLYYXXXXXXXXXLRKHREMVVEGXGXR

SEQ ID NO: 8308 - protein, 35 aa, Artificial Sequence
  GFR-binding peptide
  MOD_RES (1)..(34): Xaa is C or S
  MOD_RES (15)..(16)..(17)..(18)..(19): Xaa is A or G
  MOD_RES (20)..(21)..(22)..(23): Xaa is A or G or is absent
XVSQDLNAISILYFXXXXXXXXXLKKYRMIVKSXK

SEQ ID NO: 8309 - protein, 37 aa, Artificial Sequence
  GFR-binding peptide
  MOD_RES (2)..(3)..(37): Xaa is C or S
  MOD_RES (17)..(18)..(19)..(20)..(21): Xaa is A or G
  MOD_RES (22)..(23)..(24)..(25): Xaa is A or G or is absent
AXXVPTELNAISMLYFXXXXXXXXXLKKYRDMVVEGX

SEQ ID NO: 8310 - protein, 36 aa, Artificial Sequence
  GFR-binding peptide
RPTQVQLSPISVLYKEIVRKKPIFLKYHYTLEDHLA

SEQ ID NO: 8311 - protein, 33 aa, Artificial Sequence
  GFR-binding peptide
  MOD_RES (3)..(3): Xaa is C or S
PTXAPTKLSAISVLYLDDSSNVILKNYQNMVVR

SEQ ID NO: 8312 - protein, 33 aa, Artificial Sequence
  GFR-binding peptide
  MOD_RES (1)..(2)..(33): Xaa is C or S
XXVPQALSAISILYLVGRKPKVLKNYQMIVRSX

SEQ ID NO: 8313 - protein, 37 aa, Artificial Sequence
  GFR-binding peptide
  MOD_RES (1)..(2)..(36): Xaa is C or S
  MOD_RES (16)..(17)..(18)..(19)..(20): Xaa is A or G
  MOD_RES (21)..(22)..(23)..(24): Xaa is A or G or is absent
XXVPTELSATSMLYYXXXXXXXXXLRKHREMVVEGXG

SEQ ID NO: 8314 - protein, 37 aa, Artificial Sequence
  GFR-binding peptide
  MOD_RES (2)..(3)..(37): Xaa is C or S
  MOD_RES (17)..(18)..(19)..(20)..(21): Xaa is A or G
  MOD_RES (22)..(23)..(24)..(25): Xaa is A or G or is absent
PXXAPTQLSPISVLYKXXXXXXXXXLKYHYNMVVRAX

SEQ ID NO: 8315 - protein, 41 aa, Artificial Sequence
  GFR-binding peptide
  MOD_RES (6)..(7)..(41): Xaa is C or S
  MOD_RES (21)..(22)..(23)..(24)..(25): Xaa is A or G
  MOD_RES (26)..(27)..(28)..(29): Xaa is A or G or is absent
TVPKPXXAPTQLSAISVLYLXXXXXXXXXLKNYQNMVVRAX

SEQ ID NO: 8316 - protein, 36 aa, Artificial Sequence
  GFR-binding peptide
  MOD_RES (3)..(4)..(36): Xaa is C or S
KPXXAPTQLSAISVLYLDDSSNVILKNYQNMVVRAX

SEQ ID NO: 8317 - protein, 36 aa, Artificial Sequence
  GFR-binding peptide
  MOD_RES (3)..(4): Xaa is C or S
  MOD_RES (18)..(19)..(20)..(21)..(22): Xaa is A or G
  MOD_RES (23)..(24)..(25)..(26): Xaa is A or G or is absent
KAXXAPTKLNAISVLYFXXXXXXXXXLKKYRNMVVK

SEQ ID NO: 8318 - protein, 40 aa, Artificial Sequence
  GFR-binding peptide
  MOD_RES (5)..(6)..(38)..(40): Xaa is C or S
VPKPXXAPTQLSATSVLYYDDSSNVILRKHRNMVVRAXGX

SEQ ID NO: 8319 - protein, 34 aa, Artificial Sequence
  GFR-binding peptide
  MOD_RES (1)..(32)..(34): Xaa is C or S
XVPQALSATSILYYVGRKPKVLRKHRMIVRSXKX

SEQ ID NO: 8320 - protein, 34 aa, Artificial Sequence
  GFR-binding peptide
  MOD_RES (1)..(32)..(34): Xaa is C or S
XVPQDLNAISILYFVGRTPKVLKKYRMVVKSXKX

SEQ ID NO: 8321 - protein, 38 aa, Artificial Sequence
  GFR-binding peptide
  MOD_RES (3)..(4)..(38): Xaa is C or S
  MOD_RES (18)..(19)..(20)..(21)..(22): Xaa is A or G
  MOD_RES (23)..(24)..(25)..(26): Xaa is A or G or is absent
KPXXAPTKLSPISVLYKXXXXXXXXXLKYHYNMVVRSX

SEQ ID NO: 8322 - protein, 36 aa, Artificial Sequence
  GFR-binding peptide
  MOD_RES (1)..(1): Xaa is C or S
  MOD_RES (17)..(18)..(19)..(20)..(21): Xaa is A or G
  MOD_RES (22)..(23)..(24)..(25): Xaa is A or G or is absent
XRPTQVQLSAISVLYLXXXXXXXXXLKNYQTLEDHL

SEQ ID NO: 8323 - protein, 37 aa, Artificial Sequence
  GFR-binding peptide
  MOD_RES (1)..(1): Xaa is C or S
  MOD_RES (17)..(18)..(19)..(20)..(21): Xaa is A or G
  MOD_RES (22)..(23)..(24)..(25): Xaa is A or G or is absent
XRPTQVQLSAISVLYLXXXXXXXXXLKNYQTLEDHLA

SEQ ID NO: 8324 - protein, 42 aa, Artificial Sequence
  GFR-binding peptide
  MOD_RES (5)..(39)..(41): Xaa is C or S
  MOD_RES (19)..(20)..(21)..(22)..(23): Xaa is A or G
  MOD_RES (24)..(25)..(26)..(27): Xaa is A or G or is absent
TKPTXAPTKLSATSVLYYXXXXXXXXXLRKHRNMVVRSXGXH

SEQ ID NO: 8325 - protein, 36 aa, Artificial Sequence
  GFR-binding peptide
  MOD_RES (1)..(2)..(33)..(35): Xaa is C or S
XXVSQDLSPISILYKIGKTPKILKYHYMIVKSXKXS

SEQ ID NO: 8326 - protein, 38 aa, Artificial Sequence
  GFR-binding peptide
  MOD_RES (2)..(3)..(38): Xaa is C or S
  MOD_RES (17)..(18)..(19)..(20)..(21): Xaa is A or G
  MOD_RES (22)..(23)..(24)..(25): Xaa is A or G or is absent
AXXVPTKLSAISVLYLXXXXXXXXXLKNYQEGMSVAEX

SEQ ID NO: 8327 - protein, 34 aa, Artificial Sequence
  GFR-binding peptide
  MOD_RES (3)..(4): Xaa is C or S
KAXXAPTKLSPISVLYKDSSNNVILKYHYNMVVK

SEQ ID NO: 8328 - protein, 38 aa, Artificial Sequence
  GFR-binding peptide
  MOD_RES (3)..(3): Xaa is C or S
VQXRPTQVQLSATSVLYYEIVRKKPIFLRKHRTLEDHL

SEQ ID NO: 8329 - protein, 38 aa, Artificial Sequence
  GFR-binding peptide
  MOD_RES (36)..(38): Xaa is C or S
PTQVQLNAISVLYFEIVRKKPIFLKKYRTLEDHLAXKX

SEQ ID NO: 8330 - protein, 40 aa, Artificial Sequence
  GFR-binding peptide
  MOD_RES (6)..(38)..(40): Xaa is C or S
VTKPTXAPTKLSATSVLYYDDSSNVILRKHRNMVVRSXGX

SEQ ID NO: 8331 - protein, 36 aa, Artificial Sequence
  GFR-binding peptide
  MOD_RES (1)..(2)..(34)..(36): Xaa is C or S
XXAPTKLSAISVLYLDDSSNVILKNYQNMVVRSXGX

SEQ ID NO: 8332 - protein, 43 aa, Artificial Sequence
  GFR-binding peptide
  MOD_RES (7)..(41)..(43): Xaa is C or S
  MOD_RES (21)..(22)..(23)..(24)..(25): Xaa is A or G
  MOD_RES (26)..(27)..(28)..(29): Xaa is A or G or is absent
HVTKPTXAPTKLSPISVLYKXXXXXXXXXLKYHYNMVVRSXGX

SEQ ID NO: 8333 - protein, 37 aa, Artificial Sequence
  GFR-binding peptide
  MOD_RES (3)..(4)..(36): Xaa is C or S
KAXXAPTKLSAISVLYLDSSNNVILKNYQNMVVKAXG

SEQ ID NO: 8334 - protein, 41 aa, Artificial Sequence
  GFR-binding peptide
  MOD_RES (4)..(5)..(39)..(41): Xaa is C or S
  MOD_RES (19)..(20)..(21)..(22)..(23): Xaa is A or G
  MOD_RES (24)..(25)..(26)..(27): Xaa is A or G or is absent
PKAXXAPTKLSATSVLYYXXXXXXXXXLRKHRNMVVKAXGX

SEQ ID NO: 8335 - protein, 40 aa, Artificial Sequence
  GFR-binding peptide
  MOD_RES (5)..(6)..(40): Xaa is C or S
  MOD_RES (20)..(21)..(22)..(23)..(24): Xaa is A or G
  MOD_RES (25)..(26)..(27)..(28): Xaa is A or G or is absent
VPKAXXAPTKLSPISVLYKXXXXXXXXXLKYHYNMVVKAX

SEQ ID NO: 8336 - protein, 33 aa, Artificial Sequence
  GFR-binding peptide
  MOD_RES (1)..(33): Xaa is C or S
XAPTQLSPISVLYKDDSSNVILKYHYNMVVRAX

SEQ ID NO: 8337 - protein, 38 aa, Artificial Sequence
  GFR-binding peptide
  MOD_RES (2)..(3)..(36)..(38): Xaa is C or S
AXXVPTKLSAISVLYLDDMGVPTLKNYQEGMSVAEXGX

SEQ ID NO: 8338 - protein, 31 aa, Artificial Sequence
  GFR-binding peptide
  MOD_RES (31)..(31): Xaa is C or S
VSQDLSATSILYYIGKTPKILRKHRMIVKSX

SEQ ID NO: 8339 - protein, 43 aa, Artificial Sequence
  GFR-binding peptide
  MOD_RES (5)..(42): Xaa is C or S
  MOD_RES (21)..(22)..(23)..(24)..(25): Xaa is A or G
  MOD_RES (26)..(27)..(28)..(29): Xaa is A or G or is absent
RNVQXRPTQVQLNAISVLYFXXXXXXXXXLKKYRTLEDHLAXK

SEQ ID NO: 8340 - protein, 41 aa, Artificial Sequence
  GFR-binding peptide
  MOD_RES (3)..(4)..(38)..(40): Xaa is C or S
  MOD_RES (18)..(19)..(20)..(21)..(22): Xaa is A or G
  MOD_RES (23)..(24)..(25)..(26): Xaa is A or G or is absent
KPXXAPTKLSPISVLYKXXXXXXXXXLKYHYNMVVRSXGXH

SEQ ID NO: 8341 - protein, 37 aa, Artificial Sequence
  GFR-binding peptide
  MOD_RES (3)..(35)..(37): Xaa is C or S
PTXAPTKLSAISVLYLDDSSNVILKNYQNMVVRSXGX

SEQ ID NO: 8342 - protein, 36 aa, Artificial Sequence
  GFR-binding peptide
  MOD_RES (4)..(5)..(36): Xaa is C or S
AAPXXVPQALSAISILYLVGRKPKVLKNYQMIVRSX

SEQ ID NO: 8343 - protein, 34 aa, Artificial Sequence
  GFR-binding peptide
  MOD_RES (3)..(4): Xaa is C or S
KAXXAPTKLSAISVLYLDSSNNVILKNYQNMVVK

SEQ ID NO: 8344 - protein, 33 aa, Artificial Sequence
  GFR-binding peptide
  MOD_RES (31)..(33): Xaa is C or S
VSQDLNAISILYFIGKTPKILKKYRMIVKSXKX

SEQ ID NO: 8345 - protein, 41 aa, Artificial Sequence
  GFR-binding peptide
  MOD_RES (1)..(38)..(40): Xaa is C or S
  MOD_RES (17)..(18)..(19)..(20)..(21): Xaa is A or G
  MOD_RES (22)..(23)..(24)..(25): Xaa is A or G or is absent
XRPTQVQLSATSVLYYXXXXXXXXXLRKHRTLEDHLAXKXE

SEQ ID NO: 8346 - protein, 37 aa, Artificial Sequence
  GFR-binding peptide
  MOD_RES (3)..(4)..(36): Xaa is C or S
KPXXAPTQLSAISVLYLDDSSNVILKNYQNMVVRAXG

SEQ ID NO: 8347 - protein, 39 aa, Artificial Sequence
  GFR-binding peptide
  MOD_RES (5)..(6)..(39): Xaa is C or S
  MOD_RES (20)..(21)..(22)..(23)..(24): Xaa is A or G
  MOD_RES (25)..(26)..(27)..(28): Xaa is A or G or is absent
SASPXXVPQDLNAISILYFXXXXXXXXXLKKYRMVVKSX

SEQ ID NO: 8348 - protein, 37 aa, Artificial Sequence
  GFR-binding peptide
  MOD_RES (1)..(35)..(37): Xaa is C or S
  MOD_RES (15)..(16)..(17)..(18)..(19): Xaa is A or G
  MOD_RES (20)..(21)..(22)..(23): Xaa is A or G or is absent
XAPTKLSAISVLYLXXXXXXXXXLKNYQNMVVKAXGX

SEQ ID NO: 8349 - protein, 42 aa, Artificial Sequence
  GFR-binding peptide
  MOD_RES (5)..(6)..(40)..(42): Xaa is C or S
  MOD_RES (20)..(21)..(22)..(23)..(24): Xaa is A or G
  MOD_RES (25)..(26)..(27)..(28): Xaa is A or G or is absent
IPKAXXVPTELNAISMLYFXXXXXXXXXLKKYRDMVVEGXGX

SEQ ID NO: 8350 - protein, 38 aa, Artificial Sequence
  GFR-binding peptide
  MOD_RES (2)..(3)..(35)..(37): Xaa is C or S
PXXAPTKLSAISVLYLDDSSNVILKNYQNMVVRSXGXH

SEQ ID NO: 8351 - protein, 36 aa, Artificial Sequence
  GFR-binding peptide
  MOD_RES (34)..(36): Xaa is C or S
  MOD_RES (14)..(15)..(16)..(17)..(18): Xaa is A or G
  MOD_RES (19)..(20)..(21)..(22): Xaa is A or G or is absent
APTKLSATSVLYYXXXXXXXXXLRKHRNMVVKAXGX

SEQ ID NO: 8352 - protein, 35 aa, Artificial Sequence
  GFR-binding peptide
  MOD_RES (3)..(4): Xaa is C or S
KPXXAPTKLSPISVLYKDDSSNVILKYHYNMVVRS

SEQ ID NO: 8353 - protein, 38 aa, Artificial Sequence
  GFR-binding peptide
  MOD_RES (6)..(6): Xaa is C or S
  MOD_RES (20)..(21)..(22)..(23)..(24): Xaa is A or G
  MOD_RES (25)..(26)..(27)..(28): Xaa is A or G or is absent
VTKPTXAPTKLSPISVLYKXXXXXXXXXLKYHYNMVVR

SEQ ID NO: 8354 - protein, 34 aa, Artificial Sequence
  GFR-binding peptide
  MOD_RES (33)..(33): Xaa is C or S
VPTKLSAISVLYLDDMGVPTLKNYQEGMSVAEXG

SEQ ID NO: 8355 - protein, 41 aa, Artificial Sequence
  GFR-binding peptide
  MOD_RES (5)..(6)..(38)..(40): Xaa is C or S
VPKAXXAPTKLNAISVLYFDSSNNVILKKYRNMVVKAXGXH

SEQ ID NO: 8356 - protein, 33 aa, Artificial Sequence
  GFR-binding peptide
  MOD_RES (32)..(32): Xaa is C or S
VPTELSPISMLYKDENEKVVLKYHYDMVVEGXG

SEQ ID NO: 8357 - protein, 38 aa, Artificial Sequence
  GFR-binding peptide
  MOD_RES (4)..(5)..(36)..(38): Xaa is C or S
ASPXXVPQDLNAISILYFVGRTPKVLKKYRMVVKSXKX

SEQ ID NO: 8358 - protein, 39 aa, Artificial Sequence
  GFR-binding peptide
  MOD_RES (5)..(6): Xaa is C or S
  MOD_RES (20)..(21)..(22)..(23)..(24): Xaa is A or G
  MOD_RES (25)..(26)..(27)..(28): Xaa is A or G or is absent
VPKPXXAPTQLSATSVLYYXXXXXXXXXLRKHRNMVVRA

SEQ ID NO: 8359 - protein, 39 aa, Artificial Sequence
  GFR-binding peptide
  MOD_RES (4)..(5)..(38): Xaa is C or S
  MOD_RES (19)..(20)..(21)..(22)..(23): Xaa is A or G
  MOD_RES (24)..(25)..(26)..(27): Xaa is A or G or is absent
ASPXXVSQDLNAISILYFXXXXXXXXXLKKYRMIVKSXK

SEQ ID NO: 8360 - protein, 40 aa, Artificial Sequence
  GFR-binding peptide
  MOD_RES (5)..(6)..(38)..(40): Xaa is C or S
IPKAXXVPTELSPISMLYKDEYDKVVLKYHYEMVVEGXGX

SEQ ID NO: 8361 - protein, 38 aa, Artificial Sequence
  GFR-binding peptide
  MOD_RES (4)..(5)..(38): Xaa is C or S
  MOD_RES (19)..(20)..(21)..(22)..(23): Xaa is A or G
  MOD_RES (24)..(25)..(26)..(27): Xaa is A or G or is absent
ASPXXVPQDLSAISILYLXXXXXXXXXLKNYQMVVKSX

SEQ ID NO: 8362 - protein, 36 aa, Artificial Sequence
  GFR-binding peptide
  MOD_RES (3)..(4)..(36): Xaa is C or S
KPXXAPTKLSATSVLYYDDSSNVILRKHRNMVVRSX

SEQ ID NO: 8363 - protein, 43 aa, Artificial Sequence
  GFR-binding peptide
  MOD_RES (4)..(41)..(43): Xaa is C or S
NVQXRPTQVQLSAISVLYLEIVRKKPIFLKNYQTLEDHLAXKX

SEQ ID NO: 8364 - protein, 41 aa, Artificial Sequence
  GFR-binding peptide
  MOD_RES (4)..(5)..(38)..(40): Xaa is C or S
  MOD_RES (19)..(20)..(21)..(22)..(23): Xaa is A or G
  MOD_RES (24)..(25)..(26)..(27): Xaa is A or G or is absent
ASPXXVSQDLSATSILYYXXXXXXXXXLRKHRMIVKSXKXS

SEQ ID NO: 8365 - protein, 38 aa, Artificial Sequence
  GFR-binding peptide
  MOD_RES (4)..(5)..(36)..(38): Xaa is C or S
ASPXXVSQDLNAISILYFIGKTPKILKKYRMIVKSXKX

SEQ ID NO: 8366 - protein, 37 aa, Artificial Sequence
  GFR-binding peptide
  MOD_RES (4)..(5)..(36): Xaa is C or S
AAPXXVPQALSATSILYYVGRKPKVLRKHRMIVRSXK

SEQ ID NO: 8367 - protein, 37 aa, Artificial Sequence
  GFR-binding peptide
  MOD_RES (6)..(6): Xaa is C or S
VTKPTXAPTKLSPISVLYKDDSSNVILKYHYNMVVRS

SEQ ID NO: 8368 - protein, 35 aa, Artificial Sequence
  GFR-binding peptide
  MOD_RES (2)..(3): Xaa is C or S
  MOD_RES (17)..(18)..(19)..(20)..(21): Xaa is A or G
  MOD_RES (22)..(23)..(24)..(25): Xaa is A or G or is absent
PXXAPTQLNAISVLYFXXXXXXXXXLKKYRNMVVR

SEQ ID NO: 8369 - protein, 39 aa, Artificial Sequence
  GFR-binding peptide
  MOD_RES (5)..(6)..(37)..(39): Xaa is C or S
SASPXXVPQDLSATSILYYVGRTPKVLRKHRMVVKSXKX

SEQ ID NO: 8370 - protein, 37 aa, Artificial Sequence
  GFR-binding peptide
  MOD_RES (3)..(35)..(37): Xaa is C or S
PTXAPTKLSPISVLYKDDSSNVILKYHYNMVVRSXGX

SEQ ID NO: 8371 - protein, 31 aa, Artificial Sequence
  GFR-binding peptide
  MOD_RES (31)..(31): Xaa is C or S
VPQDLSPISILYKVGRTPKVLKYHYMVVKSX

SEQ ID NO: 8372 - protein, 38 aa, Artificial Sequence
  GFR-binding peptide
  MOD_RES (4)..(5)..(38): Xaa is C or S
  MOD_RES (19)..(20)..(21)..(22)..(23): Xaa is A or G
  MOD_RES (24)..(25)..(26)..(27): Xaa is A or G or is absent
ASPXXVPQDLSATSILYYXXXXXXXXXLRKHRMVVKSX

SEQ ID NO: 8373 - protein, 32 aa, Artificial Sequence
  GFR-binding peptide
  MOD_RES (1)..(1): Xaa is C or S
XVPTELSATSMLYYDENEKVVLRKHRDMVVEG

SEQ ID NO: 8374 - protein, 34 aa, Artificial Sequence
  GFR-binding peptide
  MOD_RES (1)..(1): Xaa is C or S
  MOD_RES (15)..(16)..(17)..(18)..(19): Xaa is A or G
  MOD_RES (20)..(21)..(22)..(23): Xaa is A or G or is absent
XVPTELNAISMLYFXXXXXXXXXLKKYREMVVEG

SEQ ID NO: 8375 - protein, 39 aa, Artificial Sequence
  GFR-binding peptide
  MOD_RES (2)..(3)..(38): Xaa is C or S
  MOD_RES (17)..(18)..(19)..(20)..(21): Xaa is A or G
  MOD_RES (22)..(23)..(24)..(25): Xaa is A or G or is absent
AXXVPTKLNAISVLYFXXXXXXXXXLKKYREGMSVAEXG

SEQ ID NO: 8376 - protein, 38 aa, Artificial Sequence
  GFR-binding peptide
  MOD_RES (1)..(38): Xaa is C or S
  MOD_RES (17)..(18)..(19)..(20)..(21): Xaa is A or G
  MOD_RES (22)..(23)..(24)..(25): Xaa is A or G or is absent
XRPTQVQLSPISVLYKXXXXXXXXXLKYHYTLEDHLAX

SEQ ID NO: 8377 - protein, 43 aa, Artificial Sequence
  GFR-binding peptide
  MOD_RES (6)..(40)..(42): Xaa is C or S
  MOD_RES (20)..(21)..(22)..(23)..(24): Xaa is A or G
  MOD_RES (25)..(26)..(27)..(28): Xaa is A or G or is absent
VTKPTXAPTKLSPISVLYKXXXXXXXXXLKYHYNMVVRSXGXH

SEQ ID NO: 8378 - protein, 31 aa, Artificial Sequence
  GFR-binding peptide
VPTELNAISMLYFDENEKVVLKKYRDMVVEG

SEQ ID NO: 8379 - protein, 35 aa, Artificial Sequence
  GFR-binding peptide
  MOD_RES (2)..(3): Xaa is C or S
  MOD_RES (17)..(18)..(19)..(20)..(21): Xaa is A or G
  MOD_RES (22)..(23)..(24)..(25): Xaa is A or G or is absent
AXXVPTELSAISMLYLXXXXXXXXXLKNYQDMVVE

SEQ ID NO: 8380 - protein, 38 aa, Artificial Sequence
  GFR-binding peptide
  MOD_RES (2)..(3)..(37): Xaa is C or S
  MOD_RES (17)..(18)..(19)..(20)..(21): Xaa is A or G
  MOD_RES (22)..(23)..(24)..(25): Xaa is A or G or is absent
AXXAPTKLSPISVLYKXXXXXXXXXLKYHYNMVVKAXG

SEQ ID NO: 8381 - protein, 40 aa, Artificial Sequence
  GFR-binding peptide
  MOD_RES (6)..(7): Xaa is C or S
  MOD_RES (21)..(22)..(23)..(24)..(25): Xaa is A or G
  MOD_RES (26)..(27)..(28)..(29): Xaa is A or G or is absent
TVPKPXXAPTQLSPISVLYKXXXXXXXXXLKYHYNMVVRA

SEQ ID NO: 8382 - protein, 40 aa, Artificial Sequence
  GFR-binding peptide
  MOD_RES (5)..(6)..(38)..(40): Xaa is C or S
VPKPXXAPTQLSAISVLYLDDSSNVILKNYQNMVVRAXGX

SEQ ID NO: 8383 - protein, 38 aa, Artificial Sequence
  GFR-binding peptide
  MOD_RES (5)..(6): Xaa is C or S
  MOD_RES (20)..(21)..(22)..(23)..(24): Xaa is A or G
  MOD_RES (25)..(26)..(27)..(28): Xaa is A or G or is absent
SASPXXVPQDLNAISILYFXXXXXXXXXLKKYRMVVKS

SEQ ID NO: 8384 - protein, 39 aa, Artificial Sequence
  GFR-binding peptide
  MOD_RES (5)..(6)..(37)..(39): Xaa is C or S
SASPXXVSQDLSATSILYYIGKTPKILRKHRMIVKSXKX

SEQ ID NO: 8385 - protein, 37 aa, Artificial Sequence
  GFR-binding peptide
  MOD_RES (5)..(6): Xaa is C or S
VPKPXXAPTQLSATSVLYYDDSSNVILRKHRNMVVRA

SEQ ID NO: 8386 - protein, 37 aa, Artificial Sequence
  GFR-binding peptide
  MOD_RES (1)..(2)..(36): Xaa is C or S
  MOD_RES (16)..(17)..(18)..(19)..(20): Xaa is A or G
  MOD_RES (21)..(22)..(23)..(24): Xaa is A or G or is absent
XXAPTQLSPISVLYKXXXXXXXXXLKYHYNMVVRAXG

SEQ ID NO: 8387 - protein, 35 aa, Artificial Sequence
  GFR-binding peptide
  MOD_RES (2)..(3): Xaa is C or S
  MOD_RES (17)..(18)..(19)..(20)..(21): Xaa is A or G
  MOD_RES (22)..(23)..(24)..(25): Xaa is A or G or is absent
AXXAPTKLSATSVLYYXXXXXXXXXLRKHRNMVVK

SEQ ID NO: 8388 - protein, 42 aa, Artificial Sequence
  GFR-binding peptide
  MOD_RES (6)..(40)..(42): Xaa is C or S
  MOD_RES (20)..(21)..(22)..(23)..(24): Xaa is A or G
  MOD_RES (25)..(26)..(27)..(28): Xaa is A or G or is absent
VTKPTXAPTKLNAISVLYFXXXXXXXXXLKKYRNMVVRSXGX

SEQ ID NO: 8389 - protein, 32 aa, Artificial Sequence
  GFR-binding peptide
  MOD_RES (14)..(15)..(16)..(17)..(18): Xaa is A or G
  MOD_RES (19)..(20)..(21)..(22): Xaa is A or G or is absent
VPTELSATSMLYYXXXXXXXXXLRKHREMVVE

SEQ ID NO: 8390 - protein, 33 aa, Artificial Sequence
  GFR-binding peptide
  MOD_RES (33)..(33): Xaa is C or S
  MOD_RES (14)..(15)..(16)..(17)..(18): Xaa is A or G
  MOD_RES (19)..(20)..(21)..(22): Xaa is A or G or is absent
VSQDLSAISILYLXXXXXXXXXLKNYQMIVKSX

SEQ ID NO: 8391 - protein, 38 aa, Artificial Sequence
  GFR-binding peptide
  MOD_RES (4)..(4): Xaa is C or S
  MOD_RES (20)..(21)..(22)..(23)..(24): Xaa is A or G
  MOD_RES (25)..(26)..(27)..(28): Xaa is A or G or is absent
NVQXRPTQVQLSATSVLYYXXXXXXXXXLRKHRTLEDH

SEQ ID NO: 8392 - protein, 38 aa, Artificial Sequence
  GFR-binding peptide
  MOD_RES (5)..(5): Xaa is C or S
  MOD_RES (19)..(20)..(21)..(22)..(23): Xaa is A or G
  MOD_RES (24)..(25)..(26)..(27): Xaa is A or G or is absent
TKPTXAPTKLNAISVLYFXXXXXXXXXLKKYRNMVVRS

SEQ ID NO: 8393 - protein, 37 aa, Artificial Sequence
  GFR-binding peptide
  MOD_RES (1)..(1): Xaa is C or S
  MOD_RES (17)..(18)..(19)..(20)..(21): Xaa is A or G
  MOD_RES (22)..(23)..(24)..(25): Xaa is A or G or is absent
XRPTQVQLSATSVLYYXXXXXXXXXLRKHRTLEDHLA

SEQ ID NO: 8394 - protein, 40 aa, Artificial Sequence
  GFR-binding peptide
  MOD_RES (6)..(7)..(39): Xaa is C or S
YVPKPXXAPTKLSATSVLYYDDSSNVILRKHRNMVVRSXG

SEQ ID NO: 8395 - protein, 40 aa, Artificial Sequence
  GFR-binding peptide
  MOD_RES (1)..(38)..(40): Xaa is C or S
XRPTQVQLNAISVLYFEIVRKKPIFLKKYRTLEDHLAXKX

SEQ ID NO: 8396 - protein, 37 aa, Artificial Sequence
  GFR-binding peptide
  MOD_RES (3)..(4)..(35)..(37): Xaa is C or S
APXXVPQALSATSILYYVGRKPKVLRKHRMIVRSXKX

SEQ ID NO: 8397 - protein, 36 aa, Artificial Sequence
  GFR-binding peptide
  MOD_RES (3)..(4)..(35): Xaa is C or S
SPXXVSQDLNAISILYFIGKTPKILKKYRMIVKSXK

SEQ ID NO: 8398 - protein, 42 aa, Artificial Sequence
  GFR-binding peptide
  MOD_RES (5)..(42): Xaa is C or S
RNVQXRPTQVQLSATSVLYYEIVRKKPIFLRKHRTLEDHLAX

SEQ ID NO: 8399 - protein, 36 aa, Artificial Sequence
  GFR-binding peptide
  MOD_RES (35)..(35): Xaa is C or S
TQVQLSPISVLYKEIVRKKPIFLKYHYTLEDHLAXK

SEQ ID NO: 8400 - protein, 32 aa, Artificial Sequence
  GFR-binding peptide
  MOD_RES (1)..(32): Xaa is C or S
XVPQDLNAISILYFVGRTPKVLKKYRMVVKSX

SEQ ID NO: 8401 - protein, 36 aa, Artificial Sequence
  GFR-binding peptide
  MOD_RES (1)..(2)..(35): Xaa is C or S
  MOD_RES (16)..(17)..(18)..(19)..(20): Xaa is A or G
  MOD_RES (21)..(22)..(23)..(24): Xaa is A or G or is absent
XXVPQDLNAISILYFXXXXXXXXXLKKYRMVVKSXK

SEQ ID NO: 8402 - protein, 38 aa, Artificial Sequence
  GFR-binding peptide
  MOD_RES (1)..(2)..(36)..(38): Xaa is C or S
  MOD_RES (16)..(17)..(18)..(19)..(20): Xaa is A or G
  MOD_RES (21)..(22)..(23)..(24): Xaa is A or G or is absent
XXAPTQLSATSVLYYXXXXXXXXXLRKHRNMVVRAXGX

SEQ ID NO: 8403 - protein, 36 aa, Artificial Sequence
  GFR-binding peptide
  MOD_RES (1)..(35): Xaa is C or S
  MOD_RES (15)..(16)..(17)..(18)..(19): Xaa is A or G
  MOD_RES (20)..(21)..(22)..(23): Xaa is A or G or is absent
XAPTKLSPISVLYKXXXXXXXXXLKYHYNMVVRSXG

SEQ ID NO: 8404 - protein, 36 aa, Artificial Sequence
  GFR-binding peptide
  MOD_RES (1)..(2)..(36): Xaa is C or S
  MOD_RES (16)..(17)..(18)..(19)..(20): Xaa is A or G
  MOD_RES (21)..(22)..(23)..(24): Xaa is A or G or is absent
XXAPTKLNAISVLYFXXXXXXXXXLKKYRNMVVRSX

SEQ ID NO: 8405 - protein, 34 aa, Artificial Sequence
  GFR-binding peptide
  MOD_RES (14)..(15)..(16)..(17)..(18): Xaa is A or G
  MOD_RES (19)..(20)..(21)..(22): Xaa is A or G or is absent
TQVQLSPISVLYKXXXXXXXXXLKYHYTLEDHLA

SEQ ID NO: 8406 - protein, 41 aa, Artificial Sequence
  GFR-binding peptide
  MOD_RES (5)..(6)..(40): Xaa is C or S
  MOD_RES (20)..(21)..(22)..(23)..(24): Xaa is A or G
  MOD_RES (25)..(26)..(27)..(28): Xaa is A or G or is absent
VPKAXXAPTKLSPISVLYKXXXXXXXXXLKYHYNMVVKAXG

SEQ ID NO: 8407 - protein, 34 aa, Artificial Sequence
  GFR-binding peptide
  MOD_RES (1)..(2): Xaa is C or S
  MOD_RES (16)..(17)..(18)..(19)..(20): Xaa is A or G
  MOD_RES (21)..(22)..(23)..(24): Xaa is A or G or is absent
XXVPQALSATSILYYXXXXXXXXXLRKHRMIVRS

SEQ ID NO: 8408 - protein, 36 aa, Artificial Sequence
  GFR-binding peptide
  MOD_RES (2)..(3)..(36): Xaa is C or S
  MOD_RES (17)..(18)..(19)..(20)..(21): Xaa is A or G
  MOD_RES (22)..(23)..(24)..(25): Xaa is A or G or is absent
PXXVPQALSAISILYLXXXXXXXXXLKNYQMIVRSX

SEQ ID NO: 8409 - protein, 33 aa, Artificial Sequence
  GFR-binding peptide
  MOD_RES (1)..(1): Xaa is C or S
  MOD_RES (15)..(16)..(17)..(18)..(19): Xaa is A or G
  MOD_RES (20)..(21)..(22)..(23): Xaa is A or G or is absent
XAPTKLNAISVLYFXXXXXXXXXLKKYRNMVVR

SEQ ID NO: 8410 - protein, 39 aa, Artificial Sequence
  GFR-binding peptide
  MOD_RES (6)..(7)..(39): Xaa is C or S
AVPKAXXAPTKLNAISVLYFDSSNNVILKKYRNMVVKAX

SEQ ID NO: 8411 - protein, 34 aa, Artificial Sequence
  GFR-binding peptide
  MOD_RES (1)..(2)..(33): Xaa is C or S
XXVPQDLNAISILYFVGRTPKVLKKYRMVVKSXK

SEQ ID NO: 8412 - protein, 37 aa, Artificial Sequence
  GFR-binding peptide
  MOD_RES (1)..(2)..(36): Xaa is C or S
  MOD_RES (16)..(17)..(18)..(19)..(20): Xaa is A or G
  MOD_RES (21)..(22)..(23)..(24): Xaa is A or G or is absent
XXAPTQLSAISVLYLXXXXXXXXXLKNYQNMVVRAXG

SEQ ID NO: 8413 - protein, 38 aa, Artificial Sequence
  GFR-binding peptide
  MOD_RES (5)..(6)..(38): Xaa is C or S
VPKPXXAPTQLSAISVLYLDDSSNVILKNYQNMVVRAX

SEQ ID NO: 8414 - protein, 43 aa, Artificial Sequence
  GFR-binding peptide
  MOD_RES (6)..(7)..(41)..(43): Xaa is C or S
  MOD_RES (21)..(22)..(23)..(24)..(25): Xaa is A or G
  MOD_RES (26)..(27)..(28)..(29): Xaa is A or G or is absent
YVPKPXXAPTKLNAISVLYFXXXXXXXXXLKKYRNMVVRSXGX

SEQ ID NO: 8415 - protein, 36 aa, Artificial Sequence
  GFR-binding peptide
  MOD_RES (2)..(3)..(36): Xaa is C or S
  MOD_RES (17)..(18)..(19)..(20)..(21): Xaa is A or G
  MOD_RES (22)..(23)..(24)..(25): Xaa is A or G or is absent
PXXVPQALSATSILYYXXXXXXXXXLRKHRMIVRSX

SEQ ID NO: 8416 - protein, 40 aa, Artificial Sequence
  GFR-binding peptide
  MOD_RES (3)..(37)..(39): Xaa is C or S
  MOD_RES (17)..(18)..(19)..(20)..(21): Xaa is A or G
  MOD_RES (22)..(23)..(24)..(25): Xaa is A or G or is absent
PTXAPTKLSATSVLYYXXXXXXXXXLRKHRNMVVRSXGXH

SEQ ID NO: 8417 - protein, 36 aa, Artificial Sequence
  GFR-binding peptide
  MOD_RES (1)..(2)..(36): Xaa is C or S
  MOD_RES (16)..(17)..(18)..(19)..(20): Xaa is A or G
  MOD_RES (21)..(22)..(23)..(24): Xaa is A or G or is absent
XXVPTELNAISMLYFXXXXXXXXXLKKYREMVVEGX

SEQ ID NO: 8418 - protein, 39 aa, Artificial Sequence
  GFR-binding peptide
  MOD_RES (3)..(4)..(36)..(38): Xaa is C or S
KAXXAPTKLSAISVLYLDSSNNVILKNYQNMVVKAXGXH

SEQ ID NO: 8419 - protein, 35 aa, Artificial Sequence
  GFR-binding peptide
  MOD_RES (1)..(2)..(33)..(35): Xaa is C or S
XXVPQDLSAISILYLVGRTPKVLKNYQMVVKSXKX

SEQ ID NO: 8420 - protein, 38 aa, Artificial Sequence
  GFR-binding peptide
  MOD_RES (3)..(4)..(35)..(37): Xaa is C or S
APXXVPQALNAISILYFVGRKPKVLKKYRMIVRSXKXS

SEQ ID NO: 8421 - protein, 34 aa, Artificial Sequence
  GFR-binding peptide
  MOD_RES (1)..(2)..(34): Xaa is C or S
XXAPTKLNAISVLYFDSSNNVILKKYRNMVVKAX

SEQ ID NO: 8422 - protein, 35 aa, Artificial Sequence
  GFR-binding peptide
  MOD_RES (34)..(34): Xaa is C or S
  MOD_RES (14)..(15)..(16)..(17)..(18): Xaa is A or G
  MOD_RES (19)..(20)..(21)..(22): Xaa is A or G or is absent
APTKLSATSVLYYXXXXXXXXXLRKHRNMVVKAXG

SEQ ID NO: 8423 - protein, 36 aa, Artificial Sequence
  GFR-binding peptide
  MOD_RES (35)..(35): Xaa is C or S
  MOD_RES (14)..(15)..(16)..(17)..(18): Xaa is A or G
  MOD_RES (19)..(20)..(21)..(22): Xaa is A or G or is absent
TQVQLNAISVLYFXXXXXXXXXLKKYRTLEDHLAXK

SEQ ID NO: 8424 - protein, 39 aa, Artificial Sequence
  GFR-binding peptide
  MOD_RES (2)..(39): Xaa is C or S
  MOD_RES (18)..(19)..(20)..(21)..(22): Xaa is A or G
  MOD_RES (23)..(24)..(25)..(26): Xaa is A or G or is absent
QXRPTQVQLSAISVLYLXXXXXXXXXLKNYQTLEDHLAX

SEQ ID NO: 8425 - protein, 38 aa, Artificial Sequence
  GFR-binding peptide
  MOD_RES (1)..(2)..(37): Xaa is C or S
  MOD_RES (16)..(17)..(18)..(19)..(20): Xaa is A or G
  MOD_RES (21)..(22)..(23)..(24): Xaa is A or G or is absent
XXVPTKLNAISVLYFXXXXXXXXXLKKYREGMSVAEXG

SEQ ID NO: 8426 - protein, 44 aa, Artificial Sequence
  GFR-binding peptide
  MOD_RES (7)..(41)..(43): Xaa is C or S
  MOD_RES (21)..(22)..(23)..(24)..(25): Xaa is A or G
  MOD_RES (26)..(27)..(28)..(29): Xaa is A or G or is absent
HVTKPTXAPTKLSAISVLYLXXXXXXXXXLKNYQNMVVRSXGXH

SEQ ID NO: 8427 - protein, 38 aa, Artificial Sequence
  GFR-binding peptide
  MOD_RES (2)..(2): Xaa is C or S
  MOD_RES (18)..(19)..(20)..(21)..(22): Xaa is A or G
  MOD_RES (23)..(24)..(25)..(26): Xaa is A or G or is absent
QXRPTQVQLSPISVLYKXXXXXXXXXLKYHYTLEDHLA

SEQ ID NO: 8428 - protein, 36 aa, Artificial Sequence
  GFR-binding peptide
  MOD_RES (1)..(2)..(34)..(36): Xaa is C or S
XXVPTELNAISMLYFDENEKVVLKKYRDMVVEGXGX

SEQ ID NO: 8429 - protein, 41 aa, Artificial Sequence
  GFR-binding peptide
  MOD_RES (4)..(5)..(39)..(41): Xaa is C or S
  MOD_RES (19)..(20)..(21)..(22)..(23): Xaa is A or G
  MOD_RES (24)..(25)..(26)..(27): Xaa is A or G or is absent
PKAXXVPTELNAISMLYFXXXXXXXXXLKKYREMVVEGXGX

SEQ ID NO: 8430 - protein, 40 aa, Artificial Sequence
  GFR-binding peptide
  MOD_RES (4)..(4): Xaa is C or S
  MOD_RES (20)..(21)..(22)..(23)..(24): Xaa is A or G
  MOD_RES (25)..(26)..(27)..(28): Xaa is A or G or is absent
NVQXRPTQVQLSPISVLYKXXXXXXXXXLKYHYTLEDHLA

SEQ ID NO: 8431 - protein, 38 aa, Artificial Sequence
  GFR-binding peptide
  MOD_RES (1)..(35)..(37): Xaa is C or S
  MOD_RES (15)..(16)..(17)..(18)..(19): Xaa is A or G
  MOD_RES (20)..(21)..(22)..(23): Xaa is A or G or is absent
XAPTKLNAISVLYFXXXXXXXXXLKKYRNMVVRSXGXH

SEQ ID NO: 8432 - protein, 37 aa, Artificial Sequence
  GFR-binding peptide
  MOD_RES (5)..(6)..(37): Xaa is C or S
SAAPXXVPQALNAISILYFVGRKPKVLKKYRMIVRSX

SEQ ID NO: 8433 - protein, 33 aa, Artificial Sequence
  GFR-binding peptide
  MOD_RES (1)..(1): Xaa is C or S
  MOD_RES (15)..(16)..(17)..(18)..(19): Xaa is A or G
  MOD_RES (20)..(21)..(22)..(23): Xaa is A or G or is absent
XAPTKLNAISVLYFXXXXXXXXXLKKYRNMVVK

SEQ ID NO: 8434 - protein, 34 aa, Artificial Sequence
  GFR-binding peptide
  MOD_RES (1)..(2): Xaa is C or S
  MOD_RES (16)..(17)..(18)..(19)..(20): Xaa is A or G
  MOD_RES (21)..(22)..(23)..(24): Xaa is A or G or is absent
XXVPTELSATSMLYYXXXXXXXXXLRKHREMVVE

SEQ ID NO: 8435 - protein, 37 aa, Artificial Sequence
  GFR-binding peptide
  MOD_RES (3)..(3): Xaa is C or S
VQXRPTQVQLSAISVLYLEIVRKKPIFLKNYQTLEDH

SEQ ID NO: 8436 - protein, 41 aa, Artificial Sequence
  GFR-binding peptide
  MOD_RES (3)..(4)..(38)..(40): Xaa is C or S
  MOD_RES (18)..(19)..(20)..(21)..(22): Xaa is A or G
  MOD_RES (23)..(24)..(25)..(26): Xaa is A or G or is absent
KPXXAPTKLSAISVLYLXXXXXXXXXLKNYQNMVVRSXGXH

SEQ ID NO: 8437 - protein, 43 aa, Artificial Sequence
  GFR-binding peptide
  MOD_RES (6)..(7)..(40)..(42): Xaa is C or S
  MOD_RES (21)..(22)..(23)..(24)..(25): Xaa is A or G
  MOD_RES (26)..(27)..(28)..(29): Xaa is A or G or is absent
ASASPXXVPQDLSATSILYYXXXXXXXXXLRKHRMVVKSXKXS

SEQ ID NO: 8438 - protein, 37 aa, Artificial Sequence
  GFR-binding peptide
  MOD_RES (3)..(3): Xaa is C or S
VQXRPTQVQLSATSVLYYEIVRKKPIFLRKHRTLEDH

SEQ ID NO: 8439 - protein, 39 aa, Artificial Sequence
  GFR-binding peptide
  MOD_RES (4)..(5)..(37)..(39): Xaa is C or S
PKPXXAPTKLSATSVLYYDDSSNVILRKHRNMVVRSXGX

SEQ ID NO: 8440 - protein, 37 aa, Artificial Sequence
  GFR-binding peptide
  MOD_RES (5)..(6): Xaa is C or S
VPKPXXAPTKLSAISVLYLDDSSNVILKNYQNMVVRS

SEQ ID NO: 8441 - protein, 33 aa, Artificial Sequence
  GFR-binding peptide
  MOD_RES (33)..(33): Xaa is C or S
  MOD_RES (14)..(15)..(16)..(17)..(18): Xaa is A or G
  MOD_RES (19)..(20)..(21)..(22): Xaa is A or G or is absent
VSQDLSATSILYYXXXXXXXXXLRKHRMIVKSX

SEQ ID NO: 8442 - protein, 38 aa, Artificial Sequence
  GFR-binding peptide
  MOD_RES (1)..(2)..(35)..(37): Xaa is C or S
  MOD_RES (16)..(17)..(18)..(19)..(20): Xaa is A or G
  MOD_RES (21)..(22)..(23)..(24): Xaa is A or G or is absent
XXVSQDLNAISILYFXXXXXXXXXLKKYRMIVKSXKXS

SEQ ID NO: 8443 - protein, 33 aa, Artificial Sequence
  GFR-binding peptide
  MOD_RES (2)..(3): Xaa is C or S
AXXVPTELSPISMLYKDENEKVVLKYHYDMVVE

SEQ ID NO: 8444 - protein, 32 aa, Artificial Sequence
  GFR-binding peptide
  MOD_RES (1)..(2): Xaa is C or S
XXVPTELNAISMLYFDENEKVVLKKYRDMVVE

SEQ ID NO: 8445 - protein, 35 aa, Artificial Sequence
  GFR-binding peptide
  MOD_RES (33)..(35): Xaa is C or S
VPTKLSATSVLYYDDMGVPTLRKHREGMSVAEXGX

SEQ ID NO: 8446 - protein, 34 aa, Artificial Sequence
  GFR-binding peptide
  MOD_RES (1)..(1): Xaa is C or S
  MOD_RES (15)..(16)..(17)..(18)..(19): Xaa is A or G
  MOD_RES (20)..(21)..(22)..(23): Xaa is A or G or is absent
XAPTQLNAISVLYFXXXXXXXXXLKKYRNMVVRA

SEQ ID NO: 8447 - protein, 41 aa, Artificial Sequence
  GFR-binding peptide
  MOD_RES (5)..(6)..(40): Xaa is C or S
  MOD_RES (20)..(21)..(22)..(23)..(24): Xaa is A or G
  MOD_RES (25)..(26)..(27)..(28): Xaa is A or G or is absent
IPKAXXVPTELSPISMLYKXXXXXXXXXLKYHYEMVVEGXG

SEQ ID NO: 8448 - protein, 40 aa, Artificial Sequence
  GFR-binding peptide
  MOD_RES (1)..(38)..(40): Xaa is C or S
  MOD_RES (17)..(18)..(19)..(20)..(21): Xaa is A or G
  MOD_RES (22)..(23)..(24)..(25): Xaa is A or G or is absent
XRPTQVQLSATSVLYYXXXXXXXXXLRKHRTLEDHLAXKX

SEQ ID NO: 8449 - protein, 37 aa, Artificial Sequence
  GFR-binding peptide
  MOD_RES (37)..(37): Xaa is C or S
RPTQVQLNAISVLYFEIVRKKPIFLKKYRTLEDHLAX

SEQ ID NO: 8450 - protein, 41 aa, Artificial Sequence
  GFR-binding peptide
  MOD_RES (5)..(6)..(39)..(41): Xaa is C or S
  MOD_RES (20)..(21)..(22)..(23)..(24): Xaa is A or G
  MOD_RES (25)..(26)..(27)..(28): Xaa is A or G or is absent
SASPXXVSQDLSATSILYYXXXXXXXXXLRKHRMIVKSXKX

SEQ ID NO: 8451 - protein, 40 aa, Artificial Sequence
  GFR-binding peptide
  MOD_RES (6)..(7)..(38)..(40): Xaa is C or S
ASASPXXVPQDLSPISILYKVGRTPKVLKYHYMVVKSXKX

SEQ ID NO: 8452 - protein, 41 aa, Artificial Sequence
  GFR-binding peptide
  MOD_RES (1)..(38)..(40): Xaa is C or S
XRPTQVQLNAISVLYFEIVRKKPIFLKKYRTLEDHLAXKXE

SEQ ID NO: 8453 - protein, 37 aa, Artificial Sequence
  GFR-binding peptide
  MOD_RES (1)..(2)..(36): Xaa is C or S
  MOD_RES (16)..(17)..(18)..(19)..(20): Xaa is A or G
  MOD_RES (21)..(22)..(23)..(24): Xaa is A or G or is absent
XXVPTELSATSMLYYXXXXXXXXXLRKHRDMVVEGXG

SEQ ID NO: 8454 - protein, 33 aa, Artificial Sequence
  GFR-binding peptide
  MOD_RES (14)..(15)..(16)..(17)..(18): Xaa is A or G
  MOD_RES (19)..(20)..(21)..(22): Xaa is A or G or is absent
TQVQLSAISVLYLXXXXXXXXXLKNYQTLEDHL

SEQ ID NO: 8455 - protein, 39 aa, Artificial Sequence
  GFR-binding peptide
  MOD_RES (4)..(5)..(39): Xaa is C or S
  MOD_RES (19)..(20)..(21)..(22)..(23): Xaa is A or G
  MOD_RES (24)..(25)..(26)..(27): Xaa is A or G or is absent
PKAXXVPTELSATSMLYYXXXXXXXXXLRKHRDMVVEGX

SEQ ID NO: 8456 - protein, 34 aa, Artificial Sequence
  GFR-binding peptide
  MOD_RES (1)..(2): Xaa is C or S
  MOD_RES (16)..(17)..(18)..(19)..(20): Xaa is A or G
  MOD_RES (21)..(22)..(23)..(24): Xaa is A or G or is absent
XXVPTELSPISMLYKXXXXXXXXXLKYHYDMVVE

SEQ ID NO: 8457 - protein, 39 aa, Artificial Sequence
  GFR-binding peptide
  MOD_RES (2)..(3)..(37)..(39): Xaa is C or S
  MOD_RES (17)..(18)..(19)..(20)..(21): Xaa is A or G
  MOD_RES (22)..(23)..(24)..(25): Xaa is A or G or is absent
AXXVPTELNAISMLYFXXXXXXXXXLKKYRDMVVEGXGX

SEQ ID NO: 8458 - protein, 37 aa, Artificial Sequence
  GFR-binding peptide
  MOD_RES (6)..(7): Xaa is C or S
ASASPXXVPQDLNAISILYFVGRTPKVLKKYRMVVKS

SEQ ID NO: 8459 - protein, 33 aa, Artificial Sequence
  GFR-binding peptide
  MOD_RES (1)..(1): Xaa is C or S
  MOD_RES (15)..(16)..(17)..(18)..(19): Xaa is A or G
  MOD_RES (20)..(21)..(22)..(23): Xaa is A or G or is absent
XAPTQLSATSVLYYXXXXXXXXXLRKHRNMVVR

SEQ ID NO: 8460 - protein, 33 aa, Artificial Sequence
  GFR-binding peptide
  MOD_RES (2)..(3): Xaa is C or S
PXXVSQDLNAISILYFIGKTPKILKKYRMIVKS

SEQ ID NO: 8461 - protein, 36 aa, Artificial Sequence
  GFR-binding peptide
  MOD_RES (33)..(35): Xaa is C or S
  MOD_RES (14)..(15)..(16)..(17)..(18): Xaa is A or G
  MOD_RES (19)..(20)..(21)..(22): Xaa is A or G or is absent
VSQDLSPISILYKXXXXXXXXXLKYHYMIVKSXKXS

SEQ ID NO: 8462 - protein, 37 aa, Artificial Sequence
  GFR-binding peptide
  MOD_RES (2)..(3)..(35)..(37): Xaa is C or S
AXXVPTELNAISMLYFDEYDKVVLKKYREMVVEGXGX

SEQ ID NO: 8463 - protein, 38 aa, Artificial Sequence
  GFR-binding peptide
  MOD_RES (37)..(37): Xaa is C or S
  MOD_RES (16)..(17)..(18)..(19)..(20): Xaa is A or G
  MOD_RES (21)..(22)..(23)..(24): Xaa is A or G or is absent
RPTQVQLNAISVLYFXXXXXXXXXLKKYRTLEDHLAXK

SEQ ID NO: 8464 - protein, 34 aa, Artificial Sequence
  GFR-binding peptide
  MOD_RES (3)..(4): Xaa is C or S
KAXXVPTELNAISMLYFDENEKVVLKKYRDMVVE

SEQ ID NO: 8465 - protein, 37 aa, Artificial Sequence
  GFR-binding peptide
  MOD_RES (1)..(35)..(37): Xaa is C or S
  MOD_RES (15)..(16)..(17)..(18)..(19): Xaa is A or G
  MOD_RES (20)..(21)..(22)..(23): Xaa is A or G or is absent
XAPTKLSPISVLYKXXXXXXXXXLKYHYNMVVRSXGX

SEQ ID NO: 8466 - protein, 38 aa, Artificial Sequence
  GFR-binding peptide
  MOD_RES (3)..(4)..(36)..(38): Xaa is C or S
KPXXAPTQLSATSVLYYDDSSNVILRKHRNMVVRAXGX

SEQ ID NO: 8467 - protein, 37 aa, Artificial Sequence
  GFR-binding peptide
  MOD_RES (3)..(4): Xaa is C or S
  MOD_RES (18)..(19)..(20)..(21)..(22): Xaa is A or G
  MOD_RES (23)..(24)..(25)..(26): Xaa is A or G or is absent
KAXXAPTKLSPISVLYKXXXXXXXXXLKYHYNMVVKA

SEQ ID NO: 8468 - protein, 39 aa, Artificial Sequence
  GFR-binding peptide
  MOD_RES (5)..(5): Xaa is C or S
RNVQXRPTQVQLSAISVLYLEIVRKKPIFLKNYQTLEDH

SEQ ID NO: 8469 - protein, 35 aa, Artificial Sequence
  GFR-binding peptide
  MOD_RES (1)..(1): Xaa is C or S
XRPTQVQLSATSVLYYEIVRKKPIFLRKHRTLEDH

SEQ ID NO: 8470 - protein, 38 aa, Artificial Sequence
  GFR-binding peptide
  MOD_RES (6)..(7): Xaa is C or S
YVPKPXXAPTKLSPISVLYKDDSSNVILKYHYNMVVRS

SEQ ID NO: 8471 - protein, 39 aa, Artificial Sequence
  GFR-binding peptide
  MOD_RES (4)..(38): Xaa is C or S
  MOD_RES (18)..(19)..(20)..(21)..(22): Xaa is A or G
  MOD_RES (23)..(24)..(25)..(26): Xaa is A or G or is absent
KPTXAPTKLSPISVLYKXXXXXXXXXLKYHYNMVVRSXG

SEQ ID NO: 8472 - protein, 39 aa, Artificial Sequence
  GFR-binding peptide
  MOD_RES (5)..(6): Xaa is C or S
  MOD_RES (20)..(21)..(22)..(23)..(24): Xaa is A or G
  MOD_RES (25)..(26)..(27)..(28): Xaa is A or G or is absent
IPKAXXVPTELSATSMLYYXXXXXXXXXLRKHREMVVEG

SEQ ID NO: 8473 - protein, 33 aa, Artificial Sequence
  GFR-binding peptide
  MOD_RES (31)..(33): Xaa is C or S
VSQDLSAISILYLIGKTPKILKNYQMIVKSXKX

SEQ ID NO: 8474 - protein, 40 aa, Artificial Sequence
  GFR-binding peptide
  MOD_RES (3)..(4)..(38)..(40): Xaa is C or S
  MOD_RES (18)..(19)..(20)..(21)..(22): Xaa is A or G
  MOD_RES (23)..(24)..(25)..(26): Xaa is A or G or is absent
KPXXAPTQLSAISVLYLXXXXXXXXXLKNYQNMVVRAXGX

SEQ ID NO: 8475 - protein, 37 aa, Artificial Sequence
  GFR-binding peptide
  MOD_RES (3)..(4): Xaa is C or S
  MOD_RES (18)..(19)..(20)..(21)..(22): Xaa is A or G
  MOD_RES (23)..(24)..(25)..(26): Xaa is A or G or is absent
KAXXVPTELSPISMLYKXXXXXXXXXLKYHYEMVVEG

SEQ ID NO: 8476 - protein, 39 aa, Artificial Sequence
  GFR-binding peptide
  MOD_RES (5)..(6)..(37)..(39): Xaa is C or S
SAAPXXVPQALSAISILYLVGRKPKVLKNYQMIVRSXKX

SEQ ID NO: 8477 - protein, 37 aa, Artificial Sequence
  GFR-binding peptide
  MOD_RES (37)..(37): Xaa is C or S
  MOD_RES (16)..(17)..(18)..(19)..(20): Xaa is A or G
  MOD_RES (21)..(22)..(23)..(24): Xaa is A or G or is absent
RPTQVQLSATSVLYYXXXXXXXXXLRKHRTLEDHLAX

SEQ ID NO: 8478 - protein, 33 aa, Artificial Sequence
  GFR-binding peptide
  MOD_RES (31)..(33): Xaa is C or S
VSQDLSPISILYKIGKTPKILKYHYMIVKSXKX

SEQ ID NO: 8479 - protein, 41 aa, Artificial Sequence
  GFR-binding peptide
  MOD_RES (6)..(7)..(39)..(41): Xaa is C or S
YVPKPXXAPTKLSATSVLYYDDSSNVILRKHRNMVVRSXGX

SEQ ID NO: 8480 - protein, 40 aa, Artificial Sequence
  GFR-binding peptide
  MOD_RES (5)..(6)..(37)..(39): Xaa is C or S
SAAPXXVPQALNAISILYFVGRKPKVLKKYRMIVRSXKXS

SEQ ID NO: 8481 - protein, 41 aa, Artificial Sequence
  GFR-binding peptide
  MOD_RES (5)..(6)..(39)..(41): Xaa is C or S
  MOD_RES (20)..(21)..(22)..(23)..(24): Xaa is A or G
  MOD_RES (25)..(26)..(27)..(28): Xaa is A or G or is absent
SAAPXXVPQALSATSILYYXXXXXXXXXLRKHRMIVRSXKX

SEQ ID NO: 8482 - protein, 35 aa, Artificial Sequence
  GFR-binding peptide
  MOD_RES (4)..(4): Xaa is C or S
KPTXAPTKLSPISVLYKDDSSNVILKYHYNMVVRS

SEQ ID NO: 8483 - protein, 36 aa, Artificial Sequence
  GFR-binding peptide
  MOD_RES (33)..(35): Xaa is C or S
VPTKLSATSVLYYDDMGVPTLRKHREGMSVAEXGXR

SEQ ID NO: 8484 - protein, 42 aa, Artificial Sequence
  GFR-binding peptide
  MOD_RES (2)..(39)..(41): Xaa is C or S
  MOD_RES (18)..(19)..(20)..(21)..(22): Xaa is A or G
  MOD_RES (23)..(24)..(25)..(26): Xaa is A or G or is absent
QXRPTQVQLSATSVLYYXXXXXXXXXLRKHRTLEDHLAXKXE

SEQ ID NO: 8485 - protein, 41 aa, Artificial Sequence
  GFR-binding peptide
  MOD_RES (3)..(4)..(38)..(40): Xaa is C or S
  MOD_RES (18)..(19)..(20)..(21)..(22): Xaa is A or G
  MOD_RES (23)..(24)..(25)..(26): Xaa is A or G or is absent
KAXXVPTELSATSMLYYXXXXXXXXXLRKHRDMVVEGXGXR

SEQ ID NO: 8486 - protein, 38 aa, Artificial Sequence
  GFR-binding peptide
  MOD_RES (5)..(6)..(38): Xaa is C or S
VPKPXXAPTQLSATSVLYYDDSSNVILRKHRNMVVRAX

SEQ ID NO: 8487 - protein, 37 aa, Artificial Sequence
  GFR-binding peptide
  MOD_RES (1)..(2)..(37): Xaa is C or S
  MOD_RES (16)..(17)..(18)..(19)..(20): Xaa is A or G
  MOD_RES (21)..(22)..(23)..(24): Xaa is A or G or is absent
XXVPTKLSATSVLYYXXXXXXXXXLRKHREGMSVAEX

SEQ ID NO: 8488 - protein, 30 aa, Artificial Sequence
  GFR-binding peptide
VPQDLSATSILYYVGRTPKVLRKHRMVVKS

SEQ ID NO: 8489 - protein, 36 aa, Artificial Sequence
  GFR-binding peptide
  MOD_RES (3)..(3): Xaa is C or S
  MOD_RES (17)..(18)..(19)..(20)..(21): Xaa is A or G
  MOD_RES (22)..(23)..(24)..(25): Xaa is A or G or is absent
PTXAPTKLSPISVLYKXXXXXXXXXLKYHYNMVVRS

SEQ ID NO: 8490 - protein, 35 aa, Artificial Sequence
  GFR-binding peptide
  MOD_RES (1)..(35): Xaa is C or S
  MOD_RES (15)..(16)..(17)..(18)..(19): Xaa is A or G
  MOD_RES (20)..(21)..(22)..(23): Xaa is A or G or is absent
XVPTELNAISMLYFXXXXXXXXXLKKYREMVVEGX

SEQ ID NO: 8491 - protein, 35 aa, Artificial Sequence
  GFR-binding peptide
  MOD_RES (1)..(2)..(35): Xaa is C or S
  MOD_RES (16)..(17)..(18)..(19)..(20): Xaa is A or G
  MOD_RES (21)..(22)..(23)..(24): Xaa is A or G or is absent
XXVPQALSPISILYKXXXXXXXXXLKYHYMIVRSX

SEQ ID NO: 8492 - protein, 36 aa, Artificial Sequence
  GFR-binding peptide
  MOD_RES (5)..(6): Xaa is C or S
SASPXXVSQDLSATSILYYIGKTPKILRKHRMIVKS

SEQ ID NO: 8493 - protein, 42 aa, Artificial Sequence
  GFR-binding peptide
  MOD_RES (6)..(7)..(39)..(41): Xaa is C or S
KIPKAXXVPTELSPISMLYKDENEKVVLKYHYDMVVEGXGXR

SEQ ID NO: 8494 - protein, 39 aa, Artificial Sequence
  GFR-binding peptide
  MOD_RES (4)..(4): Xaa is C or S
  MOD_RES (20)..(21)..(22)..(23)..(24): Xaa is A or G
  MOD_RES (25)..(26)..(27)..(28): Xaa is A or G or is absent
NVQXRPTQVQLSPISVLYKXXXXXXXXXLKYHYTLEDHL

SEQ ID NO: 8495 - protein, 38 aa, Artificial Sequence
  GFR-binding peptide
  MOD_RES (5)..(6)..(37): Xaa is C or S
SAAPXXVPQALSATSILYYVGRKPKVLRKHRMIVRSXK

SEQ ID NO: 8496 - protein, 38 aa, Artificial Sequence
  GFR-binding peptide
  MOD_RES (1)..(35)..(37): Xaa is C or S
  MOD_RES (15)..(16)..(17)..(18)..(19): Xaa is A or G
  MOD_RES (20)..(21)..(22)..(23): Xaa is A or G or is absent
XVPTELSAISMLYLXXXXXXXXXLKNYQEMVVEGXGXR

SEQ ID NO: 8497 - protein, 38 aa, Artificial Sequence
  GFR-binding peptide
  MOD_RES (5)..(6)..(37): Xaa is C or S
SAAPXXVPQALSAISILYLVGRKPKVLKNYQMIVRSXK

SEQ ID NO: 8498 - protein, 35 aa, Artificial Sequence
  GFR-binding peptide
  MOD_RES (5)..(5): Xaa is C or S
TKPTXAPTKLSATSVLYYDDSSNVILRKHRNMVVR

SEQ ID NO: 8499 - protein, 39 aa, Artificial Sequence
  GFR-binding peptide
  MOD_RES (6)..(6): Xaa is C or S
  MOD_RES (20)..(21)..(22)..(23)..(24): Xaa is A or G
  MOD_RES (25)..(26)..(27)..(28): Xaa is A or G or is absent
VTKPTXAPTKLNAISVLYFXXXXXXXXXLKKYRNMVVRS

SEQ ID NO: 8500 - protein, 36 aa, Artificial Sequence
  GFR-binding peptide
  MOD_RES (5)..(6): Xaa is C or S
SAAPXXVPQALSAISILYLVGRKPKVLKNYQMIVRS

SEQ ID NO: 8501 - protein, 33 aa, Artificial Sequence
  GFR-binding peptide
  MOD_RES (1)..(1): Xaa is C or S
  MOD_RES (15)..(16)..(17)..(18)..(19): Xaa is A or G
  MOD_RES (20)..(21)..(22)..(23): Xaa is A or G or is absent
XAPTQLSPISVLYKXXXXXXXXXLKYHYNMVVR

SEQ ID NO: 8502 - protein, 40 aa, Artificial Sequence
  GFR-binding peptide
  MOD_RES (37)..(39): Xaa is C or S
  MOD_RES (16)..(17)..(18)..(19)..(20): Xaa is A or G
  MOD_RES (21)..(22)..(23)..(24): Xaa is A or G or is absent
RPTQVQLSPISVLYKXXXXXXXXXLKYHYTLEDHLAXKXE

SEQ ID NO: 8503 - protein, 33 aa, Artificial Sequence
  GFR-binding peptide
  MOD_RES (31)..(33): Xaa is C or S
VPQALSPISILYKVGRKPKVLKYHYMIVRSXKX

SEQ ID NO: 8504 - protein, 37 aa, Artificial Sequence
  GFR-binding peptide
  MOD_RES (1)..(2)..(35)..(37): Xaa is C or S
  MOD_RES (16)..(17)..(18)..(19)..(20): Xaa is A or G
  MOD_RES (21)..(22)..(23)..(24): Xaa is A or G or is absent
XXVPQDLSATSILYYXXXXXXXXXLRKHRMVVKSXKX

SEQ ID NO: 8505 - protein, 34 aa, Artificial Sequence
  GFR-binding peptide
  MOD_RES (3)..(4): Xaa is C or S
KPXXAPTQLSAISVLYLDDSSNVILKNYQNMVVR

SEQ ID NO: 8506 - protein, 40 aa, Artificial Sequence
  GFR-binding peptide
  MOD_RES (1)..(2)..(37)..(39): Xaa is C or S
  MOD_RES (16)..(17)..(18)..(19)..(20): Xaa is A or G
  MOD_RES (21)..(22)..(23)..(24): Xaa is A or G or is absent
XXVPTKLSPISVLYKXXXXXXXXXLKYHYEGMSVAEXGXR

SEQ ID NO: 8507 - protein, 39 aa, Artificial Sequence
  GFR-binding peptide
  MOD_RES (2)..(3)..(37)..(39): Xaa is C or S
  MOD_RES (17)..(18)..(19)..(20)..(21): Xaa is A or G
  MOD_RES (22)..(23)..(24)..(25): Xaa is A or G or is absent
PXXAPTKLSPISVLYKXXXXXXXXXLKYHYNMVVRSXGX

SEQ ID NO: 8508 - protein, 41 aa, Artificial Sequence
  GFR-binding peptide
  MOD_RES (5)..(6)..(39)..(41): Xaa is C or S
  MOD_RES (20)..(21)..(22)..(23)..(24): Xaa is A or G
  MOD_RES (25)..(26)..(27)..(28): Xaa is A or G or is absent
SASPXXVPQDLSPISILYKXXXXXXXXXLKYHYMVVKSXKX

SEQ ID NO: 8509 - protein, 35 aa, Artificial Sequence
  GFR-binding peptide
  MOD_RES (1)..(1): Xaa is C or S
XRPTQVQLSAISVLYLEIVRKKPIFLKNYQTLEDH

SEQ ID NO: 8510 - protein, 41 aa, Artificial Sequence
  GFR-binding peptide
  MOD_RES (5)..(6)..(40): Xaa is C or S
  MOD_RES (20)..(21)..(22)..(23)..(24): Xaa is A or G
  MOD_RES (25)..(26)..(27)..(28): Xaa is A or G or is absent
VPKPXXAPTQLSPISVLYKXXXXXXXXXLKYHYNMVVRAXG

SEQ ID NO: 8511 - protein, 39 aa, Artificial Sequence
  GFR-binding peptide
  MOD_RES (4)..(5)..(36)..(38): Xaa is C or S
ASPXXVSQDLSPISILYKIGKTPKILKYHYMIVKSXKXS

SEQ ID NO: 8512 - protein, 33 aa, Artificial Sequence
  GFR-binding peptide
  MOD_RES (31)..(33): Xaa is C or S
VPQALSATSILYYVGRKPKVLRKHRMIVRSXKX

SEQ ID NO: 8513 - protein, 37 aa, Artificial Sequence
  GFR-binding peptide
  MOD_RES (2)..(3)..(35)..(37): Xaa is C or S
AXXAPTKLNAISVLYFDSSNNVILKKYRNMVVKAXGX

SEQ ID NO: 8514 - protein, 32 aa, Artificial Sequence
  GFR-binding peptide
  MOD_RES (32)..(32): Xaa is C or S
APTQLSATSVLYYDDSSNVILRKHRNMVVRAX

SEQ ID NO: 8515 - protein, 40 aa, Artificial Sequence
  GFR-binding peptide
  MOD_RES (3)..(4)..(39): Xaa is C or S
  MOD_RES (18)..(19)..(20)..(21)..(22): Xaa is A or G
  MOD_RES (23)..(24)..(25)..(26): Xaa is A or G or is absent
KAXXVPTKLSATSVLYYXXXXXXXXXLRKHREGMSVAEXG

SEQ ID NO: 8516 - protein, 33 aa, Artificial Sequence
  GFR-binding peptide
  MOD_RES (14)..(15)..(16)..(17)..(18): Xaa is A or G
  MOD_RES (19)..(20)..(21)..(22): Xaa is A or G or is absent
VPTELSPISMLYKXXXXXXXXXLKYHYEMVVEG

SEQ ID NO: 8517 - protein, 36 aa, Artificial Sequence
  GFR-binding peptide
  MOD_RES (3)..(4): Xaa is C or S
  MOD_RES (18)..(19)..(20)..(21)..(22): Xaa is A or G
  MOD_RES (23)..(24)..(25)..(26): Xaa is A or G or is absent
SPXXVSQDLSAISILYLXXXXXXXXXLKNYQMIVKS

SEQ ID NO: 8518 - protein, 37 aa, Artificial Sequence
  GFR-binding peptide
  MOD_RES (4)..(5): Xaa is C or S
  MOD_RES (19)..(20)..(21)..(22)..(23): Xaa is A or G
  MOD_RES (24)..(25)..(26)..(27): Xaa is A or G or is absent
PKPXXAPTQLSAISVLYLXXXXXXXXXLKNYQNMVVR

SEQ ID NO: 8519 - protein, 31 aa, Artificial Sequence
  GFR-binding peptide
  MOD_RES (1)..(1): Xaa is C or S
XVPQDLSATSILYYVGRTPKVLRKHRMVVKS

SEQ ID NO: 8520 - protein, 40 aa, Artificial Sequence
  GFR-binding peptide
  MOD_RES (3)..(37)..(39): Xaa is C or S
  MOD_RES (17)..(18)..(19)..(20)..(21): Xaa is A or G
  MOD_RES (22)..(23)..(24)..(25): Xaa is A or G or is absent
PTXAPTKLSPISVLYKXXXXXXXXXLKYHYNMVVRSXGXH

SEQ ID NO: 8521 - protein, 37 aa, Artificial Sequence
  GFR-binding peptide
  MOD_RES (4)..(5)..(37): Xaa is C or S
PKAXXAPTKLSPISVLYKDSSNNVILKYHYNMVVKAX

SEQ ID NO: 8522 - protein, 36 aa, Artificial Sequence
  GFR-binding peptide
  MOD_RES (3)..(4): Xaa is C or S
  MOD_RES (18)..(19)..(20)..(21)..(22): Xaa is A or G
  MOD_RES (23)..(24)..(25)..(26): Xaa is A or G or is absent
KPXXAPTKLSATSVLYYXXXXXXXXXLRKHRNMVVR

SEQ ID NO: 8523 - protein, 40 aa, Artificial Sequence
  GFR-binding peptide
  MOD_RES (4)..(5)..(40): Xaa is C or S
  MOD_RES (19)..(20)..(21)..(22)..(23): Xaa is A or G
  MOD_RES (24)..(25)..(26)..(27): Xaa is A or G or is absent
GKAXXVPTKLNAISVLYFXXXXXXXXXLKKYREGMSVAEX

SEQ ID NO: 8524 - protein, 37 aa, Artificial Sequence
  GFR-binding peptide
  MOD_RES (5)..(6): Xaa is C or S
IPKAXXVPTELNAISMLYFDENEKVVLKKYRDMVVEG

SEQ ID NO: 8525 - protein, 39 aa, Artificial Sequence
  GFR-binding peptide
  MOD_RES (4)..(5)..(38): Xaa is C or S
GKAXXVPTKLNAISVLYFDDMGVPTLKKYREGMSVAEXG

SEQ ID NO: 8526 - protein, 33 aa, Artificial Sequence
  GFR-binding peptide
  MOD_RES (1)..(2)..(33): Xaa is C or S
XXVSQDLNAISILYFIGKTPKILKKYRMIVKSX

SEQ ID NO: 8527 - protein, 37 aa, Artificial Sequence
  GFR-binding peptide
  MOD_RES (6)..(7): Xaa is C or S
KIPKAXXVPTELSPISMLYKDENEKVVLKYHYDMVVE

SEQ ID NO: 8528 - protein, 39 aa, Artificial Sequence
  GFR-binding peptide
  MOD_RES (4)..(5): Xaa is C or S
  MOD_RES (19)..(20)..(21)..(22)..(23): Xaa is A or G
  MOD_RES (24)..(25)..(26)..(27): Xaa is A or G or is absent
GKAXXVPTKLSATSVLYYXXXXXXXXXLRKHREGMSVAE

SEQ ID NO: 8529 - protein, 33 aa, Artificial Sequence
  GFR-binding peptide
  MOD_RES (1)..(32): Xaa is C or S
XVPQALSAISILYLVGRKPKVLKNYQMIVRSXK

SEQ ID NO: 8530 - protein, 40 aa, Artificial Sequence
  GFR-binding peptide
  MOD_RES (1)..(38)..(40): Xaa is C or S
  MOD_RES (17)..(18)..(19)..(20)..(21): Xaa is A or G
  MOD_RES (22)..(23)..(24)..(25): Xaa is A or G or is absent
XRPTQVQLSPISVLYKXXXXXXXXXLKYHYTLEDHLAXKX

SEQ ID NO: 8531 - protein, 39 aa, Artificial Sequence
  GFR-binding peptide
  MOD_RES (2)..(3)..(36)..(38): Xaa is C or S
  MOD_RES (17)..(18)..(19)..(20)..(21): Xaa is A or G
  MOD_RES (22)..(23)..(24)..(25): Xaa is A or G or is absent
PXXVPQALSATSILYYXXXXXXXXXLRKHRMIVRSXKXS

SEQ ID NO: 8532 - protein, 35 aa, Artificial Sequence
  GFR-binding peptide
  MOD_RES (1)..(2)..(33)..(35): Xaa is C or S
XXVPQDLSPISILYKVGRTPKVLKYHYMVVKSXKX

SEQ ID NO: 8533 - protein, 41 aa, Artificial Sequence
  GFR-binding peptide
  MOD_RES (5)..(6)..(38)..(40): Xaa is C or S
VPKAXXAPTKLSAISVLYLDSSNNVILKNYQNMVVKAXGXH

SEQ ID NO: 8534 - protein, 38 aa, Artificial Sequence
  GFR-binding peptide
  MOD_RES (1)..(2)..(35)..(37): Xaa is C or S
  MOD_RES (16)..(17)..(18)..(19)..(20): Xaa is A or G
  MOD_RES (21)..(22)..(23)..(24): Xaa is A or G or is absent
XXVPQDLNAISILYFXXXXXXXXXLKKYRMVVKSXKXS

SEQ ID NO: 8535 - protein, 39 aa, Artificial Sequence
  GFR-binding peptide
  MOD_RES (6)..(7)..(39): Xaa is C or S
TVPKPXXAPTQLSAISVLYLDDSSNVILKNYQNMVVRAX

SEQ ID NO: 8536 - protein, 36 aa, Artificial Sequence
  GFR-binding peptide
  MOD_RES (5)..(6): Xaa is C or S
SASPXXVPQDLSAISILYLVGRTPKVLKNYQMVVKS

SEQ ID NO: 8537 - protein, 36 aa, Artificial Sequence
  GFR-binding peptide
  MOD_RES (2)..(2): Xaa is C or S
  MOD_RES (18)..(19)..(20)..(21)..(22): Xaa is A or G
  MOD_RES (23)..(24)..(25)..(26): Xaa is A or G or is absent
QXRPTQVQLSPISVLYKXXXXXXXXXLKYHYTLEDH

SEQ ID NO: 8538 - protein, 37 aa, Artificial Sequence
  GFR-binding peptide
  MOD_RES (6)..(7): Xaa is C or S
ASAAPXXVPQALSAISILYLVGRKPKVLKNYQMIVRS

SEQ ID NO: 8539 - protein, 36 aa, Artificial Sequence
  GFR-binding peptide
  MOD_RES (4)..(5)..(36): Xaa is C or S
AAPXXVPQALSATSILYYVGRKPKVLRKHRMIVRSX

SEQ ID NO: 8540 - protein, 41 aa, Artificial Sequence
  GFR-binding peptide
  MOD_RES (1)..(38)..(40): Xaa is C or S
  MOD_RES (17)..(18)..(19)..(20)..(21): Xaa is A or G
  MOD_RES (22)..(23)..(24)..(25): Xaa is A or G or is absent
XRPTQVQLNAISVLYFXXXXXXXXXLKKYRTLEDHLAXKXE

SEQ ID NO: 8541 - protein, 37 aa, Artificial Sequence
  GFR-binding peptide
  MOD_RES (4)..(5): Xaa is C or S
  MOD_RES (19)..(20)..(21)..(22)..(23): Xaa is A or G
  MOD_RES (24)..(25)..(26)..(27): Xaa is A or G or is absent
AAPXXVPQALSAISILYLXXXXXXXXXLKNYQMIVRS

SEQ ID NO: 8542 - protein, 38 aa, Artificial Sequence
  GFR-binding peptide
  MOD_RES (2)..(3)..(35)..(37): Xaa is C or S
AXXVPTELSPISMLYKDEYDKVVLKYHYEMVVEGXGXR

SEQ ID NO: 8543 - protein, 43 aa, Artificial Sequence
  GFR-binding peptide
  MOD_RES (3)..(40)..(42): Xaa is C or S
VQXRPTQVQLSATSVLYYEIVRKKPIFLRKHRTLEDHLAXKXE

SEQ ID NO: 8544 - protein, 36 aa, Artificial Sequence
  GFR-binding peptide
  MOD_RES (3)..(4): Xaa is C or S
  MOD_RES (18)..(19)..(20)..(21)..(22): Xaa is A or G
  MOD_RES (23)..(24)..(25)..(26): Xaa is A or G or is absent
KAXXAPTKLSPISVLYKXXXXXXXXXLKYHYNMVVK

SEQ ID NO: 8545 - protein, 37 aa, Artificial Sequence
  GFR-binding peptide
  MOD_RES (2)..(3)..(37): Xaa is C or S
  MOD_RES (17)..(18)..(19)..(20)..(21): Xaa is A or G
  MOD_RES (22)..(23)..(24)..(25): Xaa is A or G or is absent
AXXAPTKLSAISVLYLXXXXXXXXXLKNYQNMVVKAX

SEQ ID NO: 8546 - protein, 39 aa, Artificial Sequence
  GFR-binding peptide
  MOD_RES (4)..(5)..(36)..(38): Xaa is C or S
ASPXXVPQDLSAISILYLVGRTPKVLKNYQMVVKSXKXS

SEQ ID NO: 8547 - protein, 41 aa, Artificial Sequence
  GFR-binding peptide
  MOD_RES (1)..(38)..(40): Xaa is C or S
  MOD_RES (17)..(18)..(19)..(20)..(21): Xaa is A or G
  MOD_RES (22)..(23)..(24)..(25): Xaa is A or G or is absent
XRPTQVQLSPISVLYKXXXXXXXXXLKYHYTLEDHLAXKXE

SEQ ID NO: 8548 - protein, 44 aa, Artificial Sequence
  GFR-binding peptide
  MOD_RES (4)..(41)..(43): Xaa is C or S
  MOD_RES (20)..(21)..(22)..(23)..(24): Xaa is A or G
  MOD_RES (25)..(26)..(27)..(28): Xaa is A or G or is absent
NVQXRPTQVQLNAISVLYFXXXXXXXXXLKKYRTLEDHLAXKXE

SEQ ID NO: 8549 - protein, 32 aa, Artificial Sequence
  GFR-binding peptide
  MOD_RES (1)..(1): Xaa is C or S
XVPTELNAISMLYFDENEKVVLKKYRDMVVEG

SEQ ID NO: 8550 - protein, 39 aa, Artificial Sequence
  GFR-binding peptide
  MOD_RES (4)..(5): Xaa is C or S
  MOD_RES (19)..(20)..(21)..(22)..(23): Xaa is A or G
  MOD_RES (24)..(25)..(26)..(27): Xaa is A or G or is absent
GKAXXVPTKLSAISVLYLXXXXXXXXXLKNYQEGMSVAE

SEQ ID NO: 8551 - protein, 37 aa, Artificial Sequence
  GFR-binding peptide
  MOD_RES (2)..(3)..(35)..(37): Xaa is C or S
PXXAPTKLSAISVLYLDDSSNVILKNYQNMVVRSXGX

SEQ ID NO: 8552 - protein, 36 aa, Artificial Sequence
  GFR-binding peptide
  MOD_RES (4)..(4): Xaa is C or S
  MOD_RES (18)..(19)..(20)..(21)..(22): Xaa is A or G
  MOD_RES (23)..(24)..(25)..(26): Xaa is A or G or is absent
KPTXAPTKLSPISVLYKXXXXXXXXXLKYHYNMVVR

SEQ ID NO: 8553 - protein, 38 aa, Artificial Sequence
  GFR-binding peptide
  MOD_RES (4)..(5)..(37): Xaa is C or S
PKAXXAPTKLSAISVLYLDSSNNVILKNYQNMVVKAXG

SEQ ID NO: 8554 - protein, 37 aa, Artificial Sequence
  GFR-binding peptide
  MOD_RES (4)..(5): Xaa is C or S
  MOD_RES (19)..(20)..(21)..(22)..(23): Xaa is A or G
  MOD_RES (24)..(25)..(26)..(27): Xaa is A or G or is absent
ASPXXVSQDLSAISILYLXXXXXXXXXLKNYQMIVKS

SEQ ID NO: 8555 - protein, 36 aa, Artificial Sequence
  GFR-binding peptide
  MOD_RES (3)..(4): Xaa is C or S
  MOD_RES (18)..(19)..(20)..(21)..(22): Xaa is A or G
  MOD_RES (23)..(24)..(25)..(26): Xaa is A or G or is absent
APXXVPQALSPISILYKXXXXXXXXXLKYHYMIVRS

SEQ ID NO: 8556 - protein, 41 aa, Artificial Sequence
  GFR-binding peptide
  MOD_RES (6)..(7)..(41): Xaa is C or S
  MOD_RES (21)..(22)..(23)..(24)..(25): Xaa is A or G
  MOD_RES (26)..(27)..(28)..(29): Xaa is A or G or is absent
SIPKAXXVPTELNAISMLYFXXXXXXXXXLKKYREMVVEGX

SEQ ID NO: 8557 - protein, 41 aa, Artificial Sequence
  GFR-binding peptide
  MOD_RES (3)..(4)..(38)..(40): Xaa is C or S
  MOD_RES (18)..(19)..(20)..(21)..(22): Xaa is A or G
  MOD_RES (23)..(24)..(25)..(26): Xaa is A or G or is absent
KAXXVPTELSAISMLYLXXXXXXXXXLKNYQEMVVEGXGXR

SEQ ID NO: 8558 - protein, 32 aa, Artificial Sequence
  GFR-binding peptide
  MOD_RES (1)..(1): Xaa is C or S
XVPTELNAISMLYFDEYDKVVLKKYREMVVEG

SEQ ID NO: 8559 - protein, 38 aa, Artificial Sequence
  GFR-binding peptide
  MOD_RES (2)..(3)..(37): Xaa is C or S
  MOD_RES (17)..(18)..(19)..(20)..(21): Xaa is A or G
  MOD_RES (22)..(23)..(24)..(25): Xaa is A or G or is absent
AXXVPTELSATSMLYYXXXXXXXXXLRKHRDMVVEGXG

SEQ ID NO: 8560 - protein, 40 aa, Artificial Sequence
  GFR-binding peptide
  MOD_RES (5)..(6)..(39): Xaa is C or S
  MOD_RES (20)..(21)..(22)..(23)..(24): Xaa is A or G
  MOD_RES (25)..(26)..(27)..(28): Xaa is A or G or is absent
SASPXXVSQDLSAISILYLXXXXXXXXXLKNYQMIVKSXK

SEQ ID NO: 8561 - protein, 36 aa, Artificial Sequence
  GFR-binding peptide
  MOD_RES (2)..(3)..(34)..(36): Xaa is C or S
PXXVSQDLSAISILYLIGKTPKILKNYQMIVKSXKX

SEQ ID NO: 8562 - protein, 39 aa, Artificial Sequence
  GFR-binding peptide
  MOD_RES (4)..(5)..(39): Xaa is C or S
  MOD_RES (19)..(20)..(21)..(22)..(23): Xaa is A or G
  MOD_RES (24)..(25)..(26)..(27): Xaa is A or G or is absent
PKAXXVPTELSPISMLYKXXXXXXXXXLKYHYEMVVEGX

SEQ ID NO: 8563 - protein, 37 aa, Artificial Sequence
  GFR-binding peptide
  MOD_RES (34)..(36): Xaa is C or S
  MOD_RES (14)..(15)..(16)..(17)..(18): Xaa is A or G
  MOD_RES (19)..(20)..(21)..(22): Xaa is A or G or is absent
VPTELNAISMLYFXXXXXXXXXLKKYREMVVEGXGXR

SEQ ID NO: 8564 - protein, 36 aa, Artificial Sequence
  GFR-binding peptide
  MOD_RES (2)..(3)..(34)..(36): Xaa is C or S
PXXVPQALSAISILYLVGRKPKVLKNYQMIVRSXKX

SEQ ID NO: 8565 - protein, 36 aa, Artificial Sequence
  GFR-binding peptide
  MOD_RES (1)..(34)..(36): Xaa is C or S
XVPTKLNAISVLYFDDMGVPTLKKYREGMSVAEXGX

SEQ ID NO: 8566 - protein, 40 aa, Artificial Sequence
  GFR-binding peptide
  MOD_RES (6)..(7)..(39): Xaa is C or S
SIPKAXXVPTELNAISMLYFDEYDKVVLKKYREMVVEGXG

SEQ ID NO: 8567 - protein, 37 aa, Artificial Sequence
  GFR-binding peptide
  MOD_RES (1)..(2)..(36): Xaa is C or S
  MOD_RES (16)..(17)..(18)..(19)..(20): Xaa is A or G
  MOD_RES (21)..(22)..(23)..(24): Xaa is A or G or is absent
XXAPTKLSAISVLYLXXXXXXXXXLKNYQNMVVKAXG

SEQ ID NO: 8568 - protein, 34 aa, Artificial Sequence
  GFR-binding peptide
  MOD_RES (3)..(4): Xaa is C or S
KPXXAPTQLSPISVLYKDDSSNVILKYHYNMVVR

SEQ ID NO: 8569 - protein, 35 aa, Artificial Sequence
  GFR-binding peptide
  MOD_RES (2)..(3)..(34): Xaa is C or S
PXXVSQDLSATSILYYIGKTPKILRKHRMIVKSXK

SEQ ID NO: 8570 - protein, 35 aa, Artificial Sequence
  GFR-binding peptide
  MOD_RES (33)..(35): Xaa is C or S
  MOD_RES (14)..(15)..(16)..(17)..(18): Xaa is A or G
  MOD_RES (19)..(20)..(21)..(22): Xaa is A or G or is absent
VPQALNAISILYFXXXXXXXXXLKKYRMIVRSXKX

SEQ ID NO: 8571 - protein, 41 aa, Artificial Sequence
  GFR-binding peptide
  MOD_RES (6)..(7)..(39)..(41): Xaa is C or S
SIPKAXXVPTELNAISMLYFDEYDKVVLKKYREMVVEGXGX

SEQ ID NO: 8572 - protein, 36 aa, Artificial Sequence
  GFR-binding peptide
  MOD_RES (5)..(6): Xaa is C or S
SASPXXVPQDLSPISILYKVGRTPKVLKYHYMVVKS

SEQ ID NO: 8573 - protein, 40 aa, Artificial Sequence
  GFR-binding peptide
  MOD_RES (4)..(5)..(37)..(39): Xaa is C or S
PKAXXAPTKLNAISVLYFDSSNNVILKKYRNMVVKAXGXH

SEQ ID NO: 8574 - protein, 37 aa, Artificial Sequence
  GFR-binding peptide
  MOD_RES (5)..(6)..(37): Xaa is C or S
SAAPXXVPQALSAISILYLVGRKPKVLKNYQMIVRSX

SEQ ID NO: 8575 - protein, 37 aa, Artificial Sequence
  GFR-binding peptide
  MOD_RES (2)..(3)..(34)..(36): Xaa is C or S
PXXVSQDLSAISILYLIGKTPKILKNYQMIVKSXKXS

SEQ ID NO: 8576 - protein, 31 aa, Artificial Sequence
  GFR-binding peptide
  MOD_RES (1)..(1): Xaa is C or S
XVSQDLSAISILYLIGKTPKILKNYQMIVKS

SEQ ID NO: 8577 - protein, 44 aa, Artificial Sequence
  GFR-binding peptide
  MOD_RES (5)..(6)..(41)..(43): Xaa is C or S
  MOD_RES (20)..(21)..(22)..(23)..(24): Xaa is A or G
  MOD_RES (25)..(26)..(27)..(28): Xaa is A or G or is absent
VGKAXXVPTKLSATSVLYYXXXXXXXXXLRKHREGMSVAEXGXR

SEQ ID NO: 8578 - protein, 40 aa, Artificial Sequence
  GFR-binding peptide
  MOD_RES (1)..(2)..(37)..(39): Xaa is C or S
  MOD_RES (16)..(17)..(18)..(19)..(20): Xaa is A or G
  MOD_RES (21)..(22)..(23)..(24): Xaa is A or G or is absent
XXVPTKLSATSVLYYXXXXXXXXXLRKHREGMSVAEXGXR

SEQ ID NO: 8579 - protein, 44 aa, Artificial Sequence
  GFR-binding peptide
  MOD_RES (4)..(41)..(43): Xaa is C or S
  MOD_RES (20)..(21)..(22)..(23)..(24): Xaa is A or G
  MOD_RES (25)..(26)..(27)..(28): Xaa is A or G or is absent
NVQXRPTQVQLSPISVLYKXXXXXXXXXLKYHYTLEDHLAXKXE

SEQ ID NO: 8580 - protein, 39 aa, Artificial Sequence
  GFR-binding peptide
  MOD_RES (3)..(4)..(36)..(38): Xaa is C or S
KAXXVPTELNAISMLYFDEYDKVVLKKYREMVVEGXGXR

SEQ ID NO: 8581 - protein, 34 aa, Artificial Sequence
  GFR-binding peptide
  MOD_RES (1)..(33): Xaa is C or S
XAPTKLSAISVLYLDDSSNVILKNYQNMVVRSXG

SEQ ID NO: 8582 - protein, 34 aa, Artificial Sequence
  GFR-binding peptide
  MOD_RES (2)..(3): Xaa is C or S
AXXVPTELSPISMLYKDEYDKVVLKYHYEMVVEG

SEQ ID NO: 8583 - protein, 35 aa, Artificial Sequence
  GFR-binding peptide
  MOD_RES (1)..(35): Xaa is C or S
  MOD_RES (15)..(16)..(17)..(18)..(19): Xaa is A or G
  MOD_RES (20)..(21)..(22)..(23): Xaa is A or G or is absent
XAPTKLNAISVLYFXXXXXXXXXLKKYRNMVVRSX

SEQ ID NO: 8584 - protein, 37 aa, Artificial Sequence
  GFR-binding peptide
  MOD_RES (1)..(35)..(37): Xaa is C or S
  MOD_RES (15)..(16)..(17)..(18)..(19): Xaa is A or G
  MOD_RES (20)..(21)..(22)..(23): Xaa is A or G or is absent
XAPTKLSPISVLYKXXXXXXXXXLKYHYNMVVKAXGX

SEQ ID NO: 8585 - protein, 42 aa, Artificial Sequence
  GFR-binding peptide
  MOD_RES (6)..(7)..(40)..(42): Xaa is C or S
  MOD_RES (21)..(22)..(23)..(24)..(25): Xaa is A or G
  MOD_RES (26)..(27)..(28)..(29): Xaa is A or G or is absent
ASASPXXVSQDLSAISILYLXXXXXXXXXLKNYQMIVKSXKX

SEQ ID NO: 8586 - protein, 41 aa, Artificial Sequence
  GFR-binding peptide
  MOD_RES (5)..(6)..(39)..(41): Xaa is C or S
  MOD_RES (20)..(21)..(22)..(23)..(24): Xaa is A or G
  MOD_RES (25)..(26)..(27)..(28): Xaa is A or G or is absent
SASPXXVSQDLSAISILYLXXXXXXXXXLKNYQMIVKSXKX

SEQ ID NO: 8587 - protein, 37 aa, Artificial Sequence
  GFR-binding peptide
  MOD_RES (6)..(7): Xaa is C or S
ASASPXXVSQDLSATSILYYIGKTPKILRKHRMIVKS

SEQ ID NO: 8588 - protein, 41 aa, Artificial Sequence
  GFR-binding peptide
  MOD_RES (4)..(5)..(39)..(41): Xaa is C or S
  MOD_RES (19)..(20)..(21)..(22)..(23): Xaa is A or G
  MOD_RES (24)..(25)..(26)..(27): Xaa is A or G or is absent
PKPXXAPTQLSAISVLYLXXXXXXXXXLKNYQNMVVRAXGX

SEQ ID NO: 8589 - protein, 31 aa, Artificial Sequence
  GFR-binding peptide
  MOD_RES (1)..(1): Xaa is C or S
XVSQDLSPISILYKIGKTPKILKYHYMIVKS

SEQ ID NO: 8590 - protein, 37 aa, Artificial Sequence
  GFR-binding peptide
  MOD_RES (3)..(4)..(35)..(37): Xaa is C or S
SPXXVSQDLNAISILYFIGKTPKILKKYRMIVKSXKX

SEQ ID NO: 8591 - protein, 34 aa, Artificial Sequence
  GFR-binding peptide
  MOD_RES (1)..(2)..(34): Xaa is C or S
XXVPTELSATSMLYYDENEKVVLRKHRDMVVEGX

SEQ ID NO: 8592 - protein, 39 aa, Artificial Sequence
  GFR-binding peptide
  MOD_RES (2)..(3)..(36)..(38): Xaa is C or S
  MOD_RES (17)..(18)..(19)..(20)..(21): Xaa is A or G
  MOD_RES (22)..(23)..(24)..(25): Xaa is A or G or is absent
PXXVSQDLNAISILYFXXXXXXXXXLKKYRMIVKSXKXS

SEQ ID NO: 8593 - protein, 43 aa, Artificial Sequence
  GFR-binding peptide
  MOD_RES (5)..(6)..(41)..(43): Xaa is C or S
  MOD_RES (20)..(21)..(22)..(23)..(24): Xaa is A or G
  MOD_RES (25)..(26)..(27)..(28): Xaa is A or G or is absent
VGKAXXVPTKLSAISVLYLXXXXXXXXXLKNYQEGMSVAEXGX

SEQ ID NO: 8594 - protein, 35 aa, Artificial Sequence
  GFR-binding peptide
  MOD_RES (1)..(34): Xaa is C or S
  MOD_RES (15)..(16)..(17)..(18)..(19): Xaa is A or G
  MOD_RES (20)..(21)..(22)..(23): Xaa is A or G or is absent
XVPQDLNAISILYFXXXXXXXXXLKKYRMVVKSXK

SEQ ID NO: 8595 - protein, 34 aa, Artificial Sequence
  GFR-binding peptide
  MOD_RES (2)..(3): Xaa is C or S
AXXVPTELSPISMLYKDENEKVVLKYHYDMVVEG

SEQ ID NO: 8596 - protein, 34 aa, Artificial Sequence
  GFR-binding peptide
  MOD_RES (32)..(34): Xaa is C or S
VPTELSPISMLYKDEYDKVVLKYHYEMVVEGXGX

SEQ ID NO: 8597 - protein, 37 aa, Artificial Sequence
  GFR-binding peptide
  MOD_RES (1)..(36): Xaa is C or S
  MOD_RES (15)..(16)..(17)..(18)..(19): Xaa is A or G
  MOD_RES (20)..(21)..(22)..(23): Xaa is A or G or is absent
XVPTKLSAISVLYLXXXXXXXXXLKNYQEGMSVAEXG

SEQ ID NO: 8598 - protein, 38 aa, Artificial Sequence
  GFR-binding peptide
  MOD_RES (7)..(7): Xaa is C or S
HVTKPTXAPTKLSPISVLYKDDSSNVILKYHYNMVVRS

SEQ ID NO: 8599 - protein, 42 aa, Artificial Sequence
  GFR-binding peptide
  MOD_RES (6)..(7)..(41): Xaa is C or S
  MOD_RES (21)..(22)..(23)..(24)..(25): Xaa is A or G
  MOD_RES (26)..(27)..(28)..(29): Xaa is A or G or is absent
TVPKPXXAPTQLSPISVLYKXXXXXXXXXLKYHYNMVVRAXG

SEQ ID NO: 8600 - protein, 40 aa, Artificial Sequence
  GFR-binding peptide
  MOD_RES (6)..(7): Xaa is C or S
  MOD_RES (21)..(22)..(23)..(24)..(25): Xaa is A or G
  MOD_RES (26)..(27)..(28)..(29): Xaa is A or G or is absent
AVPKAXXAPTKLSATSVLYYXXXXXXXXXLRKHRNMVVKA

SEQ ID NO: 8601 - protein, 42 aa, Artificial Sequence
  GFR-binding peptide
  MOD_RES (6)..(7)..(40)..(42): Xaa is C or S
  MOD_RES (21)..(22)..(23)..(24)..(25): Xaa is A or G
  MOD_RES (26)..(27)..(28)..(29): Xaa is A or G or is absent
ASAAPXXVPQALSAISILYLXXXXXXXXXLKNYQMIVRSXKX

SEQ ID NO: 8602 - protein, 38 aa, Artificial Sequence
  GFR-binding peptide
  MOD_RES (1)..(35)..(37): Xaa is C or S
  MOD_RES (15)..(16)..(17)..(18)..(19): Xaa is A or G
  MOD_RES (20)..(21)..(22)..(23): Xaa is A or G or is absent
XVPTELSPISMLYKXXXXXXXXXLKYHYDMVVEGXGXR

SEQ ID NO: 8603 - protein, 40 aa, Artificial Sequence
  GFR-binding peptide
  MOD_RES (4)..(5)..(39): Xaa is C or S
  MOD_RES (19)..(20)..(21)..(22)..(23): Xaa is A or G
  MOD_RES (24)..(25)..(26)..(27): Xaa is A or G or is absent
PKPXXAPTQLSPISVLYKXXXXXXXXXLKYHYNMVVRAXG

SEQ ID NO: 8604 - protein, 40 aa, Artificial Sequence
  GFR-binding peptide
  MOD_RES (1)..(38)..(40): Xaa is C or S
  MOD_RES (17)..(18)..(19)..(20)..(21): Xaa is A or G
  MOD_RES (22)..(23)..(24)..(25): Xaa is A or G or is absent
XRPTQVQLSAISVLYLXXXXXXXXXLKNYQTLEDHLAXKX

SEQ ID NO: 8605 - protein, 36 aa, Artificial Sequence
  GFR-binding peptide
  MOD_RES (36)..(36): Xaa is C or S
PTQVQLSATSVLYYEIVRKKPIFLRKHRTLEDHLAX

SEQ ID NO: 8606 - protein, 33 aa, Artificial Sequence
  GFR-binding peptide
  MOD_RES (1)..(33): Xaa is C or S
XVPTELSATSMLYYDEYDKVVLRKHREMVVEGX

SEQ ID NO: 8607 - protein, 41 aa, Artificial Sequence
  GFR-binding peptide
  MOD_RES (2)..(39)..(41): Xaa is C or S
  MOD_RES (18)..(19)..(20)..(21)..(22): Xaa is A or G
  MOD_RES (23)..(24)..(25)..(26): Xaa is A or G or is absent
QXRPTQVQLSPISVLYKXXXXXXXXXLKYHYTLEDHLAXKX

SEQ ID NO: 8608 - protein, 34 aa, Artificial Sequence
  GFR-binding peptide
  MOD_RES (1)..(32)..(34): Xaa is C or S
XVPQDLSAISILYLVGRTPKVLKNYQMVVKSXKX

SEQ ID NO: 8609 - protein, 42 aa, Artificial Sequence
  GFR-binding peptide
  MOD_RES (6)..(7)..(42): Xaa is C or S
  MOD_RES (21)..(22)..(23)..(24)..(25): Xaa is A or G
  MOD_RES (26)..(27)..(28)..(29): Xaa is A or G or is absent
KVGKAXXVPTKLSAISVLYLXXXXXXXXXLKNYQEGMSVAEX

SEQ ID NO: 8610 - protein, 39 aa, Artificial Sequence
  GFR-binding peptide
  MOD_RES (6)..(7)..(38): Xaa is C or S
ASASPXXVPQDLNAISILYFVGRTPKVLKKYRMVVKSXK

SEQ ID NO: 8611 - protein, 41 aa, Artificial Sequence
  GFR-binding peptide
  MOD_RES (6)..(7)..(38)..(40): Xaa is C or S
ASAAPXXVPQALSPISILYKVGRKPKVLKYHYMIVRSXKXS

SEQ ID NO: 8612 - protein, 39 aa, Artificial Sequence
  GFR-binding peptide
  MOD_RES (37)..(39): Xaa is C or S
RPTQVQLNAISVLYFEIVRKKPIFLKKYRTLEDHLAXKX

SEQ ID NO: 8613 - protein, 38 aa, Artificial Sequence
  GFR-binding peptide
  MOD_RES (3)..(4)..(37): Xaa is C or S
  MOD_RES (18)..(19)..(20)..(21)..(22): Xaa is A or G
  MOD_RES (23)..(24)..(25)..(26): Xaa is A or G or is absent
SPXXVSQDLNAISILYFXXXXXXXXXLKKYRMIVKSXK

SEQ ID NO: 8614 - protein, 36 aa, Artificial Sequence
  GFR-binding peptide
  MOD_RES (1)..(1): Xaa is C or S
  MOD_RES (17)..(18)..(19)..(20)..(21): Xaa is A or G
  MOD_RES (22)..(23)..(24)..(25): Xaa is A or G or is absent
XRPTQVQLSPISVLYKXXXXXXXXXLKYHYTLEDHL

SEQ ID NO: 8615 - protein, 39 aa, Artificial Sequence
  GFR-binding peptide
  MOD_RES (1)..(2)..(36)..(38): Xaa is C or S
  MOD_RES (16)..(17)..(18)..(19)..(20): Xaa is A or G
  MOD_RES (21)..(22)..(23)..(24): Xaa is A or G or is absent
XXVPTELNAISMLYFXXXXXXXXXLKKYRDMVVEGXGXR

SEQ ID NO: 8616 - protein, 38 aa, Artificial Sequence
  GFR-binding peptide
  MOD_RES (2)..(36)..(38): Xaa is C or S
  MOD_RES (16)..(17)..(18)..(19)..(20): Xaa is A or G
  MOD_RES (21)..(22)..(23)..(24): Xaa is A or G or is absent
TXAPTKLSPISVLYKXXXXXXXXXLKYHYNMVVRSXGX

SEQ ID NO: 8617 - protein, 36 aa, Artificial Sequence
  GFR-binding peptide
  MOD_RES (3)..(4)..(36): Xaa is C or S
KPXXAPTQLSATSVLYYDDSSNVILRKHRNMVVRAX

SEQ ID NO: 8618 - protein, 35 aa, Artificial Sequence
  GFR-binding peptide
  MOD_RES (1)..(35): Xaa is C or S
  MOD_RES (15)..(16)..(17)..(18)..(19): Xaa is A or G
  MOD_RES (20)..(21)..(22)..(23): Xaa is A or G or is absent
XVPTELSPISMLYKXXXXXXXXXLKYHYDMVVEGX

SEQ ID NO: 8619 - protein, 36 aa, Artificial Sequence
  GFR-binding peptide
  MOD_RES (5)..(6): Xaa is C or S
SAAPXXVPQALSPISILYKVGRKPKVLKYHYMIVRS

SEQ ID NO: 8620 - protein, 36 aa, Artificial Sequence
  GFR-binding peptide
  MOD_RES (3)..(4): Xaa is C or S
  MOD_RES (18)..(19)..(20)..(21)..(22): Xaa is A or G
  MOD_RES (23)..(24)..(25)..(26): Xaa is A or G or is absent
SPXXVPQDLSATSILYYXXXXXXXXXLRKHRMVVKS

SEQ ID NO: 8621 - protein, 38 aa, Artificial Sequence
  GFR-binding peptide
  MOD_RES (5)..(6): Xaa is C or S
  MOD_RES (20)..(21)..(22)..(23)..(24): Xaa is A or G
  MOD_RES (25)..(26)..(27)..(28): Xaa is A or G or is absent
IPKAXXVPTELSPISMLYKXXXXXXXXXLKYHYEMVVE

SEQ ID NO: 8622 - protein, 40 aa, Artificial Sequence
  GFR-binding peptide
  MOD_RES (5)..(6)..(40): Xaa is C or S
  MOD_RES (20)..(21)..(22)..(23)..(24): Xaa is A or G
  MOD_RES (25)..(26)..(27)..(28): Xaa is A or G or is absent
VPKPXXAPTQLSPISVLYKXXXXXXXXXLKYHYNMVVRAX

SEQ ID NO: 8623 - protein, 33 aa, Artificial Sequence
  GFR-binding peptide
  MOD_RES (1)..(2): Xaa is C or S
XXVPTELSATSMLYYDENEKVVLRKHRDMVVEG

SEQ ID NO: 8624 - protein, 35 aa, Artificial Sequence
  GFR-binding peptide
  MOD_RES (16)..(17)..(18)..(19)..(20): Xaa is A or G
  MOD_RES (21)..(22)..(23)..(24): Xaa is A or G or is absent
RPTQVQLSATSVLYYXXXXXXXXXLRKHRTLEDHL

SEQ ID NO: 8625 - protein, 45 aa, Artificial Sequence
  GFR-binding peptide
  MOD_RES (6)..(7)..(42)..(44): Xaa is C or S
  MOD_RES (21)..(22)..(23)..(24)..(25): Xaa is A or G
  MOD_RES (26)..(27)..(28)..(29): Xaa is A or G or is absent
KVGKAXXVPTKLSATSVLYYXXXXXXXXXLRKHREGMSVAEXGXR

SEQ ID NO: 8626 - protein, 34 aa, Artificial Sequence
  GFR-binding peptide
  MOD_RES (1)..(2)..(33): Xaa is C or S
XXVSQDLSATSILYYIGKTPKILRKHRMIVKSXK

SEQ ID NO: 8627 - protein, 37 aa, Artificial Sequence
  GFR-binding peptide
  MOD_RES (36)..(36): Xaa is C or S
PTQVQLNAISVLYFEIVRKKPIFLKKYRTLEDHLAXK

SEQ ID NO: 8628 - protein, 38 aa, Artificial Sequence
  GFR-binding peptide
  MOD_RES (1)..(36)..(38): Xaa is C or S
  MOD_RES (15)..(16)..(17)..(18)..(19): Xaa is A or G
  MOD_RES (20)..(21)..(22)..(23): Xaa is A or G or is absent
XVPTKLNAISVLYFXXXXXXXXXLKKYREGMSVAEXGX

SEQ ID NO: 8629 - protein, 36 aa, Artificial Sequence
  GFR-binding peptide
  MOD_RES (34)..(36): Xaa is C or S
  MOD_RES (14)..(15)..(16)..(17)..(18): Xaa is A or G
  MOD_RES (19)..(20)..(21)..(22): Xaa is A or G or is absent
VPTELNAISMLYFXXXXXXXXXLKKYRDMVVEGXGX

SEQ ID NO: 8630 - protein, 38 aa, Artificial Sequence
  GFR-binding peptide
  MOD_RES (1)..(2)..(36)..(38): Xaa is C or S
  MOD_RES (16)..(17)..(18)..(19)..(20): Xaa is A or G
  MOD_RES (21)..(22)..(23)..(24): Xaa is A or G or is absent
XXAPTQLSPISVLYKXXXXXXXXXLKYHYNMVVRAXGX

SEQ ID NO: 8631 - protein, 37 aa, Artificial Sequence
  GFR-binding peptide
  MOD_RES (1)..(34)..(36): Xaa is C or S
  MOD_RES (15)..(16)..(17)..(18)..(19): Xaa is A or G
  MOD_RES (20)..(21)..(22)..(23): Xaa is A or G or is absent
XVSQDLNAISILYFXXXXXXXXXLKKYRMIVKSXKXS

SEQ ID NO: 8632 - protein, 36 aa, Artificial Sequence
  GFR-binding peptide
  MOD_RES (2)..(36): Xaa is C or S
  MOD_RES (16)..(17)..(18)..(19)..(20): Xaa is A or G
  MOD_RES (21)..(22)..(23)..(24): Xaa is A or G or is absent
TXAPTKLSATSVLYYXXXXXXXXXLRKHRNMVVRSX

SEQ ID NO: 8633 - protein, 42 aa, Artificial Sequence
  GFR-binding peptide
  MOD_RES (3)..(4)..(39)..(41): Xaa is C or S
  MOD_RES (18)..(19)..(20)..(21)..(22): Xaa is A or G
  MOD_RES (23)..(24)..(25)..(26): Xaa is A or G or is absent
KAXXVPTKLSAISVLYLXXXXXXXXXLKNYQEGMSVAEXGXR

SEQ ID NO: 8634 - protein, 35 aa, Artificial Sequence
  GFR-binding peptide
  MOD_RES (1)..(1): Xaa is C or S
XRPTQVQLSPISVLYKEIVRKKPIFLKYHYTLEDH

SEQ ID NO: 8635 - protein, 40 aa, Artificial Sequence
  GFR-binding peptide
  MOD_RES (4)..(5)..(39): Xaa is C or S
  MOD_RES (19)..(20)..(21)..(22)..(23): Xaa is A or G
  MOD_RES (24)..(25)..(26)..(27): Xaa is A or G or is absent
PKAXXVPTELSPISMLYKXXXXXXXXXLKYHYEMVVEGXG

SEQ ID NO: 8636 - protein, 36 aa, Artificial Sequence
  GFR-binding peptide
  MOD_RES (3)..(4)..(36): Xaa is C or S
KPXXAPTKLSAISVLYLDDSSNVILKNYQNMVVRSX

SEQ ID NO: 8637 - protein, 35 aa, Artificial Sequence
  GFR-binding peptide
  MOD_RES (2)..(3)..(35): Xaa is C or S
PXXAPTKLSPISVLYKDDSSNVILKYHYNMVVRSX

SEQ ID NO: 8638 - protein, 41 aa, Artificial Sequence
  GFR-binding peptide
  MOD_RES (6)..(7): Xaa is C or S
  MOD_RES (21)..(22)..(23)..(24)..(25): Xaa is A or G
  MOD_RES (26)..(27)..(28)..(29): Xaa is A or G or is absent
KVGKAXXVPTKLSPISVLYKXXXXXXXXXLKYHYEGMSVAE

SEQ ID NO: 8639 - protein, 37 aa, Artificial Sequence
  GFR-binding peptide
  MOD_RES (1)..(34)..(36): Xaa is C or S
  MOD_RES (15)..(16)..(17)..(18)..(19): Xaa is A or G
  MOD_RES (20)..(21)..(22)..(23): Xaa is A or G or is absent
XVPQALSATSILYYXXXXXXXXXLRKHRMIVRSXKXS

SEQ ID NO: 8640 - protein, 43 aa, Artificial Sequence
  GFR-binding peptide
  MOD_RES (4)..(41)..(43): Xaa is C or S
NVQXRPTQVQLSPISVLYKEIVRKKPIFLKYHYTLEDHLAXKX

SEQ ID NO: 8641 - protein, 31 aa, Artificial Sequence
  GFR-binding peptide
APTQLSATSVLYYDDSSNVILRKHRNMVVRA

SEQ ID NO: 8642 - protein, 42 aa, Artificial Sequence
  GFR-binding peptide
  MOD_RES (5)..(6)..(40)..(42): Xaa is C or S
  MOD_RES (20)..(21)..(22)..(23)..(24): Xaa is A or G
  MOD_RES (25)..(26)..(27)..(28): Xaa is A or G or is absent
VPKAXXAPTKLSATSVLYYXXXXXXXXXLRKHRNMVVKAXGX

SEQ ID NO: 8643 - protein, 33 aa, Artificial Sequence
  GFR-binding peptide
  MOD_RES (1)..(32): Xaa is C or S
XVSQDLSATSILYYIGKTPKILRKHRMIVKSXK

SEQ ID NO: 8644 - protein, 38 aa, Artificial Sequence
  GFR-binding peptide
  MOD_RES (4)..(36)..(38): Xaa is C or S
KPTXAPTKLSPISVLYKDDSSNVILKYHYNMVVRSXGX

SEQ ID NO: 8645 - protein, 33 aa, Artificial Sequence
  GFR-binding peptide
  MOD_RES (1)..(2): Xaa is C or S
XXVPTELSATSMLYYDEYDKVVLRKHREMVVEG

SEQ ID NO: 8646 - protein, 35 aa, Artificial Sequence
  GFR-binding peptide
  MOD_RES (3)..(35): Xaa is C or S
PTXAPTKLSAISVLYLDDSSNVILKNYQNMVVRSX

SEQ ID NO: 8647 - protein, 37 aa, Artificial Sequence
  GFR-binding peptide
  MOD_RES (3)..(4)..(36): Xaa is C or S
KAXXAPTKLNAISVLYFDSSNNVILKKYRNMVVKAXG

SEQ ID NO: 8648 - protein, 36 aa, Artificial Sequence
  GFR-binding peptide
  MOD_RES (2)..(3)..(35): Xaa is C or S
PXXAPTKLSPISVLYKDDSSNVILKYHYNMVVRSXG

SEQ ID NO: 8649 - protein, 36 aa, Artificial Sequence
  GFR-binding peptide
  MOD_RES (3)..(4): Xaa is C or S
  MOD_RES (18)..(19)..(20)..(21)..(22): Xaa is A or G
  MOD_RES (23)..(24)..(25)..(26): Xaa is A or G or is absent
KAXXVPTELSAISMLYLXXXXXXXXXLKNYQEMVVE

SEQ ID NO: 8650 - protein, 34 aa, Artificial Sequence
  GFR-binding peptide
  MOD_RES (31)..(33): Xaa is C or S
VPQALSPISILYKVGRKPKVLKYHYMIVRSXKXS

SEQ ID NO: 8651 - protein, 35 aa, Artificial Sequence
  GFR-binding peptide
  MOD_RES (3)..(4)..(35): Xaa is C or S
SPXXVPQDLSAISILYLVGRTPKVLKNYQMVVKSX

SEQ ID NO: 8652 - protein, 39 aa, Artificial Sequence
  GFR-binding peptide
  MOD_RES (6)..(7): Xaa is C or S
  MOD_RES (21)..(22)..(23)..(24)..(25): Xaa is A or G
  MOD_RES (26)..(27)..(28)..(29): Xaa is A or G or is absent
TVPKPXXAPTQLSAISVLYLXXXXXXXXXLKNYQNMVVR

SEQ ID NO: 8653 - protein, 36 aa, Artificial Sequence
  GFR-binding peptide
  MOD_RES (3)..(4): Xaa is C or S
  MOD_RES (18)..(19)..(20)..(21)..(22): Xaa is A or G
  MOD_RES (23)..(24)..(25)..(26): Xaa is A or G or is absent
SPXXVPQDLSPISILYKXXXXXXXXXLKYHYMVVKS

SEQ ID NO: 8654 - protein, 36 aa, Artificial Sequence
  GFR-binding peptide
  MOD_RES (2)..(2): Xaa is C or S
  MOD_RES (18)..(19)..(20)..(21)..(22): Xaa is A or G
  MOD_RES (23)..(24)..(25)..(26): Xaa is A or G or is absent
QXRPTQVQLSATSVLYYXXXXXXXXXLRKHRTLEDH

SEQ ID NO: 8655 - protein, 32 aa, Artificial Sequence
  GFR-binding peptide
  MOD_RES (14)..(15)..(16)..(17)..(18): Xaa is A or G
  MOD_RES (19)..(20)..(21)..(22): Xaa is A or G or is absent
VPTELSPISMLYKXXXXXXXXXLKYHYEMVVE

SEQ ID NO: 8656 - protein, 38 aa, Artificial Sequence
  GFR-binding peptide
  MOD_RES (4)..(5): Xaa is C or S
  MOD_RES (19)..(20)..(21)..(22)..(23): Xaa is A or G
  MOD_RES (24)..(25)..(26)..(27): Xaa is A or G or is absent
PKPXXAPTQLNAISVLYFXXXXXXXXXLKKYRNMVVRA

SEQ ID NO: 8657 - protein, 38 aa, Artificial Sequence
  GFR-binding peptide
  MOD_RES (6)..(7)..(38): Xaa is C or S
ASASPXXVPQDLSATSILYYVGRTPKVLRKHRMVVKSX

SEQ ID NO: 8658 - protein, 33 aa, Artificial Sequence
  GFR-binding peptide
  MOD_RES (1)..(2)..(33): Xaa is C or S
XXVSQDLSAISILYLIGKTPKILKNYQMIVKSX

SEQ ID NO: 8659 - protein, 40 aa, Artificial Sequence
  GFR-binding peptide
  MOD_RES (3)..(4)..(39): Xaa is C or S
  MOD_RES (18)..(19)..(20)..(21)..(22): Xaa is A or G
  MOD_RES (23)..(24)..(25)..(26): Xaa is A or G or is absent
KAXXVPTKLSAISVLYLXXXXXXXXXLKNYQEGMSVAEXG

SEQ ID NO: 8660 - protein, 34 aa, Artificial Sequence
  GFR-binding peptide
  MOD_RES (1)..(1): Xaa is C or S
  MOD_RES (15)..(16)..(17)..(18)..(19): Xaa is A or G
  MOD_RES (20)..(21)..(22)..(23): Xaa is A or G or is absent
XVPTELSAISMLYLXXXXXXXXXLKNYQDMVVEG

SEQ ID NO: 8661 - protein, 38 aa, Artificial Sequence
  GFR-binding peptide
  MOD_RES (4)..(5): Xaa is C or S
  MOD_RES (19)..(20)..(21)..(22)..(23): Xaa is A or G
  MOD_RES (24)..(25)..(26)..(27): Xaa is A or G or is absent
PKAXXVPTELSAISMLYLXXXXXXXXXLKNYQDMVVEG

SEQ ID NO: 8662 - protein, 37 aa, Artificial Sequence
  GFR-binding peptide
  MOD_RES (2)..(2): Xaa is C or S
  MOD_RES (18)..(19)..(20)..(21)..(22): Xaa is A or G
  MOD_RES (23)..(24)..(25)..(26): Xaa is A or G or is absent
QXRPTQVQLSAISVLYLXXXXXXXXXLKNYQTLEDHL

SEQ ID NO: 8663 - protein, 36 aa, Artificial Sequence
  GFR-binding peptide
  MOD_RES (1)..(2)..(33)..(35): Xaa is C or S
XXVPQDLSATSILYYVGRTPKVLRKHRMVVKSXKXS

SEQ ID NO: 8664 - protein, 36 aa, Artificial Sequence
  GFR-binding peptide
  MOD_RES (1)..(33)..(35): Xaa is C or S
XAPTKLSPISVLYKDDSSNVILKYHYNMVVRSXGXH

SEQ ID NO: 8665 - protein, 42 aa, Artificial Sequence
  GFR-binding peptide
  MOD_RES (2)..(39)..(41): Xaa is C or S
QXRPTQVQLSATSVLYYEIVRKKPIFLRKHRTLEDHLAXKXE

SEQ ID NO: 8666 - protein, 35 aa, Artificial Sequence
  GFR-binding peptide
  MOD_RES (34)..(34): Xaa is C or S
  MOD_RES (14)..(15)..(16)..(17)..(18): Xaa is A or G
  MOD_RES (19)..(20)..(21)..(22): Xaa is A or G or is absent
VPTELSPISMLYKXXXXXXXXXLKYHYEMVVEGXG

SEQ ID NO: 8667 - protein, 38 aa, Artificial Sequence
  GFR-binding peptide
  MOD_RES (2)..(3)..(37): Xaa is C or S
  MOD_RES (17)..(18)..(19)..(20)..(21): Xaa is A or G
  MOD_RES (22)..(23)..(24)..(25): Xaa is A or G or is absent
PXXAPTQLSAISVLYLXXXXXXXXXLKNYQNMVVRAXG

SEQ ID NO: 8668 - protein, 32 aa, Artificial Sequence
  GFR-binding peptide
  MOD_RES (14)..(15)..(16)..(17)..(18): Xaa is A or G
  MOD_RES (19)..(20)..(21)..(22): Xaa is A or G or is absent
VPQALSPISILYKXXXXXXXXXLKYHYMIVRS

SEQ ID NO: 8669 - protein, 40 aa, Artificial Sequence
  GFR-binding peptide
  MOD_RES (3)..(4)..(37)..(39): Xaa is C or S
  MOD_RES (18)..(19)..(20)..(21)..(22): Xaa is A or G
  MOD_RES (23)..(24)..(25)..(26): Xaa is A or G or is absent
APXXVPQALSATSILYYXXXXXXXXXLRKHRMIVRSXKXS

SEQ ID NO: 8670 - protein, 43 aa, Artificial Sequence
  GFR-binding peptide
  MOD_RES (6)..(7)..(41)..(43): Xaa is C or S
  MOD_RES (21)..(22)..(23)..(24)..(25): Xaa is A or G
  MOD_RES (26)..(27)..(28)..(29): Xaa is A or G or is absent
AVPKAXXAPTKLNAISVLYFXXXXXXXXXLKKYRNMVVKAXGX

SEQ ID NO: 8671 - protein, 40 aa, Artificial Sequence
  GFR-binding peptide
  MOD_RES (7)..(7): Xaa is C or S
  MOD_RES (21)..(22)..(23)..(24)..(25): Xaa is A or G
  MOD_RES (26)..(27)..(28)..(29): Xaa is A or G or is absent
HVTKPTXAPTKLSPISVLYKXXXXXXXXXLKYHYNMVVRS

SEQ ID NO: 8672 - protein, 40 aa, Artificial Sequence
  GFR-binding peptide
  MOD_RES (5)..(5): Xaa is C or S
  MOD_RES (21)..(22)..(23)..(24)..(25): Xaa is A or G
  MOD_RES (26)..(27)..(28)..(29): Xaa is A or G or is absent
RNVQXRPTQVQLSPISVLYKXXXXXXXXXLKYHYTLEDHL

SEQ ID NO: 8673 - protein, 38 aa, Artificial Sequence
  GFR-binding peptide
  MOD_RES (2)..(3)..(37): Xaa is C or S
  MOD_RES (17)..(18)..(19)..(20)..(21): Xaa is A or G
  MOD_RES (22)..(23)..(24)..(25): Xaa is A or G or is absent
PXXAPTKLNAISVLYFXXXXXXXXXLKKYRNMVVRSXG

SEQ ID NO: 8674 - protein, 38 aa, Artificial Sequence
  GFR-binding peptide
  MOD_RES (3)..(4)..(35)..(37): Xaa is C or S
SPXXVPQDLNAISILYFVGRTPKVLKKYRMVVKSXKXS

SEQ ID NO: 8675 - protein, 41 aa, Artificial Sequence
  GFR-binding peptide
  MOD_RES (3)..(40): Xaa is C or S
  MOD_RES (19)..(20)..(21)..(22)..(23): Xaa is A or G
  MOD_RES (24)..(25)..(26)..(27): Xaa is A or G or is absent
VQXRPTQVQLSAISVLYLXXXXXXXXXLKNYQTLEDHLAXK

SEQ ID NO: 8676 - protein, 39 aa, Artificial Sequence
  GFR-binding peptide
  MOD_RES (3)..(4)..(38): Xaa is C or S
  MOD_RES (18)..(19)..(20)..(21)..(22): Xaa is A or G
  MOD_RES (23)..(24)..(25)..(26): Xaa is A or G or is absent
KAXXAPTKLSPISVLYKXXXXXXXXXLKYHYNMVVKAXG

SEQ ID NO: 8677 - protein, 36 aa, Artificial Sequence
  GFR-binding peptide
  MOD_RES (1)..(2): Xaa is C or S
  MOD_RES (16)..(17)..(18)..(19)..(20): Xaa is A or G
  MOD_RES (21)..(22)..(23)..(24): Xaa is A or G or is absent
XXVPTKLNAISVLYFXXXXXXXXXLKKYREGMSVAE

SEQ ID NO: 8678 - protein, 38 aa, Artificial Sequence
  GFR-binding peptide
  MOD_RES (5)..(6): Xaa is C or S
  MOD_RES (20)..(21)..(22)..(23)..(24): Xaa is A or G
  MOD_RES (25)..(26)..(27)..(28): Xaa is A or G or is absent
IPKAXXVPTELSATSMLYYXXXXXXXXXLRKHREMVVE

SEQ ID NO: 8679 - protein, 44 aa, Artificial Sequence
  GFR-binding peptide
  MOD_RES (6)..(7)..(41)..(43): Xaa is C or S
  MOD_RES (21)..(22)..(23)..(24)..(25): Xaa is A or G
  MOD_RES (26)..(27)..(28)..(29): Xaa is A or G or is absent
TVPKPXXAPTQLSATSVLYYXXXXXXXXXLRKHRNMVVRAXGXH

SEQ ID NO: 8680 - protein, 38 aa, Artificial Sequence
  GFR-binding peptide
  MOD_RES (5)..(6)..(37): Xaa is C or S
SASPXXVPQDLNAISILYFVGRTPKVLKKYRMVVKSXK

SEQ ID NO: 8681 - protein, 36 aa, Artificial Sequence
  GFR-binding peptide
  MOD_RES (3)..(4): Xaa is C or S
  MOD_RES (18)..(19)..(20)..(21)..(22): Xaa is A or G
  MOD_RES (23)..(24)..(25)..(26): Xaa is A or G or is absent
KAXXAPTKLSATSVLYYXXXXXXXXXLRKHRNMVVK

SEQ ID NO: 8682 - protein, 42 aa, Artificial Sequence
  GFR-binding peptide
  MOD_RES (6)..(7)..(40)..(42): Xaa is C or S
  MOD_RES (21)..(22)..(23)..(24)..(25): Xaa is A or G
  MOD_RES (26)..(27)..(28)..(29): Xaa is A or G or is absent
ASAAPXXVPQALSATSILYYXXXXXXXXXLRKHRMIVRSXKX

SEQ ID NO: 8683 - protein, 43 aa, Artificial Sequence
  GFR-binding peptide
  MOD_RES (6)..(7)..(41)..(43): Xaa is C or S
  MOD_RES (21)..(22)..(23)..(24)..(25): Xaa is A or G
  MOD_RES (26)..(27)..(28)..(29): Xaa is A or G or is absent
TVPKPXXAPTQLSPISVLYKXXXXXXXXXLKYHYNMVVRAXGX

SEQ ID NO: 8684 - protein, 36 aa, Artificial Sequence
  GFR-binding peptide
  MOD_RES (1)..(2)..(34)..(36): Xaa is C or S
XXVPTELSATSMLYYDEYDKVVLRKHREMVVEGXGX

SEQ ID NO: 8685 - protein, 42 aa, Artificial Sequence
  GFR-binding peptide
  MOD_RES (4)..(41): Xaa is C or S
NVQXRPTQVQLSAISVLYLEIVRKKPIFLKNYQTLEDHLAXK

SEQ ID NO: 8686 - protein, 34 aa, Artificial Sequence
  GFR-binding peptide
TQVQLSPISVLYKEIVRKKPIFLKYHYTLEDHLA

SEQ ID NO: 8687 - protein, 34 aa, Artificial Sequence
  GFR-binding peptide
  MOD_RES (16)..(17)..(18)..(19)..(20): Xaa is A or G
  MOD_RES (21)..(22)..(23)..(24): Xaa is A or G or is absent
RPTQVQLSPISVLYKXXXXXXXXXLKYHYTLEDH

SEQ ID NO: 8688 - protein, 35 aa, Artificial Sequence
  GFR-binding peptide
  MOD_RES (1)..(2)..(34): Xaa is C or S
XXVPTELNAISMLYFDENEKVVLKKYRDMVVEGXG

SEQ ID NO: 8689 - protein, 39 aa, Artificial Sequence
  GFR-binding peptide
  MOD_RES (3)..(4)..(36)..(38): Xaa is C or S
KPXXAPTKLSATSVLYYDDSSNVILRKHRNMVVRSXGXH

SEQ ID NO: 8690 - protein, 31 aa, Artificial Sequence
  GFR-binding peptide
  MOD_RES (1)..(1): Xaa is C or S
XVPQDLSPISILYKVGRTPKVLKYHYMVVKS

SEQ ID NO: 8691 - protein, 39 aa, Artificial Sequence
  GFR-binding peptide
  MOD_RES (4)..(5)..(37)..(39): Xaa is C or S
PKAXXAPTKLNAISVLYFDSSNNVILKKYRNMVVKAXGX

SEQ ID NO: 8692 - protein, 33 aa, Artificial Sequence
  GFR-binding peptide
  MOD_RES (2)..(3): Xaa is C or S
PXXVPQALSATSILYYVGRKPKVLRKHRMIVRS

SEQ ID NO: 8693 - protein, 37 aa, Artificial Sequence
  GFR-binding peptide
  MOD_RES (3)..(4)..(35)..(37): Xaa is C or S
SPXXVPQDLNAISILYFVGRTPKVLKKYRMVVKSXKX

SEQ ID NO: 8694 - protein, 39 aa, Artificial Sequence
  GFR-binding peptide
  MOD_RES (2)..(39): Xaa is C or S
QXRPTQVQLSPISVLYKEIVRKKPIFLKYHYTLEDHLAX

SEQ ID NO: 8695 - protein, 37 aa, Artificial Sequence
  GFR-binding peptide
  MOD_RES (1)..(2)..(35)..(37): Xaa is C or S
XXVPTKLSAISVLYLDDMGVPTLKNYQEGMSVAEXGX

SEQ ID NO: 8696 - protein, 37 aa, Artificial Sequence
  GFR-binding peptide
  MOD_RES (1)..(2)..(35)..(37): Xaa is C or S
  MOD_RES (16)..(17)..(18)..(19)..(20): Xaa is A or G
  MOD_RES (21)..(22)..(23)..(24): Xaa is A or G or is absent
XXVPQDLSAISILYLXXXXXXXXXLKNYQMVVKSXKX

SEQ ID NO: 8697 - protein, 34 aa, Artificial Sequence
  GFR-binding peptide
  MOD_RES (1)..(34): Xaa is C or S
  MOD_RES (15)..(16)..(17)..(18)..(19): Xaa is A or G
  MOD_RES (20)..(21)..(22)..(23): Xaa is A or G or is absent
XVPQDLSAISILYLXXXXXXXXXLKNYQMVVKSX

SEQ ID NO: 8698 - protein, 37 aa, Artificial Sequence
  GFR-binding peptide
  MOD_RES (5)..(6)..(37): Xaa is C or S
SASPXXVSQDLSPISILYKIGKTPKILKYHYMIVKSX

SEQ ID NO: 8699 - protein, 37 aa, Artificial Sequence
  GFR-binding peptide
  MOD_RES (1)..(34)..(36): Xaa is C or S
XVPTKLSAISVLYLDDMGVPTLKNYQEGMSVAEXGXR

SEQ ID NO: 8700 - protein, 37 aa, Artificial Sequence
  GFR-binding peptide
  MOD_RES (6)..(7): Xaa is C or S
ASAAPXXVPQALSPISILYKVGRKPKVLKYHYMIVRS

SEQ ID NO: 8701 - protein, 39 aa, Artificial Sequence
  GFR-binding peptide
  MOD_RES (2)..(3)..(37)..(39): Xaa is C or S
  MOD_RES (17)..(18)..(19)..(20)..(21): Xaa is A or G
  MOD_RES (22)..(23)..(24)..(25): Xaa is A or G or is absent
PXXAPTKLSATSVLYYXXXXXXXXXLRKHRNMVVRSXGX

SEQ ID NO: 8702 - protein, 39 aa, Artificial Sequence
  GFR-binding peptide
  MOD_RES (4)..(5)..(39): Xaa is C or S
  MOD_RES (19)..(20)..(21)..(22)..(23): Xaa is A or G
  MOD_RES (24)..(25)..(26)..(27): Xaa is A or G or is absent
PKAXXAPTKLNAISVLYFXXXXXXXXXLKKYRNMVVKAX

SEQ ID NO: 8703 - protein, 36 aa, Artificial Sequence
  GFR-binding peptide
  MOD_RES (2)..(3)..(35): Xaa is C or S
AXXVPTELSATSMLYYDEYDKVVLRKHREMVVEGXG

SEQ ID NO: 8704 - protein, 34 aa, Artificial Sequence
  GFR-binding peptide
  MOD_RES (15)..(16)..(17)..(18)..(19): Xaa is A or G
  MOD_RES (20)..(21)..(22)..(23): Xaa is A or G or is absent
PTQVQLSPISVLYKXXXXXXXXXLKYHYTLEDHL

SEQ ID NO: 8705 - protein, 40 aa, Artificial Sequence
  GFR-binding peptide
  MOD_RES (37)..(39): Xaa is C or S
RPTQVQLSPISVLYKEIVRKKPIFLKYHYTLEDHLAXKXE

SEQ ID NO: 8706 - protein, 43 aa, Artificial Sequence
  GFR-binding peptide
  MOD_RES (5)..(6)..(40)..(42): Xaa is C or S
  MOD_RES (20)..(21)..(22)..(23)..(24): Xaa is A or G
  MOD_RES (25)..(26)..(27)..(28): Xaa is A or G or is absent
VPKPXXAPTQLSAISVLYLXXXXXXXXXLKNYQNMVVRAXGXH

SEQ ID NO: 8707 - protein, 40 aa, Artificial Sequence
  GFR-binding peptide
  MOD_RES (4)..(5)..(39): Xaa is C or S
  MOD_RES (19)..(20)..(21)..(22)..(23): Xaa is A or G
  MOD_RES (24)..(25)..(26)..(27): Xaa is A or G or is absent
PKAXXAPTKLSPISVLYKXXXXXXXXXLKYHYNMVVKAXG

SEQ ID NO: 8708 - protein, 42 aa, Artificial Sequence
  GFR-binding peptide
  MOD_RES (4)..(5)..(39)..(41): Xaa is C or S
  MOD_RES (19)..(20)..(21)..(22)..(23): Xaa is A or G
  MOD_RES (24)..(25)..(26)..(27): Xaa is A or G or is absent
PKAXXVPTELSATSMLYYXXXXXXXXXLRKHREMVVEGXGXR

SEQ ID NO: 8709 - protein, 39 aa, Artificial Sequence
  GFR-binding peptide
  MOD_RES (4)..(4): Xaa is C or S
  MOD_RES (20)..(21)..(22)..(23)..(24): Xaa is A or G
  MOD_RES (25)..(26)..(27)..(28): Xaa is A or G or is absent
NVQXRPTQVQLSATSVLYYXXXXXXXXXLRKHRTLEDHL

SEQ ID NO: 8710 - protein, 34 aa, Artificial Sequence
  GFR-binding peptide
  MOD_RES (2)..(34): Xaa is C or S
TXAPTKLSATSVLYYDDSSNVILRKHRNMVVRSX

SEQ ID NO: 8711 - protein, 36 aa, Artificial Sequence
  GFR-binding peptide
  MOD_RES (1)..(2)..(35): Xaa is C or S
  MOD_RES (16)..(17)..(18)..(19)..(20): Xaa is A or G
  MOD_RES (21)..(22)..(23)..(24): Xaa is A or G or is absent
XXVPQALNAISILYFXXXXXXXXXLKKYRMIVRSXK

SEQ ID NO: 8712 - protein, 33 aa, Artificial Sequence
  GFR-binding peptide
  MOD_RES (2)..(2): Xaa is C or S
TXAPTKLSPISVLYKDDSSNVILKYHYNMVVRS

SEQ ID NO: 8713 - protein, 33 aa, Artificial Sequence
  GFR-binding peptide
  MOD_RES (2)..(3): Xaa is C or S
PXXAPTKLSPISVLYKDDSSNVILKYHYNMVVR

SEQ ID NO: 8714 - protein, 40 aa, Artificial Sequence
  GFR-binding peptide
  MOD_RES (3)..(4)..(37)..(39): Xaa is C or S
KAXXVPTKLSATSVLYYDDMGVPTLRKHREGMSVAEXGXR

SEQ ID NO: 8715 - protein, 32 aa, Artificial Sequence
  GFR-binding peptide
  MOD_RES (1)..(1): Xaa is C or S
XAPTKLSAISVLYLDDSSNVILKNYQNMVVRS

SEQ ID NO: 8716 - protein, 36 aa, Artificial Sequence
  GFR-binding peptide
  MOD_RES (3)..(4): Xaa is C or S
  MOD_RES (18)..(19)..(20)..(21)..(22): Xaa is A or G
  MOD_RES (23)..(24)..(25)..(26): Xaa is A or G or is absent
KPXXAPTKLNAISVLYFXXXXXXXXXLKKYRNMVVR

SEQ ID NO: 8717 - protein, 36 aa, Artificial Sequence
  GFR-binding peptide
  MOD_RES (5)..(5): Xaa is C or S
TKPTXAPTKLSATSVLYYDDSSNVILRKHRNMVVRS

SEQ ID NO: 8718 - protein, 34 aa, Artificial Sequence
  GFR-binding peptide
  MOD_RES (1)..(34): Xaa is C or S
  MOD_RES (15)..(16)..(17)..(18)..(19): Xaa is A or G
  MOD_RES (20)..(21)..(22)..(23): Xaa is A or G or is absent
XVPQDLSATSILYYXXXXXXXXXLRKHRMVVKSX

SEQ ID NO: 8719 - protein, 41 aa, Artificial Sequence
  GFR-binding peptide
  MOD_RES (3)..(4)..(38)..(40): Xaa is C or S
  MOD_RES (18)..(19)..(20)..(21)..(22): Xaa is A or G
  MOD_RES (23)..(24)..(25)..(26): Xaa is A or G or is absent
KPXXAPTQLNAISVLYFXXXXXXXXXLKKYRNMVVRAXGXH

SEQ ID NO: 8720 - protein, 40 aa, Artificial Sequence
  GFR-binding peptide
  MOD_RES (6)..(7): Xaa is C or S
  MOD_RES (21)..(22)..(23)..(24)..(25): Xaa is A or G
  MOD_RES (26)..(27)..(28)..(29): Xaa is A or G or is absent
AVPKAXXAPTKLSAISVLYLXXXXXXXXXLKNYQNMVVKA

SEQ ID NO: 8721 - protein, 37 aa, Artificial Sequence
  GFR-binding peptide
  MOD_RES (6)..(7): Xaa is C or S
ASASPXXVSQDLSPISILYKIGKTPKILKYHYMIVKS

SEQ ID NO: 8722 - protein, 35 aa, Artificial Sequence
  GFR-binding peptide
  MOD_RES (1)..(33)..(35): Xaa is C or S
XAPTKLSPISVLYKDDSSNVILKYHYNMVVRSXGX

SEQ ID NO: 8723 - protein, 37 aa, Artificial Sequence
  GFR-binding peptide
  MOD_RES (3)..(3): Xaa is C or S
VQXRPTQVQLSPISVLYKEIVRKKPIFLKYHYTLEDH

SEQ ID NO: 8724 - protein, 38 aa, Artificial Sequence
  GFR-binding peptide
  MOD_RES (1)..(2)..(35)..(37): Xaa is C or S
XXVPTKLNAISVLYFDDMGVPTLKKYREGMSVAEXGXR

SEQ ID NO: 8725 - protein, 42 aa, Artificial Sequence
  GFR-binding peptide
  MOD_RES (6)..(7)..(40)..(42): Xaa is C or S
KVGKAXXVPTKLSAISVLYLDDMGVPTLKNYQEGMSVAEXGX

SEQ ID NO: 8726 - protein, 34 aa, Artificial Sequence
  GFR-binding peptide
  MOD_RES (2)..(3): Xaa is C or S
PXXAPTQLSATSVLYYDDSSNVILRKHRNMVVRA

SEQ ID NO: 8727 - protein, 39 aa, Artificial Sequence
  GFR-binding peptide
  MOD_RES (2)..(3)..(37)..(39): Xaa is C or S
  MOD_RES (17)..(18)..(19)..(20)..(21): Xaa is A or G
  MOD_RES (22)..(23)..(24)..(25): Xaa is A or G or is absent
PXXAPTQLSPISVLYKXXXXXXXXXLKYHYNMVVRAXGX

SEQ ID NO: 8728 - protein, 37 aa, Artificial Sequence
  GFR-binding peptide
  MOD_RES (5)..(6): Xaa is C or S
IPKAXXVPTELNAISMLYFDEYDKVVLKKYREMVVEG

SEQ ID NO: 8729 - protein, 43 aa, Artificial Sequence
  GFR-binding peptide
  MOD_RES (4)..(41)..(43): Xaa is C or S
NVQXRPTQVQLSATSVLYYEIVRKKPIFLRKHRTLEDHLAXKX

SEQ ID NO: 8730 - protein, 38 aa, Artificial Sequence
  GFR-binding peptide
  MOD_RES (6)..(6): Xaa is C or S
  MOD_RES (20)..(21)..(22)..(23)..(24): Xaa is A or G
  MOD_RES (25)..(26)..(27)..(28): Xaa is A or G or is absent
VTKPTXAPTKLNAISVLYFXXXXXXXXXLKKYRNMVVR

SEQ ID NO: 8731 - protein, 39 aa, Artificial Sequence
  GFR-binding peptide
  MOD_RES (5)..(6): Xaa is C or S
  MOD_RES (20)..(21)..(22)..(23)..(24): Xaa is A or G
  MOD_RES (25)..(26)..(27)..(28): Xaa is A or G or is absent
IPKAXXVPTELSPISMLYKXXXXXXXXXLKYHYEMVVEG

SEQ ID NO: 8732 - protein, 38 aa, Artificial Sequence
  GFR-binding peptide
  MOD_RES (1)..(35)..(37): Xaa is C or S
  MOD_RES (15)..(16)..(17)..(18)..(19): Xaa is A or G
  MOD_RES (20)..(21)..(22)..(23): Xaa is A or G or is absent
XVPTELSATSMLYYXXXXXXXXXLRKHRDMVVEGXGXR

SEQ ID NO: 8733 - protein, 42 aa, Artificial Sequence
  GFR-binding peptide
  MOD_RES (6)..(7)..(39)..(41): Xaa is C or S
SIPKAXXVPTELSATSMLYYDEYDKVVLRKHREMVVEGXGXR

SEQ ID NO: 8734 - protein, 39 aa, Artificial Sequence
  GFR-binding peptide
  MOD_RES (1)..(38): Xaa is C or S
XRPTQVQLSAISVLYLEIVRKKPIFLKNYQTLEDHLAXK

SEQ ID NO: 8735 - protein, 41 aa, Artificial Sequence
  GFR-binding peptide
  MOD_RES (4)..(5)..(38)..(40): Xaa is C or S
  MOD_RES (19)..(20)..(21)..(22)..(23): Xaa is A or G
  MOD_RES (24)..(25)..(26)..(27): Xaa is A or G or is absent
ASPXXVPQDLSPISILYKXXXXXXXXXLKYHYMVVKSXKXS

SEQ ID NO: 8736 - protein, 39 aa, Artificial Sequence
  GFR-binding peptide
  MOD_RES (1)..(2)..(36)..(38): Xaa is C or S
  MOD_RES (16)..(17)..(18)..(19)..(20): Xaa is A or G
  MOD_RES (21)..(22)..(23)..(24): Xaa is A or G or is absent
XXVPTELSPISMLYKXXXXXXXXXLKYHYEMVVEGXGXR

SEQ ID NO: 8737 - protein, 40 aa, Artificial Sequence
  GFR-binding peptide
  MOD_RES (6)..(7)..(39): Xaa is C or S
YVPKPXXAPTKLSAISVLYLDDSSNVILKNYQNMVVRSXG

SEQ ID NO: 8738 - protein, 38 aa, Artificial Sequence
  GFR-binding peptide
  MOD_RES (6)..(6): Xaa is C or S
  MOD_RES (20)..(21)..(22)..(23)..(24): Xaa is A or G
  MOD_RES (25)..(26)..(27)..(28): Xaa is A or G or is absent
VTKPTXAPTKLSATSVLYYXXXXXXXXXLRKHRNMVVR

SEQ ID NO: 8739 - protein, 42 aa, Artificial Sequence
  GFR-binding peptide
  MOD_RES (6)..(7)..(41): Xaa is C or S
  MOD_RES (21)..(22)..(23)..(24)..(25): Xaa is A or G
  MOD_RES (26)..(27)..(28)..(29): Xaa is A or G or is absent
SIPKAXXVPTELSAISMLYLXXXXXXXXXLKNYQEMVVEGXG

SEQ ID NO: 8740 - protein, 35 aa, Artificial Sequence
  GFR-binding peptide
  MOD_RES (1)..(33)..(35): Xaa is C or S
XAPTQLSAISVLYLDDSSNVILKNYQNMVVRAXGX

SEQ ID NO: 8741 - protein, 39 aa, Artificial Sequence
  GFR-binding peptide
  MOD_RES (5)..(6): Xaa is C or S
  MOD_RES (20)..(21)..(22)..(23)..(24): Xaa is A or G
  MOD_RES (25)..(26)..(27)..(28): Xaa is A or G or is absent
VPKPXXAPTQLSAISVLYLXXXXXXXXXLKNYQNMVVRA

SEQ ID NO: 8742 - protein, 39 aa, Artificial Sequence
  GFR-binding peptide
  MOD_RES (3)..(4)..(38): Xaa is C or S
  MOD_RES (18)..(19)..(20)..(21)..(22): Xaa is A or G
  MOD_RES (23)..(24)..(25)..(26): Xaa is A or G or is absent
KPXXAPTQLSPISVLYKXXXXXXXXXLKYHYNMVVRAXG

SEQ ID NO: 8743 - protein, 41 aa, Artificial Sequence
  GFR-binding peptide
  MOD_RES (5)..(6)..(39)..(41): Xaa is C or S
  MOD_RES (20)..(21)..(22)..(23)..(24): Xaa is A or G
  MOD_RES (25)..(26)..(27)..(28): Xaa is A or G or is absent
SAAPXXVPQALSAISILYLXXXXXXXXXLKNYQMIVRSXKX

SEQ ID NO: 8744 - protein, 36 aa, Artificial Sequence
  GFR-binding peptide
  MOD_RES (5)..(6): Xaa is C or S
IPKAXXVPTELNAISMLYFDEYDKVVLKKYREMVVE

SEQ ID NO: 8745 - protein, 40 aa, Artificial Sequence
  GFR-binding peptide
  MOD_RES (6)..(7)..(40): Xaa is C or S
KVGKAXXVPTKLSATSVLYYDDMGVPTLRKHREGMSVAEX

SEQ ID NO: 8746 - protein, 33 aa, Artificial Sequence
  GFR-binding peptide
  MOD_RES (14)..(15)..(16)..(17)..(18): Xaa is A or G
  MOD_RES (19)..(20)..(21)..(22): Xaa is A or G or is absent
TQVQLSATSVLYYXXXXXXXXXLRKHRTLEDHL

SEQ ID NO: 8747 - protein, 41 aa, Artificial Sequence
  GFR-binding peptide
  MOD_RES (6)..(40): Xaa is C or S
  MOD_RES (20)..(21)..(22)..(23)..(24): Xaa is A or G
  MOD_RES (25)..(26)..(27)..(28): Xaa is A or G or is absent
VTKPTXAPTKLSATSVLYYXXXXXXXXXLRKHRNMVVRSXG

SEQ ID NO: 8748 - protein, 37 aa, Artificial Sequence
  GFR-binding peptide
  MOD_RES (1)..(36): Xaa is C or S
  MOD_RES (15)..(16)..(17)..(18)..(19): Xaa is A or G
  MOD_RES (20)..(21)..(22)..(23): Xaa is A or G or is absent
XVPTKLSATSVLYYXXXXXXXXXLRKHREGMSVAEXG

SEQ ID NO: 8749 - protein, 36 aa, Artificial Sequence
  GFR-binding peptide
  MOD_RES (5)..(6): Xaa is C or S
SASPXXVSQDLSPISILYKIGKTPKILKYHYMIVKS

SEQ ID NO: 8750 - protein, 38 aa, Artificial Sequence
  GFR-binding peptide
  MOD_RES (2)..(3)..(37): Xaa is C or S
  MOD_RES (17)..(18)..(19)..(20)..(21): Xaa is A or G
  MOD_RES (22)..(23)..(24)..(25): Xaa is A or G or is absent
AXXVPTELSAISMLYLXXXXXXXXXLKNYQEMVVEGXG

SEQ ID NO: 8751 - protein, 42 aa, Artificial Sequence
  GFR-binding peptide
  MOD_RES (6)..(7)..(39)..(41): Xaa is C or S
AVPKAXXAPTKLSAISVLYLDSSNNVILKNYQNMVVKAXGXH

SEQ ID NO: 8752 - protein, 36 aa, Artificial Sequence
  GFR-binding peptide
  MOD_RES (3)..(4)..(36): Xaa is C or S
KAXXAPTKLNAISVLYFDSSNNVILKKYRNMVVKAX

SEQ ID NO: 8753 - protein, 41 aa, Artificial Sequence
  GFR-binding peptide
  MOD_RES (5)..(6)..(41): Xaa is C or S
  MOD_RES (20)..(21)..(22)..(23)..(24): Xaa is A or G
  MOD_RES (25)..(26)..(27)..(28): Xaa is A or G or is absent
VGKAXXVPTKLNAISVLYFXXXXXXXXXLKKYREGMSVAEX

SEQ ID NO: 8754 - protein, 36 aa, Artificial Sequence
  GFR-binding peptide
  MOD_RES (3)..(4): Xaa is C or S
  MOD_RES (18)..(19)..(20)..(21)..(22): Xaa is A or G
  MOD_RES (23)..(24)..(25)..(26): Xaa is A or G or is absent
KPXXAPTQLSATSVLYYXXXXXXXXXLRKHRNMVVR

SEQ ID NO: 8755 - protein, 35 aa, Artificial Sequence
  GFR-binding peptide
  MOD_RES (5)..(5): Xaa is C or S
TKPTXAPTKLSPISVLYKDDSSNVILKYHYNMVVR

SEQ ID NO: 8756 - protein, 31 aa, Artificial Sequence
  GFR-binding peptide
  MOD_RES (1)..(1): Xaa is C or S
XVPTELSATSMLYYDENEKVVLRKHRDMVVE

SEQ ID NO: 8757 - protein, 35 aa, Artificial Sequence
  GFR-binding peptide
  MOD_RES (1)..(2)..(33)..(35): Xaa is C or S
XXVSQDLSAISILYLIGKTPKILKNYQMIVKSXKX

SEQ ID NO: 8758 - protein, 37 aa, Artificial Sequence
  GFR-binding peptide
  MOD_RES (1)..(2)..(34)..(36): Xaa is C or S
XXAPTQLSATSVLYYDDSSNVILRKHRNMVVRAXGXH

SEQ ID NO: 8759 - protein, 36 aa, Artificial Sequence
  GFR-binding peptide
  MOD_RES (2)..(3)..(35): Xaa is C or S
AXXVPTELSPISMLYKDENEKVVLKYHYDMVVEGXG

SEQ ID NO: 8760 - protein, 41 aa, Artificial Sequence
  GFR-binding peptide
  MOD_RES (6)..(7)..(41): Xaa is C or S
  MOD_RES (21)..(22)..(23)..(24)..(25): Xaa is A or G
  MOD_RES (26)..(27)..(28)..(29): Xaa is A or G or is absent
YVPKPXXAPTKLSATSVLYYXXXXXXXXXLRKHRNMVVRSX

SEQ ID NO: 8761 - protein, 42 aa, Artificial Sequence
  GFR-binding peptide
  MOD_RES (6)..(7)..(41): Xaa is C or S
  MOD_RES (21)..(22)..(23)..(24)..(25): Xaa is A or G
  MOD_RES (26)..(27)..(28)..(29): Xaa is A or G or is absent
AVPKAXXAPTKLSAISVLYLXXXXXXXXXLKNYQNMVVKAXG

SEQ ID NO: 8762 - protein, 38 aa, Artificial Sequence
  GFR-binding peptide
  MOD_RES (1)..(2)..(36)..(38): Xaa is C or S
  MOD_RES (16)..(17)..(18)..(19)..(20): Xaa is A or G
  MOD_RES (21)..(22)..(23)..(24): Xaa is A or G or is absent
XXAPTKLSAISVLYLXXXXXXXXXLKNYQNMVVKAXGX

SEQ ID NO: 8763 - protein, 38 aa, Artificial Sequence
  GFR-binding peptide
  MOD_RES (6)..(7): Xaa is C or S
AVPKAXXAPTKLNAISVLYFDSSNNVILKKYRNMVVKA

SEQ ID NO: 8764 - protein, 32 aa, Artificial Sequence
  GFR-binding peptide
  MOD_RES (32)..(32): Xaa is C or S
VPTELSATSMLYYDENEKVVLRKHRDMVVEGX

SEQ ID NO: 8765 - protein, 37 aa, Artificial Sequence
  GFR-binding peptide
  MOD_RES (6)..(7): Xaa is C or S
ASASPXXVPQDLSPISILYKVGRTPKVLKYHYMVVKS

SEQ ID NO: 8766 - protein, 38 aa, Artificial Sequence
  GFR-binding peptide
  MOD_RES (3)..(37): Xaa is C or S
  MOD_RES (17)..(18)..(19)..(20)..(21): Xaa is A or G
  MOD_RES (22)..(23)..(24)..(25): Xaa is A or G or is absent
PTXAPTKLSPISVLYKXXXXXXXXXLKYHYNMVVRSXG

SEQ ID NO: 8767 - protein, 35 aa, Artificial Sequence
  GFR-binding peptide
  MOD_RES (1)..(33)..(35): Xaa is C or S
XAPTKLSPISVLYKDSSNNVILKYHYNMVVKAXGX

SEQ ID NO: 8768 - protein, 36 aa, Artificial Sequence
  GFR-binding peptide
  MOD_RES (2)..(3): Xaa is C or S
  MOD_RES (17)..(18)..(19)..(20)..(21): Xaa is A or G
  MOD_RES (22)..(23)..(24)..(25): Xaa is A or G or is absent
AXXAPTKLSAISVLYLXXXXXXXXXLKNYQNMVVKA

SEQ ID NO: 8769 - protein, 41 aa, Artificial Sequence
  GFR-binding peptide
  MOD_RES (6)..(7)..(41): Xaa is C or S
  MOD_RES (21)..(22)..(23)..(24)..(25): Xaa is A or G
  MOD_RES (26)..(27)..(28)..(29): Xaa is A or G or is absent
KIPKAXXVPTELSATSMLYYXXXXXXXXXLRKHRDMVVEGX

SEQ ID NO: 8770 - protein, 39 aa, Artificial Sequence
  GFR-binding peptide
  MOD_RES (4)..(36)..(38): Xaa is C or S
KPTXAPTKLSATSVLYYDDSSNVILRKHRNMVVRSXGXH

SEQ ID NO: 8771 - protein, 41 aa, Artificial Sequence
  GFR-binding peptide
  MOD_RES (5)..(6)..(40): Xaa is C or S
  MOD_RES (20)..(21)..(22)..(23)..(24): Xaa is A or G
  MOD_RES (25)..(26)..(27)..(28): Xaa is A or G or is absent
IPKAXXVPTELSPISMLYKXXXXXXXXXLKYHYDMVVEGXG

SEQ ID NO: 8772 - protein, 38 aa, Artificial Sequence
  GFR-binding peptide
  MOD_RES (2)..(3)..(35)..(37): Xaa is C or S
PXXAPTQLSAISVLYLDDSSNVILKNYQNMVVRAXGXH

SEQ ID NO: 8773 - protein, 37 aa, Artificial Sequence
  GFR-binding peptide
  MOD_RES (2)..(2): Xaa is C or S
QXRPTQVQLSAISVLYLEIVRKKPIFLKNYQTLEDHL

SEQ ID NO: 8774 - protein, 38 aa, Artificial Sequence
  GFR-binding peptide
  MOD_RES (3)..(3): Xaa is C or S
VQXRPTQVQLSPISVLYKEIVRKKPIFLKYHYTLEDHL

SEQ ID NO: 8775 - protein, 38 aa, Artificial Sequence
  GFR-binding peptide
  MOD_RES (5)..(6): Xaa is C or S
  MOD_RES (20)..(21)..(22)..(23)..(24): Xaa is A or G
  MOD_RES (25)..(26)..(27)..(28): Xaa is A or G or is absent
VPKPXXAPTQLSPISVLYKXXXXXXXXXLKYHYNMVVR

SEQ ID NO: 8776 - protein, 41 aa, Artificial Sequence
  GFR-binding peptide
  MOD_RES (6)..(7)..(40): Xaa is C or S
KVGKAXXVPTKLSATSVLYYDDMGVPTLRKHREGMSVAEXG

SEQ ID NO: 8777 - protein, 40 aa, Artificial Sequence
  GFR-binding peptide
  MOD_RES (5)..(6)..(39): Xaa is C or S
  MOD_RES (20)..(21)..(22)..(23)..(24): Xaa is A or G
  MOD_RES (25)..(26)..(27)..(28): Xaa is A or G or is absent
SASPXXVPQDLSATSILYYXXXXXXXXXLRKHRMVVKSXK

SEQ ID NO: 8778 - protein, 36 aa, Artificial Sequence
  GFR-binding peptide
  MOD_RES (4)..(5)..(36): Xaa is C or S
ASPXXVPQDLNAISILYFVGRTPKVLKKYRMVVKSX

SEQ ID NO: 8779 - protein, 31 aa, Artificial Sequence
  GFR-binding peptide
APTKLSATSVLYYDDSSNVILRKHRNMVVRS

SEQ ID NO: 8780 - protein, 33 aa, Artificial Sequence
  GFR-binding peptide
  MOD_RES (1)..(1): Xaa is C or S
  MOD_RES (15)..(16)..(17)..(18)..(19): Xaa is A or G
  MOD_RES (20)..(21)..(22)..(23): Xaa is A or G or is absent
XAPTKLSATSVLYYXXXXXXXXXLRKHRNMVVR

SEQ ID NO: 8781 - protein, 37 aa, Artificial Sequence
  GFR-binding peptide
  MOD_RES (1)..(2)..(34)..(36): Xaa is C or S
XXVPTELSPISMLYKDEYDKVVLKYHYEMVVEGXGXR

SEQ ID NO: 8782 - protein, 38 aa, Artificial Sequence
  GFR-binding peptide
  MOD_RES (3)..(4)..(38): Xaa is C or S
  MOD_RES (18)..(19)..(20)..(21)..(22): Xaa is A or G
  MOD_RES (23)..(24)..(25)..(26): Xaa is A or G or is absent
KAXXVPTELNAISMLYFXXXXXXXXXLKKYRDMVVEGX

SEQ ID NO: 8783 - protein, 38 aa, Artificial Sequence
  GFR-binding peptide
  MOD_RES (5)..(6): Xaa is C or S
  MOD_RES (20)..(21)..(22)..(23)..(24): Xaa is A or G
  MOD_RES (25)..(26)..(27)..(28): Xaa is A or G or is absent
SAAPXXVPQALNAISILYFXXXXXXXXXLKKYRMIVRS

SEQ ID NO: 8784 - protein, 35 aa, Artificial Sequence
  GFR-binding peptide
  MOD_RES (5)..(5): Xaa is C or S
TKPTXAPTKLSAISVLYLDDSSNVILKNYQNMVVR

SEQ ID NO: 8785 - protein, 30 aa, Artificial Sequence
  GFR-binding peptide
VPTELNAISMLYFDEYDKVVLKKYREMVVE

SEQ ID NO: 8786 - protein, 35 aa, Artificial Sequence
  GFR-binding peptide
  MOD_RES (3)..(4)..(35): Xaa is C or S
APXXVPQALSATSILYYVGRKPKVLRKHRMIVRSX

SEQ ID NO: 8787 - protein, 41 aa, Artificial Sequence
  GFR-binding peptide
  MOD_RES (7)..(41): Xaa is C or S
  MOD_RES (21)..(22)..(23)..(24)..(25): Xaa is A or G
  MOD_RES (26)..(27)..(28)..(29): Xaa is A or G or is absent
HVTKPTXAPTKLSATSVLYYXXXXXXXXXLRKHRNMVVRSX

SEQ ID NO: 8788 - protein, 33 aa, Artificial Sequence
  GFR-binding peptide
  MOD_RES (1)..(1): Xaa is C or S
  MOD_RES (15)..(16)..(17)..(18)..(19): Xaa is A or G
  MOD_RES (20)..(21)..(22)..(23): Xaa is A or G or is absent
XAPTKLSATSVLYYXXXXXXXXXLRKHRNMVVK

SEQ ID NO: 8789 - protein, 34 aa, Artificial Sequence
  GFR-binding peptide
  MOD_RES (16)..(17)..(18)..(19)..(20): Xaa is A or G
  MOD_RES (21)..(22)..(23)..(24): Xaa is A or G or is absent
RPTQVQLSAISVLYLXXXXXXXXXLKNYQTLEDH

SEQ ID NO: 8790 - protein, 34 aa, Artificial Sequence
  GFR-binding peptide
  MOD_RES (1)..(33): Xaa is C or S
XAPTQLSPISVLYKDDSSNVILKYHYNMVVRAXG

SEQ ID NO: 8791 - protein, 31 aa, Artificial Sequence
  GFR-binding peptide
  MOD_RES (31)..(31): Xaa is C or S
VPQALSATSILYYVGRKPKVLRKHRMIVRSX

SEQ ID NO: 8792 - protein, 35 aa, Artificial Sequence
  GFR-binding peptide
  MOD_RES (33)..(35): Xaa is C or S
VPTKLNAISVLYFDDMGVPTLKKYREGMSVAEXGX

SEQ ID NO: 8793 - protein, 36 aa, Artificial Sequence
  GFR-binding peptide
  MOD_RES (5)..(6): Xaa is C or S
SASPXXVSQDLSAISILYLIGKTPKILKNYQMIVKS

SEQ ID NO: 8794 - protein, 37 aa, Artificial Sequence
  GFR-binding peptide
  MOD_RES (7)..(7): Xaa is C or S
HVTKPTXAPTKLSATSVLYYDDSSNVILRKHRNMVVR

SEQ ID NO: 8795 - protein, 32 aa, Artificial Sequence
  GFR-binding peptide
  MOD_RES (1)..(2): Xaa is C or S
XXVSQDLNAISILYFIGKTPKILKKYRMIVKS

SEQ ID NO: 8796 - protein, 36 aa, Artificial Sequence
  GFR-binding peptide
  MOD_RES (1)..(34)..(36): Xaa is C or S
XVPTKLSATSVLYYDDMGVPTLRKHREGMSVAEXGX

SEQ ID NO: 8797 - protein, 33 aa, Artificial Sequence
  GFR-binding peptide
  MOD_RES (31)..(33): Xaa is C or S
VPQDLSPISILYKVGRTPKVLKYHYMVVKSXKX

SEQ ID NO: 8798 - protein, 41 aa, Artificial Sequence
  GFR-binding peptide
  MOD_RES (5)..(6)..(38)..(40): Xaa is C or S
VPKPXXAPTKLSPISVLYKDDSSNVILKYHYNMVVRSXGXH

SEQ ID NO: 8799 - protein, 37 aa, Artificial Sequence
  GFR-binding peptide
  MOD_RES (36)..(36): Xaa is C or S
  MOD_RES (15)..(16)..(17)..(18)..(19): Xaa is A or G
  MOD_RES (20)..(21)..(22)..(23): Xaa is A or G or is absent
PTQVQLSPISVLYKXXXXXXXXXLKYHYTLEDHLAXK

SEQ ID NO: 8800 - protein, 36 aa, Artificial Sequence
  GFR-binding peptide
  MOD_RES (3)..(4): Xaa is C or S
  MOD_RES (18)..(19)..(20)..(21)..(22): Xaa is A or G
  MOD_RES (23)..(24)..(25)..(26): Xaa is A or G or is absent
KAXXVPTELNAISMLYFXXXXXXXXXLKKYRDMVVE

SEQ ID NO: 8801 - protein, 39 aa, Artificial Sequence
  GFR-binding peptide
  MOD_RES (3)..(4)..(38): Xaa is C or S
  MOD_RES (18)..(19)..(20)..(21)..(22): Xaa is A or G
  MOD_RES (23)..(24)..(25)..(26): Xaa is A or G or is absent
KAXXVPTELSATSMLYYXXXXXXXXXLRKHREMVVEGXG

SEQ ID NO: 8802 - protein, 34 aa, Artificial Sequence
  GFR-binding peptide
  MOD_RES (1)..(2): Xaa is C or S
  MOD_RES (16)..(17)..(18)..(19)..(20): Xaa is A or G
  MOD_RES (21)..(22)..(23)..(24): Xaa is A or G or is absent
XXVPQALNAISILYFXXXXXXXXXLKKYRMIVRS

SEQ ID NO: 8803 - protein, 37 aa, Artificial Sequence
  GFR-binding peptide
  MOD_RES (3)..(4)..(36): Xaa is C or S
KPXXAPTQLSATSVLYYDDSSNVILRKHRNMVVRAXG

SEQ ID NO: 8804 - protein, 41 aa, Artificial Sequence
  GFR-binding peptide
  MOD_RES (6)..(7)..(41): Xaa is C or S
  MOD_RES (21)..(22)..(23)..(24)..(25): Xaa is A or G
  MOD_RES (26)..(27)..(28)..(29): Xaa is A or G or is absent
TVPKPXXAPTQLSATSVLYYXXXXXXXXXLRKHRNMVVRAX

SEQ ID NO: 8805 - protein, 34 aa, Artificial Sequence
  GFR-binding peptide
  MOD_RES (1)..(2): Xaa is C or S
XXVPTKLSATSVLYYDDMGVPTLRKHREGMSVAE

SEQ ID NO: 8806 - protein, 37 aa, Artificial Sequence
  GFR-binding peptide
  MOD_RES (3)..(4): Xaa is C or S
  MOD_RES (18)..(19)..(20)..(21)..(22): Xaa is A or G
  MOD_RES (23)..(24)..(25)..(26): Xaa is A or G or is absent
KPXXAPTKLSPISVLYKXXXXXXXXXLKYHYNMVVRS

SEQ ID NO: 8807 - protein, 40 aa, Artificial Sequence
  GFR-binding peptide
  MOD_RES (5)..(37)..(39): Xaa is C or S
TKPTXAPTKLSATSVLYYDDSSNVILRKHRNMVVRSXGXH

SEQ ID NO: 8808 - protein, 44 aa, Artificial Sequence
  GFR-binding peptide
  MOD_RES (6)..(7)..(41)..(43): Xaa is C or S
  MOD_RES (21)..(22)..(23)..(24)..(25): Xaa is A or G
  MOD_RES (26)..(27)..(28)..(29): Xaa is A or G or is absent
KIPKAXXVPTELNAISMLYFXXXXXXXXXLKKYRDMVVEGXGXR

SEQ ID NO: 8809 - protein, 42 aa, Artificial Sequence
  GFR-binding peptide
  MOD_RES (5)..(6)..(39)..(41): Xaa is C or S
  MOD_RES (20)..(21)..(22)..(23)..(24): Xaa is A or G
  MOD_RES (25)..(26)..(27)..(28): Xaa is A or G or is absent
SASPXXVSQDLNAISILYFXXXXXXXXXLKKYRMIVKSXKXS

SEQ ID NO: 8810 - protein, 37 aa, Artificial Sequence
  GFR-binding peptide
  MOD_RES (5)..(6): Xaa is C or S
VPKPXXAPTQLSAISVLYLDDSSNVILKNYQNMVVRA

SEQ ID NO: 8811 - protein, 40 aa, Artificial Sequence
  GFR-binding peptide
  MOD_RES (6)..(7): Xaa is C or S
  MOD_RES (21)..(22)..(23)..(24)..(25): Xaa is A or G
  MOD_RES (26)..(27)..(28)..(29): Xaa is A or G or is absent
YVPKPXXAPTKLNAISVLYFXXXXXXXXXLKKYRNMVVRS

SEQ ID NO: 8812 - protein, 33 aa, Artificial Sequence
  GFR-binding peptide
  MOD_RES (33)..(33): Xaa is C or S
  MOD_RES (14)..(15)..(16)..(17)..(18): Xaa is A or G
  MOD_RES (19)..(20)..(21)..(22): Xaa is A or G or is absent
VSQDLSPISILYKXXXXXXXXXLKYHYMIVKSX

SEQ ID NO: 8813 - protein, 43 aa, Artificial Sequence
  GFR-binding peptide
  MOD_RES (6)..(7)..(41)..(43): Xaa is C or S
  MOD_RES (21)..(22)..(23)..(24)..(25): Xaa is A or G
  MOD_RES (26)..(27)..(28)..(29): Xaa is A or G or is absent
KIPKAXXVPTELSAISMLYLXXXXXXXXXLKNYQDMVVEGXGX

SEQ ID NO: 8814 - protein, 32 aa, Artificial Sequence
  GFR-binding peptide
  MOD_RES (14)..(15)..(16)..(17)..(18): Xaa is A or G
  MOD_RES (19)..(20)..(21)..(22): Xaa is A or G or is absent
VPTELSAISMLYLXXXXXXXXXLKNYQEMVVE

SEQ ID NO: 8815 - protein, 37 aa, Artificial Sequence
  GFR-binding peptide
  MOD_RES (2)..(36): Xaa is C or S
  MOD_RES (16)..(17)..(18)..(19)..(20): Xaa is A or G
  MOD_RES (21)..(22)..(23)..(24): Xaa is A or G or is absent
TXAPTKLSATSVLYYXXXXXXXXXLRKHRNMVVRSXG

SEQ ID NO: 8816 - protein, 38 aa, Artificial Sequence
  GFR-binding peptide
  MOD_RES (4)..(5)..(37): Xaa is C or S
PKAXXVPTELNAISMLYFDEYDKVVLKKYREMVVEGXG

SEQ ID NO: 8817 - protein, 33 aa, Artificial Sequence
  GFR-binding peptide
  MOD_RES (14)..(15)..(16)..(17)..(18): Xaa is A or G
  MOD_RES (19)..(20)..(21)..(22): Xaa is A or G or is absent
APTQLNAISVLYFXXXXXXXXXLKKYRNMVVRA

SEQ ID NO: 8818 - protein, 32 aa, Artificial Sequence
  GFR-binding peptide
  MOD_RES (32)..(32): Xaa is C or S
APTKLNAISVLYFDSSNNVILKKYRNMVVKAX

SEQ ID NO: 8819 - protein, 40 aa, Artificial Sequence
  GFR-binding peptide
  MOD_RES (2)..(3)..(37)..(39): Xaa is C or S
  MOD_RES (17)..(18)..(19)..(20)..(21): Xaa is A or G
  MOD_RES (22)..(23)..(24)..(25): Xaa is A or G or is absent
PXXAPTQLSAISVLYLXXXXXXXXXLKNYQNMVVRAXGXH

SEQ ID NO: 8820 - protein, 37 aa, Artificial Sequence
  GFR-binding peptide
  MOD_RES (6)..(7): Xaa is C or S
ASASPXXVSQDLSAISILYLIGKTPKILKNYQMIVKS

SEQ ID NO: 8821 - protein, 32 aa, Artificial Sequence
  GFR-binding peptide
  MOD_RES (1)..(32): Xaa is C or S
XVPQALSPISILYKVGRKPKVLKYHYMIVRSX

SEQ ID NO: 8822 - protein, 42 aa, Artificial Sequence
  GFR-binding peptide
  MOD_RES (4)..(41): Xaa is C or S
NVQXRPTQVQLSATSVLYYEIVRKKPIFLRKHRTLEDHLAXK

SEQ ID NO: 8823 - protein, 39 aa, Artificial Sequence
  GFR-binding peptide
  MOD_RES (6)..(7)..(39): Xaa is C or S
KIPKAXXVPTELNAISMLYFDENEKVVLKKYRDMVVEGX

SEQ ID NO: 8824 - protein, 36 aa, Artificial Sequence
  GFR-binding peptide
  MOD_RES (1)..(2)..(33)..(35): Xaa is C or S
XXVPQALNAISILYFVGRKPKVLKKYRMIVRSXKXS

SEQ ID NO: 8825 - protein, 37 aa, Artificial Sequence
  GFR-binding peptide
  MOD_RES (3)..(4): Xaa is C or S
  MOD_RES (18)..(19)..(20)..(21)..(22): Xaa is A or G
  MOD_RES (23)..(24)..(25)..(26): Xaa is A or G or is absent
KPXXAPTQLSAISVLYLXXXXXXXXXLKNYQNMVVRA

SEQ ID NO: 8826 - protein, 41 aa, Artificial Sequence
  GFR-binding peptide
  MOD_RES (4)..(5)..(39)..(41): Xaa is C or S
  MOD_RES (19)..(20)..(21)..(22)..(23): Xaa is A or G
  MOD_RES (24)..(25)..(26)..(27): Xaa is A or G or is absent
PKPXXAPTKLSAISVLYLXXXXXXXXXLKNYQNMVVRSXGX

SEQ ID NO: 8827 - protein, 41 aa, Artificial Sequence
  GFR-binding peptide
  MOD_RES (5)..(6)..(40): Xaa is C or S
  MOD_RES (20)..(21)..(22)..(23)..(24): Xaa is A or G
  MOD_RES (25)..(26)..(27)..(28): Xaa is A or G or is absent
VPKPXXAPTKLSAISVLYLXXXXXXXXXLKNYQNMVVRSXG

SEQ ID NO: 8828 - protein, 31 aa, Artificial Sequence
  GFR-binding peptide
  MOD_RES (1)..(1): Xaa is C or S
XVPQDLSAISILYLVGRTPKVLKNYQMVVKS

SEQ ID NO: 8829 - protein, 38 aa, Artificial Sequence
  GFR-binding peptide
  MOD_RES (6)..(7): Xaa is C or S
AVPKAXXAPTKLSAISVLYLDSSNNVILKNYQNMVVKA

SEQ ID NO: 8830 - protein, 36 aa, Artificial Sequence
  GFR-binding peptide
  MOD_RES (2)..(3)..(35): Xaa is C or S
AXXVPTELNAISMLYFDENEKVVLKKYRDMVVEGXG

SEQ ID NO: 8831 - protein, 36 aa, Artificial Sequence
  GFR-binding peptide
  MOD_RES (3)..(4)..(36): Xaa is C or S
KAXXVPTELSATSMLYYDEYDKVVLRKHREMVVEGX

SEQ ID NO: 8832 - protein, 39 aa, Artificial Sequence
  GFR-binding peptide
  MOD_RES (7)..(7): Xaa is C or S
  MOD_RES (21)..(22)..(23)..(24)..(25): Xaa is A or G
  MOD_RES (26)..(27)..(28)..(29): Xaa is A or G or is absent
HVTKPTXAPTKLNAISVLYFXXXXXXXXXLKKYRNMVVR

SEQ ID NO: 8833 - protein, 35 aa, Artificial Sequence
  GFR-binding peptide
  MOD_RES (1)..(33)..(35): Xaa is C or S
XAPTQLSPISVLYKDDSSNVILKYHYNMVVRAXGX

SEQ ID NO: 8834 - protein, 42 aa, Artificial Sequence
  GFR-binding peptide
  MOD_RES (7)..(41): Xaa is C or S
  MOD_RES (21)..(22)..(23)..(24)..(25): Xaa is A or G
  MOD_RES (26)..(27)..(28)..(29): Xaa is A or G or is absent
HVTKPTXAPTKLSAISVLYLXXXXXXXXXLKNYQNMVVRSXG

SEQ ID NO: 8835 - protein, 35 aa, Artificial Sequence
  GFR-binding peptide
  MOD_RES (32)..(34): Xaa is C or S
APTKLSPISVLYKDDSSNVILKYHYNMVVRSXGXH

SEQ ID NO: 8836 - protein, 41 aa, Artificial Sequence
  GFR-binding peptide
  MOD_RES (6)..(38)..(40): Xaa is C or S
VTKPTXAPTKLSPISVLYKDDSSNVILKYHYNMVVRSXGXH

SEQ ID NO: 8837 - protein, 40 aa, Artificial Sequence
  GFR-binding peptide
  MOD_RES (2)..(39): Xaa is C or S
QXRPTQVQLNAISVLYFEIVRKKPIFLKKYRTLEDHLAXK

SEQ ID NO: 8838 - protein, 38 aa, Artificial Sequence
  GFR-binding peptide
  MOD_RES (5)..(6): Xaa is C or S
  MOD_RES (20)..(21)..(22)..(23)..(24): Xaa is A or G
  MOD_RES (25)..(26)..(27)..(28): Xaa is A or G or is absent
VPKPXXAPTQLSAISVLYLXXXXXXXXXLKNYQNMVVR

SEQ ID NO: 8839 - protein, 43 aa, Artificial Sequence
  GFR-binding peptide
  MOD_RES (6)..(40)..(42): Xaa is C or S
  MOD_RES (20)..(21)..(22)..(23)..(24): Xaa is A or G
  MOD_RES (25)..(26)..(27)..(28): Xaa is A or G or is absent
VTKPTXAPTKLSAISVLYLXXXXXXXXXLKNYQNMVVRSXGXH

SEQ ID NO: 8840 - protein, 36 aa, Artificial Sequence
  GFR-binding peptide
  MOD_RES (3)..(4)..(36): Xaa is C or S
KAXXVPTELSATSMLYYDENEKVVLRKHRDMVVEGX

SEQ ID NO: 8841 - protein, 41 aa, Artificial Sequence
  GFR-binding peptide
  MOD_RES (3)..(4)..(38)..(40): Xaa is C or S
  MOD_RES (18)..(19)..(20)..(21)..(22): Xaa is A or G
  MOD_RES (23)..(24)..(25)..(26): Xaa is A or G or is absent
KAXXVPTELSAISMLYLXXXXXXXXXLKNYQDMVVEGXGXR

SEQ ID NO: 8842 - protein, 37 aa, Artificial Sequence
  GFR-binding peptide
  MOD_RES (3)..(4): Xaa is C or S
  MOD_RES (18)..(19)..(20)..(21)..(22): Xaa is A or G
  MOD_RES (23)..(24)..(25)..(26): Xaa is A or G or is absent
KAXXVPTELNAISMLYFXXXXXXXXXLKKYRDMVVEG

SEQ ID NO: 8843 - protein, 36 aa, Artificial Sequence
  GFR-binding peptide
  MOD_RES (1)..(2)..(36): Xaa is C or S
  MOD_RES (16)..(17)..(18)..(19)..(20): Xaa is A or G
  MOD_RES (21)..(22)..(23)..(24): Xaa is A or G or is absent
XXVPTELSPISMLYKXXXXXXXXXLKYHYDMVVEGX

SEQ ID NO: 8844 - protein, 37 aa, Artificial Sequence
  GFR-binding peptide
  MOD_RES (5)..(6)..(37): Xaa is C or S
SASPXXVSQDLSATSILYYIGKTPKILRKHRMIVKSX

SEQ ID NO: 8845 - protein, 32 aa, Artificial Sequence
  GFR-binding peptide
  MOD_RES (1)..(2): Xaa is C or S
XXVPQALNAISILYFVGRKPKVLKKYRMIVRS

SEQ ID NO: 8846 - protein, 42 aa, Artificial Sequence
  GFR-binding peptide
  MOD_RES (6)..(7)..(40)..(42): Xaa is C or S
  MOD_RES (21)..(22)..(23)..(24)..(25): Xaa is A or G
  MOD_RES (26)..(27)..(28)..(29): Xaa is A or G or is absent
ASASPXXVSQDLSATSILYYXXXXXXXXXLRKHRMIVKSXKX

SEQ ID NO: 8847 - protein, 30 aa, Artificial Sequence
  GFR-binding peptide
APTQLSAISVLYLDDSSNVILKNYQNMVVR

SEQ ID NO: 8848 - protein, 35 aa, Artificial Sequence
  GFR-binding peptide
  MOD_RES (1)..(2)..(34): Xaa is C or S
XXVPTELSPISMLYKDENEKVVLKYHYDMVVEGXG

SEQ ID NO: 8849 - protein, 34 aa, Artificial Sequence
  GFR-binding peptide
  MOD_RES (1)..(32)..(34): Xaa is C or S
XVPQDLSPISILYKVGRTPKVLKYHYMVVKSXKX

SEQ ID NO: 8850 - protein, 38 aa, Artificial Sequence
  GFR-binding peptide
  MOD_RES (4)..(5)..(38): Xaa is C or S
GKAXXVPTKLSATSVLYYDDMGVPTLRKHREGMSVAEX

SEQ ID NO: 8851 - protein, 34 aa, Artificial Sequence
  GFR-binding peptide
  MOD_RES (1)..(2): Xaa is C or S
  MOD_RES (16)..(17)..(18)..(19)..(20): Xaa is A or G
  MOD_RES (21)..(22)..(23)..(24): Xaa is A or G or is absent
XXVPTELNAISMLYFXXXXXXXXXLKKYREMVVE

SEQ ID NO: 8852 - protein, 32 aa, Artificial Sequence
  GFR-binding peptide
  MOD_RES (32)..(32): Xaa is C or S
VPTELSATSMLYYDEYDKVVLRKHREMVVEGX

SEQ ID NO: 8853 - protein, 37 aa, Artificial Sequence
  GFR-binding peptide
  MOD_RES (4)..(5): Xaa is C or S
  MOD_RES (19)..(20)..(21)..(22)..(23): Xaa is A or G
  MOD_RES (24)..(25)..(26)..(27): Xaa is A or G or is absent
ASPXXVPQDLSPISILYKXXXXXXXXXLKYHYMVVKS

SEQ ID NO: 8854 - protein, 33 aa, Artificial Sequence
  GFR-binding peptide
  MOD_RES (14)..(15)..(16)..(17)..(18): Xaa is A or G
  MOD_RES (19)..(20)..(21)..(22): Xaa is A or G or is absent
VPTELNAISMLYFXXXXXXXXXLKKYRDMVVEG

SEQ ID NO: 8855 - protein, 40 aa, Artificial Sequence
  GFR-binding peptide
  MOD_RES (37)..(39): Xaa is C or S
RPTQVQLNAISVLYFEIVRKKPIFLKKYRTLEDHLAXKXE

SEQ ID NO: 8856 - protein, 38 aa, Artificial Sequence
  GFR-binding peptide
  MOD_RES (6)..(7)..(38): Xaa is C or S
ASASPXXVPQDLSPISILYKVGRTPKVLKYHYMVVKSX

SEQ ID NO: 8857 - protein, 35 aa, Artificial Sequence
  GFR-binding peptide
  MOD_RES (1)..(35): Xaa is C or S
  MOD_RES (15)..(16)..(17)..(18)..(19): Xaa is A or G
  MOD_RES (20)..(21)..(22)..(23): Xaa is A or G or is absent
XVPTELSAISMLYLXXXXXXXXXLKNYQDMVVEGX

SEQ ID NO: 8858 - protein, 36 aa, Artificial Sequence
  GFR-binding peptide
  MOD_RES (3)..(4)..(35): Xaa is C or S
SPXXVPQDLNAISILYFVGRTPKVLKKYRMVVKSXK

SEQ ID NO: 8859 - protein, 38 aa, Artificial Sequence
  GFR-binding peptide
  MOD_RES (3)..(4)..(38): Xaa is C or S
  MOD_RES (18)..(19)..(20)..(21)..(22): Xaa is A or G
  MOD_RES (23)..(24)..(25)..(26): Xaa is A or G or is absent
KPXXAPTQLSPISVLYKXXXXXXXXXLKYHYNMVVRAX

SEQ ID NO: 8860 - protein, 37 aa, Artificial Sequence
  GFR-binding peptide
  MOD_RES (5)..(6)..(37): Xaa is C or S
SASPXXVPQDLSPISILYKVGRTPKVLKYHYMVVKSX

SEQ ID NO: 8861 - protein, 32 aa, Artificial Sequence
  GFR-binding peptide
VPTKLSAISVLYLDDMGVPTLKNYQEGMSVAE

SEQ ID NO: 8862 - protein, 44 aa, Artificial Sequence
  GFR-binding peptide
  MOD_RES (6)..(7)..(41)..(43): Xaa is C or S
  MOD_RES (21)..(22)..(23)..(24)..(25): Xaa is A or G
  MOD_RES (26)..(27)..(28)..(29): Xaa is A or G or is absent
TVPKPXXAPTQLSPISVLYKXXXXXXXXXLKYHYNMVVRAXGXH

SEQ ID NO: 8863 - protein, 40 aa, Artificial Sequence
  GFR-binding peptide
  MOD_RES (3)..(4)..(38)..(40): Xaa is C or S
  MOD_RES (18)..(19)..(20)..(21)..(22): Xaa is A or G
  MOD_RES (23)..(24)..(25)..(26): Xaa is A or G or is absent
KAXXVPTELSAISMLYLXXXXXXXXXLKNYQDMVVEGXGX

SEQ ID NO: 8864 - protein, 38 aa, Artificial Sequence
  GFR-binding peptide
  MOD_RES (1)..(38): Xaa is C or S
XRPTQVQLSAISVLYLEIVRKKPIFLKNYQTLEDHLAX

SEQ ID NO: 8865 - protein, 35 aa, Artificial Sequence
  GFR-binding peptide
  MOD_RES (1)..(33)..(35): Xaa is C or S
XAPTKLSAISVLYLDSSNNVILKNYQNMVVKAXGX

SEQ ID NO: 8866 - protein, 33 aa, Artificial Sequence
  GFR-binding peptide
  MOD_RES (1)..(1): Xaa is C or S
  MOD_RES (15)..(16)..(17)..(18)..(19): Xaa is A or G
  MOD_RES (20)..(21)..(22)..(23): Xaa is A or G or is absent
XAPTQLSAISVLYLXXXXXXXXXLKNYQNMVVR

SEQ ID NO: 8867 - protein, 42 aa, Artificial Sequence
  GFR-binding peptide
  MOD_RES (4)..(5)..(39)..(41): Xaa is C or S
  MOD_RES (19)..(20)..(21)..(22)..(23): Xaa is A or G
  MOD_RES (24)..(25)..(26)..(27): Xaa is A or G or is absent
PKAXXVPTELSPISMLYKXXXXXXXXXLKYHYEMVVEGXGXR

SEQ ID NO: 8868 - protein, 35 aa, Artificial Sequence
  GFR-binding peptide
  MOD_RES (3)..(4)..(35): Xaa is C or S
SPXXVPQDLNAISILYFVGRTPKVLKKYRMVVKSX

SEQ ID NO: 8869 - protein, 38 aa, Artificial Sequence
  GFR-binding peptide
  MOD_RES (3)..(4)..(36)..(38): Xaa is C or S
KPXXAPTKLSATSVLYYDDSSNVILRKHRNMVVRSXGX

SEQ ID NO: 8870 - protein, 39 aa, Artificial Sequence
  GFR-binding peptide
  MOD_RES (2)..(3)..(37)..(39): Xaa is C or S
  MOD_RES (17)..(18)..(19)..(20)..(21): Xaa is A or G
  MOD_RES (22)..(23)..(24)..(25): Xaa is A or G or is absent
AXXAPTKLNAISVLYFXXXXXXXXXLKKYRNMVVKAXGX

SEQ ID NO: 8871 - protein, 36 aa, Artificial Sequence
  GFR-binding peptide
  MOD_RES (4)..(5): Xaa is C or S
PKPXXAPTKLSPISVLYKDDSSNVILKYHYNMVVRS

SEQ ID NO: 8872 - protein, 41 aa, Artificial Sequence
  GFR-binding peptide
  MOD_RES (7)..(39)..(41): Xaa is C or S
HVTKPTXAPTKLSPISVLYKDDSSNVILKYHYNMVVRSXGX

SEQ ID NO: 8873 - protein, 38 aa, Artificial Sequence
  GFR-binding peptide
  MOD_RES (5)..(6)..(38): Xaa is C or S
IPKAXXVPTELSPISMLYKDENEKVVLKYHYDMVVEGX

SEQ ID NO: 8874 - protein, 36 aa, Artificial Sequence
  GFR-binding peptide
  MOD_RES (3)..(4): Xaa is C or S
KAXXVPTKLNAISVLYFDDMGVPTLKKYREGMSVAE

SEQ ID NO: 8875 - protein, 35 aa, Artificial Sequence
  GFR-binding peptide
  MOD_RES (1)..(35): Xaa is C or S
  MOD_RES (15)..(16)..(17)..(18)..(19): Xaa is A or G
  MOD_RES (20)..(21)..(22)..(23): Xaa is A or G or is absent
XAPTQLSAISVLYLXXXXXXXXXLKNYQNMVVRAX

SEQ ID NO: 8876 - protein, 36 aa, Artificial Sequence
  GFR-binding peptide
  MOD_RES (1)..(36): Xaa is C or S
  MOD_RES (15)..(16)..(17)..(18)..(19): Xaa is A or G
  MOD_RES (20)..(21)..(22)..(23): Xaa is A or G or is absent
XVPTKLSATSVLYYXXXXXXXXXLRKHREGMSVAEX

SEQ ID NO: 8877 - protein, 44 aa, Artificial Sequence
  GFR-binding peptide
  MOD_RES (5)..(42)..(44): Xaa is C or S
  MOD_RES (21)..(22)..(23)..(24)..(25): Xaa is A or G
  MOD_RES (26)..(27)..(28)..(29): Xaa is A or G or is absent
RNVQXRPTQVQLNAISVLYFXXXXXXXXXLKKYRTLEDHLAXKX

SEQ ID NO: 8878 - protein, 37 aa, Artificial Sequence
  GFR-binding peptide
  MOD_RES (3)..(4)..(36): Xaa is C or S
KAXXVPTELSATSMLYYDENEKVVLRKHRDMVVEGXG

SEQ ID NO: 8879 - protein, 39 aa, Artificial Sequence
  GFR-binding peptide
  MOD_RES (6)..(7): Xaa is C or S
  MOD_RES (21)..(22)..(23)..(24)..(25): Xaa is A or G
  MOD_RES (26)..(27)..(28)..(29): Xaa is A or G or is absent
AVPKAXXAPTKLSAISVLYLXXXXXXXXXLKNYQNMVVK

SEQ ID NO: 8880 - protein, 31 aa, Artificial Sequence
  GFR-binding peptide
  MOD_RES (31)..(31): Xaa is C or S
VSQDLSPISILYKIGKTPKILKYHYMIVKSX

SEQ ID NO: 8881 - protein, 35 aa, Artificial Sequence
  GFR-binding peptide
  MOD_RES (1)..(2)..(35): Xaa is C or S
  MOD_RES (16)..(17)..(18)..(19)..(20): Xaa is A or G
  MOD_RES (21)..(22)..(23)..(24): Xaa is A or G or is absent
XXVPQALSAISILYLXXXXXXXXXLKNYQMIVRSX

SEQ ID NO: 8882 - protein, 39 aa, Artificial Sequence
  GFR-binding peptide
  MOD_RES (3)..(3): Xaa is C or S
VQXRPTQVQLSAISVLYLEIVRKKPIFLKNYQTLEDHLA

SEQ ID NO: 8883 - protein, 39 aa, Artificial Sequence
  GFR-binding peptide
  MOD_RES (3)..(3): Xaa is C or S
VQXRPTQVQLSATSVLYYEIVRKKPIFLRKHRTLEDHLA

SEQ ID NO: 8884 - protein, 39 aa, Artificial Sequence
  GFR-binding peptide
  MOD_RES (4)..(4): Xaa is C or S
NVQXRPTQVQLSATSVLYYEIVRKKPIFLRKHRTLEDHL

SEQ ID NO: 8885 - protein, 40 aa, Artificial Sequence
  GFR-binding peptide
  MOD_RES (6)..(7): Xaa is C or S
  MOD_RES (21)..(22)..(23)..(24)..(25): Xaa is A or G
  MOD_RES (26)..(27)..(28)..(29): Xaa is A or G or is absent
KIPKAXXVPTELSPISMLYKXXXXXXXXXLKYHYDMVVEG

SEQ ID NO: 8886 - protein, 32 aa, Artificial Sequence
  GFR-binding peptide
  MOD_RES (1)..(2): Xaa is C or S
XXVPQALSAISILYLVGRKPKVLKNYQMIVRS

SEQ ID NO: 8887 - protein, 35 aa, Artificial Sequence
  GFR-binding peptide
  MOD_RES (2)..(2): Xaa is C or S
  MOD_RES (16)..(17)..(18)..(19)..(20): Xaa is A or G
  MOD_RES (21)..(22)..(23)..(24): Xaa is A or G or is absent
TXAPTKLSPISVLYKXXXXXXXXXLKYHYNMVVRS

SEQ ID NO: 8888 - protein, 41 aa, Artificial Sequence
  GFR-binding peptide
  MOD_RES (4)..(5)..(40): Xaa is C or S
  MOD_RES (19)..(20)..(21)..(22)..(23): Xaa is A or G
  MOD_RES (24)..(25)..(26)..(27): Xaa is A or G or is absent
GKAXXVPTKLSAISVLYLXXXXXXXXXLKNYQEGMSVAEXG

SEQ ID NO: 8889 - protein, 37 aa, Artificial Sequence
  GFR-binding peptide
  MOD_RES (1)..(2)..(35)..(37): Xaa is C or S
  MOD_RES (16)..(17)..(18)..(19)..(20): Xaa is A or G
  MOD_RES (21)..(22)..(23)..(24): Xaa is A or G or is absent
XXVPQDLNAISILYFXXXXXXXXXLKKYRMVVKSXKX

SEQ ID NO: 8890 - protein, 40 aa, Artificial Sequence
  GFR-binding peptide
  MOD_RES (5)..(6)..(38)..(40): Xaa is C or S
VPKAXXAPTKLSAISVLYLDSSNNVILKNYQNMVVKAXGX

SEQ ID NO: 8891 - protein, 35 aa, Artificial Sequence
  GFR-binding peptide
  MOD_RES (1)..(2)..(34): Xaa is C or S
XXAPTKLNAISVLYFDSSNNVILKKYRNMVVKAXG

SEQ ID NO: 8892 - protein, 40 aa, Artificial Sequence
  GFR-binding peptide
  MOD_RES (5)..(6)..(37)..(39): Xaa is C or S
SAAPXXVPQALSAISILYLVGRKPKVLKNYQMIVRSXKXS

SEQ ID NO: 8893 - protein, 37 aa, Artificial Sequence
  GFR-binding peptide
  MOD_RES (2)..(3)..(36): Xaa is C or S
  MOD_RES (17)..(18)..(19)..(20)..(21): Xaa is A or G
  MOD_RES (22)..(23)..(24)..(25): Xaa is A or G or is absent
PXXVSQDLSPISILYKXXXXXXXXXLKYHYMIVKSXK

SEQ ID NO: 8894 - protein, 40 aa, Artificial Sequence
  GFR-binding peptide
  MOD_RES (5)..(6)..(40): Xaa is C or S
  MOD_RES (20)..(21)..(22)..(23)..(24): Xaa is A or G
  MOD_RES (25)..(26)..(27)..(28): Xaa is A or G or is absent
VPKPXXAPTQLSATSVLYYXXXXXXXXXLRKHRNMVVRAX

SEQ ID NO: 8895 - protein, 37 aa, Artificial Sequence
  GFR-binding peptide
  MOD_RES (6)..(7): Xaa is C or S
ASASPXXVSQDLNAISILYFIGKTPKILKKYRMIVKS

SEQ ID NO: 8896 - protein, 42 aa, Artificial Sequence
  GFR-binding peptide
  MOD_RES (5)..(6)..(41): Xaa is C or S
  MOD_RES (20)..(21)..(22)..(23)..(24): Xaa is A or G
  MOD_RES (25)..(26)..(27)..(28): Xaa is A or G or is absent
VGKAXXVPTKLNAISVLYFXXXXXXXXXLKKYREGMSVAEXG

SEQ ID NO: 8897 - protein, 34 aa, Artificial Sequence
  GFR-binding peptide
  MOD_RES (2)..(2): Xaa is C or S
  MOD_RES (16)..(17)..(18)..(19)..(20): Xaa is A or G
  MOD_RES (21)..(22)..(23)..(24): Xaa is A or G or is absent
TXAPTKLNAISVLYFXXXXXXXXXLKKYRNMVVR

SEQ ID NO: 8898 - protein, 41 aa, Artificial Sequence
  GFR-binding peptide
  MOD_RES (6)..(7)..(38)..(40): Xaa is C or S
ASAAPXXVPQALSAISILYLVGRKPKVLKNYQMIVRSXKXS

SEQ ID NO: 8899 - protein, 41 aa, Artificial Sequence
  GFR-binding peptide
  MOD_RES (5)..(6)..(41): Xaa is C or S
  MOD_RES (20)..(21)..(22)..(23)..(24): Xaa is A or G
  MOD_RES (25)..(26)..(27)..(28): Xaa is A or G or is absent
VGKAXXVPTKLSPISVLYKXXXXXXXXXLKYHYEGMSVAEX

SEQ ID NO: 8900 - protein, 38 aa, Artificial Sequence
  GFR-binding peptide
  MOD_RES (1)..(2)..(37): Xaa is C or S
  MOD_RES (16)..(17)..(18)..(19)..(20): Xaa is A or G
  MOD_RES (21)..(22)..(23)..(24): Xaa is A or G or is absent
XXVPTKLSATSVLYYXXXXXXXXXLRKHREGMSVAEXG

SEQ ID NO: 8901 - protein, 35 aa, Artificial Sequence
  GFR-binding peptide
  MOD_RES (2)..(3): Xaa is C or S
  MOD_RES (17)..(18)..(19)..(20)..(21): Xaa is A or G
  MOD_RES (22)..(23)..(24)..(25): Xaa is A or G or is absent
PXXVPQALSAISILYLXXXXXXXXXLKNYQMIVRS

SEQ ID NO: 8902 - protein, 39 aa, Artificial Sequence
  GFR-binding peptide
  MOD_RES (1)..(2)..(36)..(38): Xaa is C or S
  MOD_RES (16)..(17)..(18)..(19)..(20): Xaa is A or G
  MOD_RES (21)..(22)..(23)..(24): Xaa is A or G or is absent
XXAPTQLSAISVLYLXXXXXXXXXLKNYQNMVVRAXGXH

SEQ ID NO: 8903 - protein, 34 aa, Artificial Sequence
  GFR-binding peptide
  MOD_RES (34)..(34): Xaa is C or S
  MOD_RES (14)..(15)..(16)..(17)..(18): Xaa is A or G
  MOD_RES (19)..(20)..(21)..(22): Xaa is A or G or is absent
APTQLSPISVLYKXXXXXXXXXLKYHYNMVVRAX

SEQ ID NO: 8904 - protein, 35 aa, Artificial Sequence
  GFR-binding peptide
  MOD_RES (2)..(3): Xaa is C or S
AXXVPTKLSAISVLYLDDMGVPTLKNYQEGMSVAE

SEQ ID NO: 8905 - protein, 36 aa, Artificial Sequence
  GFR-binding peptide
  MOD_RES (4)..(5)..(36): Xaa is C or S
ASPXXVPQDLSAISILYLVGRTPKVLKNYQMVVKSX

SEQ ID NO: 8906 - protein, 35 aa, Artificial Sequence
  GFR-binding peptide
  MOD_RES (1)..(2)..(34): Xaa is C or S
XXVPTELSATSMLYYDEYDKVVLRKHREMVVEGXG

SEQ ID NO: 8907 - protein, 35 aa, Artificial Sequence
  GFR-binding peptide
  MOD_RES (1)..(32)..(34): Xaa is C or S
XVPQDLSPISILYKVGRTPKVLKYHYMVVKSXKXS

SEQ ID NO: 8908 - protein, 31 aa, Artificial Sequence
  GFR-binding peptide
  MOD_RES (1)..(1): Xaa is C or S
XAPTQLSAISVLYLDDSSNVILKNYQNMVVR

SEQ ID NO: 8909 - protein, 40 aa, Artificial Sequence
  GFR-binding peptide
  MOD_RES (2)..(39): Xaa is C or S
  MOD_RES (18)..(19)..(20)..(21)..(22): Xaa is A or G
  MOD_RES (23)..(24)..(25)..(26): Xaa is A or G or is absent
QXRPTQVQLSATSVLYYXXXXXXXXXLRKHRTLEDHLAXK

SEQ ID NO: 8910 - protein, 42 aa, Artificial Sequence
  GFR-binding peptide
  MOD_RES (5)..(6)..(39)..(41): Xaa is C or S
  MOD_RES (20)..(21)..(22)..(23)..(24): Xaa is A or G
  MOD_RES (25)..(26)..(27)..(28): Xaa is A or G or is absent
SAAPXXVPQALSAISILYLXXXXXXXXXLKNYQMIVRSXKXS

SEQ ID NO: 8911 - protein, 34 aa, Artificial Sequence
  GFR-binding peptide
  MOD_RES (1)..(32)..(34): Xaa is C or S
XVPQALSPISILYKVGRKPKVLKYHYMIVRSXKX

SEQ ID NO: 8912 - protein, 41 aa, Artificial Sequence
  GFR-binding peptide
  MOD_RES (6)..(7)..(40): Xaa is C or S
  MOD_RES (21)..(22)..(23)..(24)..(25): Xaa is A or G
  MOD_RES (26)..(27)..(28)..(29): Xaa is A or G or is absent
ASASPXXVSQDLSAISILYLXXXXXXXXXLKNYQMIVKSXK

SEQ ID NO: 8913 - protein, 41 aa, Artificial Sequence
  GFR-binding peptide
  MOD_RES (6)..(7)..(40): Xaa is C or S
  MOD_RES (21)..(22)..(23)..(24)..(25): Xaa is A or G
  MOD_RES (26)..(27)..(28)..(29): Xaa is A or G or is absent
ASASPXXVSQDLNAISILYFXXXXXXXXXLKKYRMIVKSXK

SEQ ID NO: 8914 - protein, 38 aa, Artificial Sequence
  GFR-binding peptide
  MOD_RES (5)..(6): Xaa is C or S
  MOD_RES (20)..(21)..(22)..(23)..(24): Xaa is A or G
  MOD_RES (25)..(26)..(27)..(28): Xaa is A or G or is absent
VPKAXXAPTKLSPISVLYKXXXXXXXXXLKYHYNMVVK

SEQ ID NO: 8915 - protein, 39 aa, Artificial Sequence
  GFR-binding peptide
  MOD_RES (2)..(3)..(37)..(39): Xaa is C or S
  MOD_RES (17)..(18)..(19)..(20)..(21): Xaa is A or G
  MOD_RES (22)..(23)..(24)..(25): Xaa is A or G or is absent
PXXAPTKLSAISVLYLXXXXXXXXXLKNYQNMVVRSXGX

SEQ ID NO: 8916 - protein, 35 aa, Artificial Sequence
  GFR-binding peptide
  MOD_RES (32)..(34): Xaa is C or S
APTKLSAISVLYLDDSSNVILKNYQNMVVRSXGXH

SEQ ID NO: 8917 - protein, 36 aa, Artificial Sequence
  GFR-binding peptide
  MOD_RES (3)..(4)..(35): Xaa is C or S
APXXVPQALSATSILYYVGRKPKVLRKHRMIVRSXK

SEQ ID NO: 8918 - protein, 35 aa, Artificial Sequence
  GFR-binding peptide
  MOD_RES (4)..(5): Xaa is C or S
PKPXXAPTKLSATSVLYYDDSSNVILRKHRNMVVR

SEQ ID NO: 8919 - protein, 39 aa, Artificial Sequence
  GFR-binding peptide
  MOD_RES (2)..(3)..(36)..(38): Xaa is C or S
AXXVPTKLNAISVLYFDDMGVPTLKKYREGMSVAEXGXR

SEQ ID NO: 8920 - protein, 38 aa, Artificial Sequence
  GFR-binding peptide
  MOD_RES (3)..(4)..(36)..(38): Xaa is C or S
KAXXVPTELNAISMLYFDENEKVVLKKYRDMVVEGXGX

SEQ ID NO: 8921 - protein, 35 aa, Artificial Sequence
  GFR-binding peptide
  MOD_RES (1)..(2)..(35): Xaa is C or S
  MOD_RES (16)..(17)..(18)..(19)..(20): Xaa is A or G
  MOD_RES (21)..(22)..(23)..(24): Xaa is A or G or is absent
XXVPQALSATSILYYXXXXXXXXXLRKHRMIVRSX

SEQ ID NO: 8922 - protein, 45 aa, Artificial Sequence
  GFR-binding peptide
  MOD_RES (6)..(7)..(42)..(44): Xaa is C or S
  MOD_RES (21)..(22)..(23)..(24)..(25): Xaa is A or G
  MOD_RES (26)..(27)..(28)..(29): Xaa is A or G or is absent
KVGKAXXVPTKLNAISVLYFXXXXXXXXXLKKYREGMSVAEXGXR

SEQ ID NO: 8923 - protein, 37 aa, Artificial Sequence
  GFR-binding peptide
  MOD_RES (3)..(4)..(37): Xaa is C or S
KAXXVPTKLNAISVLYFDDMGVPTLKKYREGMSVAEX

SEQ ID NO: 8924 - protein, 36 aa, Artificial Sequence
  GFR-binding peptide
  MOD_RES (1)..(33)..(35): Xaa is C or S
XVPTELSPISMLYKDEYDKVVLKYHYEMVVEGXGXR

SEQ ID NO: 8925 - protein, 33 aa, Artificial Sequence
  GFR-binding peptide
  MOD_RES (1)..(1): Xaa is C or S
  MOD_RES (15)..(16)..(17)..(18)..(19): Xaa is A or G
  MOD_RES (20)..(21)..(22)..(23): Xaa is A or G or is absent
XVPTELNAISMLYFXXXXXXXXXLKKYRDMVVE

SEQ ID NO: 8926 - protein, 40 aa, Artificial Sequence
  GFR-binding peptide
  MOD_RES (5)..(6)..(38)..(40): Xaa is C or S
IPKAXXVPTELNAISMLYFDEYDKVVLKKYREMVVEGXGX

SEQ ID NO: 8927 - protein, 39 aa, Artificial Sequence
  GFR-binding peptide
  MOD_RES (6)..(7)..(38): Xaa is C or S
ASASPXXVSQDLSAISILYLIGKTPKILKNYQMIVKSXK

SEQ ID NO: 8928 - protein, 40 aa, Artificial Sequence
  GFR-binding peptide
  MOD_RES (4)..(5)..(39): Xaa is C or S
  MOD_RES (19)..(20)..(21)..(22)..(23): Xaa is A or G
  MOD_RES (24)..(25)..(26)..(27): Xaa is A or G or is absent
PKPXXAPTQLSAISVLYLXXXXXXXXXLKNYQNMVVRAXG

SEQ ID NO: 8929 - protein, 43 aa, Artificial Sequence
  GFR-binding peptide
  MOD_RES (6)..(7)..(41)..(43): Xaa is C or S
  MOD_RES (21)..(22)..(23)..(24)..(25): Xaa is A or G
  MOD_RES (26)..(27)..(28)..(29): Xaa is A or G or is absent
AVPKAXXAPTKLSATSVLYYXXXXXXXXXLRKHRNMVVKAXGX

SEQ ID NO: 8930 - protein, 42 aa, Artificial Sequence
  GFR-binding peptide
  MOD_RES (4)..(5)..(39)..(41): Xaa is C or S
  MOD_RES (19)..(20)..(21)..(22)..(23): Xaa is A or G
  MOD_RES (24)..(25)..(26)..(27): Xaa is A or G or is absent
PKAXXAPTKLSATSVLYYXXXXXXXXXLRKHRNMVVKAXGXH

SEQ ID NO: 8931 - protein, 39 aa, Artificial Sequence
  GFR-binding peptide
  MOD_RES (2)..(3)..(37)..(39): Xaa is C or S
  MOD_RES (17)..(18)..(19)..(20)..(21): Xaa is A or G
  MOD_RES (22)..(23)..(24)..(25): Xaa is A or G or is absent
PXXAPTQLSATSVLYYXXXXXXXXXLRKHRNMVVRAXGX

SEQ ID NO: 8932 - protein, 36 aa, Artificial Sequence
  GFR-binding peptide
  MOD_RES (2)..(2): Xaa is C or S
QXRPTQVQLSAISVLYLEIVRKKPIFLKNYQTLEDH

SEQ ID NO: 8933 - protein, 32 aa, Artificial Sequence
  GFR-binding peptide
  MOD_RES (14)..(15)..(16)..(17)..(18): Xaa is A or G
  MOD_RES (19)..(20)..(21)..(22): Xaa is A or G or is absent
VPQDLSPISILYKXXXXXXXXXLKYHYMVVKS

SEQ ID NO: 8934 - protein, 32 aa, Artificial Sequence
  GFR-binding peptide
  MOD_RES (31)..(31): Xaa is C or S
VPQDLSPISILYKVGRTPKVLKYHYMVVKSXK

SEQ ID NO: 8935 - protein, 39 aa, Artificial Sequence
  GFR-binding peptide
  MOD_RES (3)..(4)..(37)..(39): Xaa is C or S
  MOD_RES (18)..(19)..(20)..(21)..(22): Xaa is A or G
  MOD_RES (23)..(24)..(25)..(26): Xaa is A or G or is absent
APXXVPQALNAISILYFXXXXXXXXXLKKYRMIVRSXKX

SEQ ID NO: 8936 - protein, 39 aa, Artificial Sequence
  GFR-binding peptide
  MOD_RES (4)..(4): Xaa is C or S
  MOD_RES (20)..(21)..(22)..(23)..(24): Xaa is A or G
  MOD_RES (25)..(26)..(27)..(28): Xaa is A or G or is absent
NVQXRPTQVQLSAISVLYLXXXXXXXXXLKNYQTLEDHL

SEQ ID NO: 8937 - protein, 35 aa, Artificial Sequence
  GFR-binding peptide
  MOD_RES (1)..(32)..(34): Xaa is C or S
XVPQALSAISILYLVGRKPKVLKNYQMIVRSXKXS

SEQ ID NO: 8938 - protein, 40 aa, Artificial Sequence
  GFR-binding peptide
  MOD_RES (6)..(7): Xaa is C or S
  MOD_RES (21)..(22)..(23)..(24)..(25): Xaa is A or G
  MOD_RES (26)..(27)..(28)..(29): Xaa is A or G or is absent
TVPKPXXAPTQLNAISVLYFXXXXXXXXXLKKYRNMVVRA

SEQ ID NO: 8939 - protein, 37 aa, Artificial Sequence
  GFR-binding peptide
  MOD_RES (2)..(3): Xaa is C or S
  MOD_RES (17)..(18)..(19)..(20)..(21): Xaa is A or G
  MOD_RES (22)..(23)..(24)..(25): Xaa is A or G or is absent
AXXVPTKLNAISVLYFXXXXXXXXXLKKYREGMSVAE

SEQ ID NO: 8940 - protein, 38 aa, Artificial Sequence
  GFR-binding peptide
  MOD_RES (6)..(7): Xaa is C or S
KIPKAXXVPTELSATSMLYYDENEKVVLRKHRDMVVEG

SEQ ID NO: 8941 - protein, 36 aa, Artificial Sequence
  GFR-binding peptide
  MOD_RES (4)..(5)..(36): Xaa is C or S
ASPXXVSQDLSATSILYYIGKTPKILRKHRMIVKSX

SEQ ID NO: 8942 - protein, 37 aa, Artificial Sequence
  GFR-binding peptide
  MOD_RES (2)..(3)..(37): Xaa is C or S
  MOD_RES (17)..(18)..(19)..(20)..(21): Xaa is A or G
  MOD_RES (22)..(23)..(24)..(25): Xaa is A or G or is absent
AXXVPTELSATSMLYYXXXXXXXXXLRKHREMVVEGX

SEQ ID NO: 8943 - protein, 37 aa, Artificial Sequence
  GFR-binding peptide
  MOD_RES (3)..(3): Xaa is C or S
  MOD_RES (19)..(20)..(21)..(22)..(23): Xaa is A or G
  MOD_RES (24)..(25)..(26)..(27): Xaa is A or G or is absent
VQXRPTQVQLSPISVLYKXXXXXXXXXLKYHYTLEDH

SEQ ID NO: 8944 - protein, 39 aa, Artificial Sequence
  GFR-binding peptide
  MOD_RES (1)..(2)..(36)..(38): Xaa is C or S
  MOD_RES (16)..(17)..(18)..(19)..(20): Xaa is A or G
  MOD_RES (21)..(22)..(23)..(24): Xaa is A or G or is absent
XXAPTKLNAISVLYFXXXXXXXXXLKKYRNMVVRSXGXH

SEQ ID NO: 8945 - protein, 39 aa, Artificial Sequence
  GFR-binding peptide
  MOD_RES (37)..(39): Xaa is C or S
  MOD_RES (16)..(17)..(18)..(19)..(20): Xaa is A or G
  MOD_RES (21)..(22)..(23)..(24): Xaa is A or G or is absent
RPTQVQLSATSVLYYXXXXXXXXXLRKHRTLEDHLAXKX

SEQ ID NO: 8946 - protein, 43 aa, Artificial Sequence
  GFR-binding peptide
  MOD_RES (3)..(40)..(42): Xaa is C or S
VQXRPTQVQLSAISVLYLEIVRKKPIFLKNYQTLEDHLAXKXE

SEQ ID NO: 8947 - protein, 40 aa, Artificial Sequence
  GFR-binding peptide
  MOD_RES (6)..(7)..(39): Xaa is C or S
KIPKAXXVPTELSATSMLYYDENEKVVLRKHRDMVVEGXG

SEQ ID NO: 8948 - protein, 38 aa, Artificial Sequence
  GFR-binding peptide
  MOD_RES (3)..(4)..(38): Xaa is C or S
  MOD_RES (18)..(19)..(20)..(21)..(22): Xaa is A or G
  MOD_RES (23)..(24)..(25)..(26): Xaa is A or G or is absent
KAXXAPTKLSPISVLYKXXXXXXXXXLKYHYNMVVKAX

SEQ ID NO: 8949 - protein, 41 aa, Artificial Sequence
  GFR-binding peptide
  MOD_RES (5)..(6)..(38)..(40): Xaa is C or S
IPKAXXVPTELSATSMLYYDEYDKVVLRKHREMVVEGXGXR

SEQ ID NO: 8950 - protein, 36 aa, Artificial Sequence
  GFR-binding peptide
  MOD_RES (2)..(3): Xaa is C or S
  MOD_RES (17)..(18)..(19)..(20)..(21): Xaa is A or G
  MOD_RES (22)..(23)..(24)..(25): Xaa is A or G or is absent
PXXAPTKLSAISVLYLXXXXXXXXXLKNYQNMVVRS

SEQ ID NO: 8951 - protein, 35 aa, Artificial Sequence
  GFR-binding peptide
  MOD_RES (2)..(3)..(35): Xaa is C or S
PXXAPTKLSAISVLYLDDSSNVILKNYQNMVVRSX

SEQ ID NO: 8952 - protein, 39 aa, Artificial Sequence
  GFR-binding peptide
  MOD_RES (5)..(6)..(38): Xaa is C or S
VPKPXXAPTKLSPISVLYKDDSSNVILKYHYNMVVRSXG

SEQ ID NO: 8953 - protein, 42 aa, Artificial Sequence
  GFR-binding peptide
  MOD_RES (3)..(40)..(42): Xaa is C or S
VQXRPTQVQLSAISVLYLEIVRKKPIFLKNYQTLEDHLAXKX

SEQ ID NO: 8954 - protein, 41 aa, Artificial Sequence
  GFR-binding peptide
  MOD_RES (3)..(40): Xaa is C or S
  MOD_RES (19)..(20)..(21)..(22)..(23): Xaa is A or G
  MOD_RES (24)..(25)..(26)..(27): Xaa is A or G or is absent
VQXRPTQVQLSATSVLYYXXXXXXXXXLRKHRTLEDHLAXK

SEQ ID NO: 8955 - protein, 42 aa, Artificial Sequence
  GFR-binding peptide
  MOD_RES (6)..(7)..(39)..(41): Xaa is C or S
TVPKPXXAPTQLSAISVLYLDDSSNVILKNYQNMVVRAXGXH

SEQ ID NO: 8956 - protein, 31 aa, Artificial Sequence
  GFR-binding peptide
  MOD_RES (1)..(1): Xaa is C or S
XAPTKLSATSVLYYDDSSNVILRKHRNMVVR

SEQ ID NO: 8957 - protein, 35 aa, Artificial Sequence
  GFR-binding peptide
  MOD_RES (1)..(33)..(35): Xaa is C or S
XVPTELNAISMLYFDENEKVVLKKYRDMVVEGXGX

SEQ ID NO: 8958 - protein, 33 aa, Artificial Sequence
  GFR-binding peptide
  MOD_RES (2)..(3): Xaa is C or S
AXXVPTELSPISMLYKDEYDKVVLKYHYEMVVE

SEQ ID NO: 8959 - protein, 40 aa, Artificial Sequence
  GFR-binding peptide
  MOD_RES (3)..(4)..(37)..(39): Xaa is C or S
  MOD_RES (18)..(19)..(20)..(21)..(22): Xaa is A or G
  MOD_RES (23)..(24)..(25)..(26): Xaa is A or G or is absent
APXXVPQALNAISILYFXXXXXXXXXLKKYRMIVRSXKXS

SEQ ID NO: 8960 - protein, 39 aa, Artificial Sequence
  GFR-binding peptide
  MOD_RES (6)..(7)..(38): Xaa is C or S
ASASPXXVPQDLSAISILYLVGRTPKVLKNYQMVVKSXK

SEQ ID NO: 8961 - protein, 36 aa, Artificial Sequence
  GFR-binding peptide
  MOD_RES (2)..(34)..(36): Xaa is C or S
TXAPTKLSATSVLYYDDSSNVILRKHRNMVVRSXGX

SEQ ID NO: 8962 - protein, 32 aa, Artificial Sequence
  GFR-binding peptide
  MOD_RES (1)..(2): Xaa is C or S
XXVPQALSPISILYKVGRKPKVLKYHYMIVRS

SEQ ID NO: 8963 - protein, 35 aa, Artificial Sequence
  GFR-binding peptide
  MOD_RES (1)..(2): Xaa is C or S
  MOD_RES (16)..(17)..(18)..(19)..(20): Xaa is A or G
  MOD_RES (21)..(22)..(23)..(24): Xaa is A or G or is absent
XXVPTELSPISMLYKXXXXXXXXXLKYHYEMVVEG

SEQ ID NO: 8964 - protein, 34 aa, Artificial Sequence
  GFR-binding peptide
  MOD_RES (32)..(34): Xaa is C or S
APTQLSAISVLYLDDSSNVILKNYQNMVVRAXGX

SEQ ID NO: 8965 - protein, 37 aa, Artificial Sequence
  GFR-binding peptide
  MOD_RES (5)..(6): Xaa is C or S
VPKPXXAPTQLSPISVLYKDDSSNVILKYHYNMVVRA

SEQ ID NO: 8966 - protein, 40 aa, Artificial Sequence
  GFR-binding peptide
  MOD_RES (3)..(4)..(38)..(40): Xaa is C or S
  MOD_RES (18)..(19)..(20)..(21)..(22): Xaa is A or G
  MOD_RES (23)..(24)..(25)..(26): Xaa is A or G or is absent
KPXXAPTKLSPISVLYKXXXXXXXXXLKYHYNMVVRSXGX

SEQ ID NO: 8967 - protein, 36 aa, Artificial Sequence
  GFR-binding peptide
  MOD_RES (35)..(35): Xaa is C or S
  MOD_RES (14)..(15)..(16)..(17)..(18): Xaa is A or G
  MOD_RES (19)..(20)..(21)..(22): Xaa is A or G or is absent
TQVQLSATSVLYYXXXXXXXXXLRKHRTLEDHLAXK

SEQ ID NO: 8968 - protein, 35 aa, Artificial Sequence
  GFR-binding peptide
  MOD_RES (32)..(34): Xaa is C or S
VPTELNAISMLYFDENEKVVLKKYRDMVVEGXGXR

SEQ ID NO: 8969 - protein, 39 aa, Artificial Sequence
  GFR-binding peptide
  MOD_RES (2)..(3)..(36)..(38): Xaa is C or S
  MOD_RES (17)..(18)..(19)..(20)..(21): Xaa is A or G
  MOD_RES (22)..(23)..(24)..(25): Xaa is A or G or is absent
PXXVPQDLSPISILYKXXXXXXXXXLKYHYMVVKSXKXS

SEQ ID NO: 8970 - protein, 38 aa, Artificial Sequence
  GFR-binding peptide
  MOD_RES (3)..(4)..(35)..(37): Xaa is C or S
SPXXVSQDLSATSILYYIGKTPKILRKHRMIVKSXKXS

SEQ ID NO: 8971 - protein, 36 aa, Artificial Sequence
  GFR-binding peptide
  MOD_RES (5)..(6): Xaa is C or S
SAAPXXVPQALNAISILYFVGRKPKVLKKYRMIVRS

SEQ ID NO: 8972 - protein, 41 aa, Artificial Sequence
  GFR-binding peptide
  MOD_RES (4)..(5)..(38)..(40): Xaa is C or S
  MOD_RES (19)..(20)..(21)..(22)..(23): Xaa is A or G
  MOD_RES (24)..(25)..(26)..(27): Xaa is A or G or is absent
AAPXXVPQALNAISILYFXXXXXXXXXLKKYRMIVRSXKXS

SEQ ID NO: 8973 - protein, 38 aa, Artificial Sequence
  GFR-binding peptide
  MOD_RES (4)..(5)..(37): Xaa is C or S
PKPXXAPTQLSATSVLYYDDSSNVILRKHRNMVVRAXG

SEQ ID NO: 8974 - protein, 33 aa, Artificial Sequence
  GFR-binding peptide
  MOD_RES (1)..(2): Xaa is C or S
XXAPTQLSPISVLYKDDSSNVILKYHYNMVVRA

SEQ ID NO: 8975 - protein, 31 aa, Artificial Sequence
  GFR-binding peptide
  MOD_RES (1)..(1): Xaa is C or S
XAPTQLSPISVLYKDDSSNVILKYHYNMVVR

SEQ ID NO: 8976 - protein, 44 aa, Artificial Sequence
  GFR-binding peptide
  MOD_RES (5)..(6)..(41)..(43): Xaa is C or S
  MOD_RES (20)..(21)..(22)..(23)..(24): Xaa is A or G
  MOD_RES (25)..(26)..(27)..(28): Xaa is A or G or is absent
VGKAXXVPTKLNAISVLYFXXXXXXXXXLKKYREGMSVAEXGXR

SEQ ID NO: 8977 - protein, 39 aa, Artificial Sequence
  GFR-binding peptide
  MOD_RES (3)..(4)..(36)..(38): Xaa is C or S
KAXXAPTKLNAISVLYFDSSNNVILKKYRNMVVKAXGXH

SEQ ID NO: 8978 - protein, 44 aa, Artificial Sequence
  GFR-binding peptide
  MOD_RES (6)..(7)..(41)..(43): Xaa is C or S
  MOD_RES (21)..(22)..(23)..(24)..(25): Xaa is A or G
  MOD_RES (26)..(27)..(28)..(29): Xaa is A or G or is absent
AVPKAXXAPTKLSPISVLYKXXXXXXXXXLKYHYNMVVKAXGXH

SEQ ID NO: 8979 - protein, 42 aa, Artificial Sequence
  GFR-binding peptide
  MOD_RES (6)..(7)..(41): Xaa is C or S
  MOD_RES (21)..(22)..(23)..(24)..(25): Xaa is A or G
  MOD_RES (26)..(27)..(28)..(29): Xaa is A or G or is absent
YVPKPXXAPTKLSAISVLYLXXXXXXXXXLKNYQNMVVRSXG

SEQ ID NO: 8980 - protein, 38 aa, Artificial Sequence
  GFR-binding peptide
  MOD_RES (5)..(6)..(38): Xaa is C or S
IPKAXXVPTELNAISMLYFDENEKVVLKKYRDMVVEGX

SEQ ID NO: 8981 - protein, 32 aa, Artificial Sequence
  GFR-binding peptide
  MOD_RES (31)..(31): Xaa is C or S
VPQDLNAISILYFVGRTPKVLKKYRMVVKSXK

SEQ ID NO: 8982 - protein, 42 aa, Artificial Sequence
  GFR-binding peptide
  MOD_RES (4)..(41): Xaa is C or S
  MOD_RES (20)..(21)..(22)..(23)..(24): Xaa is A or G
  MOD_RES (25)..(26)..(27)..(28): Xaa is A or G or is absent
NVQXRPTQVQLSPISVLYKXXXXXXXXXLKYHYTLEDHLAXK

SEQ ID NO: 8983 - protein, 38 aa, Artificial Sequence
  GFR-binding peptide
  MOD_RES (5)..(6)..(37): Xaa is C or S
SASPXXVSQDLSPISILYKIGKTPKILKYHYMIVKSXK

SEQ ID NO: 8984 - protein, 42 aa, Artificial Sequence
  GFR-binding peptide
  MOD_RES (4)..(5)..(39)..(41): Xaa is C or S
  MOD_RES (19)..(20)..(21)..(22)..(23): Xaa is A or G
  MOD_RES (24)..(25)..(26)..(27): Xaa is A or G or is absent
PKAXXVPTELSPISMLYKXXXXXXXXXLKYHYDMVVEGXGXR

SEQ ID NO: 8985 - protein, 40 aa, Artificial Sequence
  GFR-binding peptide
  MOD_RES (6)..(40): Xaa is C or S
  MOD_RES (20)..(21)..(22)..(23)..(24): Xaa is A or G
  MOD_RES (25)..(26)..(27)..(28): Xaa is A or G or is absent
VTKPTXAPTKLSATSVLYYXXXXXXXXXLRKHRNMVVRSX

SEQ ID NO: 8986 - protein, 39 aa, Artificial Sequence
  GFR-binding peptide
  MOD_RES (36)..(38): Xaa is C or S
PTQVQLSPISVLYKEIVRKKPIFLKYHYTLEDHLAXKXE

SEQ ID NO: 8987 - protein, 35 aa, Artificial Sequence
  GFR-binding peptide
  MOD_RES (3)..(3): Xaa is C or S
  MOD_RES (17)..(18)..(19)..(20)..(21): Xaa is A or G
  MOD_RES (22)..(23)..(24)..(25): Xaa is A or G or is absent
PTXAPTKLSAISVLYLXXXXXXXXXLKNYQNMVVR

SEQ ID NO: 8988 - protein, 35 aa, Artificial Sequence
  GFR-binding peptide
  MOD_RES (35)..(35): Xaa is C or S
TQVQLSATSVLYYEIVRKKPIFLRKHRTLEDHLAX

SEQ ID NO: 8989 - protein, 38 aa, Artificial Sequence
  GFR-binding peptide
  MOD_RES (5)..(6): Xaa is C or S
  MOD_RES (20)..(21)..(22)..(23)..(24): Xaa is A or G
  MOD_RES (25)..(26)..(27)..(28): Xaa is A or G or is absent
VPKAXXAPTKLSATSVLYYXXXXXXXXXLRKHRNMVVK

SEQ ID NO: 8990 - protein, 39 aa, Artificial Sequence
  GFR-binding peptide
  MOD_RES (1)..(36)..(38): Xaa is C or S
  MOD_RES (15)..(16)..(17)..(18)..(19): Xaa is A or G
  MOD_RES (20)..(21)..(22)..(23): Xaa is A or G or is absent
XVPTKLNAISVLYFXXXXXXXXXLKKYREGMSVAEXGXR

SEQ ID NO: 8991 - protein, 41 aa, Artificial Sequence
  GFR-binding peptide
  MOD_RES (5)..(6)..(40): Xaa is C or S
  MOD_RES (20)..(21)..(22)..(23)..(24): Xaa is A or G
  MOD_RES (25)..(26)..(27)..(28): Xaa is A or G or is absent
IPKAXXVPTELSAISMLYLXXXXXXXXXLKNYQEMVVEGXG

SEQ ID NO: 8992 - protein, 33 aa, Artificial Sequence
  GFR-binding peptide
  MOD_RES (1)..(33): Xaa is C or S
XAPTKLSPISVLYKDSSNNVILKYHYNMVVKAX

SEQ ID NO: 8993 - protein, 30 aa, Artificial Sequence
  GFR-binding peptide
VPTELSATSMLYYDENEKVVLRKHRDMVVE

SEQ ID NO: 8994 - protein, 38 aa, Artificial Sequence
  GFR-binding peptide
  MOD_RES (36)..(38): Xaa is C or S
PTQVQLSPISVLYKEIVRKKPIFLKYHYTLEDHLAXKX

SEQ ID NO: 8995 - protein, 35 aa, Artificial Sequence
  GFR-binding peptide
  MOD_RES (1)..(34): Xaa is C or S
  MOD_RES (15)..(16)..(17)..(18)..(19): Xaa is A or G
  MOD_RES (20)..(21)..(22)..(23): Xaa is A or G or is absent
XVPQALSAISILYLXXXXXXXXXLKNYQMIVRSXK

SEQ ID NO: 8996 - protein, 39 aa, Artificial Sequence
  GFR-binding peptide
  MOD_RES (4)..(5)..(39): Xaa is C or S
  MOD_RES (19)..(20)..(21)..(22)..(23): Xaa is A or G
  MOD_RES (24)..(25)..(26)..(27): Xaa is A or G or is absent
PKPXXAPTQLSATSVLYYXXXXXXXXXLRKHRNMVVRAX

SEQ ID NO: 8997 - protein, 33 aa, Artificial Sequence
  GFR-binding peptide
  MOD_RES (1)..(33): Xaa is C or S
XVPTELNAISMLYFDEYDKVVLKKYREMVVEGX

SEQ ID NO: 8998 - protein, 41 aa, Artificial Sequence
  GFR-binding peptide
  MOD_RES (4)..(5)..(39)..(41): Xaa is C or S
  MOD_RES (19)..(20)..(21)..(22)..(23): Xaa is A or G
  MOD_RES (24)..(25)..(26)..(27): Xaa is A or G or is absent
PKAXXAPTKLSPISVLYKXXXXXXXXXLKYHYNMVVKAXGX

SEQ ID NO: 8999 - protein, 40 aa, Artificial Sequence
  GFR-binding peptide
  MOD_RES (6)..(7)..(38)..(40): Xaa is C or S
ASAAPXXVPQALSATSILYYVGRKPKVLRKHRMIVRSXKX

SEQ ID NO: 9000 - protein, 39 aa, Artificial Sequence
  GFR-binding peptide
  MOD_RES (7)..(39): Xaa is C or S
HVTKPTXAPTKLSATSVLYYDDSSNVILRKHRNMVVRSX

SEQ ID NO: 9001 - protein, 36 aa, Artificial Sequence
  GFR-binding peptide
  MOD_RES (2)..(3): Xaa is C or S
  MOD_RES (17)..(18)..(19)..(20)..(21): Xaa is A or G
  MOD_RES (22)..(23)..(24)..(25): Xaa is A or G or is absent
PXXAPTQLNAISVLYFXXXXXXXXXLKKYRNMVVRA

SEQ ID NO: 9002 - protein, 39 aa, Artificial Sequence
  GFR-binding peptide
  MOD_RES (36)..(38): Xaa is C or S
PTQVQLSAISVLYLEIVRKKPIFLKNYQTLEDHLAXKXE

SEQ ID NO: 9003 - protein, 31 aa, Artificial Sequence
  GFR-binding peptide
  MOD_RES (1)..(1): Xaa is C or S
XVPQDLNAISILYFVGRTPKVLKKYRMVVKS

SEQ ID NO: 9004 - protein, 40 aa, Artificial Sequence
  GFR-binding peptide
  MOD_RES (37)..(39): Xaa is C or S
RPTQVQLSATSVLYYEIVRKKPIFLRKHRTLEDHLAXKXE

SEQ ID NO: 9005 - protein, 38 aa, Artificial Sequence
  GFR-binding peptide
  MOD_RES (3)..(4)..(36)..(38): Xaa is C or S
KAXXVPTELNAISMLYFDEYDKVVLKKYREMVVEGXGX

SEQ ID NO: 9006 - protein, 42 aa, Artificial Sequence
  GFR-binding peptide
  MOD_RES (5)..(6)..(40)..(42): Xaa is C or S
  MOD_RES (20)..(21)..(22)..(23)..(24): Xaa is A or G
  MOD_RES (25)..(26)..(27)..(28): Xaa is A or G or is absent
VPKPXXAPTKLSAISVLYLXXXXXXXXXLKNYQNMVVRSXGX

SEQ ID NO: 9007 - protein, 40 aa, Artificial Sequence
  GFR-binding peptide
  MOD_RES (2)..(39): Xaa is C or S
  MOD_RES (18)..(19)..(20)..(21)..(22): Xaa is A or G
  MOD_RES (23)..(24)..(25)..(26): Xaa is A or G or is absent
QXRPTQVQLSAISVLYLXXXXXXXXXLKNYQTLEDHLAXK

SEQ ID NO: 9008 - protein, 39 aa, Artificial Sequence
  GFR-binding peptide
  MOD_RES (4)..(36)..(38): Xaa is C or S
KPTXAPTKLSPISVLYKDDSSNVILKYHYNMVVRSXGXH

SEQ ID NO: 9009 - protein, 39 aa, Artificial Sequence
  GFR-binding peptide
  MOD_RES (1)..(2)..(36)..(38): Xaa is C or S
  MOD_RES (16)..(17)..(18)..(19)..(20): Xaa is A or G
  MOD_RES (21)..(22)..(23)..(24): Xaa is A or G or is absent
XXVPTELSAISMLYLXXXXXXXXXLKNYQEMVVEGXGXR

SEQ ID NO: 9010 - protein, 32 aa, Artificial Sequence
  GFR-binding peptide
  MOD_RES (1)..(2): Xaa is C or S
XXAPTKLSPISVLYKDDSSNVILKYHYNMVVR

SEQ ID NO: 9011 - protein, 33 aa, Artificial Sequence
  GFR-binding peptide
  MOD_RES (1)..(2): Xaa is C or S
XXAPTKLNAISVLYFDSSNNVILKKYRNMVVKA

SEQ ID NO: 9012 - protein, 32 aa, Artificial Sequence
  GFR-binding peptide
  MOD_RES (1)..(2): Xaa is C or S
XXVPQDLNAISILYFVGRTPKVLKKYRMVVKS

SEQ ID NO: 9013 - protein, 39 aa, Artificial Sequence
  GFR-binding peptide
  MOD_RES (4)..(5)..(37)..(39): Xaa is C or S
PKAXXVPTELSPISMLYKDEYDKVVLKYHYEMVVEGXGX

SEQ ID NO: 9014 - protein, 44 aa, Artificial Sequence
  GFR-binding peptide
  MOD_RES (6)..(7)..(41)..(43): Xaa is C or S
  MOD_RES (21)..(22)..(23)..(24)..(25): Xaa is A or G
  MOD_RES (26)..(27)..(28)..(29): Xaa is A or G or is absent
TVPKPXXAPTQLNAISVLYFXXXXXXXXXLKKYRNMVVRAXGXH

SEQ ID NO: 9015 - protein, 34 aa, Artificial Sequence
  GFR-binding peptide
  MOD_RES (1)..(32)..(34): Xaa is C or S
XVSQDLSAISILYLIGKTPKILKNYQMIVKSXKX

SEQ ID NO: 9016 - protein, 33 aa, Artificial Sequence
  GFR-binding peptide
  MOD_RES (2)..(3): Xaa is C or S
PXXVSQDLSPISILYKIGKTPKILKYHYMIVKS

SEQ ID NO: 9017 - protein, 39 aa, Artificial Sequence
  GFR-binding peptide
  MOD_RES (7)..(7): Xaa is C or S
  MOD_RES (21)..(22)..(23)..(24)..(25): Xaa is A or G
  MOD_RES (26)..(27)..(28)..(29): Xaa is A or G or is absent
HVTKPTXAPTKLSAISVLYLXXXXXXXXXLKNYQNMVVR

SEQ ID NO: 9018 - protein, 45 aa, Artificial Sequence
  GFR-binding peptide
  MOD_RES (6)..(7)..(42)..(44): Xaa is C or S
  MOD_RES (21)..(22)..(23)..(24)..(25): Xaa is A or G
  MOD_RES (26)..(27)..(28)..(29): Xaa is A or G or is absent
KVGKAXXVPTKLSAISVLYLXXXXXXXXXLKNYQEGMSVAEXGXR

SEQ ID NO: 9019 - protein, 37 aa, Artificial Sequence
  GFR-binding peptide
  MOD_RES (6)..(7): Xaa is C or S
ASASPXXVPQDLSAISILYLVGRTPKVLKNYQMVVKS

SEQ ID NO: 9020 - protein, 40 aa, Artificial Sequence
  GFR-binding peptide
  MOD_RES (5)..(6)..(40): Xaa is C or S
  MOD_RES (20)..(21)..(22)..(23)..(24): Xaa is A or G
  MOD_RES (25)..(26)..(27)..(28): Xaa is A or G or is absent
IPKAXXVPTELNAISMLYFXXXXXXXXXLKKYRDMVVEGX

SEQ ID NO: 9021 - protein, 41 aa, Artificial Sequence
  GFR-binding peptide
  MOD_RES (3)..(4)..(38)..(40): Xaa is C or S
  MOD_RES (18)..(19)..(20)..(21)..(22): Xaa is A or G
  MOD_RES (23)..(24)..(25)..(26): Xaa is A or G or is absent
KAXXVPTELSATSMLYYXXXXXXXXXLRKHREMVVEGXGXR

SEQ ID NO: 9022 - protein, 34 aa, Artificial Sequence
  GFR-binding peptide
  MOD_RES (1)..(2): Xaa is C or S
  MOD_RES (16)..(17)..(18)..(19)..(20): Xaa is A or G
  MOD_RES (21)..(22)..(23)..(24): Xaa is A or G or is absent
XXVSQDLSATSILYYXXXXXXXXXLRKHRMIVKS

SEQ ID NO: 9023 - protein, 36 aa, Artificial Sequence
  GFR-binding peptide
  MOD_RES (3)..(4): Xaa is C or S
  MOD_RES (18)..(19)..(20)..(21)..(22): Xaa is A or G
  MOD_RES (23)..(24)..(25)..(26): Xaa is A or G or is absent
KAXXVPTELSPISMLYKXXXXXXXXXLKYHYDMVVE

SEQ ID NO: 9024 - protein, 35 aa, Artificial Sequence
  GFR-binding peptide
  MOD_RES (3)..(4): Xaa is C or S
KAXXVPTELSPISMLYKDENEKVVLKYHYDMVVEG

SEQ ID NO: 9025 - protein, 35 aa, Artificial Sequence
  GFR-binding peptide
  MOD_RES (4)..(5): Xaa is C or S
PKPXXAPTQLSPISVLYKDDSSNVILKYHYNMVVR

SEQ ID NO: 9026 - protein, 37 aa, Artificial Sequence
  GFR-binding peptide
  MOD_RES (2)..(3)..(35)..(37): Xaa is C or S
PXXAPTQLSATSVLYYDDSSNVILRKHRNMVVRAXGX

SEQ ID NO: 9027 - protein, 41 aa, Artificial Sequence
  GFR-binding peptide
  MOD_RES (6)..(7)..(41): Xaa is C or S
  MOD_RES (21)..(22)..(23)..(24)..(25): Xaa is A or G
  MOD_RES (26)..(27)..(28)..(29): Xaa is A or G or is absent
AVPKAXXAPTKLNAISVLYFXXXXXXXXXLKKYRNMVVKAX

SEQ ID NO: 9028 - protein, 37 aa, Artificial Sequence
  GFR-binding peptide
  MOD_RES (3)..(37): Xaa is C or S
  MOD_RES (17)..(18)..(19)..(20)..(21): Xaa is A or G
  MOD_RES (22)..(23)..(24)..(25): Xaa is A or G or is absent
PTXAPTKLSATSVLYYXXXXXXXXXLRKHRNMVVRSX

SEQ ID NO: 9029 - protein, 34 aa, Artificial Sequence
  GFR-binding peptide
  MOD_RES (1)..(2): Xaa is C or S
  MOD_RES (16)..(17)..(18)..(19)..(20): Xaa is A or G
  MOD_RES (21)..(22)..(23)..(24): Xaa is A or G or is absent
XXAPTKLSATSVLYYXXXXXXXXXLRKHRNMVVR

SEQ ID NO: 9030 - protein, 33 aa, Artificial Sequence
  GFR-binding peptide
  MOD_RES (2)..(3): Xaa is C or S
PXXVSQDLSAISILYLIGKTPKILKNYQMIVKS

SEQ ID NO: 9031 - protein, 35 aa, Artificial Sequence
  GFR-binding peptide
  MOD_RES (2)..(3): Xaa is C or S
AXXVPTKLNAISVLYFDDMGVPTLKKYREGMSVAE

SEQ ID NO: 9032 - protein, 33 aa, Artificial Sequence
  GFR-binding peptide
  MOD_RES (1)..(33): Xaa is C or S
XAPTKLNAISVLYFDSSNNVILKKYRNMVVKAX

SEQ ID NO: 9033 - protein, 40 aa, Artificial Sequence
  GFR-binding peptide
  MOD_RES (6)..(7): Xaa is C or S
  MOD_RES (21)..(22)..(23)..(24)..(25): Xaa is A or G
  MOD_RES (26)..(27)..(28)..(29): Xaa is A or G or is absent
AVPKAXXAPTKLNAISVLYFXXXXXXXXXLKKYRNMVVKA

SEQ ID NO: 9034 - protein, 37 aa, Artificial Sequence
  GFR-binding peptide
  MOD_RES (3)..(4): Xaa is C or S
  MOD_RES (18)..(19)..(20)..(21)..(22): Xaa is A or G
  MOD_RES (23)..(24)..(25)..(26): Xaa is A or G or is absent
KAXXAPTKLSATSVLYYXXXXXXXXXLRKHRNMVVKA

SEQ ID NO: 9035 - protein, 34 aa, Artificial Sequence
  GFR-binding peptide
  MOD_RES (1)..(2): Xaa is C or S
  MOD_RES (16)..(17)..(18)..(19)..(20): Xaa is A or G
  MOD_RES (21)..(22)..(23)..(24): Xaa is A or G or is absent
XXAPTKLSATSVLYYXXXXXXXXXLRKHRNMVVK

SEQ ID NO: 9036 - protein, 36 aa, Artificial Sequence
  GFR-binding peptide
  MOD_RES (2)..(34)..(36): Xaa is C or S
TXAPTKLSAISVLYLDDSSNVILKNYQNMVVRSXGX

SEQ ID NO: 9037 - protein, 36 aa, Artificial Sequence
  GFR-binding peptide
  MOD_RES (34)..(36): Xaa is C or S
  MOD_RES (14)..(15)..(16)..(17)..(18): Xaa is A or G
  MOD_RES (19)..(20)..(21)..(22): Xaa is A or G or is absent
APTKLSPISVLYKXXXXXXXXXLKYHYNMVVKAXGX

SEQ ID NO: 9038 - protein, 36 aa, Artificial Sequence
  GFR-binding peptide
  MOD_RES (1)..(34)..(36): Xaa is C or S
  MOD_RES (15)..(16)..(17)..(18)..(19): Xaa is A or G
  MOD_RES (20)..(21)..(22)..(23): Xaa is A or G or is absent
XVPQDLNAISILYFXXXXXXXXXLKKYRMVVKSXKX

SEQ ID NO: 9039 - protein, 37 aa, Artificial Sequence
  GFR-binding peptide
  MOD_RES (35)..(37): Xaa is C or S
  MOD_RES (14)..(15)..(16)..(17)..(18): Xaa is A or G
  MOD_RES (19)..(20)..(21)..(22): Xaa is A or G or is absent
TQVQLNAISVLYFXXXXXXXXXLKKYRTLEDHLAXKX

SEQ ID NO: 9040 - protein, 36 aa, Artificial Sequence
  GFR-binding peptide
  MOD_RES (33)..(35): Xaa is C or S
  MOD_RES (14)..(15)..(16)..(17)..(18): Xaa is A or G
  MOD_RES (19)..(20)..(21)..(22): Xaa is A or G or is absent
VSQDLNAISILYFXXXXXXXXXLKKYRMIVKSXKXS

SEQ ID NO: 9041 - protein, 39 aa, Artificial Sequence
  GFR-binding peptide
  MOD_RES (3)..(4)..(37)..(39): Xaa is C or S
  MOD_RES (18)..(19)..(20)..(21)..(22): Xaa is A or G
  MOD_RES (23)..(24)..(25)..(26): Xaa is A or G or is absent
SPXXVPQDLNAISILYFXXXXXXXXXLKKYRMVVKSXKX

SEQ ID NO: 9042 - protein, 39 aa, Artificial Sequence
  GFR-binding peptide
  MOD_RES (3)..(37)..(39): Xaa is C or S
  MOD_RES (17)..(18)..(19)..(20)..(21): Xaa is A or G
  MOD_RES (22)..(23)..(24)..(25): Xaa is A or G or is absent
PTXAPTKLSAISVLYLXXXXXXXXXLKNYQNMVVRSXGX

SEQ ID NO: 9043 - protein, 41 aa, Artificial Sequence
  GFR-binding peptide
  MOD_RES (6)..(38)..(40): Xaa is C or S
VTKPTXAPTKLSAISVLYLDDSSNVILKNYQNMVVRSXGXH

SEQ ID NO: 9044 - protein, 39 aa, Artificial Sequence
  GFR-binding peptide
  MOD_RES (5)..(6)..(38): Xaa is C or S
VPKPXXAPTKLSAISVLYLDDSSNVILKNYQNMVVRSXG

SEQ ID NO: 9045 - protein, 34 aa, Artificial Sequence
  GFR-binding peptide
  MOD_RES (34)..(34): Xaa is C or S
  MOD_RES (14)..(15)..(16)..(17)..(18): Xaa is A or G
  MOD_RES (19)..(20)..(21)..(22): Xaa is A or G or is absent
VPTELSPISMLYKXXXXXXXXXLKYHYDMVVEGX

SEQ ID NO: 9046 - protein, 32 aa, Artificial Sequence
  GFR-binding peptide
  MOD_RES (14)..(15)..(16)..(17)..(18): Xaa is A or G
  MOD_RES (19)..(20)..(21)..(22): Xaa is A or G or is absent
VPQDLSATSILYYXXXXXXXXXLRKHRMVVKS

SEQ ID NO: 9047 - protein, 37 aa, Artificial Sequence
  GFR-binding peptide
  MOD_RES (34)..(36): Xaa is C or S
  MOD_RES (14)..(15)..(16)..(17)..(18): Xaa is A or G
  MOD_RES (19)..(20)..(21)..(22): Xaa is A or G or is absent
APTKLSAISVLYLXXXXXXXXXLKNYQNMVVKAXGXH

SEQ ID NO: 9048 - protein, 35 aa, Artificial Sequence
  GFR-binding peptide
  MOD_RES (1)..(34): Xaa is C or S
  MOD_RES (15)..(16)..(17)..(18)..(19): Xaa is A or G
  MOD_RES (20)..(21)..(22)..(23): Xaa is A or G or is absent
XVPQDLSPISILYKXXXXXXXXXLKYHYMVVKSXK

SEQ ID NO: 9049 - protein, 40 aa, Artificial Sequence
  GFR-binding peptide
  MOD_RES (5)..(6)..(38)..(40): Xaa is C or S
VPKPXXAPTKLSATSVLYYDDSSNVILRKHRNMVVRSXGX

SEQ ID NO: 9050 - protein, 40 aa, Artificial Sequence
  GFR-binding peptide
  MOD_RES (5)..(6)..(37)..(39): Xaa is C or S
SASPXXVSQDLSAISILYLIGKTPKILKNYQMIVKSXKXS

SEQ ID NO: 9051 - protein, 38 aa, Artificial Sequence
  GFR-binding peptide
  MOD_RES (35)..(37): Xaa is C or S
  MOD_RES (14)..(15)..(16)..(17)..(18): Xaa is A or G
  MOD_RES (19)..(20)..(21)..(22): Xaa is A or G or is absent
TQVQLSPISVLYKXXXXXXXXXLKYHYTLEDHLAXKXE

SEQ ID NO: 9052 - protein, 37 aa, Artificial Sequence
  GFR-binding peptide
  MOD_RES (2)..(3)..(37): Xaa is C or S
  MOD_RES (17)..(18)..(19)..(20)..(21): Xaa is A or G
  MOD_RES (22)..(23)..(24)..(25): Xaa is A or G or is absent
AXXAPTKLSATSVLYYXXXXXXXXXLRKHRNMVVKAX

SEQ ID NO: 9053 - protein, 43 aa, Artificial Sequence
  GFR-binding peptide
  MOD_RES (5)..(6)..(40)..(42): Xaa is C or S
  MOD_RES (20)..(21)..(22)..(23)..(24): Xaa is A or G
  MOD_RES (25)..(26)..(27)..(28): Xaa is A or G or is absent
IPKAXXVPTELNAISMLYFXXXXXXXXXLKKYRDMVVEGXGXR

SEQ ID NO: 9054 - protein, 40 aa, Artificial Sequence
  GFR-binding peptide
  MOD_RES (6)..(7): Xaa is C or S
  MOD_RES (21)..(22)..(23)..(24)..(25): Xaa is A or G
  MOD_RES (26)..(27)..(28)..(29): Xaa is A or G or is absent
TVPKPXXAPTQLSAISVLYLXXXXXXXXXLKNYQNMVVRA

SEQ ID NO: 9055 - protein, 35 aa, Artificial Sequence
  GFR-binding peptide
  MOD_RES (4)..(5): Xaa is C or S
PKPXXAPTQLSAISVLYLDDSSNVILKNYQNMVVR

SEQ ID NO: 9056 - protein, 42 aa, Artificial Sequence
  GFR-binding peptide
  MOD_RES (6)..(7)..(41): Xaa is C or S
  MOD_RES (21)..(22)..(23)..(24)..(25): Xaa is A or G
  MOD_RES (26)..(27)..(28)..(29): Xaa is A or G or is absent
SIPKAXXVPTELNAISMLYFXXXXXXXXXLKKYREMVVEGXG

SEQ ID NO: 9057 - protein, 43 aa, Artificial Sequence
  GFR-binding peptide
  MOD_RES (7)..(41)..(43): Xaa is C or S
  MOD_RES (21)..(22)..(23)..(24)..(25): Xaa is A or G
  MOD_RES (26)..(27)..(28)..(29): Xaa is A or G or is absent
HVTKPTXAPTKLSATSVLYYXXXXXXXXXLRKHRNMVVRSXGX

SEQ ID NO: 9058 - protein, 36 aa, Artificial Sequence
  GFR-binding peptide
  MOD_RES (5)..(6): Xaa is C or S
SAAPXXVPQALSATSILYYVGRKPKVLRKHRMIVRS

SEQ ID NO: 9059 - protein, 41 aa, Artificial Sequence
  GFR-binding peptide
  MOD_RES (4)..(5)..(40): Xaa is C or S
  MOD_RES (19)..(20)..(21)..(22)..(23): Xaa is A or G
  MOD_RES (24)..(25)..(26)..(27): Xaa is A or G or is absent
GKAXXVPTKLSATSVLYYXXXXXXXXXLRKHREGMSVAEXG

SEQ ID NO: 9060 - protein, 40 aa, Artificial Sequence
  GFR-binding peptide
  MOD_RES (5)..(6)..(40): Xaa is C or S
  MOD_RES (20)..(21)..(22)..(23)..(24): Xaa is A or G
  MOD_RES (25)..(26)..(27)..(28): Xaa is A or G or is absent
IPKAXXVPTELSPISMLYKXXXXXXXXXLKYHYEMVVEGX

SEQ ID NO: 9061 - protein, 32 aa, Artificial Sequence
  GFR-binding peptide
  MOD_RES (14)..(15)..(16)..(17)..(18): Xaa is A or G
  MOD_RES (19)..(20)..(21)..(22): Xaa is A or G or is absent
TQVQLSAISVLYLXXXXXXXXXLKNYQTLEDH

SEQ ID NO: 9062 - protein, 40 aa, Artificial Sequence
  GFR-binding peptide
  MOD_RES (1)..(38)..(40): Xaa is C or S
XRPTQVQLSPISVLYKEIVRKKPIFLKYHYTLEDHLAXKX

SEQ ID NO: 9063 - protein, 37 aa, Artificial Sequence
  GFR-binding peptide
  MOD_RES (2)..(3)..(34)..(36): Xaa is C or S
PXXVPQALSPISILYKVGRKPKVLKYHYMIVRSXKXS

SEQ ID NO: 9064 - protein, 43 aa, Artificial Sequence
  GFR-binding peptide
  MOD_RES (5)..(6)..(40)..(42): Xaa is C or S
  MOD_RES (20)..(21)..(22)..(23)..(24): Xaa is A or G
  MOD_RES (25)..(26)..(27)..(28): Xaa is A or G or is absent
VPKPXXAPTQLSATSVLYYXXXXXXXXXLRKHRNMVVRAXGXH

SEQ ID NO: 9065 - protein, 41 aa, Artificial Sequence
  GFR-binding peptide
  MOD_RES (3)..(4)..(38)..(40): Xaa is C or S
  MOD_RES (18)..(19)..(20)..(21)..(22): Xaa is A or G
  MOD_RES (23)..(24)..(25)..(26): Xaa is A or G or is absent
KPXXAPTQLSATSVLYYXXXXXXXXXLRKHRNMVVRAXGXH

SEQ ID NO: 9066 - protein, 39 aa, Artificial Sequence
  GFR-binding peptide
  MOD_RES (1)..(2)..(36)..(38): Xaa is C or S
  MOD_RES (16)..(17)..(18)..(19)..(20): Xaa is A or G
  MOD_RES (21)..(22)..(23)..(24): Xaa is A or G or is absent
XXVPTELSATSMLYYXXXXXXXXXLRKHREMVVEGXGXR

SEQ ID NO: 9067 - protein, 41 aa, Artificial Sequence
  GFR-binding peptide
  MOD_RES (5)..(6)..(40): Xaa is C or S
  MOD_RES (20)..(21)..(22)..(23)..(24): Xaa is A or G
  MOD_RES (25)..(26)..(27)..(28): Xaa is A or G or is absent
IPKAXXVPTELSATSMLYYXXXXXXXXXLRKHREMVVEGXG

SEQ ID NO: 9068 - protein, 35 aa, Artificial Sequence
  GFR-binding peptide
  MOD_RES (3)..(4): Xaa is C or S
KAXXAPTKLSPISVLYKDSSNNVILKYHYNMVVKA

SEQ ID NO: 9069 - protein, 44 aa, Artificial Sequence
  GFR-binding peptide
  MOD_RES (5)..(42)..(44): Xaa is C or S
RNVQXRPTQVQLSPISVLYKEIVRKKPIFLKYHYTLEDHLAXKX

SEQ ID NO: 9070 - protein, 39 aa, Artificial Sequence
  GFR-binding peptide
  MOD_RES (3)..(4)..(37)..(39): Xaa is C or S
  MOD_RES (18)..(19)..(20)..(21)..(22): Xaa is A or G
  MOD_RES (23)..(24)..(25)..(26): Xaa is A or G or is absent
SPXXVSQDLNAISILYFXXXXXXXXXLKKYRMIVKSXKX

SEQ ID NO: 9071 - protein, 38 aa, Artificial Sequence
  GFR-binding peptide
  MOD_RES (3)..(4)..(37): Xaa is C or S
  MOD_RES (18)..(19)..(20)..(21)..(22): Xaa is A or G
  MOD_RES (23)..(24)..(25)..(26): Xaa is A or G or is absent
APXXVPQALNAISILYFXXXXXXXXXLKKYRMIVRSXK

SEQ ID NO: 9072 - protein, 35 aa, Artificial Sequence
  GFR-binding peptide
  MOD_RES (1)..(35): Xaa is C or S
  MOD_RES (15)..(16)..(17)..(18)..(19): Xaa is A or G
  MOD_RES (20)..(21)..(22)..(23): Xaa is A or G or is absent
XVPTELNAISMLYFXXXXXXXXXLKKYRDMVVEGX

SEQ ID NO: 9073 - protein, 39 aa, Artificial Sequence
  GFR-binding peptide
  MOD_RES (4)..(5)..(36)..(38): Xaa is C or S
ASPXXVPQDLSPISILYKVGRTPKVLKYHYMVVKSXKXS

SEQ ID NO: 9074 - protein, 38 aa, Artificial Sequence
  GFR-binding peptide
  MOD_RES (2)..(3)..(37): Xaa is C or S
  MOD_RES (17)..(18)..(19)..(20)..(21): Xaa is A or G
  MOD_RES (22)..(23)..(24)..(25): Xaa is A or G or is absent
PXXAPTKLSPISVLYKXXXXXXXXXLKYHYNMVVRSXG

SEQ ID NO: 9075 - protein, 37 aa, Artificial Sequence
  GFR-binding peptide
  MOD_RES (1)..(2)..(34)..(36): Xaa is C or S
XXAPTKLSAISVLYLDDSSNVILKNYQNMVVRSXGXH

SEQ ID NO: 9076 - protein, 36 aa, Artificial Sequence
  GFR-binding peptide
  MOD_RES (1)..(34)..(36): Xaa is C or S
  MOD_RES (15)..(16)..(17)..(18)..(19): Xaa is A or G
  MOD_RES (20)..(21)..(22)..(23): Xaa is A or G or is absent
XVSQDLSPISILYKXXXXXXXXXLKYHYMIVKSXKX

SEQ ID NO: 9077 - protein, 39 aa, Artificial Sequence
  GFR-binding peptide
  MOD_RES (6)..(7): Xaa is C or S
  MOD_RES (21)..(22)..(23)..(24)..(25): Xaa is A or G
  MOD_RES (26)..(27)..(28)..(29): Xaa is A or G or is absent
SIPKAXXVPTELSATSMLYYXXXXXXXXXLRKHREMVVE

SEQ ID NO: 9078 - protein, 41 aa, Artificial Sequence
  GFR-binding peptide
  MOD_RES (2)..(39)..(41): Xaa is C or S
  MOD_RES (18)..(19)..(20)..(21)..(22): Xaa is A or G
  MOD_RES (23)..(24)..(25)..(26): Xaa is A or G or is absent
QXRPTQVQLSAISVLYLXXXXXXXXXLKNYQTLEDHLAXKX

SEQ ID NO: 9079 - protein, 36 aa, Artificial Sequence
  GFR-binding peptide
  MOD_RES (1)..(35): Xaa is C or S
  MOD_RES (15)..(16)..(17)..(18)..(19): Xaa is A or G
  MOD_RES (20)..(21)..(22)..(23): Xaa is A or G or is absent
XAPTQLSAISVLYLXXXXXXXXXLKNYQNMVVRAXG

SEQ ID NO: 9080 - protein, 31 aa, Artificial Sequence
  GFR-binding peptide
  MOD_RES (1)..(1): Xaa is C or S
XAPTKLNAISVLYFDSSNNVILKKYRNMVVK

SEQ ID NO: 9081 - protein, 44 aa, Artificial Sequence
  GFR-binding peptide
  MOD_RES (5)..(6)..(41)..(43): Xaa is C or S
  MOD_RES (20)..(21)..(22)..(23)..(24): Xaa is A or G
  MOD_RES (25)..(26)..(27)..(28): Xaa is A or G or is absent
VGKAXXVPTKLSAISVLYLXXXXXXXXXLKNYQEGMSVAEXGXR

SEQ ID NO: 9082 - protein, 38 aa, Artificial Sequence
  GFR-binding peptide
  MOD_RES (1)..(2)..(35)..(37): Xaa is C or S
XXVPTKLSATSVLYYDDMGVPTLRKHREGMSVAEXGXR

SEQ ID NO: 9083 - protein, 41 aa, Artificial Sequence
  GFR-binding peptide
  MOD_RES (6)..(7)..(39)..(41): Xaa is C or S
AVPKAXXAPTKLSAISVLYLDSSNNVILKNYQNMVVKAXGX

SEQ ID NO: 9084 - protein, 34 aa, Artificial Sequence
  GFR-binding peptide
  MOD_RES (31)..(33): Xaa is C or S
VSQDLSATSILYYIGKTPKILRKHRMIVKSXKXS

SEQ ID NO: 9085 - protein, 36 aa, Artificial Sequence
  GFR-binding peptide
  MOD_RES (3)..(4): Xaa is C or S
  MOD_RES (18)..(19)..(20)..(21)..(22): Xaa is A or G
  MOD_RES (23)..(24)..(25)..(26): Xaa is A or G or is absent
APXXVPQALSAISILYLXXXXXXXXXLKNYQMIVRS

SEQ ID NO: 9086 - protein, 36 aa, Artificial Sequence
  GFR-binding peptide
  MOD_RES (2)..(3): Xaa is C or S
  MOD_RES (17)..(18)..(19)..(20)..(21): Xaa is A or G
  MOD_RES (22)..(23)..(24)..(25): Xaa is A or G or is absent
AXXAPTKLSATSVLYYXXXXXXXXXLRKHRNMVVKA

SEQ ID NO: 9087 - protein, 34 aa, Artificial Sequence
  GFR-binding peptide
  MOD_RES (2)..(3)..(34): Xaa is C or S
PXXVPQDLSATSILYYVGRTPKVLRKHRMVVKSX

SEQ ID NO: 9088 - protein, 39 aa, Artificial Sequence
  GFR-binding peptide
  MOD_RES (4)..(5)..(37)..(39): Xaa is C or S
PKAXXVPTELSPISMLYKDENEKVVLKYHYDMVVEGXGX

SEQ ID NO: 9089 - protein, 44 aa, Artificial Sequence
  GFR-binding peptide
  MOD_RES (6)..(7)..(42)..(44): Xaa is C or S
  MOD_RES (21)..(22)..(23)..(24)..(25): Xaa is A or G
  MOD_RES (26)..(27)..(28)..(29): Xaa is A or G or is absent
KVGKAXXVPTKLSATSVLYYXXXXXXXXXLRKHREGMSVAEXGX

SEQ ID NO: 9090 - protein, 36 aa, Artificial Sequence
  GFR-binding peptide
  MOD_RES (35)..(35): Xaa is C or S
  MOD_RES (14)..(15)..(16)..(17)..(18): Xaa is A or G
  MOD_RES (19)..(20)..(21)..(22): Xaa is A or G or is absent
VPTKLSATSVLYYXXXXXXXXXLRKHREGMSVAEXG

SEQ ID NO: 9091 - protein, 33 aa, Artificial Sequence
  GFR-binding peptide
  MOD_RES (1)..(1): Xaa is C or S
  MOD_RES (15)..(16)..(17)..(18)..(19): Xaa is A or G
  MOD_RES (20)..(21)..(22)..(23): Xaa is A or G or is absent
XAPTKLSPISVLYKXXXXXXXXXLKYHYNMVVK

SEQ ID NO: 9092 - protein, 38 aa, Artificial Sequence
  GFR-binding peptide
  MOD_RES (2)..(3)..(37): Xaa is C or S
  MOD_RES (17)..(18)..(19)..(20)..(21): Xaa is A or G
  MOD_RES (22)..(23)..(24)..(25): Xaa is A or G or is absent
AXXAPTKLSATSVLYYXXXXXXXXXLRKHRNMVVKAXG

SEQ ID NO: 9093 - protein, 33 aa, Artificial Sequence
  GFR-binding peptide
  MOD_RES (1)..(33): Xaa is C or S
XVPTELSATSMLYYDENEKVVLRKHRDMVVEGX

SEQ ID NO: 9094 - protein, 33 aa, Artificial Sequence
  GFR-binding peptide
  MOD_RES (1)..(1): Xaa is C or S
  MOD_RES (15)..(16)..(17)..(18)..(19): Xaa is A or G
  MOD_RES (20)..(21)..(22)..(23): Xaa is A or G or is absent
XAPTKLSPISVLYKXXXXXXXXXLKYHYNMVVR

SEQ ID NO: 9095 - protein, 33 aa, Artificial Sequence
  GFR-binding peptide
  MOD_RES (1)..(1): Xaa is C or S
  MOD_RES (15)..(16)..(17)..(18)..(19): Xaa is A or G
  MOD_RES (20)..(21)..(22)..(23): Xaa is A or G or is absent
XVPQDLSATSILYYXXXXXXXXXLRKHRMVVKS

SEQ ID NO: 9096 - protein, 40 aa, Artificial Sequence
  GFR-binding peptide
  MOD_RES (4)..(38)..(40): Xaa is C or S
  MOD_RES (18)..(19)..(20)..(21)..(22): Xaa is A or G
  MOD_RES (23)..(24)..(25)..(26): Xaa is A or G or is absent
KPTXAPTKLNAISVLYFXXXXXXXXXLKKYRNMVVRSXGX

SEQ ID NO: 9097 - protein, 35 aa, Artificial Sequence
  GFR-binding peptide
  MOD_RES (35)..(35): Xaa is C or S
  MOD_RES (14)..(15)..(16)..(17)..(18): Xaa is A or G
  MOD_RES (19)..(20)..(21)..(22): Xaa is A or G or is absent
TQVQLSAISVLYLXXXXXXXXXLKNYQTLEDHLAX

SEQ ID NO: 9098 - protein, 44 aa, Artificial Sequence
  GFR-binding peptide
  MOD_RES (4)..(41)..(43): Xaa is C or S
NVQXRPTQVQLSPISVLYKEIVRKKPIFLKYHYTLEDHLAXKXE

SEQ ID NO: 9099 - protein, 36 aa, Artificial Sequence
  GFR-binding peptide
  MOD_RES (1)..(2)..(36): Xaa is C or S
  MOD_RES (16)..(17)..(18)..(19)..(20): Xaa is A or G
  MOD_RES (21)..(22)..(23)..(24): Xaa is A or G or is absent
XXVPTELSAISMLYLXXXXXXXXXLKNYQDMVVEGX

SEQ ID NO: 9100 - protein, 32 aa, Artificial Sequence
  GFR-binding peptide
  MOD_RES (1)..(2): Xaa is C or S
XXAPTKLSAISVLYLDDSSNVILKNYQNMVVR

SEQ ID NO: 9101 - protein, 38 aa, Artificial Sequence
  GFR-binding peptide
  MOD_RES (1)..(35)..(37): Xaa is C or S
  MOD_RES (15)..(16)..(17)..(18)..(19): Xaa is A or G
  MOD_RES (20)..(21)..(22)..(23): Xaa is A or G or is absent
XVPTELSAISMLYLXXXXXXXXXLKNYQDMVVEGXGXR

SEQ ID NO: 9102 - protein, 40 aa, Artificial Sequence
  GFR-binding peptide
  MOD_RES (6)..(7)..(40): Xaa is C or S
  MOD_RES (21)..(22)..(23)..(24)..(25): Xaa is A or G
  MOD_RES (26)..(27)..(28)..(29): Xaa is A or G or is absent
ASAAPXXVPQALSPISILYKXXXXXXXXXLKYHYMIVRSX

SEQ ID NO: 9103 - protein, 39 aa, Artificial Sequence
  GFR-binding peptide
  MOD_RES (1)..(38): Xaa is C or S
XRPTQVQLSPISVLYKEIVRKKPIFLKYHYTLEDHLAXK

SEQ ID NO: 9104 - protein, 35 aa, Artificial Sequence
  GFR-binding peptide
  MOD_RES (33)..(35): Xaa is C or S
  MOD_RES (14)..(15)..(16)..(17)..(18): Xaa is A or G
  MOD_RES (19)..(20)..(21)..(22): Xaa is A or G or is absent
VSQDLNAISILYFXXXXXXXXXLKKYRMIVKSXKX

SEQ ID NO: 9105 - protein, 34 aa, Artificial Sequence
  GFR-binding peptide
  MOD_RES (1)..(33): Xaa is C or S
XVPTELSPISMLYKDEYDKVVLKYHYEMVVEGXG

SEQ ID NO: 9106 - protein, 33 aa, Artificial Sequence
  GFR-binding peptide
  MOD_RES (1)..(2)..(33): Xaa is C or S
XXVPQDLSATSILYYVGRTPKVLRKHRMVVKSX

SEQ ID NO: 9107 - protein, 33 aa, Artificial Sequence
  GFR-binding peptide
  MOD_RES (14)..(15)..(16)..(17)..(18): Xaa is A or G
  MOD_RES (19)..(20)..(21)..(22): Xaa is A or G or is absent
VPTELNAISMLYFXXXXXXXXXLKKYREMVVEG

SEQ ID NO: 9108 - protein, 34 aa, Artificial Sequence
  GFR-binding peptide
  MOD_RES (1)..(33): Xaa is C or S
XAPTKLSAISVLYLDSSNNVILKNYQNMVVKAXG

SEQ ID NO: 9109 - protein, 39 aa, Artificial Sequence
  GFR-binding peptide
  MOD_RES (1)..(2)..(36)..(38): Xaa is C or S
  MOD_RES (16)..(17)..(18)..(19)..(20): Xaa is A or G
  MOD_RES (21)..(22)..(23)..(24): Xaa is A or G or is absent
XXAPTQLSATSVLYYXXXXXXXXXLRKHRNMVVRAXGXH

SEQ ID NO: 9110 - protein, 41 aa, Artificial Sequence
  GFR-binding peptide
  MOD_RES (4)..(5)..(39)..(41): Xaa is C or S
  MOD_RES (19)..(20)..(21)..(22)..(23): Xaa is A or G
  MOD_RES (24)..(25)..(26)..(27): Xaa is A or G or is absent
PKAXXVPTELSAISMLYLXXXXXXXXXLKNYQDMVVEGXGX

SEQ ID NO: 9111 - protein, 31 aa, Artificial Sequence
  GFR-binding peptide
  MOD_RES (31)..(31): Xaa is C or S
VSQDLNAISILYFIGKTPKILKKYRMIVKSX

SEQ ID NO: 9112 - protein, 40 aa, Artificial Sequence
  GFR-binding peptide
  MOD_RES (6)..(7): Xaa is C or S
  MOD_RES (21)..(22)..(23)..(24)..(25): Xaa is A or G
  MOD_RES (26)..(27)..(28)..(29): Xaa is A or G or is absent
KIPKAXXVPTELSATSMLYYXXXXXXXXXLRKHRDMVVEG

SEQ ID NO: 9113 - protein, 40 aa, Artificial Sequence
  GFR-binding peptide
  MOD_RES (5)..(6)..(39): Xaa is C or S
  MOD_RES (20)..(21)..(22)..(23)..(24): Xaa is A or G
  MOD_RES (25)..(26)..(27)..(28): Xaa is A or G or is absent
SAAPXXVPQALSAISILYLXXXXXXXXXLKNYQMIVRSXK

SEQ ID NO: 9114 - protein, 41 aa, Artificial Sequence
  GFR-binding peptide
  MOD_RES (4)..(5)..(38)..(40): Xaa is C or S
GKAXXVPTKLSAISVLYLDDMGVPTLKNYQEGMSVAEXGXR

SEQ ID NO: 9115 - protein, 38 aa, Artificial Sequence
  GFR-binding peptide
  MOD_RES (2)..(36)..(38): Xaa is C or S
  MOD_RES (16)..(17)..(18)..(19)..(20): Xaa is A or G
  MOD_RES (21)..(22)..(23)..(24): Xaa is A or G or is absent
TXAPTKLSATSVLYYXXXXXXXXXLRKHRNMVVRSXGX

SEQ ID NO: 9116 - protein, 37 aa, Artificial Sequence
  GFR-binding peptide
  MOD_RES (3)..(4)..(37): Xaa is C or S
  MOD_RES (18)..(19)..(20)..(21)..(22): Xaa is A or G
  MOD_RES (23)..(24)..(25)..(26): Xaa is A or G or is absent
APXXVPQALSATSILYYXXXXXXXXXLRKHRMIVRSX

SEQ ID NO: 9117 - protein, 36 aa, Artificial Sequence
  GFR-binding peptide
  MOD_RES (34)..(36): Xaa is C or S
  MOD_RES (14)..(15)..(16)..(17)..(18): Xaa is A or G
  MOD_RES (19)..(20)..(21)..(22): Xaa is A or G or is absent
VPTELSAISMLYLXXXXXXXXXLKNYQDMVVEGXGX

SEQ ID NO: 9118 - protein, 39 aa, Artificial Sequence
  GFR-binding peptide
  MOD_RES (1)..(36)..(38): Xaa is C or S
  MOD_RES (15)..(16)..(17)..(18)..(19): Xaa is A or G
  MOD_RES (20)..(21)..(22)..(23): Xaa is A or G or is absent
XVPTKLSAISVLYLXXXXXXXXXLKNYQEGMSVAEXGXR

SEQ ID NO: 9119 - protein, 38 aa, Artificial Sequence
  GFR-binding peptide
  MOD_RES (1)..(36)..(38): Xaa is C or S
  MOD_RES (15)..(16)..(17)..(18)..(19): Xaa is A or G
  MOD_RES (20)..(21)..(22)..(23): Xaa is A or G or is absent
XVPTKLSATSVLYYXXXXXXXXXLRKHREGMSVAEXGX

SEQ ID NO: 9120 - protein, 43 aa, Artificial Sequence
  GFR-binding peptide
  MOD_RES (6)..(7)..(40)..(42): Xaa is C or S
  MOD_RES (21)..(22)..(23)..(24)..(25): Xaa is A or G
  MOD_RES (26)..(27)..(28)..(29): Xaa is A or G or is absent
ASASPXXVPQDLSPISILYKXXXXXXXXXLKYHYMVVKSXKXS

SEQ ID NO: 9121 - protein, 41 aa, Artificial Sequence
  GFR-binding peptide
  MOD_RES (6)..(7)..(40): Xaa is C or S
  MOD_RES (21)..(22)..(23)..(24)..(25): Xaa is A or G
  MOD_RES (26)..(27)..(28)..(29): Xaa is A or G or is absent
ASAAPXXVPQALSPISILYKXXXXXXXXXLKYHYMIVRSXK

SEQ ID NO: 9122 - protein, 31 aa, Artificial Sequence
  GFR-binding peptide
  MOD_RES (1)..(1): Xaa is C or S
XVPQALSPISILYKVGRKPKVLKYHYMIVRS

SEQ ID NO: 9123 - protein, 37 aa, Artificial Sequence
  GFR-binding peptide
  MOD_RES (6)..(7): Xaa is C or S
ASASPXXVPQDLSATSILYYVGRTPKVLRKHRMVVKS

SEQ ID NO: 9124 - protein, 38 aa, Artificial Sequence
  GFR-binding peptide
  MOD_RES (5)..(6): Xaa is C or S
  MOD_RES (20)..(21)..(22)..(23)..(24): Xaa is A or G
  MOD_RES (25)..(26)..(27)..(28): Xaa is A or G or is absent
SAAPXXVPQALSATSILYYXXXXXXXXXLRKHRMIVRS

SEQ ID NO: 9125 - protein, 39 aa, Artificial Sequence
  GFR-binding peptide
  MOD_RES (3)..(4)..(39): Xaa is C or S
  MOD_RES (18)..(19)..(20)..(21)..(22): Xaa is A or G
  MOD_RES (23)..(24)..(25)..(26): Xaa is A or G or is absent
KAXXVPTKLNAISVLYFXXXXXXXXXLKKYREGMSVAEX

SEQ ID NO: 9126 - protein, 43 aa, Artificial Sequence
  GFR-binding peptide
  MOD_RES (6)..(7)..(41)..(43): Xaa is C or S
  MOD_RES (21)..(22)..(23)..(24)..(25): Xaa is A or G
  MOD_RES (26)..(27)..(28)..(29): Xaa is A or G or is absent
KIPKAXXVPTELSATSMLYYXXXXXXXXXLRKHRDMVVEGXGX

SEQ ID NO: 9127 - protein, 41 aa, Artificial Sequence
  GFR-binding peptide
  MOD_RES (2)..(39)..(41): Xaa is C or S
  MOD_RES (18)..(19)..(20)..(21)..(22): Xaa is A or G
  MOD_RES (23)..(24)..(25)..(26): Xaa is A or G or is absent
QXRPTQVQLSATSVLYYXXXXXXXXXLRKHRTLEDHLAXKX

SEQ ID NO: 9128 - protein, 37 aa, Artificial Sequence
  GFR-binding peptide
  MOD_RES (4)..(5)..(36): Xaa is C or S
AAPXXVPQALSAISILYLVGRKPKVLKNYQMIVRSXK

SEQ ID NO: 9129 - protein, 36 aa, Artificial Sequence
  GFR-binding peptide
  MOD_RES (4)..(36): Xaa is C or S
KPTXAPTKLSATSVLYYDDSSNVILRKHRNMVVRSX

SEQ ID NO: 9130 - protein, 32 aa, Artificial Sequence
  GFR-binding peptide
  MOD_RES (1)..(2): Xaa is C or S
XXAPTKLSATSVLYYDDSSNVILRKHRNMVVR

SEQ ID NO: 9131 - protein, 44 aa, Artificial Sequence
  GFR-binding peptide
  MOD_RES (6)..(7)..(41)..(43): Xaa is C or S
  MOD_RES (21)..(22)..(23)..(24)..(25): Xaa is A or G
  MOD_RES (26)..(27)..(28)..(29): Xaa is A or G or is absent
SIPKAXXVPTELNAISMLYFXXXXXXXXXLKKYREMVVEGXGXR

SEQ ID NO: 9132 - protein, 35 aa, Artificial Sequence
  GFR-binding peptide
  MOD_RES (16)..(17)..(18)..(19)..(20): Xaa is A or G
  MOD_RES (21)..(22)..(23)..(24): Xaa is A or G or is absent
RPTQVQLNAISVLYFXXXXXXXXXLKKYRTLEDHL

SEQ ID NO: 9133 - protein, 38 aa, Artificial Sequence
  GFR-binding peptide
  MOD_RES (5)..(6)..(38): Xaa is C or S
VPKPXXAPTKLSAISVLYLDDSSNVILKNYQNMVVRSX

SEQ ID NO: 9134 - protein, 37 aa, Artificial Sequence
  GFR-binding peptide
  MOD_RES (3)..(4)..(37): Xaa is C or S
  MOD_RES (18)..(19)..(20)..(21)..(22): Xaa is A or G
  MOD_RES (23)..(24)..(25)..(26): Xaa is A or G or is absent
APXXVPQALSAISILYLXXXXXXXXXLKNYQMIVRSX

SEQ ID NO: 9135 - protein, 38 aa, Artificial Sequence
  GFR-binding peptide
  MOD_RES (1)..(2)..(35)..(37): Xaa is C or S
XXVPTKLSAISVLYLDDMGVPTLKNYQEGMSVAEXGXR

SEQ ID NO: 9136 - protein, 35 aa, Artificial Sequence
  GFR-binding peptide
  MOD_RES (16)..(17)..(18)..(19)..(20): Xaa is A or G
  MOD_RES (21)..(22)..(23)..(24): Xaa is A or G or is absent
RPTQVQLSAISVLYLXXXXXXXXXLKNYQTLEDHL

SEQ ID NO: 9137 - protein, 34 aa, Artificial Sequence
  GFR-binding peptide
  MOD_RES (1)..(33): Xaa is C or S
XAPTKLSPISVLYKDSSNNVILKYHYNMVVKAXG

SEQ ID NO: 9138 - protein, 39 aa, Artificial Sequence
  GFR-binding peptide
  MOD_RES (4)..(5)..(38): Xaa is C or S
  MOD_RES (19)..(20)..(21)..(22)..(23): Xaa is A or G
  MOD_RES (24)..(25)..(26)..(27): Xaa is A or G or is absent
AAPXXVPQALNAISILYFXXXXXXXXXLKKYRMIVRSXK

SEQ ID NO: 9139 - protein, 39 aa, Artificial Sequence
  GFR-binding peptide
  MOD_RES (2)..(3)..(38): Xaa is C or S
  MOD_RES (17)..(18)..(19)..(20)..(21): Xaa is A or G
  MOD_RES (22)..(23)..(24)..(25): Xaa is A or G or is absent
AXXVPTKLSAISVLYLXXXXXXXXXLKNYQEGMSVAEXG

SEQ ID NO: 9140 - protein, 36 aa, Artificial Sequence
  GFR-binding peptide
  MOD_RES (1)..(2)..(33)..(35): Xaa is C or S
XXVSQDLSATSILYYIGKTPKILRKHRMIVKSXKXS

SEQ ID NO: 9141 - protein, 43 aa, Artificial Sequence
  GFR-binding peptide
  MOD_RES (5)..(6)..(40)..(42): Xaa is C or S
  MOD_RES (20)..(21)..(22)..(23)..(24): Xaa is A or G
  MOD_RES (25)..(26)..(27)..(28): Xaa is A or G or is absent
VPKPXXAPTKLNAISVLYFXXXXXXXXXLKKYRNMVVRSXGXH

SEQ ID NO: 9142 - protein, 38 aa, Artificial Sequence
  GFR-binding peptide
  MOD_RES (4)..(5)..(37): Xaa is C or S
PKAXXVPTELSATSMLYYDENEKVVLRKHRDMVVEGXG

SEQ ID NO: 9143 - protein, 36 aa, Artificial Sequence
  GFR-binding peptide
  MOD_RES (5)..(6): Xaa is C or S
IPKAXXVPTELSPISMLYKDENEKVVLKYHYDMVVE

SEQ ID NO: 9144 - protein, 36 aa, Artificial Sequence
  GFR-binding peptide
  MOD_RES (4)..(5): Xaa is C or S
PKPXXAPTQLSATSVLYYDDSSNVILRKHRNMVVRA

SEQ ID NO: 9145 - protein, 36 aa, Artificial Sequence
  GFR-binding peptide
  MOD_RES (3)..(4): Xaa is C or S
  MOD_RES (18)..(19)..(20)..(21)..(22): Xaa is A or G
  MOD_RES (23)..(24)..(25)..(26): Xaa is A or G or is absent
KAXXVPTELSATSMLYYXXXXXXXXXLRKHRDMVVE

SEQ ID NO: 9146 - protein, 32 aa, Artificial Sequence
  GFR-binding peptide
  MOD_RES (1)..(2): Xaa is C or S
XXAPTQLSAISVLYLDDSSNVILKNYQNMVVR

SEQ ID NO: 9147 - protein, 34 aa, Artificial Sequence
  GFR-binding peptide
  MOD_RES (32)..(34): Xaa is C or S
APTKLSPISVLYKDSSNNVILKYHYNMVVKAXGX

SEQ ID NO: 9148 - protein, 40 aa, Artificial Sequence
  GFR-binding peptide
  MOD_RES (3)..(37)..(39): Xaa is C or S
  MOD_RES (17)..(18)..(19)..(20)..(21): Xaa is A or G
  MOD_RES (22)..(23)..(24)..(25): Xaa is A or G or is absent
PTXAPTKLSAISVLYLXXXXXXXXXLKNYQNMVVRSXGXH

SEQ ID NO: 9149 - protein, 42 aa, Artificial Sequence
  GFR-binding peptide
  MOD_RES (4)..(5)..(39)..(41): Xaa is C or S
  MOD_RES (19)..(20)..(21)..(22)..(23): Xaa is A or G
  MOD_RES (24)..(25)..(26)..(27): Xaa is A or G or is absent
PKAXXAPTKLSAISVLYLXXXXXXXXXLKNYQNMVVKAXGXH

SEQ ID NO: 9150 - protein, 34 aa, Artificial Sequence
  GFR-binding peptide
  MOD_RES (3)..(4): Xaa is C or S
APXXVPQALSATSILYYVGRKPKVLRKHRMIVRS

SEQ ID NO: 9151 - protein, 38 aa, Artificial Sequence
  GFR-binding peptide
  MOD_RES (35)..(37): Xaa is C or S
TQVQLSPISVLYKEIVRKKPIFLKYHYTLEDHLAXKXE

SEQ ID NO: 9152 - protein, 35 aa, Artificial Sequence
  GFR-binding peptide
  MOD_RES (34)..(34): Xaa is C or S
  MOD_RES (14)..(15)..(16)..(17)..(18): Xaa is A or G
  MOD_RES (19)..(20)..(21)..(22): Xaa is A or G or is absent
APTKLSAISVLYLXXXXXXXXXLKNYQNMVVRSXG

SEQ ID NO: 9153 - protein, 34 aa, Artificial Sequence
  GFR-binding peptide
  MOD_RES (33)..(33): Xaa is C or S
  MOD_RES (14)..(15)..(16)..(17)..(18): Xaa is A or G
  MOD_RES (19)..(20)..(21)..(22): Xaa is A or G or is absent
VPQALSAISILYLXXXXXXXXXLKNYQMIVRSXK

SEQ ID NO: 9154 - protein, 35 aa, Artificial Sequence
  GFR-binding peptide
RPTQVQLSATSVLYYEIVRKKPIFLRKHRTLEDHL

SEQ ID NO: 9155 - protein, 39 aa, Artificial Sequence
  GFR-binding peptide
  MOD_RES (4)..(5)..(39): Xaa is C or S
  MOD_RES (19)..(20)..(21)..(22)..(23): Xaa is A or G
  MOD_RES (24)..(25)..(26)..(27): Xaa is A or G or is absent
PKAXXVPTELNAISMLYFXXXXXXXXXLKKYREMVVEGX

SEQ ID NO: 9156 - protein, 40 aa, Artificial Sequence
  GFR-binding peptide
  MOD_RES (2)..(3)..(38)..(40): Xaa is C or S
  MOD_RES (17)..(18)..(19)..(20)..(21): Xaa is A or G
  MOD_RES (22)..(23)..(24)..(25): Xaa is A or G or is absent
AXXVPTKLNAISVLYFXXXXXXXXXLKKYREGMSVAEXGX

SEQ ID NO: 9157 - protein, 35 aa, Artificial Sequence
  GFR-binding peptide
  MOD_RES (34)..(34): Xaa is C or S
  MOD_RES (14)..(15)..(16)..(17)..(18): Xaa is A or G
  MOD_RES (19)..(20)..(21)..(22): Xaa is A or G or is absent
VPTELNAISMLYFXXXXXXXXXLKKYRDMVVEGXG

SEQ ID NO: 9158 - protein, 37 aa, Artificial Sequence
  GFR-binding peptide
  MOD_RES (4)..(5)..(37): Xaa is C or S
PKPXXAPTQLSPISVLYKDDSSNVILKYHYNMVVRAX

SEQ ID NO: 9159 - protein, 37 aa, Artificial Sequence
  GFR-binding peptide
  MOD_RES (37)..(37): Xaa is C or S
RPTQVQLSAISVLYLEIVRKKPIFLKNYQTLEDHLAX

SEQ ID NO: 9160 - protein, 43 aa, Artificial Sequence
  GFR-binding peptide
  MOD_RES (5)..(6)..(41)..(43): Xaa is C or S
  MOD_RES (20)..(21)..(22)..(23)..(24): Xaa is A or G
  MOD_RES (25)..(26)..(27)..(28): Xaa is A or G or is absent
VGKAXXVPTKLSATSVLYYXXXXXXXXXLRKHREGMSVAEXGX

SEQ ID NO: 9161 - protein, 40 aa, Artificial Sequence
  GFR-binding peptide
  MOD_RES (4)..(5)..(38)..(40): Xaa is C or S
  MOD_RES (19)..(20)..(21)..(22)..(23): Xaa is A or G
  MOD_RES (24)..(25)..(26)..(27): Xaa is A or G or is absent
ASPXXVPQDLNAISILYFXXXXXXXXXLKKYRMVVKSXKX

SEQ ID NO: 9162 - protein, 36 aa, Artificial Sequence
  GFR-binding peptide
  MOD_RES (1)..(35): Xaa is C or S
  MOD_RES (15)..(16)..(17)..(18)..(19): Xaa is A or G
  MOD_RES (20)..(21)..(22)..(23): Xaa is A or G or is absent
XVPTELSAISMLYLXXXXXXXXXLKNYQEMVVEGXG

SEQ ID NO: 9163 - protein, 41 aa, Artificial Sequence
  GFR-binding peptide
  MOD_RES (6)..(7)..(41): Xaa is C or S
  MOD_RES (21)..(22)..(23)..(24)..(25): Xaa is A or G
  MOD_RES (26)..(27)..(28)..(29): Xaa is A or G or is absent
AVPKAXXAPTKLSPISVLYKXXXXXXXXXLKYHYNMVVKAX

SEQ ID NO: 9164 - protein, 34 aa, Artificial Sequence
  GFR-binding peptide
  MOD_RES (2)..(3): Xaa is C or S
PXXAPTKLSPISVLYKDDSSNVILKYHYNMVVRS

SEQ ID NO: 9165 - protein, 41 aa, Artificial Sequence
  GFR-binding peptide
  MOD_RES (6)..(7)..(41): Xaa is C or S
  MOD_RES (21)..(22)..(23)..(24)..(25): Xaa is A or G
  MOD_RES (26)..(27)..(28)..(29): Xaa is A or G or is absent
KIPKAXXVPTELSAISMLYLXXXXXXXXXLKNYQDMVVEGX

SEQ ID NO: 9166 - protein, 35 aa, Artificial Sequence
  GFR-binding peptide
  MOD_RES (32)..(34): Xaa is C or S
APTQLSPISVLYKDDSSNVILKYHYNMVVRAXGXH

SEQ ID NO: 9167 - protein, 38 aa, Artificial Sequence
  GFR-binding peptide
  MOD_RES (5)..(6): Xaa is C or S
  MOD_RES (20)..(21)..(22)..(23)..(24): Xaa is A or G
  MOD_RES (25)..(26)..(27)..(28): Xaa is A or G or is absent
VPKPXXAPTQLSATSVLYYXXXXXXXXXLRKHRNMVVR

SEQ ID NO: 9168 - protein, 40 aa, Artificial Sequence
  GFR-binding peptide
  MOD_RES (37)..(39): Xaa is C or S
  MOD_RES (16)..(17)..(18)..(19)..(20): Xaa is A or G
  MOD_RES (21)..(22)..(23)..(24): Xaa is A or G or is absent
RPTQVQLNAISVLYFXXXXXXXXXLKKYRTLEDHLAXKXE

SEQ ID NO: 9169 - protein, 34 aa, Artificial Sequence
  GFR-binding peptide
  MOD_RES (3)..(3): Xaa is C or S
PTXAPTKLSATSVLYYDDSSNVILRKHRNMVVRS

SEQ ID NO: 9170 - protein, 42 aa, Artificial Sequence
  GFR-binding peptide
  MOD_RES (6)..(7)..(41): Xaa is C or S
  MOD_RES (21)..(22)..(23)..(24)..(25): Xaa is A or G
  MOD_RES (26)..(27)..(28)..(29): Xaa is A or G or is absent
SIPKAXXVPTELSPISMLYKXXXXXXXXXLKYHYEMVVEGXG

SEQ ID NO: 9171 - protein, 32 aa, Artificial Sequence
  GFR-binding peptide
  MOD_RES (1)..(2): Xaa is C or S
XXAPTKLSPISVLYKDSSNNVILKYHYNMVVK

SEQ ID NO: 9172 - protein, 37 aa, Artificial Sequence
  GFR-binding peptide
  MOD_RES (2)..(3)..(37): Xaa is C or S
  MOD_RES (17)..(18)..(19)..(20)..(21): Xaa is A or G
  MOD_RES (22)..(23)..(24)..(25): Xaa is A or G or is absent
PXXAPTKLNAISVLYFXXXXXXXXXLKKYRNMVVRSX

SEQ ID NO: 9173 - protein, 41 aa, Artificial Sequence
  GFR-binding peptide
  MOD_RES (5)..(6)..(38)..(40): Xaa is C or S
IPKAXXVPTELSATSMLYYDENEKVVLRKHRDMVVEGXGXR

SEQ ID NO: 9174 - protein, 39 aa, Artificial Sequence
  GFR-binding peptide
  MOD_RES (3)..(4)..(37)..(39): Xaa is C or S
KAXXVPTKLNAISVLYFDDMGVPTLKKYREGMSVAEXGX

SEQ ID NO: 9175 - protein, 35 aa, Artificial Sequence
  GFR-binding peptide
  MOD_RES (1)..(34): Xaa is C or S
  MOD_RES (15)..(16)..(17)..(18)..(19): Xaa is A or G
  MOD_RES (20)..(21)..(22)..(23): Xaa is A or G or is absent
XVPQALSATSILYYXXXXXXXXXLRKHRMIVRSXK

SEQ ID NO: 9176 - protein, 34 aa, Artificial Sequence
  GFR-binding peptide
RPTQVQLSAISVLYLEIVRKKPIFLKNYQTLEDH

SEQ ID NO: 9177 - protein, 38 aa, Artificial Sequence
  GFR-binding peptide
  MOD_RES (37)..(37): Xaa is C or S
  MOD_RES (16)..(17)..(18)..(19)..(20): Xaa is A or G
  MOD_RES (21)..(22)..(23)..(24): Xaa is A or G or is absent
RPTQVQLSPISVLYKXXXXXXXXXLKYHYTLEDHLAXK

SEQ ID NO: 9178 - protein, 36 aa, Artificial Sequence
  GFR-binding peptide
  MOD_RES (35)..(35): Xaa is C or S
TQVQLSATSVLYYEIVRKKPIFLRKHRTLEDHLAXK

SEQ ID NO: 9179 - protein, 32 aa, Artificial Sequence
  GFR-binding peptide
  MOD_RES (1)..(1): Xaa is C or S
XAPTKLSATSVLYYDDSSNVILRKHRNMVVRS

SEQ ID NO: 9180 - protein, 32 aa, Artificial Sequence
  GFR-binding peptide
  MOD_RES (1)..(2): Xaa is C or S
XXAPTQLSPISVLYKDDSSNVILKYHYNMVVR

SEQ ID NO: 9181 - protein, 35 aa, Artificial Sequence
  GFR-binding peptide
  MOD_RES (2)..(3): Xaa is C or S
  MOD_RES (17)..(18)..(19)..(20)..(21): Xaa is A or G
  MOD_RES (22)..(23)..(24)..(25): Xaa is A or G or is absent
PXXVSQDLSATSILYYXXXXXXXXXLRKHRMIVKS

SEQ ID NO: 9182 - protein, 38 aa, Artificial Sequence
  GFR-binding peptide
  MOD_RES (2)..(3)..(37): Xaa is C or S
  MOD_RES (17)..(18)..(19)..(20)..(21): Xaa is A or G
  MOD_RES (22)..(23)..(24)..(25): Xaa is A or G or is absent
AXXAPTKLSAISVLYLXXXXXXXXXLKNYQNMVVKAXG

SEQ ID NO: 9183 - protein, 36 aa, Artificial Sequence
  GFR-binding peptide
  MOD_RES (1)..(2)..(36): Xaa is C or S
  MOD_RES (16)..(17)..(18)..(19)..(20): Xaa is A or G
  MOD_RES (21)..(22)..(23)..(24): Xaa is A or G or is absent
XXVPTELSATSMLYYXXXXXXXXXLRKHRDMVVEGX

SEQ ID NO: 9184 - protein, 38 aa, Artificial Sequence
  GFR-binding peptide
  MOD_RES (5)..(6): Xaa is C or S
  MOD_RES (20)..(21)..(22)..(23)..(24): Xaa is A or G
  MOD_RES (25)..(26)..(27)..(28): Xaa is A or G or is absent
VPKPXXAPTKLNAISVLYFXXXXXXXXXLKKYRNMVVR

SEQ ID NO: 9185 - protein, 32 aa, Artificial Sequence
  GFR-binding peptide
  MOD_RES (1)..(32): Xaa is C or S
XVSQDLSPISILYKIGKTPKILKYHYMIVKSX

SEQ ID NO: 9186 - protein, 39 aa, Artificial Sequence
  GFR-binding peptide
  MOD_RES (3)..(4)..(38): Xaa is C or S
  MOD_RES (18)..(19)..(20)..(21)..(22): Xaa is A or G
  MOD_RES (23)..(24)..(25)..(26): Xaa is A or G or is absent
KAXXVPTELSAISMLYLXXXXXXXXXLKNYQEMVVEGXG

SEQ ID NO: 9187 - protein, 39 aa, Artificial Sequence
  GFR-binding peptide
  MOD_RES (5)..(6): Xaa is C or S
  MOD_RES (20)..(21)..(22)..(23)..(24): Xaa is A or G
  MOD_RES (25)..(26)..(27)..(28): Xaa is A or G or is absent
VPKAXXAPTKLSAISVLYLXXXXXXXXXLKNYQNMVVKA

SEQ ID NO: 9188 - protein, 38 aa, Artificial Sequence
  GFR-binding peptide
  MOD_RES (2)..(3)..(37): Xaa is C or S
  MOD_RES (17)..(18)..(19)..(20)..(21): Xaa is A or G
  MOD_RES (22)..(23)..(24)..(25): Xaa is A or G or is absent
AXXVPTELSAISMLYLXXXXXXXXXLKNYQDMVVEGXG

SEQ ID NO: 9189 - protein, 38 aa, Artificial Sequence
  GFR-binding peptide
  MOD_RES (2)..(3)..(37): Xaa is C or S
  MOD_RES (17)..(18)..(19)..(20)..(21): Xaa is A or G
  MOD_RES (22)..(23)..(24)..(25): Xaa is A or G or is absent
AXXVPTELSATSMLYYXXXXXXXXXLRKHREMVVEGXG

SEQ ID NO: 9190 - protein, 42 aa, Artificial Sequence
  GFR-binding peptide
  MOD_RES (5)..(6)..(40)..(42): Xaa is C or S
  MOD_RES (20)..(21)..(22)..(23)..(24): Xaa is A or G
  MOD_RES (25)..(26)..(27)..(28): Xaa is A or G or is absent
IPKAXXVPTELSATSMLYYXXXXXXXXXLRKHREMVVEGXGX

SEQ ID NO: 9191 - protein, 35 aa, Artificial Sequence
  GFR-binding peptide
  MOD_RES (34)..(34): Xaa is C or S
  MOD_RES (14)..(15)..(16)..(17)..(18): Xaa is A or G
  MOD_RES (19)..(20)..(21)..(22): Xaa is A or G or is absent
APTKLNAISVLYFXXXXXXXXXLKKYRNMVVKAXG

SEQ ID NO: 9192 - protein, 40 aa, Artificial Sequence
  GFR-binding peptide
  MOD_RES (5)..(6)..(40): Xaa is C or S
  MOD_RES (20)..(21)..(22)..(23)..(24): Xaa is A or G
  MOD_RES (25)..(26)..(27)..(28): Xaa is A or G or is absent
VPKAXXAPTKLSAISVLYLXXXXXXXXXLKNYQNMVVKAX

SEQ ID NO: 9193 - protein, 35 aa, Artificial Sequence
  GFR-binding peptide
  MOD_RES (4)..(5): Xaa is C or S
ASPXXVSQDLSPISILYKIGKTPKILKYHYMIVKS

SEQ ID NO: 9194 - protein, 40 aa, Artificial Sequence
  GFR-binding peptide
  MOD_RES (37)..(39): Xaa is C or S
  MOD_RES (16)..(17)..(18)..(19)..(20): Xaa is A or G
  MOD_RES (21)..(22)..(23)..(24): Xaa is A or G or is absent
RPTQVQLSATSVLYYXXXXXXXXXLRKHRTLEDHLAXKXE

SEQ ID NO: 9195 - protein, 40 aa, Artificial Sequence
  GFR-binding peptide
  MOD_RES (3)..(4)..(38)..(40): Xaa is C or S
  MOD_RES (18)..(19)..(20)..(21)..(22): Xaa is A or G
  MOD_RES (23)..(24)..(25)..(26): Xaa is A or G or is absent
KAXXVPTELNAISMLYFXXXXXXXXXLKKYREMVVEGXGX

SEQ ID NO: 9196 - protein, 35 aa, Artificial Sequence
  GFR-binding peptide
  MOD_RES (2)..(3): Xaa is C or S
  MOD_RES (17)..(18)..(19)..(20)..(21): Xaa is A or G
  MOD_RES (22)..(23)..(24)..(25): Xaa is A or G or is absent
AXXVPTELSPISMLYKXXXXXXXXXLKYHYDMVVE

SEQ ID NO: 9197 - protein, 31 aa, Artificial Sequence
  GFR-binding peptide
APTQLSAISVLYLDDSSNVILKNYQNMVVRA

SEQ ID NO: 9198 - protein, 36 aa, Artificial Sequence
  GFR-binding peptide
  MOD_RES (1)..(34)..(36): Xaa is C or S
  MOD_RES (15)..(16)..(17)..(18)..(19): Xaa is A or G
  MOD_RES (20)..(21)..(22)..(23): Xaa is A or G or is absent
XVPQALSAISILYLXXXXXXXXXLKNYQMIVRSXKX

SEQ ID NO: 9199 - protein, 33 aa, Artificial Sequence
  GFR-binding peptide
  MOD_RES (1)..(33): Xaa is C or S
XAPTQLSATSVLYYDDSSNVILRKHRNMVVRAX

SEQ ID NO: 9200 - protein, 39 aa, Artificial Sequence
  GFR-binding peptide
  MOD_RES (6)..(7): Xaa is C or S
  MOD_RES (21)..(22)..(23)..(24)..(25): Xaa is A or G
  MOD_RES (26)..(27)..(28)..(29): Xaa is A or G or is absent
YVPKPXXAPTKLSPISVLYKXXXXXXXXXLKYHYNMVVR

SEQ ID NO: 9201 - protein, 43 aa, Artificial Sequence
  GFR-binding peptide
  MOD_RES (3)..(40)..(42): Xaa is C or S
  MOD_RES (19)..(20)..(21)..(22)..(23): Xaa is A or G
  MOD_RES (24)..(25)..(26)..(27): Xaa is A or G or is absent
VQXRPTQVQLNAISVLYFXXXXXXXXXLKKYRTLEDHLAXKXE

SEQ ID NO: 9202 - protein, 34 aa, Artificial Sequence
  GFR-binding peptide
  MOD_RES (31)..(33): Xaa is C or S
VPQDLNAISILYFVGRTPKVLKKYRMVVKSXKXS

SEQ ID NO: 9203 - protein, 41 aa, Artificial Sequence
  GFR-binding peptide
  MOD_RES (4)..(38)..(40): Xaa is C or S
  MOD_RES (18)..(19)..(20)..(21)..(22): Xaa is A or G
  MOD_RES (23)..(24)..(25)..(26): Xaa is A or G or is absent
KPTXAPTKLSPISVLYKXXXXXXXXXLKYHYNMVVRSXGXH

SEQ ID NO: 9204 - protein, 37 aa, Artificial Sequence
  GFR-binding peptide
  MOD_RES (35)..(37): Xaa is C or S
TQVQLSPISVLYKEIVRKKPIFLKYHYTLEDHLAXKX

SEQ ID NO: 9205 - protein, 37 aa, Artificial Sequence
  GFR-binding peptide
  MOD_RES (2)..(3)..(35)..(37): Xaa is C or S
PXXAPTKLSPISVLYKDDSSNVILKYHYNMVVRSXGX

SEQ ID NO: 9206 - protein, 37 aa, Artificial Sequence
  GFR-binding peptide
  MOD_RES (4)..(5)..(37): Xaa is C or S
PKPXXAPTKLSATSVLYYDDSSNVILRKHRNMVVRSX

SEQ ID NO: 9207 - protein, 32 aa, Artificial Sequence
  GFR-binding peptide
  MOD_RES (1)..(2): Xaa is C or S
XXVPQDLSATSILYYVGRTPKVLRKHRMVVKS

SEQ ID NO: 9208 - protein, 35 aa, Artificial Sequence
  GFR-binding peptide
  MOD_RES (1)..(35): Xaa is C or S
  MOD_RES (15)..(16)..(17)..(18)..(19): Xaa is A or G
  MOD_RES (20)..(21)..(22)..(23): Xaa is A or G or is absent
XVPTELSPISMLYKXXXXXXXXXLKYHYEMVVEGX

SEQ ID NO: 9209 - protein, 37 aa, Artificial Sequence
  GFR-binding peptide
  MOD_RES (35)..(37): Xaa is C or S
  MOD_RES (14)..(15)..(16)..(17)..(18): Xaa is A or G
  MOD_RES (19)..(20)..(21)..(22): Xaa is A or G or is absent
VPTKLSPISVLYKXXXXXXXXXLKYHYEGMSVAEXGX

SEQ ID NO: 9210 - protein, 42 aa, Artificial Sequence
  GFR-binding peptide
  MOD_RES (3)..(4)..(39)..(41): Xaa is C or S
  MOD_RES (18)..(19)..(20)..(21)..(22): Xaa is A or G
  MOD_RES (23)..(24)..(25)..(26): Xaa is A or G or is absent
KAXXVPTKLNAISVLYFXXXXXXXXXLKKYREGMSVAEXGXR

SEQ ID NO: 9211 - protein, 42 aa, Artificial Sequence
  GFR-binding peptide
  MOD_RES (5)..(6)..(40)..(42): Xaa is C or S
  MOD_RES (20)..(21)..(22)..(23)..(24): Xaa is A or G
  MOD_RES (25)..(26)..(27)..(28): Xaa is A or G or is absent
VPKPXXAPTQLSATSVLYYXXXXXXXXXLRKHRNMVVRAXGX

SEQ ID NO: 9212 - protein, 40 aa, Artificial Sequence
  GFR-binding peptide
  MOD_RES (5)..(6)..(38)..(40): Xaa is C or S
VPKPXXAPTQLSPISVLYKDDSSNVILKYHYNMVVRAXGX

SEQ ID NO: 9213 - protein, 36 aa, Artificial Sequence
  GFR-binding peptide
  MOD_RES (1)..(35): Xaa is C or S
  MOD_RES (15)..(16)..(17)..(18)..(19): Xaa is A or G
  MOD_RES (20)..(21)..(22)..(23): Xaa is A or G or is absent
XAPTQLNAISVLYFXXXXXXXXXLKKYRNMVVRAXG

SEQ ID NO: 9214 - protein, 40 aa, Artificial Sequence
  GFR-binding peptide
  MOD_RES (3)..(40): Xaa is C or S
VQXRPTQVQLSPISVLYKEIVRKKPIFLKYHYTLEDHLAX

SEQ ID NO: 9215 - protein, 38 aa, Artificial Sequence
  GFR-binding peptide
  MOD_RES (1)..(2)..(37): Xaa is C or S
  MOD_RES (16)..(17)..(18)..(19)..(20): Xaa is A or G
  MOD_RES (21)..(22)..(23)..(24): Xaa is A or G or is absent
XXVPTKLSAISVLYLXXXXXXXXXLKNYQEGMSVAEXG

SEQ ID NO: 9216 - protein, 38 aa, Artificial Sequence
  GFR-binding peptide
  MOD_RES (2)..(3)..(38): Xaa is C or S
  MOD_RES (17)..(18)..(19)..(20)..(21): Xaa is A or G
  MOD_RES (22)..(23)..(24)..(25): Xaa is A or G or is absent
AXXVPTKLSPISVLYKXXXXXXXXXLKYHYEGMSVAEX

SEQ ID NO: 9217 - protein, 38 aa, Artificial Sequence
  GFR-binding peptide
  MOD_RES (4)..(5): Xaa is C or S
  MOD_RES (19)..(20)..(21)..(22)..(23): Xaa is A or G
  MOD_RES (24)..(25)..(26)..(27): Xaa is A or G or is absent
PKAXXVPTELSATSMLYYXXXXXXXXXLRKHRDMVVEG

SEQ ID NO: 9218 - protein, 36 aa, Artificial Sequence
  GFR-binding peptide
  MOD_RES (2)..(3): Xaa is C or S
  MOD_RES (17)..(18)..(19)..(20)..(21): Xaa is A or G
  MOD_RES (22)..(23)..(24)..(25): Xaa is A or G or is absent
AXXVPTELSAISMLYLXXXXXXXXXLKNYQDMVVEG

SEQ ID NO: 9219 - protein, 39 aa, Artificial Sequence
  GFR-binding peptide
  MOD_RES (2)..(3)..(37)..(39): Xaa is C or S
  MOD_RES (17)..(18)..(19)..(20)..(21): Xaa is A or G
  MOD_RES (22)..(23)..(24)..(25): Xaa is A or G or is absent
AXXVPTELSPISMLYKXXXXXXXXXLKYHYEMVVEGXGX

SEQ ID NO: 9220 - protein, 38 aa, Artificial Sequence
  GFR-binding peptide
  MOD_RES (6)..(6): Xaa is C or S
  MOD_RES (20)..(21)..(22)..(23)..(24): Xaa is A or G
  MOD_RES (25)..(26)..(27)..(28): Xaa is A or G or is absent
VTKPTXAPTKLSAISVLYLXXXXXXXXXLKNYQNMVVR

SEQ ID NO: 9221 - protein, 33 aa, Artificial Sequence
  GFR-binding peptide
  MOD_RES (14)..(15)..(16)..(17)..(18): Xaa is A or G
  MOD_RES (19)..(20)..(21)..(22): Xaa is A or G or is absent
APTKLNAISVLYFXXXXXXXXXLKKYRNMVVKA

SEQ ID NO: 9222 - protein, 35 aa, Artificial Sequence
  GFR-binding peptide
  MOD_RES (2)..(3)..(34): Xaa is C or S
PXXVPQDLSAISILYLVGRTPKVLKNYQMVVKSXK

SEQ ID NO: 9223 - protein, 36 aa, Artificial Sequence
  GFR-binding peptide
  MOD_RES (2)..(3): Xaa is C or S
  MOD_RES (17)..(18)..(19)..(20)..(21): Xaa is A or G
  MOD_RES (22)..(23)..(24)..(25): Xaa is A or G or is absent
AXXVPTELNAISMLYFXXXXXXXXXLKKYRDMVVEG

SEQ ID NO: 9224 - protein, 36 aa, Artificial Sequence
  GFR-binding peptide
  MOD_RES (1)..(2): Xaa is C or S
  MOD_RES (16)..(17)..(18)..(19)..(20): Xaa is A or G
  MOD_RES (21)..(22)..(23)..(24): Xaa is A or G or is absent
XXVPTKLSPISVLYKXXXXXXXXXLKYHYEGMSVAE

SEQ ID NO: 9225 - protein, 42 aa, Artificial Sequence
  GFR-binding peptide
  MOD_RES (5)..(6)..(40)..(42): Xaa is C or S
  MOD_RES (20)..(21)..(22)..(23)..(24): Xaa is A or G
  MOD_RES (25)..(26)..(27)..(28): Xaa is A or G or is absent
IPKAXXVPTELNAISMLYFXXXXXXXXXLKKYREMVVEGXGX

SEQ ID NO: 9226 - protein, 34 aa, Artificial Sequence
  GFR-binding peptide
  MOD_RES (16)..(17)..(18)..(19)..(20): Xaa is A or G
  MOD_RES (21)..(22)..(23)..(24): Xaa is A or G or is absent
RPTQVQLSATSVLYYXXXXXXXXXLRKHRTLEDH

SEQ ID NO: 9227 - protein, 34 aa, Artificial Sequence
  GFR-binding peptide
  MOD_RES (1)..(2): Xaa is C or S
  MOD_RES (16)..(17)..(18)..(19)..(20): Xaa is A or G
  MOD_RES (21)..(22)..(23)..(24): Xaa is A or G or is absent
XXVPQALSPISILYKXXXXXXXXXLKYHYMIVRS

SEQ ID NO: 9228 - protein, 38 aa, Artificial Sequence
  GFR-binding peptide
  MOD_RES (1)..(2)..(36)..(38): Xaa is C or S
  MOD_RES (16)..(17)..(18)..(19)..(20): Xaa is A or G
  MOD_RES (21)..(22)..(23)..(24): Xaa is A or G or is absent
XXVPTELNAISMLYFXXXXXXXXXLKKYRDMVVEGXGX

SEQ ID NO: 9229 - protein, 34 aa, Artificial Sequence
  GFR-binding peptide
  MOD_RES (2)..(3)..(34): Xaa is C or S
PXXVSQDLSPISILYKIGKTPKILKYHYMIVKSX

SEQ ID NO: 9230 - protein, 40 aa, Artificial Sequence
  GFR-binding peptide
  MOD_RES (5)..(6)..(39): Xaa is C or S
  MOD_RES (20)..(21)..(22)..(23)..(24): Xaa is A or G
  MOD_RES (25)..(26)..(27)..(28): Xaa is A or G or is absent
SAAPXXVPQALSPISILYKXXXXXXXXXLKYHYMIVRSXK

SEQ ID NO: 9231 - protein, 39 aa, Artificial Sequence
  GFR-binding peptide
  MOD_RES (1)..(2)..(36)..(38): Xaa is C or S
  MOD_RES (16)..(17)..(18)..(19)..(20): Xaa is A or G
  MOD_RES (21)..(22)..(23)..(24): Xaa is A or G or is absent
XXVPTELSPISMLYKXXXXXXXXXLKYHYDMVVEGXGXR

SEQ ID NO: 9232 - protein, 32 aa, Artificial Sequence
  GFR-binding peptide
  MOD_RES (1)..(2): Xaa is C or S
XXAPTKLSAISVLYLDSSNNVILKNYQNMVVK

SEQ ID NO: 9233 - protein, 35 aa, Artificial Sequence
  GFR-binding peptide
  MOD_RES (2)..(3): Xaa is C or S
  MOD_RES (17)..(18)..(19)..(20)..(21): Xaa is A or G
  MOD_RES (22)..(23)..(24)..(25): Xaa is A or G or is absent
PXXAPTKLSAISVLYLXXXXXXXXXLKNYQNMVVR

SEQ ID NO: 9234 - protein, 39 aa, Artificial Sequence
  GFR-binding peptide
  MOD_RES (37)..(39): Xaa is C or S
  MOD_RES (16)..(17)..(18)..(19)..(20): Xaa is A or G
  MOD_RES (21)..(22)..(23)..(24): Xaa is A or G or is absent
RPTQVQLSAISVLYLXXXXXXXXXLKNYQTLEDHLAXKX

SEQ ID NO: 9235 - protein, 37 aa, Artificial Sequence
  GFR-binding peptide
  MOD_RES (2)..(3)..(36): Xaa is C or S
  MOD_RES (17)..(18)..(19)..(20)..(21): Xaa is A or G
  MOD_RES (22)..(23)..(24)..(25): Xaa is A or G or is absent
PXXVSQDLNAISILYFXXXXXXXXXLKKYRMIVKSXK

SEQ ID NO: 9236 - protein, 37 aa, Artificial Sequence
  GFR-binding peptide
  MOD_RES (4)..(5): Xaa is C or S
GKAXXVPTKLSAISVLYLDDMGVPTLKNYQEGMSVAE

SEQ ID NO: 9237 - protein, 33 aa, Artificial Sequence
  GFR-binding peptide
  MOD_RES (14)..(15)..(16)..(17)..(18): Xaa is A or G
  MOD_RES (19)..(20)..(21)..(22): Xaa is A or G or is absent
APTKLSAISVLYLXXXXXXXXXLKNYQNMVVKA

SEQ ID NO: 9238 - protein, 37 aa, Artificial Sequence
  GFR-binding peptide
  MOD_RES (1)..(2)..(35)..(37): Xaa is C or S
  MOD_RES (16)..(17)..(18)..(19)..(20): Xaa is A or G
  MOD_RES (21)..(22)..(23)..(24): Xaa is A or G or is absent
XXVSQDLNAISILYFXXXXXXXXXLKKYRMIVKSXKX

SEQ ID NO: 9239 - protein, 33 aa, Artificial Sequence
  GFR-binding peptide
  MOD_RES (1)..(33): Xaa is C or S
XVPTELSPISMLYKDEYDKVVLKYHYEMVVEGX

SEQ ID NO: 9240 - protein, 41 aa, Artificial Sequence
  GFR-binding peptide
  MOD_RES (5)..(6)..(39)..(41): Xaa is C or S
  MOD_RES (20)..(21)..(22)..(23)..(24): Xaa is A or G
  MOD_RES (25)..(26)..(27)..(28): Xaa is A or G or is absent
SASPXXVSQDLSPISILYKXXXXXXXXXLKYHYMIVKSXKX

SEQ ID NO: 9241 - protein, 36 aa, Artificial Sequence
  GFR-binding peptide
  MOD_RES (1)..(34)..(36): Xaa is C or S
  MOD_RES (15)..(16)..(17)..(18)..(19): Xaa is A or G
  MOD_RES (20)..(21)..(22)..(23): Xaa is A or G or is absent
XVPQALSATSILYYXXXXXXXXXLRKHRMIVRSXKX

SEQ ID NO: 9242 - protein, 39 aa, Artificial Sequence
  GFR-binding peptide
  MOD_RES (2)..(3)..(37)..(39): Xaa is C or S
  MOD_RES (17)..(18)..(19)..(20)..(21): Xaa is A or G
  MOD_RES (22)..(23)..(24)..(25): Xaa is A or G or is absent
PXXAPTQLNAISVLYFXXXXXXXXXLKKYRNMVVRAXGX

SEQ ID NO: 9243 - protein, 45 aa, Artificial Sequence
  GFR-binding peptide
  MOD_RES (5)..(42)..(44): Xaa is C or S
  MOD_RES (21)..(22)..(23)..(24)..(25): Xaa is A or G
  MOD_RES (26)..(27)..(28)..(29): Xaa is A or G or is absent
RNVQXRPTQVQLSATSVLYYXXXXXXXXXLRKHRTLEDHLAXKXE

SEQ ID NO: 9244 - protein, 37 aa, Artificial Sequence
  GFR-binding peptide
  MOD_RES (3)..(4)..(37): Xaa is C or S
  MOD_RES (18)..(19)..(20)..(21)..(22): Xaa is A or G
  MOD_RES (23)..(24)..(25)..(26): Xaa is A or G or is absent
SPXXVPQDLNAISILYFXXXXXXXXXLKKYRMVVKSX

SEQ ID NO: 9245 - protein, 41 aa, Artificial Sequence
  GFR-binding peptide
  MOD_RES (3)..(4)..(39)..(41): Xaa is C or S
  MOD_RES (18)..(19)..(20)..(21)..(22): Xaa is A or G
  MOD_RES (23)..(24)..(25)..(26): Xaa is A or G or is absent
KAXXVPTKLNAISVLYFXXXXXXXXXLKKYREGMSVAEXGX

SEQ ID NO: 9246 - protein, 40 aa, Artificial Sequence
  GFR-binding peptide
  MOD_RES (4)..(5)..(37)..(39): Xaa is C or S
PKPXXAPTQLSATSVLYYDDSSNVILRKHRNMVVRAXGXH

SEQ ID NO: 9247 - protein, 33 aa, Artificial Sequence
  GFR-binding peptide
  MOD_RES (1)..(1): Xaa is C or S
  MOD_RES (15)..(16)..(17)..(18)..(19): Xaa is A or G
  MOD_RES (20)..(21)..(22)..(23): Xaa is A or G or is absent
XVPQDLSPISILYKXXXXXXXXXLKYHYMVVKS

SEQ ID NO: 9248 - protein, 39 aa, Artificial Sequence
  GFR-binding peptide
  MOD_RES (3)..(4)..(36)..(38): Xaa is C or S
KPXXAPTQLSPISVLYKDDSSNVILKYHYNMVVRAXGXH

SEQ ID NO: 9249 - protein, 34 aa, Artificial Sequence
  GFR-binding peptide
  MOD_RES (1)..(2)..(34): Xaa is C or S
XXAPTQLSATSVLYYDDSSNVILRKHRNMVVRAX

SEQ ID NO: 9250 - protein, 43 aa, Artificial Sequence
  GFR-binding peptide
  MOD_RES (6)..(7)..(41)..(43): Xaa is C or S
  MOD_RES (21)..(22)..(23)..(24)..(25): Xaa is A or G
  MOD_RES (26)..(27)..(28)..(29): Xaa is A or G or is absent
YVPKPXXAPTKLSPISVLYKXXXXXXXXXLKYHYNMVVRSXGX

SEQ ID NO: 9251 - protein, 38 aa, Artificial Sequence
  GFR-binding peptide
  MOD_RES (37)..(37): Xaa is C or S
RPTQVQLSPISVLYKEIVRKKPIFLKYHYTLEDHLAXK

SEQ ID NO: 9252 - protein, 39 aa, Artificial Sequence
  GFR-binding peptide
  MOD_RES (6)..(7): Xaa is C or S
  MOD_RES (21)..(22)..(23)..(24)..(25): Xaa is A or G
  MOD_RES (26)..(27)..(28)..(29): Xaa is A or G or is absent
ASASPXXVSQDLSAISILYLXXXXXXXXXLKNYQMIVKS

SEQ ID NO: 9253 - protein, 36 aa, Artificial Sequence
  GFR-binding peptide
  MOD_RES (1)..(34)..(36): Xaa is C or S
  MOD_RES (15)..(16)..(17)..(18)..(19): Xaa is A or G
  MOD_RES (20)..(21)..(22)..(23): Xaa is A or G or is absent
XVPQALNAISILYFXXXXXXXXXLKKYRMIVRSXKX

SEQ ID NO: 9254 - protein, 36 aa, Artificial Sequence
  GFR-binding peptide
  MOD_RES (2)..(3): Xaa is C or S
  MOD_RES (17)..(18)..(19)..(20)..(21): Xaa is A or G
  MOD_RES (22)..(23)..(24)..(25): Xaa is A or G or is absent
PXXAPTKLNAISVLYFXXXXXXXXXLKKYRNMVVRS

SEQ ID NO: 9255 - protein, 38 aa, Artificial Sequence
  GFR-binding peptide
  MOD_RES (5)..(6)..(37): Xaa is C or S
SASPXXVSQDLNAISILYFIGKTPKILKKYRMIVKSXK

SEQ ID NO: 9256 - protein, 37 aa, Artificial Sequence
  GFR-binding peptide
  MOD_RES (34)..(36): Xaa is C or S
  MOD_RES (14)..(15)..(16)..(17)..(18): Xaa is A or G
  MOD_RES (19)..(20)..(21)..(22): Xaa is A or G or is absent
APTKLSATSVLYYXXXXXXXXXLRKHRNMVVKAXGXH

SEQ ID NO: 9257 - protein, 36 aa, Artificial Sequence
  GFR-binding peptide
  MOD_RES (1)..(33)..(35): Xaa is C or S
XVPTELNAISMLYFDEYDKVVLKKYREMVVEGXGXR

SEQ ID NO: 9258 - protein, 37 aa, Artificial Sequence
  GFR-binding peptide
  MOD_RES (4)..(5)..(36): Xaa is C or S
AAPXXVPQALNAISILYFVGRKPKVLKKYRMIVRSXK

SEQ ID NO: 9259 - protein, 36 aa, Artificial Sequence
  GFR-binding peptide
  MOD_RES (6)..(6): Xaa is C or S
VTKPTXAPTKLSATSVLYYDDSSNVILRKHRNMVVR

SEQ ID NO: 9260 - protein, 41 aa, Artificial Sequence
  GFR-binding peptide
  MOD_RES (6)..(7)..(41): Xaa is C or S
  MOD_RES (21)..(22)..(23)..(24)..(25): Xaa is A or G
  MOD_RES (26)..(27)..(28)..(29): Xaa is A or G or is absent
KIPKAXXVPTELSPISMLYKXXXXXXXXXLKYHYDMVVEGX

SEQ ID NO: 9261 - protein, 34 aa, Artificial Sequence
  GFR-binding peptide
  MOD_RES (3)..(4): Xaa is C or S
APXXVPQALNAISILYFVGRKPKVLKKYRMIVRS

SEQ ID NO: 9262 - protein, 34 aa, Artificial Sequence
  GFR-binding peptide
  MOD_RES (34)..(34): Xaa is C or S
  MOD_RES (14)..(15)..(16)..(17)..(18): Xaa is A or G
  MOD_RES (19)..(20)..(21)..(22): Xaa is A or G or is absent
APTQLSAISVLYLXXXXXXXXXLKNYQNMVVRAX

SEQ ID NO: 9263 - protein, 41 aa, Artificial Sequence
  GFR-binding peptide
  MOD_RES (6)..(7)..(41): Xaa is C or S
  MOD_RES (21)..(22)..(23)..(24)..(25): Xaa is A or G
  MOD_RES (26)..(27)..(28)..(29): Xaa is A or G or is absent
AVPKAXXAPTKLSAISVLYLXXXXXXXXXLKNYQNMVVKAX

SEQ ID NO: 9264 - protein, 40 aa, Artificial Sequence
  GFR-binding peptide
  MOD_RES (4)..(5)..(37)..(39): Xaa is C or S
PKPXXAPTQLSAISVLYLDDSSNVILKNYQNMVVRAXGXH

SEQ ID NO: 9265 - protein, 37 aa, Artificial Sequence
  GFR-binding peptide
  MOD_RES (4)..(5): Xaa is C or S
  MOD_RES (19)..(20)..(21)..(22)..(23): Xaa is A or G
  MOD_RES (24)..(25)..(26)..(27): Xaa is A or G or is absent
ASPXXVSQDLNAISILYFXXXXXXXXXLKKYRMIVKS

SEQ ID NO: 9266 - protein, 32 aa, Artificial Sequence
  GFR-binding peptide
  MOD_RES (1)..(32): Xaa is C or S
XVPQDLSATSILYYVGRTPKVLRKHRMVVKSX

SEQ ID NO: 9267 - protein, 42 aa, Artificial Sequence
  GFR-binding peptide
  MOD_RES (3)..(40)..(42): Xaa is C or S
  MOD_RES (19)..(20)..(21)..(22)..(23): Xaa is A or G
  MOD_RES (24)..(25)..(26)..(27): Xaa is A or G or is absent
VQXRPTQVQLSATSVLYYXXXXXXXXXLRKHRTLEDHLAXKX

SEQ ID NO: 9268 - protein, 41 aa, Artificial Sequence
  GFR-binding peptide
  MOD_RES (6)..(7)..(40): Xaa is C or S
  MOD_RES (21)..(22)..(23)..(24)..(25): Xaa is A or G
  MOD_RES (26)..(27)..(28)..(29): Xaa is A or G or is absent
ASASPXXVSQDLSPISILYKXXXXXXXXXLKYHYMIVKSXK

SEQ ID NO: 9269 - protein, 41 aa, Artificial Sequence
  GFR-binding peptide
  MOD_RES (5)..(6)..(39)..(41): Xaa is C or S
  MOD_RES (20)..(21)..(22)..(23)..(24): Xaa is A or G
  MOD_RES (25)..(26)..(27)..(28): Xaa is A or G or is absent
SAAPXXVPQALSPISILYKXXXXXXXXXLKYHYMIVRSXKX

SEQ ID NO: 9270 - protein, 39 aa, Artificial Sequence
  GFR-binding peptide
  MOD_RES (1)..(38): Xaa is C or S
  MOD_RES (17)..(18)..(19)..(20)..(21): Xaa is A or G
  MOD_RES (22)..(23)..(24)..(25): Xaa is A or G or is absent
XRPTQVQLSPISVLYKXXXXXXXXXLKYHYTLEDHLAXK

SEQ ID NO: 9271 - protein, 40 aa, Artificial Sequence
  GFR-binding peptide
  MOD_RES (3)..(4)..(38)..(40): Xaa is C or S
  MOD_RES (18)..(19)..(20)..(21)..(22): Xaa is A or G
  MOD_RES (23)..(24)..(25)..(26): Xaa is A or G or is absent
KAXXVPTELSATSMLYYXXXXXXXXXLRKHRDMVVEGXGX

SEQ ID NO: 9272 - protein, 38 aa, Artificial Sequence
  GFR-binding peptide
  MOD_RES (2)..(3)..(37): Xaa is C or S
  MOD_RES (17)..(18)..(19)..(20)..(21): Xaa is A or G
  MOD_RES (22)..(23)..(24)..(25): Xaa is A or G or is absent
PXXAPTQLSATSVLYYXXXXXXXXXLRKHRNMVVRAXG

SEQ ID NO: 9273 - protein, 36 aa, Artificial Sequence
  GFR-binding peptide
  MOD_RES (2)..(3): Xaa is C or S
  MOD_RES (17)..(18)..(19)..(20)..(21): Xaa is A or G
  MOD_RES (22)..(23)..(24)..(25): Xaa is A or G or is absent
PXXAPTQLSAISVLYLXXXXXXXXXLKNYQNMVVRA

SEQ ID NO: 9274 - protein, 40 aa, Artificial Sequence
  GFR-binding peptide
  MOD_RES (2)..(3)..(37)..(39): Xaa is C or S
  MOD_RES (17)..(18)..(19)..(20)..(21): Xaa is A or G
  MOD_RES (22)..(23)..(24)..(25): Xaa is A or G or is absent
PXXAPTQLSPISVLYKXXXXXXXXXLKYHYNMVVRAXGXH

SEQ ID NO: 9275 - protein, 31 aa, Artificial Sequence
  GFR-binding peptide
  MOD_RES (31)..(31): Xaa is C or S
VPQDLSATSILYYVGRTPKVLRKHRMVVKSX

SEQ ID NO: 9276 - protein, 41 aa, Artificial Sequence
  GFR-binding peptide
  MOD_RES (6)..(7)..(38)..(40): Xaa is C or S
ASASPXXVSQDLNAISILYFIGKTPKILKKYRMIVKSXKXS

SEQ ID NO: 9277 - protein, 35 aa, Artificial Sequence
  GFR-binding peptide
  MOD_RES (2)..(3): Xaa is C or S
  MOD_RES (17)..(18)..(19)..(20)..(21): Xaa is A or G
  MOD_RES (22)..(23)..(24)..(25): Xaa is A or G or is absent
PXXAPTKLSPISVLYKXXXXXXXXXLKYHYNMVVR

SEQ ID NO: 9278 - protein, 35 aa, Artificial Sequence
  GFR-binding peptide
  MOD_RES (35)..(35): Xaa is C or S
  MOD_RES (14)..(15)..(16)..(17)..(18): Xaa is A or G
  MOD_RES (19)..(20)..(21)..(22): Xaa is A or G or is absent
TQVQLSPISVLYKXXXXXXXXXLKYHYTLEDHLAX

SEQ ID NO: 9279 - protein, 39 aa, Artificial Sequence
  GFR-binding peptide
  MOD_RES (4)..(5)..(36)..(38): Xaa is C or S
AAPXXVPQALNAISILYFVGRKPKVLKKYRMIVRSXKXS

SEQ ID NO: 9280 - protein, 37 aa, Artificial Sequence
  GFR-binding peptide
  MOD_RES (1)..(2)..(36): Xaa is C or S
  MOD_RES (16)..(17)..(18)..(19)..(20): Xaa is A or G
  MOD_RES (21)..(22)..(23)..(24): Xaa is A or G or is absent
XXAPTKLNAISVLYFXXXXXXXXXLKKYRNMVVRSXG

SEQ ID NO: 9281 - protein, 42 aa, Artificial Sequence
  GFR-binding peptide
  MOD_RES (6)..(7)..(41): Xaa is C or S
  MOD_RES (21)..(22)..(23)..(24)..(25): Xaa is A or G
  MOD_RES (26)..(27)..(28)..(29): Xaa is A or G or is absent
YVPKPXXAPTKLNAISVLYFXXXXXXXXXLKKYRNMVVRSXG

SEQ ID NO: 9282 - protein, 36 aa, Artificial Sequence
  GFR-binding peptide
  MOD_RES (1)..(2)..(34)..(36): Xaa is C or S
XXAPTKLSAISVLYLDSSNNVILKNYQNMVVKAXGX

SEQ ID NO: 9283 - protein, 34 aa, Artificial Sequence
  GFR-binding peptide
  MOD_RES (34)..(34): Xaa is C or S
  MOD_RES (14)..(15)..(16)..(17)..(18): Xaa is A or G
  MOD_RES (19)..(20)..(21)..(22): Xaa is A or G or is absent
APTKLSPISVLYKXXXXXXXXXLKYHYNMVVKAX

SEQ ID NO: 9284 - protein, 33 aa, Artificial Sequence
  GFR-binding peptide
  MOD_RES (32)..(32): Xaa is C or S
APTQLSAISVLYLDDSSNVILKNYQNMVVRAXG

SEQ ID NO: 9285 - protein, 37 aa, Artificial Sequence
  GFR-binding peptide
  MOD_RES (4)..(5): Xaa is C or S
  MOD_RES (19)..(20)..(21)..(22)..(23): Xaa is A or G
  MOD_RES (24)..(25)..(26)..(27): Xaa is A or G or is absent
PKAXXVPTELNAISMLYFXXXXXXXXXLKKYREMVVE

SEQ ID NO: 9286 - protein, 40 aa, Artificial Sequence
  GFR-binding peptide
  MOD_RES (4)..(5)..(40): Xaa is C or S
  MOD_RES (19)..(20)..(21)..(22)..(23): Xaa is A or G
  MOD_RES (24)..(25)..(26)..(27): Xaa is A or G or is absent
GKAXXVPTKLSAISVLYLXXXXXXXXXLKNYQEGMSVAEX

SEQ ID NO: 9287 - protein, 40 aa, Artificial Sequence
  GFR-binding peptide
  MOD_RES (5)..(6)..(38)..(40): Xaa is C or S
IPKAXXVPTELNAISMLYFDENEKVVLKKYRDMVVEGXGX

SEQ ID NO: 9288 - protein, 39 aa, Artificial Sequence
  GFR-binding peptide
  MOD_RES (5)..(6)..(39): Xaa is C or S
VGKAXXVPTKLSATSVLYYDDMGVPTLRKHREGMSVAEX

SEQ ID NO: 9289 - protein, 34 aa, Artificial Sequence
  GFR-binding peptide
  MOD_RES (3)..(4): Xaa is C or S
KAXXVPTELSPISMLYKDENEKVVLKYHYDMVVE

SEQ ID NO: 9290 - protein, 39 aa, Artificial Sequence
  GFR-binding peptide
  MOD_RES (5)..(6)..(38): Xaa is C or S
IPKAXXVPTELSATSMLYYDEYDKVVLRKHREMVVEGXG

SEQ ID NO: 9291 - protein, 42 aa, Artificial Sequence
  GFR-binding peptide
  MOD_RES (4)..(5)..(39)..(41): Xaa is C or S
  MOD_RES (19)..(20)..(21)..(22)..(23): Xaa is A or G
  MOD_RES (24)..(25)..(26)..(27): Xaa is A or G or is absent
PKAXXVPTELSAISMLYLXXXXXXXXXLKNYQEMVVEGXGXR

SEQ ID NO: 9292 - protein, 39 aa, Artificial Sequence
  GFR-binding peptide
  MOD_RES (6)..(7): Xaa is C or S
  MOD_RES (21)..(22)..(23)..(24)..(25): Xaa is A or G
  MOD_RES (26)..(27)..(28)..(29): Xaa is A or G or is absent
ASASPXXVPQDLNAISILYFXXXXXXXXXLKKYRMVVKS

SEQ ID NO: 9293 - protein, 34 aa, Artificial Sequence
  GFR-binding peptide
  MOD_RES (1)..(2): Xaa is C or S
  MOD_RES (16)..(17)..(18)..(19)..(20): Xaa is A or G
  MOD_RES (21)..(22)..(23)..(24): Xaa is A or G or is absent
XXVSQDLSPISILYKXXXXXXXXXLKYHYMIVKS

SEQ ID NO: 9294 - protein, 44 aa, Artificial Sequence
  GFR-binding peptide
  MOD_RES (6)..(7)..(41)..(43): Xaa is C or S
  MOD_RES (21)..(22)..(23)..(24)..(25): Xaa is A or G
  MOD_RES (26)..(27)..(28)..(29): Xaa is A or G or is absent
YVPKPXXAPTKLNAISVLYFXXXXXXXXXLKKYRNMVVRSXGXH

SEQ ID NO: 9295 - protein, 39 aa, Artificial Sequence
  GFR-binding peptide
  MOD_RES (4)..(4): Xaa is C or S
  MOD_RES (20)..(21)..(22)..(23)..(24): Xaa is A or G
  MOD_RES (25)..(26)..(27)..(28): Xaa is A or G or is absent
NVQXRPTQVQLNAISVLYFXXXXXXXXXLKKYRTLEDHL

SEQ ID NO: 9296 - protein, 36 aa, Artificial Sequence
  GFR-binding peptide
  MOD_RES (35)..(35): Xaa is C or S
  MOD_RES (14)..(15)..(16)..(17)..(18): Xaa is A or G
  MOD_RES (19)..(20)..(21)..(22): Xaa is A or G or is absent
VPTKLSAISVLYLXXXXXXXXXLKNYQEGMSVAEXG

SEQ ID NO: 9297 - protein, 38 aa, Artificial Sequence
  GFR-binding peptide
  MOD_RES (35)..(37): Xaa is C or S
  MOD_RES (14)..(15)..(16)..(17)..(18): Xaa is A or G
  MOD_RES (19)..(20)..(21)..(22): Xaa is A or G or is absent
TQVQLSAISVLYLXXXXXXXXXLKNYQTLEDHLAXKXE

SEQ ID NO: 9298 - protein, 39 aa, Artificial Sequence
  GFR-binding peptide
  MOD_RES (1)..(2)..(37)..(39): Xaa is C or S
  MOD_RES (16)..(17)..(18)..(19)..(20): Xaa is A or G
  MOD_RES (21)..(22)..(23)..(24): Xaa is A or G or is absent
XXVPTKLNAISVLYFXXXXXXXXXLKKYREGMSVAEXGX

SEQ ID NO: 9299 - protein, 41 aa, Artificial Sequence
  GFR-binding peptide
  MOD_RES (4)..(5)..(39)..(41): Xaa is C or S
  MOD_RES (19)..(20)..(21)..(22)..(23): Xaa is A or G
  MOD_RES (24)..(25)..(26)..(27): Xaa is A or G or is absent
PKPXXAPTKLNAISVLYFXXXXXXXXXLKKYRNMVVRSXGX

SEQ ID NO: 9300 - protein, 36 aa, Artificial Sequence
  GFR-binding peptide
  MOD_RES (5)..(6): Xaa is C or S
IPKAXXVPTELSPISMLYKDEYDKVVLKYHYEMVVE

SEQ ID NO: 9301 - protein, 39 aa, Artificial Sequence
  GFR-binding peptide
  MOD_RES (2)..(3)..(38): Xaa is C or S
  MOD_RES (17)..(18)..(19)..(20)..(21): Xaa is A or G
  MOD_RES (22)..(23)..(24)..(25): Xaa is A or G or is absent
AXXVPTKLSATSVLYYXXXXXXXXXLRKHREGMSVAEXG

SEQ ID NO: 9302 - protein, 42 aa, Artificial Sequence
  GFR-binding peptide
  MOD_RES (6)..(7)..(40)..(42): Xaa is C or S
  MOD_RES (21)..(22)..(23)..(24)..(25): Xaa is A or G
  MOD_RES (26)..(27)..(28)..(29): Xaa is A or G or is absent
ASASPXXVPQDLNAISILYFXXXXXXXXXLKKYRMVVKSXKX

SEQ ID NO: 9303 - protein, 43 aa, Artificial Sequence
  GFR-binding peptide
  MOD_RES (6)..(7)..(40)..(42): Xaa is C or S
  MOD_RES (21)..(22)..(23)..(24)..(25): Xaa is A or G
  MOD_RES (26)..(27)..(28)..(29): Xaa is A or G or is absent
ASASPXXVPQDLNAISILYFXXXXXXXXXLKKYRMVVKSXKXS

SEQ ID NO: 9304 - protein, 33 aa, Artificial Sequence
  GFR-binding peptide
  MOD_RES (31)..(33): Xaa is C or S
VPQDLNAISILYFVGRTPKVLKKYRMVVKSXKX

SEQ ID NO: 9305 - protein, 40 aa, Artificial Sequence
  GFR-binding peptide
  MOD_RES (6)..(40): Xaa is C or S
  MOD_RES (20)..(21)..(22)..(23)..(24): Xaa is A or G
  MOD_RES (25)..(26)..(27)..(28): Xaa is A or G or is absent
VTKPTXAPTKLSAISVLYLXXXXXXXXXLKNYQNMVVRSX

SEQ ID NO: 9306 - protein, 41 aa, Artificial Sequence
  GFR-binding peptide
  MOD_RES (5)..(6)..(38)..(40): Xaa is C or S
VPKPXXAPTQLSPISVLYKDDSSNVILKYHYNMVVRAXGXH

SEQ ID NO: 9307 - protein, 35 aa, Artificial Sequence
  GFR-binding peptide
  MOD_RES (34)..(34): Xaa is C or S
  MOD_RES (14)..(15)..(16)..(17)..(18): Xaa is A or G
  MOD_RES (19)..(20)..(21)..(22): Xaa is A or G or is absent
VPTELSATSMLYYXXXXXXXXXLRKHRDMVVEGXG

SEQ ID NO: 9308 - protein, 39 aa, Artificial Sequence
  GFR-binding peptide
  MOD_RES (3)..(4)..(39): Xaa is C or S
  MOD_RES (18)..(19)..(20)..(21)..(22): Xaa is A or G
  MOD_RES (23)..(24)..(25)..(26): Xaa is A or G or is absent
KAXXVPTKLSATSVLYYXXXXXXXXXLRKHREGMSVAEX

SEQ ID NO: 9309 - protein, 39 aa, Artificial Sequence
  GFR-binding peptide
  MOD_RES (5)..(37)..(39): Xaa is C or S
TKPTXAPTKLSAISVLYLDDSSNVILKNYQNMVVRSXGX

SEQ ID NO: 9310 - protein, 41 aa, Artificial Sequence
  GFR-binding peptide
  MOD_RES (3)..(4)..(38)..(40): Xaa is C or S
  MOD_RES (18)..(19)..(20)..(21)..(22): Xaa is A or G
  MOD_RES (23)..(24)..(25)..(26): Xaa is A or G or is absent
KAXXVPTELSPISMLYKXXXXXXXXXLKYHYDMVVEGXGXR

SEQ ID NO: 9311 - protein, 35 aa, Artificial Sequence
  GFR-binding peptide
  MOD_RES (1)..(35): Xaa is C or S
  MOD_RES (15)..(16)..(17)..(18)..(19): Xaa is A or G
  MOD_RES (20)..(21)..(22)..(23): Xaa is A or G or is absent
XAPTKLSPISVLYKXXXXXXXXXLKYHYNMVVKAX

SEQ ID NO: 9312 - protein, 38 aa, Artificial Sequence
  GFR-binding peptide
  MOD_RES (2)..(36)..(38): Xaa is C or S
  MOD_RES (16)..(17)..(18)..(19)..(20): Xaa is A or G
  MOD_RES (21)..(22)..(23)..(24): Xaa is A or G or is absent
TXAPTKLNAISVLYFXXXXXXXXXLKKYRNMVVRSXGX

SEQ ID NO: 9313 - protein, 33 aa, Artificial Sequence
  GFR-binding peptide
  MOD_RES (32)..(32): Xaa is C or S
APTKLSAISVLYLDDSSNVILKNYQNMVVRSXG

SEQ ID NO: 9314 - protein, 39 aa, Artificial Sequence
  GFR-binding peptide
  MOD_RES (2)..(3)..(36)..(38): Xaa is C or S
  MOD_RES (17)..(18)..(19)..(20)..(21): Xaa is A or G
  MOD_RES (22)..(23)..(24)..(25): Xaa is A or G or is absent
PXXVPQALSPISILYKXXXXXXXXXLKYHYMIVRSXKXS

SEQ ID NO: 9315 - protein, 36 aa, Artificial Sequence
  GFR-binding peptide
  MOD_RES (1)..(2)..(34)..(36): Xaa is C or S
XXAPTQLSATSVLYYDDSSNVILRKHRNMVVRAXGX

SEQ ID NO: 9316 - protein, 36 aa, Artificial Sequence
  GFR-binding peptide
  MOD_RES (3)..(4): Xaa is C or S
  MOD_RES (18)..(19)..(20)..(21)..(22): Xaa is A or G
  MOD_RES (23)..(24)..(25)..(26): Xaa is A or G or is absent
SPXXVPQDLNAISILYFXXXXXXXXXLKKYRMVVKS

SEQ ID NO: 9317 - protein, 37 aa, Artificial Sequence
  GFR-binding peptide
  MOD_RES (3)..(4)..(37): Xaa is C or S
  MOD_RES (18)..(19)..(20)..(21)..(22): Xaa is A or G
  MOD_RES (23)..(24)..(25)..(26): Xaa is A or G or is absent
SPXXVSQDLNAISILYFXXXXXXXXXLKKYRMIVKSX

SEQ ID NO: 9318 - protein, 38 aa, Artificial Sequence
  GFR-binding peptide
  MOD_RES (5)..(6)..(38): Xaa is C or S
IPKAXXVPTELSATSMLYYDENEKVVLRKHRDMVVEGX

SEQ ID NO: 9319 - protein, 40 aa, Artificial Sequence
  GFR-binding peptide
  MOD_RES (4)..(4): Xaa is C or S
NVQXRPTQVQLSPISVLYKEIVRKKPIFLKYHYTLEDHLA

SEQ ID NO: 9320 - protein, 37 aa, Artificial Sequence
  GFR-binding peptide
  MOD_RES (3)..(35)..(37): Xaa is C or S
PTXAPTKLSATSVLYYDDSSNVILRKHRNMVVRSXGX

SEQ ID NO: 9321 - protein, 42 aa, Artificial Sequence
  GFR-binding peptide
  MOD_RES (6)..(40)..(42): Xaa is C or S
  MOD_RES (20)..(21)..(22)..(23)..(24): Xaa is A or G
  MOD_RES (25)..(26)..(27)..(28): Xaa is A or G or is absent
VTKPTXAPTKLSATSVLYYXXXXXXXXXLRKHRNMVVRSXGX

SEQ ID NO: 9322 - protein, 33 aa, Artificial Sequence
  GFR-binding peptide
  MOD_RES (1)..(32): Xaa is C or S
XVSQDLSAISILYLIGKTPKILKNYQMIVKSXK

SEQ ID NO: 9323 - protein, 40 aa, Artificial Sequence
  GFR-binding peptide
  MOD_RES (5)..(6)..(40): Xaa is C or S
  MOD_RES (20)..(21)..(22)..(23)..(24): Xaa is A or G
  MOD_RES (25)..(26)..(27)..(28): Xaa is A or G or is absent
VPKPXXAPTQLSAISVLYLXXXXXXXXXLKNYQNMVVRAX

SEQ ID NO: 9324 - protein, 35 aa, Artificial Sequence
  GFR-binding peptide
  MOD_RES (1)..(33)..(35): Xaa is C or S
XVPTELNAISMLYFDEYDKVVLKKYREMVVEGXGX

SEQ ID NO: 9325 - protein, 39 aa, Artificial Sequence
  GFR-binding peptide
  MOD_RES (5)..(6): Xaa is C or S
  MOD_RES (20)..(21)..(22)..(23)..(24): Xaa is A or G
  MOD_RES (25)..(26)..(27)..(28): Xaa is A or G or is absent
VPKAXXAPTKLNAISVLYFXXXXXXXXXLKKYRNMVVKA

SEQ ID NO: 9326 - protein, 40 aa, Artificial Sequence
  GFR-binding peptide
  MOD_RES (4)..(5)..(39): Xaa is C or S
  MOD_RES (19)..(20)..(21)..(22)..(23): Xaa is A or G
  MOD_RES (24)..(25)..(26)..(27): Xaa is A or G or is absent
PKPXXAPTKLSPISVLYKXXXXXXXXXLKYHYNMVVRSXG

SEQ ID NO: 9327 - protein, 37 aa, Artificial Sequence
  GFR-binding peptide
  MOD_RES (1)..(2)..(35)..(37): Xaa is C or S
  MOD_RES (16)..(17)..(18)..(19)..(20): Xaa is A or G
  MOD_RES (21)..(22)..(23)..(24): Xaa is A or G or is absent
XXVPQALNAISILYFXXXXXXXXXLKKYRMIVRSXKX

SEQ ID NO: 9328 - protein, 37 aa, Artificial Sequence
  GFR-binding peptide
  MOD_RES (3)..(4)..(36): Xaa is C or S
KAXXVPTELNAISMLYFDENEKVVLKKYRDMVVEGXG

SEQ ID NO: 9329 - protein, 37 aa, Artificial Sequence
  GFR-binding peptide
  MOD_RES (2)..(3)..(37): Xaa is C or S
  MOD_RES (17)..(18)..(19)..(20)..(21): Xaa is A or G
  MOD_RES (22)..(23)..(24)..(25): Xaa is A or G or is absent
PXXAPTKLSATSVLYYXXXXXXXXXLRKHRNMVVRSX

SEQ ID NO: 9330 - protein, 36 aa, Artificial Sequence
  GFR-binding peptide
  MOD_RES (34)..(36): Xaa is C or S
  MOD_RES (14)..(15)..(16)..(17)..(18): Xaa is A or G
  MOD_RES (19)..(20)..(21)..(22): Xaa is A or G or is absent
APTQLNAISVLYFXXXXXXXXXLKKYRNMVVRAXGX

SEQ ID NO: 9331 - protein, 33 aa, Artificial Sequence
  GFR-binding peptide
  MOD_RES (14)..(15)..(16)..(17)..(18): Xaa is A or G
  MOD_RES (19)..(20)..(21)..(22): Xaa is A or G or is absent
APTKLSAISVLYLXXXXXXXXXLKNYQNMVVRS

SEQ ID NO: 9332 - protein, 35 aa, Artificial Sequence
  GFR-binding peptide
  MOD_RES (3)..(4)..(35): Xaa is C or S
APXXVPQALNAISILYFVGRKPKVLKKYRMIVRSX

SEQ ID NO: 9333 - protein, 43 aa, Artificial Sequence
  GFR-binding peptide
  MOD_RES (4)..(5)..(40)..(42): Xaa is C or S
  MOD_RES (19)..(20)..(21)..(22)..(23): Xaa is A or G
  MOD_RES (24)..(25)..(26)..(27): Xaa is A or G or is absent
GKAXXVPTKLSATSVLYYXXXXXXXXXLRKHREGMSVAEXGXR

SEQ ID NO: 9334 - protein, 43 aa, Artificial Sequence
  GFR-binding peptide
  MOD_RES (6)..(7)..(41)..(43): Xaa is C or S
  MOD_RES (21)..(22)..(23)..(24)..(25): Xaa is A or G
  MOD_RES (26)..(27)..(28)..(29): Xaa is A or G or is absent
YVPKPXXAPTKLSAISVLYLXXXXXXXXXLKNYQNMVVRSXGX

SEQ ID NO: 9335 - protein, 35 aa, Artificial Sequence
  GFR-binding peptide
  MOD_RES (2)..(3)..(34): Xaa is C or S
PXXVPQDLNAISILYFVGRTPKVLKKYRMVVKSXK

SEQ ID NO: 9336 - protein, 36 aa, Artificial Sequence
  GFR-binding peptide
  MOD_RES (3)..(4)..(36): Xaa is C or S
KAXXAPTKLSAISVLYLDSSNNVILKNYQNMVVKAX

SEQ ID NO: 9337 - protein, 36 aa, Artificial Sequence
  GFR-binding peptide
  MOD_RES (2)..(3): Xaa is C or S
  MOD_RES (17)..(18)..(19)..(20)..(21): Xaa is A or G
  MOD_RES (22)..(23)..(24)..(25): Xaa is A or G or is absent
AXXVPTELSAISMLYLXXXXXXXXXLKNYQEMVVEG

SEQ ID NO: 9338 - protein, 33 aa, Artificial Sequence
  GFR-binding peptide
  MOD_RES (14)..(15)..(16)..(17)..(18): Xaa is A or G
  MOD_RES (19)..(20)..(21)..(22): Xaa is A or G or is absent
TQVQLNAISVLYFXXXXXXXXXLKKYRTLEDHL

SEQ ID NO: 9339 - protein, 34 aa, Artificial Sequence
  GFR-binding peptide
RPTQVQLSPISVLYKEIVRKKPIFLKYHYTLEDH

SEQ ID NO: 9340 - protein, 38 aa, Artificial Sequence
  GFR-binding peptide
  MOD_RES (1)..(2)..(36)..(38): Xaa is C or S
  MOD_RES (16)..(17)..(18)..(19)..(20): Xaa is A or G
  MOD_RES (21)..(22)..(23)..(24): Xaa is A or G or is absent
XXAPTKLSPISVLYKXXXXXXXXXLKYHYNMVVKAXGX

SEQ ID NO: 9341 - protein, 33 aa, Artificial Sequence
  GFR-binding peptide
  MOD_RES (14)..(15)..(16)..(17)..(18): Xaa is A or G
  MOD_RES (19)..(20)..(21)..(22): Xaa is A or G or is absent
APTKLNAISVLYFXXXXXXXXXLKKYRNMVVRS

SEQ ID NO: 9342 - protein, 41 aa, Artificial Sequence
  GFR-binding peptide
  MOD_RES (6)..(7)..(38)..(40): Xaa is C or S
ASASPXXVPQDLSATSILYYVGRTPKVLRKHRMVVKSXKXS

SEQ ID NO: 9343 - protein, 31 aa, Artificial Sequence
  GFR-binding peptide
VPTELNAISMLYFDEYDKVVLKKYREMVVEG

SEQ ID NO: 9344 - protein, 39 aa, Artificial Sequence
  GFR-binding peptide
  MOD_RES (3)..(4)..(38): Xaa is C or S
  MOD_RES (18)..(19)..(20)..(21)..(22): Xaa is A or G
  MOD_RES (23)..(24)..(25)..(26): Xaa is A or G or is absent
KPXXAPTKLSPISVLYKXXXXXXXXXLKYHYNMVVRSXG

SEQ ID NO: 9345 - protein, 39 aa, Artificial Sequence
  GFR-binding peptide
  MOD_RES (1)..(2)..(36)..(38): Xaa is C or S
  MOD_RES (16)..(17)..(18)..(19)..(20): Xaa is A or G
  MOD_RES (21)..(22)..(23)..(24): Xaa is A or G or is absent
XXAPTKLSAISVLYLXXXXXXXXXLKNYQNMVVKAXGXH

SEQ ID NO: 9346 - protein, 34 aa, Artificial Sequence
  GFR-binding peptide
  MOD_RES (15)..(16)..(17)..(18)..(19): Xaa is A or G
  MOD_RES (20)..(21)..(22)..(23): Xaa is A or G or is absent
PTQVQLSAISVLYLXXXXXXXXXLKNYQTLEDHL

SEQ ID NO: 9347 - protein, 37 aa, Artificial Sequence
  GFR-binding peptide
  MOD_RES (34)..(36): Xaa is C or S
  MOD_RES (14)..(15)..(16)..(17)..(18): Xaa is A or G
  MOD_RES (19)..(20)..(21)..(22): Xaa is A or G or is absent
APTQLSAISVLYLXXXXXXXXXLKNYQNMVVRAXGXH

SEQ ID NO: 9348 - protein, 41 aa, Artificial Sequence
  GFR-binding peptide
  MOD_RES (4)..(5)..(38)..(40): Xaa is C or S
  MOD_RES (19)..(20)..(21)..(22)..(23): Xaa is A or G
  MOD_RES (24)..(25)..(26)..(27): Xaa is A or G or is absent
AAPXXVPQALSPISILYKXXXXXXXXXLKYHYMIVRSXKXS

SEQ ID NO: 9349 - protein, 38 aa, Artificial Sequence
  GFR-binding peptide
  MOD_RES (3)..(4)..(35)..(37): Xaa is C or S
APXXVPQALSPISILYKVGRKPKVLKYHYMIVRSXKXS

SEQ ID NO: 9350 - protein, 35 aa, Artificial Sequence
  GFR-binding peptide
  MOD_RES (1)..(35): Xaa is C or S
  MOD_RES (15)..(16)..(17)..(18)..(19): Xaa is A or G
  MOD_RES (20)..(21)..(22)..(23): Xaa is A or G or is absent
XVPTELSAISMLYLXXXXXXXXXLKNYQEMVVEGX

SEQ ID NO: 9351 - protein, 37 aa, Artificial Sequence
  GFR-binding peptide
  MOD_RES (5)..(6): Xaa is C or S
VPKPXXAPTKLSATSVLYYDDSSNVILRKHRNMVVRS

SEQ ID NO: 9352 - protein, 39 aa, Artificial Sequence
  GFR-binding peptide
  MOD_RES (5)..(6)..(38): Xaa is C or S
IPKAXXVPTELNAISMLYFDENEKVVLKKYRDMVVEGXG

SEQ ID NO: 9353 - protein, 36 aa, Artificial Sequence
  GFR-binding peptide
  MOD_RES (33)..(35): Xaa is C or S
  MOD_RES (14)..(15)..(16)..(17)..(18): Xaa is A or G
  MOD_RES (19)..(20)..(21)..(22): Xaa is A or G or is absent
VPQALSPISILYKXXXXXXXXXLKYHYMIVRSXKXS

SEQ ID NO: 9354 - protein, 36 aa, Artificial Sequence
  GFR-binding peptide
  MOD_RES (3)..(4): Xaa is C or S
  MOD_RES (18)..(19)..(20)..(21)..(22): Xaa is A or G
  MOD_RES (23)..(24)..(25)..(26): Xaa is A or G or is absent
KPXXAPTKLSAISVLYLXXXXXXXXXLKNYQNMVVR

SEQ ID NO: 9355 - protein, 37 aa, Artificial Sequence
  GFR-binding peptide
  MOD_RES (4)..(5)..(37): Xaa is C or S
PKPXXAPTKLSPISVLYKDDSSNVILKYHYNMVVRSX

SEQ ID NO: 9356 - protein, 36 aa, Artificial Sequence
  GFR-binding peptide
  MOD_RES (1)..(2)..(34)..(36): Xaa is C or S
XXVPTELSPISMLYKDENEKVVLKYHYDMVVEGXGX

SEQ ID NO: 9357 - protein, 41 aa, Artificial Sequence
  GFR-binding peptide
  MOD_RES (2)..(3)..(38)..(40): Xaa is C or S
  MOD_RES (17)..(18)..(19)..(20)..(21): Xaa is A or G
  MOD_RES (22)..(23)..(24)..(25): Xaa is A or G or is absent
AXXVPTKLSPISVLYKXXXXXXXXXLKYHYEGMSVAEXGXR

SEQ ID NO: 9358 - protein, 33 aa, Artificial Sequence
  GFR-binding peptide
  MOD_RES (1)..(1): Xaa is C or S
XVPTKLSATSVLYYDDMGVPTLRKHREGMSVAE

SEQ ID NO: 9359 - protein, 35 aa, Artificial Sequence
  GFR-binding peptide
  MOD_RES (4)..(5): Xaa is C or S
ASPXXVPQDLNAISILYFVGRTPKVLKKYRMVVKS

SEQ ID NO: 9360 - protein, 36 aa, Artificial Sequence
  GFR-binding peptide
  MOD_RES (1)..(33)..(35): Xaa is C or S
XAPTQLSATSVLYYDDSSNVILRKHRNMVVRAXGXH

SEQ ID NO: 9361 - protein, 38 aa, Artificial Sequence
  GFR-binding peptide
  MOD_RES (3)..(4)..(38): Xaa is C or S
  MOD_RES (18)..(19)..(20)..(21)..(22): Xaa is A or G
  MOD_RES (23)..(24)..(25)..(26): Xaa is A or G or is absent
KAXXVPTELNAISMLYFXXXXXXXXXLKKYREMVVEGX

SEQ ID NO: 9362 - protein, 38 aa, Artificial Sequence
  GFR-binding peptide
  MOD_RES (4)..(4): Xaa is C or S
NVQXRPTQVQLSAISVLYLEIVRKKPIFLKNYQTLEDH

SEQ ID NO: 9363 - protein, 37 aa, Artificial Sequence
  GFR-binding peptide
  MOD_RES (34)..(36): Xaa is C or S
  MOD_RES (14)..(15)..(16)..(17)..(18): Xaa is A or G
  MOD_RES (19)..(20)..(21)..(22): Xaa is A or G or is absent
VPTELSATSMLYYXXXXXXXXXLRKHREMVVEGXGXR

SEQ ID NO: 9364 - protein, 38 aa, Artificial Sequence
  GFR-binding peptide
  MOD_RES (5)..(6)..(37): Xaa is C or S
SASPXXVSQDLSAISILYLIGKTPKILKNYQMIVKSXK

SEQ ID NO: 9365 - protein, 39 aa, Artificial Sequence
  GFR-binding peptide
  MOD_RES (5)..(5): Xaa is C or S
  MOD_RES (21)..(22)..(23)..(24)..(25): Xaa is A or G
  MOD_RES (26)..(27)..(28)..(29): Xaa is A or G or is absent
RNVQXRPTQVQLNAISVLYFXXXXXXXXXLKKYRTLEDH

SEQ ID NO: 9366 - protein, 40 aa, Artificial Sequence
  GFR-binding peptide
  MOD_RES (2)..(3)..(37)..(39): Xaa is C or S
  MOD_RES (17)..(18)..(19)..(20)..(21): Xaa is A or G
  MOD_RES (22)..(23)..(24)..(25): Xaa is A or G or is absent
AXXVPTELSAISMLYLXXXXXXXXXLKNYQEMVVEGXGXR

SEQ ID NO: 9367 - protein, 31 aa, Artificial Sequence
  GFR-binding peptide
  MOD_RES (1)..(1): Xaa is C or S
XVPTELSPISMLYKDENEKVVLKYHYDMVVE

SEQ ID NO: 9368 - protein, 35 aa, Artificial Sequence
  GFR-binding peptide
  MOD_RES (1)..(2): Xaa is C or S
  MOD_RES (16)..(17)..(18)..(19)..(20): Xaa is A or G
  MOD_RES (21)..(22)..(23)..(24): Xaa is A or G or is absent
XXAPTQLSPISVLYKXXXXXXXXXLKYHYNMVVRA

SEQ ID NO: 9369 - protein, 34 aa, Artificial Sequence
  GFR-binding peptide
  MOD_RES (1)..(2)..(34): Xaa is C or S
XXVPTELSPISMLYKDEYDKVVLKYHYEMVVEGX

SEQ ID NO: 9370 - protein, 39 aa, Artificial Sequence
  GFR-binding peptide
  MOD_RES (6)..(7): Xaa is C or S
  MOD_RES (21)..(22)..(23)..(24)..(25): Xaa is A or G
  MOD_RES (26)..(27)..(28)..(29): Xaa is A or G or is absent
ASAAPXXVPQALSPISILYKXXXXXXXXXLKYHYMIVRS

SEQ ID NO: 9371 - protein, 41 aa, Artificial Sequence
  GFR-binding peptide
  MOD_RES (6)..(7)..(39)..(41): Xaa is C or S
AVPKAXXAPTKLNAISVLYFDSSNNVILKKYRNMVVKAXGX

SEQ ID NO: 9372 - protein, 37 aa, Artificial Sequence
  GFR-binding peptide
  MOD_RES (3)..(4)..(37): Xaa is C or S
  MOD_RES (18)..(19)..(20)..(21)..(22): Xaa is A or G
  MOD_RES (23)..(24)..(25)..(26): Xaa is A or G or is absent
SPXXVSQDLSATSILYYXXXXXXXXXLRKHRMIVKSX

SEQ ID NO: 9373 - protein, 39 aa, Artificial Sequence
  GFR-binding peptide
  MOD_RES (4)..(5)..(36)..(38): Xaa is C or S
ASPXXVSQDLNAISILYFIGKTPKILKKYRMIVKSXKXS

SEQ ID NO: 9374 - protein, 42 aa, Artificial Sequence
  GFR-binding peptide
  MOD_RES (4)..(5)..(39)..(41): Xaa is C or S
  MOD_RES (19)..(20)..(21)..(22)..(23): Xaa is A or G
  MOD_RES (24)..(25)..(26)..(27): Xaa is A or G or is absent
PKPXXAPTQLSPISVLYKXXXXXXXXXLKYHYNMVVRAXGXH

SEQ ID NO: 9375 - protein, 33 aa, Artificial Sequence
  GFR-binding peptide
  MOD_RES (32)..(32): Xaa is C or S
APTKLSPISVLYKDDSSNVILKYHYNMVVRSXG

SEQ ID NO: 9376 - protein, 37 aa, Artificial Sequence
  GFR-binding peptide
  MOD_RES (5)..(6): Xaa is C or S
VPKAXXAPTKLSAISVLYLDSSNNVILKNYQNMVVKA

SEQ ID NO: 9377 - protein, 37 aa, Artificial Sequence
  GFR-binding peptide
  MOD_RES (1)..(34)..(36): Xaa is C or S
  MOD_RES (15)..(16)..(17)..(18)..(19): Xaa is A or G
  MOD_RES (20)..(21)..(22)..(23): Xaa is A or G or is absent
XVPQALSAISILYLXXXXXXXXXLKNYQMIVRSXKXS

SEQ ID NO: 9378 - protein, 36 aa, Artificial Sequence
  GFR-binding peptide
  MOD_RES (4)..(4): Xaa is C or S
  MOD_RES (18)..(19)..(20)..(21)..(22): Xaa is A or G
  MOD_RES (23)..(24)..(25)..(26): Xaa is A or G or is absent
KPTXAPTKLSATSVLYYXXXXXXXXXLRKHRNMVVR

SEQ ID NO: 9379 - protein, 36 aa, Artificial Sequence
  GFR-binding peptide
  MOD_RES (5)..(6): Xaa is C or S
IPKAXXVPTELSATSMLYYDENEKVVLRKHRDMVVE

SEQ ID NO: 9380 - protein, 37 aa, Artificial Sequence
  GFR-binding peptide
  MOD_RES (3)..(4)..(37): Xaa is C or S
  MOD_RES (18)..(19)..(20)..(21)..(22): Xaa is A or G
  MOD_RES (23)..(24)..(25)..(26): Xaa is A or G or is absent
SPXXVSQDLSAISILYLXXXXXXXXXLKNYQMIVKSX

SEQ ID NO: 9381 - protein, 35 aa, Artificial Sequence
  GFR-binding peptide
  MOD_RES (2)..(3): Xaa is C or S
  MOD_RES (17)..(18)..(19)..(20)..(21): Xaa is A or G
  MOD_RES (22)..(23)..(24)..(25): Xaa is A or G or is absent
PXXAPTKLSATSVLYYXXXXXXXXXLRKHRNMVVR

SEQ ID NO: 9382 - protein, 42 aa, Artificial Sequence
  GFR-binding peptide
  MOD_RES (5)..(6)..(39)..(41): Xaa is C or S
  MOD_RES (20)..(21)..(22)..(23)..(24): Xaa is A or G
  MOD_RES (25)..(26)..(27)..(28): Xaa is A or G or is absent
SASPXXVSQDLSAISILYLXXXXXXXXXLKNYQMIVKSXKXS

SEQ ID NO: 9383 - protein, 32 aa, Artificial Sequence
  GFR-binding peptide
  MOD_RES (14)..(15)..(16)..(17)..(18): Xaa is A or G
  MOD_RES (19)..(20)..(21)..(22): Xaa is A or G or is absent
VSQDLNAISILYFXXXXXXXXXLKKYRMIVKS

SEQ ID NO: 9384 - protein, 43 aa, Artificial Sequence
  GFR-binding peptide
  MOD_RES (6)..(7)..(42): Xaa is C or S
  MOD_RES (21)..(22)..(23)..(24)..(25): Xaa is A or G
  MOD_RES (26)..(27)..(28)..(29): Xaa is A or G or is absent
KVGKAXXVPTKLSATSVLYYXXXXXXXXXLRKHREGMSVAEXG

SEQ ID NO: 9385 - protein, 35 aa, Artificial Sequence
  GFR-binding peptide
  MOD_RES (4)..(5): Xaa is C or S
PKPXXAPTQLSATSVLYYDDSSNVILRKHRNMVVR

SEQ ID NO: 9386 - protein, 37 aa, Artificial Sequence
  GFR-binding peptide
  MOD_RES (2)..(3)..(35)..(37): Xaa is C or S
AXXVPTELSPISMLYKDEYDKVVLKYHYEMVVEGXGX

SEQ ID NO: 9387 - protein, 39 aa, Artificial Sequence
  GFR-binding peptide
  MOD_RES (4)..(5)..(39): Xaa is C or S
  MOD_RES (19)..(20)..(21)..(22)..(23): Xaa is A or G
  MOD_RES (24)..(25)..(26)..(27): Xaa is A or G or is absent
PKPXXAPTQLNAISVLYFXXXXXXXXXLKKYRNMVVRAX

SEQ ID NO: 9388 - protein, 40 aa, Artificial Sequence
  GFR-binding peptide
  MOD_RES (3)..(4)..(38)..(40): Xaa is C or S
  MOD_RES (18)..(19)..(20)..(21)..(22): Xaa is A or G
  MOD_RES (23)..(24)..(25)..(26): Xaa is A or G or is absent
KAXXVPTELSATSMLYYXXXXXXXXXLRKHREMVVEGXGX

SEQ ID NO: 9389 - protein, 38 aa, Artificial Sequence
  GFR-binding peptide
  MOD_RES (3)..(4)..(37): Xaa is C or S
  MOD_RES (18)..(19)..(20)..(21)..(22): Xaa is A or G
  MOD_RES (23)..(24)..(25)..(26): Xaa is A or G or is absent
SPXXVPQDLSATSILYYXXXXXXXXXLRKHRMVVKSXK

SEQ ID NO: 9390 - protein, 38 aa, Artificial Sequence
  GFR-binding peptide
  MOD_RES (1)..(2)..(35)..(37): Xaa is C or S
  MOD_RES (16)..(17)..(18)..(19)..(20): Xaa is A or G
  MOD_RES (21)..(22)..(23)..(24): Xaa is A or G or is absent
XXVPQALNAISILYFXXXXXXXXXLKKYRMIVRSXKXS

SEQ ID NO: 9391 - protein, 34 aa, Artificial Sequence
  GFR-binding peptide
  MOD_RES (3)..(4): Xaa is C or S
APXXVPQALSPISILYKVGRKPKVLKYHYMIVRS

SEQ ID NO: 9392 - protein, 34 aa, Artificial Sequence
  GFR-binding peptide
  MOD_RES (1)..(1): Xaa is C or S
  MOD_RES (15)..(16)..(17)..(18)..(19): Xaa is A or G
  MOD_RES (20)..(21)..(22)..(23): Xaa is A or G or is absent
XVPTELSPISMLYKXXXXXXXXXLKYHYEMVVEG

SEQ ID NO: 9393 - protein, 34 aa, Artificial Sequence
  GFR-binding peptide
PTQVQLSATSVLYYEIVRKKPIFLRKHRTLEDHL

SEQ ID NO: 9394 - protein, 37 aa, Artificial Sequence
  GFR-binding peptide
  MOD_RES (35)..(37): Xaa is C or S
  MOD_RES (14)..(15)..(16)..(17)..(18): Xaa is A or G
  MOD_RES (19)..(20)..(21)..(22): Xaa is A or G or is absent
VPTKLNAISVLYFXXXXXXXXXLKKYREGMSVAEXGX

SEQ ID NO: 9395 - protein, 38 aa, Artificial Sequence
  GFR-binding peptide
  MOD_RES (3)..(4)..(38): Xaa is C or S
  MOD_RES (18)..(19)..(20)..(21)..(22): Xaa is A or G
  MOD_RES (23)..(24)..(25)..(26): Xaa is A or G or is absent
KAXXAPTKLNAISVLYFXXXXXXXXXLKKYRNMVVKAX

SEQ ID NO: 9396 - protein, 42 aa, Artificial Sequence
  GFR-binding peptide
  MOD_RES (5)..(6)..(40)..(42): Xaa is C or S
  MOD_RES (20)..(21)..(22)..(23)..(24): Xaa is A or G
  MOD_RES (25)..(26)..(27)..(28): Xaa is A or G or is absent
VPKPXXAPTKLSPISVLYKXXXXXXXXXLKYHYNMVVRSXGX

SEQ ID NO: 9397 - protein, 38 aa, Artificial Sequence
  GFR-binding peptide
  MOD_RES (5)..(6): Xaa is C or S
  MOD_RES (20)..(21)..(22)..(23)..(24): Xaa is A or G
  MOD_RES (25)..(26)..(27)..(28): Xaa is A or G or is absent
SASPXXVSQDLSAISILYLXXXXXXXXXLKNYQMIVKS

SEQ ID NO: 9398 - protein, 34 aa, Artificial Sequence
  GFR-binding peptide
  MOD_RES (1)..(2): Xaa is C or S
  MOD_RES (16)..(17)..(18)..(19)..(20): Xaa is A or G
  MOD_RES (21)..(22)..(23)..(24): Xaa is A or G or is absent
XXVPQALSAISILYLXXXXXXXXXLKNYQMIVRS

SEQ ID NO: 9399 - protein, 38 aa, Artificial Sequence
  GFR-binding peptide
  MOD_RES (4)..(5)..(38): Xaa is C or S
  MOD_RES (19)..(20)..(21)..(22)..(23): Xaa is A or G
  MOD_RES (24)..(25)..(26)..(27): Xaa is A or G or is absent
AAPXXVPQALSATSILYYXXXXXXXXXLRKHRMIVRSX

SEQ ID NO: 9400 - protein, 39 aa, Artificial Sequence
  GFR-binding peptide
  MOD_RES (4)..(5)..(39): Xaa is C or S
  MOD_RES (19)..(20)..(21)..(22)..(23): Xaa is A or G
  MOD_RES (24)..(25)..(26)..(27): Xaa is A or G or is absent
PKPXXAPTQLSAISVLYLXXXXXXXXXLKNYQNMVVRAX

SEQ ID NO: 9401 - protein, 38 aa, Artificial Sequence
  GFR-binding peptide
  MOD_RES (4)..(5)..(38): Xaa is C or S
  MOD_RES (19)..(20)..(21)..(22)..(23): Xaa is A or G
  MOD_RES (24)..(25)..(26)..(27): Xaa is A or G or is absent
AAPXXVPQALSAISILYLXXXXXXXXXLKNYQMIVRSX

SEQ ID NO: 9402 - protein, 40 aa, Artificial Sequence
  GFR-binding peptide
  MOD_RES (7)..(7): Xaa is C or S
  MOD_RES (21)..(22)..(23)..(24)..(25): Xaa is A or G
  MOD_RES (26)..(27)..(28)..(29): Xaa is A or G or is absent
HVTKPTXAPTKLSATSVLYYXXXXXXXXXLRKHRNMVVRS

SEQ ID NO: 9403 - protein, 36 aa, Artificial Sequence
  GFR-binding peptide
  MOD_RES (4)..(5)..(36): Xaa is C or S
ASPXXVPQDLSPISILYKVGRTPKVLKYHYMVVKSX

SEQ ID NO: 9404 - protein, 34 aa, Artificial Sequence
  GFR-binding peptide
  MOD_RES (1)..(2)..(34): Xaa is C or S
XXVPTELNAISMLYFDEYDKVVLKKYREMVVEGX

SEQ ID NO: 9405 - protein, 35 aa, Artificial Sequence
  GFR-binding peptide
  MOD_RES (35)..(35): Xaa is C or S
  MOD_RES (14)..(15)..(16)..(17)..(18): Xaa is A or G
  MOD_RES (19)..(20)..(21)..(22): Xaa is A or G or is absent
VPTKLSAISVLYLXXXXXXXXXLKNYQEGMSVAEX

SEQ ID NO: 9406 - protein, 37 aa, Artificial Sequence
  GFR-binding peptide
  MOD_RES (4)..(5)..(36): Xaa is C or S
ASPXXVPQDLNAISILYFVGRTPKVLKKYRMVVKSXK

SEQ ID NO: 9407 - protein, 37 aa, Artificial Sequence
  GFR-binding peptide
  MOD_RES (5)..(5): Xaa is C or S
  MOD_RES (19)..(20)..(21)..(22)..(23): Xaa is A or G
  MOD_RES (24)..(25)..(26)..(27): Xaa is A or G or is absent
TKPTXAPTKLNAISVLYFXXXXXXXXXLKKYRNMVVR

SEQ ID NO: 9408 - protein, 38 aa, Artificial Sequence
  GFR-binding peptide
  MOD_RES (3)..(4)..(38): Xaa is C or S
  MOD_RES (18)..(19)..(20)..(21)..(22): Xaa is A or G
  MOD_RES (23)..(24)..(25)..(26): Xaa is A or G or is absent
KAXXAPTKLSAISVLYLXXXXXXXXXLKNYQNMVVKAX

SEQ ID NO: 9409 - protein, 36 aa, Artificial Sequence
  GFR-binding peptide
  MOD_RES (1)..(2)..(35): Xaa is C or S
XXVPTKLNAISVLYFDDMGVPTLKKYREGMSVAEXG

SEQ ID NO: 9410 - protein, 34 aa, Artificial Sequence
  GFR-binding peptide
  MOD_RES (33)..(33): Xaa is C or S
  MOD_RES (14)..(15)..(16)..(17)..(18): Xaa is A or G
  MOD_RES (19)..(20)..(21)..(22): Xaa is A or G or is absent
VPQALSATSILYYXXXXXXXXXLRKHRMIVRSXK

SEQ ID NO: 9411 - protein, 41 aa, Artificial Sequence
  GFR-binding peptide
  MOD_RES (4)..(5)..(38)..(40): Xaa is C or S
GKAXXVPTKLSATSVLYYDDMGVPTLRKHREGMSVAEXGXR

SEQ ID NO: 9412 - protein, 43 aa, Artificial Sequence
  GFR-binding peptide
  MOD_RES (6)..(7)..(42): Xaa is C or S
  MOD_RES (21)..(22)..(23)..(24)..(25): Xaa is A or G
  MOD_RES (26)..(27)..(28)..(29): Xaa is A or G or is absent
KVGKAXXVPTKLSAISVLYLXXXXXXXXXLKNYQEGMSVAEXG

SEQ ID NO: 9413 - protein, 42 aa, Artificial Sequence
  GFR-binding peptide
  MOD_RES (2)..(39)..(41): Xaa is C or S
QXRPTQVQLSAISVLYLEIVRKKPIFLKNYQTLEDHLAXKXE

SEQ ID NO: 9414 - protein, 35 aa, Artificial Sequence
  GFR-binding peptide
  MOD_RES (2)..(3)..(34): Xaa is C or S
PXXVPQDLSPISILYKVGRTPKVLKYHYMVVKSXK

SEQ ID NO: 9415 - protein, 36 aa, Artificial Sequence
  GFR-binding peptide
  MOD_RES (1)..(35): Xaa is C or S
  MOD_RES (15)..(16)..(17)..(18)..(19): Xaa is A or G
  MOD_RES (20)..(21)..(22)..(23): Xaa is A or G or is absent
XVPTELSPISMLYKXXXXXXXXXLKYHYEMVVEGXG

SEQ ID NO: 9416 - protein, 32 aa, Artificial Sequence
  GFR-binding peptide
  MOD_RES (1)..(32): Xaa is C or S
XVSQDLNAISILYFIGKTPKILKKYRMIVKSX

SEQ ID NO: 9417 - protein, 42 aa, Artificial Sequence
  GFR-binding peptide
  MOD_RES (7)..(41): Xaa is C or S
  MOD_RES (21)..(22)..(23)..(24)..(25): Xaa is A or G
  MOD_RES (26)..(27)..(28)..(29): Xaa is A or G or is absent
HVTKPTXAPTKLNAISVLYFXXXXXXXXXLKKYRNMVVRSXG

SEQ ID NO: 9418 - protein, 36 aa, Artificial Sequence
  GFR-binding peptide
  MOD_RES (2)..(3)..(35): Xaa is C or S
AXXVPTELSATSMLYYDENEKVVLRKHRDMVVEGXG

SEQ ID NO: 9419 - protein, 40 aa, Artificial Sequence
  GFR-binding peptide
  MOD_RES (6)..(38)..(40): Xaa is C or S
VTKPTXAPTKLSAISVLYLDDSSNVILKNYQNMVVRSXGX

SEQ ID NO: 9420 - protein, 36 aa, Artificial Sequence
  GFR-binding peptide
  MOD_RES (2)..(3): Xaa is C or S
  MOD_RES (17)..(18)..(19)..(20)..(21): Xaa is A or G
  MOD_RES (22)..(23)..(24)..(25): Xaa is A or G or is absent
AXXVPTELNAISMLYFXXXXXXXXXLKKYREMVVEG

SEQ ID NO: 9421 - protein, 33 aa, Artificial Sequence
  GFR-binding peptide
  MOD_RES (33)..(33): Xaa is C or S
  MOD_RES (14)..(15)..(16)..(17)..(18): Xaa is A or G
  MOD_RES (19)..(20)..(21)..(22): Xaa is A or G or is absent
VPQDLSATSILYYXXXXXXXXXLRKHRMVVKSX

SEQ ID NO: 9422 - protein, 37 aa, Artificial Sequence
  GFR-binding peptide
  MOD_RES (4)..(5): Xaa is C or S
GKAXXVPTKLSATSVLYYDDMGVPTLRKHREGMSVAE

SEQ ID NO: 9423 - protein, 39 aa, Artificial Sequence
  GFR-binding peptide
  MOD_RES (3)..(4)..(36)..(38): Xaa is C or S
KAXXVPTELSATSMLYYDENEKVVLRKHRDMVVEGXGXR

SEQ ID NO: 9424 - protein, 40 aa, Artificial Sequence
  GFR-binding peptide
  MOD_RES (37)..(39): Xaa is C or S
RPTQVQLSAISVLYLEIVRKKPIFLKNYQTLEDHLAXKXE

SEQ ID NO: 9425 - protein, 39 aa, Artificial Sequence
  GFR-binding peptide
  MOD_RES (6)..(7)..(39): Xaa is C or S
YVPKPXXAPTKLSATSVLYYDDSSNVILRKHRNMVVRSX

SEQ ID NO: 9426 - protein, 38 aa, Artificial Sequence
  GFR-binding peptide
  MOD_RES (35)..(37): Xaa is C or S
TQVQLSATSVLYYEIVRKKPIFLRKHRTLEDHLAXKXE

SEQ ID NO: 9427 - protein, 34 aa, Artificial Sequence
  GFR-binding peptide
  MOD_RES (1)..(2): Xaa is C or S
  MOD_RES (16)..(17)..(18)..(19)..(20): Xaa is A or G
  MOD_RES (21)..(22)..(23)..(24): Xaa is A or G or is absent
XXVPTELSPISMLYKXXXXXXXXXLKYHYEMVVE

SEQ ID NO: 9428 - protein, 39 aa, Artificial Sequence
  GFR-binding peptide
  MOD_RES (2)..(3)..(37)..(39): Xaa is C or S
  MOD_RES (17)..(18)..(19)..(20)..(21): Xaa is A or G
  MOD_RES (22)..(23)..(24)..(25): Xaa is A or G or is absent
AXXVPTELSATSMLYYXXXXXXXXXLRKHRDMVVEGXGX

SEQ ID NO: 9429 - protein, 32 aa, Artificial Sequence
  GFR-binding peptide
  MOD_RES (1)..(32): Xaa is C or S
XVPQDLSAISILYLVGRTPKVLKNYQMVVKSX

SEQ ID NO: 9430 - protein, 37 aa, Artificial Sequence
  GFR-binding peptide
  MOD_RES (5)..(6): Xaa is C or S
IPKAXXVPTELSATSMLYYDENEKVVLRKHRDMVVEG

SEQ ID NO: 9431 - protein, 38 aa, Artificial Sequence
  GFR-binding peptide
  MOD_RES (1)..(35)..(37): Xaa is C or S
  MOD_RES (15)..(16)..(17)..(18)..(19): Xaa is A or G
  MOD_RES (20)..(21)..(22)..(23): Xaa is A or G or is absent
XAPTKLSAISVLYLXXXXXXXXXLKNYQNMVVRSXGXH

SEQ ID NO: 9432 - protein, 39 aa, Artificial Sequence
  GFR-binding peptide
  MOD_RES (3)..(4)..(37)..(39): Xaa is C or S
KAXXVPTKLSAISVLYLDDMGVPTLKNYQEGMSVAEXGX

SEQ ID NO: 9433 - protein, 38 aa, Artificial Sequence
  GFR-binding peptide
  MOD_RES (1)..(2)..(35)..(37): Xaa is C or S
  MOD_RES (16)..(17)..(18)..(19)..(20): Xaa is A or G
  MOD_RES (21)..(22)..(23)..(24): Xaa is A or G or is absent
XXVPQDLSAISILYLXXXXXXXXXLKNYQMVVKSXKXS

SEQ ID NO: 9434 - protein, 36 aa, Artificial Sequence
  GFR-binding peptide
  MOD_RES (1)..(2)..(36): Xaa is C or S
  MOD_RES (16)..(17)..(18)..(19)..(20): Xaa is A or G
  MOD_RES (21)..(22)..(23)..(24): Xaa is A or G or is absent
XXAPTKLSAISVLYLXXXXXXXXXLKNYQNMVVRSX

SEQ ID NO: 9435 - protein, 34 aa, Artificial Sequence
  GFR-binding peptide
RPTQVQLSATSVLYYEIVRKKPIFLRKHRTLEDH

SEQ ID NO: 9436 - protein, 34 aa, Artificial Sequence
  GFR-binding peptide
  MOD_RES (32)..(34): Xaa is C or S
VPTELSATSMLYYDEYDKVVLRKHREMVVEGXGX

SEQ ID NO: 9437 - protein, 40 aa, Artificial Sequence
  GFR-binding peptide
  MOD_RES (3)..(4)..(38)..(40): Xaa is C or S
  MOD_RES (18)..(19)..(20)..(21)..(22): Xaa is A or G
  MOD_RES (23)..(24)..(25)..(26): Xaa is A or G or is absent
KPXXAPTQLSATSVLYYXXXXXXXXXLRKHRNMVVRAXGX

SEQ ID NO: 9438 - protein, 38 aa, Artificial Sequence
  GFR-binding peptide
  MOD_RES (2)..(3)..(36)..(38): Xaa is C or S
  MOD_RES (17)..(18)..(19)..(20)..(21): Xaa is A or G
  MOD_RES (22)..(23)..(24)..(25): Xaa is A or G or is absent
PXXVPQALSPISILYKXXXXXXXXXLKYHYMIVRSXKX

SEQ ID NO: 9439 - protein, 37 aa, Artificial Sequence
  GFR-binding peptide
  MOD_RES (4)..(4): Xaa is C or S
  MOD_RES (18)..(19)..(20)..(21)..(22): Xaa is A or G
  MOD_RES (23)..(24)..(25)..(26): Xaa is A or G or is absent
KPTXAPTKLSPISVLYKXXXXXXXXXLKYHYNMVVRS

SEQ ID NO: 9440 - protein, 31 aa, Artificial Sequence
  GFR-binding peptide
  MOD_RES (31)..(31): Xaa is C or S
VSQDLSAISILYLIGKTPKILKNYQMIVKSX

SEQ ID NO: 9441 - protein, 36 aa, Artificial Sequence
  GFR-binding peptide
  MOD_RES (2)..(3)..(35): Xaa is C or S
AXXAPTKLSAISVLYLDSSNNVILKNYQNMVVKAXG

SEQ ID NO: 9442 - protein, 39 aa, Artificial Sequence
  GFR-binding peptide
  MOD_RES (6)..(7)..(39): Xaa is C or S
KIPKAXXVPTELSATSMLYYDENEKVVLRKHRDMVVEGX

SEQ ID NO: 9443 - protein, 34 aa, Artificial Sequence
  GFR-binding peptide
  MOD_RES (31)..(33): Xaa is C or S
VSQDLSAISILYLIGKTPKILKNYQMIVKSXKXS

SEQ ID NO: 9444 - protein, 30 aa, Artificial Sequence
  GFR-binding peptide
VPQALNAISILYFVGRKPKVLKKYRMIVRS

SEQ ID NO: 9445 - protein, 41 aa, Artificial Sequence
  GFR-binding peptide
  MOD_RES (3)..(4)..(38)..(40): Xaa is C or S
  MOD_RES (18)..(19)..(20)..(21)..(22): Xaa is A or G
  MOD_RES (23)..(24)..(25)..(26): Xaa is A or G or is absent
KPXXAPTKLNAISVLYFXXXXXXXXXLKKYRNMVVRSXGXH

SEQ ID NO: 9446 - protein, 38 aa, Artificial Sequence
  GFR-binding peptide
  MOD_RES (5)..(6)..(37): Xaa is C or S
SASPXXVPQDLSAISILYLVGRTPKVLKNYQMVVKSXK

SEQ ID NO: 9447 - protein, 38 aa, Artificial Sequence
  GFR-binding peptide
  MOD_RES (6)..(7): Xaa is C or S
TVPKPXXAPTQLSPISVLYKDDSSNVILKYHYNMVVRA

SEQ ID NO: 9448 - protein, 38 aa, Artificial Sequence
  GFR-binding peptide
  MOD_RES (4)..(5)..(36)..(38): Xaa is C or S
ASPXXVSQDLSAISILYLIGKTPKILKNYQMIVKSXKX

SEQ ID NO: 9449 - protein, 31 aa, Artificial Sequence
  GFR-binding peptide
APTKLSPISVLYKDDSSNVILKYHYNMVVRS

SEQ ID NO: 9450 - protein, 39 aa, Artificial Sequence
  GFR-binding peptide
  MOD_RES (3)..(4)..(38): Xaa is C or S
  MOD_RES (18)..(19)..(20)..(21)..(22): Xaa is A or G
  MOD_RES (23)..(24)..(25)..(26): Xaa is A or G or is absent
KPXXAPTKLNAISVLYFXXXXXXXXXLKKYRNMVVRSXG

SEQ ID NO: 9451 - protein, 41 aa, Artificial Sequence
  GFR-binding peptide
  MOD_RES (5)..(6)..(41): Xaa is C or S
  MOD_RES (20)..(21)..(22)..(23)..(24): Xaa is A or G
  MOD_RES (25)..(26)..(27)..(28): Xaa is A or G or is absent
VGKAXXVPTKLSAISVLYLXXXXXXXXXLKNYQEGMSVAEX

SEQ ID NO: 9452 - protein, 35 aa, Artificial Sequence
  GFR-binding peptide
  MOD_RES (3)..(4)..(35): Xaa is C or S
APXXVPQALSAISILYLVGRKPKVLKNYQMIVRSX

SEQ ID NO: 9453 - protein, 39 aa, Artificial Sequence
  GFR-binding peptide
  MOD_RES (5)..(6): Xaa is C or S
  MOD_RES (20)..(21)..(22)..(23)..(24): Xaa is A or G
  MOD_RES (25)..(26)..(27)..(28): Xaa is A or G or is absent
VPKPXXAPTKLSAISVLYLXXXXXXXXXLKNYQNMVVRS

SEQ ID NO: 9454 - protein, 37 aa, Artificial Sequence
  GFR-binding peptide
  MOD_RES (37)..(37): Xaa is C or S
  MOD_RES (16)..(17)..(18)..(19)..(20): Xaa is A or G
  MOD_RES (21)..(22)..(23)..(24): Xaa is A or G or is absent
RPTQVQLNAISVLYFXXXXXXXXXLKKYRTLEDHLAX

SEQ ID NO: 9455 - protein, 40 aa, Artificial Sequence
  GFR-binding peptide
  MOD_RES (4)..(5)..(37)..(39): Xaa is C or S
PKAXXVPTELSPISMLYKDENEKVVLKYHYDMVVEGXGXR

SEQ ID NO: 9456 - protein, 38 aa, Artificial Sequence
  GFR-binding peptide
  MOD_RES (5)..(6): Xaa is C or S
  MOD_RES (20)..(21)..(22)..(23)..(24): Xaa is A or G
  MOD_RES (25)..(26)..(27)..(28): Xaa is A or G or is absent
IPKAXXVPTELSPISMLYKXXXXXXXXXLKYHYDMVVE

SEQ ID NO: 9457 - protein, 40 aa, Artificial Sequence
  GFR-binding peptide
  MOD_RES (6)..(40): Xaa is C or S
  MOD_RES (20)..(21)..(22)..(23)..(24): Xaa is A or G
  MOD_RES (25)..(26)..(27)..(28): Xaa is A or G or is absent
VTKPTXAPTKLSPISVLYKXXXXXXXXXLKYHYNMVVRSX

SEQ ID NO: 9458 - protein, 36 aa, Artificial Sequence
  GFR-binding peptide
  MOD_RES (35)..(35): Xaa is C or S
TQVQLSAISVLYLEIVRKKPIFLKNYQTLEDHLAXK

SEQ ID NO: 9459 - protein, 38 aa, Artificial Sequence
  GFR-binding peptide
  MOD_RES (2)..(3)..(35)..(37): Xaa is C or S
PXXAPTQLSPISVLYKDDSSNVILKYHYNMVVRAXGXH

SEQ ID NO: 9460 - protein, 36 aa, Artificial Sequence
  GFR-binding peptide
  MOD_RES (35)..(35): Xaa is C or S
  MOD_RES (14)..(15)..(16)..(17)..(18): Xaa is A or G
  MOD_RES (19)..(20)..(21)..(22): Xaa is A or G or is absent
VPTKLNAISVLYFXXXXXXXXXLKKYREGMSVAEXG

SEQ ID NO: 9461 - protein, 34 aa, Artificial Sequence
  GFR-binding peptide
  MOD_RES (1)..(33): Xaa is C or S
XAPTKLSATSVLYYDDSSNVILRKHRNMVVRSXG

SEQ ID NO: 9462 - protein, 36 aa, Artificial Sequence
  GFR-binding peptide
  MOD_RES (3)..(4): Xaa is C or S
  MOD_RES (18)..(19)..(20)..(21)..(22): Xaa is A or G
  MOD_RES (23)..(24)..(25)..(26): Xaa is A or G or is absent
KPXXAPTKLSPISVLYKXXXXXXXXXLKYHYNMVVR

SEQ ID NO: 9463 - protein, 37 aa, Artificial Sequence
  GFR-binding peptide
  MOD_RES (2)..(3)..(36): Xaa is C or S
  MOD_RES (17)..(18)..(19)..(20)..(21): Xaa is A or G
  MOD_RES (22)..(23)..(24)..(25): Xaa is A or G or is absent
PXXVSQDLSAISILYLXXXXXXXXXLKNYQMIVKSXK

SEQ ID NO: 9464 - protein, 39 aa, Artificial Sequence
  GFR-binding peptide
  MOD_RES (7)..(39): Xaa is C or S
HVTKPTXAPTKLSPISVLYKDDSSNVILKYHYNMVVRSX

SEQ ID NO: 9465 - protein, 39 aa, Artificial Sequence
  GFR-binding peptide
  MOD_RES (3)..(4)..(36)..(38): Xaa is C or S
KAXXVPTELSPISMLYKDEYDKVVLKYHYEMVVEGXGXR

SEQ ID NO: 9466 - protein, 34 aa, Artificial Sequence
  GFR-binding peptide
  MOD_RES (3)..(4): Xaa is C or S
APXXVPQALSAISILYLVGRKPKVLKNYQMIVRS

SEQ ID NO: 9467 - protein, 41 aa, Artificial Sequence
  GFR-binding peptide
  MOD_RES (5)..(6)..(39)..(41): Xaa is C or S
  MOD_RES (20)..(21)..(22)..(23)..(24): Xaa is A or G
  MOD_RES (25)..(26)..(27)..(28): Xaa is A or G or is absent
SASPXXVPQDLSAISILYLXXXXXXXXXLKNYQMVVKSXKX

SEQ ID NO: 9468 - protein, 36 aa, Artificial Sequence
  GFR-binding peptide
  MOD_RES (3)..(4)..(35): Xaa is C or S
APXXVPQALNAISILYFVGRKPKVLKKYRMIVRSXK

SEQ ID NO: 9469 - protein, 37 aa, Artificial Sequence
  GFR-binding peptide
  MOD_RES (1)..(2)..(34)..(36): Xaa is C or S
XXAPTKLSATSVLYYDDSSNVILRKHRNMVVRSXGXH

SEQ ID NO: 9470 - protein, 36 aa, Artificial Sequence
  GFR-binding peptide
  MOD_RES (1)..(2)..(34)..(36): Xaa is C or S
XXAPTKLSPISVLYKDDSSNVILKYHYNMVVRSXGX

SEQ ID NO: 9471 - protein, 40 aa, Artificial Sequence
  GFR-binding peptide
  MOD_RES (4)..(5)..(40): Xaa is C or S
  MOD_RES (19)..(20)..(21)..(22)..(23): Xaa is A or G
  MOD_RES (24)..(25)..(26)..(27): Xaa is A or G or is absent
GKAXXVPTKLSPISVLYKXXXXXXXXXLKYHYEGMSVAEX

SEQ ID NO: 9472 - protein, 39 aa, Artificial Sequence
  GFR-binding peptide
  MOD_RES (2)..(36)..(38): Xaa is C or S
  MOD_RES (16)..(17)..(18)..(19)..(20): Xaa is A or G
  MOD_RES (21)..(22)..(23)..(24): Xaa is A or G or is absent
TXAPTKLNAISVLYFXXXXXXXXXLKKYRNMVVRSXGXH

SEQ ID NO: 9473 - protein, 39 aa, Artificial Sequence
  GFR-binding peptide
  MOD_RES (6)..(7): Xaa is C or S
  MOD_RES (21)..(22)..(23)..(24)..(25): Xaa is A or G
  MOD_RES (26)..(27)..(28)..(29): Xaa is A or G or is absent
ASAAPXXVPQALSAISILYLXXXXXXXXXLKNYQMIVRS

SEQ ID NO: 9474 - protein, 35 aa, Artificial Sequence
  GFR-binding peptide
  MOD_RES (2)..(3)..(34): Xaa is C or S
PXXVSQDLNAISILYFIGKTPKILKKYRMIVKSXK

SEQ ID NO: 9475 - protein, 39 aa, Artificial Sequence
  GFR-binding peptide
  MOD_RES (5)..(6)..(38): Xaa is C or S
VPKAXXAPTKLNAISVLYFDSSNNVILKKYRNMVVKAXG

SEQ ID NO: 9476 - protein, 36 aa, Artificial Sequence
  GFR-binding peptide
  MOD_RES (1)..(1): Xaa is C or S
  MOD_RES (17)..(18)..(19)..(20)..(21): Xaa is A or G
  MOD_RES (22)..(23)..(24)..(25): Xaa is A or G or is absent
XRPTQVQLNAISVLYFXXXXXXXXXLKKYRTLEDHL

SEQ ID NO: 9477 - protein, 34 aa, Artificial Sequence
  GFR-binding peptide
  MOD_RES (1)..(1): Xaa is C or S
  MOD_RES (15)..(16)..(17)..(18)..(19): Xaa is A or G
  MOD_RES (20)..(21)..(22)..(23): Xaa is A or G or is absent
XVPTELSPISMLYKXXXXXXXXXLKYHYDMVVEG

SEQ ID NO: 9478 - protein, 38 aa, Artificial Sequence
  GFR-binding peptide
  MOD_RES (5)..(6): Xaa is C or S
  MOD_RES (20)..(21)..(22)..(23)..(24): Xaa is A or G
  MOD_RES (25)..(26)..(27)..(28): Xaa is A or G or is absent
SASPXXVSQDLSPISILYKXXXXXXXXXLKYHYMIVKS

SEQ ID NO: 9479 - protein, 37 aa, Artificial Sequence
  GFR-binding peptide
  MOD_RES (5)..(6): Xaa is C or S
VPKAXXAPTKLNAISVLYFDSSNNVILKKYRNMVVKA

SEQ ID NO: 9480 - protein, 38 aa, Artificial Sequence
  GFR-binding peptide
  MOD_RES (5)..(6): Xaa is C or S
  MOD_RES (20)..(21)..(22)..(23)..(24): Xaa is A or G
  MOD_RES (25)..(26)..(27)..(28): Xaa is A or G or is absent
SAAPXXVPQALSPISILYKXXXXXXXXXLKYHYMIVRS

SEQ ID NO: 9481 - protein, 36 aa, Artificial Sequence
  GFR-binding peptide
  MOD_RES (33)..(35): Xaa is C or S
  MOD_RES (14)..(15)..(16)..(17)..(18): Xaa is A or G
  MOD_RES (19)..(20)..(21)..(22): Xaa is A or G or is absent
VSQDLSATSILYYXXXXXXXXXLRKHRMIVKSXKXS

SEQ ID NO: 9482 - protein, 39 aa, Artificial Sequence
  GFR-binding peptide
  MOD_RES (6)..(7)..(38): Xaa is C or S
ASASPXXVSQDLSPISILYKIGKTPKILKYHYMIVKSXK

SEQ ID NO: 9483 - protein, 32 aa, Artificial Sequence
  GFR-binding peptide
TQVQLSAISVLYLEIVRKKPIFLKNYQTLEDH

SEQ ID NO: 9484 - protein, 35 aa, Artificial Sequence
  GFR-binding peptide
  MOD_RES (1)..(2)..(34): Xaa is C or S
XXAPTQLSPISVLYKDDSSNVILKYHYNMVVRAXG

SEQ ID NO: 9485 - protein, 41 aa, Artificial Sequence
  GFR-binding peptide
  MOD_RES (3)..(4)..(38)..(40): Xaa is C or S
  MOD_RES (18)..(19)..(20)..(21)..(22): Xaa is A or G
  MOD_RES (23)..(24)..(25)..(26): Xaa is A or G or is absent
KAXXVPTELNAISMLYFXXXXXXXXXLKKYRDMVVEGXGXR

SEQ ID NO: 9486 - protein, 37 aa, Artificial Sequence
  GFR-binding peptide
  MOD_RES (6)..(7): Xaa is C or S
AVPKAXXAPTKLNAISVLYFDSSNNVILKKYRNMVVK

SEQ ID NO: 9487 - protein, 41 aa, Artificial Sequence
  GFR-binding peptide
  MOD_RES (4)..(5)..(39)..(41): Xaa is C or S
  MOD_RES (19)..(20)..(21)..(22)..(23): Xaa is A or G
  MOD_RES (24)..(25)..(26)..(27): Xaa is A or G or is absent
PKAXXVPTELSATSMLYYXXXXXXXXXLRKHREMVVEGXGX

SEQ ID NO: 9488 - protein, 36 aa, Artificial Sequence
  GFR-binding peptide
  MOD_RES (5)..(5): Xaa is C or S
TKPTXAPTKLSAISVLYLDDSSNVILKNYQNMVVRS

SEQ ID NO: 9489 - protein, 37 aa, Artificial Sequence
  GFR-binding peptide
  MOD_RES (2)..(3)..(34)..(36): Xaa is C or S
PXXVSQDLSATSILYYIGKTPKILRKHRMIVKSXKXS

SEQ ID NO: 9490 - protein, 34 aa, Artificial Sequence
  GFR-binding peptide
  MOD_RES (2)..(3): Xaa is C or S
PXXAPTQLSAISVLYLDDSSNVILKNYQNMVVRA

SEQ ID NO: 9491 - protein, 36 aa, Artificial Sequence
  GFR-binding peptide
  MOD_RES (1)..(2)..(35): Xaa is C or S
  MOD_RES (16)..(17)..(18)..(19)..(20): Xaa is A or G
  MOD_RES (21)..(22)..(23)..(24): Xaa is A or G or is absent
XXVSQDLSPISILYKXXXXXXXXXLKYHYMIVKSXK

SEQ ID NO: 9492 - protein, 40 aa, Artificial Sequence
  GFR-binding peptide
  MOD_RES (2)..(3)..(37)..(39): Xaa is C or S
  MOD_RES (17)..(18)..(19)..(20)..(21): Xaa is A or G
  MOD_RES (22)..(23)..(24)..(25): Xaa is A or G or is absent
AXXVPTELNAISMLYFXXXXXXXXXLKKYREMVVEGXGXR

SEQ ID NO: 9493 - protein, 40 aa, Artificial Sequence
  GFR-binding peptide
  MOD_RES (3)..(4)..(38)..(40): Xaa is C or S
  MOD_RES (18)..(19)..(20)..(21)..(22): Xaa is A or G
  MOD_RES (23)..(24)..(25)..(26): Xaa is A or G or is absent
KPXXAPTKLSAISVLYLXXXXXXXXXLKNYQNMVVRSXGX

SEQ ID NO: 9494 - protein, 40 aa, Artificial Sequence
  GFR-binding peptide
  MOD_RES (6)..(7)..(39): Xaa is C or S
AVPKAXXAPTKLSPISVLYKDSSNNVILKYHYNMVVKAXG

SEQ ID NO: 9495 - protein, 32 aa, Artificial Sequence
  GFR-binding peptide
  MOD_RES (1)..(2): Xaa is C or S
XXAPTKLNAISVLYFDSSNNVILKKYRNMVVK

SEQ ID NO: 9496 - protein, 34 aa, Artificial Sequence
  GFR-binding peptide
  MOD_RES (1)..(2): Xaa is C or S
  MOD_RES (16)..(17)..(18)..(19)..(20): Xaa is A or G
  MOD_RES (21)..(22)..(23)..(24): Xaa is A or G or is absent
XXVPTELSAISMLYLXXXXXXXXXLKNYQEMVVE

SEQ ID NO: 9497 - protein, 45 aa, Artificial Sequence
  GFR-binding peptide
  MOD_RES (5)..(42)..(44): Xaa is C or S
  MOD_RES (21)..(22)..(23)..(24)..(25): Xaa is A or G
  MOD_RES (26)..(27)..(28)..(29): Xaa is A or G or is absent
RNVQXRPTQVQLSPISVLYKXXXXXXXXXLKYHYTLEDHLAXKXE

SEQ ID NO: 9498 - protein, 39 aa, Artificial Sequence
  GFR-binding peptide
  MOD_RES (1)..(2)..(37)..(39): Xaa is C or S
  MOD_RES (16)..(17)..(18)..(19)..(20): Xaa is A or G
  MOD_RES (21)..(22)..(23)..(24): Xaa is A or G or is absent
XXVPTKLSPISVLYKXXXXXXXXXLKYHYEGMSVAEXGX

SEQ ID NO: 9499 - protein, 34 aa, Artificial Sequence
  GFR-binding peptide
  MOD_RES (34)..(34): Xaa is C or S
  MOD_RES (14)..(15)..(16)..(17)..(18): Xaa is A or G
  MOD_RES (19)..(20)..(21)..(22): Xaa is A or G or is absent
VPTELNAISMLYFXXXXXXXXXLKKYRDMVVEGX

SEQ ID NO: 9500 - protein, 37 aa, Artificial Sequence
  GFR-binding peptide
  MOD_RES (2)..(2): Xaa is C or S
QXRPTQVQLSPISVLYKEIVRKKPIFLKYHYTLEDHL

SEQ ID NO: 9501 - protein, 36 aa, Artificial Sequence
  GFR-binding peptide
  MOD_RES (3)..(4): Xaa is C or S
  MOD_RES (18)..(19)..(20)..(21)..(22): Xaa is A or G
  MOD_RES (23)..(24)..(25)..(26): Xaa is A or G or is absent
KAXXVPTELSAISMLYLXXXXXXXXXLKNYQDMVVE

SEQ ID NO: 9502 - protein, 39 aa, Artificial Sequence
  GFR-binding peptide
  MOD_RES (5)..(6)..(39): Xaa is C or S
  MOD_RES (20)..(21)..(22)..(23)..(24): Xaa is A or G
  MOD_RES (25)..(26)..(27)..(28): Xaa is A or G or is absent
SASPXXVSQDLSATSILYYXXXXXXXXXLRKHRMIVKSX

SEQ ID NO: 9503 - protein, 43 aa, Artificial Sequence
  GFR-binding peptide
  MOD_RES (6)..(7)..(40)..(42): Xaa is C or S
  MOD_RES (21)..(22)..(23)..(24)..(25): Xaa is A or G
  MOD_RES (26)..(27)..(28)..(29): Xaa is A or G or is absent
ASAAPXXVPQALNAISILYFXXXXXXXXXLKKYRMIVRSXKXS

SEQ ID NO: 9504 - protein, 41 aa, Artificial Sequence
  GFR-binding peptide
  MOD_RES (6)..(7)..(38)..(40): Xaa is C or S
ASAAPXXVPQALNAISILYFVGRKPKVLKKYRMIVRSXKXS

SEQ ID NO: 9505 - protein, 35 aa, Artificial Sequence
  GFR-binding peptide
  MOD_RES (4)..(5): Xaa is C or S
ASPXXVSQDLSAISILYLIGKTPKILKNYQMIVKS

SEQ ID NO: 9506 - protein, 35 aa, Artificial Sequence
  GFR-binding peptide
  MOD_RES (1)..(2)..(34): Xaa is C or S
XXVPTELNAISMLYFDEYDKVVLKKYREMVVEGXG

SEQ ID NO: 9507 - protein, 36 aa, Artificial Sequence
  GFR-binding peptide
  MOD_RES (1)..(33)..(35): Xaa is C or S
XAPTKLNAISVLYFDSSNNVILKKYRNMVVKAXGXH

SEQ ID NO: 9508 - protein, 42 aa, Artificial Sequence
  GFR-binding peptide
  MOD_RES (7)..(41): Xaa is C or S
  MOD_RES (21)..(22)..(23)..(24)..(25): Xaa is A or G
  MOD_RES (26)..(27)..(28)..(29): Xaa is A or G or is absent
HVTKPTXAPTKLSPISVLYKXXXXXXXXXLKYHYNMVVRSXG

SEQ ID NO: 9509 - protein, 39 aa, Artificial Sequence
  GFR-binding peptide
  MOD_RES (5)..(6)..(39): Xaa is C or S
  MOD_RES (20)..(21)..(22)..(23)..(24): Xaa is A or G
  MOD_RES (25)..(26)..(27)..(28): Xaa is A or G or is absent
SASPXXVSQDLSAISILYLXXXXXXXXXLKNYQMIVKSX

SEQ ID NO: 9510 - protein, 38 aa, Artificial Sequence
  GFR-binding peptide
  MOD_RES (36)..(38): Xaa is C or S
  MOD_RES (15)..(16)..(17)..(18)..(19): Xaa is A or G
  MOD_RES (20)..(21)..(22)..(23): Xaa is A or G or is absent
PTQVQLSPISVLYKXXXXXXXXXLKYHYTLEDHLAXKX

SEQ ID NO: 9511 - protein, 38 aa, Artificial Sequence
  GFR-binding peptide
  MOD_RES (3)..(4)..(36)..(38): Xaa is C or S
KAXXAPTKLSAISVLYLDSSNNVILKNYQNMVVKAXGX

SEQ ID NO: 9512 - protein, 35 aa, Artificial Sequence
  GFR-binding peptide
  MOD_RES (1)..(35): Xaa is C or S
  MOD_RES (15)..(16)..(17)..(18)..(19): Xaa is A or G
  MOD_RES (20)..(21)..(22)..(23): Xaa is A or G or is absent
XAPTKLSAISVLYLXXXXXXXXXLKNYQNMVVKAX

SEQ ID NO: 9513 - protein, 37 aa, Artificial Sequence
  GFR-binding peptide
  MOD_RES (4)..(5)..(36): Xaa is C or S
ASPXXVSQDLSATSILYYIGKTPKILRKHRMIVKSXK

SEQ ID NO: 9514 - protein, 33 aa, Artificial Sequence
  GFR-binding peptide
  MOD_RES (1)..(2)..(33): Xaa is C or S
XXVSQDLSATSILYYIGKTPKILRKHRMIVKSX

SEQ ID NO: 9515 - protein, 33 aa, Artificial Sequence
  GFR-binding peptide
  MOD_RES (33)..(33): Xaa is C or S
  MOD_RES (14)..(15)..(16)..(17)..(18): Xaa is A or G
  MOD_RES (19)..(20)..(21)..(22): Xaa is A or G or is absent
VPQALSAISILYLXXXXXXXXXLKNYQMIVRSX

SEQ ID NO: 9516 - protein, 44 aa, Artificial Sequence
  GFR-binding peptide
  MOD_RES (6)..(7)..(41)..(43): Xaa is C or S
  MOD_RES (21)..(22)..(23)..(24)..(25): Xaa is A or G
  MOD_RES (26)..(27)..(28)..(29): Xaa is A or G or is absent
KIPKAXXVPTELSPISMLYKXXXXXXXXXLKYHYDMVVEGXGXR

SEQ ID NO: 9517 - protein, 38 aa, Artificial Sequence
  GFR-binding peptide
  MOD_RES (1)..(35)..(37): Xaa is C or S
  MOD_RES (15)..(16)..(17)..(18)..(19): Xaa is A or G
  MOD_RES (20)..(21)..(22)..(23): Xaa is A or G or is absent
XAPTKLSATSVLYYXXXXXXXXXLRKHRNMVVRSXGXH

SEQ ID NO: 9518 - protein, 34 aa, Artificial Sequence
  GFR-binding peptide
  MOD_RES (33)..(33): Xaa is C or S
  MOD_RES (14)..(15)..(16)..(17)..(18): Xaa is A or G
  MOD_RES (19)..(20)..(21)..(22): Xaa is A or G or is absent
VPQDLSPISILYKXXXXXXXXXLKYHYMVVKSXK

SEQ ID NO: 9519 - protein, 31 aa, Artificial Sequence
  GFR-binding peptide
VPTELSPISMLYKDENEKVVLKYHYDMVVEG

SEQ ID NO: 9520 - protein, 36 aa, Artificial Sequence
  GFR-binding peptide
  MOD_RES (34)..(36): Xaa is C or S
  MOD_RES (14)..(15)..(16)..(17)..(18): Xaa is A or G
  MOD_RES (19)..(20)..(21)..(22): Xaa is A or G or is absent
VPTELSAISMLYLXXXXXXXXXLKNYQEMVVEGXGX

SEQ ID NO: 9521 - protein, 40 aa, Artificial Sequence
  GFR-binding peptide
  MOD_RES (3)..(4)..(39): Xaa is C or S
  MOD_RES (18)..(19)..(20)..(21)..(22): Xaa is A or G
  MOD_RES (23)..(24)..(25)..(26): Xaa is A or G or is absent
KAXXVPTKLSPISVLYKXXXXXXXXXLKYHYEGMSVAEXG

SEQ ID NO: 9522 - protein, 42 aa, Artificial Sequence
  GFR-binding peptide
  MOD_RES (4)..(5)..(39)..(41): Xaa is C or S
  MOD_RES (19)..(20)..(21)..(22)..(23): Xaa is A or G
  MOD_RES (24)..(25)..(26)..(27): Xaa is A or G or is absent
PKPXXAPTQLNAISVLYFXXXXXXXXXLKKYRNMVVRAXGXH

SEQ ID NO: 9523 - protein, 32 aa, Artificial Sequence
  GFR-binding peptide
  MOD_RES (31)..(31): Xaa is C or S
VPQDLSAISILYLVGRTPKVLKNYQMVVKSXK

SEQ ID NO: 9524 - protein, 39 aa, Artificial Sequence
  GFR-binding peptide
  MOD_RES (2)..(3)..(36)..(38): Xaa is C or S
  MOD_RES (17)..(18)..(19)..(20)..(21): Xaa is A or G
  MOD_RES (22)..(23)..(24)..(25): Xaa is A or G or is absent
PXXVSQDLSATSILYYXXXXXXXXXLRKHRMIVKSXKXS

SEQ ID NO: 9525 - protein, 39 aa, Artificial Sequence
  GFR-binding peptide
  MOD_RES (2)..(3)..(36)..(38): Xaa is C or S
  MOD_RES (17)..(18)..(19)..(20)..(21): Xaa is A or G
  MOD_RES (22)..(23)..(24)..(25): Xaa is A or G or is absent
PXXVPQALNAISILYFXXXXXXXXXLKKYRMIVRSXKXS

SEQ ID NO: 9526 - protein, 38 aa, Artificial Sequence
  GFR-binding peptide
  MOD_RES (3)..(4)..(38): Xaa is C or S
  MOD_RES (18)..(19)..(20)..(21)..(22): Xaa is A or G
  MOD_RES (23)..(24)..(25)..(26): Xaa is A or G or is absent
KAXXVPTELSAISMLYLXXXXXXXXXLKNYQEMVVEGX

SEQ ID NO: 9527 - protein, 33 aa, Artificial Sequence
  GFR-binding peptide
  MOD_RES (33)..(33): Xaa is C or S
  MOD_RES (14)..(15)..(16)..(17)..(18): Xaa is A or G
  MOD_RES (19)..(20)..(21)..(22): Xaa is A or G or is absent
VPQALSATSILYYXXXXXXXXXLRKHRMIVRSX

SEQ ID NO: 9528 - protein, 36 aa, Artificial Sequence
  GFR-binding peptide
  MOD_RES (3)..(4)..(35): Xaa is C or S
APXXVPQALSPISILYKVGRKPKVLKYHYMIVRSXK

SEQ ID NO: 9529 - protein, 38 aa, Artificial Sequence
  GFR-binding peptide
  MOD_RES (3)..(37): Xaa is C or S
  MOD_RES (17)..(18)..(19)..(20)..(21): Xaa is A or G
  MOD_RES (22)..(23)..(24)..(25): Xaa is A or G or is absent
PTXAPTKLSAISVLYLXXXXXXXXXLKNYQNMVVRSXG

SEQ ID NO: 9530 - protein, 42 aa, Artificial Sequence
  GFR-binding peptide
  MOD_RES (2)..(39)..(41): Xaa is C or S
QXRPTQVQLNAISVLYFEIVRKKPIFLKKYRTLEDHLAXKXE

SEQ ID NO: 9531 - protein, 39 aa, Artificial Sequence
  GFR-binding peptide
  MOD_RES (4)..(5)..(36)..(38): Xaa is C or S
ASPXXVPQDLSATSILYYVGRTPKVLRKHRMVVKSXKXS

SEQ ID NO: 9532 - protein, 40 aa, Artificial Sequence
  GFR-binding peptide
  MOD_RES (2)..(3)..(37)..(39): Xaa is C or S
  MOD_RES (17)..(18)..(19)..(20)..(21): Xaa is A or G
  MOD_RES (22)..(23)..(24)..(25): Xaa is A or G or is absent
PXXAPTQLNAISVLYFXXXXXXXXXLKKYRNMVVRAXGXH

SEQ ID NO: 9533 - protein, 36 aa, Artificial Sequence
  GFR-binding peptide
  MOD_RES (2)..(3): Xaa is C or S
  MOD_RES (17)..(18)..(19)..(20)..(21): Xaa is A or G
  MOD_RES (22)..(23)..(24)..(25): Xaa is A or G or is absent
PXXAPTQLSPISVLYKXXXXXXXXXLKYHYNMVVRA

SEQ ID NO: 9534 - protein, 30 aa, Artificial Sequence
  GFR-binding peptide
VPTELSPISMLYKDENEKVVLKYHYDMVVE

SEQ ID NO: 9535 - protein, 39 aa, Artificial Sequence
  GFR-binding peptide
  MOD_RES (36)..(38): Xaa is C or S
  MOD_RES (15)..(16)..(17)..(18)..(19): Xaa is A or G
  MOD_RES (20)..(21)..(22)..(23): Xaa is A or G or is absent
PTQVQLSAISVLYLXXXXXXXXXLKNYQTLEDHLAXKXE

SEQ ID NO: 9536 - protein, 38 aa, Artificial Sequence
  GFR-binding peptide
  MOD_RES (6)..(7): Xaa is C or S
SIPKAXXVPTELNAISMLYFDEYDKVVLKKYREMVVEG

SEQ ID NO: 9537 - protein, 39 aa, Artificial Sequence
  GFR-binding peptide
  MOD_RES (5)..(6): Xaa is C or S
  MOD_RES (20)..(21)..(22)..(23)..(24): Xaa is A or G
  MOD_RES (25)..(26)..(27)..(28): Xaa is A or G or is absent
VPKPXXAPTKLNAISVLYFXXXXXXXXXLKKYRNMVVRS

SEQ ID NO: 9538 - protein, 40 aa, Artificial Sequence
  GFR-binding peptide
  MOD_RES (5)..(6)..(37)..(39): Xaa is C or S
SASPXXVSQDLNAISILYFIGKTPKILKKYRMIVKSXKXS

SEQ ID NO: 9539 - protein, 37 aa, Artificial Sequence
  GFR-binding peptide
  MOD_RES (4)..(36): Xaa is C or S
KPTXAPTKLSAISVLYLDDSSNVILKNYQNMVVRSXG

SEQ ID NO: 9540 - protein, 41 aa, Artificial Sequence
  GFR-binding peptide
  MOD_RES (3)..(40): Xaa is C or S
VQXRPTQVQLSPISVLYKEIVRKKPIFLKYHYTLEDHLAXK

SEQ ID NO: 9541 - protein, 40 aa, Artificial Sequence
  GFR-binding peptide
  MOD_RES (4)..(5)..(39): Xaa is C or S
  MOD_RES (19)..(20)..(21)..(22)..(23): Xaa is A or G
  MOD_RES (24)..(25)..(26)..(27): Xaa is A or G or is absent
PKPXXAPTKLNAISVLYFXXXXXXXXXLKKYRNMVVRSXG

SEQ ID NO: 9542 - protein, 36 aa, Artificial Sequence
  GFR-binding peptide
  MOD_RES (1)..(34)..(36): Xaa is C or S
  MOD_RES (15)..(16)..(17)..(18)..(19): Xaa is A or G
  MOD_RES (20)..(21)..(22)..(23): Xaa is A or G or is absent
XVPQDLSATSILYYXXXXXXXXXLRKHRMVVKSXKX

SEQ ID NO: 9543 - protein, 39 aa, Artificial Sequence
  GFR-binding peptide
  MOD_RES (2)..(39): Xaa is C or S
QXRPTQVQLSAISVLYLEIVRKKPIFLKNYQTLEDHLAX

SEQ ID NO: 9544 - protein, 33 aa, Artificial Sequence
  GFR-binding peptide
  MOD_RES (3)..(3): Xaa is C or S
PTXAPTKLSATSVLYYDDSSNVILRKHRNMVVR

SEQ ID NO: 9545 - protein, 34 aa, Artificial Sequence
  GFR-binding peptide
  MOD_RES (1)..(33): Xaa is C or S
XVPTELSPISMLYKDENEKVVLKYHYDMVVEGXG

SEQ ID NO: 9546 - protein, 39 aa, Artificial Sequence
  GFR-binding peptide
  MOD_RES (6)..(7)..(38): Xaa is C or S
ASASPXXVSQDLNAISILYFIGKTPKILKKYRMIVKSXK

SEQ ID NO: 9547 - protein, 38 aa, Artificial Sequence
  GFR-binding peptide
  MOD_RES (35)..(37): Xaa is C or S
  MOD_RES (14)..(15)..(16)..(17)..(18): Xaa is A or G
  MOD_RES (19)..(20)..(21)..(22): Xaa is A or G or is absent
TQVQLSATSVLYYXXXXXXXXXLRKHRTLEDHLAXKXE

SEQ ID NO: 9548 - protein, 37 aa, Artificial Sequence
  GFR-binding peptide
  MOD_RES (1)..(2)..(35)..(37): Xaa is C or S
XXVPTKLNAISVLYFDDMGVPTLKKYREGMSVAEXGX

SEQ ID NO: 9549 - protein, 41 aa, Artificial Sequence
  GFR-binding peptide
  MOD_RES (4)..(5)..(38)..(40): Xaa is C or S
  MOD_RES (19)..(20)..(21)..(22)..(23): Xaa is A or G
  MOD_RES (24)..(25)..(26)..(27): Xaa is A or G or is absent
ASPXXVPQDLSAISILYLXXXXXXXXXLKNYQMVVKSXKXS

SEQ ID NO: 9550 - protein, 34 aa, Artificial Sequence
  GFR-binding peptide
  MOD_RES (34)..(34): Xaa is C or S
  MOD_RES (14)..(15)..(16)..(17)..(18): Xaa is A or G
  MOD_RES (19)..(20)..(21)..(22): Xaa is A or G or is absent
VPTELSATSMLYYXXXXXXXXXLRKHREMVVEGX

SEQ ID NO: 9551 - protein, 37 aa, Artificial Sequence
  GFR-binding peptide
  MOD_RES (1)..(36): Xaa is C or S
  MOD_RES (15)..(16)..(17)..(18)..(19): Xaa is A or G
  MOD_RES (20)..(21)..(22)..(23): Xaa is A or G or is absent
XVPTKLSPISVLYKXXXXXXXXXLKYHYEGMSVAEXG

SEQ ID NO: 9552 - protein, 39 aa, Artificial Sequence
  GFR-binding peptide
  MOD_RES (3)..(3): Xaa is C or S
  MOD_RES (19)..(20)..(21)..(22)..(23): Xaa is A or G
  MOD_RES (24)..(25)..(26)..(27): Xaa is A or G or is absent
VQXRPTQVQLSATSVLYYXXXXXXXXXLRKHRTLEDHLA

SEQ ID NO: 9553 - protein, 40 aa, Artificial Sequence
  GFR-binding peptide
  MOD_RES (6)..(7)..(40): Xaa is C or S
KVGKAXXVPTKLNAISVLYFDDMGVPTLKKYREGMSVAEX

SEQ ID NO: 9554 - protein, 40 aa, Artificial Sequence
  GFR-binding peptide
  MOD_RES (3)..(40): Xaa is C or S
VQXRPTQVQLNAISVLYFEIVRKKPIFLKKYRTLEDHLAX

SEQ ID NO: 9555 - protein, 37 aa, Artificial Sequence
  GFR-binding peptide
  MOD_RES (1)..(2)..(37): Xaa is C or S
  MOD_RES (16)..(17)..(18)..(19)..(20): Xaa is A or G
  MOD_RES (21)..(22)..(23)..(24): Xaa is A or G or is absent
XXVPTKLNAISVLYFXXXXXXXXXLKKYREGMSVAEX

SEQ ID NO: 9556 - protein, 32 aa, Artificial Sequence
  GFR-binding peptide
  MOD_RES (1)..(1): Xaa is C or S
XAPTKLNAISVLYFDSSNNVILKKYRNMVVKA

SEQ ID NO: 9557 - protein, 39 aa, Artificial Sequence
  GFR-binding peptide
  MOD_RES (6)..(7): Xaa is C or S
  MOD_RES (21)..(22)..(23)..(24)..(25): Xaa is A or G
  MOD_RES (26)..(27)..(28)..(29): Xaa is A or G or is absent
SIPKAXXVPTELSPISMLYKXXXXXXXXXLKYHYEMVVE

SEQ ID NO: 9558 - protein, 38 aa, Artificial Sequence
  GFR-binding peptide
  MOD_RES (2)..(2): Xaa is C or S
QXRPTQVQLSPISVLYKEIVRKKPIFLKYHYTLEDHLA

SEQ ID NO: 9559 - protein, 34 aa, Artificial Sequence
  GFR-binding peptide
  MOD_RES (1)..(32)..(34): Xaa is C or S
XVPQALNAISILYFVGRKPKVLKKYRMIVRSXKX

SEQ ID NO: 9560 - protein, 33 aa, Artificial Sequence
  GFR-binding peptide
  MOD_RES (14)..(15)..(16)..(17)..(18): Xaa is A or G
  MOD_RES (19)..(20)..(21)..(22): Xaa is A or G or is absent
VPTELSAISMLYLXXXXXXXXXLKNYQEMVVEG

SEQ ID NO: 9561 - protein, 40 aa, Artificial Sequence
  GFR-binding peptide
  MOD_RES (5)..(5): Xaa is C or S
RNVQXRPTQVQLNAISVLYFEIVRKKPIFLKKYRTLEDHL

SEQ ID NO: 9562 - protein, 40 aa, Artificial Sequence
  GFR-binding peptide
  MOD_RES (5)..(6)..(39): Xaa is C or S
  MOD_RES (20)..(21)..(22)..(23)..(24): Xaa is A or G
  MOD_RES (25)..(26)..(27)..(28): Xaa is A or G or is absent
SAAPXXVPQALNAISILYFXXXXXXXXXLKKYRMIVRSXK

SEQ ID NO: 9563 - protein, 32 aa, Artificial Sequence
  GFR-binding peptide
  MOD_RES (2)..(2): Xaa is C or S
TXAPTKLSATSVLYYDDSSNVILRKHRNMVVR

SEQ ID NO: 9564 - protein, 36 aa, Artificial Sequence
  GFR-binding peptide
  MOD_RES (1)..(33)..(35): Xaa is C or S
XAPTKLSPISVLYKDSSNNVILKYHYNMVVKAXGXH

SEQ ID NO: 9565 - protein, 41 aa, Artificial Sequence
  GFR-binding peptide
  MOD_RES (3)..(4)..(39)..(41): Xaa is C or S
  MOD_RES (18)..(19)..(20)..(21)..(22): Xaa is A or G
  MOD_RES (23)..(24)..(25)..(26): Xaa is A or G or is absent
KAXXVPTKLSAISVLYLXXXXXXXXXLKNYQEGMSVAEXGX

SEQ ID NO: 9566 - protein, 37 aa, Artificial Sequence
  GFR-binding peptide
  MOD_RES (3)..(4)..(36): Xaa is C or S
KAXXVPTELSATSMLYYDEYDKVVLRKHREMVVEGXG

SEQ ID NO: 9567 - protein, 36 aa, Artificial Sequence
  GFR-binding peptide
  MOD_RES (4)..(5)..(36): Xaa is C or S
ASPXXVPQDLSATSILYYVGRTPKVLRKHRMVVKSX

SEQ ID NO: 9568 - protein, 37 aa, Artificial Sequence
  GFR-binding peptide
  MOD_RES (2)..(3)..(37): Xaa is C or S
  MOD_RES (17)..(18)..(19)..(20)..(21): Xaa is A or G
  MOD_RES (22)..(23)..(24)..(25): Xaa is A or G or is absent
AXXVPTELSPISMLYKXXXXXXXXXLKYHYDMVVEGX

SEQ ID NO: 9569 - protein, 36 aa, Artificial Sequence
  GFR-binding peptide
  MOD_RES (1)..(35): Xaa is C or S
  MOD_RES (15)..(16)..(17)..(18)..(19): Xaa is A or G
  MOD_RES (20)..(21)..(22)..(23): Xaa is A or G or is absent
XVPTELSPISMLYKXXXXXXXXXLKYHYDMVVEGXG

SEQ ID NO: 9570 - protein, 33 aa, Artificial Sequence
  GFR-binding peptide
  MOD_RES (14)..(15)..(16)..(17)..(18): Xaa is A or G
  MOD_RES (19)..(20)..(21)..(22): Xaa is A or G or is absent
VPTELSPISMLYKXXXXXXXXXLKYHYDMVVEG

SEQ ID NO: 9571 - protein, 36 aa, Artificial Sequence
  GFR-binding peptide
  MOD_RES (33)..(35): Xaa is C or S
  MOD_RES (14)..(15)..(16)..(17)..(18): Xaa is A or G
  MOD_RES (19)..(20)..(21)..(22): Xaa is A or G or is absent
VPQDLSAISILYLXXXXXXXXXLKNYQMVVKSXKXS

SEQ ID NO: 9572 - protein, 33 aa, Artificial Sequence
  GFR-binding peptide
  MOD_RES (1)..(1): Xaa is C or S
  MOD_RES (15)..(16)..(17)..(18)..(19): Xaa is A or G
  MOD_RES (20)..(21)..(22)..(23): Xaa is A or G or is absent
XVSQDLNAISILYFXXXXXXXXXLKKYRMIVKS

SEQ ID NO: 9573 - protein, 42 aa, Artificial Sequence
  GFR-binding peptide
  MOD_RES (5)..(6)..(39)..(41): Xaa is C or S
VGKAXXVPTKLSATSVLYYDDMGVPTLRKHREGMSVAEXGXR

SEQ ID NO: 9574 - protein, 40 aa, Artificial Sequence
  GFR-binding peptide
  MOD_RES (2)..(39): Xaa is C or S
QXRPTQVQLSAISVLYLEIVRKKPIFLKNYQTLEDHLAXK

SEQ ID NO: 9575 - protein, 38 aa, Artificial Sequence
  GFR-binding peptide
  MOD_RES (3)..(3): Xaa is C or S
VQXRPTQVQLNAISVLYFEIVRKKPIFLKKYRTLEDHL

SEQ ID NO: 9576 - protein, 41 aa, Artificial Sequence
  GFR-binding peptide
  MOD_RES (3)..(4)..(38)..(40): Xaa is C or S
  MOD_RES (18)..(19)..(20)..(21)..(22): Xaa is A or G
  MOD_RES (23)..(24)..(25)..(26): Xaa is A or G or is absent
KPXXAPTQLSAISVLYLXXXXXXXXXLKNYQNMVVRAXGXH

SEQ ID NO: 9577 - protein, 38 aa, Artificial Sequence
  GFR-binding peptide
  MOD_RES (4)..(5)..(37): Xaa is C or S
PKAXXVPTELNAISMLYFDENEKVVLKKYRDMVVEGXG

SEQ ID NO: 9578 - protein, 38 aa, Artificial Sequence
  GFR-binding peptide
  MOD_RES (4)..(5)..(38): Xaa is C or S
  MOD_RES (19)..(20)..(21)..(22)..(23): Xaa is A or G
  MOD_RES (24)..(25)..(26)..(27): Xaa is A or G or is absent
ASPXXVPQDLSPISILYKXXXXXXXXXLKYHYMVVKSX

SEQ ID NO: 9579 - protein, 34 aa, Artificial Sequence
  GFR-binding peptide
  MOD_RES (3)..(4): Xaa is C or S
KAXXAPTKLNAISVLYFDSSNNVILKKYRNMVVK

SEQ ID NO: 9580 - protein, 41 aa, Artificial Sequence
  GFR-binding peptide
  MOD_RES (6)..(7)..(41): Xaa is C or S
  MOD_RES (21)..(22)..(23)..(24)..(25): Xaa is A or G
  MOD_RES (26)..(27)..(28)..(29): Xaa is A or G or is absent
KIPKAXXVPTELNAISMLYFXXXXXXXXXLKKYRDMVVEGX

SEQ ID NO: 9581 - protein, 37 aa, Artificial Sequence
  GFR-binding peptide
  MOD_RES (4)..(5): Xaa is C or S
  MOD_RES (19)..(20)..(21)..(22)..(23): Xaa is A or G
  MOD_RES (24)..(25)..(26)..(27): Xaa is A or G or is absent
PKPXXAPTQLNAISVLYFXXXXXXXXXLKKYRNMVVR

SEQ ID NO: 9582 - protein, 40 aa, Artificial Sequence
  GFR-binding peptide
  MOD_RES (6)..(7)..(40): Xaa is C or S
  MOD_RES (21)..(22)..(23)..(24)..(25): Xaa is A or G
  MOD_RES (26)..(27)..(28)..(29): Xaa is A or G or is absent
ASASPXXVPQDLSATSILYYXXXXXXXXXLRKHRMVVKSX

SEQ ID NO: 9583 - protein, 38 aa, Artificial Sequence
  GFR-binding peptide
  MOD_RES (6)..(7): Xaa is C or S
AVPKAXXAPTKLSPISVLYKDSSNNVILKYHYNMVVKA

SEQ ID NO: 9584 - protein, 32 aa, Artificial Sequence
  GFR-binding peptide
  MOD_RES (31)..(31): Xaa is C or S
VSQDLSPISILYKIGKTPKILKYHYMIVKSXK

SEQ ID NO: 9585 - protein, 39 aa, Artificial Sequence
  GFR-binding peptide
  MOD_RES (5)..(6)..(39): Xaa is C or S
VGKAXXVPTKLNAISVLYFDDMGVPTLKKYREGMSVAEX

SEQ ID NO: 9586 - protein, 35 aa, Artificial Sequence
  GFR-binding peptide
  MOD_RES (1)..(2)..(34): Xaa is C or S
XXAPTKLSAISVLYLDDSSNVILKNYQNMVVRSXG

SEQ ID NO: 9587 - protein, 34 aa, Artificial Sequence
  GFR-binding peptide
  MOD_RES (32)..(34): Xaa is C or S
VPTELSATSMLYYDENEKVVLRKHRDMVVEGXGX

SEQ ID NO: 9588 - protein, 30 aa, Artificial Sequence
  GFR-binding peptide
VPQALSPISILYKVGRKPKVLKYHYMIVRS

SEQ ID NO: 9589 - protein, 39 aa, Artificial Sequence
  GFR-binding peptide
  MOD_RES (1)..(2)..(36)..(38): Xaa is C or S
  MOD_RES (16)..(17)..(18)..(19)..(20): Xaa is A or G
  MOD_RES (21)..(22)..(23)..(24): Xaa is A or G or is absent
XXAPTKLSATSVLYYXXXXXXXXXLRKHRNMVVKAXGXH

SEQ ID NO: 9590 - protein, 37 aa, Artificial Sequence
  GFR-binding peptide
  MOD_RES (2)..(3)..(35)..(37): Xaa is C or S
AXXVPTELSPISMLYKDENEKVVLKYHYDMVVEGXGX

SEQ ID NO: 9591 - protein, 36 aa, Artificial Sequence
  GFR-binding peptide
  MOD_RES (1)..(34)..(36): Xaa is C or S
  MOD_RES (15)..(16)..(17)..(18)..(19): Xaa is A or G
  MOD_RES (20)..(21)..(22)..(23): Xaa is A or G or is absent
XVPQDLSAISILYLXXXXXXXXXLKNYQMVVKSXKX

SEQ ID NO: 9592 - protein, 36 aa, Artificial Sequence
  GFR-binding peptide
  MOD_RES (1)..(35): Xaa is C or S
  MOD_RES (15)..(16)..(17)..(18)..(19): Xaa is A or G
  MOD_RES (20)..(21)..(22)..(23): Xaa is A or G or is absent
XAPTQLSPISVLYKXXXXXXXXXLKYHYNMVVRAXG

SEQ ID NO: 9593 - protein, 40 aa, Artificial Sequence
  GFR-binding peptide
  MOD_RES (5)..(6)..(40): Xaa is C or S
  MOD_RES (20)..(21)..(22)..(23)..(24): Xaa is A or G
  MOD_RES (25)..(26)..(27)..(28): Xaa is A or G or is absent
VPKAXXAPTKLNAISVLYFXXXXXXXXXLKKYRNMVVKAX

SEQ ID NO: 9594 - protein, 40 aa, Artificial Sequence
  GFR-binding peptide
  MOD_RES (6)..(40): Xaa is C or S
  MOD_RES (20)..(21)..(22)..(23)..(24): Xaa is A or G
  MOD_RES (25)..(26)..(27)..(28): Xaa is A or G or is absent
VTKPTXAPTKLNAISVLYFXXXXXXXXXLKKYRNMVVRSX

SEQ ID NO: 9595 - protein, 32 aa, Artificial Sequence
  GFR-binding peptide
  MOD_RES (14)..(15)..(16)..(17)..(18): Xaa is A or G
  MOD_RES (19)..(20)..(21)..(22): Xaa is A or G or is absent
VPQALNAISILYFXXXXXXXXXLKKYRMIVRS

SEQ ID NO: 9596 - protein, 36 aa, Artificial Sequence
  GFR-binding peptide
  MOD_RES (6)..(6): Xaa is C or S
VTKPTXAPTKLSAISVLYLDDSSNVILKNYQNMVVR

SEQ ID NO: 9597 - protein, 39 aa, Artificial Sequence
  GFR-binding peptide
  MOD_RES (3)..(3): Xaa is C or S
  MOD_RES (19)..(20)..(21)..(22)..(23): Xaa is A or G
  MOD_RES (24)..(25)..(26)..(27): Xaa is A or G or is absent
VQXRPTQVQLSAISVLYLXXXXXXXXXLKNYQTLEDHLA

SEQ ID NO: 9598 - protein, 42 aa, Artificial Sequence
  GFR-binding peptide
  MOD_RES (6)..(7)..(40)..(42): Xaa is C or S
  MOD_RES (21)..(22)..(23)..(24)..(25): Xaa is A or G
  MOD_RES (26)..(27)..(28)..(29): Xaa is A or G or is absent
ASASPXXVSQDLNAISILYFXXXXXXXXXLKKYRMIVKSXKX

SEQ ID NO: 9599 - protein, 35 aa, Artificial Sequence
  GFR-binding peptide
  MOD_RES (1)..(35): Xaa is C or S
  MOD_RES (15)..(16)..(17)..(18)..(19): Xaa is A or G
  MOD_RES (20)..(21)..(22)..(23): Xaa is A or G or is absent
XAPTKLSATSVLYYXXXXXXXXXLRKHRNMVVKAX

SEQ ID NO: 9600 - protein, 40 aa, Artificial Sequence
  GFR-binding peptide
  MOD_RES (6)..(7)..(40): Xaa is C or S
  MOD_RES (21)..(22)..(23)..(24)..(25): Xaa is A or G
  MOD_RES (26)..(27)..(28)..(29): Xaa is A or G or is absent
ASASPXXVPQDLSAISILYLXXXXXXXXXLKNYQMVVKSX

SEQ ID NO: 9601 - protein, 40 aa, Artificial Sequence
  GFR-binding peptide
  MOD_RES (5)..(5): Xaa is C or S
RNVQXRPTQVQLSAISVLYLEIVRKKPIFLKNYQTLEDHL

SEQ ID NO: 9602 - protein, 37 aa, Artificial Sequence
  GFR-binding peptide
  MOD_RES (4)..(5)..(37): Xaa is C or S
PKAXXVPTELSPISMLYKDENEKVVLKYHYDMVVEGX

SEQ ID NO: 9603 - protein, 33 aa, Artificial Sequence
  GFR-binding peptide
  MOD_RES (1)..(2): Xaa is C or S
XXVPTELSPISMLYKDEYDKVVLKYHYEMVVEG

SEQ ID NO: 9604 - protein, 39 aa, Artificial Sequence
  GFR-binding peptide
  MOD_RES (4)..(5)..(37)..(39): Xaa is C or S
PKPXXAPTKLSPISVLYKDDSSNVILKYHYNMVVRSXGX

SEQ ID NO: 9605 - protein, 40 aa, Artificial Sequence
  GFR-binding peptide
  MOD_RES (5)..(39): Xaa is C or S
  MOD_RES (19)..(20)..(21)..(22)..(23): Xaa is A or G
  MOD_RES (24)..(25)..(26)..(27): Xaa is A or G or is absent
TKPTXAPTKLSATSVLYYXXXXXXXXXLRKHRNMVVRSXG

SEQ ID NO: 9606 - protein, 35 aa, Artificial Sequence
  GFR-binding peptide
  MOD_RES (2)..(3): Xaa is C or S
  MOD_RES (17)..(18)..(19)..(20)..(21): Xaa is A or G
  MOD_RES (22)..(23)..(24)..(25): Xaa is A or G or is absent
PXXVSQDLSPISILYKXXXXXXXXXLKYHYMIVKS

SEQ ID NO: 9607 - protein, 36 aa, Artificial Sequence
  GFR-binding peptide
  MOD_RES (3)..(4)..(36): Xaa is C or S
KAXXVPTELSPISMLYKDENEKVVLKYHYDMVVEGX

SEQ ID NO: 9608 - protein, 35 aa, Artificial Sequence
  GFR-binding peptide
  MOD_RES (32)..(34): Xaa is C or S
VPTELSATSMLYYDEYDKVVLRKHREMVVEGXGXR

SEQ ID NO: 9609 - protein, 36 aa, Artificial Sequence
  GFR-binding peptide
  MOD_RES (35)..(35): Xaa is C or S
  MOD_RES (14)..(15)..(16)..(17)..(18): Xaa is A or G
  MOD_RES (19)..(20)..(21)..(22): Xaa is A or G or is absent
TQVQLSAISVLYLXXXXXXXXXLKNYQTLEDHLAXK

SEQ ID NO: 9610 - protein, 41 aa, Artificial Sequence
  GFR-binding peptide
  MOD_RES (5)..(6)..(40): Xaa is C or S
  MOD_RES (20)..(21)..(22)..(23)..(24): Xaa is A or G
  MOD_RES (25)..(26)..(27)..(28): Xaa is A or G or is absent
VPKPXXAPTKLSPISVLYKXXXXXXXXXLKYHYNMVVRSXG

SEQ ID NO: 9611 - protein, 35 aa, Artificial Sequence
  GFR-binding peptide
  MOD_RES (4)..(5): Xaa is C or S
ASPXXVSQDLSATSILYYIGKTPKILRKHRMIVKS

SEQ ID NO: 9612 - protein, 43 aa, Artificial Sequence
  GFR-binding peptide
  MOD_RES (6)..(7)..(40)..(42): Xaa is C or S
KVGKAXXVPTKLSAISVLYLDDMGVPTLKNYQEGMSVAEXGXR

SEQ ID NO: 9613 - protein, 39 aa, Artificial Sequence
  GFR-binding peptide
  MOD_RES (5)..(6)..(39): Xaa is C or S
  MOD_RES (20)..(21)..(22)..(23)..(24): Xaa is A or G
  MOD_RES (25)..(26)..(27)..(28): Xaa is A or G or is absent
SASPXXVPQDLSPISILYKXXXXXXXXXLKYHYMVVKSX

SEQ ID NO: 9614 - protein, 42 aa, Artificial Sequence
  GFR-binding peptide
  MOD_RES (6)..(7)..(41): Xaa is C or S
  MOD_RES (21)..(22)..(23)..(24)..(25): Xaa is A or G
  MOD_RES (26)..(27)..(28)..(29): Xaa is A or G or is absent
TVPKPXXAPTQLNAISVLYFXXXXXXXXXLKKYRNMVVRAXG

SEQ ID NO: 9615 - protein, 36 aa, Artificial Sequence
  GFR-binding peptide
  MOD_RES (4)..(5): Xaa is C or S
PKAXXVPTELSATSMLYYDEYDKVVLRKHREMVVEG

SEQ ID NO: 9616 - protein, 38 aa, Artificial Sequence
  GFR-binding peptide
  MOD_RES (1)..(2)..(35)..(37): Xaa is C or S
  MOD_RES (16)..(17)..(18)..(19)..(20): Xaa is A or G
  MOD_RES (21)..(22)..(23)..(24): Xaa is A or G or is absent
XXVSQDLSATSILYYXXXXXXXXXLRKHRMIVKSXKXS

SEQ ID NO: 9617 - protein, 35 aa, Artificial Sequence
  GFR-binding peptide
  MOD_RES (1)..(35): Xaa is C or S
  MOD_RES (15)..(16)..(17)..(18)..(19): Xaa is A or G
  MOD_RES (20)..(21)..(22)..(23): Xaa is A or G or is absent
XAPTQLSATSVLYYXXXXXXXXXLRKHRNMVVRAX

SEQ ID NO: 9618 - protein, 36 aa, Artificial Sequence
  GFR-binding peptide
  MOD_RES (2)..(3)..(35): Xaa is C or S
PXXAPTKLSATSVLYYDDSSNVILRKHRNMVVRSXG

SEQ ID NO: 9619 - protein, 42 aa, Artificial Sequence
  GFR-binding peptide
  MOD_RES (6)..(7)..(41): Xaa is C or S
  MOD_RES (21)..(22)..(23)..(24)..(25): Xaa is A or G
  MOD_RES (26)..(27)..(28)..(29): Xaa is A or G or is absent
KIPKAXXVPTELSATSMLYYXXXXXXXXXLRKHRDMVVEGXG

SEQ ID NO: 9620 - protein, 37 aa, Artificial Sequence
  GFR-binding peptide
  MOD_RES (3)..(4): Xaa is C or S
  MOD_RES (18)..(19)..(20)..(21)..(22): Xaa is A or G
  MOD_RES (23)..(24)..(25)..(26): Xaa is A or G or is absent
KAXXVPTELSATSMLYYXXXXXXXXXLRKHREMVVEG

SEQ ID NO: 9621 - protein, 35 aa, Artificial Sequence
  GFR-binding peptide
  MOD_RES (1)..(2): Xaa is C or S
  MOD_RES (16)..(17)..(18)..(19)..(20): Xaa is A or G
  MOD_RES (21)..(22)..(23)..(24): Xaa is A or G or is absent
XXAPTKLNAISVLYFXXXXXXXXXLKKYRNMVVKA

SEQ ID NO: 9622 - protein, 40 aa, Artificial Sequence
  GFR-binding peptide
  MOD_RES (4)..(5)..(38)..(40): Xaa is C or S
  MOD_RES (19)..(20)..(21)..(22)..(23): Xaa is A or G
  MOD_RES (24)..(25)..(26)..(27): Xaa is A or G or is absent
ASPXXVSQDLNAISILYFXXXXXXXXXLKKYRMIVKSXKX

SEQ ID NO: 9623 - protein, 39 aa, Artificial Sequence
  GFR-binding peptide
  MOD_RES (36)..(38): Xaa is C or S
PTQVQLSATSVLYYEIVRKKPIFLRKHRTLEDHLAXKXE

SEQ ID NO: 9624 - protein, 37 aa, Artificial Sequence
  GFR-binding peptide
  MOD_RES (2)..(3)..(37): Xaa is C or S
  MOD_RES (17)..(18)..(19)..(20)..(21): Xaa is A or G
  MOD_RES (22)..(23)..(24)..(25): Xaa is A or G or is absent
PXXAPTKLSAISVLYLXXXXXXXXXLKNYQNMVVRSX

SEQ ID NO: 9625 - protein, 36 aa, Artificial Sequence
  GFR-binding peptide
  MOD_RES (1)..(2)..(33)..(35): Xaa is C or S
XXVPQALSPISILYKVGRKPKVLKYHYMIVRSXKXS

SEQ ID NO: 9626 - protein, 39 aa, Artificial Sequence
  GFR-binding peptide
  MOD_RES (4)..(5)..(39): Xaa is C or S
  MOD_RES (19)..(20)..(21)..(22)..(23): Xaa is A or G
  MOD_RES (24)..(25)..(26)..(27): Xaa is A or G or is absent
PKPXXAPTQLSPISVLYKXXXXXXXXXLKYHYNMVVRAX

SEQ ID NO: 9627 - protein, 33 aa, Artificial Sequence
  GFR-binding peptide
  MOD_RES (2)..(3): Xaa is C or S
AXXVPTELSATSMLYYDEYDKVVLRKHREMVVE

SEQ ID NO: 9628 - protein, 41 aa, Artificial Sequence
  GFR-binding peptide
  MOD_RES (6)..(7)..(41): Xaa is C or S
  MOD_RES (21)..(22)..(23)..(24)..(25): Xaa is A or G
  MOD_RES (26)..(27)..(28)..(29): Xaa is A or G or is absent
SIPKAXXVPTELSATSMLYYXXXXXXXXXLRKHREMVVEGX

SEQ ID NO: 9629 - protein, 35 aa, Artificial Sequence
  GFR-binding peptide
  MOD_RES (1)..(2)..(35): Xaa is C or S
  MOD_RES (16)..(17)..(18)..(19)..(20): Xaa is A or G
  MOD_RES (21)..(22)..(23)..(24): Xaa is A or G or is absent
XXVPQDLSATSILYYXXXXXXXXXLRKHRMVVKSX

SEQ ID NO: 9630 - protein, 42 aa, Artificial Sequence
  GFR-binding peptide
  MOD_RES (5)..(42): Xaa is C or S
RNVQXRPTQVQLSAISVLYLEIVRKKPIFLKNYQTLEDHLAX

SEQ ID NO: 9631 - protein, 42 aa, Artificial Sequence
  GFR-binding peptide
  MOD_RES (5)..(6)..(39)..(41): Xaa is C or S
  MOD_RES (20)..(21)..(22)..(23)..(24): Xaa is A or G
  MOD_RES (25)..(26)..(27)..(28): Xaa is A or G or is absent
SASPXXVPQDLSATSILYYXXXXXXXXXLRKHRMVVKSXKXS

SEQ ID NO: 9632 - protein, 36 aa, Artificial Sequence
  GFR-binding peptide
  MOD_RES (4)..(5): Xaa is C or S
PKAXXAPTKLSPISVLYKDSSNNVILKYHYNMVVKA

SEQ ID NO: 9633 - protein, 39 aa, Artificial Sequence
  GFR-binding peptide
  MOD_RES (3)..(37)..(39): Xaa is C or S
  MOD_RES (17)..(18)..(19)..(20)..(21): Xaa is A or G
  MOD_RES (22)..(23)..(24)..(25): Xaa is A or G or is absent
PTXAPTKLSPISVLYKXXXXXXXXXLKYHYNMVVRSXGX

SEQ ID NO: 9634 - protein, 33 aa, Artificial Sequence
  GFR-binding peptide
  MOD_RES (32)..(32): Xaa is C or S
APTQLSPISVLYKDDSSNVILKYHYNMVVRAXG

SEQ ID NO: 9635 - protein, 32 aa, Artificial Sequence
  GFR-binding peptide
  MOD_RES (1)..(32): Xaa is C or S
XVSQDLSAISILYLIGKTPKILKNYQMIVKSX

SEQ ID NO: 9636 - protein, 40 aa, Artificial Sequence
  GFR-binding peptide
  MOD_RES (6)..(7)..(39): Xaa is C or S
SIPKAXXVPTELSATSMLYYDEYDKVVLRKHREMVVEGXG

SEQ ID NO: 9637 - protein, 40 aa, Artificial Sequence
  GFR-binding peptide
  MOD_RES (7)..(39): Xaa is C or S
HVTKPTXAPTKLSATSVLYYDDSSNVILRKHRNMVVRSXG

SEQ ID NO: 9638 - protein, 34 aa, Artificial Sequence
  GFR-binding peptide
  MOD_RES (1)..(1): Xaa is C or S
  MOD_RES (15)..(16)..(17)..(18)..(19): Xaa is A or G
  MOD_RES (20)..(21)..(22)..(23): Xaa is A or G or is absent
XAPTKLSAISVLYLXXXXXXXXXLKNYQNMVVRS

SEQ ID NO: 9639 - protein, 43 aa, Artificial Sequence
  GFR-binding peptide
  MOD_RES (6)..(7)..(41)..(43): Xaa is C or S
  MOD_RES (21)..(22)..(23)..(24)..(25): Xaa is A or G
  MOD_RES (26)..(27)..(28)..(29): Xaa is A or G or is absent
SIPKAXXVPTELSATSMLYYXXXXXXXXXLRKHREMVVEGXGX

SEQ ID NO: 9640 - protein, 40 aa, Artificial Sequence
  GFR-binding peptide
  MOD_RES (4)..(5)..(39): Xaa is C or S
  MOD_RES (19)..(20)..(21)..(22)..(23): Xaa is A or G
  MOD_RES (24)..(25)..(26)..(27): Xaa is A or G or is absent
PKAXXAPTKLSAISVLYLXXXXXXXXXLKNYQNMVVKAXG

SEQ ID NO: 9641 - protein, 36 aa, Artificial Sequence
  GFR-binding peptide
  MOD_RES (4)..(5): Xaa is C or S
PKPXXAPTKLSAISVLYLDDSSNVILKNYQNMVVRS

SEQ ID NO: 9642 - protein, 42 aa, Artificial Sequence
  GFR-binding peptide
  MOD_RES (4)..(5)..(40)..(42): Xaa is C or S
  MOD_RES (19)..(20)..(21)..(22)..(23): Xaa is A or G
  MOD_RES (24)..(25)..(26)..(27): Xaa is A or G or is absent
GKAXXVPTKLSPISVLYKXXXXXXXXXLKYHYEGMSVAEXGX

SEQ ID NO: 9643 - protein, 34 aa, Artificial Sequence
  GFR-binding peptide
  MOD_RES (1)..(1): Xaa is C or S
  MOD_RES (15)..(16)..(17)..(18)..(19): Xaa is A or G
  MOD_RES (20)..(21)..(22)..(23): Xaa is A or G or is absent
XAPTKLNAISVLYFXXXXXXXXXLKKYRNMVVKA

SEQ ID NO: 9644 - protein, 41 aa, Artificial Sequence
  GFR-binding peptide
  MOD_RES (7)..(41): Xaa is C or S
  MOD_RES (21)..(22)..(23)..(24)..(25): Xaa is A or G
  MOD_RES (26)..(27)..(28)..(29): Xaa is A or G or is absent
HVTKPTXAPTKLNAISVLYFXXXXXXXXXLKKYRNMVVRSX

SEQ ID NO: 9645 - protein, 37 aa, Artificial Sequence
  GFR-binding peptide
  MOD_RES (34)..(36): Xaa is C or S
  MOD_RES (14)..(15)..(16)..(17)..(18): Xaa is A or G
  MOD_RES (19)..(20)..(21)..(22): Xaa is A or G or is absent
VPTELSPISMLYKXXXXXXXXXLKYHYDMVVEGXGXR

SEQ ID NO: 9646 - protein, 39 aa, Artificial Sequence
  GFR-binding peptide
  MOD_RES (2)..(3)..(37)..(39): Xaa is C or S
  MOD_RES (17)..(18)..(19)..(20)..(21): Xaa is A or G
  MOD_RES (22)..(23)..(24)..(25): Xaa is A or G or is absent
AXXVPTELNAISMLYFXXXXXXXXXLKKYREMVVEGXGX

SEQ ID NO: 9647 - protein, 41 aa, Artificial Sequence
  GFR-binding peptide
  MOD_RES (5)..(6)..(38)..(40): Xaa is C or S
VPKAXXAPTKLSPISVLYKDSSNNVILKYHYNMVVKAXGXH

SEQ ID NO: 9648 - protein, 34 aa, Artificial Sequence
  GFR-binding peptide
  MOD_RES (34)..(34): Xaa is C or S
  MOD_RES (14)..(15)..(16)..(17)..(18): Xaa is A or G
  MOD_RES (19)..(20)..(21)..(22): Xaa is A or G or is absent
APTQLSATSVLYYXXXXXXXXXLRKHRNMVVRAX

SEQ ID NO: 9649 - protein, 41 aa, Artificial Sequence
  GFR-binding peptide
  MOD_RES (5)..(6)..(38)..(40): Xaa is C or S
VPKPXXAPTKLSAISVLYLDDSSNVILKNYQNMVVRSXGXH

SEQ ID NO: 9650 - protein, 32 aa, Artificial Sequence
  GFR-binding peptide
  MOD_RES (31)..(31): Xaa is C or S
VSQDLNAISILYFIGKTPKILKKYRMIVKSXK

SEQ ID NO: 9651 - protein, 37 aa, Artificial Sequence
  GFR-binding peptide
  MOD_RES (1)..(34)..(36): Xaa is C or S
  MOD_RES (15)..(16)..(17)..(18)..(19): Xaa is A or G
  MOD_RES (20)..(21)..(22)..(23): Xaa is A or G or is absent
XVPQDLSATSILYYXXXXXXXXXLRKHRMVVKSXKXS

SEQ ID NO: 9652 - protein, 42 aa, Artificial Sequence
  GFR-binding peptide
  MOD_RES (6)..(7)..(40)..(42): Xaa is C or S
  MOD_RES (21)..(22)..(23)..(24)..(25): Xaa is A or G
  MOD_RES (26)..(27)..(28)..(29): Xaa is A or G or is absent
ASAAPXXVPQALNAISILYFXXXXXXXXXLKKYRMIVRSXKX

SEQ ID NO: 9653 - protein, 38 aa, Artificial Sequence
  GFR-binding peptide
  MOD_RES (3)..(3): Xaa is C or S
VQXRPTQVQLSAISVLYLEIVRKKPIFLKNYQTLEDHL

SEQ ID NO: 9654 - protein, 41 aa, Artificial Sequence
  GFR-binding peptide
  MOD_RES (4)..(5)..(39)..(41): Xaa is C or S
  MOD_RES (19)..(20)..(21)..(22)..(23): Xaa is A or G
  MOD_RES (24)..(25)..(26)..(27): Xaa is A or G or is absent
PKAXXAPTKLSAISVLYLXXXXXXXXXLKNYQNMVVKAXGX

SEQ ID NO: 9655 - protein, 41 aa, Artificial Sequence
  GFR-binding peptide
  MOD_RES (6)..(7)..(41): Xaa is C or S
  MOD_RES (21)..(22)..(23)..(24)..(25): Xaa is A or G
  MOD_RES (26)..(27)..(28)..(29): Xaa is A or G or is absent
TVPKPXXAPTQLNAISVLYFXXXXXXXXXLKKYRNMVVRAX

SEQ ID NO: 9656 - protein, 37 aa, Artificial Sequence
  GFR-binding peptide
  MOD_RES (1)..(2)..(34)..(36): Xaa is C or S
XXAPTQLSAISVLYLDDSSNVILKNYQNMVVRAXGXH

SEQ ID NO: 9657 - protein, 39 aa, Artificial Sequence
  GFR-binding peptide
  MOD_RES (5)..(5): Xaa is C or S
RNVQXRPTQVQLNAISVLYFEIVRKKPIFLKKYRTLEDH

SEQ ID NO: 9658 - protein, 38 aa, Artificial Sequence
  GFR-binding peptide
  MOD_RES (5)..(6): Xaa is C or S
  MOD_RES (20)..(21)..(22)..(23)..(24): Xaa is A or G
  MOD_RES (25)..(26)..(27)..(28): Xaa is A or G or is absent
IPKAXXVPTELSATSMLYYXXXXXXXXXLRKHRDMVVE

SEQ ID NO: 9659 - protein, 44 aa, Artificial Sequence
  GFR-binding peptide
  MOD_RES (6)..(7)..(42)..(44): Xaa is C or S
  MOD_RES (21)..(22)..(23)..(24)..(25): Xaa is A or G
  MOD_RES (26)..(27)..(28)..(29): Xaa is A or G or is absent
KVGKAXXVPTKLSAISVLYLXXXXXXXXXLKNYQEGMSVAEXGX

SEQ ID NO: 9660 - protein, 35 aa, Artificial Sequence
  GFR-binding peptide
  MOD_RES (4)..(5): Xaa is C or S
PKAXXAPTKLSPISVLYKDSSNNVILKYHYNMVVK

SEQ ID NO: 9661 - protein, 36 aa, Artificial Sequence
  GFR-binding peptide
  MOD_RES (3)..(4)..(36): Xaa is C or S
KAXXVPTELNAISMLYFDENEKVVLKKYRDMVVEGX

SEQ ID NO: 9662 - protein, 43 aa, Artificial Sequence
  GFR-binding peptide
  MOD_RES (5)..(6)..(40)..(42): Xaa is C or S
  MOD_RES (20)..(21)..(22)..(23)..(24): Xaa is A or G
  MOD_RES (25)..(26)..(27)..(28): Xaa is A or G or is absent
VPKAXXAPTKLSPISVLYKXXXXXXXXXLKYHYNMVVKAXGXH

SEQ ID NO: 9663 - protein, 42 aa, Artificial Sequence
  GFR-binding peptide
  MOD_RES (4)..(41): Xaa is C or S
NVQXRPTQVQLSPISVLYKEIVRKKPIFLKYHYTLEDHLAXK

SEQ ID NO: 9664 - protein, 37 aa, Artificial Sequence
  GFR-binding peptide
  MOD_RES (2)..(3)..(37): Xaa is C or S
  MOD_RES (17)..(18)..(19)..(20)..(21): Xaa is A or G
  MOD_RES (22)..(23)..(24)..(25): Xaa is A or G or is absent
PXXAPTKLSPISVLYKXXXXXXXXXLKYHYNMVVRSX

SEQ ID NO: 9665 - protein, 39 aa, Artificial Sequence
  GFR-binding peptide
  MOD_RES (4)..(5)..(37)..(39): Xaa is C or S
PKAXXAPTKLSAISVLYLDSSNNVILKNYQNMVVKAXGX

SEQ ID NO: 9666 - protein, 35 aa, Artificial Sequence
  GFR-binding peptide
  MOD_RES (2)..(3)..(34): Xaa is C or S
PXXVSQDLSPISILYKIGKTPKILKYHYMIVKSXK

SEQ ID NO: 9667 - protein, 43 aa, Artificial Sequence
  GFR-binding peptide
  MOD_RES (6)..(7)..(41)..(43): Xaa is C or S
  MOD_RES (21)..(22)..(23)..(24)..(25): Xaa is A or G
  MOD_RES (26)..(27)..(28)..(29): Xaa is A or G or is absent
TVPKPXXAPTQLSAISVLYLXXXXXXXXXLKNYQNMVVRAXGX

SEQ ID NO: 9668 - protein, 43 aa, Artificial Sequence
  GFR-binding peptide
  MOD_RES (5)..(6)..(40)..(42): Xaa is C or S
  MOD_RES (20)..(21)..(22)..(23)..(24): Xaa is A or G
  MOD_RES (25)..(26)..(27)..(28): Xaa is A or G or is absent
VPKPXXAPTKLSAISVLYLXXXXXXXXXLKNYQNMVVRSXGXH

SEQ ID NO: 9669 - protein, 35 aa, Artificial Sequence
  GFR-binding peptide
  MOD_RES (4)..(5): Xaa is C or S
PKAXXAPTKLSAISVLYLDSSNNVILKNYQNMVVK

SEQ ID NO: 9670 - protein, 40 aa, Artificial Sequence
  GFR-binding peptide
  MOD_RES (3)..(40): Xaa is C or S
  MOD_RES (19)..(20)..(21)..(22)..(23): Xaa is A or G
  MOD_RES (24)..(25)..(26)..(27): Xaa is A or G or is absent
VQXRPTQVQLSATSVLYYXXXXXXXXXLRKHRTLEDHLAX

SEQ ID NO: 9671 - protein, 38 aa, Artificial Sequence
  GFR-binding peptide
  MOD_RES (3)..(4)..(36)..(38): Xaa is C or S
KPXXAPTQLSPISVLYKDDSSNVILKYHYNMVVRAXGX

SEQ ID NO: 9672 - protein, 40 aa, Artificial Sequence
  GFR-binding peptide
  MOD_RES (6)..(7)..(39): Xaa is C or S
TVPKPXXAPTQLSATSVLYYDDSSNVILRKHRNMVVRAXG

SEQ ID NO: 9673 - protein, 37 aa, Artificial Sequence
  GFR-binding peptide
  MOD_RES (34)..(36): Xaa is C or S
  MOD_RES (14)..(15)..(16)..(17)..(18): Xaa is A or G
  MOD_RES (19)..(20)..(21)..(22): Xaa is A or G or is absent
APTKLNAISVLYFXXXXXXXXXLKKYRNMVVRSXGXH

SEQ ID NO: 9674 - protein, 33 aa, Artificial Sequence
  GFR-binding peptide
  MOD_RES (1)..(2)..(33): Xaa is C or S
XXVSQDLSPISILYKIGKTPKILKYHYMIVKSX

SEQ ID NO: 9675 - protein, 31 aa, Artificial Sequence
  GFR-binding peptide
  MOD_RES (1)..(1): Xaa is C or S
XAPTQLSATSVLYYDDSSNVILRKHRNMVVR

SEQ ID NO: 9676 - protein, 39 aa, Artificial Sequence
  GFR-binding peptide
  MOD_RES (2)..(3)..(36)..(38): Xaa is C or S
  MOD_RES (17)..(18)..(19)..(20)..(21): Xaa is A or G
  MOD_RES (22)..(23)..(24)..(25): Xaa is A or G or is absent
PXXVPQDLSAISILYLXXXXXXXXXLKNYQMVVKSXKXS

SEQ ID NO: 9677 - protein, 36 aa, Artificial Sequence
  GFR-binding peptide
  MOD_RES (3)..(3): Xaa is C or S
  MOD_RES (17)..(18)..(19)..(20)..(21): Xaa is A or G
  MOD_RES (22)..(23)..(24)..(25): Xaa is A or G or is absent
PTXAPTKLNAISVLYFXXXXXXXXXLKKYRNMVVRS

SEQ ID NO: 9678 - protein, 36 aa, Artificial Sequence
  GFR-binding peptide
  MOD_RES (1)..(35): Xaa is C or S
  MOD_RES (15)..(16)..(17)..(18)..(19): Xaa is A or G
  MOD_RES (20)..(21)..(22)..(23): Xaa is A or G or is absent
XAPTKLSPISVLYKXXXXXXXXXLKYHYNMVVKAXG

SEQ ID NO: 9679 - protein, 35 aa, Artificial Sequence
  GFR-binding peptide
  MOD_RES (2)..(3): Xaa is C or S
  MOD_RES (17)..(18)..(19)..(20)..(21): Xaa is A or G
  MOD_RES (22)..(23)..(24)..(25): Xaa is A or G or is absent
PXXVSQDLSAISILYLXXXXXXXXXLKNYQMIVKS

SEQ ID NO: 9680 - protein, 36 aa, Artificial Sequence
  GFR-binding peptide
  MOD_RES (3)..(3): Xaa is C or S
  MOD_RES (17)..(18)..(19)..(20)..(21): Xaa is A or G
  MOD_RES (22)..(23)..(24)..(25): Xaa is A or G or is absent
PTXAPTKLSAISVLYLXXXXXXXXXLKNYQNMVVRS

SEQ ID NO: 9681 - protein, 39 aa, Artificial Sequence
  GFR-binding peptide
  MOD_RES (6)..(7): Xaa is C or S
  MOD_RES (21)..(22)..(23)..(24)..(25): Xaa is A or G
  MOD_RES (26)..(27)..(28)..(29): Xaa is A or G or is absent
ASASPXXVSQDLSATSILYYXXXXXXXXXLRKHRMIVKS

SEQ ID NO: 9682 - protein, 36 aa, Artificial Sequence
  GFR-binding peptide
  MOD_RES (1)..(2)..(34)..(36): Xaa is C or S
XXVPTELSPISMLYKDEYDKVVLKYHYEMVVEGXGX

SEQ ID NO: 9683 - protein, 36 aa, Artificial Sequence
  GFR-binding peptide
  MOD_RES (5)..(6): Xaa is C or S
IPKAXXVPTELNAISMLYFDENEKVVLKKYRDMVVE

SEQ ID NO: 9684 - protein, 34 aa, Artificial Sequence
  GFR-binding peptide
  MOD_RES (1)..(2)..(33): Xaa is C or S
XXVPQDLSAISILYLVGRTPKVLKNYQMVVKSXK

SEQ ID NO: 9685 - protein, 38 aa, Artificial Sequence
  GFR-binding peptide
  MOD_RES (3)..(4)..(38): Xaa is C or S
  MOD_RES (18)..(19)..(20)..(21)..(22): Xaa is A or G
  MOD_RES (23)..(24)..(25)..(26): Xaa is A or G or is absent
KAXXVPTELSPISMLYKXXXXXXXXXLKYHYEMVVEGX

SEQ ID NO: 9686 - protein, 40 aa, Artificial Sequence
  GFR-binding peptide
  MOD_RES (5)..(37)..(39): Xaa is C or S
TKPTXAPTKLSAISVLYLDDSSNVILKNYQNMVVRSXGXH

SEQ ID NO: 9687 - protein, 42 aa, Artificial Sequence
  GFR-binding peptide
  MOD_RES (3)..(40)..(42): Xaa is C or S
VQXRPTQVQLSATSVLYYEIVRKKPIFLRKHRTLEDHLAXKX

SEQ ID NO: 9688 - protein, 37 aa, Artificial Sequence
  GFR-binding peptide
  MOD_RES (6)..(7): Xaa is C or S
AVPKAXXAPTKLSAISVLYLDSSNNVILKNYQNMVVK

SEQ ID NO: 9689 - protein, 41 aa, Artificial Sequence
  GFR-binding peptide
  MOD_RES (6)..(7)..(40): Xaa is C or S
  MOD_RES (21)..(22)..(23)..(24)..(25): Xaa is A or G
  MOD_RES (26)..(27)..(28)..(29): Xaa is A or G or is absent
ASAAPXXVPQALNAISILYFXXXXXXXXXLKKYRMIVRSXK

SEQ ID NO: 9690 - protein, 37 aa, Artificial Sequence
  GFR-binding peptide
  MOD_RES (4)..(5): Xaa is C or S
  MOD_RES (19)..(20)..(21)..(22)..(23): Xaa is A or G
  MOD_RES (24)..(25)..(26)..(27): Xaa is A or G or is absent
AAPXXVPQALNAISILYFXXXXXXXXXLKKYRMIVRS

SEQ ID NO: 9691 - protein, 35 aa, Artificial Sequence
  GFR-binding peptide
  MOD_RES (1)..(2)..(35): Xaa is C or S
  MOD_RES (16)..(17)..(18)..(19)..(20): Xaa is A or G
  MOD_RES (21)..(22)..(23)..(24): Xaa is A or G or is absent
XXVPQDLSAISILYLXXXXXXXXXLKNYQMVVKSX

SEQ ID NO: 9692 - protein, 42 aa, Artificial Sequence
  GFR-binding peptide
  MOD_RES (6)..(7)..(40)..(42): Xaa is C or S
KVGKAXXVPTKLNAISVLYFDDMGVPTLKKYREGMSVAEXGX

SEQ ID NO: 9693 - protein, 40 aa, Artificial Sequence
  GFR-binding peptide
  MOD_RES (1)..(38)..(40): Xaa is C or S
  MOD_RES (17)..(18)..(19)..(20)..(21): Xaa is A or G
  MOD_RES (22)..(23)..(24)..(25): Xaa is A or G or is absent
XRPTQVQLNAISVLYFXXXXXXXXXLKKYRTLEDHLAXKX

SEQ ID NO: 9694 - protein, 40 aa, Artificial Sequence
  GFR-binding peptide
  MOD_RES (2)..(39): Xaa is C or S
QXRPTQVQLSATSVLYYEIVRKKPIFLRKHRTLEDHLAXK

SEQ ID NO: 9695 - protein, 30 aa, Artificial Sequence
  GFR-binding peptide
VPTELNAISMLYFDENEKVVLKKYRDMVVE

SEQ ID NO: 9696 - protein, 40 aa, Artificial Sequence
  GFR-binding peptide
  MOD_RES (6)..(7): Xaa is C or S
  MOD_RES (21)..(22)..(23)..(24)..(25): Xaa is A or G
  MOD_RES (26)..(27)..(28)..(29): Xaa is A or G or is absent
YVPKPXXAPTKLSPISVLYKXXXXXXXXXLKYHYNMVVRS

SEQ ID NO: 9697 - protein, 42 aa, Artificial Sequence
  GFR-binding peptide
  MOD_RES (5)..(6)..(39)..(41): Xaa is C or S
VGKAXXVPTKLSAISVLYLDDMGVPTLKNYQEGMSVAEXGXR

SEQ ID NO: 9698 - protein, 34 aa, Artificial Sequence
  GFR-binding peptide
  MOD_RES (14)..(15)..(16)..(17)..(18): Xaa is A or G
  MOD_RES (19)..(20)..(21)..(22): Xaa is A or G or is absent
VPTKLSPISVLYKXXXXXXXXXLKYHYEGMSVAE

SEQ ID NO: 9699 - protein, 44 aa, Artificial Sequence
  GFR-binding peptide
  MOD_RES (6)..(7)..(41)..(43): Xaa is C or S
  MOD_RES (21)..(22)..(23)..(24)..(25): Xaa is A or G
  MOD_RES (26)..(27)..(28)..(29): Xaa is A or G or is absent
AVPKAXXAPTKLNAISVLYFXXXXXXXXXLKKYRNMVVKAXGXH

SEQ ID NO: 9700 - protein, 35 aa, Artificial Sequence
  GFR-binding peptide
  MOD_RES (2)..(3): Xaa is C or S
  MOD_RES (17)..(18)..(19)..(20)..(21): Xaa is A or G
  MOD_RES (22)..(23)..(24)..(25): Xaa is A or G or is absent
PXXVPQALSPISILYKXXXXXXXXXLKYHYMIVRS

SEQ ID NO: 9701 - protein, 39 aa, Artificial Sequence
  GFR-binding peptide
  MOD_RES (5)..(6): Xaa is C or S
  MOD_RES (20)..(21)..(22)..(23)..(24): Xaa is A or G
  MOD_RES (25)..(26)..(27)..(28): Xaa is A or G or is absent
VPKPXXAPTQLSPISVLYKXXXXXXXXXLKYHYNMVVRA

SEQ ID NO: 9702 - protein, 37 aa, Artificial Sequence
  GFR-binding peptide
  MOD_RES (4)..(5): Xaa is C or S
  MOD_RES (19)..(20)..(21)..(22)..(23): Xaa is A or G
  MOD_RES (24)..(25)..(26)..(27): Xaa is A or G or is absent
PKAXXAPTKLNAISVLYFXXXXXXXXXLKKYRNMVVK

SEQ ID NO: 9703 - protein, 37 aa, Artificial Sequence
  GFR-binding peptide
  MOD_RES (2)..(3): Xaa is C or S
  MOD_RES (17)..(18)..(19)..(20)..(21): Xaa is A or G
  MOD_RES (22)..(23)..(24)..(25): Xaa is A or G or is absent
AXXVPTKLSATSVLYYXXXXXXXXXLRKHREGMSVAE

SEQ ID NO: 9704 - protein, 38 aa, Artificial Sequence
  GFR-binding peptide
  MOD_RES (2)..(3)..(38): Xaa is C or S
  MOD_RES (17)..(18)..(19)..(20)..(21): Xaa is A or G
  MOD_RES (22)..(23)..(24)..(25): Xaa is A or G or is absent
AXXVPTKLNAISVLYFXXXXXXXXXLKKYREGMSVAEX

SEQ ID NO: 9705 - protein, 37 aa, Artificial Sequence
  GFR-binding peptide
  MOD_RES (4)..(36): Xaa is C or S
KPTXAPTKLSPISVLYKDDSSNVILKYHYNMVVRSXG

SEQ ID NO: 9706 - protein, 33 aa, Artificial Sequence
  GFR-binding peptide
  MOD_RES (31)..(33): Xaa is C or S
VPQALNAISILYFVGRKPKVLKKYRMIVRSXKX

SEQ ID NO: 9707 - protein, 39 aa, Artificial Sequence
  GFR-binding peptide
  MOD_RES (5)..(6): Xaa is C or S
  MOD_RES (20)..(21)..(22)..(23)..(24): Xaa is A or G
  MOD_RES (25)..(26)..(27)..(28): Xaa is A or G or is absent
IPKAXXVPTELSATSMLYYXXXXXXXXXLRKHRDMVVEG

SEQ ID NO: 9708 - protein, 39 aa, Artificial Sequence
  GFR-binding peptide
  MOD_RES (6)..(7): Xaa is C or S
  MOD_RES (21)..(22)..(23)..(24)..(25): Xaa is A or G
  MOD_RES (26)..(27)..(28)..(29): Xaa is A or G or is absent
KIPKAXXVPTELNAISMLYFXXXXXXXXXLKKYRDMVVE

SEQ ID NO: 9709 - protein, 40 aa, Artificial Sequence
  GFR-binding peptide
  MOD_RES (5)..(6)..(39): Xaa is C or S
  MOD_RES (20)..(21)..(22)..(23)..(24): Xaa is A or G
  MOD_RES (25)..(26)..(27)..(28): Xaa is A or G or is absent
SASPXXVSQDLNAISILYFXXXXXXXXXLKKYRMIVKSXK

SEQ ID NO: 9710 - protein, 37 aa, Artificial Sequence
  GFR-binding peptide
  MOD_RES (2)..(3)..(36): Xaa is C or S
AXXVPTKLSATSVLYYDDMGVPTLRKHREGMSVAEXG

SEQ ID NO: 9711 - protein, 40 aa, Artificial Sequence
  GFR-binding peptide
  MOD_RES (37)..(39): Xaa is C or S
  MOD_RES (16)..(17)..(18)..(19)..(20): Xaa is A or G
  MOD_RES (21)..(22)..(23)..(24): Xaa is A or G or is absent
RPTQVQLSAISVLYLXXXXXXXXXLKNYQTLEDHLAXKXE

SEQ ID NO: 9712 - protein, 35 aa, Artificial Sequence
  GFR-binding peptide
  MOD_RES (1)..(35): Xaa is C or S
  MOD_RES (15)..(16)..(17)..(18)..(19): Xaa is A or G
  MOD_RES (20)..(21)..(22)..(23): Xaa is A or G or is absent
XVPTELSATSMLYYXXXXXXXXXLRKHREMVVEGX

SEQ ID NO: 9713 - protein, 35 aa, Artificial Sequence
  GFR-binding peptide
  MOD_RES (4)..(5): Xaa is C or S
ASPXXVPQDLSAISILYLVGRTPKVLKNYQMVVKS

SEQ ID NO: 9714 - protein, 35 aa, Artificial Sequence
  GFR-binding peptide
  MOD_RES (2)..(3): Xaa is C or S
  MOD_RES (17)..(18)..(19)..(20)..(21): Xaa is A or G
  MOD_RES (22)..(23)..(24)..(25): Xaa is A or G or is absent
AXXVPTELSATSMLYYXXXXXXXXXLRKHRDMVVE

SEQ ID NO: 9715 - protein, 42 aa, Artificial Sequence
  GFR-binding peptide
  MOD_RES (6)..(7)..(41): Xaa is C or S
  MOD_RES (21)..(22)..(23)..(24)..(25): Xaa is A or G
  MOD_RES (26)..(27)..(28)..(29): Xaa is A or G or is absent
YVPKPXXAPTKLSPISVLYKXXXXXXXXXLKYHYNMVVRSXG

SEQ ID NO: 9716 - protein, 37 aa, Artificial Sequence
  GFR-binding peptide
  MOD_RES (2)..(3): Xaa is C or S
  MOD_RES (17)..(18)..(19)..(20)..(21): Xaa is A or G
  MOD_RES (22)..(23)..(24)..(25): Xaa is A or G or is absent
AXXVPTKLSAISVLYLXXXXXXXXXLKNYQEGMSVAE

SEQ ID NO: 9717 - protein, 40 aa, Artificial Sequence
  GFR-binding peptide
  MOD_RES (2)..(3)..(37)..(39): Xaa is C or S
  MOD_RES (17)..(18)..(19)..(20)..(21): Xaa is A or G
  MOD_RES (22)..(23)..(24)..(25): Xaa is A or G or is absent
AXXAPTKLSATSVLYYXXXXXXXXXLRKHRNMVVKAXGXH

SEQ ID NO: 9718 - protein, 34 aa, Artificial Sequence
  GFR-binding peptide
  MOD_RES (2)..(3): Xaa is C or S
AXXVPTELNAISMLYFDEYDKVVLKKYREMVVEG

SEQ ID NO: 9719 - protein, 34 aa, Artificial Sequence
  GFR-binding peptide
  MOD_RES (1)..(2): Xaa is C or S
  MOD_RES (16)..(17)..(18)..(19)..(20): Xaa is A or G
  MOD_RES (21)..(22)..(23)..(24): Xaa is A or G or is absent
XXAPTKLSPISVLYKXXXXXXXXXLKYHYNMVVK

SEQ ID NO: 9720 - protein, 35 aa, Artificial Sequence
  GFR-binding peptide
  MOD_RES (1)..(34): Xaa is C or S
  MOD_RES (15)..(16)..(17)..(18)..(19): Xaa is A or G
  MOD_RES (20)..(21)..(22)..(23): Xaa is A or G or is absent
XVPQDLSAISILYLXXXXXXXXXLKNYQMVVKSXK

SEQ ID NO: 9721 - protein, 37 aa, Artificial Sequence
  GFR-binding peptide
  MOD_RES (4)..(5)..(37): Xaa is C or S
PKAXXVPTELNAISMLYFDENEKVVLKKYRDMVVEGX

SEQ ID NO: 9722 - protein, 37 aa, Artificial Sequence
  GFR-binding peptide
  MOD_RES (1)..(2)..(36): Xaa is C or S
  MOD_RES (16)..(17)..(18)..(19)..(20): Xaa is A or G
  MOD_RES (21)..(22)..(23)..(24): Xaa is A or G or is absent
XXAPTKLSPISVLYKXXXXXXXXXLKYHYNMVVRSXG

SEQ ID NO: 9723 - protein, 38 aa, Artificial Sequence
  GFR-binding peptide
  MOD_RES (3)..(4)..(36)..(38): Xaa is C or S
KPXXAPTKLSPISVLYKDDSSNVILKYHYNMVVRSXGX

SEQ ID NO: 9724 - protein, 34 aa, Artificial Sequence
  GFR-binding peptide
  MOD_RES (1)..(2): Xaa is C or S
  MOD_RES (16)..(17)..(18)..(19)..(20): Xaa is A or G
  MOD_RES (21)..(22)..(23)..(24): Xaa is A or G or is absent
XXVPTELNAISMLYFXXXXXXXXXLKKYRDMVVE

SEQ ID NO: 9725 - protein, 38 aa, Artificial Sequence
  GFR-binding peptide
  MOD_RES (5)..(37): Xaa is C or S
TKPTXAPTKLSPISVLYKDDSSNVILKYHYNMVVRSXG

SEQ ID NO: 9726 - protein, 39 aa, Artificial Sequence
  GFR-binding peptide
  MOD_RES (37)..(39): Xaa is C or S
RPTQVQLSAISVLYLEIVRKKPIFLKNYQTLEDHLAXKX

SEQ ID NO: 9727 - protein, 44 aa, Artificial Sequence
  GFR-binding peptide
  MOD_RES (7)..(41)..(43): Xaa is C or S
  MOD_RES (21)..(22)..(23)..(24)..(25): Xaa is A or G
  MOD_RES (26)..(27)..(28)..(29): Xaa is A or G or is absent
HVTKPTXAPTKLSPISVLYKXXXXXXXXXLKYHYNMVVRSXGXH

SEQ ID NO: 9728 - protein, 37 aa, Artificial Sequence
  GFR-binding peptide
  MOD_RES (34)..(36): Xaa is C or S
  MOD_RES (14)..(15)..(16)..(17)..(18): Xaa is A or G
  MOD_RES (19)..(20)..(21)..(22): Xaa is A or G or is absent
APTQLSATSVLYYXXXXXXXXXLRKHRNMVVRAXGXH

SEQ ID NO: 9729 - protein, 30 aa, Artificial Sequence
  GFR-binding peptide
VPQALSAISILYLVGRKPKVLKNYQMIVRS

SEQ ID NO: 9730 - protein, 39 aa, Artificial Sequence
  GFR-binding peptide
  MOD_RES (6)..(7): Xaa is C or S
  MOD_RES (21)..(22)..(23)..(24)..(25): Xaa is A or G
  MOD_RES (26)..(27)..(28)..(29): Xaa is A or G or is absent
YVPKPXXAPTKLSATSVLYYXXXXXXXXXLRKHRNMVVR

SEQ ID NO: 9731 - protein, 40 aa, Artificial Sequence
  GFR-binding peptide
  MOD_RES (6)..(7)..(39): Xaa is C or S
KIPKAXXVPTELNAISMLYFDENEKVVLKKYRDMVVEGXG

SEQ ID NO: 9732 - protein, 33 aa, Artificial Sequence
  GFR-binding peptide
  MOD_RES (14)..(15)..(16)..(17)..(18): Xaa is A or G
  MOD_RES (19)..(20)..(21)..(22): Xaa is A or G or is absent
APTQLSPISVLYKXXXXXXXXXLKYHYNMVVRA

SEQ ID NO: 9733 - protein, 37 aa, Artificial Sequence
  GFR-binding peptide
  MOD_RES (3)..(4)..(35)..(37): Xaa is C or S
SPXXVSQDLSAISILYLIGKTPKILKNYQMIVKSXKX

SEQ ID NO: 9734 - protein, 44 aa, Artificial Sequence
  GFR-binding peptide
  MOD_RES (4)..(41)..(43): Xaa is C or S
  MOD_RES (20)..(21)..(22)..(23)..(24): Xaa is A or G
  MOD_RES (25)..(26)..(27)..(28): Xaa is A or G or is absent
NVQXRPTQVQLSATSVLYYXXXXXXXXXLRKHRTLEDHLAXKXE

SEQ ID NO: 9735 - protein, 40 aa, Artificial Sequence
  GFR-binding peptide
  MOD_RES (5)..(6)..(40): Xaa is C or S
  MOD_RES (20)..(21)..(22)..(23)..(24): Xaa is A or G
  MOD_RES (25)..(26)..(27)..(28): Xaa is A or G or is absent
IPKAXXVPTELSAISMLYLXXXXXXXXXLKNYQEMVVEGX

SEQ ID NO: 9736 - protein, 38 aa, Artificial Sequence
  GFR-binding peptide
  MOD_RES (4)..(4): Xaa is C or S
NVQXRPTQVQLSATSVLYYEIVRKKPIFLRKHRTLEDH

SEQ ID NO: 9737 - protein, 43 aa, Artificial Sequence
  GFR-binding peptide
  MOD_RES (3)..(40)..(42): Xaa is C or S
VQXRPTQVQLNAISVLYFEIVRKKPIFLKKYRTLEDHLAXKXE

SEQ ID NO: 9738 - protein, 37 aa, Artificial Sequence
  GFR-binding peptide
  MOD_RES (4)..(5)..(37): Xaa is C or S
PKAXXAPTKLSAISVLYLDSSNNVILKNYQNMVVKAX

SEQ ID NO: 9739 - protein, 32 aa, Artificial Sequence
  GFR-binding peptide
  MOD_RES (1)..(2): Xaa is C or S
XXAPTQLSATSVLYYDDSSNVILRKHRNMVVR

SEQ ID NO: 9740 - protein, 35 aa, Artificial Sequence
  GFR-binding peptide
  MOD_RES (15)..(16)..(17)..(18)..(19): Xaa is A or G
  MOD_RES (20)..(21)..(22)..(23): Xaa is A or G or is absent
PTQVQLNAISVLYFXXXXXXXXXLKKYRTLEDHLA

SEQ ID NO: 9741 - protein, 40 aa, Artificial Sequence
  GFR-binding peptide
  MOD_RES (4)..(5)..(38)..(40): Xaa is C or S
  MOD_RES (19)..(20)..(21)..(22)..(23): Xaa is A or G
  MOD_RES (24)..(25)..(26)..(27): Xaa is A or G or is absent
AAPXXVPQALNAISILYFXXXXXXXXXLKKYRMIVRSXKX

SEQ ID NO: 9742 - protein, 38 aa, Artificial Sequence
  GFR-binding peptide
  MOD_RES (2)..(3)..(35)..(37): Xaa is C or S
AXXVPTELSATSMLYYDENEKVVLRKHRDMVVEGXGXR

SEQ ID NO: 9743 - protein, 37 aa, Artificial Sequence
  GFR-binding peptide
  MOD_RES (4)..(5)..(36): Xaa is C or S
ASPXXVPQDLSPISILYKVGRTPKVLKYHYMVVKSXK

SEQ ID NO: 9744 - protein, 38 aa, Artificial Sequence
  GFR-binding peptide
  MOD_RES (5)..(6): Xaa is C or S
  MOD_RES (20)..(21)..(22)..(23)..(24): Xaa is A or G
  MOD_RES (25)..(26)..(27)..(28): Xaa is A or G or is absent
SASPXXVSQDLSATSILYYXXXXXXXXXLRKHRMIVKS

SEQ ID NO: 9745 - protein, 37 aa, Artificial Sequence
  GFR-binding peptide
  MOD_RES (34)..(36): Xaa is C or S
  MOD_RES (14)..(15)..(16)..(17)..(18): Xaa is A or G
  MOD_RES (19)..(20)..(21)..(22): Xaa is A or G or is absent
VPTELSAISMLYLXXXXXXXXXLKNYQEMVVEGXGXR

SEQ ID NO: 9746 - protein, 34 aa, Artificial Sequence
  GFR-binding peptide
  MOD_RES (1)..(1): Xaa is C or S
  MOD_RES (15)..(16)..(17)..(18)..(19): Xaa is A or G
  MOD_RES (20)..(21)..(22)..(23): Xaa is A or G or is absent
XAPTKLNAISVLYFXXXXXXXXXLKKYRNMVVRS

SEQ ID NO: 9747 - protein, 34 aa, Artificial Sequence
  GFR-binding peptide
  MOD_RES (1)..(2): Xaa is C or S
  MOD_RES (16)..(17)..(18)..(19)..(20): Xaa is A or G
  MOD_RES (21)..(22)..(23)..(24): Xaa is A or G or is absent
XXAPTKLSPISVLYKXXXXXXXXXLKYHYNMVVR

SEQ ID NO: 9748 - protein, 40 aa, Artificial Sequence
  GFR-binding peptide
  MOD_RES (4)..(5)..(39): Xaa is C or S
  MOD_RES (19)..(20)..(21)..(22)..(23): Xaa is A or G
  MOD_RES (24)..(25)..(26)..(27): Xaa is A or G or is absent
PKAXXVPTELSAISMLYLXXXXXXXXXLKNYQDMVVEGXG

SEQ ID NO: 9749 - protein, 37 aa, Artificial Sequence
  GFR-binding peptide
  MOD_RES (3)..(4)..(37): Xaa is C or S
  MOD_RES (18)..(19)..(20)..(21)..(22): Xaa is A or G
  MOD_RES (23)..(24)..(25)..(26): Xaa is A or G or is absent
SPXXVPQDLSPISILYKXXXXXXXXXLKYHYMVVKSX

SEQ ID NO: 9750 - protein, 38 aa, Artificial Sequence
  GFR-binding peptide
  MOD_RES (6)..(38): Xaa is C or S
VTKPTXAPTKLSATSVLYYDDSSNVILRKHRNMVVRSX

SEQ ID NO: 9751 - protein, 36 aa, Artificial Sequence
  GFR-binding peptide
  MOD_RES (34)..(36): Xaa is C or S
  MOD_RES (14)..(15)..(16)..(17)..(18): Xaa is A or G
  MOD_RES (19)..(20)..(21)..(22): Xaa is A or G or is absent
VPTELSPISMLYKXXXXXXXXXLKYHYDMVVEGXGX

SEQ ID NO: 9752 - protein, 40 aa, Artificial Sequence
  GFR-binding peptide
  MOD_RES (6)..(7)..(39): Xaa is C or S
AVPKAXXAPTKLSAISVLYLDSSNNVILKNYQNMVVKAXG

SEQ ID NO: 9753 - protein, 36 aa, Artificial Sequence
  GFR-binding peptide
  MOD_RES (1)..(34)..(36): Xaa is C or S
XVPTKLSAISVLYLDDMGVPTLKNYQEGMSVAEXGX

SEQ ID NO: 9754 - protein, 35 aa, Artificial Sequence
  GFR-binding peptide
  MOD_RES (1)..(2)..(34): Xaa is C or S
XXAPTQLSAISVLYLDDSSNVILKNYQNMVVRAXG

SEQ ID NO: 9755 - protein, 39 aa, Artificial Sequence
  GFR-binding peptide
  MOD_RES (3)..(4)..(36)..(38): Xaa is C or S
KPXXAPTKLSAISVLYLDDSSNVILKNYQNMVVRSXGXH

SEQ ID NO: 9756 - protein, 38 aa, Artificial Sequence
  GFR-binding peptide
  MOD_RES (1)..(35)..(37): Xaa is C or S
  MOD_RES (15)..(16)..(17)..(18)..(19): Xaa is A or G
  MOD_RES (20)..(21)..(22)..(23): Xaa is A or G or is absent
XVPTELNAISMLYFXXXXXXXXXLKKYRDMVVEGXGXR

SEQ ID NO: 9757 - protein, 37 aa, Artificial Sequence
  GFR-binding peptide
  MOD_RES (1)..(34)..(36): Xaa is C or S
  MOD_RES (15)..(16)..(17)..(18)..(19): Xaa is A or G
  MOD_RES (20)..(21)..(22)..(23): Xaa is A or G or is absent
XVSQDLSPISILYKXXXXXXXXXLKYHYMIVKSXKXS

SEQ ID NO: 9758 - protein, 32 aa, Artificial Sequence
  GFR-binding peptide
  MOD_RES (1)..(1): Xaa is C or S
XAPTKLSAISVLYLDSSNNVILKNYQNMVVKA

SEQ ID NO: 9759 - protein, 34 aa, Artificial Sequence
  GFR-binding peptide
  MOD_RES (34)..(34): Xaa is C or S
  MOD_RES (14)..(15)..(16)..(17)..(18): Xaa is A or G
  MOD_RES (19)..(20)..(21)..(22): Xaa is A or G or is absent
APTKLSATSVLYYXXXXXXXXXLRKHRNMVVKAX

SEQ ID NO: 9760 - protein, 36 aa, Artificial Sequence
  GFR-binding peptide
  MOD_RES (6)..(6): Xaa is C or S
VTKPTXAPTKLSPISVLYKDDSSNVILKYHYNMVVR

SEQ ID NO: 9761 - protein, 40 aa, Artificial Sequence
  GFR-binding peptide
  MOD_RES (4)..(5)..(37)..(39): Xaa is C or S
PKPXXAPTKLSATSVLYYDDSSNVILRKHRNMVVRSXGXH

SEQ ID NO: 9762 - protein, 39 aa, Artificial Sequence
  GFR-binding peptide
  MOD_RES (2)..(3)..(37)..(39): Xaa is C or S
  MOD_RES (17)..(18)..(19)..(20)..(21): Xaa is A or G
  MOD_RES (22)..(23)..(24)..(25): Xaa is A or G or is absent
AXXAPTKLSATSVLYYXXXXXXXXXLRKHRNMVVKAXGX

SEQ ID NO: 9763 - protein, 41 aa, Artificial Sequence
  GFR-binding peptide
  MOD_RES (5)..(6)..(39)..(41): Xaa is C or S
  MOD_RES (20)..(21)..(22)..(23)..(24): Xaa is A or G
  MOD_RES (25)..(26)..(27)..(28): Xaa is A or G or is absent
SASPXXVPQDLSATSILYYXXXXXXXXXLRKHRMVVKSXKX

SEQ ID NO: 9764 - protein, 37 aa, Artificial Sequence
  GFR-binding peptide
  MOD_RES (3)..(4)..(35)..(37): Xaa is C or S
SPXXVPQDLSAISILYLVGRTPKVLKNYQMVVKSXKX

SEQ ID NO: 9765 - protein, 41 aa, Artificial Sequence
  GFR-binding peptide
  MOD_RES (2)..(39)..(41): Xaa is C or S
QXRPTQVQLNAISVLYFEIVRKKPIFLKKYRTLEDHLAXKX

SEQ ID NO: 9766 - protein, 38 aa, Artificial Sequence
  GFR-binding peptide
  MOD_RES (1)..(36)..(38): Xaa is C or S
  MOD_RES (15)..(16)..(17)..(18)..(19): Xaa is A or G
  MOD_RES (20)..(21)..(22)..(23): Xaa is A or G or is absent
XVPTKLSAISVLYLXXXXXXXXXLKNYQEGMSVAEXGX

SEQ ID NO: 9767 - protein, 35 aa, Artificial Sequence
  GFR-binding peptide
  MOD_RES (1)..(2): Xaa is C or S
  MOD_RES (16)..(17)..(18)..(19)..(20): Xaa is A or G
  MOD_RES (21)..(22)..(23)..(24): Xaa is A or G or is absent
XXAPTKLNAISVLYFXXXXXXXXXLKKYRNMVVRS

SEQ ID NO: 9768 - protein, 36 aa, Artificial Sequence
  GFR-binding peptide
  MOD_RES (2)..(3)..(35): Xaa is C or S
AXXAPTKLSPISVLYKDSSNNVILKYHYNMVVKAXG

SEQ ID NO: 9769 - protein, 39 aa, Artificial Sequence
  GFR-binding peptide
  MOD_RES (3)..(4)..(38): Xaa is C or S
  MOD_RES (18)..(19)..(20)..(21)..(22): Xaa is A or G
  MOD_RES (23)..(24)..(25)..(26): Xaa is A or G or is absent
KAXXAPTKLSAISVLYLXXXXXXXXXLKNYQNMVVKAXG

SEQ ID NO: 9770 - protein, 35 aa, Artificial Sequence
  GFR-binding peptide
  MOD_RES (1)..(32)..(34): Xaa is C or S
XVSQDLNAISILYFIGKTPKILKKYRMIVKSXKXS

SEQ ID NO: 9771 - protein, 36 aa, Artificial Sequence
  GFR-binding peptide
  MOD_RES (2)..(3)..(36): Xaa is C or S
  MOD_RES (17)..(18)..(19)..(20)..(21): Xaa is A or G
  MOD_RES (22)..(23)..(24)..(25): Xaa is A or G or is absent
PXXVSQDLSPISILYKXXXXXXXXXLKYHYMIVKSX

SEQ ID NO: 9772 - protein, 36 aa, Artificial Sequence
  GFR-binding peptide
  MOD_RES (1)..(2)..(36): Xaa is C or S
  MOD_RES (16)..(17)..(18)..(19)..(20): Xaa is A or G
  MOD_RES (21)..(22)..(23)..(24): Xaa is A or G or is absent
XXAPTKLSPISVLYKXXXXXXXXXLKYHYNMVVRSX

SEQ ID NO: 9773 - protein, 39 aa, Artificial Sequence
  GFR-binding peptide
  MOD_RES (3)..(4)..(36)..(38): Xaa is C or S
KAXXAPTKLSPISVLYKDSSNNVILKYHYNMVVKAXGXH

SEQ ID NO: 9774 - protein, 34 aa, Artificial Sequence
  GFR-binding peptide
  MOD_RES (15)..(16)..(17)..(18)..(19): Xaa is A or G
  MOD_RES (20)..(21)..(22)..(23): Xaa is A or G or is absent
PTQVQLNAISVLYFXXXXXXXXXLKKYRTLEDHL

SEQ ID NO: 9775 - protein, 33 aa, Artificial Sequence
  GFR-binding peptide
  MOD_RES (2)..(3): Xaa is C or S
AXXVPTELNAISMLYFDEYDKVVLKKYREMVVE

SEQ ID NO: 9776 - protein, 33 aa, Artificial Sequence
  GFR-binding peptide
  MOD_RES (1)..(32): Xaa is C or S
XVPQDLSAISILYLVGRTPKVLKNYQMVVKSXK

SEQ ID NO: 9777 - protein, 38 aa, Artificial Sequence; identical to SEQ ID NO: 2269
  GFR-binding peptide
  MOD_RES (32)..(33): Xaa is C or S

SEQ ID NO: 9778 - protein, 43 aa, Artificial Sequence; identical to SEQ ID NO: 2270
  GFR-binding peptide
  MOD_RES (2)..(4)..(38)..(39): Xaa is C or S
  MOD_RES (16)..(17)..(18)..(19)..(20): Xaa is A or G
  MOD_RES (21)..(22)..(23)..(24): Xaa is A or G or is absent

SEQ ID NO: 9779 - protein, 35 aa, Artificial Sequence; identical to SEQ ID NO: 2271
  GFR-binding peptide
  MOD_RES (2)..(4): Xaa is C or S

SEQ ID NO: 9780 - protein, 36 aa, Artificial Sequence
  GFR-binding peptide
  MOD_RES (2)..(4)..(36): Xaa is C or S
HXGXSRVVMNNSLQEIVNSSDDYYVVPLPELKTPAX

SEQ ID NO: 9781 - protein, 40 aa, Artificial Sequence; identical to SEQ ID NO: 2275
  GFR-binding peptide
  MOD_RES (1)..(3)..(36)..(37): Xaa is C or S
  MOD_RES (14)..(15)..(16)..(17)..(18): Xaa is A or G
  MOD_RES (19)..(20)..(21)..(22): Xaa is A or G or is absent

SEQ ID NO: 9782 - protein, 33 aa, Artificial Sequence; identical to SEQ ID NO: 2277
  GFR-binding peptide
  MOD_RES (2)..(2): Xaa is C or S

SEQ ID NO: 9783 - protein, 38 aa, Artificial Sequence; identical to SEQ ID NO: 2279
  GFR-binding peptide
  MOD_RES (1)..(3)..(37)..(38): Xaa is C or S
  MOD_RES (15)..(16)..(17)..(18)..(19): Xaa is A or G
  MOD_RES (20)..(21)..(22)..(23): Xaa is A or G or is absent

SEQ ID NO: 9784 - protein, 35 aa, Artificial Sequence
  GFR-binding peptide
  MOD_RES (1)..(33)..(34): Xaa is C or S
XGEVVMENSLQEVVKDYEDYYVMPLPELETPVXXA

SEQ ID NO: 9785 - protein, 34 aa, Artificial Sequence
  GFR-binding peptide
  MOD_RES (2)..(34): Xaa is C or S
GXARVVMNNSLQEIVNSSDDYYLVTLPELQTPAX

SEQ ID NO: 9786 - protein, 40 aa, Artificial Sequence
  GFR-binding peptide
  MOD_RES (2)..(34)..(35): Xaa is C or S
GXGEVVMDNSLQEVVKENEDYYVMPLPELETPVXXAKPIK

SEQ ID NO: 9787 - protein, 38 aa, Artificial Sequence; identical to SEQ ID NO: 2284
  GFR-binding peptide
  MOD_RES (1)..(3)..(34)..(35): Xaa is C or S

SEQ ID NO: 9788 - protein, 39 aa, Artificial Sequence
  GFR-binding peptide
  MOD_RES (1)..(3)..(37)..(38): Xaa is C or S
  MOD_RES (15)..(16)..(17)..(18)..(19): Xaa is A or G
  MOD_RES (20)..(21)..(22)..(23): Xaa is A or G or is absent
XGXSEVVMDEYQKYXXXXXXXXXIFLISIPSLRTPVXXT

SEQ ID NO: 9789 - protein, 35 aa, Artificial Sequence
  GFR-binding peptide
  MOD_RES (1)..(33)..(34): Xaa is C or S
XSRVVMNEYQKYIVNSSDDIFLVSIPSLKTPAXXP

SEQ ID NO: 9790 - protein, 36 aa, Artificial Sequence
  GFR-binding peptide
  MOD_RES (1)..(35)..(36): Xaa is C or S
  MOD_RES (13)..(14)..(15)..(16)..(17): Xaa is A or G
  MOD_RES (18)..(19)..(20)..(21): Xaa is A or G or is absent
XGEVVMDNSLQEXXXXXXXXXYYVMPLPELETPVXX

SEQ ID NO: 9791 - protein, 41 aa, Artificial Sequence
  GFR-binding peptide
  MOD_RES (1)..(3)..(37)..(38): Xaa is C or S
  MOD_RES (15)..(16)..(17)..(18)..(19): Xaa is A or G
  MOD_RES (20)..(21)..(22)..(23): Xaa is A or G or is absent
XGXGEVVMENSLQEXXXXXXXXXYYVMPLPELETPVXXAKP

SEQ ID NO: 9792 - protein, 35 aa, Artificial Sequence; identical to SEQ ID NO: 2288
  GFR-binding peptide
  MOD_RES (31)..(32): Xaa is C or S

SEQ ID NO: 9793 - protein, 42 aa, Artificial Sequence
  GFR-binding peptide
  MOD_RES (1)..(3)..(36)..(37): Xaa is C or S
  MOD_RES (14)..(15)..(16)..(17)..(18): Xaa is A or G
  MOD_RES (19)..(20)..(21)..(22): Xaa is A or G or is absent
XKXSKVVMNSLQEXXXXXXXXXYYLITLPELDQPVXXPSASA

SEQ ID NO: 9794 - protein, 30 aa, Artificial Sequence; identical to SEQ ID NO: 2292
  GFR-binding peptide

SEQ ID NO: 9795 - protein, 42 aa, Artificial Sequence; identical to SEQ ID NO: 2293
  GFR-binding peptide
  MOD_RES (2)..(4)..(36)..(37): Xaa is C or S

SEQ ID NO: 9796 - protein, 35 aa, Artificial Sequence
  GFR-binding peptide
  MOD_RES (1)..(33)..(34): Xaa is C or S
XSEVVMDNSLQEVVNNASDYYVIPLPELRTPVXXT

SEQ ID NO: 9797 - protein, 35 aa, Artificial Sequence
  GFR-binding peptide
  MOD_RES (2)..(34)..(35): Xaa is C or S
GXGEVVMENSLQEVVKDYEDYYVMPLPELETPVXX

SEQ ID NO: 9798 - protein, 32 aa, Artificial Sequence; identical to SEQ ID NO: 2297
  GFR-binding peptide
  MOD_RES (11)..(12)..(13)..(14)..(15): Xaa is A or G
  MOD_RES (16)..(17)..(18)..(19): Xaa is A or G or is absent

SEQ ID NO: 9799 - protein, 38 aa, Artificial Sequence; identical to SEQ ID NO: 2298
  GFR-binding peptide
  MOD_RES (1)..(35)..(36): Xaa is C or S
  MOD_RES (13)..(14)..(15)..(16)..(17): Xaa is A or G
  MOD_RES (18)..(19)..(20)..(21): Xaa is A or G or is absent

SEQ ID NO: 9800 - protein, 33 aa, Artificial Sequence
  GFR-binding peptide
  MOD_RES (12)..(13)..(14)..(15)..(16): Xaa is A or G
  MOD_RES (17)..(18)..(19)..(20): Xaa is A or G or is absent
GEVVMDNSLQEXXXXXXXXXYYVMPLPELETPV

SEQ ID NO: 9801 - protein, 39 aa, Artificial Sequence; identical to SEQ ID NO: 2299
  GFR-binding peptide
  MOD_RES (1)..(3)..(35)..(36): Xaa is C or S

SEQ ID NO: 9802 - protein, 35 aa, Artificial Sequence; identical to SEQ ID NO: 2300
  GFR-binding peptide
  MOD_RES (1)..(32)..(33): Xaa is C or S

SEQ ID NO: 9803 - protein, 39 aa, Artificial Sequence
  GFR-binding peptide
  MOD_RES (1)..(3)..(34)..(35): Xaa is C or S
XKXSKVVMNSLQEVKPTRGVYYLITLPELDQPVXXPSAS

SEQ ID NO: 9804 - protein, 40 aa, Artificial Sequence; identical to SEQ ID NO: 2303
  GFR-binding peptide
  MOD_RES (1)..(3)..(36)..(37): Xaa is C or S
  MOD_RES (14)..(15)..(16)..(17)..(18): Xaa is A or G
  MOD_RES (19)..(20)..(21)..(22): Xaa is A or G or is absent

SEQ ID NO: 9805 - protein, 39 aa, Artificial Sequence
  GFR-binding peptide
  MOD_RES (1)..(3)..(37): Xaa is C or S
  MOD_RES (15)..(16)..(17)..(18)..(19): Xaa is A or G
  MOD_RES (20)..(21)..(22)..(23): Xaa is A or G or is absent
XGXSRVVMNNSLQEXXXXXXXXXYYLVTLPELKTPAXTP

SEQ ID NO: 9806 - protein, 34 aa, Artificial Sequence; identical to SEQ ID NO: 2305
  GFR-binding peptide
  MOD_RES (2)..(2): Xaa is C or S
  MOD_RES (13)..(14)..(15)..(16)..(17): Xaa is A or G
  MOD_RES (18)..(19)..(20)..(21): Xaa is A or G or is absent

SEQ ID NO: 9807 - protein, 37 aa, Artificial Sequence
  GFR-binding peptide
  MOD_RES (1)..(34)..(35): Xaa is C or S
  MOD_RES (12)..(13)..(14)..(15)..(16): Xaa is A or G
  MOD_RES (17)..(18)..(19)..(20): Xaa is A or G or is absent
XSKVIMEYQKYXXXXXXXXXIFLISIPSLDQSVXXPS

SEQ ID NO: 9808 - protein, 36 aa, Artificial Sequence
  GFR-binding peptide
  MOD_RES (2)..(36): Xaa is C or S
  MOD_RES (14)..(15)..(16)..(17)..(18): Xaa is A or G
  MOD_RES (19)..(20)..(21)..(22): Xaa is A or G or is absent
GXSEVVMDRYKKLXXXXXXXXXFYLISIANLRTPVX

SEQ ID NO: 9809 - protein, 37 aa, Artificial Sequence
  GFR-binding peptide
  MOD_RES (32)..(33): Xaa is C or S
GEVVMENSLQEVVKDYEDYYLMTLPELETPVXXAKPI

SEQ ID NO: 9810 - protein, 37 aa, Artificial Sequence; identical to SEQ ID NO: 2310
  GFR-binding peptide
  MOD_RES (31)..(32): Xaa is C or S

SEQ ID NO: 9811 - protein, 33 aa, Artificial Sequence
  GFR-binding peptide
  MOD_RES (2)..(2): Xaa is C or S
GXSEVVMDEYQKYVVNNASDIFLISIPSLRTPV

SEQ ID NO: 9812 - protein, 44 aa, Artificial Sequence; identical to SEQ ID NO: 2311
  GFR-binding peptide
  MOD_RES (2)..(4)..(38)..(39): Xaa is C or S
  MOD_RES (16)..(17)..(18)..(19)..(20): Xaa is A or G
  MOD_RES (21)..(22)..(23)..(24): Xaa is A or G or is absent

SEQ ID NO: 9813 - protein, 36 aa, Artificial Sequence
  GFR-binding peptide
  MOD_RES (33)..(34): Xaa is C or S
  MOD_RES (11)..(12)..(13)..(14)..(15): Xaa is A or G
  MOD_RES (16)..(17)..(18)..(19): Xaa is A or G or is absent
SRVIMNSLQEXXXXXXXXXYYLITLPELAQPVXXPA

SEQ ID NO: 9814 - protein, 35 aa, Artificial Sequence
  GFR-binding peptide
  MOD_RES (31)..(32): Xaa is C or S
EVVMDNSLQEVVNNASDYYLITLPELRTPVXXTPP

SEQ ID NO: 9815 - protein, 41 aa, Artificial Sequence
  GFR-binding peptide
  MOD_RES (1)..(3)..(36)..(37): Xaa is C or S
  MOD_RES (14)..(15)..(16)..(17)..(18): Xaa is A or G
  MOD_RES (19)..(20)..(21)..(22): Xaa is A or G or is absent
XKXSKVVMNSLQEXXXXXXXXXYYVIPLPELDQPVXXPSAS

SEQ ID NO: 9816 - protein, 38 aa, Artificial Sequence; identical to SEQ ID NO: 2316
  GFR-binding peptide
  MOD_RES (32)..(32): Xaa is C or S

SEQ ID NO: 9817 - protein, 39 aa, Artificial Sequence
  GFR-binding peptide
  MOD_RES (1)..(3)..(36)..(37): Xaa is C or S
  MOD_RES (14)..(15)..(16)..(17)..(18): Xaa is A or G
  MOD_RES (19)..(20)..(21)..(22): Xaa is A or G or is absent
XKXSKVIMNSLQEXXXXXXXXXYYVIPLPELDQSVXXPS

SEQ ID NO: 9818 - protein, 33 aa, Artificial Sequence
  GFR-binding peptide
  MOD_RES (2)..(2): Xaa is C or S
GXSRVVMNEYQKYIVNSSDDIFLVSIPSLKTPA

SEQ ID NO: 9819 - protein, 37 aa, Artificial Sequence
  GFR-binding peptide
  MOD_RES (1)..(33)..(34): Xaa is C or S
XSEVVMDNSLQEVVNNASDYYVIPLPELRTPVXXTPP

SEQ ID NO: 9820 - protein, 32 aa, Artificial Sequence; identical to SEQ ID NO: 2327
  GFR-binding peptide
  MOD_RES (31)..(32): Xaa is C or S

SEQ ID NO: 9821 - protein, 41 aa, Artificial Sequence
  GFR-binding peptide
  MOD_RES (1)..(3)..(35)..(36): Xaa is C or S
XGXSEVVMDQYNKLVVNNASDLYLISIASLRTPVXXTPPTS

SEQ ID NO: 9822 - protein, 35 aa, Artificial Sequence; identical to SEQ ID NO: 2332
  GFR-binding peptide
  MOD_RES (2)..(4)..(35): Xaa is C or S

SEQ ID NO: 9823 - protein, 36 aa, Artificial Sequence
  GFR-binding peptide
  MOD_RES (1)..(3): Xaa is C or S
  MOD_RES (15)..(16)..(17)..(18)..(19): Xaa is A or G
  MOD_RES (20)..(21)..(22)..(23): Xaa is A or G or is absent
XGXGEVVMENSLQEXXXXXXXXXYYVMPLPELETPV

SEQ ID NO: 9824 - protein, 38 aa, Artificial Sequence
  GFR-binding peptide
  MOD_RES (2)..(4)..(38): Xaa is C or S
  MOD_RES (16)..(17)..(18)..(19)..(20): Xaa is A or G
  MOD_RES (21)..(22)..(23)..(24): Xaa is A or G or is absent
HXGXSRVVMNNSLQEXXXXXXXXXYYLVTLPELKTPAX

SEQ ID NO: 9825 - protein, 40 aa, Artificial Sequence
  GFR-binding peptide
  MOD_RES (1)..(3)..(34)..(35): Xaa is C or S
XKXSKVVMEYQKYVKPTRGVIFLISIPSLDQPVXXPSASA

SEQ ID NO: 9826 - protein, 39 aa, Artificial Sequence; identical to SEQ ID NO: 2336
  GFR-binding peptide
  MOD_RES (2)..(35)..(36): Xaa is C or S
  MOD_RES (13)..(14)..(15)..(16)..(17): Xaa is A or G
  MOD_RES (18)..(19)..(20)..(21): Xaa is A or G or is absent

SEQ ID NO: 9827 - protein, 35 aa, Artificial Sequence
  GFR-binding peptide
  MOD_RES (2)..(4): Xaa is C or S
HXGXSRVVMNNSLQEIVNSSDDYYVVPLPELKTPA

SEQ ID NO: 9828 - protein, 39 aa, Artificial Sequence; identical to SEQ ID NO: 2338
  GFR-binding peptide
  MOD_RES (2)..(36)..(37): Xaa is C or S
  MOD_RES (14)..(15)..(16)..(17)..(18): Xaa is A or G
  MOD_RES (19)..(20)..(21)..(22): Xaa is A or G or is absent

SEQ ID NO: 9829 - protein, 34 aa, Artificial Sequence
  GFR-binding peptide
  MOD_RES (1)..(1): Xaa is C or S
  MOD_RES (13)..(14)..(15)..(16)..(17): Xaa is A or G
  MOD_RES (18)..(19)..(20)..(21): Xaa is A or G or is absent
XARVVMNEYQKYXXXXXXXXXIFLVSIPSLQTPA

SEQ ID NO: 9830 - protein, 38 aa, Artificial Sequence
  GFR-binding peptide
  MOD_RES (33)..(34): Xaa is C or S
  MOD_RES (11)..(12)..(13)..(14)..(15): Xaa is A or G
  MOD_RES (16)..(17)..(18)..(19): Xaa is A or G or is absent
EVVMENSLQEXXXXXXXXXYYLMTLPELETPVXXAKPI

SEQ ID NO: 9831 - protein, 31 aa, Artificial Sequence
  GFR-binding peptide
SRVVMNNSLQEIVNSSDDYYVVPLPELKTPA

SEQ ID NO: 9832 - protein, 40 aa, Artificial Sequence
  GFR-binding peptide
  MOD_RES (2)..(36)..(37): Xaa is C or S
  MOD_RES (14)..(15)..(16)..(17)..(18): Xaa is A or G
  MOD_RES (19)..(20)..(21)..(22): Xaa is A or G or is absent
GXGEVVMDEYQKYXXXXXXXXXIFLMSIPSLETPVXXAKP

SEQ ID NO: 9833 - protein, 37 aa, Artificial Sequence; identical to SEQ ID NO: 2340
  GFR-binding peptide
  MOD_RES (1)..(33)..(34): Xaa is C or S

SEQ ID NO: 9834 - protein, 32 aa, Artificial Sequence
  GFR-binding peptide
  MOD_RES (1)..(1): Xaa is C or S
XARVVMNNSLQEIVNSSDDYYLVTLPELQTPA

SEQ ID NO: 9835 - protein, 41 aa, Artificial Sequence
  GFR-binding peptide
  MOD_RES (2)..(4)..(38)..(39): Xaa is C or S
  MOD_RES (16)..(17)..(18)..(19)..(20): Xaa is A or G
  MOD_RES (21)..(22)..(23)..(24): Xaa is A or G or is absent
HXGXARVVMNNSLQEXXXXXXXXXYYVVPLPELQTPAXXPK

SEQ ID NO: 9836 - protein, 35 aa, Artificial Sequence
  GFR-binding peptide
  MOD_RES (31)..(32): Xaa is C or S
EVVMDNSLQEVVKENEDYYLMTLPELETPVXXAKP

SEQ ID NO: 9837 - protein, 41 aa, Artificial Sequence; identical to SEQ ID NO: 2343
  GFR-binding peptide
  MOD_RES (1)..(3)..(37): Xaa is C or S
  MOD_RES (15)..(16)..(17)..(18)..(19): Xaa is A or G
  MOD_RES (20)..(21)..(22)..(23): Xaa is A or G or is absent

SEQ ID NO: 9838 - protein, 42 aa, Artificial Sequence
  GFR-binding peptide
  MOD_RES (2)..(4)..(37)..(38): Xaa is C or S
  MOD_RES (15)..(16)..(17)..(18)..(19): Xaa is A or G
  MOD_RES (20)..(21)..(22)..(23): Xaa is A or G or is absent
SXKXSKVIMNSLQEXXXXXXXXXYYVIPLPELDQSVXXPSAS

SEQ ID NO: 9839 - protein, 36 aa, Artificial Sequence
  GFR-binding peptide
  MOD_RES (1)..(3)..(36): Xaa is C or S
  MOD_RES (14)..(15)..(16)..(17)..(18): Xaa is A or G
  MOD_RES (19)..(20)..(21)..(22): Xaa is A or G or is absent
XKXSRVIMEYQKYXXXXXXXXXIFLISIPSLAQPVX

SEQ ID NO: 9840 - protein, 34 aa, Artificial Sequence; identical to SEQ ID NO: 2344
  GFR-binding peptide
  MOD_RES (31)..(32): Xaa is C or S

SEQ ID NO: 9841 - protein, 37 aa, Artificial Sequence
  GFR-binding peptide
  MOD_RES (1)..(3)..(37): Xaa is C or S
  MOD_RES (15)..(16)..(17)..(18)..(19): Xaa is A or G
  MOD_RES (20)..(21)..(22)..(23): Xaa is A or G or is absent
XGXSEVVMDNSLQEXXXXXXXXXYYVIPLPELRTPVX

SEQ ID NO: 9842 - protein, 36 aa, Artificial Sequence
  GFR-binding peptide
  MOD_RES (1)..(33)..(34): Xaa is C or S
XSEVVMDNSLQEVVNNASDYYLITLPELRTPVXXTP

SEQ ID NO: 9843 - protein, 37 aa, Artificial Sequence
  GFR-binding peptide
  MOD_RES (2)..(36)..(37): Xaa is C or S
  MOD_RES (14)..(15)..(16)..(17)..(18): Xaa is A or G
  MOD_RES (19)..(20)..(21)..(22): Xaa is A or G or is absent
GXSRVVMNNSLQEXXXXXXXXXYYVVPLPELKTPAXX

SEQ ID NO: 9844 - protein, 38 aa, Artificial Sequence; identical to SEQ ID NO: 2349
  GFR-binding peptide
  MOD_RES (34)..(35): Xaa is C or S
  MOD_RES (12)..(13)..(14)..(15)..(16): Xaa is A or G
  MOD_RES (17)..(18)..(19)..(20): Xaa is A or G or is absent

SEQ ID NO: 9845 - protein, 39 aa, Artificial Sequence; identical to SEQ ID NO: 2350
  GFR-binding peptide
  MOD_RES (2)..(4)..(36)..(37): Xaa is C or S

SEQ ID NO: 9846 - protein, 38 aa, Artificial Sequence; identical to SEQ ID NO: 2351
  GFR-binding peptide
  MOD_RES (1)..(3)..(35)..(36): Xaa is C or S

SEQ ID NO: 9847 - protein, 39 aa, Artificial Sequence
  GFR-binding peptide
  MOD_RES (2)..(4)..(38): Xaa is C or S
  MOD_RES (16)..(17)..(18)..(19)..(20): Xaa is A or G
  MOD_RES (21)..(22)..(23)..(24): Xaa is A or G or is absent
HXGXSRVVMNNSLQEXXXXXXXXXYYLVTLPELKTPAXT

SEQ ID NO: 9848 - protein, 34 aa, Artificial Sequence; identical to SEQ ID NO: 2356
  GFR-binding peptide
  MOD_RES (1)..(34): Xaa is C or S
  MOD_RES (12)..(13)..(14)..(15)..(16): Xaa is A or G
  MOD_RES (17)..(18)..(19)..(20): Xaa is A or G or is absent

SEQ ID NO: 9849 - protein, 43 aa, Artificial Sequence; identical to SEQ ID NO: 2357
  GFR-binding peptide
  MOD_RES (2)..(4)..(38)..(39): Xaa is C or S
  MOD_RES (16)..(17)..(18)..(19)..(20): Xaa is A or G
  MOD_RES (21)..(22)..(23)..(24): Xaa is A or G or is absent

SEQ ID NO: 9850 - protein, 37 aa, Artificial Sequence
  GFR-binding peptide
  MOD_RES (2)..(4): Xaa is C or S
  MOD_RES (16)..(17)..(18)..(19)..(20): Xaa is A or G
  MOD_RES (21)..(22)..(23)..(24): Xaa is A or G or is absent
HXGXSRVVMNNSLQEXXXXXXXXXYYLVTLPELKTPA

SEQ ID NO: 9851 - protein, 33 aa, Artificial Sequence; identical to SEQ ID NO: 2358
  GFR-binding peptide
  MOD_RES (33)..(33): Xaa is C or S
  MOD_RES (11)..(12)..(13)..(14)..(15): Xaa is A or G
  MOD_RES (16)..(17)..(18)..(19): Xaa is A or G or is absent

SEQ ID NO: 9852 - protein, 38 aa, Artificial Sequence; identical to SEQ ID NO: 2359
  GFR-binding peptide
  MOD_RES (1)..(34)..(35): Xaa is C or S
  MOD_RES (12)..(13)..(14)..(15)..(16): Xaa is A or G
  MOD_RES (17)..(18)..(19)..(20): Xaa is A or G or is absent

SEQ ID NO: 9853 - protein, 41 aa, Artificial Sequence
  GFR-binding peptide
  MOD_RES (2)..(4)..(36)..(37): Xaa is C or S
RXGXGEVVMDEYQKYVVKENEDIFLMSIPSLETPVXXAKPI

SEQ ID NO: 9854 - protein, 37 aa, Artificial Sequence; identical to SEQ ID NO: 2360
  GFR-binding peptide
  MOD_RES (1)..(3)..(37): Xaa is C or S
  MOD_RES (15)..(16)..(17)..(18)..(19): Xaa is A or G
  MOD_RES (20)..(21)..(22)..(23): Xaa is A or G or is absent

SEQ ID NO: 9855 - protein, 38 aa, Artificial Sequence
  GFR-binding peptide
  MOD_RES (2)..(33)..(34): Xaa is C or S
KXSKVVMNSLQEVKPTRGVYYLITLPELDQPVXXPSAS

SEQ ID NO: 9856 - protein, 34 aa, Artificial Sequence; identical to SEQ ID NO: 2362
  GFR-binding peptide
  MOD_RES (1)..(33)..(34): Xaa is C or S

SEQ ID NO: 9857 - protein, 39 aa, Artificial Sequence; identical to SEQ ID NO: 2363
  GFR-binding peptide
  MOD_RES (33)..(34): Xaa is C or S
  MOD_RES (11)..(12)..(13)..(14)..(15): Xaa is A or G
  MOD_RES (16)..(17)..(18)..(19): Xaa is A or G or is absent

SEQ ID NO: 9858 - protein, 40 aa, Artificial Sequence
  GFR-binding peptide
  MOD_RES (1)..(35)..(36): Xaa is C or S
  MOD_RES (13)..(14)..(15)..(16)..(17): Xaa is A or G
  MOD_RES (18)..(19)..(20)..(21): Xaa is A or G or is absent
XGEVVMEEYQKYXXXXXXXXXIFLMSIPSLETPVXXAKPI

SEQ ID NO: 9859 - protein, 41 aa, Artificial Sequence; identical to SEQ ID NO: 2364
  GFR-binding peptide
  MOD_RES (2)..(4)..(37)..(38): Xaa is C or S
  MOD_RES (15)..(16)..(17)..(18)..(19): Xaa is A or G
  MOD_RES (20)..(21)..(22)..(23): Xaa is A or G or is absent

SEQ ID NO: 9860 - protein, 32 aa, Artificial Sequence
  GFR-binding peptide
  MOD_RES (31)..(32): Xaa is C or S
RVVMNEYQKYIVNSSDDIFLVSIPSLKTPAXX

SEQ ID NO: 9861 - protein, 35 aa, Artificial Sequence; identical to SEQ ID NO: 2367
  GFR-binding peptide
  MOD_RES (34)..(35): Xaa is C or S
  MOD_RES (12)..(13)..(14)..(15)..(16): Xaa is A or G
  MOD_RES (17)..(18)..(19)..(20): Xaa is A or G or is absent

SEQ ID NO: 9862 - protein, 40 aa, Artificial Sequence
  GFR-binding peptide
  MOD_RES (2)..(4)..(35)..(36): Xaa is C or S
SXKXSRVIMEYQKYVKPKRGVIFLISIPSLAQPVXXPAAS

SEQ ID NO: 9863 - protein, 34 aa, Artificial Sequence; identical to SEQ ID NO: 2368
  GFR-binding peptide
  MOD_RES (32)..(33): Xaa is C or S

SEQ ID NO: 9864 - protein, 42 aa, Artificial Sequence
  GFR-binding peptide
  MOD_RES (2)..(4)..(38): Xaa is C or S
  MOD_RES (16)..(17)..(18)..(19)..(20): Xaa is A or G
  MOD_RES (21)..(22)..(23)..(24): Xaa is A or G or is absent
HXGXSRVVMNEYQKYXXXXXXXXXIFLVSIPSLKTPAXTPKT

SEQ ID NO: 9865 - protein, 36 aa, Artificial Sequence
  GFR-binding peptide
  MOD_RES (1)..(34)..(35): Xaa is C or S
  MOD_RES (12)..(13)..(14)..(15)..(16): Xaa is A or G
  MOD_RES (17)..(18)..(19)..(20): Xaa is A or G or is absent
XSRVIMEYQKYXXXXXXXXXIFLISIPSLAQPVXXP

SEQ ID NO: 9866 - protein, 32 aa, Artificial Sequence
  GFR-binding peptide
  MOD_RES (32)..(32): Xaa is C or S
GEVVMENSLQEVVKDYEDYYLMTLPELETPVX

SEQ ID NO: 9867 - protein, 39 aa, Artificial Sequence
  GFR-binding peptide
  MOD_RES (1)..(3)..(35)..(36): Xaa is C or S
XGXSRVVMNNSLQEIVNSSDDYYLVTLPELKTPAXXPKP

SEQ ID NO: 9868 - protein, 37 aa, Artificial Sequence; identical to SEQ ID NO: 2377
  GFR-binding peptide
  MOD_RES (1)..(33)..(34): Xaa is C or S

SEQ ID NO: 9869 - protein, 42 aa, Artificial Sequence; identical to SEQ ID NO: 2379
  GFR-binding peptide
  MOD_RES (2)..(4)..(38)..(39): Xaa is C or S
  MOD_RES (16)..(17)..(18)..(19)..(20): Xaa is A or G
  MOD_RES (21)..(22)..(23)..(24): Xaa is A or G or is absent

SEQ ID NO: 9870 - protein, 38 aa, Artificial Sequence; identical to SEQ ID NO: 2382
  GFR-binding peptide
  MOD_RES (1)..(3)..(37)..(38): Xaa is C or S
  MOD_RES (15)..(16)..(17)..(18)..(19): Xaa is A or G
  MOD_RES (20)..(21)..(22)..(23): Xaa is A or G or is absent

SEQ ID NO: 9871 - protein, 38 aa, Artificial Sequence
  GFR-binding peptide
  MOD_RES (1)..(35): Xaa is C or S
  MOD_RES (13)..(14)..(15)..(16)..(17): Xaa is A or G
  MOD_RES (18)..(19)..(20)..(21): Xaa is A or G or is absent
XSRVVMNNSLQEXXXXXXXXXYYLVTLPELKTPAXTPK

SEQ ID NO: 9872 - protein, 43 aa, Artificial Sequence
  GFR-binding peptide
  MOD_RES (2)..(4)..(37)..(38): Xaa is C or S
  MOD_RES (15)..(16)..(17)..(18)..(19): Xaa is A or G
  MOD_RES (20)..(21)..(22)..(23): Xaa is A or G or is absent
SXKXSRVIMEYQKYXXXXXXXXXIFLISIPSLAQPVXXPAASA

SEQ ID NO: 9873 - protein, 34 aa, Artificial Sequence; identical to SEQ ID NO: 2387
  GFR-binding peptide
  MOD_RES (33)..(34): Xaa is C or S
  MOD_RES (11)..(12)..(13)..(14)..(15): Xaa is A or G
  MOD_RES (16)..(17)..(18)..(19): Xaa is A or G or is absent

SEQ ID NO: 9874 - protein, 31 aa, Artificial Sequence
  GFR-binding peptide
  MOD_RES (31)..(31): Xaa is C or S
RVVMNEYQKYIVNSSDDIFLVSIPSLQTPAX

SEQ ID NO: 9875 - protein, 31 aa, Artificial Sequence
  GFR-binding peptide
  MOD_RES (31)..(31): Xaa is C or S
SRVIMNSLQEVKPKRGVYYVIPLPELAQPVX

SEQ ID NO: 9876 - protein, 41 aa, Artificial Sequence
  GFR-binding peptide
  MOD_RES (1)..(3)..(37)..(38): Xaa is C or S
  MOD_RES (15)..(16)..(17)..(18)..(19): Xaa is A or G
  MOD_RES (20)..(21)..(22)..(23): Xaa is A or G or is absent
XGXSEVVMDNSLQEXXXXXXXXXYYVIPLPELRTPVXXTPP

SEQ ID NO: 9877 - protein, 39 aa, Artificial Sequence; identical to SEQ ID NO: 2389
  GFR-binding peptide
  MOD_RES (1)..(3)..(37)..(38): Xaa is C or S
  MOD_RES (15)..(16)..(17)..(18)..(19): Xaa is A or G
  MOD_RES (20)..(21)..(22)..(23): Xaa is A or G or is absent

SEQ ID NO: 9878 - protein, 35 aa, Artificial Sequence; identical to SEQ ID NO: 2390
  GFR-binding peptide
  MOD_RES (1)..(32)..(33): Xaa is C or S

SEQ ID NO: 9879 - protein, 32 aa, Artificial Sequence
  GFR-binding peptide
  MOD_RES (31)..(32): Xaa is C or S
SRVIMEYQKYVKPKRGVIFLISIPSLAQPVXX

SEQ ID NO: 9880 - protein, 41 aa, Artificial Sequence; identical to SEQ ID NO: 2394
  GFR-binding peptide
  MOD_RES (2)..(36)..(37): Xaa is C or S
  MOD_RES (14)..(15)..(16)..(17)..(18): Xaa is A or G
  MOD_RES (19)..(20)..(21)..(22): Xaa is A or G or is absent

SEQ ID NO: 9881 - protein, 38 aa, Artificial Sequence
  GFR-binding peptide
  MOD_RES (2)..(4)..(37)..(38): Xaa is C or S
  MOD_RES (15)..(16)..(17)..(18)..(19): Xaa is A or G
  MOD_RES (20)..(21)..(22)..(23): Xaa is A or G or is absent
SXKXSKVVMNSLQEXXXXXXXXXYYVIPLPELDQPVXX

SEQ ID NO: 9882 - protein, 39 aa, Artificial Sequence
  GFR-binding peptide
  MOD_RES (33)..(33): Xaa is C or S
  MOD_RES (11)..(12)..(13)..(14)..(15): Xaa is A or G
  MOD_RES (16)..(17)..(18)..(19): Xaa is A or G or is absent
RVVMNNSLQEXXXXXXXXXYYVVPLPELKTPAXTPKTVH

SEQ ID NO: 9883 - protein, 39 aa, Artificial Sequence
  GFR-binding peptide
  MOD_RES (1)..(3)..(36)..(37): Xaa is C or S
  MOD_RES (14)..(15)..(16)..(17)..(18): Xaa is A or G
  MOD_RES (19)..(20)..(21)..(22): Xaa is A or G or is absent
XKXSRVIMNSLQEXXXXXXXXXYYVIPLPELAQPVXXPA

SEQ ID NO: 9884 - protein, 35 aa, Artificial Sequence
  GFR-binding peptide
  MOD_RES (33)..(34): Xaa is C or S
  MOD_RES (11)..(12)..(13)..(14)..(15): Xaa is A or G
  MOD_RES (16)..(17)..(18)..(19): Xaa is A or G or is absent
RVVMNNSLQEXXXXXXXXXYYVVPLPELQTPAXXP

SEQ ID NO: 9885 - protein, 37 aa, Artificial Sequence
  GFR-binding peptide
  MOD_RES (34)..(35): Xaa is C or S
  MOD_RES (12)..(13)..(14)..(15)..(16): Xaa is A or G
  MOD_RES (17)..(18)..(19)..(20): Xaa is A or G or is absent
ARVVMNNSLQEXXXXXXXXXYYLVTLPELQTPAXXPK

SEQ ID NO: 9886 - protein, 34 aa, Artificial Sequence
  GFR-binding peptide
  MOD_RES (31)..(31): Xaa is C or S
RVVMNNSLQEIVNSSDDYYLVTLPELKTPAXTPK

SEQ ID NO: 9887 - protein, 44 aa, Artificial Sequence
  GFR-binding peptide
  MOD_RES (2)..(4)..(38)..(39): Xaa is C or S
  MOD_RES (16)..(17)..(18)..(19)..(20): Xaa is A or G
  MOD_RES (21)..(22)..(23)..(24): Xaa is A or G or is absent
HXGXARVVMNEYQKYXXXXXXXXXIFLVSIPSLQTPAXXPKPVT

SEQ ID NO: 9888 - protein, 36 aa, Artificial Sequence; identical to SEQ ID NO: 2398
  GFR-binding peptide
  MOD_RES (1)..(34)..(35): Xaa is C or S
  MOD_RES (12)..(13)..(14)..(15)..(16): Xaa is A or G
  MOD_RES (17)..(18)..(19)..(20): Xaa is A or G or is absent

SEQ ID NO: 9889 - protein, 37 aa, Artificial Sequence; identical to SEQ ID NO: 2399
  GFR-binding peptide
  MOD_RES (1)..(3)..(37): Xaa is C or S
  MOD_RES (15)..(16)..(17)..(18)..(19): Xaa is A or G
  MOD_RES (20)..(21)..(22)..(23): Xaa is A or G or is absent

SEQ ID NO: 9890 - protein, 39 aa, Artificial Sequence
  GFR-binding peptide
  MOD_RES (34)..(35): Xaa is C or S
  MOD_RES (12)..(13)..(14)..(15)..(16): Xaa is A or G
  MOD_RES (17)..(18)..(19)..(20): Xaa is A or G or is absent
SEVVMDNSLQEXXXXXXXXXYYLITLPELRTPVXXTPPT

SEQ ID NO: 9891 - protein, 42 aa, Artificial Sequence
  GFR-binding peptide
  MOD_RES (1)..(3)..(37): Xaa is C or S
  MOD_RES (15)..(16)..(17)..(18)..(19): Xaa is A or G
  MOD_RES (20)..(21)..(22)..(23): Xaa is A or G or is absent
XGXSRVVMNNSLQEXXXXXXXXXYYVVPLPELKTPAXTPKTV

SEQ ID NO: 9892 - protein, 39 aa, Artificial Sequence
  GFR-binding peptide
  MOD_RES (2)..(4)..(37)..(38): Xaa is C or S
  MOD_RES (15)..(16)..(17)..(18)..(19): Xaa is A or G
  MOD_RES (20)..(21)..(22)..(23): Xaa is A or G or is absent
SXKXSKVIMNSLQEXXXXXXXXXYYVIPLPELDQSVXXP

SEQ ID NO: 9893 - protein, 41 aa, Artificial Sequence
  GFR-binding peptide
  MOD_RES (1)..(3)..(37)..(38): Xaa is C or S
  MOD_RES (15)..(16)..(17)..(18)..(19): Xaa is A or G
  MOD_RES (20)..(21)..(22)..(23): Xaa is A or G or is absent
XGXARVVMNEYQKYXXXXXXXXXIFLVSIPSLQTPAXXPKP

SEQ ID NO: 9894 - protein, 37 aa, Artificial Sequence
  GFR-binding peptide
  MOD_RES (2)..(4)..(37): Xaa is C or S
  MOD_RES (15)..(16)..(17)..(18)..(19): Xaa is A or G
  MOD_RES (20)..(21)..(22)..(23): Xaa is A or G or is absent
SXKXSKVIMNSLQEXXXXXXXXXYYVIPLPELDQSVX

SEQ ID NO: 9895 - protein, 38 aa, Artificial Sequence
  GFR-binding peptide
  MOD_RES (1)..(33)..(34): Xaa is C or S
XSEVVMDQYNKLVVNNASDLYLISIASLRTPVXXTPPT

SEQ ID NO: 9896 - protein, 39 aa, Artificial Sequence
  GFR-binding peptide
  MOD_RES (1)..(35)..(36): Xaa is C or S
  MOD_RES (13)..(14)..(15)..(16)..(17): Xaa is A or G
  MOD_RES (18)..(19)..(20)..(21): Xaa is A or G or is absent
XGEVVMDNSLQEXXXXXXXXXYYLMTLPELETPVXXAKP

SEQ ID NO: 9897 - protein, 36 aa, Artificial Sequence
  GFR-binding peptide
  MOD_RES (33)..(34): Xaa is C or S
  MOD_RES (11)..(12)..(13)..(14)..(15): Xaa is A or G
  MOD_RES (16)..(17)..(18)..(19): Xaa is A or G or is absent
RVVMNNSLQEXXXXXXXXXYYLVTLPELQTPAXXPK

SEQ ID NO: 9898 - protein, 38 aa, Artificial Sequence
  GFR-binding peptide
  MOD_RES (1)..(3)..(37)..(38): Xaa is C or S
  MOD_RES (15)..(16)..(17)..(18)..(19): Xaa is A or G
  MOD_RES (20)..(21)..(22)..(23): Xaa is A or G or is absent
XGXGEVVMDNSLQEXXXXXXXXXYYVMPLPELETPVXX

SEQ ID NO: 9899 - protein, 39 aa, Artificial Sequence
  GFR-binding peptide
  MOD_RES (2)..(34): Xaa is C or S
GXSRVVMNEYQKYIVNSSDDIFLVSIPSLKTPAXTPKTV

SEQ ID NO: 9900 - protein, 39 aa, Artificial Sequence; identical to SEQ ID NO: 2406
  GFR-binding peptide
  MOD_RES (2)..(4)..(38)..(39): Xaa is C or S
  MOD_RES (16)..(17)..(18)..(19)..(20): Xaa is A or G
  MOD_RES (21)..(22)..(23)..(24): Xaa is A or G or is absent

SEQ ID NO: 9901 - protein, 37 aa, Artificial Sequence
  GFR-binding peptide
  MOD_RES (33)..(34): Xaa is C or S
  MOD_RES (11)..(12)..(13)..(14)..(15): Xaa is A or G
  MOD_RES (16)..(17)..(18)..(19): Xaa is A or G or is absent
SKVVMNSLQEXXXXXXXXXYYVIPLPELDQPVXXPSA

SEQ ID NO: 9902 - protein, 38 aa, Artificial Sequence; identical to SEQ ID NO: 2407
  GFR-binding peptide
  MOD_RES (33)..(34): Xaa is C or S
  MOD_RES (11)..(12)..(13)..(14)..(15): Xaa is A or G
  MOD_RES (16)..(17)..(18)..(19): Xaa is A or G or is absent

SEQ ID NO: 9903 - protein, 34 aa, Artificial Sequence; identical to SEQ ID NO: 2408
  GFR-binding peptide
  MOD_RES (33)..(34): Xaa is C or S
  MOD_RES (11)..(12)..(13)..(14)..(15): Xaa is A or G
  MOD_RES (16)..(17)..(18)..(19): Xaa is A or G or is absent

SEQ ID NO: 9904 - protein, 41 aa, Artificial Sequence
  GFR-binding peptide
  MOD_RES (2)..(35)..(36): Xaa is C or S
  MOD_RES (13)..(14)..(15)..(16)..(17): Xaa is A or G
  MOD_RES (18)..(19)..(20)..(21): Xaa is A or G or is absent
KXSKVIMNSLQEXXXXXXXXXYYVIPLPELDQSVXXPSASA

SEQ ID NO: 9905 - protein, 32 aa, Artificial Sequence; identical to SEQ ID NO: 2409
  GFR-binding peptide
  MOD_RES (31)..(31): Xaa is C or S

SEQ ID NO: 9906 - protein, 41 aa, Artificial Sequence; identical to SEQ ID NO: 2410
  GFR-binding peptide
  MOD_RES (1)..(3)..(35)..(36): Xaa is C or S

SEQ ID NO: 9907 - protein, 35 aa, Artificial Sequence
  GFR-binding peptide
  MOD_RES (1)..(3)..(34)..(35): Xaa is C or S
XKXSKVIMNSLQEIKPTKGIYYVIPLPELDQSVXX

SEQ ID NO: 9908 - protein, 38 aa, Artificial Sequence
  GFR-binding peptide
  MOD_RES (2)..(4)..(36)..(37): Xaa is C or S
RXGXGEVVMENSLQEVVKDYEDYYVMPLPELETPVXXA

SEQ ID NO: 9909 - protein, 35 aa, Artificial Sequence
  GFR-binding peptide
  MOD_RES (1)..(3): Xaa is C or S
  MOD_RES (14)..(15)..(16)..(17)..(18): Xaa is A or G
  MOD_RES (19)..(20)..(21)..(22): Xaa is A or G or is absent
XKXSRVIMEYQKYXXXXXXXXXIFLISIPSLAQPV

SEQ ID NO: 9910 - protein, 34 aa, Artificial Sequence
  GFR-binding peptide
  MOD_RES (32)..(33): Xaa is C or S
ARVVMNNSLQEIVNSSDDYYVVPLPELQTPAXXP

SEQ ID NO: 9911 - protein, 40 aa, Artificial Sequence
  GFR-binding peptide
  MOD_RES (2)..(34)..(35): Xaa is C or S
GXSEVVMDRYKKLVVNNASDFYLISIANLRTPVXXTPPTS

SEQ ID NO: 9912 - protein, 38 aa, Artificial Sequence
  GFR-binding peptide
  MOD_RES (2)..(4)..(37)..(38): Xaa is C or S
  MOD_RES (15)..(16)..(17)..(18)..(19): Xaa is A or G
  MOD_RES (20)..(21)..(22)..(23): Xaa is A or G or is absent
SXKXSKVIMEYQKYXXXXXXXXXIFLISIPSLDQSVXX

SEQ ID NO: 9913 - protein, 36 aa, Artificial Sequence; identical to SEQ ID NO: 2418
  GFR-binding peptide
  MOD_RES (1)..(32)..(33): Xaa is C or S

SEQ ID NO: 9914 - protein, 34 aa, Artificial Sequence
  GFR-binding peptide
  MOD_RES (1)..(3): Xaa is C or S
XGXARVVMNEYQKYIVNSSDDIFLVSIPSLQTPA

SEQ ID NO: 9915 - protein, 37 aa, Artificial Sequence; identical to SEQ ID NO: 2423
  GFR-binding peptide
  MOD_RES (1)..(35)..(36): Xaa is C or S
  MOD_RES (13)..(14)..(15)..(16)..(17): Xaa is A or G
  MOD_RES (18)..(19)..(20)..(21): Xaa is A or G or is absent

SEQ ID NO: 9916 - protein, 41 aa, Artificial Sequence
  GFR-binding peptide
  MOD_RES (1)..(35): Xaa is C or S
  MOD_RES (13)..(14)..(15)..(16)..(17): Xaa is A or G
  MOD_RES (18)..(19)..(20)..(21): Xaa is A or G or is absent
XSRVVMNNSLQEXXXXXXXXXYYLVTLPELKTPAXTPKTVH

SEQ ID NO: 9917 - protein, 35 aa, Artificial Sequence; identical to SEQ ID NO: 2424
  GFR-binding peptide
  MOD_RES (2)..(35): Xaa is C or S
  MOD_RES (13)..(14)..(15)..(16)..(17): Xaa is A or G
  MOD_RES (18)..(19)..(20)..(21): Xaa is A or G or is absent

SEQ ID NO: 9918 - protein, 35 aa, Artificial Sequence; identical to SEQ ID NO: 2426
  GFR-binding peptide
  MOD_RES (2)..(2): Xaa is C or S
  MOD_RES (14)..(15)..(16)..(17)..(18): Xaa is A or G
  MOD_RES (19)..(20)..(21)..(22): Xaa is A or G or is absent

SEQ ID NO: 9919 - protein, 30 aa, Artificial Sequence
  GFR-binding peptide
EVVMDNSLQEVVKENEDYYLMTLPELETPV

SEQ ID NO: 9920 - protein, 40 aa, Artificial Sequence
  GFR-binding peptide
  MOD_RES (34)..(35): Xaa is C or S
  MOD_RES (12)..(13)..(14)..(15)..(16): Xaa is A or G
  MOD_RES (17)..(18)..(19)..(20): Xaa is A or G or is absent
GEVVMENSLQEXXXXXXXXXYYVMPLPELETPVXXAKPIS

SEQ ID NO: 9921 - protein, 37 aa, Artificial Sequence
  GFR-binding peptide
  MOD_RES (1)..(3)..(34)..(35): Xaa is C or S
XKXSRVIMEYQKYVKPKRGVIFLISIPSLAQPVXXPA

SEQ ID NO: 9922 - protein, 32 aa, Artificial Sequence
  GFR-binding peptide
  MOD_RES (11)..(12)..(13)..(14)..(15): Xaa is A or G
  MOD_RES (16)..(17)..(18)..(19): Xaa is A or G or is absent
EVVMENSLQEXXXXXXXXXYYLMTLPELETPV

SEQ ID NO: 9923 - protein, 38 aa, Artificial Sequence
  GFR-binding peptide
  MOD_RES (1)..(35)..(36): Xaa is C or S
  MOD_RES (13)..(14)..(15)..(16)..(17): Xaa is A or G
  MOD_RES (18)..(19)..(20)..(21): Xaa is A or G or is absent
XGEVVMEEYQKYXXXXXXXXXIFLMSIPSLETPVXXAK

SEQ ID NO: 9924 - protein, 38 aa, Artificial Sequence
  GFR-binding peptide
  MOD_RES (2)..(4)..(36)..(37): Xaa is C or S
HXGXARVVMNNSLQEIVNSSDDYYVVPLPELQTPAXXP

SEQ ID NO: 9925 - protein, 37 aa, Artificial Sequence
  GFR-binding peptide
  MOD_RES (1)..(3)..(37): Xaa is C or S
  MOD_RES (15)..(16)..(17)..(18)..(19): Xaa is A or G
  MOD_RES (20)..(21)..(22)..(23): Xaa is A or G or is absent
XGXGEVVMDNSLQEXXXXXXXXXYYLMTLPELETPVX

SEQ ID NO: 9926 - protein, 38 aa, Artificial Sequence
  GFR-binding peptide
  MOD_RES (33)..(34): Xaa is C or S
  MOD_RES (11)..(12)..(13)..(14)..(15): Xaa is A or G
  MOD_RES (16)..(17)..(18)..(19): Xaa is A or G or is absent
EVVMDEYQKYXXXXXXXXXIFLMSIPSLETPVXXAKPI

SEQ ID NO: 9927 - protein, 31 aa, Artificial Sequence
  GFR-binding peptide
  MOD_RES (31)..(31): Xaa is C or S
RVVMNNSLQEIVNSSDDYYVVPLPELKTPAX

SEQ ID NO: 9928 - protein, 36 aa, Artificial Sequence
  GFR-binding peptide
  MOD_RES (2)..(36): Xaa is C or S
  MOD_RES (14)..(15)..(16)..(17)..(18): Xaa is A or G
  MOD_RES (19)..(20)..(21)..(22): Xaa is A or G or is absent
GXARVVMNEYQKYXXXXXXXXXIFLVSIPSLQTPAX

SEQ ID NO: 9929 - protein, 39 aa, Artificial Sequence
  GFR-binding peptide
  MOD_RES (33)..(34): Xaa is C or S
  MOD_RES (11)..(12)..(13)..(14)..(15): Xaa is A or G
  MOD_RES (16)..(17)..(18)..(19): Xaa is A or G or is absent
RVVMNEYQKYXXXXXXXXXIFLVSIPSLKTPAXXPKPVY

SEQ ID NO: 9930 - protein, 42 aa, Artificial Sequence; identical to SEQ ID NO: 2435
  GFR-binding peptide
  MOD_RES (1)..(3)..(37)..(38): Xaa is C or S
  MOD_RES (15)..(16)..(17)..(18)..(19): Xaa is A or G
  MOD_RES (20)..(21)..(22)..(23): Xaa is A or G or is absent

SEQ ID NO: 9931 - protein, 36 aa, Artificial Sequence
  GFR-binding peptide
  MOD_RES (2)..(36): Xaa is C or S
  MOD_RES (14)..(15)..(16)..(17)..(18): Xaa is A or G
  MOD_RES (19)..(20)..(21)..(22): Xaa is A or G or is absent
GXARVVMNNSLQEXXXXXXXXXYYLVTLPELQTPAX

SEQ ID NO: 9932 - protein, 32 aa, Artificial Sequence
  GFR-binding peptide
  MOD_RES (1)..(32): Xaa is C or S
XSRVIMNSLQEVKPKRGVYYVIPLPELAQPVX

SEQ ID NO: 9933 - protein, 34 aa, Artificial Sequence; identical to SEQ ID NO: 2438
  GFR-binding peptide
  MOD_RES (1)..(3)..(34): Xaa is C or S

SEQ ID NO: 9934 - protein, 33 aa, Artificial Sequence; identical to SEQ ID NO: 2439
  GFR-binding peptide
  MOD_RES (31)..(32): Xaa is C or S

SEQ ID NO: 9935 - protein, 37 aa, Artificial Sequence
  GFR-binding peptide
  MOD_RES (31)..(32): Xaa is C or S
SKVVMEYQKYVKPTRGVIFLISIPSLDQPVXXPSASA

SEQ ID NO: 9936 - protein, 36 aa, Artificial Sequence
  GFR-binding peptide
  MOD_RES (32)..(33): Xaa is C or S
ARVVMNNSLQEIVNSSDDYYLVTLPELQTPAXXPKP

SEQ ID NO: 9937 - protein, 40 aa, Artificial Sequence
  GFR-binding peptide
  MOD_RES (2)..(4)..(35)..(36): Xaa is C or S
SXKXSRVIMNSLQEVKPKRGVYYVIPLPELAQPVXXPAAS

SEQ ID NO: 9938 - protein, 37 aa, Artificial Sequence
  GFR-binding peptide
  MOD_RES (1)..(3)..(37): Xaa is C or S
  MOD_RES (15)..(16)..(17)..(18)..(19): Xaa is A or G
  MOD_RES (20)..(21)..(22)..(23): Xaa is A or G or is absent
XGXGEVVMENSLQEXXXXXXXXXYYLMTLPELETPVX

SEQ ID NO: 9939 - protein, 38 aa, Artificial Sequence
  GFR-binding peptide
  MOD_RES (33)..(34): Xaa is C or S
  MOD_RES (11)..(12)..(13)..(14)..(15): Xaa is A or G
  MOD_RES (16)..(17)..(18)..(19): Xaa is A or G or is absent
EVVMDRYKKLXXXXXXXXXFYLISIANLRTPVXXTPPT

SEQ ID NO: 9940 - protein, 31 aa, Artificial Sequence
  GFR-binding peptide
  MOD_RES (1)..(1): Xaa is C or S
XSKVVMNSLQEVKPTRGVYYVIPLPELDQPV

SEQ ID NO: 9941 - protein, 32 aa, Artificial Sequence
  GFR-binding peptide
  MOD_RES (11)..(12)..(13)..(14)..(15): Xaa is A or G
  MOD_RES (16)..(17)..(18)..(19): Xaa is A or G or is absent
EVVMENSLQEXXXXXXXXXYYVMPLPELETPV

SEQ ID NO: 9942 - protein, 34 aa, Artificial Sequence
  GFR-binding peptide
  MOD_RES (1)..(3): Xaa is C or S
XGXGEVVMDNSLQEVVKENEDYYLMTLPELETPV

SEQ ID NO: 9943 - protein, 41 aa, Artificial Sequence
  GFR-binding peptide
  MOD_RES (2)..(36)..(37): Xaa is C or S
  MOD_RES (14)..(15)..(16)..(17)..(18): Xaa is A or G
  MOD_RES (19)..(20)..(21)..(22): Xaa is A or G or is absent
GXSEVVMDNSLQEXXXXXXXXXYYLITLPELRTPVXXTPPT

SEQ ID NO: 9944 - protein, 40 aa, Artificial Sequence
  GFR-binding peptide
  MOD_RES (34)..(35): Xaa is C or S
  MOD_RES (12)..(13)..(14)..(15)..(16): Xaa is A or G
  MOD_RES (17)..(18)..(19)..(20): Xaa is A or G or is absent
ARVVMNNSLQEXXXXXXXXXYYLVTLPELQTPAXXPKPVT

SEQ ID NO: 9945 - protein, 34 aa, Artificial Sequence
  GFR-binding peptide
  MOD_RES (2)..(2): Xaa is C or S
  MOD_RES (13)..(14)..(15)..(16)..(17): Xaa is A or G
  MOD_RES (18)..(19)..(20)..(21): Xaa is A or G or is absent
KXSRVIMEYQKYXXXXXXXXXIFLISIPSLAQPV

SEQ ID NO: 9946 - protein, 34 aa, Artificial Sequence
  GFR-binding peptide
  MOD_RES (34)..(34): Xaa is C or S
  MOD_RES (12)..(13)..(14)..(15)..(16): Xaa is A or G
  MOD_RES (17)..(18)..(19)..(20): Xaa is A or G or is absent
ARVVMNNSLQEXXXXXXXXXYYVVPLPELQTPAX

SEQ ID NO: 9947 - protein, 39 aa, Artificial Sequence
  GFR-binding peptide
  MOD_RES (1)..(3)..(37)..(38): Xaa is C or S
  MOD_RES (15)..(16)..(17)..(18)..(19): Xaa is A or G
  MOD_RES (20)..(21)..(22)..(23): Xaa is A or G or is absent
XGXGEVVMEEYQKYXXXXXXXXXIFLMSIPSLETPVXXA

SEQ ID NO: 9948 - protein, 34 aa, Artificial Sequence
  GFR-binding peptide
  MOD_RES (1)..(1): Xaa is C or S
  MOD_RES (13)..(14)..(15)..(16)..(17): Xaa is A or G
  MOD_RES (18)..(19)..(20)..(21): Xaa is A or G or is absent
XSEVVMDNSLQEXXXXXXXXXYYVIPLPELRTPV

SEQ ID NO: 9949 - protein, 31 aa, Artificial Sequence; identical to SEQ ID NO: 2448
  GFR-binding peptide
  MOD_RES (31)..(31): Xaa is C or S

SEQ ID NO: 9950 - protein, 34 aa, Artificial Sequence
  GFR-binding peptide
  MOD_RES (32)..(33): Xaa is C or S
SEVVMDRYKKLVVNNASDFYLISIANLRTPVXXT

SEQ ID NO: 9951 - protein, 39 aa, Artificial Sequence
  GFR-binding peptide
  MOD_RES (34)..(35): Xaa is C or S
  MOD_RES (12)..(13)..(14)..(15)..(16): Xaa is A or G
  MOD_RES (17)..(18)..(19)..(20): Xaa is A or G or is absent
GEVVMDNSLQEXXXXXXXXXYYLMTLPELETPVXXAKPI

SEQ ID NO: 9952 - protein, 41 aa, Artificial Sequence
  GFR-binding peptide
  MOD_RES (2)..(4)..(36)..(37): Xaa is C or S
RXGXSEVVMDNSLQEVVNNASDYYLITLPELRTPVXXTPPT

SEQ ID NO: 9953 - protein, 38 aa, Artificial Sequence; identical to SEQ ID NO: 2453
  GFR-binding peptide
  MOD_RES (33)..(34): Xaa is C or S
  MOD_RES (11)..(12)..(13)..(14)..(15): Xaa is A or G
  MOD_RES (16)..(17)..(18)..(19): Xaa is A or G or is absent

SEQ ID NO: 9954 - protein, 40 aa, Artificial Sequence; identical to SEQ ID NO: 2454
  GFR-binding peptide
  MOD_RES (2)..(4)..(36)..(37): Xaa is C or S

SEQ ID NO: 9955 - protein, 42 aa, Artificial Sequence
  GFR-binding peptide
  MOD_RES (2)..(4)..(37)..(38): Xaa is C or S
  MOD_RES (15)..(16)..(17)..(18)..(19): Xaa is A or G
  MOD_RES (20)..(21)..(22)..(23): Xaa is A or G or is absent
SXKXSKVVMNSLQEXXXXXXXXXYYLITLPELDQPVXXPSAS

SEQ ID NO: 9956 - protein, 32 aa, Artificial Sequence; identical to SEQ ID NO: 2456
  GFR-binding peptide
  MOD_RES (31)..(32): Xaa is C or S

SEQ ID NO: 9957 - protein, 33 aa, Artificial Sequence
  GFR-binding peptide
  MOD_RES (1)..(33): Xaa is C or S
XGEVVMENSLQEVVKDYEDYYLMTLPELETPVX

SEQ ID NO: 9958 - protein, 40 aa, Artificial Sequence
  GFR-binding peptide
  MOD_RES (1)..(35)..(36): Xaa is C or S
  MOD_RES (13)..(14)..(15)..(16)..(17): Xaa is A or G
  MOD_RES (18)..(19)..(20)..(21): Xaa is A or G or is absent
XSEVVMDEYQKYXXXXXXXXXIFLISIPSLRTPVXXTPPT

SEQ ID NO: 9959 - protein, 35 aa, Artificial Sequence
  GFR-binding peptide
  MOD_RES (1)..(33)..(34): Xaa is C or S
XGEVVMEEYQKYVVKDYEDIFLMSIPSLETPVXXA

SEQ ID NO: 9960 - protein, 37 aa, Artificial Sequence
  GFR-binding peptide
  MOD_RES (32)..(33): Xaa is C or S
GEVVMDNSLQEVVKENEDYYVMPLPELETPVXXAKPI

SEQ ID NO: 9961 - protein, 33 aa, Artificial Sequence; identical to SEQ ID NO: 2458
  GFR-binding peptide
  MOD_RES (33)..(33): Xaa is C or S
  MOD_RES (11)..(12)..(13)..(14)..(15): Xaa is A or G
  MOD_RES (16)..(17)..(18)..(19): Xaa is A or G or is absent

SEQ ID NO: 9962 - protein, 38 aa, Artificial Sequence
  GFR-binding peptide
  MOD_RES (2)..(4)..(37)..(38): Xaa is C or S
  MOD_RES (15)..(16)..(17)..(18)..(19): Xaa is A or G
  MOD_RES (20)..(21)..(22)..(23): Xaa is A or G or is absent
SXKXSRVIMNSLQEXXXXXXXXXYYVIPLPELAQPVXX

SEQ ID NO: 9963 - protein, 38 aa, Artificial Sequence
  GFR-binding peptide
  MOD_RES (1)..(33)..(34): Xaa is C or S
XGEVVMEEYQKYVVKDYEDIFLMSIPSLETPVXXAKPI

SEQ ID NO: 9964 - protein, 38 aa, Artificial Sequence; identical to SEQ ID NO: 2462
  GFR-binding peptide
  MOD_RES (1)..(32)..(33): Xaa is C or S

SEQ ID NO: 9965 - protein, 37 aa, Artificial Sequence
  GFR-binding peptide
  MOD_RES (1)..(3)..(34)..(35): Xaa is C or S
XKXSRVIMNSLQEVKPKRGVYYLITLPELAQPVXXPA

SEQ ID NO: 9966 - protein, 35 aa, Artificial Sequence
  GFR-binding peptide
  MOD_RES (1)..(32)..(33): Xaa is C or S
XSKVIMNSLQEIKPTKGIYYVIPLPELDQSVXXPS

SEQ ID NO: 9967 - protein, 40 aa, Artificial Sequence
  GFR-binding peptide
  MOD_RES (2)..(4)..(38)..(39): Xaa is C or S
  MOD_RES (16)..(17)..(18)..(19)..(20): Xaa is A or G
  MOD_RES (21)..(22)..(23)..(24): Xaa is A or G or is absent
RXGXSEVVMDEYQKYXXXXXXXXXIFLISIPSLRTPVXXT

SEQ ID NO: 9968 - protein, 33 aa, Artificial Sequence; identical to SEQ ID NO: 2464
  GFR-binding peptide
  MOD_RES (33)..(33): Xaa is C or S
  MOD_RES (11)..(12)..(13)..(14)..(15): Xaa is A or G
  MOD_RES (16)..(17)..(18)..(19): Xaa is A or G or is absent

SEQ ID NO: 9969 - protein, 40 aa, Artificial Sequence
  GFR-binding peptide
  MOD_RES (2)..(4)..(38)..(39): Xaa is C or S
  MOD_RES (16)..(17)..(18)..(19)..(20): Xaa is A or G
  MOD_RES (21)..(22)..(23)..(24): Xaa is A or G or is absent
RXGXGEVVMENSLQEXXXXXXXXXYYVMPLPELETPVXXA

SEQ ID NO: 9970 - protein, 34 aa, Artificial Sequence
  GFR-binding peptide
  MOD_RES (31)..(32): Xaa is C or S
EVVMDEYQKYVVKENEDIFLMSIPSLETPVXXAK

SEQ ID NO: 9971 - protein, 32 aa, Artificial Sequence; identical to SEQ ID NO: 2466
  GFR-binding peptide
  MOD_RES (1)..(32): Xaa is C or S

SEQ ID NO: 9972 - protein, 32 aa, Artificial Sequence; identical to SEQ ID NO: 2470
  GFR-binding peptide
  MOD_RES (11)..(12)..(13)..(14)..(15): Xaa is A or G
  MOD_RES (16)..(17)..(18)..(19): Xaa is A or G or is absent

SEQ ID NO: 9973 - protein, 40 aa, Artificial Sequence
  GFR-binding peptide
  MOD_RES (1)..(35)..(36): Xaa is C or S
  MOD_RES (13)..(14)..(15)..(16)..(17): Xaa is A or G
  MOD_RES (18)..(19)..(20)..(21): Xaa is A or G or is absent
XSRVVMNEYQKYXXXXXXXXXIFLVSIPSLKTPAXXPKPV

SEQ ID NO: 9974 - protein, 31 aa, Artificial Sequence; identical to SEQ ID NO: 2474
  GFR-binding peptide
  MOD_RES (1)..(1): Xaa is C or S

SEQ ID NO: 9975 - protein, 39 aa, Artificial Sequence; identical to SEQ ID NO: 2476
  GFR-binding peptide
  MOD_RES (2)..(36)..(37): Xaa is C or S
  MOD_RES (14)..(15)..(16)..(17)..(18): Xaa is A or G
  MOD_RES (19)..(20)..(21)..(22): Xaa is A or G or is absent

SEQ ID NO: 9976 - protein, 35 aa, Artificial Sequence
  GFR-binding peptide
  MOD_RES (33)..(34): Xaa is C or S
  MOD_RES (11)..(12)..(13)..(14)..(15): Xaa is A or G
  MOD_RES (16)..(17)..(18)..(19): Xaa is A or G or is absent
RVVMNNSLQEXXXXXXXXXYYLVTLPELKTPAXXP

SEQ ID NO: 9977 - protein, 34 aa, Artificial Sequence
  GFR-binding peptide
  MOD_RES (1)..(33)..(34): Xaa is C or S
XGEVVMDNSLQEVVKENEDYYLMTLPELETPVXX

SEQ ID NO: 9978 - protein, 34 aa, Artificial Sequence
  GFR-binding peptide
  MOD_RES (1)..(34): Xaa is C or S
  MOD_RES (12)..(13)..(14)..(15)..(16): Xaa is A or G
  MOD_RES (17)..(18)..(19)..(20): Xaa is A or G or is absent
XSRVIMNSLQEXXXXXXXXXYYVIPLPELAQPVX

SEQ ID NO: 9979 - protein, 40 aa, Artificial Sequence; identical to SEQ ID NO: 2479
  GFR-binding peptide
  MOD_RES (2)..(34)..(35): Xaa is C or S

SEQ ID NO: 9980 - protein, 39 aa, Artificial Sequence
  GFR-binding peptide
  MOD_RES (2)..(4)..(35)..(36): Xaa is C or S
SXKXSKVVMNSLQEVKPTRGVYYLITLPELDQPVXXPSA

SEQ ID NO: 9981 - protein, 34 aa, Artificial Sequence
  GFR-binding peptide
  MOD_RES (1)..(3): Xaa is C or S
XGXGEVVMEEYQKYVVKDYEDIFLMSIPSLETPV

SEQ ID NO: 9982 - protein, 31 aa, Artificial Sequence
  GFR-binding peptide
  MOD_RES (1)..(1): Xaa is C or S
XSKVVMNSLQEVKPTRGVYYLITLPELDQPV

SEQ ID NO: 9983 - protein, 41 aa, Artificial Sequence; identical to SEQ ID NO: 2483
  GFR-binding peptide
  MOD_RES (2)..(4)..(36)..(37): Xaa is C or S

SEQ ID NO: 9984 - protein, 40 aa, Artificial Sequence; identical to SEQ ID NO: 2484
  GFR-binding peptide
  MOD_RES (2)..(4)..(37)..(38): Xaa is C or S
  MOD_RES (15)..(16)..(17)..(18)..(19): Xaa is A or G
  MOD_RES (20)..(21)..(22)..(23): Xaa is A or G or is absent

SEQ ID NO: 9985 - protein, 38 aa, Artificial Sequence; identical to SEQ ID NO: 2485
  GFR-binding peptide
  MOD_RES (32)..(33): Xaa is C or S

SEQ ID NO: 9986 - protein, 34 aa, Artificial Sequence
  GFR-binding peptide
  MOD_RES (32)..(32): Xaa is C or S
SRVVMNNSLQEIVNSSDDYYLVTLPELKTPAXTP

SEQ ID NO: 9987 - protein, 33 aa, Artificial Sequence; identical to SEQ ID NO: 2486
  GFR-binding peptide
  MOD_RES (1)..(33): Xaa is C or S

SEQ ID NO: 9988 - protein, 39 aa, Artificial Sequence; identical to SEQ ID NO: 2487
  GFR-binding peptide
  MOD_RES (2)..(4)..(35)..(36): Xaa is C or S

SEQ ID NO: 9989 - protein, 37 aa, Artificial Sequence
  GFR-binding peptide
  MOD_RES (1)..(34)..(35): Xaa is C or S
  MOD_RES (12)..(13)..(14)..(15)..(16): Xaa is A or G
  MOD_RES (17)..(18)..(19)..(20): Xaa is A or G or is absent
XSKVVMNSLQEXXXXXXXXXYYVIPLPELDQPVXXPS

SEQ ID NO: 9990 - protein, 39 aa, Artificial Sequence; identical to SEQ ID NO: 2489
  GFR-binding peptide
  MOD_RES (34)..(35): Xaa is C or S
  MOD_RES (12)..(13)..(14)..(15)..(16): Xaa is A or G
  MOD_RES (17)..(18)..(19)..(20): Xaa is A or G or is absent

SEQ ID NO: 9991 - protein, 35 aa, Artificial Sequence; identical to SEQ ID NO: 2490
  GFR-binding peptide
  MOD_RES (1)..(3): Xaa is C or S
  MOD_RES (14)..(15)..(16)..(17)..(18): Xaa is A or G
  MOD_RES (19)..(20)..(21)..(22): Xaa is A or G or is absent

SEQ ID NO: 9992 - protein, 34 aa, Artificial Sequence
  GFR-binding peptide
  MOD_RES (2)..(33)..(34): Xaa is C or S
KXSRVIMEYQKYVKPKRGVIFLISIPSLAQPVXX

SEQ ID NO: 9993 - protein, 40 aa, Artificial Sequence
  GFR-binding peptide
  MOD_RES (34)..(34): Xaa is C or S
  MOD_RES (12)..(13)..(14)..(15)..(16): Xaa is A or G
  MOD_RES (17)..(18)..(19)..(20): Xaa is A or G or is absent
SRVVMNEYQKYXXXXXXXXXIFLVSIPSLKTPAXTPKTVH

SEQ ID NO: 9994 - protein, 40 aa, Artificial Sequence; identical to SEQ ID NO: 2493
  GFR-binding peptide
  MOD_RES (2)..(34): Xaa is C or S

SEQ ID NO: 9995 - protein, 39 aa, Artificial Sequence
  GFR-binding peptide
  MOD_RES (34)..(35): Xaa is C or S
  MOD_RES (12)..(13)..(14)..(15)..(16): Xaa is A or G
  MOD_RES (17)..(18)..(19)..(20): Xaa is A or G or is absent
ARVVMNNSLQEXXXXXXXXXYYLVTLPELQTPAXXPKPV

SEQ ID NO: 9996 - protein, 35 aa, Artificial Sequence
  GFR-binding peptide
  MOD_RES (1)..(35): Xaa is C or S
  MOD_RES (13)..(14)..(15)..(16)..(17): Xaa is A or G
  MOD_RES (18)..(19)..(20)..(21): Xaa is A or G or is absent
XSEVVMDNSLQEXXXXXXXXXYYLITLPELRTPVX

SEQ ID NO: 9997 - protein, 36 aa, Artificial Sequence
  GFR-binding peptide
  MOD_RES (31)..(31): Xaa is C or S
RVVMNEYQKYIVNSSDDIFLVSIPSLKTPAXTPKTV

SEQ ID NO: 9998 - protein, 39 aa, Artificial Sequence
  GFR-binding peptide
  MOD_RES (33)..(34): Xaa is C or S
  MOD_RES (11)..(12)..(13)..(14)..(15): Xaa is A or G
  MOD_RES (16)..(17)..(18)..(19): Xaa is A or G or is absent
EVVMDQYNKLXXXXXXXXXLYLISIASLRTPVXXTPPTS

SEQ ID NO: 9999 - protein, 34 aa, Artificial Sequence; identical to SEQ ID NO: 2498
  GFR-binding peptide
  MOD_RES (1)..(3): Xaa is C or S

SEQ ID NO: 10000 - protein, 41 aa, Artificial Sequence
  GFR-binding peptide
  MOD_RES (2)..(4)..(36)..(37): Xaa is C or S
RXGXSEVVMDRYKKLVVNNASDFYLISIANLRTPVXXTPPT

SEQ ID NO: 10001 - protein, 38 aa, Artificial Sequence; identical to SEQ ID NO: 2500
  GFR-binding peptide
  MOD_RES (2)..(4)..(35)..(36): Xaa is C or S

SEQ ID NO: 10002 - protein, 39 aa, Artificial Sequence
  GFR-binding peptide
  MOD_RES (2)..(4)..(38)..(39): Xaa is C or S
  MOD_RES (16)..(17)..(18)..(19)..(20): Xaa is A or G
  MOD_RES (21)..(22)..(23)..(24): Xaa is A or G or is absent
RXGXGEVVMDNSLQEXXXXXXXXXYYVMPLPELETPVXX

SEQ ID NO: 10003 - protein, 37 aa, Artificial Sequence
  GFR-binding peptide
  MOD_RES (2)..(35)..(36): Xaa is C or S
  MOD_RES (13)..(14)..(15)..(16)..(17): Xaa is A or G
  MOD_RES (18)..(19)..(20)..(21): Xaa is A or G or is absent
KXSKVIMEYQKYXXXXXXXXXIFLISIPSLDQSVXXP

SEQ ID NO: 10004 - protein, 38 aa, Artificial Sequence
  GFR-binding peptide
  MOD_RES (1)..(32)..(33): Xaa is C or S
XSRVIMNSLQEVKPKRGVYYVIPLPELAQPVXXPAASA

SEQ ID NO: 10005 - protein, 34 aa, Artificial Sequence
  GFR-binding peptide
  MOD_RES (1)..(33)..(34): Xaa is C or S
XGEVVMENSLQEVVKDYEDYYLMTLPELETPVXX

SEQ ID NO: 10006 - protein, 33 aa, Artificial Sequence
  GFR-binding peptide
  MOD_RES (31)..(32): Xaa is C or S
EVVMDQYNKLVVNNASDLYLISIASLRTPVXXT

SEQ ID NO: 10007 - protein, 30 aa, Artificial Sequence
  GFR-binding peptide
EVVMDNSLQEVVKENEDYYVMPLPELETPV

SEQ ID NO: 10008 - protein, 37 aa, Artificial Sequence
  GFR-binding peptide
  MOD_RES (1)..(3)..(36)..(37): Xaa is C or S
  MOD_RES (14)..(15)..(16)..(17)..(18): Xaa is A or G
  MOD_RES (19)..(20)..(21)..(22): Xaa is A or G or is absent
XKXSRVIMEYQKYXXXXXXXXXIFLISIPSLAQPVXX

SEQ ID NO: 10009 - protein, 42 aa, Artificial Sequence
  GFR-binding peptide
  MOD_RES (1)..(3)..(37)..(38): Xaa is C or S
  MOD_RES (15)..(16)..(17)..(18)..(19): Xaa is A or G
  MOD_RES (20)..(21)..(22)..(23): Xaa is A or G or is absent
XGXSEVVMDQYNKLXXXXXXXXXLYLISIASLRTPVXXTPPT

SEQ ID NO: 10010 - protein, 33 aa, Artificial Sequence; identical to SEQ ID NO: 2515
  GFR-binding peptide
  MOD_RES (32)..(32): Xaa is C or S

SEQ ID NO: 10011 - protein, 36 aa, Artificial Sequence
  GFR-binding peptide
  MOD_RES (34)..(34): Xaa is C or S
  MOD_RES (12)..(13)..(14)..(15)..(16): Xaa is A or G
  MOD_RES (17)..(18)..(19)..(20): Xaa is A or G or is absent
SRVVMNEYQKYXXXXXXXXXIFLVSIPSLKTPAXTP

SEQ ID NO: 10012 - protein, 39 aa, Artificial Sequence
  GFR-binding peptide
  MOD_RES (2)..(34)..(35): Xaa is C or S
GXGEVVMDNSLQEVVKENEDYYLMTLPELETPVXXAKPI

SEQ ID NO: 10013 - protein, 37 aa, Artificial Sequence; identical to SEQ ID NO: 2518
  GFR-binding peptide
  MOD_RES (33)..(34): Xaa is C or S
  MOD_RES (11)..(12)..(13)..(14)..(15): Xaa is A or G
  MOD_RES (16)..(17)..(18)..(19): Xaa is A or G or is absent

SEQ ID NO: 10014 - protein, 35 aa, Artificial Sequence
  GFR-binding peptide
  MOD_RES (34)..(35): Xaa is C or S
  MOD_RES (12)..(13)..(14)..(15)..(16): Xaa is A or G
  MOD_RES (17)..(18)..(19)..(20): Xaa is A or G or is absent
ARVVMNNSLQEXXXXXXXXXYYVVPLPELQTPAXX

SEQ ID NO: 10015 - protein, 35 aa, Artificial Sequence
  GFR-binding peptide
  MOD_RES (31)..(32): Xaa is C or S
RVVMNNSLQEIVNSSDDYYVVPLPELKTPAXXPKP

SEQ ID NO: 10016 - protein, 35 aa, Artificial Sequence
  GFR-binding peptide
  MOD_RES (1)..(33)..(34): Xaa is C or S
XSRVVMNNSLQEIVNSSDDYYVVPLPELKTPAXXP

SEQ ID NO: 10017 - protein, 36 aa, Artificial Sequence
  GFR-binding peptide
  MOD_RES (2)..(34)..(35): Xaa is C or S
GXGEVVMENSLQEVVKDYEDYYVMPLPELETPVXXA

SEQ ID NO: 10018 - protein, 36 aa, Artificial Sequence
  GFR-binding peptide
  MOD_RES (2)..(34)..(35): Xaa is C or S
GXSRVVMNNSLQEIVNSSDDYYVVPLPELKTPAXXP

SEQ ID NO: 10019 - protein, 34 aa, Artificial Sequence
  GFR-binding peptide
  MOD_RES (1)..(3): Xaa is C or S
XGXSEVVMDRYKKLVVNNASDFYLISIANLRTPV

SEQ ID NO: 10020 - protein, 32 aa, Artificial Sequence
  GFR-binding peptide
  MOD_RES (11)..(12)..(13)..(14)..(15): Xaa is A or G
  MOD_RES (16)..(17)..(18)..(19): Xaa is A or G or is absent
EVVMDEYQKYXXXXXXXXXIFLMSIPSLETPV

SEQ ID NO: 10021 - protein, 39 aa, Artificial Sequence; identical to SEQ ID NO: 2525
  GFR-binding peptide
  MOD_RES (1)..(3)..(34)..(35): Xaa is C or S

SEQ ID NO: 10022 - protein, 34 aa, Artificial Sequence
  GFR-binding peptide
  MOD_RES (31)..(32): Xaa is C or S
EVVMDEYQKYVVNNASDIFLISIPSLRTPVXXTP

SEQ ID NO: 10023 - protein, 37 aa, Artificial Sequence; identical to SEQ ID NO: 2526
  GFR-binding peptide
  MOD_RES (2)..(36): Xaa is C or S
  MOD_RES (14)..(15)..(16)..(17)..(18): Xaa is A or G
  MOD_RES (19)..(20)..(21)..(22): Xaa is A or G or is absent

SEQ ID NO: 10024 - protein, 39 aa, Artificial Sequence
  GFR-binding peptide
  MOD_RES (1)..(3)..(35)..(36): Xaa is C or S
XGXGEVVMDNSLQEVVKENEDYYLMTLPELETPVXXAKP

SEQ ID NO: 10025 - protein, 35 aa, Artificial Sequence
  GFR-binding peptide
  MOD_RES (1)..(33)..(34): Xaa is C or S
XSEVVMDRYKKLVVNNASDFYLISIANLRTPVXXT

SEQ ID NO: 10026 - protein, 35 aa, Artificial Sequence
  GFR-binding peptide
  MOD_RES (1)..(33)..(34): Xaa is C or S
XARVVMNEYQKYIVNSSDDIFLVSIPSLQTPAXXP

SEQ ID NO: 10027 - protein, 39 aa, Artificial Sequence; identical to SEQ ID NO: 2531
  GFR-binding peptide
  MOD_RES (2)..(4)..(38): Xaa is C or S
  MOD_RES (16)..(17)..(18)..(19)..(20): Xaa is A or G
  MOD_RES (21)..(22)..(23)..(24): Xaa is A or G or is absent

SEQ ID NO: 10028 - protein, 34 aa, Artificial Sequence
  GFR-binding peptide
  MOD_RES (2)..(34): Xaa is C or S
GXGEVVMEEYQKYVVKDYEDIFLMSIPSLETPVX

SEQ ID NO: 10029 - protein, 32 aa, Artificial Sequence
  GFR-binding peptide
  MOD_RES (1)..(1): Xaa is C or S
XGEVVMDNSLQEVVKENEDYYLMTLPELETPV

SEQ ID NO: 10030 - protein, 33 aa, Artificial Sequence
  GFR-binding peptide
  MOD_RES (1)..(1): Xaa is C or S
  MOD_RES (12)..(13)..(14)..(15)..(16): Xaa is A or G
  MOD_RES (17)..(18)..(19)..(20): Xaa is A or G or is absent
XSRVIMEYQKYXXXXXXXXXIFLISIPSLAQPV

SEQ ID NO: 10031 - protein, 38 aa, Artificial Sequence; identical to SEQ ID NO: 2535
  GFR-binding peptide
  MOD_RES (1)..(34)..(35): Xaa is C or S
  MOD_RES (12)..(13)..(14)..(15)..(16): Xaa is A or G
  MOD_RES (17)..(18)..(19)..(20): Xaa is A or G or is absent

SEQ ID NO: 10032 - protein, 32 aa, Artificial Sequence
  GFR-binding peptide
  MOD_RES (2)..(2): Xaa is C or S
KXSRVIMEYQKYVKPKRGVIFLISIPSLAQPV

SEQ ID NO: 10033 - protein, 36 aa, Artificial Sequence
  GFR-binding peptide
  MOD_RES (2)..(4)..(36): Xaa is C or S
HXGXARVVMNEYQKYIVNSSDDIFLVSIPSLQTPAX

SEQ ID NO: 10034 - protein, 42 aa, Artificial Sequence
  GFR-binding peptide
  MOD_RES (2)..(36)..(37): Xaa is C or S
  MOD_RES (14)..(15)..(16)..(17)..(18): Xaa is A or G
  MOD_RES (19)..(20)..(21)..(22): Xaa is A or G or is absent
GXGEVVMENSLQEXXXXXXXXXYYLMTLPELETPVXXAKPIS

SEQ ID NO: 10035 - protein, 40 aa, Artificial Sequence
  GFR-binding peptide
  MOD_RES (1)..(3)..(37): Xaa is C or S
  MOD_RES (15)..(16)..(17)..(18)..(19): Xaa is A or G
  MOD_RES (20)..(21)..(22)..(23): Xaa is A or G or is absent
XGXSRVVMNNSLQEXXXXXXXXXYYVVPLPELKTPAXTPK

SEQ ID NO: 10036 - protein, 43 aa, Artificial Sequence
  GFR-binding peptide
  MOD_RES (2)..(4)..(37)..(38): Xaa is C or S
  MOD_RES (15)..(16)..(17)..(18)..(19): Xaa is A or G
  MOD_RES (20)..(21)..(22)..(23): Xaa is A or G or is absent
SXKXSKVIMNSLQEXXXXXXXXXYYVIPLPELDQSVXXPSASA

SEQ ID NO: 10037 - protein, 37 aa, Artificial Sequence; identical to SEQ ID NO: 2539
  GFR-binding peptide
  MOD_RES (2)..(33)..(34): Xaa is C or S

SEQ ID NO: 10038 - protein, 32 aa, Artificial Sequence
  GFR-binding peptide
  MOD_RES (31)..(32): Xaa is C or S
EVVMDRYKKLVVNNASDFYLISIANLRTPVXX

SEQ ID NO: 10039 - protein, 40 aa, Artificial Sequence; identical to SEQ ID NO: 2541
  GFR-binding peptide
  MOD_RES (34)..(35): Xaa is C or S
  MOD_RES (12)..(13)..(14)..(15)..(16): Xaa is A or G
  MOD_RES (17)..(18)..(19)..(20): Xaa is A or G or is absent

SEQ ID NO: 10040 - protein, 40 aa, Artificial Sequence; identical to SEQ ID NO: 2542
  GFR-binding peptide
  MOD_RES (1)..(3)..(35)..(36): Xaa is C or S

SEQ ID NO: 10041 - protein, 41 aa, Artificial Sequence; identical to SEQ ID NO: 2544
  GFR-binding peptide
  MOD_RES (2)..(4)..(36)..(37): Xaa is C or S

SEQ ID NO: 10042 - protein, 36 aa, Artificial Sequence
  GFR-binding peptide
  MOD_RES (2)..(4): Xaa is C or S
  MOD_RES (15)..(16)..(17)..(18)..(19): Xaa is A or G
  MOD_RES (20)..(21)..(22)..(23): Xaa is A or G or is absent
SXKXSKVVMNSLQEXXXXXXXXXYYVIPLPELDQPV

SEQ ID NO: 10043 - protein, 38 aa, Artificial Sequence; identical to SEQ ID NO: 2549
  GFR-binding peptide
  MOD_RES (2)..(35)..(36): Xaa is C or S
  MOD_RES (13)..(14)..(15)..(16)..(17): Xaa is A or G
  MOD_RES (18)..(19)..(20)..(21): Xaa is A or G or is absent

SEQ ID NO: 10044 - protein, 31 aa, Artificial Sequence
  GFR-binding peptide
  MOD_RES (31)..(31): Xaa is C or S
EVVMENSLQEVVKDYEDYYVMPLPELETPVX

SEQ ID NO: 10045 - protein, 34 aa, Artificial Sequence; identical to SEQ ID NO: 2550
  GFR-binding peptide
  MOD_RES (1)..(33): Xaa is C or S

SEQ ID NO: 10046 - protein, 38 aa, Artificial Sequence
  GFR-binding peptide
  MOD_RES (1)..(3)..(37)..(38): Xaa is C or S
  MOD_RES (15)..(16)..(17)..(18)..(19): Xaa is A or G
  MOD_RES (20)..(21)..(22)..(23): Xaa is A or G or is absent
XGXSEVVMDEYQKYXXXXXXXXXIFLISIPSLRTPVXX

SEQ ID NO: 10047 - protein, 35 aa, Artificial Sequence
  GFR-binding peptide
  MOD_RES (1)..(33)..(34): Xaa is C or S
XGEVVMDEYQKYVVKENEDIFLMSIPSLETPVXXA

SEQ ID NO: 10048 - protein, 39 aa, Artificial Sequence
  GFR-binding peptide
  MOD_RES (1)..(3)..(35): Xaa is C or S
XGXSRVVMNEYQKYIVNSSDDIFLVSIPSLKTPAXTPKT

SEQ ID NO: 10049 - protein, 41 aa, Artificial Sequence
  GFR-binding peptide
  MOD_RES (2)..(4)..(36): Xaa is C or S
HXGXSRVVMNNSLQEIVNSSDDYYLVTLPELKTPAXTPKTV

SEQ ID NO: 10050 - protein, 36 aa, Artificial Sequence
  GFR-binding peptide
  MOD_RES (2)..(34)..(35): Xaa is C or S
GXSRVVMNEYQKYIVNSSDDIFLVSIPSLKTPAXXP

SEQ ID NO: 10051 - protein, 41 aa, Artificial Sequence; identical to SEQ ID NO: 2551
  GFR-binding peptide
  MOD_RES (2)..(4)..(38)..(39): Xaa is C or S
  MOD_RES (16)..(17)..(18)..(19)..(20): Xaa is A or G
  MOD_RES (21)..(22)..(23)..(24): Xaa is A or G or is absent

SEQ ID NO: 10052 - protein, 36 aa, Artificial Sequence
  GFR-binding peptide
  MOD_RES (31)..(32): Xaa is C or S
EVVMEEYQKYVVKDYEDIFLMSIPSLETPVXXAKPI

SEQ ID NO: 10053 - protein, 37 aa, Artificial Sequence
  GFR-binding peptide
  MOD_RES (1)..(3)..(37): Xaa is C or S
  MOD_RES (15)..(16)..(17)..(18)..(19): Xaa is A or G
  MOD_RES (20)..(21)..(22)..(23): Xaa is A or G or is absent
XGXSRVVMNNSLQEXXXXXXXXXYYLVTLPELKTPAX

SEQ ID NO: 10054 - protein, 36 aa, Artificial Sequence; identical to SEQ ID NO: 2554
  GFR-binding peptide
  MOD_RES (32)..(33): Xaa is C or S

SEQ ID NO: 10055 - protein, 37 aa, Artificial Sequence; identical to SEQ ID NO: 2557
  GFR-binding peptide
  MOD_RES (2)..(4): Xaa is C or S
  MOD_RES (16)..(17)..(18)..(19)..(20): Xaa is A or G
  MOD_RES (21)..(22)..(23)..(24): Xaa is A or G or is absent

SEQ ID NO: 10056 - protein, 34 aa, Artificial Sequence; identical to SEQ ID NO: 2558
  GFR-binding peptide
  MOD_RES (2)..(4): Xaa is C or S

SEQ ID NO: 10057 - protein, 40 aa, Artificial Sequence; identical to SEQ ID NO: 2563
  GFR-binding peptide
  MOD_RES (1)..(3)..(35)..(36): Xaa is C or S

SEQ ID NO: 10058 - protein, 37 aa, Artificial Sequence
  GFR-binding peptide
  MOD_RES (34)..(35): Xaa is C or S
  MOD_RES (12)..(13)..(14)..(15)..(16): Xaa is A or G
  MOD_RES (17)..(18)..(19)..(20): Xaa is A or G or is absent
SRVVMNNSLQEXXXXXXXXXYYLVTLPELKTPAXXPK

SEQ ID NO: 10059 - protein, 36 aa, Artificial Sequence
  GFR-binding peptide
  MOD_RES (1)..(3): Xaa is C or S
  MOD_RES (15)..(16)..(17)..(18)..(19): Xaa is A or G
  MOD_RES (20)..(21)..(22)..(23): Xaa is A or G or is absent
XGXARVVMNNSLQEXXXXXXXXXYYLVTLPELQTPA

SEQ ID NO: 10060 - protein, 35 aa, Artificial Sequence; identical to SEQ ID NO: 2569
  GFR-binding peptide
  MOD_RES (1)..(33)..(34): Xaa is C or S

SEQ ID NO: 10061 - protein, 39 aa, Artificial Sequence
  GFR-binding peptide
  MOD_RES (2)..(4)..(38)..(39): Xaa is C or S
  MOD_RES (16)..(17)..(18)..(19)..(20): Xaa is A or G
  MOD_RES (21)..(22)..(23)..(24): Xaa is A or G or is absent
RXGXSEVVMDEYQKYXXXXXXXXXIFLISIPSLRTPVXX

SEQ ID NO: 10062 - protein, 39 aa, Artificial Sequence; identical to SEQ ID NO: 2573
  GFR-binding peptide
  MOD_RES (1)..(3)..(34)..(35): Xaa is C or S

SEQ ID NO: 10063 - protein, 40 aa, Artificial Sequence
  GFR-binding peptide
  MOD_RES (1)..(3)..(35): Xaa is C or S
XGXSRVVMNNSLQEIVNSSDDYYLVTLPELKTPAXTPKTV

SEQ ID NO: 10064 - protein, 35 aa, Artificial Sequence
  GFR-binding peptide
  MOD_RES (2)..(33)..(34): Xaa is C or S
KXSKVVMNSLQEVKPTRGVYYLITLPELDQPVXXP

SEQ ID NO: 10065 - protein, 31 aa, Artificial Sequence
  GFR-binding peptide
  MOD_RES (1)..(1): Xaa is C or S
XSRVIMEYQKYVKPKRGVIFLISIPSLAQPV

SEQ ID NO: 10066 - protein, 42 aa, Artificial Sequence
  GFR-binding peptide
  MOD_RES (2)..(4)..(36)..(37): Xaa is C or S
RXGXGEVVMDNSLQEVVKENEDYYVMPLPELETPVXXAKPIK

SEQ ID NO: 10067 - protein, 37 aa, Artificial Sequence
  GFR-binding peptide
  MOD_RES (2)..(36)..(37): Xaa is C or S
  MOD_RES (14)..(15)..(16)..(17)..(18): Xaa is A or G
  MOD_RES (19)..(20)..(21)..(22): Xaa is A or G or is absent
GXGEVVMDNSLQEXXXXXXXXXYYVMPLPELETPVXX

SEQ ID NO: 10068 - protein, 42 aa, Artificial Sequence
  GFR-binding peptide
  MOD_RES (1)..(3)..(36)..(37): Xaa is C or S
  MOD_RES (14)..(15)..(16)..(17)..(18): Xaa is A or G
  MOD_RES (19)..(20)..(21)..(22): Xaa is A or G or is absent
XKXSKVIMEYQKYXXXXXXXXXIFLISIPSLDQSVXXPSASA

SEQ ID NO: 10069 - protein, 36 aa, Artificial Sequence
  GFR-binding peptide
  MOD_RES (2)..(4)..(35)..(36): Xaa is C or S
SXKXSKVIMNSLQEIKPTKGIYYVIPLPELDQSVXX

SEQ ID NO: 10070 - protein, 38 aa, Artificial Sequence
  GFR-binding peptide
  MOD_RES (2)..(34)..(35): Xaa is C or S
GXSEVVMDEYQKYVVNNASDIFLISIPSLRTPVXXTPP

SEQ ID NO: 10071 - protein, 38 aa, Artificial Sequence; identical to SEQ ID NO: 2579
  GFR-binding peptide
  MOD_RES (1)..(3)..(36)..(37): Xaa is C or S
  MOD_RES (14)..(15)..(16)..(17)..(18): Xaa is A or G
  MOD_RES (19)..(20)..(21)..(22): Xaa is A or G or is absent

SEQ ID NO: 10072 - protein, 33 aa, Artificial Sequence
  GFR-binding peptide
  MOD_RES (1)..(3): Xaa is C or S
XKXSRVIMNSLQEVKPKRGVYYLITLPELAQPV

SEQ ID NO: 10073 - protein, 38 aa, Artificial Sequence
  GFR-binding peptide
  MOD_RES (34)..(35): Xaa is C or S
  MOD_RES (12)..(13)..(14)..(15)..(16): Xaa is A or G
  MOD_RES (17)..(18)..(19)..(20): Xaa is A or G or is absent
GEVVMENSLQEXXXXXXXXXYYVMPLPELETPVXXAKP

SEQ ID NO: 10074 - protein, 39 aa, Artificial Sequence
  GFR-binding peptide
  MOD_RES (2)..(4)..(38)..(39): Xaa is C or S
  MOD_RES (16)..(17)..(18)..(19)..(20): Xaa is A or G
  MOD_RES (21)..(22)..(23)..(24): Xaa is A or G or is absent
RXGXGEVVMDNSLQEXXXXXXXXXYYLMTLPELETPVXX

SEQ ID NO: 10075 - protein, 36 aa, Artificial Sequence
  GFR-binding peptide
  MOD_RES (31)..(32): Xaa is C or S
EVVMDEYQKYVVKENEDIFLMSIPSLETPVXXAKPI

SEQ ID NO: 10076 - protein, 36 aa, Artificial Sequence; identical to SEQ ID NO: 2585
  GFR-binding peptide
  MOD_RES (1)..(32)..(33): Xaa is C or S

SEQ ID NO: 10077 - protein, 35 aa, Artificial Sequence
  GFR-binding peptide
  MOD_RES (32)..(33): Xaa is C or S
SEVVMDNSLQEVVNNASDYYLITLPELRTPVXXTP

SEQ ID NO: 10078 - protein, 37 aa, Artificial Sequence; identical to SEQ ID NO: 2589
  GFR-binding peptide
  MOD_RES (1)..(3)..(36)..(37): Xaa is C or S
  MOD_RES (14)..(15)..(16)..(17)..(18): Xaa is A or G
  MOD_RES (19)..(20)..(21)..(22): Xaa is A or G or is absent

SEQ ID NO: 10079 - protein, 33 aa, Artificial Sequence; identical to SEQ ID NO: 2590
  GFR-binding peptide
  MOD_RES (31)..(32): Xaa is C or S

SEQ ID NO: 10080 - protein, 33 aa, Artificial Sequence
  GFR-binding peptide
  MOD_RES (31)..(32): Xaa is C or S
EVVMDNSLQEVVNNASDYYLITLPELRTPVXXT

SEQ ID NO: 10081 - protein, 36 aa, Artificial Sequence
  GFR-binding peptide
  MOD_RES (33)..(34): Xaa is C or S
  MOD_RES (11)..(12)..(13)..(14)..(15): Xaa is A or G
  MOD_RES (16)..(17)..(18)..(19): Xaa is A or G or is absent
EVVMDQYNKLXXXXXXXXXLYLISIASLRTPVXXTP

SEQ ID NO: 10082 - protein, 42 aa, Artificial Sequence; identical to SEQ ID NO: 2592
  GFR-binding peptide
  MOD_RES (2)..(4)..(36): Xaa is C or S

SEQ ID NO: 10083 - protein, 34 aa, Artificial Sequence
  GFR-binding peptide
  MOD_RES (31)..(32): Xaa is C or S
RVVMNEYQKYIVNSSDDIFLVSIPSLKTPAXXPK

SEQ ID NO: 10084 - protein, 38 aa, Artificial Sequence
  GFR-binding peptide
  MOD_RES (1)..(32)..(33): Xaa is C or S
XSKVVMEYQKYVKPTRGVIFLISIPSLDQPVXXPSASA

SEQ ID NO: 10085 - protein, 41 aa, Artificial Sequence; identical to SEQ ID NO: 2593
  GFR-binding peptide
  MOD_RES (2)..(36): Xaa is C or S
  MOD_RES (14)..(15)..(16)..(17)..(18): Xaa is A or G
  MOD_RES (19)..(20)..(21)..(22): Xaa is A or G or is absent

SEQ ID NO: 10086 - protein, 41 aa, Artificial Sequence; identical to SEQ ID NO: 2597
  GFR-binding peptide
  MOD_RES (2)..(36)..(37): Xaa is C or S
  MOD_RES (14)..(15)..(16)..(17)..(18): Xaa is A or G
  MOD_RES (19)..(20)..(21)..(22): Xaa is A or G or is absent

SEQ ID NO: 10087 - protein, 37 aa, Artificial Sequence
  GFR-binding peptide
  MOD_RES (31)..(32): Xaa is C or S
RVVMNNSLQEIVNSSDDYYLVTLPELKTPAXXPKPVY

SEQ ID NO: 10088 - protein, 34 aa, Artificial Sequence; identical to SEQ ID NO: 2599
  GFR-binding peptide
  MOD_RES (1)..(33)..(34): Xaa is C or S

SEQ ID NO: 10089 - protein, 44 aa, Artificial Sequence; identical to SEQ ID NO: 2603
  GFR-binding peptide
  MOD_RES (2)..(4)..(38)..(39): Xaa is C or S
  MOD_RES (16)..(17)..(18)..(19)..(20): Xaa is A or G
  MOD_RES (21)..(22)..(23)..(24): Xaa is A or G or is absent

SEQ ID NO: 10090 - protein, 37 aa, Artificial Sequence
  GFR-binding peptide
  MOD_RES (2)..(4)..(36)..(37): Xaa is C or S
HXGXSRVVMNNSLQEIVNSSDDYYLVTLPELKTPAXX

SEQ ID NO: 10091 - protein, 38 aa, Artificial Sequence
  GFR-binding peptide
  MOD_RES (2)..(35)..(36): Xaa is C or S
  MOD_RES (13)..(14)..(15)..(16)..(17): Xaa is A or G
  MOD_RES (18)..(19)..(20)..(21): Xaa is A or G or is absent
KXSRVIMEYQKYXXXXXXXXXIFLISIPSLAQPVXXPA

SEQ ID NO: 10092 - protein, 38 aa, Artificial Sequence
  GFR-binding peptide
  MOD_RES (1)..(33)..(34): Xaa is C or S
XGEVVMENSLQEVVKDYEDYYVMPLPELETPVXXAKPI

SEQ ID NO: 10093 - protein, 32 aa, Artificial Sequence; identical to SEQ ID NO: 2604
  GFR-binding peptide
  MOD_RES (11)..(12)..(13)..(14)..(15): Xaa is A or G
  MOD_RES (16)..(17)..(18)..(19): Xaa is A or G or is absent

SEQ ID NO: 10094 - protein, 37 aa, Artificial Sequence; identical to SEQ ID NO: 2605
  GFR-binding peptide
  MOD_RES (1)..(3)..(35)..(36): Xaa is C or S

SEQ ID NO: 10095 - protein, 33 aa, Artificial Sequence
  GFR-binding peptide
  MOD_RES (31)..(32): Xaa is C or S
EVVMENSLQEVVKDYEDYYVMPLPELETPVXXA

SEQ ID NO: 10096 - protein, 38 aa, Artificial Sequence
  GFR-binding peptide
  MOD_RES (1)..(34)..(35): Xaa is C or S
  MOD_RES (12)..(13)..(14)..(15)..(16): Xaa is A or G
  MOD_RES (17)..(18)..(19)..(20): Xaa is A or G or is absent
XSKVVMNSLQEXXXXXXXXXYYLITLPELDQPVXXPSA

SEQ ID NO: 10097 - protein, 38 aa, Artificial Sequence
  GFR-binding peptide
  MOD_RES (1)..(3)..(34)..(35): Xaa is C or S
XKXSRVIMNSLQEVKPKRGVYYLITLPELAQPVXXPAA

SEQ ID NO: 10098 - protein, 36 aa, Artificial Sequence
  GFR-binding peptide
  MOD_RES (33)..(34): Xaa is C or S
  MOD_RES (11)..(12)..(13)..(14)..(15): Xaa is A or G
  MOD_RES (16)..(17)..(18)..(19): Xaa is A or G or is absent
RVVMNNSLQEXXXXXXXXXYYVVPLPELQTPAXXPK

SEQ ID NO: 10099 - protein, 33 aa, Artificial Sequence; identical to SEQ ID NO: 2612
  GFR-binding peptide
  MOD_RES (1)..(1): Xaa is C or S
  MOD_RES (12)..(13)..(14)..(15)..(16): Xaa is A or G
  MOD_RES (17)..(18)..(19)..(20): Xaa is A or G or is absent

SEQ ID NO: 10100 - protein, 35 aa, Artificial Sequence; identical to SEQ ID NO: 2614
  GFR-binding peptide
  MOD_RES (33)..(34): Xaa is C or S
  MOD_RES (11)..(12)..(13)..(14)..(15): Xaa is A or G
  MOD_RES (16)..(17)..(18)..(19): Xaa is A or G or is absent

SEQ ID NO: 10101 - protein, 34 aa, Artificial Sequence
  GFR-binding peptide
  MOD_RES (1)..(3): Xaa is C or S
XGXGEVVMENSLQEVVKDYEDYYVMPLPELETPV

SEQ ID NO: 10102 - protein, 40 aa, Artificial Sequence; identical to SEQ ID NO: 2618
  GFR-binding peptide
  MOD_RES (2)..(4)..(35)..(36): Xaa is C or S

SEQ ID NO: 10103 - protein, 35 aa, Artificial Sequence
  GFR-binding peptide
  MOD_RES (2)..(4)..(35): Xaa is C or S
SXKXSKVVMEYQKYVKPTRGVIFLISIPSLDQPVX

SEQ ID NO: 10104 - protein, 39 aa, Artificial Sequence
  GFR-binding peptide
  MOD_RES (2)..(4)..(37)..(38): Xaa is C or S
  MOD_RES (15)..(16)..(17)..(18)..(19): Xaa is A or G
  MOD_RES (20)..(21)..(22)..(23): Xaa is A or G or is absent
SXKXSKVVMNSLQEXXXXXXXXXYYLITLPELDQPVXXP

SEQ ID NO: 10105 - protein, 40 aa, Artificial Sequence
  GFR-binding peptide
  MOD_RES (1)..(3)..(36)..(37): Xaa is C or S
  MOD_RES (14)..(15)..(16)..(17)..(18): Xaa is A or G
  MOD_RES (19)..(20)..(21)..(22): Xaa is A or G or is absent
XKXSKVIMNSLQEXXXXXXXXXYYVIPLPELDQSVXXPSA

SEQ ID NO: 10106 - protein, 36 aa, Artificial Sequence
  GFR-binding peptide
  MOD_RES (1)..(32)..(33): Xaa is C or S
XSKVIMNSLQEIKPTKGIYYVIPLPELDQSVXXPSA

SEQ ID NO: 10107 - protein, 36 aa, Artificial Sequence; identical to SEQ ID NO: 2620
  GFR-binding peptide
  MOD_RES (1)..(34)..(35): Xaa is C or S
  MOD_RES (12)..(13)..(14)..(15)..(16): Xaa is A or G
  MOD_RES (17)..(18)..(19)..(20): Xaa is A or G or is absent

SEQ ID NO: 10108 - protein, 34 aa, Artificial Sequence; identical to SEQ ID NO: 2621
  GFR-binding peptide
  MOD_RES (31)..(32): Xaa is C or S

SEQ ID NO: 10109 - protein, 40 aa, Artificial Sequence
  GFR-binding peptide
  MOD_RES (1)..(3)..(35)..(36): Xaa is C or S
XGXSRVVMNNSLQEIVNSSDDYYVVPLPELKTPAXXPKPV

SEQ ID NO: 10110 - protein, 41 aa, Artificial Sequence; identical to SEQ ID NO: 2622
  GFR-binding peptide
  MOD_RES (1)..(3)..(35)..(36): Xaa is C or S

SEQ ID NO: 10111 - protein, 33 aa, Artificial Sequence; identical to SEQ ID NO: 2623
  GFR-binding peptide
  MOD_RES (1)..(33): Xaa is C or S

SEQ ID NO: 10112 - protein, 40 aa, Artificial Sequence
  GFR-binding peptide
  MOD_RES (2)..(4)..(36)..(37): Xaa is C or S
RXGXGEVVMDNSLQEVVKENEDYYLMTLPELETPVXXAKP

SEQ ID NO: 10113 - protein, 36 aa, Artificial Sequence
  GFR-binding peptide
  MOD_RES (34)..(35): Xaa is C or S
  MOD_RES (12)..(13)..(14)..(15)..(16): Xaa is A or G
  MOD_RES (17)..(18)..(19)..(20): Xaa is A or G or is absent
GEVVMDNSLQEXXXXXXXXXYYLMTLPELETPVXXA

SEQ ID NO: 10114 - protein, 31 aa, Artificial Sequence; identical to SEQ ID NO: 2628
  GFR-binding peptide
  MOD_RES (31)..(31): Xaa is C or S

SEQ ID NO: 10115 - protein, 37 aa, Artificial Sequence; identical to SEQ ID NO: 2629
  GFR-binding peptide
  MOD_RES (32)..(32): Xaa is C or S

SEQ ID NO: 10116 - protein, 35 aa, Artificial Sequence; identical to SEQ ID NO: 2630
  GFR-binding peptide
  MOD_RES (34)..(34): Xaa is C or S
  MOD_RES (12)..(13)..(14)..(15)..(16): Xaa is A or G
  MOD_RES (17)..(18)..(19)..(20): Xaa is A or G or is absent

SEQ ID NO: 10117 - protein, 41 aa, Artificial Sequence; identical to SEQ ID NO: 2632
  GFR-binding peptide
  MOD_RES (2)..(4)..(36)..(37): Xaa is C or S

SEQ ID NO: 10118 - protein, 35 aa, Artificial Sequence
  GFR-binding peptide
  MOD_RES (33)..(34): Xaa is C or S
  MOD_RES (11)..(12)..(13)..(14)..(15): Xaa is A or G
  MOD_RES (16)..(17)..(18)..(19): Xaa is A or G or is absent
RVVMNNSLQEXXXXXXXXXYYLVTLPELQTPAXXP

SEQ ID NO: 10119 - protein, 41 aa, Artificial Sequence; identical to SEQ ID NO: 2634
  GFR-binding peptide
  MOD_RES (2)..(35)..(36): Xaa is C or S
  MOD_RES (13)..(14)..(15)..(16)..(17): Xaa is A or G
  MOD_RES (18)..(19)..(20)..(21): Xaa is A or G or is absent

SEQ ID NO: 10120 - protein, 40 aa, Artificial Sequence
  GFR-binding peptide
  MOD_RES (1)..(3)..(34)..(35): Xaa is C or S
XKXSKVVMNSLQEVKPTRGVYYLITLPELDQPVXXPSASA

SEQ ID NO: 10121 - protein, 39 aa, Artificial Sequence; identical to SEQ ID NO: 2637
  GFR-binding peptide
  MOD_RES (2)..(4)..(37)..(38): Xaa is C or S
  MOD_RES (15)..(16)..(17)..(18)..(19): Xaa is A or G
  MOD_RES (20)..(21)..(22)..(23): Xaa is A or G or is absent

SEQ ID NO: 10122 - protein, 37 aa, Artificial Sequence; identical to SEQ ID NO: 2638
  GFR-binding peptide
  MOD_RES (1)..(33)..(34): Xaa is C or S

SEQ ID NO: 10123 - protein, 38 aa, Artificial Sequence; identical to SEQ ID NO: 2639
  GFR-binding peptide
  MOD_RES (34)..(34): Xaa is C or S
  MOD_RES (12)..(13)..(14)..(15)..(16): Xaa is A or G
  MOD_RES (17)..(18)..(19)..(20): Xaa is A or G or is absent

SEQ ID NO: 10124 - protein, 35 aa, Artificial Sequence
  GFR-binding peptide
  MOD_RES (1)..(3)..(35): Xaa is C or S
XGXGEVVMENSLQEVVKDYEDYYVMPLPELETPVX

SEQ ID NO: 10125 - protein, 38 aa, Artificial Sequence
  GFR-binding peptide
  MOD_RES (2)..(4)..(38): Xaa is C or S
  MOD_RES (16)..(17)..(18)..(19)..(20): Xaa is A or G
  MOD_RES (21)..(22)..(23)..(24): Xaa is A or G or is absent
HXGXSRVVMNNSLQEXXXXXXXXXYYVVPLPELKTPAX

SEQ ID NO: 10126 - protein, 37 aa, Artificial Sequence
  GFR-binding peptide
  MOD_RES (2)..(4): Xaa is C or S
  MOD_RES (16)..(17)..(18)..(19)..(20): Xaa is A or G
  MOD_RES (21)..(22)..(23)..(24): Xaa is A or G or is absent
RXGXGEVVMDNSLQEXXXXXXXXXYYVMPLPELETPV

SEQ ID NO: 10127 - protein, 37 aa, Artificial Sequence; identical to SEQ ID NO: 2642
  GFR-binding peptide
  MOD_RES (31)..(32): Xaa is C or S

SEQ ID NO: 10128 - protein, 36 aa, Artificial Sequence
  GFR-binding peptide
  MOD_RES (1)..(3)..(35): Xaa is C or S
XGXSRVVMNNSLQEIVNSSDDYYLVTLPELKTPAXT

SEQ ID NO: 10129 - protein, 37 aa, Artificial Sequence; identical to SEQ ID NO: 2645
  GFR-binding peptide
  MOD_RES (1)..(33): Xaa is C or S

SEQ ID NO: 10130 - protein, 32 aa, Artificial Sequence; identical to SEQ ID NO: 2646
  GFR-binding peptide
  MOD_RES (1)..(1): Xaa is C or S

SEQ ID NO: 10131 - protein, 39 aa, Artificial Sequence
  GFR-binding peptide
  MOD_RES (33)..(34): Xaa is C or S
  MOD_RES (11)..(12)..(13)..(14)..(15): Xaa is A or G
  MOD_RES (16)..(17)..(18)..(19): Xaa is A or G or is absent
SKVIMNSLQEXXXXXXXXXYYVIPLPELDQSVXXPSASA

SEQ ID NO: 10132 - protein, 39 aa, Artificial Sequence; identical to SEQ ID NO: 2652
  GFR-binding peptide
  MOD_RES (2)..(4)..(35)..(36): Xaa is C or S

SEQ ID NO: 10133 - protein, 38 aa, Artificial Sequence
  GFR-binding peptide
  MOD_RES (33)..(34): Xaa is C or S
  MOD_RES (11)..(12)..(13)..(14)..(15): Xaa is A or G
  MOD_RES (16)..(17)..(18)..(19): Xaa is A or G or is absent
SKVVMNSLQEXXXXXXXXXYYLITLPELDQPVXXPSAS

SEQ ID NO: 10134 - protein, 33 aa, Artificial Sequence
  GFR-binding peptide
  MOD_RES (33)..(33): Xaa is C or S
  MOD_RES (11)..(12)..(13)..(14)..(15): Xaa is A or G
  MOD_RES (16)..(17)..(18)..(19): Xaa is A or G or is absent
SKVVMEYQKYXXXXXXXXXIFLISIPSLDQPVX

SEQ ID NO: 10135 - protein, 36 aa, Artificial Sequence
  GFR-binding peptide
  MOD_RES (2)..(34)..(35): Xaa is C or S
GXSEVVMDRYKKLVVNNASDFYLISIANLRTPVXXT

SEQ ID NO: 10136 - protein, 37 aa, Artificial Sequence
  GFR-binding peptide
  MOD_RES (2)..(4): Xaa is C or S
  MOD_RES (16)..(17)..(18)..(19)..(20): Xaa is A or G
  MOD_RES (21)..(22)..(23)..(24): Xaa is A or G or is absent
HXGXSRVVMNNSLQEXXXXXXXXXYYVVPLPELKTPA

SEQ ID NO: 10137 - protein, 36 aa, Artificial Sequence; identical to SEQ ID NO: 2657
  GFR-binding peptide
  MOD_RES (1)..(3): Xaa is C or S
  MOD_RES (15)..(16)..(17)..(18)..(19): Xaa is A or G
  MOD_RES (20)..(21)..(22)..(23): Xaa is A or G or is absent

SEQ ID NO: 10138 - protein, 38 aa, Artificial Sequence; identical to SEQ ID NO: 2658
  GFR-binding peptide
  MOD_RES (1)..(3)..(37)..(38): Xaa is C or S
  MOD_RES (15)..(16)..(17)..(18)..(19): Xaa is A or G
  MOD_RES (20)..(21)..(22)..(23): Xaa is A or G or is absent

SEQ ID NO: 10139 - protein, 38 aa, Artificial Sequence
  GFR-binding peptide
  MOD_RES (2)..(36)..(37): Xaa is C or S
  MOD_RES (14)..(15)..(16)..(17)..(18): Xaa is A or G
  MOD_RES (19)..(20)..(21)..(22): Xaa is A or G or is absent
GXGEVVMEEYQKYXXXXXXXXXIFLMSIPSLETPVXXA

SEQ ID NO: 10140 - protein, 40 aa, Artificial Sequence
  GFR-binding peptide
  MOD_RES (1)..(3)..(36)..(37): Xaa is C or S
  MOD_RES (14)..(15)..(16)..(17)..(18): Xaa is A or G
  MOD_RES (19)..(20)..(21)..(22): Xaa is A or G or is absent
XKXSRVIMNSLQEXXXXXXXXXYYVIPLPELAQPVXXPAA

SEQ ID NO: 10141 - protein, 35 aa, Artificial Sequence; identical to SEQ ID NO: 2659
  GFR-binding peptide
  MOD_RES (2)..(4)..(35): Xaa is C or S

SEQ ID NO: 10142 - protein, 37 aa, Artificial Sequence; identical to SEQ ID NO: 2660
  GFR-binding peptide
  MOD_RES (2)..(33)..(34): Xaa is C or S

SEQ ID NO: 10143 - protein, 35 aa, Artificial Sequence; identical to SEQ ID NO: 2661
  GFR-binding peptide
  MOD_RES (1)..(3)..(34)..(35): Xaa is C or S

SEQ ID NO: 10144 - protein, 37 aa, Artificial Sequence; identical to SEQ ID NO: 2663
  GFR-binding peptide
  MOD_RES (33)..(34): Xaa is C or S
  MOD_RES (11)..(12)..(13)..(14)..(15): Xaa is A or G
  MOD_RES (16)..(17)..(18)..(19): Xaa is A or G or is absent

SEQ ID NO: 10145 - protein, 37 aa, Artificial Sequence
  GFR-binding peptide
  MOD_RES (31)..(32): Xaa is C or S
EVVMEEYQKYVVKDYEDIFLMSIPSLETPVXXAKPIS

SEQ ID NO: 10146 - protein, 36 aa, Artificial Sequence; identical to SEQ ID NO: 2664
  GFR-binding peptide
  MOD_RES (2)..(36): Xaa is C or S
  MOD_RES (14)..(15)..(16)..(17)..(18): Xaa is A or G
  MOD_RES (19)..(20)..(21)..(22): Xaa is A or G or is absent

SEQ ID NO: 10147 - protein, 35 aa, Artificial Sequence
  GFR-binding peptide
  MOD_RES (2)..(4)..(35): Xaa is C or S
SXKXSRVIMNSLQEVKPKRGVYYLITLPELAQPVX

SEQ ID NO: 10148 - protein, 35 aa, Artificial Sequence
  GFR-binding peptide
  MOD_RES (31)..(32): Xaa is C or S
RVVMNEYQKYIVNSSDDIFLVSIPSLQTPAXXPKP

SEQ ID NO: 10149 - protein, 40 aa, Artificial Sequence
  GFR-binding peptide
  MOD_RES (2)..(36)..(37): Xaa is C or S
  MOD_RES (14)..(15)..(16)..(17)..(18): Xaa is A or G
  MOD_RES (19)..(20)..(21)..(22): Xaa is A or G or is absent
GXGEVVMDNSLQEXXXXXXXXXYYLMTLPELETPVXXAKP

SEQ ID NO: 10150 - protein, 35 aa, Artificial Sequence
  GFR-binding peptide
  MOD_RES (1)..(35): Xaa is C or S
  MOD_RES (13)..(14)..(15)..(16)..(17): Xaa is A or G
  MOD_RES (18)..(19)..(20)..(21): Xaa is A or G or is absent
XSEVVMDRYKKLXXXXXXXXXFYLISIANLRTPVX

SEQ ID NO: 10151 - protein, 33 aa, Artificial Sequence; identical to SEQ ID NO: 2667
  GFR-binding peptide
  MOD_RES (1)..(1): Xaa is C or S
  MOD_RES (12)..(13)..(14)..(15)..(16): Xaa is A or G
  MOD_RES (17)..(18)..(19)..(20): Xaa is A or G or is absent

SEQ ID NO: 10152 - protein, 42 aa, Artificial Sequence
  GFR-binding peptide
  MOD_RES (2)..(4)..(38)..(39): Xaa is C or S
  MOD_RES (16)..(17)..(18)..(19)..(20): Xaa is A or G
  MOD_RES (21)..(22)..(23)..(24): Xaa is A or G or is absent
HXGXSRVVMNNSLQEXXXXXXXXXYYLVTLPELKTPAXXPKP

SEQ ID NO: 10153 - protein, 41 aa, Artificial Sequence
  GFR-binding peptide
  MOD_RES (1)..(35)..(36): Xaa is C or S
  MOD_RES (13)..(14)..(15)..(16)..(17): Xaa is A or G
  MOD_RES (18)..(19)..(20)..(21): Xaa is A or G or is absent
XGEVVMDEYQKYXXXXXXXXXIFLMSIPSLETPVXXAKPIK

SEQ ID NO: 10154 - protein, 35 aa, Artificial Sequence
  GFR-binding peptide
  MOD_RES (1)..(35): Xaa is C or S
  MOD_RES (13)..(14)..(15)..(16)..(17): Xaa is A or G
  MOD_RES (18)..(19)..(20)..(21): Xaa is A or G or is absent
XARVVMNEYQKYXXXXXXXXXIFLVSIPSLQTPAX

SEQ ID NO: 10155 - protein, 34 aa, Artificial Sequence; identical to SEQ ID NO: 2668
  GFR-binding peptide
  MOD_RES (31)..(31): Xaa is C or S

SEQ ID NO: 10156 - protein, 36 aa, Artificial Sequence
  GFR-binding peptide
  MOD_RES (33)..(33): Xaa is C or S
  MOD_RES (11)..(12)..(13)..(14)..(15): Xaa is A or G
  MOD_RES (16)..(17)..(18)..(19): Xaa is A or G or is absent
RVVMNEYQKYXXXXXXXXXIFLVSIPSLKTPAXTPK

SEQ ID NO: 10157 - protein, 39 aa, Artificial Sequence; identical to SEQ ID NO: 2672
  GFR-binding peptide
  MOD_RES (1)..(33)..(34): Xaa is C or S

SEQ ID NO: 10158 - protein, 38 aa, Artificial Sequence
  GFR-binding peptide
  MOD_RES (1)..(3)..(34)..(35): Xaa is C or S
XKXSKVIMNSLQEIKPTKGIYYVIPLPELDQSVXXPSA

SEQ ID NO: 10159 - protein, 38 aa, Artificial Sequence
  GFR-binding peptide
  MOD_RES (34)..(35): Xaa is C or S
  MOD_RES (12)..(13)..(14)..(15)..(16): Xaa is A or G
  MOD_RES (17)..(18)..(19)..(20): Xaa is A or G or is absent
SEVVMDQYNKLXXXXXXXXXLYLISIASLRTPVXXTPP

SEQ ID NO: 10160 - protein, 33 aa, Artificial Sequence
  GFR-binding peptide
  MOD_RES (31)..(32): Xaa is C or S
RVVMNNSLQEIVNSSDDYYLVTLPELQTPAXXP

SEQ ID NO: 10161 - protein, 38 aa, Artificial Sequence
  GFR-binding peptide
  MOD_RES (34)..(35): Xaa is C or S
  MOD_RES (12)..(13)..(14)..(15)..(16): Xaa is A or G
  MOD_RES (17)..(18)..(19)..(20): Xaa is A or G or is absent
ARVVMNNSLQEXXXXXXXXXYYVVPLPELQTPAXXPKP

SEQ ID NO: 10162 - protein, 36 aa, Artificial Sequence; identical to SEQ ID NO: 2677
  GFR-binding peptide
  MOD_RES (1)..(3)..(36): Xaa is C or S
  MOD_RES (14)..(15)..(16)..(17)..(18): Xaa is A or G
  MOD_RES (19)..(20)..(21)..(22): Xaa is A or G or is absent

SEQ ID NO: 10163 - protein, 34 aa, Artificial Sequence
  GFR-binding peptide
  MOD_RES (1)..(3)..(34): Xaa is C or S
XKXSRVIMNSLQEVKPKRGVYYLITLPELAQPVX

SEQ ID NO: 10164 - protein, 39 aa, Artificial Sequence
  GFR-binding peptide
  MOD_RES (2)..(4)..(36)..(37): Xaa is C or S
RXGXSEVVMDNSLQEVVNNASDYYVIPLPELRTPVXXTP

SEQ ID NO: 10165 - protein, 35 aa, Artificial Sequence; identical to SEQ ID NO: 2680
  GFR-binding peptide
  MOD_RES (1)..(3)..(35): Xaa is C or S

SEQ ID NO: 10166 - protein, 39 aa, Artificial Sequence
  GFR-binding peptide
  MOD_RES (2)..(36)..(37): Xaa is C or S
  MOD_RES (14)..(15)..(16)..(17)..(18): Xaa is A or G
  MOD_RES (19)..(20)..(21)..(22): Xaa is A or G or is absent
GXSRVVMNNSLQEXXXXXXXXXYYVVPLPELKTPAXXPK

SEQ ID NO: 10167 - protein, 36 aa, Artificial Sequence; identical to SEQ ID NO: 2681
  GFR-binding peptide
  MOD_RES (32)..(33): Xaa is C or S

SEQ ID NO: 10168 - protein, 38 aa, Artificial Sequence
  GFR-binding peptide
  MOD_RES (32)..(33): Xaa is C or S
ARVVMNEYQKYIVNSSDDIFLVSIPSLQTPAXXPKPVT

SEQ ID NO: 10169 - protein, 31 aa, Artificial Sequence
  GFR-binding peptide
SEVVMDNSLQEVVNNASDYYVIPLPELRTPV

SEQ ID NO: 10170 - protein, 41 aa, Artificial Sequence
  GFR-binding peptide
  MOD_RES (2)..(4)..(36)..(37): Xaa is C or S
RXGXGEVVMDNSLQEVVKENEDYYLMTLPELETPVXXAKPI

SEQ ID NO: 10171 - protein, 35 aa, Artificial Sequence
  GFR-binding peptide
  MOD_RES (32)..(33): Xaa is C or S
SEVVMDNSLQEVVNNASDYYVIPLPELRTPVXXTP

SEQ ID NO: 10172 - protein, 35 aa, Artificial Sequence; identical to SEQ ID NO: 2683
  GFR-binding peptide
  MOD_RES (32)..(32): Xaa is C or S

SEQ ID NO: 10173 - protein, 31 aa, Artificial Sequence
  GFR-binding peptide
  MOD_RES (31)..(31): Xaa is C or S
SRVIMNSLQEVKPKRGVYYLITLPELAQPVX

SEQ ID NO: 10174 - protein, 37 aa, Artificial Sequence; identical to SEQ ID NO: 2690
  GFR-binding peptide
  MOD_RES (2)..(4)..(36)..(37): Xaa is C or S

SEQ ID NO: 10175 - protein, 38 aa, Artificial Sequence
  GFR-binding peptide
  MOD_RES (33)..(34): Xaa is C or S
  MOD_RES (11)..(12)..(13)..(14)..(15): Xaa is A or G
  MOD_RES (16)..(17)..(18)..(19): Xaa is A or G or is absent
EVVMENSLQEXXXXXXXXXYYVMPLPELETPVXXAKPI

SEQ ID NO: 10176 - protein, 39 aa, Artificial Sequence
  GFR-binding peptide
  MOD_RES (33)..(34): Xaa is C or S
  MOD_RES (11)..(12)..(13)..(14)..(15): Xaa is A or G
  MOD_RES (16)..(17)..(18)..(19): Xaa is A or G or is absent
EVVMDEYQKYXXXXXXXXXIFLISIPSLRTPVXXTPPTS

SEQ ID NO: 10177 - protein, 42 aa, Artificial Sequence
  GFR-binding peptide
  MOD_RES (1)..(3)..(37)..(38): Xaa is C or S
  MOD_RES (15)..(16)..(17)..(18)..(19): Xaa is A or G
  MOD_RES (20)..(21)..(22)..(23): Xaa is A or G or is absent
XGXGEVVMDNSLQEXXXXXXXXXYYVMPLPELETPVXXAKPI

SEQ ID NO: 10178 - protein, 34 aa, Artificial Sequence
  GFR-binding peptide
  MOD_RES (1)..(3)..(34): Xaa is C or S
XKXSKVIMNSLQEIKPTKGIYYVIPLPELDQSVX

SEQ ID NO: 10179 - protein, 36 aa, Artificial Sequence
  GFR-binding peptide
  MOD_RES (33)..(34): Xaa is C or S
  MOD_RES (11)..(12)..(13)..(14)..(15): Xaa is A or G
  MOD_RES (16)..(17)..(18)..(19): Xaa is A or G or is absent
SKVVMNSLQEXXXXXXXXXYYVIPLPELDQPVXXPS

SEQ ID NO: 10180 - protein, 38 aa, Artificial Sequence
  GFR-binding peptide
  MOD_RES (34)..(35): Xaa is C or S
  MOD_RES (12)..(13)..(14)..(15)..(16): Xaa is A or G
  MOD_RES (17)..(18)..(19)..(20): Xaa is A or G or is absent
GEVVMDEYQKYXXXXXXXXXIFLMSIPSLETPVXXAKP

SEQ ID NO: 10181 - protein, 40 aa, Artificial Sequence
  GFR-binding peptide
  MOD_RES (2)..(4)..(38)..(39): Xaa is C or S
  MOD_RES (16)..(17)..(18)..(19)..(20): Xaa is A or G
  MOD_RES (21)..(22)..(23)..(24): Xaa is A or G or is absent
RXGXGEVVMDNSLQEXXXXXXXXXYYLMTLPELETPVXXA

SEQ ID NO: 10182 - protein, 41 aa, Artificial Sequence; identical to SEQ ID NO: 2697
  GFR-binding peptide
  MOD_RES (1)..(35)..(36): Xaa is C or S
  MOD_RES (13)..(14)..(15)..(16)..(17): Xaa is A or G
  MOD_RES (18)..(19)..(20)..(21): Xaa is A or G or is absent

SEQ ID NO: 10183 - protein, 34 aa, Artificial Sequence; identical to SEQ ID NO: 2698
  GFR-binding peptide
  MOD_RES (2)..(4): Xaa is C or S

SEQ ID NO: 10184 - protein, 39 aa, Artificial Sequence
  GFR-binding peptide
  MOD_RES (1)..(35)..(36): Xaa is C or S
  MOD_RES (13)..(14)..(15)..(16)..(17): Xaa is A or G
  MOD_RES (18)..(19)..(20)..(21): Xaa is A or G or is absent
XGEVVMENSLQEXXXXXXXXXYYVMPLPELETPVXXAKP

SEQ ID NO: 10185 - protein, 41 aa, Artificial Sequence
  GFR-binding peptide
  MOD_RES (2)..(4)..(36)..(37): Xaa is C or S
HXGXSRVVMNEYQKYIVNSSDDIFLVSIPSLKTPAXXPKPV

SEQ ID NO: 10186 - protein, 35 aa, Artificial Sequence
  GFR-binding peptide
  MOD_RES (1)..(32)..(33): Xaa is C or S
XSRVIMEYQKYVKPKRGVIFLISIPSLAQPVXXPA

SEQ ID NO: 10187 - protein, 30 aa, Artificial Sequence; identical to SEQ ID NO: 2703
  GFR-binding peptide

SEQ ID NO: 10188 - protein, 35 aa, Artificial Sequence; identical to SEQ ID NO: 2705
  GFR-binding peptide
  MOD_RES (2)..(34)..(35): Xaa is C or S

SEQ ID NO: 10189 - protein, 39 aa, Artificial Sequence
  GFR-binding peptide
  MOD_RES (34)..(35): Xaa is C or S
  MOD_RES (12)..(13)..(14)..(15)..(16): Xaa is A or G
  MOD_RES (17)..(18)..(19)..(20): Xaa is A or G or is absent
SRVVMNNSLQEXXXXXXXXXYYLVTLPELKTPAXXPKPV

SEQ ID NO: 10190 - protein, 41 aa, Artificial Sequence
  GFR-binding peptide
  MOD_RES (1)..(35)..(36): Xaa is C or S
  MOD_RES (13)..(14)..(15)..(16)..(17): Xaa is A or G
  MOD_RES (18)..(19)..(20)..(21): Xaa is A or G or is absent
XSRVVMNEYQKYXXXXXXXXXIFLVSIPSLKTPAXXPKPVY

SEQ ID NO: 10191 - protein, 33 aa, Artificial Sequence
  GFR-binding peptide
  MOD_RES (32)..(33): Xaa is C or S
SEVVMDQYNKLVVNNASDLYLISIASLRTPVXX

SEQ ID NO: 10192 - protein, 37 aa, Artificial Sequence
  GFR-binding peptide
  MOD_RES (34)..(35): Xaa is C or S
  MOD_RES (12)..(13)..(14)..(15)..(16): Xaa is A or G
  MOD_RES (17)..(18)..(19)..(20): Xaa is A or G or is absent
SRVVMNEYQKYXXXXXXXXXIFLVSIPSLKTPAXXPK

SEQ ID NO: 10193 - protein, 34 aa, Artificial Sequence; identical to SEQ ID NO: 2709
  GFR-binding peptide
  MOD_RES (1)..(1): Xaa is C or S
  MOD_RES (13)..(14)..(15)..(16)..(17): Xaa is A or G
  MOD_RES (18)..(19)..(20)..(21): Xaa is A or G or is absent

SEQ ID NO: 10194 - protein, 41 aa, Artificial Sequence
  GFR-binding peptide
  MOD_RES (2)..(4)..(35)..(36): Xaa is C or S
SXKXSKVIMNSLQEIKPTKGIYYLITLPELDQSVXXPSASA

SEQ ID NO: 10195 - protein, 39 aa, Artificial Sequence; identical to SEQ ID NO: 2710
  GFR-binding peptide
  MOD_RES (1)..(3)..(35)..(36): Xaa is C or S

SEQ ID NO: 10196 - protein, 36 aa, Artificial Sequence
  GFR-binding peptide
  MOD_RES (1)..(3)..(35)..(36): Xaa is C or S
XGXSEVVMDEYQKYVVNNASDIFLISIPSLRTPVXX

SEQ ID NO: 10197 - protein, 34 aa, Artificial Sequence; identical to SEQ ID NO: 2714
  GFR-binding peptide
  MOD_RES (34)..(34): Xaa is C or S
  MOD_RES (12)..(13)..(14)..(15)..(16): Xaa is A or G
  MOD_RES (17)..(18)..(19)..(20): Xaa is A or G or is absent

SEQ ID NO: 10198 - protein, 34 aa, Artificial Sequence
  GFR-binding peptide
  MOD_RES (31)..(31): Xaa is C or S
RVVMNNSLQEIVNSSDDYYVVPLPELKTPAXTPK

SEQ ID NO: 10199 - protein, 35 aa, Artificial Sequence
  GFR-binding peptide
  MOD_RES (34)..(35): Xaa is C or S
  MOD_RES (12)..(13)..(14)..(15)..(16): Xaa is A or G
  MOD_RES (17)..(18)..(19)..(20): Xaa is A or G or is absent
SRVVMNNSLQEXXXXXXXXXYYVVPLPELKTPAXX

SEQ ID NO: 10200 - protein, 37 aa, Artificial Sequence
  GFR-binding peptide
  MOD_RES (34)..(34): Xaa is C or S
  MOD_RES (12)..(13)..(14)..(15)..(16): Xaa is A or G
  MOD_RES (17)..(18)..(19)..(20): Xaa is A or G or is absent
SRVVMNEYQKYXXXXXXXXXIFLVSIPSLKTPAXTPK

SEQ ID NO: 10201 - protein, 37 aa, Artificial Sequence
  GFR-binding peptide
  MOD_RES (31)..(31): Xaa is C or S
RVVMNNSLQEIVNSSDDYYVVPLPELKTPAXTPKTVH

SEQ ID NO: 10202 - protein, 35 aa, Artificial Sequence; identical to SEQ ID NO: 2719
  GFR-binding peptide
  MOD_RES (34)..(35): Xaa is C or S
  MOD_RES (12)..(13)..(14)..(15)..(16): Xaa is A or G
  MOD_RES (17)..(18)..(19)..(20): Xaa is A or G or is absent

SEQ ID NO: 10203 - protein, 32 aa, Artificial Sequence
  GFR-binding peptide
  MOD_RES (32)..(32): Xaa is C or S
SEVVMDRYKKLVVNNASDFYLISIANLRTPVX

SEQ ID NO: 10204 - protein, 41 aa, Artificial Sequence
  GFR-binding peptide
  MOD_RES (2)..(35)..(36): Xaa is C or S
  MOD_RES (13)..(14)..(15)..(16)..(17): Xaa is A or G
  MOD_RES (18)..(19)..(20)..(21): Xaa is A or G or is absent
KXSKVVMNSLQEXXXXXXXXXYYVIPLPELDQPVXXPSASA

SEQ ID NO: 10205 - protein, 33 aa, Artificial Sequence; identical to SEQ ID NO: 2723
  GFR-binding peptide
  MOD_RES (32)..(33): Xaa is C or S

SEQ ID NO: 10206 - protein, 34 aa, Artificial Sequence
  GFR-binding peptide
  MOD_RES (33)..(34): Xaa is C or S
  MOD_RES (11)..(12)..(13)..(14)..(15): Xaa is A or G
  MOD_RES (16)..(17)..(18)..(19): Xaa is A or G or is absent
EVVMDEYQKYXXXXXXXXXIFLMSIPSLETPVXX

SEQ ID NO: 10207 - protein, 36 aa, Artificial Sequence; identical to SEQ ID NO: 2728
  GFR-binding peptide
  MOD_RES (2)..(35)..(36): Xaa is C or S
  MOD_RES (13)..(14)..(15)..(16)..(17): Xaa is A or G
  MOD_RES (18)..(19)..(20)..(21): Xaa is A or G or is absent

SEQ ID NO: 10208 - protein, 34 aa, Artificial Sequence
  GFR-binding peptide
  MOD_RES (1)..(33): Xaa is C or S
XSRVVMNNSLQEIVNSSDDYYLVTLPELKTPAXT

SEQ ID NO: 10209 - protein, 42 aa, Artificial Sequence
  GFR-binding peptide
  MOD_RES (2)..(36)..(37): Xaa is C or S
  MOD_RES (14)..(15)..(16)..(17)..(18): Xaa is A or G
  MOD_RES (19)..(20)..(21)..(22): Xaa is A or G or is absent
GXSEVVMDNSLQEXXXXXXXXXYYVIPLPELRTPVXXTPPTS

SEQ ID NO: 10210 - protein, 42 aa, Artificial Sequence
  GFR-binding peptide
  MOD_RES (2)..(36)..(37): Xaa is C or S
  MOD_RES (14)..(15)..(16)..(17)..(18): Xaa is A or G
  MOD_RES (19)..(20)..(21)..(22): Xaa is A or G or is absent
GXGEVVMEEYQKYXXXXXXXXXIFLMSIPSLETPVXXAKPIS

SEQ ID NO: 10211 - protein, 36 aa, Artificial Sequence
  GFR-binding peptide
  MOD_RES (1)..(33)..(34): Xaa is C or S
XGEVVMDNSLQEVVKENEDYYLMTLPELETPVXXAK

SEQ ID NO: 10212 - protein, 33 aa, Artificial Sequence
  GFR-binding peptide
  MOD_RES (31)..(32): Xaa is C or S
SKVIMEYQKYIKPTKGIIFLISIPSLDQSVXXP

SEQ ID NO: 10213 - protein, 37 aa, Artificial Sequence
  GFR-binding peptide
  MOD_RES (1)..(32)..(33): Xaa is C or S
XSKVIMEYQKYIKPTKGIIFLISIPSLDQSVXXPSAS

SEQ ID NO: 10214 - protein, 37 aa, Artificial Sequence; identical to SEQ ID NO: 2733
  GFR-binding peptide
  MOD_RES (33)..(34): Xaa is C or S
  MOD_RES (11)..(12)..(13)..(14)..(15): Xaa is A or G
  MOD_RES (16)..(17)..(18)..(19): Xaa is A or G or is absent

SEQ ID NO: 10215 - protein, 41 aa, Artificial Sequence
  GFR-binding peptide
  MOD_RES (1)..(35)..(36): Xaa is C or S
  MOD_RES (13)..(14)..(15)..(16)..(17): Xaa is A or G
  MOD_RES (18)..(19)..(20)..(21): Xaa is A or G or is absent
XSEVVMDQYNKLXXXXXXXXXLYLISIASLRTPVXXTPPTS

SEQ ID NO: 10216 - protein, 36 aa, Artificial Sequence; identical to SEQ ID NO: 2734
  GFR-binding peptide
  MOD_RES (2)..(34)..(35): Xaa is C or S

SEQ ID NO: 10217 - protein, 36 aa, Artificial Sequence; identical to SEQ ID NO: 2735
  GFR-binding peptide
  MOD_RES (2)..(34)..(35): Xaa is C or S

SEQ ID NO: 10218 - protein, 32 aa, Artificial Sequence; identical to SEQ ID NO: 2736
  GFR-binding peptide
  MOD_RES (31)..(32): Xaa is C or S

SEQ ID NO: 10219 - protein, 30 aa, Artificial Sequence; identical to SEQ ID NO: 2738
  GFR-binding peptide

SEQ ID NO: 10220 - protein, 40 aa, Artificial Sequence; identical to SEQ ID NO: 2739
  GFR-binding peptide
  MOD_RES (2)..(4)..(36)..(37): Xaa is C or S

SEQ ID NO: 10221 - protein, 38 aa, Artificial Sequence
  GFR-binding peptide
  MOD_RES (1)..(3)..(37)..(38): Xaa is C or S
  MOD_RES (15)..(16)..(17)..(18)..(19): Xaa is A or G
  MOD_RES (20)..(21)..(22)..(23): Xaa is A or G or is absent
XGXARVVMNNSLQEXXXXXXXXXYYLVTLPELQTPAXX

SEQ ID NO: 10222 - protein, 33 aa, Artificial Sequence; identical to SEQ ID NO: 2740
  GFR-binding peptide
  MOD_RES (32)..(33): Xaa is C or S

SEQ ID NO: 10223 - protein, 33 aa, Artificial Sequence; identical to SEQ ID NO: 2741
  GFR-binding peptide
  MOD_RES (1)..(33): Xaa is C or S

SEQ ID NO: 10224 - protein, 32 aa, Artificial Sequence
  GFR-binding peptide
  MOD_RES (11)..(12)..(13)..(14)..(15): Xaa is A or G
  MOD_RES (16)..(17)..(18)..(19): Xaa is A or G or is absent
EVVMDRYKKLXXXXXXXXXFYLISIANLRTPV

SEQ ID NO: 10225 - protein, 34 aa, Artificial Sequence
  GFR-binding peptide
  MOD_RES (34)..(34): Xaa is C or S
  MOD_RES (12)..(13)..(14)..(15)..(16): Xaa is A or G
  MOD_RES (17)..(18)..(19)..(20): Xaa is A or G or is absent
SRVVMNNSLQEXXXXXXXXXYYVVPLPELKTPAX

SEQ ID NO: 10226 - protein, 31 aa, Artificial Sequence; identical to SEQ ID NO: 2746
  GFR-binding peptide
  MOD_RES (1)..(1): Xaa is C or S

SEQ ID NO: 10227 - protein, 40 aa, Artificial Sequence
  GFR-binding peptide
  MOD_RES (2)..(34): Xaa is C or S
GXSRVVMNNSLQEIVNSSDDYYVVPLPELKTPAXTPKTVH

SEQ ID NO: 10228 - protein, 39 aa, Artificial Sequence; identical to SEQ ID NO: 2747
  GFR-binding peptide
  MOD_RES (1)..(34)..(35): Xaa is C or S
  MOD_RES (12)..(13)..(14)..(15)..(16): Xaa is A or G
  MOD_RES (17)..(18)..(19)..(20): Xaa is A or G or is absent

SEQ ID NO: 10229 - protein, 40 aa, Artificial Sequence
  GFR-binding peptide
  MOD_RES (1)..(35)..(36): Xaa is C or S
  MOD_RES (13)..(14)..(15)..(16)..(17): Xaa is A or G
  MOD_RES (18)..(19)..(20)..(21): Xaa is A or G or is absent
XARVVMNNSLQEXXXXXXXXXYYVVPLPELQTPAXXPKPV

SEQ ID NO: 10230 - protein, 31 aa, Artificial Sequence
  GFR-binding peptide
SRVVMNNSLQEIVNSSDDYYLVTLPELKTPA

SEQ ID NO: 10231 - protein, 35 aa, Artificial Sequence
  GFR-binding peptide
  MOD_RES (2)..(2): Xaa is C or S
  MOD_RES (14)..(15)..(16)..(17)..(18): Xaa is A or G
  MOD_RES (19)..(20)..(21)..(22): Xaa is A or G or is absent
GXGEVVMDEYQKYXXXXXXXXXIFLMSIPSLETPV

SEQ ID NO: 10232 - protein, 37 aa, Artificial Sequence
  GFR-binding peptide
  MOD_RES (34)..(35): Xaa is C or S
  MOD_RES (12)..(13)..(14)..(15)..(16): Xaa is A or G
  MOD_RES (17)..(18)..(19)..(20): Xaa is A or G or is absent
SEVVMDEYQKYXXXXXXXXXIFLISIPSLRTPVXXTP

SEQ ID NO: 10233 - protein, 37 aa, Artificial Sequence
  GFR-binding peptide
  MOD_RES (34)..(35): Xaa is C or S
  MOD_RES (12)..(13)..(14)..(15)..(16): Xaa is A or G
  MOD_RES (17)..(18)..(19)..(20): Xaa is A or G or is absent
GEVVMDNSLQEXXXXXXXXXYYVMPLPELETPVXXAK

SEQ ID NO: 10234 - protein, 38 aa, Artificial Sequence
  GFR-binding peptide
  MOD_RES (2)..(4)..(38): Xaa is C or S
  MOD_RES (16)..(17)..(18)..(19)..(20): Xaa is A or G
  MOD_RES (21)..(22)..(23)..(24): Xaa is A or G or is absent
RXGXGEVVMDNSLQEXXXXXXXXXYYVMPLPELETPVX

SEQ ID NO: 10235 - protein, 41 aa, Artificial Sequence; identical to SEQ ID NO: 2751
  GFR-binding peptide
  MOD_RES (2)..(4)..(37)..(38): Xaa is C or S
  MOD_RES (15)..(16)..(17)..(18)..(19): Xaa is A or G
  MOD_RES (20)..(21)..(22)..(23): Xaa is A or G or is absent

SEQ ID NO: 10236 - protein, 39 aa, Artificial Sequence; identical to SEQ ID NO: 2753
  GFR-binding peptide
  MOD_RES (33)..(34): Xaa is C or S
  MOD_RES (11)..(12)..(13)..(14)..(15): Xaa is A or G
  MOD_RES (16)..(17)..(18)..(19): Xaa is A or G or is absent

SEQ ID NO: 10237 - protein, 36 aa, Artificial Sequence
  GFR-binding peptide
  MOD_RES (1)..(3)..(35)..(36): Xaa is C or S
XGXARVVMNNSLQEIVNSSDDYYLVTLPELQTPAXX

SEQ ID NO: 10238 - protein, 39 aa, Artificial Sequence
  GFR-binding peptide
  MOD_RES (34)..(35): Xaa is C or S
  MOD_RES (12)..(13)..(14)..(15)..(16): Xaa is A or G
  MOD_RES (17)..(18)..(19)..(20): Xaa is A or G or is absent
GEVVMEEYQKYXXXXXXXXXIFLMSIPSLETPVXXAKPI

SEQ ID NO: 10239 - protein, 37 aa, Artificial Sequence; identical to SEQ ID NO: 2755
  GFR-binding peptide
  MOD_RES (1)..(33)..(34): Xaa is C or S

SEQ ID NO: 10240 - protein, 34 aa, Artificial Sequence
  GFR-binding peptide
  MOD_RES (33)..(34): Xaa is C or S
  MOD_RES (11)..(12)..(13)..(14)..(15): Xaa is A or G
  MOD_RES (16)..(17)..(18)..(19): Xaa is A or G or is absent
SKVIMEYQKYXXXXXXXXXIFLISIPSLDQSVXX

SEQ ID NO: 10241 - protein, 33 aa, Artificial Sequence; identical to SEQ ID NO: 2757
  GFR-binding peptide
  MOD_RES (1)..(33): Xaa is C or S

SEQ ID NO: 10242 - protein, 38 aa, Artificial Sequence
  GFR-binding peptide
  MOD_RES (1)..(34)..(35): Xaa is C or S
  MOD_RES (12)..(13)..(14)..(15)..(16): Xaa is A or G
  MOD_RES (17)..(18)..(19)..(20): Xaa is A or G or is absent
XSRVIMEYQKYXXXXXXXXXIFLISIPSLAQPVXXPAA

SEQ ID NO: 10243 - protein, 42 aa, Artificial Sequence
  GFR-binding peptide
  MOD_RES (1)..(3)..(37)..(38): Xaa is C or S
  MOD_RES (15)..(16)..(17)..(18)..(19): Xaa is A or G
  MOD_RES (20)..(21)..(22)..(23): Xaa is A or G or is absent
XGXGEVVMENSLQEXXXXXXXXXYYVMPLPELETPVXXAKPI

SEQ ID NO: 10244 - protein, 30 aa, Artificial Sequence
  GFR-binding peptide
EVVMENSLQEVVKDYEDYYLMTLPELETPV

SEQ ID NO: 10245 - protein, 37 aa, Artificial Sequence
  GFR-binding peptide
  MOD_RES (31)..(32): Xaa is C or S
RVVMNNSLQEIVNSSDDYYVVPLPELKTPAXXPKPVY

SEQ ID NO: 10246 - protein, 33 aa, Artificial Sequence; identical to SEQ ID NO: 2763
  GFR-binding peptide
  MOD_RES (31)..(32): Xaa is C or S

SEQ ID NO: 10247 - protein, 36 aa, Artificial Sequence
  GFR-binding peptide
  MOD_RES (2)..(4)..(36): Xaa is C or S
HXGXSRVVMNNSLQEIVNSSDDYYLVTLPELKTPAX

SEQ ID NO: 10248 - protein, 40 aa, Artificial Sequence
  GFR-binding peptide
  MOD_RES (2)..(34)..(35): Xaa is C or S
GXSEVVMDNSLQEVVNNASDYYLITLPELRTPVXXTPPTS

SEQ ID NO: 10249 - protein, 43 aa, Artificial Sequence
  GFR-binding peptide
  MOD_RES (2)..(4)..(37)..(38): Xaa is C or S
  MOD_RES (15)..(16)..(17)..(18)..(19): Xaa is A or G
  MOD_RES (20)..(21)..(22)..(23): Xaa is A or G or is absent
SXKXSKVVMNSLQEXXXXXXXXXYYLITLPELDQPVXXPSASA

SEQ ID NO: 10250 - protein, 37 aa, Artificial Sequence
  GFR-binding peptide
  MOD_RES (1)..(33)..(34): Xaa is C or S
XSEVVMDEYQKYVVNNASDIFLISIPSLRTPVXXTPP

SEQ ID NO: 10251 - protein, 40 aa, Artificial Sequence
  GFR-binding peptide
  MOD_RES (2)..(36)..(37): Xaa is C or S
  MOD_RES (14)..(15)..(16)..(17)..(18): Xaa is A or G
  MOD_RES (19)..(20)..(21)..(22): Xaa is A or G or is absent
GXSEVVMDQYNKLXXXXXXXXXLYLISIASLRTPVXXTPP

SEQ ID NO: 10252 - protein, 35 aa, Artificial Sequence
  GFR-binding peptide
  MOD_RES (1)..(3)..(34)..(35): Xaa is C or S
XKXSRVIMEYQKYVKPKRGVIFLISIPSLAQPVXX

SEQ ID NO: 10253 - protein, 37 aa, Artificial Sequence; identical to SEQ ID NO: 2766
  GFR-binding peptide
  MOD_RES (1)..(35)..(36): Xaa is C or S
  MOD_RES (13)..(14)..(15)..(16)..(17): Xaa is A or G
  MOD_RES (18)..(19)..(20)..(21): Xaa is A or G or is absent

SEQ ID NO: 10254 - protein, 41 aa, Artificial Sequence
  GFR-binding peptide
  MOD_RES (1)..(3)..(36)..(37): Xaa is C or S
  MOD_RES (14)..(15)..(16)..(17)..(18): Xaa is A or G
  MOD_RES (19)..(20)..(21)..(22): Xaa is A or G or is absent
XKXSRVIMEYQKYXXXXXXXXXIFLISIPSLAQPVXXPAAS

SEQ ID NO: 10255 - protein, 36 aa, Artificial Sequence
  GFR-binding peptide
  MOD_RES (32)..(32): Xaa is C or S
SRVVMNNSLQEIVNSSDDYYVVPLPELKTPAXTPKT

SEQ ID NO: 10256 - protein, 40 aa, Artificial Sequence; identical to SEQ ID NO: 2769
  GFR-binding peptide
  MOD_RES (1)..(34)..(35): Xaa is C or S
  MOD_RES (12)..(13)..(14)..(15)..(16): Xaa is A or G
  MOD_RES (17)..(18)..(19)..(20): Xaa is A or G or is absent

SEQ ID NO: 10257 - protein, 35 aa, Artificial Sequence
  GFR-binding peptide
  MOD_RES (1)..(3)..(34)..(35): Xaa is C or S
XKXSKVIMEYQKYIKPTKGIIFLISIPSLDQSVXX

SEQ ID NO: 10258 - protein, 36 aa, Artificial Sequence
  GFR-binding peptide
  MOD_RES (33)..(34): Xaa is C or S
  MOD_RES (11)..(12)..(13)..(14)..(15): Xaa is A or G
  MOD_RES (16)..(17)..(18)..(19): Xaa is A or G or is absent
SKVVMEYQKYXXXXXXXXXIFLISIPSLDQPVXXPS

SEQ ID NO: 10259 - protein, 32 aa, Artificial Sequence; identical to SEQ ID NO: 2771
  GFR-binding peptide
  MOD_RES (11)..(12)..(13)..(14)..(15): Xaa is A or G
  MOD_RES (16)..(17)..(18)..(19): Xaa is A or G or is absent

SEQ ID NO: 10260 - protein, 33 aa, Artificial Sequence; identical to SEQ ID NO: 2773
  GFR-binding peptide
  MOD_RES (1)..(33): Xaa is C or S

SEQ ID NO: 10261 - protein, 37 aa, Artificial Sequence; identical to SEQ ID NO: 2780
  GFR-binding peptide
  MOD_RES (1)..(34)..(35): Xaa is C or S
  MOD_RES (12)..(13)..(14)..(15)..(16): Xaa is A or G
  MOD_RES (17)..(18)..(19)..(20): Xaa is A or G or is absent

SEQ ID NO: 10262 - protein, 39 aa, Artificial Sequence
  GFR-binding peptide
  MOD_RES (2)..(4)..(38)..(39): Xaa is C or S
  MOD_RES (16)..(17)..(18)..(19)..(20): Xaa is A or G
  MOD_RES (21)..(22)..(23)..(24): Xaa is A or G or is absent
HXGXSRVVMNNSLQEXXXXXXXXXYYLVTLPELKTPAXX

SEQ ID NO: 10263 - protein, 41 aa, Artificial Sequence
  GFR-binding peptide
  MOD_RES (1)..(3)..(36)..(37): Xaa is C or S
  MOD_RES (14)..(15)..(16)..(17)..(18): Xaa is A or G
  MOD_RES (19)..(20)..(21)..(22): Xaa is A or G or is absent
XKXSKVIMEYQKYXXXXXXXXXIFLISIPSLDQSVXXPSAS

SEQ ID NO: 10264 - protein, 37 aa, Artificial Sequence
  GFR-binding peptide
  MOD_RES (1)..(3)..(34)..(35): Xaa is C or S
XKXSRVIMNSLQEVKPKRGVYYVIPLPELAQPVXXPA

SEQ ID NO: 10265 - protein, 32 aa, Artificial Sequence; identical to SEQ ID NO: 2782
  GFR-binding peptide
  MOD_RES (32)..(32): Xaa is C or S

SEQ ID NO: 10266 - protein, 40 aa, Artificial Sequence
  GFR-binding peptide
  MOD_RES (2)..(36)..(37): Xaa is C or S
  MOD_RES (14)..(15)..(16)..(17)..(18): Xaa is A or G
  MOD_RES (19)..(20)..(21)..(22): Xaa is A or G or is absent
GXSEVVMDEYQKYXXXXXXXXXIFLISIPSLRTPVXXTPP

SEQ ID NO: 10267 - protein, 35 aa, Artificial Sequence; identical to SEQ ID NO: 2785
  GFR-binding peptide
  MOD_RES (2)..(4): Xaa is C or S

SEQ ID NO: 10268 - protein, 41 aa, Artificial Sequence; identical to SEQ ID NO: 2786
  GFR-binding peptide
  MOD_RES (1)..(3)..(37)..(38): Xaa is C or S
  MOD_RES (15)..(16)..(17)..(18)..(19): Xaa is A or G
  MOD_RES (20)..(21)..(22)..(23): Xaa is A or G or is absent

SEQ ID NO: 10269 - protein, 35 aa, Artificial Sequence; identical to SEQ ID NO: 2789
  GFR-binding peptide
  MOD_RES (33)..(34): Xaa is C or S
  MOD_RES (11)..(12)..(13)..(14)..(15): Xaa is A or G
  MOD_RES (16)..(17)..(18)..(19): Xaa is A or G or is absent

SEQ ID NO: 10270 - protein, 37 aa, Artificial Sequence; identical to SEQ ID NO: 2791
  GFR-binding peptide
  MOD_RES (1)..(3)..(34)..(35): Xaa is C or S

SEQ ID NO: 10271 - protein, 36 aa, Artificial Sequence; identical to SEQ ID NO: 2792
  GFR-binding peptide
  MOD_RES (32)..(33): Xaa is C or S

SEQ ID NO: 10272 - protein, 32 aa, Artificial Sequence; identical to SEQ ID NO: 2794
  GFR-binding peptide
  MOD_RES (31)..(32): Xaa is C or S

SEQ ID NO: 10273 - protein, 41 aa, Artificial Sequence
  GFR-binding peptide
  MOD_RES (2)..(4)..(38): Xaa is C or S
  MOD_RES (16)..(17)..(18)..(19)..(20): Xaa is A or G
  MOD_RES (21)..(22)..(23)..(24): Xaa is A or G or is absent
HXGXSRVVMNNSLQEXXXXXXXXXYYLVTLPELKTPAXTPK

SEQ ID NO: 10274 - protein, 35 aa, Artificial Sequence
  GFR-binding peptide
  MOD_RES (1)..(3)..(34)..(35): Xaa is C or S
XKXSKVVMNSLQEVKPTRGVYYVIPLPELDQPVXX

SEQ ID NO: 10275 - protein, 37 aa, Artificial Sequence
  GFR-binding peptide
  MOD_RES (1)..(3)..(35)..(36): Xaa is C or S
XGXSEVVMDNSLQEVVNNASDYYVIPLPELRTPVXXT

SEQ ID NO: 10276 - protein, 36 aa, Artificial Sequence
  GFR-binding peptide
  MOD_RES (34)..(35): Xaa is C or S
  MOD_RES (12)..(13)..(14)..(15)..(16): Xaa is A or G
  MOD_RES (17)..(18)..(19)..(20): Xaa is A or G or is absent
GEVVMDEYQKYXXXXXXXXXIFLMSIPSLETPVXXA

SEQ ID NO: 10277 - protein, 38 aa, Artificial Sequence
  GFR-binding peptide
  MOD_RES (1)..(3)..(37)..(38): Xaa is C or S
  MOD_RES (15)..(16)..(17)..(18)..(19): Xaa is A or G
  MOD_RES (20)..(21)..(22)..(23): Xaa is A or G or is absent
XGXSRVVMNNSLQEXXXXXXXXXYYVVPLPELKTPAXX

SEQ ID NO: 10278 - protein, 38 aa, Artificial Sequence
  GFR-binding peptide
  MOD_RES (34)..(35): Xaa is C or S
  MOD_RES (12)..(13)..(14)..(15)..(16): Xaa is A or G
  MOD_RES (17)..(18)..(19)..(20): Xaa is A or G or is absent
SEVVMDNSLQEXXXXXXXXXYYVIPLPELRTPVXXTPP

SEQ ID NO: 10279 - protein, 34 aa, Artificial Sequence; identical to SEQ ID NO: 2801
  GFR-binding peptide
  MOD_RES (2)..(34): Xaa is C or S

SEQ ID NO: 10280 - protein, 38 aa, Artificial Sequence
  GFR-binding peptide
  MOD_RES (2)..(36): Xaa is C or S
  MOD_RES (14)..(15)..(16)..(17)..(18): Xaa is A or G
  MOD_RES (19)..(20)..(21)..(22): Xaa is A or G or is absent
GXSRVVMNNSLQEXXXXXXXXXYYVVPLPELKTPAXTP

SEQ ID NO: 10281 - protein, 31 aa, Artificial Sequence
  GFR-binding peptide
GEVVMDNSLQEVVKENEDYYLMTLPELETPV

SEQ ID NO: 10282 - protein, 39 aa, Artificial Sequence
  GFR-binding peptide
  MOD_RES (1)..(3)..(35): Xaa is C or S
XGXSRVVMNNSLQEIVNSSDDYYVVPLPELKTPAXTPKT

SEQ ID NO: 10283 - protein, 37 aa, Artificial Sequence
  GFR-binding peptide
  MOD_RES (1)..(33): Xaa is C or S
XSRVVMNNSLQEIVNSSDDYYLVTLPELKTPAXTPKT

SEQ ID NO: 10284 - protein, 40 aa, Artificial Sequence; identical to SEQ ID NO: 2809
  GFR-binding peptide
  MOD_RES (1)..(35)..(36): Xaa is C or S
  MOD_RES (13)..(14)..(15)..(16)..(17): Xaa is A or G
  MOD_RES (18)..(19)..(20)..(21): Xaa is A or G or is absent

SEQ ID NO: 10285 - protein, 33 aa, Artificial Sequence
  GFR-binding peptide
  MOD_RES (31)..(32): Xaa is C or S
SKVVMEYQKYVKPTRGVIFLISIPSLDQPVXXP

SEQ ID NO: 10286 - protein, 35 aa, Artificial Sequence; identical to SEQ ID NO: 2810
  GFR-binding peptide
  MOD_RES (32)..(33): Xaa is C or S

SEQ ID NO: 10287 - protein, 38 aa, Artificial Sequence
  GFR-binding peptide
  MOD_RES (32)..(33): Xaa is C or S
SEVVMDQYNKLVVNNASDLYLISIASLRTPVXXTPPTS

SEQ ID NO: 10288 - protein, 36 aa, Artificial Sequence; identical to SEQ ID NO: 2811
  GFR-binding peptide
  MOD_RES (2)..(36): Xaa is C or S
  MOD_RES (14)..(15)..(16)..(17)..(18): Xaa is A or G
  MOD_RES (19)..(20)..(21)..(22): Xaa is A or G or is absent

SEQ ID NO: 10289 - protein, 33 aa, Artificial Sequence; identical to SEQ ID NO: 2812
  GFR-binding peptide
  MOD_RES (1)..(1): Xaa is C or S
  MOD_RES (12)..(13)..(14)..(15)..(16): Xaa is A or G
  MOD_RES (17)..(18)..(19)..(20): Xaa is A or G or is absent

SEQ ID NO: 10290 - protein, 34 aa, Artificial Sequence; identical to SEQ ID NO: 2814
  GFR-binding peptide
  MOD_RES (34)..(34): Xaa is C or S
  MOD_RES (12)..(13)..(14)..(15)..(16): Xaa is A or G
  MOD_RES (17)..(18)..(19)..(20): Xaa is A or G or is absent

SEQ ID NO: 10291 - protein, 32 aa, Artificial Sequence
  GFR-binding peptide
  MOD_RES (1)..(32): Xaa is C or S
XSRVIMNSLQEVKPKRGVYYLITLPELAQPVX

SEQ ID NO: 10292 - protein, 34 aa, Artificial Sequence
  GFR-binding peptide
  MOD_RES (1)..(3)..(34): Xaa is C or S
XKXSKVIMEYQKYIKPTKGIIFLISIPSLDQSVX

SEQ ID NO: 10293 - protein, 37 aa, Artificial Sequence
  GFR-binding peptide
  MOD_RES (1)..(32)..(33): Xaa is C or S
XSKVVMNSLQEVKPTRGVYYLITLPELDQPVXXPSAS

SEQ ID NO: 10294 - protein, 32 aa, Artificial Sequence
  GFR-binding peptide
  MOD_RES (31)..(31): Xaa is C or S
RVVMNNSLQEIVNSSDDYYLVTLPELKTPAXT

SEQ ID NO: 10295 - protein, 37 aa, Artificial Sequence
  GFR-binding peptide
  MOD_RES (2)..(36)..(37): Xaa is C or S
  MOD_RES (14)..(15)..(16)..(17)..(18): Xaa is A or G
  MOD_RES (19)..(20)..(21)..(22): Xaa is A or G or is absent
GXSEVVMDNSLQEXXXXXXXXXYYVIPLPELRTPVXX

SEQ ID NO: 10296 - protein, 34 aa, Artificial Sequence
  GFR-binding peptide
  MOD_RES (1)..(3)..(34): Xaa is C or S
XKXSRVIMEYQKYVKPKRGVIFLISIPSLAQPVX

SEQ ID NO: 10297 - protein, 38 aa, Artificial Sequence; identical to SEQ ID NO: 2817
  GFR-binding peptide
  MOD_RES (2)..(36)..(37): Xaa is C or S
  MOD_RES (14)..(15)..(16)..(17)..(18): Xaa is A or G
  MOD_RES (19)..(20)..(21)..(22): Xaa is A or G or is absent

SEQ ID NO: 10298 - protein, 35 aa, Artificial Sequence
  GFR-binding peptide
  MOD_RES (1)..(34)..(35): Xaa is C or S
  MOD_RES (12)..(13)..(14)..(15)..(16): Xaa is A or G
  MOD_RES (17)..(18)..(19)..(20): Xaa is A or G or is absent
XSRVIMNSLQEXXXXXXXXXYYVIPLPELAQPVXX

SEQ ID NO: 10299 - protein, 33 aa, Artificial Sequence; identical to SEQ ID NO: 2819
  GFR-binding peptide
  MOD_RES (32)..(33): Xaa is C or S

SEQ ID NO: 10300 - protein, 38 aa, Artificial Sequence
  GFR-binding peptide
  MOD_RES (1)..(35)..(36): Xaa is C or S
  MOD_RES (13)..(14)..(15)..(16)..(17): Xaa is A or G
  MOD_RES (18)..(19)..(20)..(21): Xaa is A or G or is absent
XGEVVMDEYQKYXXXXXXXXXIFLMSIPSLETPVXXAK

SEQ ID NO: 10301 - protein, 35 aa, Artificial Sequence
  GFR-binding peptide
  MOD_RES (2)..(2): Xaa is C or S
  MOD_RES (14)..(15)..(16)..(17)..(18): Xaa is A or G
  MOD_RES (19)..(20)..(21)..(22): Xaa is A or G or is absent
GXARVVMNNSLQEXXXXXXXXXYYLVTLPELQTPA

SEQ ID NO: 10302 - protein, 34 aa, Artificial Sequence
  GFR-binding peptide
  MOD_RES (33)..(34): Xaa is C or S
  MOD_RES (11)..(12)..(13)..(14)..(15): Xaa is A or G
  MOD_RES (16)..(17)..(18)..(19): Xaa is A or G or is absent
EVVMENSLQEXXXXXXXXXYYVMPLPELETPVXX

SEQ ID NO: 10303 - protein, 39 aa, Artificial Sequence; identical to SEQ ID NO: 2829
  GFR-binding peptide
  MOD_RES (2)..(4)..(37)..(38): Xaa is C or S
  MOD_RES (15)..(16)..(17)..(18)..(19): Xaa is A or G
  MOD_RES (20)..(21)..(22)..(23): Xaa is A or G or is absent

SEQ ID NO: 10304 - protein, 44 aa, Artificial Sequence
  GFR-binding peptide
  MOD_RES (2)..(4)..(38)..(39): Xaa is C or S
  MOD_RES (16)..(17)..(18)..(19)..(20): Xaa is A or G
  MOD_RES (21)..(22)..(23)..(24): Xaa is A or G or is absent
RXGXGEVVMENSLQEXXXXXXXXXYYVMPLPELETPVXXAKPIS

SEQ ID NO: 10305 - protein, 38 aa, Artificial Sequence
  GFR-binding peptide
  MOD_RES (32)..(33): Xaa is C or S
ARVVMNNSLQEIVNSSDDYYLVTLPELQTPAXXPKPVT

SEQ ID NO: 10306 - protein, 37 aa, Artificial Sequence
  GFR-binding peptide
  MOD_RES (1)..(33)..(34): Xaa is C or S
XGEVVMDNSLQEVVKENEDYYVMPLPELETPVXXAKP

SEQ ID NO: 10307 - protein, 37 aa, Artificial Sequence
  GFR-binding peptide
  MOD_RES (1)..(3)..(35)..(36): Xaa is C or S
XGXARVVMNNSLQEIVNSSDDYYLVTLPELQTPAXXP

SEQ ID NO: 10308 - protein, 35 aa, Artificial Sequence
  GFR-binding peptide
  MOD_RES (1)..(3)..(35): Xaa is C or S
XGXARVVMNNSLQEIVNSSDDYYVVPLPELQTPAX

SEQ ID NO: 10309 - protein, 36 aa, Artificial Sequence
  GFR-binding peptide
  MOD_RES (2)..(34)..(35): Xaa is C or S
GXSEVVMDQYNKLVVNNASDLYLISIASLRTPVXXT

SEQ ID NO: 10310 - protein, 37 aa, Artificial Sequence
  GFR-binding peptide
  MOD_RES (1)..(3)..(35)..(36): Xaa is C or S
XGXSRVVMNNSLQEIVNSSDDYYLVTLPELKTPAXXP

SEQ ID NO: 10311 - protein, 34 aa, Artificial Sequence
  GFR-binding peptide
  MOD_RES (32)..(32): Xaa is C or S
SRVVMNNSLQEIVNSSDDYYVVPLPELKTPAXTP

SEQ ID NO: 10312 - protein, 33 aa, Artificial Sequence
  GFR-binding peptide
  MOD_RES (31)..(32): Xaa is C or S
EVVMENSLQEVVKDYEDYYLMTLPELETPVXXA

SEQ ID NO: 10313 - protein, 33 aa, Artificial Sequence; identical to SEQ ID NO: 2848
  GFR-binding peptide
  MOD_RES (1)..(3): Xaa is C or S

SEQ ID NO: 10314 - protein, 33 aa, Artificial Sequence
  GFR-binding peptide
  MOD_RES (2)..(2): Xaa is C or S
GXGEVVMDNSLQEVVKENEDYYVMPLPELETPV

SEQ ID NO: 10315 - protein, 40 aa, Artificial Sequence; identical to SEQ ID NO: 2850
  GFR-binding peptide
  MOD_RES (1)..(3)..(37)..(38): Xaa is C or S
  MOD_RES (15)..(16)..(17)..(18)..(19): Xaa is A or G
  MOD_RES (20)..(21)..(22)..(23): Xaa is A or G or is absent

SEQ ID NO: 10316 - protein, 38 aa, Artificial Sequence
  GFR-binding peptide
  MOD_RES (33)..(33): Xaa is C or S
  MOD_RES (11)..(12)..(13)..(14)..(15): Xaa is A or G
  MOD_RES (16)..(17)..(18)..(19): Xaa is A or G or is absent
RVVMNEYQKYXXXXXXXXXIFLVSIPSLKTPAXTPKTV

SEQ ID NO: 10317 - protein, 35 aa, Artificial Sequence
  GFR-binding peptide
  MOD_RES (31)..(32): Xaa is C or S
EVVMDNSLQEVVKENEDYYVMPLPELETPVXXAKP

SEQ ID NO: 10318 - protein, 36 aa, Artificial Sequence
  GFR-binding peptide
  MOD_RES (2)..(4): Xaa is C or S
  MOD_RES (15)..(16)..(17)..(18)..(19): Xaa is A or G
  MOD_RES (20)..(21)..(22)..(23): Xaa is A or G or is absent
SXKXSRVIMNSLQEXXXXXXXXXYYVIPLPELAQPV

SEQ ID NO: 10319 - protein, 43 aa, Artificial Sequence; identical to SEQ ID NO: 2853
  GFR-binding peptide
  MOD_RES (1)..(3)..(37)..(38): Xaa is C or S
  MOD_RES (15)..(16)..(17)..(18)..(19): Xaa is A or G
  MOD_RES (20)..(21)..(22)..(23): Xaa is A or G or is absent

SEQ ID NO: 10320 - protein, 34 aa, Artificial Sequence
  GFR-binding peptide
  MOD_RES (33)..(34): Xaa is C or S
  MOD_RES (11)..(12)..(13)..(14)..(15): Xaa is A or G
  MOD_RES (16)..(17)..(18)..(19): Xaa is A or G or is absent
SRVIMNSLQEXXXXXXXXXYYVIPLPELAQPVXX

SEQ ID NO: 10321 - protein, 36 aa, Artificial Sequence
  GFR-binding peptide
  MOD_RES (1)..(35): Xaa is C or S
  MOD_RES (13)..(14)..(15)..(16)..(17): Xaa is A or G
  MOD_RES (18)..(19)..(20)..(21): Xaa is A or G or is absent
XSRVVMNNSLQEXXXXXXXXXYYVVPLPELKTPAXT

SEQ ID NO: 10322 - protein, 38 aa, Artificial Sequence
  GFR-binding peptide
  MOD_RES (2)..(4)..(38): Xaa is C or S
  MOD_RES (16)..(17)..(18)..(19)..(20): Xaa is A or G
  MOD_RES (21)..(22)..(23)..(24): Xaa is A or G or is absent
RXGXSEVVMDRYKKLXXXXXXXXXFYLISIANLRTPVX

SEQ ID NO: 10323 - protein, 38 aa, Artificial Sequence; identical to SEQ ID NO: 2855
  GFR-binding peptide
  MOD_RES (2)..(4)..(36)..(37): Xaa is C or S

SEQ ID NO: 10324 - protein, 38 aa, Artificial Sequence
  GFR-binding peptide
  MOD_RES (1)..(33)..(34): Xaa is C or S
XSRVVMNNSLQEIVNSSDDYYLVTLPELKTPAXXPKPV

SEQ ID NO: 10325 - protein, 38 aa, Artificial Sequence; identical to SEQ ID NO: 2858
  GFR-binding peptide
  MOD_RES (1)..(3)..(35)..(36): Xaa is C or S

SEQ ID NO: 10326 - protein, 37 aa, Artificial Sequence; identical to SEQ ID NO: 2859
  GFR-binding peptide
  MOD_RES (1)..(33)..(34): Xaa is C or S

SEQ ID NO: 10327 - protein, 40 aa, Artificial Sequence; identical to SEQ ID NO: 2862
  GFR-binding peptide
  MOD_RES (1)..(3)..(37)..(38): Xaa is C or S
  MOD_RES (15)..(16)..(17)..(18)..(19): Xaa is A or G
  MOD_RES (20)..(21)..(22)..(23): Xaa is A or G or is absent

SEQ ID NO: 10328 - protein, 35 aa, Artificial Sequence
  GFR-binding peptide
  MOD_RES (31)..(32): Xaa is C or S
EVVMDNSLQEVVNNASDYYVIPLPELRTPVXXTPP

SEQ ID NO: 10329 - protein, 35 aa, Artificial Sequence; identical to SEQ ID NO: 2863
  GFR-binding peptide
  MOD_RES (2)..(4)..(35): Xaa is C or S

SEQ ID NO: 10330 - protein, 44 aa, Artificial Sequence; identical to SEQ ID NO: 2864
  GFR-binding peptide
  MOD_RES (2)..(4)..(38): Xaa is C or S
  MOD_RES (16)..(17)..(18)..(19)..(20): Xaa is A or G
  MOD_RES (21)..(22)..(23)..(24): Xaa is A or G or is absent

SEQ ID NO: 10331 - protein, 39 aa, Artificial Sequence
  GFR-binding peptide
  MOD_RES (2)..(36)..(37): Xaa is C or S
  MOD_RES (14)..(15)..(16)..(17)..(18): Xaa is A or G
  MOD_RES (19)..(20)..(21)..(22): Xaa is A or G or is absent
GXSEVVMDQYNKLXXXXXXXXXLYLISIASLRTPVXXTP

SEQ ID NO: 10332 - protein, 39 aa, Artificial Sequence; identical to SEQ ID NO: 2870
  GFR-binding peptide
  MOD_RES (1)..(34)..(35): Xaa is C or S
  MOD_RES (12)..(13)..(14)..(15)..(16): Xaa is A or G
  MOD_RES (17)..(18)..(19)..(20): Xaa is A or G or is absent

SEQ ID NO: 10333 - protein, 35 aa, Artificial Sequence; identical to SEQ ID NO: 2871
  GFR-binding peptide
  MOD_RES (1)..(34)..(35): Xaa is C or S
  MOD_RES (12)..(13)..(14)..(15)..(16): Xaa is A or G
  MOD_RES (17)..(18)..(19)..(20): Xaa is A or G or is absent

SEQ ID NO: 10334 - protein, 40 aa, Artificial Sequence
  GFR-binding peptide
  MOD_RES (1)..(3)..(37)..(38): Xaa is C or S
  MOD_RES (15)..(16)..(17)..(18)..(19): Xaa is A or G
  MOD_RES (20)..(21)..(22)..(23): Xaa is A or G or is absent
XGXSEVVMDEYQKYXXXXXXXXXIFLISIPSLRTPVXXTP

SEQ ID NO: 10335 - protein, 36 aa, Artificial Sequence
  GFR-binding peptide
  MOD_RES (2)..(4): Xaa is C or S
  MOD_RES (15)..(16)..(17)..(18)..(19): Xaa is A or G
  MOD_RES (20)..(21)..(22)..(23): Xaa is A or G or is absent
SXKXSKVVMEYQKYXXXXXXXXXIFLISIPSLDQPV

SEQ ID NO: 10336 - protein, 34 aa, Artificial Sequence
  GFR-binding peptide
  MOD_RES (1)..(3)..(34): Xaa is C or S
XKXSKVVMNSLQEVKPTRGVYYVIPLPELDQPVX

SEQ ID NO: 10337 - protein, 38 aa, Artificial Sequence
  GFR-binding peptide
  MOD_RES (2)..(4)..(36)..(37): Xaa is C or S
HXGXARVVMNNSLQEIVNSSDDYYLVTLPELQTPAXXP

SEQ ID NO: 10338 - protein, 40 aa, Artificial Sequence
  GFR-binding peptide
  MOD_RES (2)..(4)..(38)..(39): Xaa is C or S
  MOD_RES (16)..(17)..(18)..(19)..(20): Xaa is A or G
  MOD_RES (21)..(22)..(23)..(24): Xaa is A or G or is absent
RXGXGEVVMDNSLQEXXXXXXXXXYYVMPLPELETPVXXA

SEQ ID NO: 10339 - protein, 38 aa, Artificial Sequence
  GFR-binding peptide
  MOD_RES (1)..(35): Xaa is C or S
  MOD_RES (13)..(14)..(15)..(16)..(17): Xaa is A or G
  MOD_RES (18)..(19)..(20)..(21): Xaa is A or G or is absent
XSRVVMNNSLQEXXXXXXXXXYYVVPLPELKTPAXTPK

SEQ ID NO: 10340 - protein, 33 aa, Artificial Sequence; identical to SEQ ID NO: 2877
  GFR-binding peptide
  MOD_RES (32)..(33): Xaa is C or S

SEQ ID NO: 10341 - protein, 37 aa, Artificial Sequence; identical to SEQ ID NO: 2879
  GFR-binding peptide
  MOD_RES (2)..(36)..(37): Xaa is C or S
  MOD_RES (14)..(15)..(16)..(17)..(18): Xaa is A or G
  MOD_RES (19)..(20)..(21)..(22): Xaa is A or G or is absent

SEQ ID NO: 10342 - protein, 33 aa, Artificial Sequence; identical to SEQ ID NO: 2880
  GFR-binding peptide
  MOD_RES (1)..(33): Xaa is C or S

SEQ ID NO: 10343 - protein, 33 aa, Artificial Sequence
  GFR-binding peptide
  MOD_RES (12)..(13)..(14)..(15)..(16): Xaa is A or G
  MOD_RES (17)..(18)..(19)..(20): Xaa is A or G or is absent
GEVVMENSLQEXXXXXXXXXYYLMTLPELETPV

SEQ ID NO: 10344 - protein, 41 aa, Artificial Sequence
  GFR-binding peptide
  MOD_RES (2)..(4)..(36)..(37): Xaa is C or S
RXGXSEVVMDNSLQEVVNNASDYYVIPLPELRTPVXXTPPT

SEQ ID NO: 10345 - protein, 40 aa, Artificial Sequence; identical to SEQ ID NO: 2883
  GFR-binding peptide
  MOD_RES (2)..(4)..(38)..(39): Xaa is C or S
  MOD_RES (16)..(17)..(18)..(19)..(20): Xaa is A or G
  MOD_RES (21)..(22)..(23)..(24): Xaa is A or G or is absent

SEQ ID NO: 10346 - protein, 36 aa, Artificial Sequence
  GFR-binding peptide
  MOD_RES (1)..(33)..(34): Xaa is C or S
XSEVVMDQYNKLVVNNASDLYLISIASLRTPVXXTP

SEQ ID NO: 10347 - protein, 37 aa, Artificial Sequence
  GFR-binding peptide
  MOD_RES (2)..(4)..(35)..(36): Xaa is C or S
SXKXSKVIMNSLQEIKPTKGIYYVIPLPELDQSVXXP

SEQ ID NO: 10348 - protein, 38 aa, Artificial Sequence
  GFR-binding peptide
  MOD_RES (33)..(34): Xaa is C or S
  MOD_RES (11)..(12)..(13)..(14)..(15): Xaa is A or G
  MOD_RES (16)..(17)..(18)..(19): Xaa is A or G or is absent
EVVMDQYNKLXXXXXXXXXLYLISIASLRTPVXXTPPT

SEQ ID NO: 10349 - protein, 37 aa, Artificial Sequence
  GFR-binding peptide
  MOD_RES (32)..(33): Xaa is C or S
GEVVMEEYQKYVVKDYEDIFLMSIPSLETPVXXAKPI

SEQ ID NO: 10350 - protein, 36 aa, Artificial Sequence; identical to SEQ ID NO: 2886
  GFR-binding peptide
  MOD_RES (1)..(3)..(35)..(36): Xaa is C or S

SEQ ID NO: 10351 - protein, 41 aa, Artificial Sequence
  GFR-binding peptide
  MOD_RES (2)..(4)..(38)..(39): Xaa is C or S
  MOD_RES (16)..(17)..(18)..(19)..(20): Xaa is A or G
  MOD_RES (21)..(22)..(23)..(24): Xaa is A or G or is absent
HXGXARVVMNNSLQEXXXXXXXXXYYLVTLPELQTPAXXPK

SEQ ID NO: 10352 - protein, 39 aa, Artificial Sequence
  GFR-binding peptide
  MOD_RES (1)..(3)..(35)..(36): Xaa is C or S
XGXGEVVMEEYQKYVVKDYEDIFLMSIPSLETPVXXAKP

SEQ ID NO: 10353 - protein, 39 aa, Artificial Sequence; identical to SEQ ID NO: 2892
  GFR-binding peptide
  MOD_RES (1)..(34)..(35): Xaa is C or S
  MOD_RES (12)..(13)..(14)..(15)..(16): Xaa is A or G
  MOD_RES (17)..(18)..(19)..(20): Xaa is A or G or is absent

SEQ ID NO: 10354 - protein, 32 aa, Artificial Sequence
  GFR-binding peptide
  MOD_RES (31)..(32): Xaa is C or S
EVVMDNSLQEVVKENEDYYLMTLPELETPVXX

SEQ ID NO: 10355 - protein, 35 aa, Artificial Sequence
  GFR-binding peptide
  MOD_RES (1)..(3): Xaa is C or S
  MOD_RES (14)..(15)..(16)..(17)..(18): Xaa is A or G
  MOD_RES (19)..(20)..(21)..(22): Xaa is A or G or is absent
XKXSKVVMEYQKYXXXXXXXXXIFLISIPSLDQPV

SEQ ID NO: 10356 - protein, 37 aa, Artificial Sequence; identical to SEQ ID NO: 2894
  GFR-binding peptide
  MOD_RES (2)..(35)..(36): Xaa is C or S
  MOD_RES (13)..(14)..(15)..(16)..(17): Xaa is A or G
  MOD_RES (18)..(19)..(20)..(21): Xaa is A or G or is absent

SEQ ID NO: 10357 - protein, 39 aa, Artificial Sequence
  GFR-binding peptide
  MOD_RES (1)..(35)..(36): Xaa is C or S
  MOD_RES (13)..(14)..(15)..(16)..(17): Xaa is A or G
  MOD_RES (18)..(19)..(20)..(21): Xaa is A or G or is absent
XSEVVMDNSLQEXXXXXXXXXYYLITLPELRTPVXXTPP

SEQ ID NO: 10358 - protein, 37 aa, Artificial Sequence
  GFR-binding peptide
  MOD_RES (1)..(35)..(36): Xaa is C or S
  MOD_RES (13)..(14)..(15)..(16)..(17): Xaa is A or G
  MOD_RES (18)..(19)..(20)..(21): Xaa is A or G or is absent
XARVVMNNSLQEXXXXXXXXXYYVVPLPELQTPAXXP

SEQ ID NO: 10359 - protein, 34 aa, Artificial Sequence
  GFR-binding peptide
  MOD_RES (33)..(33): Xaa is C or S
  MOD_RES (11)..(12)..(13)..(14)..(15): Xaa is A or G
  MOD_RES (16)..(17)..(18)..(19): Xaa is A or G or is absent
RVVMNNSLQEXXXXXXXXXYYVVPLPELKTPAXT

SEQ ID NO: 10360 - protein, 37 aa, Artificial Sequence; identical to SEQ ID NO: 2896
  GFR-binding peptide
  MOD_RES (2)..(4)..(35)..(36): Xaa is C or S

SEQ ID NO: 10361 - protein, 38 aa, Artificial Sequence
  GFR-binding peptide
  MOD_RES (32)..(33): Xaa is C or S
SEVVMDRYKKLVVNNASDFYLISIANLRTPVXXTPPTS

SEQ ID NO: 10362 - protein, 36 aa, Artificial Sequence
  GFR-binding peptide
  MOD_RES (2)..(34)..(35): Xaa is C or S
GXSEVVMDNSLQEVVNNASDYYLITLPELRTPVXXT

SEQ ID NO: 10363 - protein, 42 aa, Artificial Sequence; identical to SEQ ID NO: 2900
  GFR-binding peptide
  MOD_RES (2)..(36)..(37): Xaa is C or S
  MOD_RES (14)..(15)..(16)..(17)..(18): Xaa is A or G
  MOD_RES (19)..(20)..(21)..(22): Xaa is A or G or is absent

SEQ ID NO: 10364 - protein, 34 aa, Artificial Sequence
  GFR-binding peptide
  MOD_RES (2)..(34): Xaa is C or S
GXSEVVMDNSLQEVVNNASDYYLITLPELRTPVX

SEQ ID NO: 10365 - protein, 36 aa, Artificial Sequence
  GFR-binding peptide
  MOD_RES (1)..(35)..(36): Xaa is C or S
  MOD_RES (13)..(14)..(15)..(16)..(17): Xaa is A or G
  MOD_RES (18)..(19)..(20)..(21): Xaa is A or G or is absent
XGEVVMENSLQEXXXXXXXXXYYVMPLPELETPVXX

SEQ ID NO: 10366 - protein, 44 aa, Artificial Sequence
  GFR-binding peptide
  MOD_RES (2)..(4)..(38)..(39): Xaa is C or S
  MOD_RES (16)..(17)..(18)..(19)..(20): Xaa is A or G
  MOD_RES (21)..(22)..(23)..(24): Xaa is A or G or is absent
RXGXGEVVMDNSLQEXXXXXXXXXYYLMTLPELETPVXXAKPIK

SEQ ID NO: 10367 - protein, 34 aa, Artificial Sequence; identical to SEQ ID NO: 2903
  GFR-binding peptide
  MOD_RES (33)..(34): Xaa is C or S
  MOD_RES (11)..(12)..(13)..(14)..(15): Xaa is A or G
  MOD_RES (16)..(17)..(18)..(19): Xaa is A or G or is absent

SEQ ID NO: 10368 - protein, 41 aa, Artificial Sequence
  GFR-binding peptide
  MOD_RES (2)..(36)..(37): Xaa is C or S
  MOD_RES (14)..(15)..(16)..(17)..(18): Xaa is A or G
  MOD_RES (19)..(20)..(21)..(22): Xaa is A or G or is absent
GXGEVVMENSLQEXXXXXXXXXYYVMPLPELETPVXXAKPI

SEQ ID NO: 10369 - protein, 33 aa, Artificial Sequence
  GFR-binding peptide
  MOD_RES (1)..(32)..(33): Xaa is C or S
XSRVIMEYQKYVKPKRGVIFLISIPSLAQPVXX

SEQ ID NO: 10370 - protein, 32 aa, Artificial Sequence; identical to SEQ ID NO: 2904
  GFR-binding peptide
  MOD_RES (32)..(32): Xaa is C or S

SEQ ID NO: 10371 - protein, 32 aa, Artificial Sequence; identical to SEQ ID NO: 2906
  GFR-binding peptide
  MOD_RES (32)..(32): Xaa is C or S

SEQ ID NO: 10372 - protein, 38 aa, Artificial Sequence
  GFR-binding peptide
  MOD_RES (1)..(3)..(34)..(35): Xaa is C or S
XKXSRVIMEYQKYVKPKRGVIFLISIPSLAQPVXXPAA

SEQ ID NO: 10373 - protein, 37 aa, Artificial Sequence
  GFR-binding peptide
  MOD_RES (1)..(33)..(34): Xaa is C or S
XGEVVMDEYQKYVVKENEDIFLMSIPSLETPVXXAKP

SEQ ID NO: 10374 - protein, 35 aa, Artificial Sequence; identical to SEQ ID NO: 2911
  GFR-binding peptide
  MOD_RES (31)..(32): Xaa is C or S

SEQ ID NO: 10375 - protein, 39 aa, Artificial Sequence; identical to SEQ ID NO: 2912
  GFR-binding peptide
  MOD_RES (33)..(34): Xaa is C or S
  MOD_RES (11)..(12)..(13)..(14)..(15): Xaa is A or G
  MOD_RES (16)..(17)..(18)..(19): Xaa is A or G or is absent

SEQ ID NO: 10376 - protein, 36 aa, Artificial Sequence
  GFR-binding peptide
  MOD_RES (31)..(32): Xaa is C or S
EVVMDRYKKLVVNNASDFYLISIANLRTPVXXTPPT

SEQ ID NO: 10377 - protein, 38 aa, Artificial Sequence
  GFR-binding peptide
  MOD_RES (1)..(3)..(35): Xaa is C or S
XGXSRVVMNNSLQEIVNSSDDYYVVPLPELKTPAXTPK

SEQ ID NO: 10378 - protein, 39 aa, Artificial Sequence
  GFR-binding peptide
  MOD_RES (2)..(4)..(36)..(37): Xaa is C or S
RXGXSEVVMDNSLQEVVNNASDYYLITLPELRTPVXXTP

SEQ ID NO: 10379 - protein, 42 aa, Artificial Sequence; identical to SEQ ID NO: 2913
  GFR-binding peptide
  MOD_RES (2)..(4)..(37)..(38): Xaa is C or S
  MOD_RES (15)..(16)..(17)..(18)..(19): Xaa is A or G
  MOD_RES (20)..(21)..(22)..(23): Xaa is A or G or is absent

SEQ ID NO: 10380 - protein, 42 aa, Artificial Sequence
  GFR-binding peptide
  MOD_RES (2)..(4)..(36)..(37): Xaa is C or S
HXGXSRVVMNEYQKYIVNSSDDIFLVSIPSLKTPAXXPKPVY

SEQ ID NO: 10381 - protein, 38 aa, Artificial Sequence
  GFR-binding peptide
  MOD_RES (1)..(3)..(35)..(36): Xaa is C or S
XGXGEVVMENSLQEVVKDYEDYYLMTLPELETPVXXAK

SEQ ID NO: 10382 - protein, 38 aa, Artificial Sequence; identical to SEQ ID NO: 2914
  GFR-binding peptide
  MOD_RES (1)..(3)..(37)..(38): Xaa is C or S
  MOD_RES (15)..(16)..(17)..(18)..(19): Xaa is A or G
  MOD_RES (20)..(21)..(22)..(23): Xaa is A or G or is absent

SEQ ID NO: 10383 - protein, 35 aa, Artificial Sequence
  GFR-binding peptide
  MOD_RES (2)..(2): Xaa is C or S
  MOD_RES (14)..(15)..(16)..(17)..(18): Xaa is A or G
  MOD_RES (19)..(20)..(21)..(22): Xaa is A or G or is absent
GXSEVVMDRYKKLXXXXXXXXXFYLISIANLRTPV

SEQ ID NO: 10384 - protein, 35 aa, Artificial Sequence; identical to SEQ ID NO: 2918
  GFR-binding peptide
  MOD_RES (33)..(34): Xaa is C or S
  MOD_RES (11)..(12)..(13)..(14)..(15): Xaa is A or G
  MOD_RES (16)..(17)..(18)..(19): Xaa is A or G or is absent

SEQ ID NO: 10385 - protein, 40 aa, Artificial Sequence; identical to SEQ ID NO: 2919
  GFR-binding peptide
  MOD_RES (1)..(35)..(36): Xaa is C or S
  MOD_RES (13)..(14)..(15)..(16)..(17): Xaa is A or G
  MOD_RES (18)..(19)..(20)..(21): Xaa is A or G or is absent

SEQ ID NO: 10386 - protein, 37 aa, Artificial Sequence; identical to SEQ ID NO: 2920
  GFR-binding peptide
  MOD_RES (32)..(33): Xaa is C or S

SEQ ID NO: 10387 - protein, 42 aa, Artificial Sequence
  GFR-binding peptide
  MOD_RES (2)..(4)..(36): Xaa is C or S
HXGXSRVVMNEYQKYIVNSSDDIFLVSIPSLKTPAXTPKTVH

SEQ ID NO: 10388 - protein, 40 aa, Artificial Sequence
  GFR-binding peptide
  MOD_RES (2)..(34)..(35): Xaa is C or S
GXGEVVMEEYQKYVVKDYEDIFLMSIPSLETPVXXAKPIS

SEQ ID NO: 10389 - protein, 40 aa, Artificial Sequence; identical to SEQ ID NO: 2924
  GFR-binding peptide
  MOD_RES (2)..(4)..(37)..(38): Xaa is C or S
  MOD_RES (15)..(16)..(17)..(18)..(19): Xaa is A or G
  MOD_RES (20)..(21)..(22)..(23): Xaa is A or G or is absent

SEQ ID NO: 10390 - protein, 38 aa, Artificial Sequence
  GFR-binding peptide
  MOD_RES (1)..(32)..(33): Xaa is C or S
XSKVVMNSLQEVKPTRGVYYLITLPELDQPVXXPSASA

SEQ ID NO: 10391 - protein, 40 aa, Artificial Sequence; identical to SEQ ID NO: 2929
  GFR-binding peptide
  MOD_RES (1)..(3)..(34)..(35): Xaa is C or S

SEQ ID NO: 10392 - protein, 41 aa, Artificial Sequence
  GFR-binding peptide
  MOD_RES (1)..(3)..(37)..(38): Xaa is C or S
  MOD_RES (15)..(16)..(17)..(18)..(19): Xaa is A or G
  MOD_RES (20)..(21)..(22)..(23): Xaa is A or G or is absent
XGXSEVVMDQYNKLXXXXXXXXXLYLISIASLRTPVXXTPP

SEQ ID NO: 10393 - protein, 33 aa, Artificial Sequence
  GFR-binding peptide
  MOD_RES (2)..(2): Xaa is C or S
GXSRVVMNNSLQEIVNSSDDYYVVPLPELKTPA

SEQ ID NO: 10394 - protein, 37 aa, Artificial Sequence; identical to SEQ ID NO: 2931
  GFR-binding peptide
  MOD_RES (2)..(4): Xaa is C or S
  MOD_RES (16)..(17)..(18)..(19)..(20): Xaa is A or G
  MOD_RES (21)..(22)..(23)..(24): Xaa is A or G or is absent

SEQ ID NO: 10395 - protein, 39 aa, Artificial Sequence
  GFR-binding peptide
  MOD_RES (2)..(4)..(38): Xaa is C or S
  MOD_RES (16)..(17)..(18)..(19)..(20): Xaa is A or G
  MOD_RES (21)..(22)..(23)..(24): Xaa is A or G or is absent
HXGXSRVVMNNSLQEXXXXXXXXXYYVVPLPELKTPAXT

SEQ ID NO: 10396 - protein, 38 aa, Artificial Sequence
  GFR-binding peptide
  MOD_RES (1)..(3)..(37)..(38): Xaa is C or S
  MOD_RES (15)..(16)..(17)..(18)..(19): Xaa is A or G
  MOD_RES (20)..(21)..(22)..(23): Xaa is A or G or is absent
XGXGEVVMENSLQEXXXXXXXXXYYVMPLPELETPVXX

SEQ ID NO: 10397 - protein, 36 aa, Artificial Sequence
  GFR-binding peptide
  MOD_RES (1)..(3)..(34)..(35): Xaa is C or S
XKXSRVIMNSLQEVKPKRGVYYVIPLPELAQPVXXP

SEQ ID NO: 10398 - protein, 39 aa, Artificial Sequence
  GFR-binding peptide
  MOD_RES (1)..(3)..(34)..(35): Xaa is C or S
XKXSKVVMEYQKYVKPTRGVIFLISIPSLDQPVXXPSAS

SEQ ID NO: 10399 - protein, 38 aa, Artificial Sequence
  GFR-binding peptide
  MOD_RES (1)..(3)..(35)..(36): Xaa is C or S
XGXGEVVMDNSLQEVVKENEDYYVMPLPELETPVXXAK

SEQ ID NO: 10400 - protein, 37 aa, Artificial Sequence; identical to SEQ ID NO: 2935
  GFR-binding peptide
  MOD_RES (2)..(4)..(37): Xaa is C or S
  MOD_RES (15)..(16)..(17)..(18)..(19): Xaa is A or G
  MOD_RES (20)..(21)..(22)..(23): Xaa is A or G or is absent

SEQ ID NO: 10401 - protein, 35 aa, Artificial Sequence
  GFR-binding peptide
  MOD_RES (31)..(32): Xaa is C or S
EVVMENSLQEVVKDYEDYYLMTLPELETPVXXAKP

SEQ ID NO: 10402 - protein, 34 aa, Artificial Sequence
  GFR-binding peptide
  MOD_RES (2)..(34): Xaa is C or S
GXSRVVMNNSLQEIVNSSDDYYLVTLPELKTPAX

SEQ ID NO: 10403 - protein, 35 aa, Artificial Sequence; identical to SEQ ID NO: 2943
  GFR-binding peptide
  MOD_RES (32)..(33): Xaa is C or S

SEQ ID NO: 10404 - protein, 38 aa, Artificial Sequence
  GFR-binding peptide
  MOD_RES (1)..(3)..(37): Xaa is C or S
  MOD_RES (15)..(16)..(17)..(18)..(19): Xaa is A or G
  MOD_RES (20)..(21)..(22)..(23): Xaa is A or G or is absent
XGXSRVVMNEYQKYXXXXXXXXXIFLVSIPSLKTPAXT

SEQ ID NO: 10405 - protein, 38 aa, Artificial Sequence
  GFR-binding peptide
  MOD_RES (1)..(33)..(34): Xaa is C or S
XSEVVMDNSLQEVVNNASDYYLITLPELRTPVXXTPPT

SEQ ID NO: 10406 - protein, 38 aa, Artificial Sequence
  GFR-binding peptide
  MOD_RES (1)..(35)..(36): Xaa is C or S
  MOD_RES (13)..(14)..(15)..(16)..(17): Xaa is A or G
  MOD_RES (18)..(19)..(20)..(21): Xaa is A or G or is absent
XGEVVMENSLQEXXXXXXXXXYYLMTLPELETPVXXAK

SEQ ID NO: 10407 - protein, 32 aa, Artificial Sequence
  GFR-binding peptide
  MOD_RES (11)..(12)..(13)..(14)..(15): Xaa is A or G
  MOD_RES (16)..(17)..(18)..(19): Xaa is A or G or is absent
EVVMDQYNKLXXXXXXXXXLYLISIASLRTPV

SEQ ID NO: 10408 - protein, 37 aa, Artificial Sequence; identical to SEQ ID NO: 2946
  GFR-binding peptide
  MOD_RES (2)..(4)..(36)..(37): Xaa is C or S

SEQ ID NO: 10409 - protein, 34 aa, Artificial Sequence; identical to SEQ ID NO: 2947
  GFR-binding peptide
  MOD_RES (1)..(1): Xaa is C or S
  MOD_RES (13)..(14)..(15)..(16)..(17): Xaa is A or G
  MOD_RES (18)..(19)..(20)..(21): Xaa is A or G or is absent

SEQ ID NO: 10410 - protein, 38 aa, Artificial Sequence
  GFR-binding peptide
  MOD_RES (1)..(3)..(35)..(36): Xaa is C or S
XGXGEVVMDEYQKYVVKENEDIFLMSIPSLETPVXXAK

SEQ ID NO: 10411 - protein, 35 aa, Artificial Sequence; identical to SEQ ID NO: 2950
  GFR-binding peptide
  MOD_RES (1)..(33)..(34): Xaa is C or S

SEQ ID NO: 10412 - protein, 38 aa, Artificial Sequence; identical to SEQ ID NO: 2952
  GFR-binding peptide
  MOD_RES (1)..(34)..(35): Xaa is C or S
  MOD_RES (12)..(13)..(14)..(15)..(16): Xaa is A or G
  MOD_RES (17)..(18)..(19)..(20): Xaa is A or G or is absent

SEQ ID NO: 10413 - protein, 31 aa, Artificial Sequence; identical to SEQ ID NO: 2956
  GFR-binding peptide
  MOD_RES (31)..(31): Xaa is C or S

SEQ ID NO: 10414 - protein, 33 aa, Artificial Sequence
  GFR-binding peptide
  MOD_RES (33)..(33): Xaa is C or S
  MOD_RES (11)..(12)..(13)..(14)..(15): Xaa is A or G
  MOD_RES (16)..(17)..(18)..(19): Xaa is A or G or is absent
SRVIMEYQKYXXXXXXXXXIFLISIPSLAQPVX

SEQ ID NO: 10415 - protein, 36 aa, Artificial Sequence
  GFR-binding peptide
  MOD_RES (1)..(35)..(36): Xaa is C or S
  MOD_RES (13)..(14)..(15)..(16)..(17): Xaa is A or G
  MOD_RES (18)..(19)..(20)..(21): Xaa is A or G or is absent
XARVVMNEYQKYXXXXXXXXXIFLVSIPSLQTPAXX

SEQ ID NO: 10416 - protein, 31 aa, Artificial Sequence; identical to SEQ ID NO: 2959
  GFR-binding peptide
  MOD_RES (31)..(31): Xaa is C or S

SEQ ID NO: 10417 - protein, 32 aa, Artificial Sequence
  GFR-binding peptide
  MOD_RES (11)..(12)..(13)..(14)..(15): Xaa is A or G
  MOD_RES (16)..(17)..(18)..(19): Xaa is A or G or is absent
RVVMNEYQKYXXXXXXXXXIFLVSIPSLKTPA

SEQ ID NO: 10418 - protein, 36 aa, Artificial Sequence; identical to SEQ ID NO: 2967
  GFR-binding peptide
  MOD_RES (33)..(34): Xaa is C or S
  MOD_RES (11)..(12)..(13)..(14)..(15): Xaa is A or G
  MOD_RES (16)..(17)..(18)..(19): Xaa is A or G or is absent

SEQ ID NO: 10419 - protein, 33 aa, Artificial Sequence
  GFR-binding peptide
  MOD_RES (1)..(33): Xaa is C or S
XSRVVMNNSLQEIVNSSDDYYVVPLPELKTPAX

SEQ ID NO: 10420 - protein, 41 aa, Artificial Sequence; identical to SEQ ID NO: 2968
  GFR-binding peptide
  MOD_RES (2)..(4)..(36)..(37): Xaa is C or S

SEQ ID NO: 10421 - protein, 40 aa, Artificial Sequence
  GFR-binding peptide
  MOD_RES (2)..(4)..(37)..(38): Xaa is C or S
  MOD_RES (15)..(16)..(17)..(18)..(19): Xaa is A or G
  MOD_RES (20)..(21)..(22)..(23): Xaa is A or G or is absent
SXKXSRVIMNSLQEXXXXXXXXXYYVIPLPELAQPVXXPA

SEQ ID NO: 10422 - protein, 38 aa, Artificial Sequence
  GFR-binding peptide
  MOD_RES (33)..(33): Xaa is C or S
  MOD_RES (11)..(12)..(13)..(14)..(15): Xaa is A or G
  MOD_RES (16)..(17)..(18)..(19): Xaa is A or G or is absent
RVVMNNSLQEXXXXXXXXXYYLVTLPELKTPAXTPKTV

SEQ ID NO: 10423 - protein, 39 aa, Artificial Sequence
  GFR-binding peptide
  MOD_RES (1)..(33)..(34): Xaa is C or S
XGEVVMENSLQEVVKDYEDYYLMTLPELETPVXXAKPIS

SEQ ID NO: 10424 - protein, 36 aa, Artificial Sequence
  GFR-binding peptide
  MOD_RES (32)..(33): Xaa is C or S
ARVVMNNSLQEIVNSSDDYYVVPLPELQTPAXXPKP

SEQ ID NO: 10425 - protein, 42 aa, Artificial Sequence
  GFR-binding peptide
  MOD_RES (2)..(4)..(38)..(39): Xaa is C or S
  MOD_RES (16)..(17)..(18)..(19)..(20): Xaa is A or G
  MOD_RES (21)..(22)..(23)..(24): Xaa is A or G or is absent
RXGXGEVVMENSLQEXXXXXXXXXYYVMPLPELETPVXXAKP

SEQ ID NO: 10426 - protein, 34 aa, Artificial Sequence
  GFR-binding peptide
  MOD_RES (2)..(33)..(34): Xaa is C or S
KXSRVIMNSLQEVKPKRGVYYVIPLPELAQPVXX

SEQ ID NO: 10427 - protein, 32 aa, Artificial Sequence
  GFR-binding peptide
  MOD_RES (11)..(12)..(13)..(14)..(15): Xaa is A or G
  MOD_RES (16)..(17)..(18)..(19): Xaa is A or G or is absent
SKVIMEYQKYXXXXXXXXXIFLISIPSLDQSV

SEQ ID NO: 10428 - protein, 40 aa, Artificial Sequence
  GFR-binding peptide
  MOD_RES (2)..(4)..(36)..(37): Xaa is C or S
RXGXGEVVMDNSLQEVVKENEDYYVMPLPELETPVXXAKP

SEQ ID NO: 10429 - protein, 39 aa, Artificial Sequence
  GFR-binding peptide
  MOD_RES (2)..(4)..(37)..(38): Xaa is C or S
  MOD_RES (15)..(16)..(17)..(18)..(19): Xaa is A or G
  MOD_RES (20)..(21)..(22)..(23): Xaa is A or G or is absent
SXKXSRVIMNSLQEXXXXXXXXXYYLITLPELAQPVXXP

SEQ ID NO: 10430 - protein, 35 aa, Artificial Sequence
  GFR-binding peptide
  MOD_RES (2)..(4)..(35): Xaa is C or S
SXKXSKVVMNSLQEVKPTRGVYYVIPLPELDQPVX

SEQ ID NO: 10431 - protein, 38 aa, Artificial Sequence
  GFR-binding peptide
  MOD_RES (33)..(34): Xaa is C or S
  MOD_RES (11)..(12)..(13)..(14)..(15): Xaa is A or G
  MOD_RES (16)..(17)..(18)..(19): Xaa is A or G or is absent
EVVMDEYQKYXXXXXXXXXIFLISIPSLRTPVXXTPPT

SEQ ID NO: 10432 - protein, 38 aa, Artificial Sequence; identical to SEQ ID NO: 2976
  GFR-binding peptide
  MOD_RES (2)..(4)..(37)..(38): Xaa is C or S
  MOD_RES (15)..(16)..(17)..(18)..(19): Xaa is A or G
  MOD_RES (20)..(21)..(22)..(23): Xaa is A or G or is absent

SEQ ID NO: 10433 - protein, 36 aa, Artificial Sequence
  GFR-binding peptide
  MOD_RES (32)..(33): Xaa is C or S
SEVVMDRYKKLVVNNASDFYLISIANLRTPVXXTPP

SEQ ID NO: 10434 - protein, 34 aa, Artificial Sequence
  GFR-binding peptide
  MOD_RES (2)..(4): Xaa is C or S
SXKXSRVIMNSLQEVKPKRGVYYLITLPELAQPV

SEQ ID NO: 10435 - protein, 40 aa, Artificial Sequence; identical to SEQ ID NO: 2983
  GFR-binding peptide
  MOD_RES (1)..(3)..(34)..(35): Xaa is C or S

SEQ ID NO: 10436 - protein, 37 aa, Artificial Sequence
  GFR-binding peptide
  MOD_RES (2)..(4)..(37): Xaa is C or S
  MOD_RES (15)..(16)..(17)..(18)..(19): Xaa is A or G
  MOD_RES (20)..(21)..(22)..(23): Xaa is A or G or is absent
SXKXSRVIMNSLQEXXXXXXXXXYYLITLPELAQPVX

SEQ ID NO: 10437 - protein, 30 aa, Artificial Sequence; identical to SEQ ID NO: 2986
  GFR-binding peptide

SEQ ID NO: 10438 - protein, 37 aa, Artificial Sequence
  GFR-binding peptide
  MOD_RES (2)..(4): Xaa is C or S
  MOD_RES (16)..(17)..(18)..(19)..(20): Xaa is A or G
  MOD_RES (21)..(22)..(23)..(24): Xaa is A or G or is absent
RXGXGEVVMENSLQEXXXXXXXXXYYVMPLPELETPV

SEQ ID NO: 10439 - protein, 39 aa, Artificial Sequence; identical to SEQ ID NO: 2987
  GFR-binding peptide
  MOD_RES (34)..(34): Xaa is C or S
  MOD_RES (12)..(13)..(14)..(15)..(16): Xaa is A or G
  MOD_RES (17)..(18)..(19)..(20): Xaa is A or G or is absent

SEQ ID NO: 10440 - protein, 40 aa, Artificial Sequence; identical to SEQ ID NO: 2989
  GFR-binding peptide
  MOD_RES (1)..(35)..(36): Xaa is C or S
  MOD_RES (13)..(14)..(15)..(16)..(17): Xaa is A or G
  MOD_RES (18)..(19)..(20)..(21): Xaa is A or G or is absent

SEQ ID NO: 10441 - protein, 33 aa, Artificial Sequence
  GFR-binding peptide
  MOD_RES (2)..(2): Xaa is C or S
GXSEVVMDNSLQEVVNNASDYYVIPLPELRTPV

SEQ ID NO: 10442 - protein, 35 aa, Artificial Sequence
  GFR-binding peptide
  MOD_RES (1)..(33)..(34): Xaa is C or S
XGEVVMDNSLQEVVKENEDYYVMPLPELETPVXXA

SEQ ID NO: 10443 - protein, 40 aa, Artificial Sequence
  GFR-binding peptide
  MOD_RES (2)..(4)..(36)..(37): Xaa is C or S
HXGXSRVVMNEYQKYIVNSSDDIFLVSIPSLKTPAXXPKP

SEQ ID NO: 10444 - protein, 32 aa, Artificial Sequence
  GFR-binding peptide
  MOD_RES (2)..(2): Xaa is C or S
KXSKVVMEYQKYVKPTRGVIFLISIPSLDQPV

SEQ ID NO: 10445 - protein, 36 aa, Artificial Sequence
  GFR-binding peptide
  MOD_RES (2)..(35)..(36): Xaa is C or S
  MOD_RES (13)..(14)..(15)..(16)..(17): Xaa is A or G
  MOD_RES (18)..(19)..(20)..(21): Xaa is A or G or is absent
KXSKVVMNSLQEXXXXXXXXXYYVIPLPELDQPVXX

SEQ ID NO: 10446 - protein, 36 aa, Artificial Sequence
  GFR-binding peptide
  MOD_RES (1)..(35)..(36): Xaa is C or S
  MOD_RES (13)..(14)..(15)..(16)..(17): Xaa is A or G
  MOD_RES (18)..(19)..(20)..(21): Xaa is A or G or is absent
XSEVVMDRYKKLXXXXXXXXXFYLISIANLRTPVXX

SEQ ID NO: 10447 - protein, 37 aa, Artificial Sequence
  GFR-binding peptide
  MOD_RES (2)..(34)..(35): Xaa is C or S
GXSEVVMDEYQKYVVNNASDIFLISIPSLRTPVXXTP

SEQ ID NO: 10448 - protein, 34 aa, Artificial Sequence
  GFR-binding peptide
  MOD_RES (33)..(34): Xaa is C or S
  MOD_RES (11)..(12)..(13)..(14)..(15): Xaa is A or G
  MOD_RES (16)..(17)..(18)..(19): Xaa is A or G or is absent
EVVMDRYKKLXXXXXXXXXFYLISIANLRTPVXX

SEQ ID NO: 10449 - protein, 33 aa, Artificial Sequence; identical to SEQ ID NO: 2995
  GFR-binding peptide
  MOD_RES (1)..(32)..(33): Xaa is C or S

SEQ ID NO: 10450 - protein, 39 aa, Artificial Sequence
  GFR-binding peptide
  MOD_RES (1)..(34)..(35): Xaa is C or S
  MOD_RES (12)..(13)..(14)..(15)..(16): Xaa is A or G
  MOD_RES (17)..(18)..(19)..(20): Xaa is A or G or is absent
XSRVIMNSLQEXXXXXXXXXYYVIPLPELAQPVXXPAAS

SEQ ID NO: 10451 - protein, 38 aa, Artificial Sequence; identical to SEQ ID NO: 2999
  GFR-binding peptide
  MOD_RES (2)..(4)..(38): Xaa is C or S
  MOD_RES (16)..(17)..(18)..(19)..(20): Xaa is A or G
  MOD_RES (21)..(22)..(23)..(24): Xaa is A or G or is absent

SEQ ID NO: 10452 - protein, 38 aa, Artificial Sequence; identical to SEQ ID NO: 3000
  GFR-binding peptide
  MOD_RES (1)..(35)..(36): Xaa is C or S
  MOD_RES (13)..(14)..(15)..(16)..(17): Xaa is A or G
  MOD_RES (18)..(19)..(20)..(21): Xaa is A or G or is absent

SEQ ID NO: 10453 - protein, 35 aa, Artificial Sequence; identical to SEQ ID NO: 3004
  GFR-binding peptide
  MOD_RES (1)..(34)..(35): Xaa is C or S
  MOD_RES (12)..(13)..(14)..(15)..(16): Xaa is A or G
  MOD_RES (17)..(18)..(19)..(20): Xaa is A or G or is absent

SEQ ID NO: 10454 - protein, 36 aa, Artificial Sequence
  GFR-binding peptide
  MOD_RES (34)..(35): Xaa is C or S
  MOD_RES (12)..(13)..(14)..(15)..(16): Xaa is A or G
  MOD_RES (17)..(18)..(19)..(20): Xaa is A or G or is absent
SEVVMDNSLQEXXXXXXXXXYYVIPLPELRTPVXXT

SEQ ID NO: 10455 - protein, 36 aa, Artificial Sequence; identical to SEQ ID NO: 3005
  GFR-binding peptide
  MOD_RES (33)..(33): Xaa is C or S
  MOD_RES (11)..(12)..(13)..(14)..(15): Xaa is A or G
  MOD_RES (16)..(17)..(18)..(19): Xaa is A or G or is absent

SEQ ID NO: 10456 - protein, 37 aa, Artificial Sequence; identical to SEQ ID NO: 3008
  GFR-binding peptide
  MOD_RES (1)..(35)..(36): Xaa is C or S
  MOD_RES (13)..(14)..(15)..(16)..(17): Xaa is A or G
  MOD_RES (18)..(19)..(20)..(21): Xaa is A or G or is absent

SEQ ID NO: 10457 - protein, 33 aa, Artificial Sequence
  GFR-binding peptide
  MOD_RES (2)..(33): Xaa is C or S
KXSRVIMEYQKYVKPKRGVIFLISIPSLAQPVX

SEQ ID NO: 10458 - protein, 36 aa, Artificial Sequence; identical to SEQ ID NO: 3011
  GFR-binding peptide
  MOD_RES (2)..(34)..(35): Xaa is C or S

SEQ ID NO: 10459 - protein, 36 aa, Artificial Sequence
  GFR-binding peptide
  MOD_RES (32)..(33): Xaa is C or S
SRVVMNEYQKYIVNSSDDIFLVSIPSLKTPAXXPKP

SEQ ID NO: 10460 - protein, 36 aa, Artificial Sequence
  GFR-binding peptide
  MOD_RES (2)..(34)..(35): Xaa is C or S
GXARVVMNEYQKYIVNSSDDIFLVSIPSLQTPAXXP

SEQ ID NO: 10461 - protein, 35 aa, Artificial Sequence
  GFR-binding peptide
  MOD_RES (33)..(34): Xaa is C or S
  MOD_RES (11)..(12)..(13)..(14)..(15): Xaa is A or G
  MOD_RES (16)..(17)..(18)..(19): Xaa is A or G or is absent
SKVIMNSLQEXXXXXXXXXYYVIPLPELDQSVXXP

SEQ ID NO: 10462 - protein, 33 aa, Artificial Sequence; identical to SEQ ID NO: 3013
  GFR-binding peptide
  MOD_RES (2)..(2): Xaa is C or S

SEQ ID NO: 10463 - protein, 42 aa, Artificial Sequence
  GFR-binding peptide
  MOD_RES (2)..(4)..(36)..(37): Xaa is C or S
HXGXSRVVMNNSLQEIVNSSDDYYVVPLPELKTPAXXPKPVY

SEQ ID NO: 10464 - protein, 37 aa, Artificial Sequence; identical to SEQ ID NO: 3014
  GFR-binding peptide
  MOD_RES (1)..(3)..(37): Xaa is C or S
  MOD_RES (15)..(16)..(17)..(18)..(19): Xaa is A or G
  MOD_RES (20)..(21)..(22)..(23): Xaa is A or G or is absent

SEQ ID NO: 10465 - protein, 34 aa, Artificial Sequence
  GFR-binding peptide
  MOD_RES (32)..(32): Xaa is C or S
SRVVMNEYQKYIVNSSDDIFLVSIPSLKTPAXTP

SEQ ID NO: 10466 - protein, 39 aa, Artificial Sequence
  GFR-binding peptide
  MOD_RES (2)..(34): Xaa is C or S
GXSRVVMNNSLQEIVNSSDDYYVVPLPELKTPAXTPKTV

SEQ ID NO: 10467 - protein, 34 aa, Artificial Sequence
  GFR-binding peptide
  MOD_RES (33)..(34): Xaa is C or S
  MOD_RES (11)..(12)..(13)..(14)..(15): Xaa is A or G
  MOD_RES (16)..(17)..(18)..(19): Xaa is A or G or is absent
SRVIMNSLQEXXXXXXXXXYYLITLPELAQPVXX

SEQ ID NO: 10468 - protein, 38 aa, Artificial Sequence; identical to SEQ ID NO: 3018
  GFR-binding peptide
  MOD_RES (34)..(35): Xaa is C or S
  MOD_RES (12)..(13)..(14)..(15)..(16): Xaa is A or G
  MOD_RES (17)..(18)..(19)..(20): Xaa is A or G or is absent

SEQ ID NO: 10469 - protein, 35 aa, Artificial Sequence
  GFR-binding peptide
  MOD_RES (2)..(4): Xaa is C or S
RXGXGEVVMENSLQEVVKDYEDYYVMPLPELETPV

SEQ ID NO: 10470 - protein, 36 aa, Artificial Sequence
  GFR-binding peptide
  MOD_RES (33)..(34): Xaa is C or S
  MOD_RES (11)..(12)..(13)..(14)..(15): Xaa is A or G
  MOD_RES (16)..(17)..(18)..(19): Xaa is A or G or is absent
EVVMDEYQKYXXXXXXXXXIFLISIPSLRTPVXXTP

SEQ ID NO: 10471 - protein, 36 aa, Artificial Sequence
  GFR-binding peptide
  MOD_RES (2)..(4)..(36): Xaa is C or S
HXGXARVVMNNSLQEIVNSSDDYYLVTLPELQTPAX

SEQ ID NO: 10472 - protein, 43 aa, Artificial Sequence; identical to SEQ ID NO: 3020
  GFR-binding peptide
  MOD_RES (2)..(4)..(37)..(38): Xaa is C or S
  MOD_RES (15)..(16)..(17)..(18)..(19): Xaa is A or G
  MOD_RES (20)..(21)..(22)..(23): Xaa is A or G or is absent

SEQ ID NO: 10473 - protein, 36 aa, Artificial Sequence
  GFR-binding peptide
  MOD_RES (34)..(35): Xaa is C or S
  MOD_RES (12)..(13)..(14)..(15)..(16): Xaa is A or G
  MOD_RES (17)..(18)..(19)..(20): Xaa is A or G or is absent
ARVVMNNSLQEXXXXXXXXXYYVVPLPELQTPAXXP

SEQ ID NO: 10474 - protein, 37 aa, Artificial Sequence
  GFR-binding peptide
  MOD_RES (31)..(32): Xaa is C or S
RVVMNNSLQEIVNSSDDYYVVPLPELQTPAXXPKPVT

SEQ ID NO: 10475 - protein, 36 aa, Artificial Sequence
  GFR-binding peptide
  MOD_RES (32)..(33): Xaa is C or S
ARVVMNEYQKYIVNSSDDIFLVSIPSLQTPAXXPKP

SEQ ID NO: 10476 - protein, 40 aa, Artificial Sequence; identical to SEQ ID NO: 3025
  GFR-binding peptide
  MOD_RES (2)..(4)..(37)..(38): Xaa is C or S
  MOD_RES (15)..(16)..(17)..(18)..(19): Xaa is A or G
  MOD_RES (20)..(21)..(22)..(23): Xaa is A or G or is absent

SEQ ID NO: 10477 - protein, 35 aa, Artificial Sequence; identical to SEQ ID NO: 3026
  GFR-binding peptide
  MOD_RES (1)..(3)..(35): Xaa is C or S

SEQ ID NO: 10478 - protein, 36 aa, Artificial Sequence
  GFR-binding peptide
  MOD_RES (31)..(32): Xaa is C or S
RVVMNEYQKYIVNSSDDIFLVSIPSLKTPAXXPKPV

SEQ ID NO: 10479 - protein, 35 aa, Artificial Sequence; identical to SEQ ID NO: 3028
  GFR-binding peptide
  MOD_RES (32)..(33): Xaa is C or S

SEQ ID NO: 10480 - protein, 33 aa, Artificial Sequence
  GFR-binding peptide
  MOD_RES (2)..(2): Xaa is C or S
GXGEVVMENSLQEVVKDYEDYYLMTLPELETPV

SEQ ID NO: 10481 - protein, 35 aa, Artificial Sequence; identical to SEQ ID NO: 3031
  GFR-binding peptide
  MOD_RES (1)..(34)..(35): Xaa is C or S
  MOD_RES (12)..(13)..(14)..(15)..(16): Xaa is A or G
  MOD_RES (17)..(18)..(19)..(20): Xaa is A or G or is absent

SEQ ID NO: 10482 - protein, 34 aa, Artificial Sequence
  GFR-binding peptide
  MOD_RES (1)..(33)..(34): Xaa is C or S
XSRVVMNNSLQEIVNSSDDYYLVTLPELKTPAXX

SEQ ID NO: 10483 - protein, 35 aa, Artificial Sequence; identical to SEQ ID NO: 3033
  GFR-binding peptide
  MOD_RES (2)..(33)..(34): Xaa is C or S

SEQ ID NO: 10484 - protein, 32 aa, Artificial Sequence
  GFR-binding peptide
  MOD_RES (11)..(12)..(13)..(14)..(15): Xaa is A or G
  MOD_RES (16)..(17)..(18)..(19): Xaa is A or G or is absent
EVVMDEYQKYXXXXXXXXXIFLISIPSLRTPV

SEQ ID NO: 10485 - protein, 37 aa, Artificial Sequence
  GFR-binding peptide
  MOD_RES (2)..(34): Xaa is C or S
GXSRVVMNNSLQEIVNSSDDYYVVPLPELKTPAXTPK

SEQ ID NO: 10486 - protein, 40 aa, Artificial Sequence
  GFR-binding peptide
  MOD_RES (1)..(3)..(35)..(36): Xaa is C or S
XGXSEVVMDEYQKYVVNNASDIFLISIPSLRTPVXXTPPT

SEQ ID NO: 10487 - protein, 37 aa, Artificial Sequence
  GFR-binding peptide
  MOD_RES (1)..(3)..(37): Xaa is C or S
  MOD_RES (15)..(16)..(17)..(18)..(19): Xaa is A or G
  MOD_RES (20)..(21)..(22)..(23): Xaa is A or G or is absent
XGXARVVMNEYQKYXXXXXXXXXIFLVSIPSLQTPAX

SEQ ID NO: 10488 - protein, 37 aa, Artificial Sequence
  GFR-binding peptide
  MOD_RES (32)..(33): Xaa is C or S
GEVVMDNSLQEVVKENEDYYLMTLPELETPVXXAKPI

SEQ ID NO: 10489 - protein, 36 aa, Artificial Sequence
  GFR-binding peptide
  MOD_RES (1)..(3)..(36): Xaa is C or S
  MOD_RES (14)..(15)..(16)..(17)..(18): Xaa is A or G
  MOD_RES (19)..(20)..(21)..(22): Xaa is A or G or is absent
XKXSKVIMNSLQEXXXXXXXXXYYVIPLPELDQSVX

SEQ ID NO: 10490 - protein, 38 aa, Artificial Sequence
  GFR-binding peptide
  MOD_RES (33)..(33): Xaa is C or S
  MOD_RES (11)..(12)..(13)..(14)..(15): Xaa is A or G
  MOD_RES (16)..(17)..(18)..(19): Xaa is A or G or is absent
RVVMNNSLQEXXXXXXXXXYYVVPLPELKTPAXTPKTV

SEQ ID NO: 10491 - protein, 36 aa, Artificial Sequence
  GFR-binding peptide
  MOD_RES (1)..(35)..(36): Xaa is C or S
  MOD_RES (13)..(14)..(15)..(16)..(17): Xaa is A or G
  MOD_RES (18)..(19)..(20)..(21): Xaa is A or G or is absent
XSRVVMNNSLQEXXXXXXXXXYYVVPLPELKTPAXX

SEQ ID NO: 10492 - protein, 39 aa, Artificial Sequence; identical to SEQ ID NO: 3039
  GFR-binding peptide
  MOD_RES (2)..(35)..(36): Xaa is C or S
  MOD_RES (13)..(14)..(15)..(16)..(17): Xaa is A or G
  MOD_RES (18)..(19)..(20)..(21): Xaa is A or G or is absent

SEQ ID NO: 10493 - protein, 38 aa, Artificial Sequence; identical to SEQ ID NO: 3041
  GFR-binding peptide
  MOD_RES (1)..(3)..(35): Xaa is C or S

SEQ ID NO: 10494 - protein, 35 aa, Artificial Sequence; identical to SEQ ID NO: 3042
  GFR-binding peptide
  MOD_RES (32)..(33): Xaa is C or S

SEQ ID NO: 10495 - protein, 33 aa, Artificial Sequence
  GFR-binding peptide
  MOD_RES (2)..(33): Xaa is C or S
KXSRVIMNSLQEVKPKRGVYYVIPLPELAQPVX

SEQ ID NO: 10496 - protein, 44 aa, Artificial Sequence
  GFR-binding peptide
  MOD_RES (2)..(4)..(38)..(39): Xaa is C or S
  MOD_RES (16)..(17)..(18)..(19)..(20): Xaa is A or G
  MOD_RES (21)..(22)..(23)..(24): Xaa is A or G or is absent
RXGXSEVVMDEYQKYXXXXXXXXXIFLISIPSLRTPVXXTPPTS

SEQ ID NO: 10497 - protein, 35 aa, Artificial Sequence
  GFR-binding peptide
  MOD_RES (1)..(3)..(35): Xaa is C or S
XGXARVVMNEYQKYIVNSSDDIFLVSIPSLQTPAX

SEQ ID NO: 10498 - protein, 39 aa, Artificial Sequence
  GFR-binding peptide
  MOD_RES (1)..(3)..(36)..(37): Xaa is C or S
  MOD_RES (14)..(15)..(16)..(17)..(18): Xaa is A or G
  MOD_RES (19)..(20)..(21)..(22): Xaa is A or G or is absent
XKXSRVIMNSLQEXXXXXXXXXYYLITLPELAQPVXXPA

SEQ ID NO: 10499 - protein, 35 aa, Artificial Sequence
  GFR-binding peptide
  MOD_RES (2)..(4): Xaa is C or S
HXGXARVVMNEYQKYIVNSSDDIFLVSIPSLQTPA

SEQ ID NO: 10500 - protein, 37 aa, Artificial Sequence; identical to SEQ ID NO: 3046
  GFR-binding peptide
  MOD_RES (2)..(33)..(34): Xaa is C or S

SEQ ID NO: 10501 - protein, 37 aa, Artificial Sequence
  GFR-binding peptide
  MOD_RES (33)..(34): Xaa is C or S
  MOD_RES (11)..(12)..(13)..(14)..(15): Xaa is A or G
  MOD_RES (16)..(17)..(18)..(19): Xaa is A or G or is absent
SKVVMEYQKYXXXXXXXXXIFLISIPSLDQPVXXPSA

SEQ ID NO: 10502 - protein, 39 aa, Artificial Sequence
  GFR-binding peptide
  MOD_RES (1)..(3)..(36)..(37): Xaa is C or S
  MOD_RES (14)..(15)..(16)..(17)..(18): Xaa is A or G
  MOD_RES (19)..(20)..(21)..(22): Xaa is A or G or is absent
XKXSKVVMEYQKYXXXXXXXXXIFLISIPSLDQPVXXPS

SEQ ID NO: 10503 - protein, 39 aa, Artificial Sequence
  GFR-binding peptide
  MOD_RES (1)..(3)..(37)..(38): Xaa is C or S
  MOD_RES (15)..(16)..(17)..(18)..(19): Xaa is A or G
  MOD_RES (20)..(21)..(22)..(23): Xaa is A or G or is absent
XGXSRVVMNNSLQEXXXXXXXXXYYLVTLPELKTPAXXP

SEQ ID NO: 10504 - protein, 34 aa, Artificial Sequence
  GFR-binding peptide
  MOD_RES (31)..(32): Xaa is C or S
SKVVMNSLQEVKPTRGVYYLITLPELDQPVXXPS

SEQ ID NO: 10505 - protein, 41 aa, Artificial Sequence; identical to SEQ ID NO: 3049
  GFR-binding peptide
  MOD_RES (2)..(4)..(35)..(36): Xaa is C or S

SEQ ID NO: 10506 - protein, 33 aa, Artificial Sequence
  GFR-binding peptide
  MOD_RES (33)..(33): Xaa is C or S
  MOD_RES (11)..(12)..(13)..(14)..(15): Xaa is A or G
  MOD_RES (16)..(17)..(18)..(19): Xaa is A or G or is absent
EVVMEEYQKYXXXXXXXXXIFLMSIPSLETPVX

SEQ ID NO: 10507 - protein, 38 aa, Artificial Sequence
  GFR-binding peptide
  MOD_RES (2)..(36)..(37): Xaa is C or S
  MOD_RES (14)..(15)..(16)..(17)..(18): Xaa is A or G
  MOD_RES (19)..(20)..(21)..(22): Xaa is A or G or is absent
GXGEVVMDNSLQEXXXXXXXXXYYLMTLPELETPVXXA

SEQ ID NO: 10508 - protein, 39 aa, Artificial Sequence; identical to SEQ ID NO: 3052
  GFR-binding peptide
  MOD_RES (1)..(35)..(36): Xaa is C or S
  MOD_RES (13)..(14)..(15)..(16)..(17): Xaa is A or G
  MOD_RES (18)..(19)..(20)..(21): Xaa is A or G or is absent

SEQ ID NO: 10509 - protein, 39 aa, Artificial Sequence
  GFR-binding peptide
  MOD_RES (2)..(36)..(37): Xaa is C or S
  MOD_RES (14)..(15)..(16)..(17)..(18): Xaa is A or G
  MOD_RES (19)..(20)..(21)..(22): Xaa is A or G or is absent
GXGEVVMENSLQEXXXXXXXXXYYLMTLPELETPVXXAK

SEQ ID NO: 10510 - protein, 43 aa, Artificial Sequence; identical to SEQ ID NO: 3053
  GFR-binding peptide
  MOD_RES (2)..(4)..(38)..(39): Xaa is C or S
  MOD_RES (16)..(17)..(18)..(19)..(20): Xaa is A or G
  MOD_RES (21)..(22)..(23)..(24): Xaa is A or G or is absent

SEQ ID NO: 10511 - protein, 39 aa, Artificial Sequence
  GFR-binding peptide
  MOD_RES (1)..(3)..(34)..(35): Xaa is C or S
XKXSKVVMNSLQEVKPTRGVYYVIPLPELDQPVXXPSAS

SEQ ID NO: 10512 - protein, 38 aa, Artificial Sequence; identical to SEQ ID NO: 3054
  GFR-binding peptide
  MOD_RES (1)..(3)..(36)..(37): Xaa is C or S
  MOD_RES (14)..(15)..(16)..(17)..(18): Xaa is A or G
  MOD_RES (19)..(20)..(21)..(22): Xaa is A or G or is absent

SEQ ID NO: 10513 - protein, 34 aa, Artificial Sequence
  GFR-binding peptide
  MOD_RES (33)..(34): Xaa is C or S
  MOD_RES (11)..(12)..(13)..(14)..(15): Xaa is A or G
  MOD_RES (16)..(17)..(18)..(19): Xaa is A or G or is absent
EVVMENSLQEXXXXXXXXXYYLMTLPELETPVXX

SEQ ID NO: 10514 - protein, 37 aa, Artificial Sequence; identical to SEQ ID NO: 3057
  GFR-binding peptide
  MOD_RES (34)..(35): Xaa is C or S
  MOD_RES (12)..(13)..(14)..(15)..(16): Xaa is A or G
  MOD_RES (17)..(18)..(19)..(20): Xaa is A or G or is absent

SEQ ID NO: 10515 - protein, 33 aa, Artificial Sequence
  GFR-binding peptide
  MOD_RES (31)..(32): Xaa is C or S
EVVMDNSLQEVVKENEDYYVMPLPELETPVXXA

SEQ ID NO: 10516 - protein, 40 aa, Artificial Sequence
  GFR-binding peptide
  MOD_RES (1)..(34)..(35): Xaa is C or S
  MOD_RES (12)..(13)..(14)..(15)..(16): Xaa is A or G
  MOD_RES (17)..(18)..(19)..(20): Xaa is A or G or is absent
XSKVVMEYQKYXXXXXXXXXIFLISIPSLDQPVXXPSASA

SEQ ID NO: 10517 - protein, 44 aa, Artificial Sequence
  GFR-binding peptide
  MOD_RES (2)..(4)..(38)..(39): Xaa is C or S
  MOD_RES (16)..(17)..(18)..(19)..(20): Xaa is A or G
  MOD_RES (21)..(22)..(23)..(24): Xaa is A or G or is absent
HXGXSRVVMNEYQKYXXXXXXXXXIFLVSIPSLKTPAXXPKPVY

SEQ ID NO: 10518 - protein, 40 aa, Artificial Sequence
  GFR-binding peptide
  MOD_RES (2)..(36): Xaa is C or S
  MOD_RES (14)..(15)..(16)..(17)..(18): Xaa is A or G
  MOD_RES (19)..(20)..(21)..(22): Xaa is A or G or is absent
GXSRVVMNEYQKYXXXXXXXXXIFLVSIPSLKTPAXTPKT

SEQ ID NO: 10519 - protein, 40 aa, Artificial Sequence; identical to SEQ ID NO: 3059
  GFR-binding peptide
  MOD_RES (1)..(3)..(37): Xaa is C or S
  MOD_RES (15)..(16)..(17)..(18)..(19): Xaa is A or G
  MOD_RES (20)..(21)..(22)..(23): Xaa is A or G or is absent

SEQ ID NO: 10520 - protein, 32 aa, Artificial Sequence; identical to SEQ ID NO: 3061
  GFR-binding peptide
  MOD_RES (11)..(12)..(13)..(14)..(15): Xaa is A or G
  MOD_RES (16)..(17)..(18)..(19): Xaa is A or G or is absent

SEQ ID NO: 10521 - protein, 35 aa, Artificial Sequence; identical to SEQ ID NO: 3064
  GFR-binding peptide
  MOD_RES (32)..(33): Xaa is C or S

SEQ ID NO: 10522 - protein, 34 aa, Artificial Sequence
  GFR-binding peptide
  MOD_RES (34)..(34): Xaa is C or S
  MOD_RES (12)..(13)..(14)..(15)..(16): Xaa is A or G
  MOD_RES (17)..(18)..(19)..(20): Xaa is A or G or is absent
GEVVMENSLQEXXXXXXXXXYYVMPLPELETPVX

SEQ ID NO: 10523 - protein, 38 aa, Artificial Sequence
  GFR-binding peptide
  MOD_RES (2)..(36)..(37): Xaa is C or S
  MOD_RES (14)..(15)..(16)..(17)..(18): Xaa is A or G
  MOD_RES (19)..(20)..(21)..(22): Xaa is A or G or is absent
GXSEVVMDNSLQEXXXXXXXXXYYLITLPELRTPVXXT

SEQ ID NO: 10524 - protein, 38 aa, Artificial Sequence
  GFR-binding peptide
  MOD_RES (1)..(3)..(37)..(38): Xaa is C or S
  MOD_RES (15)..(16)..(17)..(18)..(19): Xaa is A or G
  MOD_RES (20)..(21)..(22)..(23): Xaa is A or G or is absent
XGXSRVVMNNSLQEXXXXXXXXXYYLVTLPELKTPAXX

SEQ ID NO: 10525 - protein, 40 aa, Artificial Sequence
  GFR-binding peptide
  MOD_RES (2)..(4)..(37)..(38): Xaa is C or S
  MOD_RES (15)..(16)..(17)..(18)..(19): Xaa is A or G
  MOD_RES (20)..(21)..(22)..(23): Xaa is A or G or is absent
SXKXSRVIMNSLQEXXXXXXXXXYYLITLPELAQPVXXPA

SEQ ID NO: 10526 - protein, 36 aa, Artificial Sequence; identical to SEQ ID NO: 3070
  GFR-binding peptide
  MOD_RES (2)..(34)..(35): Xaa is C or S

SEQ ID NO: 10527 - protein, 32 aa, Artificial Sequence
  GFR-binding peptide
  MOD_RES (31)..(32): Xaa is C or S
SKVVMNSLQEVKPTRGVYYVIPLPELDQPVXX

SEQ ID NO: 10528 - protein, 37 aa, Artificial Sequence
  GFR-binding peptide
  MOD_RES (1)..(3)..(37): Xaa is C or S
  MOD_RES (15)..(16)..(17)..(18)..(19): Xaa is A or G
  MOD_RES (20)..(21)..(22)..(23): Xaa is A or G or is absent
XGXSEVVMDEYQKYXXXXXXXXXIFLISIPSLRTPVX

SEQ ID NO: 10529 - protein, 35 aa, Artificial Sequence
  GFR-binding peptide
  MOD_RES (1)..(34)..(35): Xaa is C or S
  MOD_RES (12)..(13)..(14)..(15)..(16): Xaa is A or G
  MOD_RES (17)..(18)..(19)..(20): Xaa is A or G or is absent
XSKVVMEYQKYXXXXXXXXXIFLISIPSLDQPVXX

SEQ ID NO: 10530 - protein, 31 aa, Artificial Sequence; identical to SEQ ID NO: 3074
  GFR-binding peptide
  MOD_RES (31)..(31): Xaa is C or S

SEQ ID NO: 10531 - protein, 39 aa, Artificial Sequence
  GFR-binding peptide
  MOD_RES (1)..(3)..(37)..(38): Xaa is C or S
  MOD_RES (15)..(16)..(17)..(18)..(19): Xaa is A or G
  MOD_RES (20)..(21)..(22)..(23): Xaa is A or G or is absent
XGXGEVVMDEYQKYXXXXXXXXXIFLMSIPSLETPVXXA

SEQ ID NO: 10532 - protein, 37 aa, Artificial Sequence
  GFR-binding peptide
  MOD_RES (34)..(35): Xaa is C or S
  MOD_RES (12)..(13)..(14)..(15)..(16): Xaa is A or G
  MOD_RES (17)..(18)..(19)..(20): Xaa is A or G or is absent
SEVVMDRYKKLXXXXXXXXXFYLISIANLRTPVXXTP

SEQ ID NO: 10533 - protein, 34 aa, Artificial Sequence
  GFR-binding peptide
  MOD_RES (31)..(32): Xaa is C or S
EVVMEEYQKYVVKDYEDIFLMSIPSLETPVXXAK

SEQ ID NO: 10534 - protein, 41 aa, Artificial Sequence
  GFR-binding peptide
  MOD_RES (1)..(35)..(36): Xaa is C or S
  MOD_RES (13)..(14)..(15)..(16)..(17): Xaa is A or G
  MOD_RES (18)..(19)..(20)..(21): Xaa is A or G or is absent
XARVVMNNSLQEXXXXXXXXXYYLVTLPELQTPAXXPKPVT

SEQ ID NO: 10535 - protein, 36 aa, Artificial Sequence
  GFR-binding peptide
  MOD_RES (31)..(32): Xaa is C or S
SKVVMEYQKYVKPTRGVIFLISIPSLDQPVXXPSAS

SEQ ID NO: 10536 - protein, 38 aa, Artificial Sequence
  GFR-binding peptide
  MOD_RES (2)..(4)..(38): Xaa is C or S
  MOD_RES (16)..(17)..(18)..(19)..(20): Xaa is A or G
  MOD_RES (21)..(22)..(23)..(24): Xaa is A or G or is absent
RXGXSEVVMDEYQKYXXXXXXXXXIFLISIPSLRTPVX

SEQ ID NO: 10537 - protein, 34 aa, Artificial Sequence; identical to SEQ ID NO: 3078
  GFR-binding peptide
  MOD_RES (33)..(34): Xaa is C or S
  MOD_RES (11)..(12)..(13)..(14)..(15): Xaa is A or G
  MOD_RES (16)..(17)..(18)..(19): Xaa is A or G or is absent

SEQ ID NO: 10538 - protein, 32 aa, Artificial Sequence
  GFR-binding peptide
  MOD_RES (1)..(32): Xaa is C or S
XSKVIMNSLQEIKPTKGIYYVIPLPELDQSVX

SEQ ID NO: 10539 - protein, 42 aa, Artificial Sequence
  GFR-binding peptide
  MOD_RES (2)..(4)..(38)..(39): Xaa is C or S
  MOD_RES (16)..(17)..(18)..(19)..(20): Xaa is A or G
  MOD_RES (21)..(22)..(23)..(24): Xaa is A or G or is absent
HXGXSRVVMNNSLQEXXXXXXXXXYYVVPLPELKTPAXXPKP

SEQ ID NO: 10540 - protein, 35 aa, Artificial Sequence; identical to SEQ ID NO: 3082
  GFR-binding peptide
  MOD_RES (1)..(33)..(34): Xaa is C or S

SEQ ID NO: 10541 - protein, 37 aa, Artificial Sequence
  GFR-binding peptide
  MOD_RES (31)..(32): Xaa is C or S
SRVIMEYQKYVKPKRGVIFLISIPSLAQPVXXPAASA

SEQ ID NO: 10542 - protein, 33 aa, Artificial Sequence
  GFR-binding peptide
  MOD_RES (32)..(32): Xaa is C or S
SRVVMNEYQKYIVNSSDDIFLVSIPSLKTPAXT

SEQ ID NO: 10543 - protein, 32 aa, Artificial Sequence
  GFR-binding peptide
  MOD_RES (1)..(1): Xaa is C or S
XSRVVMNNSLQEIVNSSDDYYLVTLPELKTPA

SEQ ID NO: 10544 - protein, 34 aa, Artificial Sequence; identical to SEQ ID NO: 3087
  GFR-binding peptide
  MOD_RES (1)..(32)..(33): Xaa is C or S

SEQ ID NO: 10545 - protein, 35 aa, Artificial Sequence
  GFR-binding peptide
  MOD_RES (2)..(34): Xaa is C or S
GXSRVVMNNSLQEIVNSSDDYYVVPLPELKTPAXT

SEQ ID NO: 10546 - protein, 38 aa, Artificial Sequence; identical to SEQ ID NO: 3088
  GFR-binding peptide
  MOD_RES (1)..(32)..(33): Xaa is C or S

SEQ ID NO: 10547 - protein, 40 aa, Artificial Sequence
  GFR-binding peptide
  MOD_RES (34)..(35): Xaa is C or S
  MOD_RES (12)..(13)..(14)..(15)..(16): Xaa is A or G
  MOD_RES (17)..(18)..(19)..(20): Xaa is A or G or is absent
ARVVMNEYQKYXXXXXXXXXIFLVSIPSLQTPAXXPKPVT

SEQ ID NO: 10548 - protein, 35 aa, Artificial Sequence
  GFR-binding peptide
  MOD_RES (2)..(4): Xaa is C or S
HXGXARVVMNNSLQEIVNSSDDYYLVTLPELQTPA

SEQ ID NO: 10549 - protein, 37 aa, Artificial Sequence
  GFR-binding peptide
  MOD_RES (34)..(35): Xaa is C or S
  MOD_RES (12)..(13)..(14)..(15)..(16): Xaa is A or G
  MOD_RES (17)..(18)..(19)..(20): Xaa is A or G or is absent
GEVVMENSLQEXXXXXXXXXYYLMTLPELETPVXXAK

SEQ ID NO: 10550 - protein, 41 aa, Artificial Sequence
  GFR-binding peptide
  MOD_RES (2)..(36)..(37): Xaa is C or S
  MOD_RES (14)..(15)..(16)..(17)..(18): Xaa is A or G
  MOD_RES (19)..(20)..(21)..(22): Xaa is A or G or is absent
GXARVVMNNSLQEXXXXXXXXXYYLVTLPELQTPAXXPKPV

SEQ ID NO: 10551 - protein, 40 aa, Artificial Sequence
  GFR-binding peptide
  MOD_RES (2)..(36)..(37): Xaa is C or S
  MOD_RES (14)..(15)..(16)..(17)..(18): Xaa is A or G
  MOD_RES (19)..(20)..(21)..(22): Xaa is A or G or is absent
GXARVVMNNSLQEXXXXXXXXXYYVVPLPELQTPAXXPKP

SEQ ID NO: 10552 - protein, 33 aa, Artificial Sequence; identical to SEQ ID NO: 3092
  GFR-binding peptide
  MOD_RES (12)..(13)..(14)..(15)..(16): Xaa is A or G
  MOD_RES (17)..(18)..(19)..(20): Xaa is A or G or is absent

SEQ ID NO: 10553 - protein, 39 aa, Artificial Sequence; identical to SEQ ID NO: 3093
  GFR-binding peptide
  MOD_RES (2)..(4)..(38)..(39): Xaa is C or S
  MOD_RES (16)..(17)..(18)..(19)..(20): Xaa is A or G
  MOD_RES (21)..(22)..(23)..(24): Xaa is A or G or is absent

SEQ ID NO: 10554 - protein, 37 aa, Artificial Sequence
  GFR-binding peptide
  MOD_RES (1)..(34)..(35): Xaa is C or S
  MOD_RES (12)..(13)..(14)..(15)..(16): Xaa is A or G
  MOD_RES (17)..(18)..(19)..(20): Xaa is A or G or is absent
XSRVIMNSLQEXXXXXXXXXYYVIPLPELAQPVXXPA

SEQ ID NO: 10555 - protein, 40 aa, Artificial Sequence
  GFR-binding peptide
  MOD_RES (1)..(3)..(36)..(37): Xaa is C or S
  MOD_RES (14)..(15)..(16)..(17)..(18): Xaa is A or G
  MOD_RES (19)..(20)..(21)..(22): Xaa is A or G or is absent
XKXSRVIMNSLQEXXXXXXXXXYYLITLPELAQPVXXPAA

SEQ ID NO: 10556 - protein, 35 aa, Artificial Sequence
  GFR-binding peptide
  MOD_RES (1)..(3): Xaa is C or S
  MOD_RES (14)..(15)..(16)..(17)..(18): Xaa is A or G
  MOD_RES (19)..(20)..(21)..(22): Xaa is A or G or is absent
XKXSKVIMNSLQEXXXXXXXXXYYVIPLPELDQSV

SEQ ID NO: 10557 - protein, 37 aa, Artificial Sequence
  GFR-binding peptide
  MOD_RES (1)..(32)..(33): Xaa is C or S
XSKVVMNSLQEVKPTRGVYYVIPLPELDQPVXXPSAS

SEQ ID NO: 10558 - protein, 35 aa, Artificial Sequence
  GFR-binding peptide
  MOD_RES (1)..(3)..(34)..(35): Xaa is C or S
XKXSRVIMNSLQEVKPKRGVYYLITLPELAQPVXX

SEQ ID NO: 10559 - protein, 35 aa, Artificial Sequence
  GFR-binding peptide
  MOD_RES (34)..(35): Xaa is C or S
  MOD_RES (12)..(13)..(14)..(15)..(16): Xaa is A or G
  MOD_RES (17)..(18)..(19)..(20): Xaa is A or G or is absent
GEVVMENSLQEXXXXXXXXXYYVMPLPELETPVXX

SEQ ID NO: 10560 - protein, 30 aa, Artificial Sequence
  GFR-binding peptide
SKVVMNSLQEVKPTRGVYYLITLPELDQPV

SEQ ID NO: 10561 - protein, 36 aa, Artificial Sequence
  GFR-binding peptide
  MOD_RES (2)..(4)..(36): Xaa is C or S
RXGXGEVVMENSLQEVVKDYEDYYVMPLPELETPVX

SEQ ID NO: 10562 - protein, 42 aa, Artificial Sequence
  GFR-binding peptide
  MOD_RES (2)..(36)..(37): Xaa is C or S
  MOD_RES (14)..(15)..(16)..(17)..(18): Xaa is A or G
  MOD_RES (19)..(20)..(21)..(22): Xaa is A or G or is absent
GXARVVMNNSLQEXXXXXXXXXYYVVPLPELQTPAXXPKPVT

SEQ ID NO: 10563 - protein, 37 aa, Artificial Sequence; identical to SEQ ID NO: 3101
  GFR-binding peptide
  MOD_RES (1)..(3)..(35)..(36): Xaa is C or S

SEQ ID NO: 10564 - protein, 40 aa, Artificial Sequence; identical to SEQ ID NO: 3102
  GFR-binding peptide
  MOD_RES (34)..(35): Xaa is C or S
  MOD_RES (12)..(13)..(14)..(15)..(16): Xaa is A or G
  MOD_RES (17)..(18)..(19)..(20): Xaa is A or G or is absent

SEQ ID NO: 10565 - protein, 34 aa, Artificial Sequence
  GFR-binding peptide
  MOD_RES (33)..(34): Xaa is C or S
  MOD_RES (11)..(12)..(13)..(14)..(15): Xaa is A or G
  MOD_RES (16)..(17)..(18)..(19): Xaa is A or G or is absent
SKVIMNSLQEXXXXXXXXXYYVIPLPELDQSVXX

SEQ ID NO: 10566 - protein, 37 aa, Artificial Sequence; identical to SEQ ID NO: 3104
  GFR-binding peptide
  MOD_RES (31)..(32): Xaa is C or S

SEQ ID NO: 10567 - protein, 35 aa, Artificial Sequence
  GFR-binding peptide
  MOD_RES (2)..(34)..(35): Xaa is C or S
GXGEVVMDEYQKYVVKENEDIFLMSIPSLETPVXX

SEQ ID NO: 10568 - protein, 39 aa, Artificial Sequence
  GFR-binding peptide
  MOD_RES (1)..(35): Xaa is C or S
  MOD_RES (13)..(14)..(15)..(16)..(17): Xaa is A or G
  MOD_RES (18)..(19)..(20)..(21): Xaa is A or G or is absent
XSRVVMNEYQKYXXXXXXXXXIFLVSIPSLKTPAXTPKT

SEQ ID NO: 10569 - protein, 39 aa, Artificial Sequence
  GFR-binding peptide
  MOD_RES (1)..(3)..(34)..(35): Xaa is C or S
XKXSKVIMEYQKYIKPTKGIIFLISIPSLDQSVXXPSAS

SEQ ID NO: 10570 - protein, 40 aa, Artificial Sequence; identical to SEQ ID NO: 3107
  GFR-binding peptide
  MOD_RES (1)..(3)..(34)..(35): Xaa is C or S

SEQ ID NO: 10571 - protein, 37 aa, Artificial Sequence; identical to SEQ ID NO: 3108
  GFR-binding peptide
  MOD_RES (34)..(35): Xaa is C or S
  MOD_RES (12)..(13)..(14)..(15)..(16): Xaa is A or G
  MOD_RES (17)..(18)..(19)..(20): Xaa is A or G or is absent

SEQ ID NO: 10572 - protein, 39 aa, Artificial Sequence; identical to SEQ ID NO: 3110
  GFR-binding peptide
  MOD_RES (1)..(3)..(35)..(36): Xaa is C or S

SEQ ID NO: 10573 - protein, 40 aa, Artificial Sequence; identical to SEQ ID NO: 3117
  GFR-binding peptide
  MOD_RES (2)..(36)..(37): Xaa is C or S
  MOD_RES (14)..(15)..(16)..(17)..(18): Xaa is A or G
  MOD_RES (19)..(20)..(21)..(22): Xaa is A or G or is absent

SEQ ID NO: 10574 - protein, 37 aa, Artificial Sequence; identical to SEQ ID NO: 3118
  GFR-binding peptide
  MOD_RES (33)..(34): Xaa is C or S
  MOD_RES (11)..(12)..(13)..(14)..(15): Xaa is A or G
  MOD_RES (16)..(17)..(18)..(19): Xaa is A or G or is absent

SEQ ID NO: 10575 - protein, 39 aa, Artificial Sequence; identical to SEQ ID NO: 3121
  GFR-binding peptide
  MOD_RES (2)..(35)..(36): Xaa is C or S
  MOD_RES (13)..(14)..(15)..(16)..(17): Xaa is A or G
  MOD_RES (18)..(19)..(20)..(21): Xaa is A or G or is absent

SEQ ID NO: 10576 - protein, 36 aa, Artificial Sequence
  GFR-binding peptide
  MOD_RES (34)..(34): Xaa is C or S
  MOD_RES (12)..(13)..(14)..(15)..(16): Xaa is A or G
  MOD_RES (17)..(18)..(19)..(20): Xaa is A or G or is absent
SRVVMNNSLQEXXXXXXXXXYYLVTLPELKTPAXTP

SEQ ID NO: 10577 - protein, 37 aa, Artificial Sequence; identical to SEQ ID NO: 3124
  GFR-binding peptide
  MOD_RES (2)..(4)..(37): Xaa is C or S
  MOD_RES (15)..(16)..(17)..(18)..(19): Xaa is A or G
  MOD_RES (20)..(21)..(22)..(23): Xaa is A or G or is absent

SEQ ID NO: 10578 - protein, 40 aa, Artificial Sequence; identical to SEQ ID NO: 3125
  GFR-binding peptide
  MOD_RES (1)..(34)..(35): Xaa is C or S
  MOD_RES (12)..(13)..(14)..(15)..(16): Xaa is A or G
  MOD_RES (17)..(18)..(19)..(20): Xaa is A or G or is absent

SEQ ID NO: 10579 - protein, 39 aa, Artificial Sequence
  GFR-binding peptide
  MOD_RES (33)..(33): Xaa is C or S
  MOD_RES (11)..(12)..(13)..(14)..(15): Xaa is A or G
  MOD_RES (16)..(17)..(18)..(19): Xaa is A or G or is absent
RVVMNNSLQEXXXXXXXXXYYLVTLPELKTPAXTPKTVH

SEQ ID NO: 10580 - protein, 32 aa, Artificial Sequence
  GFR-binding peptide
  MOD_RES (32)..(32): Xaa is C or S
GEVVMDNSLQEVVKENEDYYLMTLPELETPVX

SEQ ID NO: 10581 - protein, 43 aa, Artificial Sequence
  GFR-binding peptide
  MOD_RES (1)..(3)..(37)..(38): Xaa is C or S
  MOD_RES (15)..(16)..(17)..(18)..(19): Xaa is A or G
  MOD_RES (20)..(21)..(22)..(23): Xaa is A or G or is absent
XGXSRVVMNEYQKYXXXXXXXXXIFLVSIPSLKTPAXXPKPVY

SEQ ID NO: 10582 - protein, 37 aa, Artificial Sequence; identical to SEQ ID NO: 3128
  GFR-binding peptide
  MOD_RES (2)..(36)..(37): Xaa is C or S
  MOD_RES (14)..(15)..(16)..(17)..(18): Xaa is A or G
  MOD_RES (19)..(20)..(21)..(22): Xaa is A or G or is absent

SEQ ID NO: 10583 - protein, 41 aa, Artificial Sequence
  GFR-binding peptide
  MOD_RES (2)..(4)..(36)..(37): Xaa is C or S
RXGXGEVVMDNSLQEVVKENEDYYVMPLPELETPVXXAKPI

SEQ ID NO: 10584 - protein, 39 aa, Artificial Sequence
  GFR-binding peptide
  MOD_RES (2)..(4)..(38)..(39): Xaa is C or S
  MOD_RES (16)..(17)..(18)..(19)..(20): Xaa is A or G
  MOD_RES (21)..(22)..(23)..(24): Xaa is A or G or is absent
RXGXGEVVMENSLQEXXXXXXXXXYYVMPLPELETPVXX

SEQ ID NO: 10585 - protein, 42 aa, Artificial Sequence
  GFR-binding peptide
  MOD_RES (2)..(4)..(38)..(39): Xaa is C or S
  MOD_RES (16)..(17)..(18)..(19)..(20): Xaa is A or G
  MOD_RES (21)..(22)..(23)..(24): Xaa is A or G or is absent
RXGXGEVVMDNSLQEXXXXXXXXXYYVMPLPELETPVXXAKP

SEQ ID NO: 10586 - protein, 35 aa, Artificial Sequence; identical to SEQ ID NO: 3133
  GFR-binding peptide
  MOD_RES (34)..(35): Xaa is C or S
  MOD_RES (12)..(13)..(14)..(15)..(16): Xaa is A or G
  MOD_RES (17)..(18)..(19)..(20): Xaa is A or G or is absent

SEQ ID NO: 10587 - protein, 33 aa, Artificial Sequence
  GFR-binding peptide
  MOD_RES (1)..(33): Xaa is C or S
XARVVMNEYQKYIVNSSDDIFLVSIPSLQTPAX

SEQ ID NO: 10588 - protein, 43 aa, Artificial Sequence
  GFR-binding peptide
  MOD_RES (2)..(4)..(38)..(39): Xaa is C or S
  MOD_RES (16)..(17)..(18)..(19)..(20): Xaa is A or G
  MOD_RES (21)..(22)..(23)..(24): Xaa is A or G or is absent
RXGXGEVVMENSLQEXXXXXXXXXYYLMTLPELETPVXXAKPI

SEQ ID NO: 10589 - protein, 37 aa, Artificial Sequence; identical to SEQ ID NO: 3137
  GFR-binding peptide
  MOD_RES (1)..(3)..(35)..(36): Xaa is C or S

SEQ ID NO: 10590 - protein, 39 aa, Artificial Sequence
  GFR-binding peptide
  MOD_RES (1)..(3)..(37)..(38): Xaa is C or S
  MOD_RES (15)..(16)..(17)..(18)..(19): Xaa is A or G
  MOD_RES (20)..(21)..(22)..(23): Xaa is A or G or is absent
XGXSEVVMDNSLQEXXXXXXXXXYYVIPLPELRTPVXXT

SEQ ID NO: 10591 - protein, 38 aa, Artificial Sequence; identical to SEQ ID NO: 3138
  GFR-binding peptide
  MOD_RES (34)..(35): Xaa is C or S
  MOD_RES (12)..(13)..(14)..(15)..(16): Xaa is A or G
  MOD_RES (17)..(18)..(19)..(20): Xaa is A or G or is absent

SEQ ID NO: 10592 - protein, 32 aa, Artificial Sequence; identical to SEQ ID NO: 3139
  GFR-binding peptide
  MOD_RES (11)..(12)..(13)..(14)..(15): Xaa is A or G
  MOD_RES (16)..(17)..(18)..(19): Xaa is A or G or is absent

SEQ ID NO: 10593 - protein, 39 aa, Artificial Sequence
  GFR-binding peptide
  MOD_RES (2)..(4)..(36)..(37): Xaa is C or S
RXGXGEVVMDEYQKYVVKENEDIFLMSIPSLETPVXXAK

SEQ ID NO: 10594 - protein, 41 aa, Artificial Sequence
  GFR-binding peptide
  MOD_RES (1)..(3)..(37)..(38): Xaa is C or S
  MOD_RES (15)..(16)..(17)..(18)..(19): Xaa is A or G
  MOD_RES (20)..(21)..(22)..(23): Xaa is A or G or is absent
XGXGEVVMDNSLQEXXXXXXXXXYYVMPLPELETPVXXAKP

SEQ ID NO: 10595 - protein, 37 aa, Artificial Sequence
  GFR-binding peptide
  MOD_RES (2)..(4): Xaa is C or S
  MOD_RES (16)..(17)..(18)..(19)..(20): Xaa is A or G
  MOD_RES (21)..(22)..(23)..(24): Xaa is A or G or is absent
RXGXGEVVMEEYQKYXXXXXXXXXIFLMSIPSLETPV

SEQ ID NO: 10596 - protein, 33 aa, Artificial Sequence; identical to SEQ ID NO: 3144
  GFR-binding peptide
  MOD_RES (33)..(33): Xaa is C or S
  MOD_RES (11)..(12)..(13)..(14)..(15): Xaa is A or G
  MOD_RES (16)..(17)..(18)..(19): Xaa is A or G or is absent

SEQ ID NO: 10597 - protein, 35 aa, Artificial Sequence
  GFR-binding peptide
  MOD_RES (31)..(31): Xaa is C or S
RVVMNNSLQEIVNSSDDYYVVPLPELKTPAXTPKT

SEQ ID NO: 10598 - protein, 39 aa, Artificial Sequence
  GFR-binding peptide
  MOD_RES (2)..(34)..(35): Xaa is C or S
GXSEVVMDEYQKYVVNNASDIFLISIPSLRTPVXXTPPT

SEQ ID NO: 10599 - protein, 34 aa, Artificial Sequence; identical to SEQ ID NO: 3147
  GFR-binding peptide
  MOD_RES (31)..(32): Xaa is C or S

SEQ ID NO: 10600 - protein, 32 aa, Artificial Sequence
  GFR-binding peptide
  MOD_RES (2)..(2): Xaa is C or S
KXSRVIMNSLQEVKPKRGVYYVIPLPELAQPV

SEQ ID NO: 10601 - protein, 42 aa, Artificial Sequence
  GFR-binding peptide
  MOD_RES (2)..(4)..(36)..(37): Xaa is C or S
HXGXSRVVMNNSLQEIVNSSDDYYLVTLPELKTPAXXPKPVY

SEQ ID NO: 10602 - protein, 40 aa, Artificial Sequence
  GFR-binding peptide
  MOD_RES (2)..(35)..(36): Xaa is C or S
  MOD_RES (13)..(14)..(15)..(16)..(17): Xaa is A or G
  MOD_RES (18)..(19)..(20)..(21): Xaa is A or G or is absent
KXSKVVMNSLQEXXXXXXXXXYYLITLPELDQPVXXPSAS

SEQ ID NO: 10603 - protein, 31 aa, Artificial Sequence; identical to SEQ ID NO: 3149
  GFR-binding peptide
  MOD_RES (31)..(31): Xaa is C or S

SEQ ID NO: 10604 - protein, 36 aa, Artificial Sequence
  GFR-binding peptide
  MOD_RES (1)..(3): Xaa is C or S
  MOD_RES (15)..(16)..(17)..(18)..(19): Xaa is A or G
  MOD_RES (20)..(21)..(22)..(23): Xaa is A or G or is absent
XGXSRVVMNNSLQEXXXXXXXXXYYVVPLPELKTPA

SEQ ID NO: 10605 - protein, 35 aa, Artificial Sequence
  GFR-binding peptide
  MOD_RES (2)..(2): Xaa is C or S
  MOD_RES (14)..(15)..(16)..(17)..(18): Xaa is A or G
  MOD_RES (19)..(20)..(21)..(22): Xaa is A or G or is absent
GXSEVVMDEYQKYXXXXXXXXXIFLISIPSLRTPV

SEQ ID NO: 10606 - protein, 40 aa, Artificial Sequence
  GFR-binding peptide
  MOD_RES (2)..(4)..(38): Xaa is C or S
  MOD_RES (16)..(17)..(18)..(19)..(20): Xaa is A or G
  MOD_RES (21)..(22)..(23)..(24): Xaa is A or G or is absent
HXGXSRVVMNNSLQEXXXXXXXXXYYVVPLPELKTPAXTP

SEQ ID NO: 10607 - protein, 41 aa, Artificial Sequence
  GFR-binding peptide
  MOD_RES (2)..(4)..(35)..(36): Xaa is C or S
SXKXSRVIMNSLQEVKPKRGVYYVIPLPELAQPVXXPAASA

SEQ ID NO: 10608 - protein, 38 aa, Artificial Sequence
  GFR-binding peptide
  MOD_RES (2)..(34)..(35): Xaa is C or S
GXGEVVMEEYQKYVVKDYEDIFLMSIPSLETPVXXAKP

SEQ ID NO: 10609 - protein, 38 aa, Artificial Sequence; identical to SEQ ID NO: 3157
  GFR-binding peptide
  MOD_RES (32)..(33): Xaa is C or S

SEQ ID NO: 10610 - protein, 35 aa, Artificial Sequence
  GFR-binding peptide
  MOD_RES (1)..(3)..(35): Xaa is C or S
XGXSRVVMNNSLQEIVNSSDDYYVVPLPELKTPAX

SEQ ID NO: 10611 - protein, 35 aa, Artificial Sequence
  GFR-binding peptide
  MOD_RES (1)..(33)..(34): Xaa is C or S
XARVVMNNSLQEIVNSSDDYYVVPLPELQTPAXXP

SEQ ID NO: 10612 - protein, 38 aa, Artificial Sequence
  GFR-binding peptide
  MOD_RES (1)..(3)..(35): Xaa is C or S
XGXSRVVMNEYQKYIVNSSDDIFLVSIPSLKTPAXTPK

SEQ ID NO: 10613 - protein, 40 aa, Artificial Sequence
  GFR-binding peptide
  MOD_RES (2)..(34)..(35): Xaa is C or S
GXSRVVMNNSLQEIVNSSDDYYLVTLPELKTPAXXPKPVY

SEQ ID NO: 10614 - protein, 33 aa, Artificial Sequence; identical to SEQ ID NO: 3162
  GFR-binding peptide
  MOD_RES (12)..(13)..(14)..(15)..(16): Xaa is A or G
  MOD_RES (17)..(18)..(19)..(20): Xaa is A or G or is absent

SEQ ID NO: 10615 - protein, 40 aa, Artificial Sequence
  GFR-binding peptide
  MOD_RES (1)..(3)..(37)..(38): Xaa is C or S
  MOD_RES (15)..(16)..(17)..(18)..(19): Xaa is A or G
  MOD_RES (20)..(21)..(22)..(23): Xaa is A or G or is absent
XGXGEVVMEEYQKYXXXXXXXXXIFLMSIPSLETPVXXAK

SEQ ID NO: 10616 - protein, 36 aa, Artificial Sequence
  GFR-binding peptide
  MOD_RES (1)..(34)..(35): Xaa is C or S
  MOD_RES (12)..(13)..(14)..(15)..(16): Xaa is A or G
  MOD_RES (17)..(18)..(19)..(20): Xaa is A or G or is absent
XSRVIMNSLQEXXXXXXXXXYYLITLPELAQPVXXP

SEQ ID NO: 10617 - protein, 37 aa, Artificial Sequence
  GFR-binding peptide
  MOD_RES (1)..(33)..(34): Xaa is C or S
XGEVVMENSLQEVVKDYEDYYVMPLPELETPVXXAKP

SEQ ID NO: 10618 - protein, 40 aa, Artificial Sequence
  GFR-binding peptide
  MOD_RES (1)..(3)..(34)..(35): Xaa is C or S
XKXSKVVMNSLQEVKPTRGVYYVIPLPELDQPVXXPSASA

SEQ ID NO: 10619 - protein, 35 aa, Artificial Sequence
  GFR-binding peptide
  MOD_RES (1)..(3)..(35): Xaa is C or S
XGXSRVVMNEYQKYIVNSSDDIFLVSIPSLKTPAX

SEQ ID NO: 10620 - protein, 32 aa, Artificial Sequence
  GFR-binding peptide
  MOD_RES (31)..(32): Xaa is C or S
EVVMEEYQKYVVKDYEDIFLMSIPSLETPVXX

SEQ ID NO: 10621 - protein, 35 aa, Artificial Sequence; identical to SEQ ID NO: 3170
  GFR-binding peptide
  MOD_RES (1)..(3): Xaa is C or S
  MOD_RES (14)..(15)..(16)..(17)..(18): Xaa is A or G
  MOD_RES (19)..(20)..(21)..(22): Xaa is A or G or is absent

SEQ ID NO: 10622 - protein, 36 aa, Artificial Sequence; identical to SEQ ID NO: 3171
  GFR-binding peptide
  MOD_RES (2)..(4)..(35)..(36): Xaa is C or S

SEQ ID NO: 10623 - protein, 34 aa, Artificial Sequence; identical to SEQ ID NO: 3174
  GFR-binding peptide
  MOD_RES (1)..(32)..(33): Xaa is C or S

SEQ ID NO: 10624 - protein, 39 aa, Artificial Sequence
  GFR-binding peptide
  MOD_RES (2)..(4)..(37)..(38): Xaa is C or S
  MOD_RES (15)..(16)..(17)..(18)..(19): Xaa is A or G
  MOD_RES (20)..(21)..(22)..(23): Xaa is A or G or is absent
SXKXSKVIMEYQKYXXXXXXXXXIFLISIPSLDQSVXXP

SEQ ID NO: 10625 - protein, 38 aa, Artificial Sequence
  GFR-binding peptide
  MOD_RES (2)..(33)..(34): Xaa is C or S
KXSRVIMNSLQEVKPKRGVYYLITLPELAQPVXXPAAS

SEQ ID NO: 10626 - protein, 33 aa, Artificial Sequence; identical to SEQ ID NO: 3175
  GFR-binding peptide
  MOD_RES (33)..(33): Xaa is C or S
  MOD_RES (11)..(12)..(13)..(14)..(15): Xaa is A or G
  MOD_RES (16)..(17)..(18)..(19): Xaa is A or G or is absent

SEQ ID NO: 10627 - protein, 34 aa, Artificial Sequence
  GFR-binding peptide
  MOD_RES (1)..(3)..(34): Xaa is C or S
XKXSRVIMNSLQEVKPKRGVYYVIPLPELAQPVX

SEQ ID NO: 10628 - protein, 37 aa, Artificial Sequence
  GFR-binding peptide
  MOD_RES (2)..(4): Xaa is C or S
  MOD_RES (16)..(17)..(18)..(19)..(20): Xaa is A or G
  MOD_RES (21)..(22)..(23)..(24): Xaa is A or G or is absent
HXGXARVVMNNSLQEXXXXXXXXXYYLVTLPELQTPA

SEQ ID NO: 10629 - protein, 35 aa, Artificial Sequence
  GFR-binding peptide
  MOD_RES (1)..(3)..(35): Xaa is C or S
XGXSEVVMDQYNKLVVNNASDLYLISIASLRTPVX

SEQ ID NO: 10630 - protein, 39 aa, Artificial Sequence; identical to SEQ ID NO: 3179
  GFR-binding peptide
  MOD_RES (1)..(3)..(36)..(37): Xaa is C or S
  MOD_RES (14)..(15)..(16)..(17)..(18): Xaa is A or G
  MOD_RES (19)..(20)..(21)..(22): Xaa is A or G or is absent

SEQ ID NO: 10631 - protein, 37 aa, Artificial Sequence
  GFR-binding peptide
  MOD_RES (33)..(34): Xaa is C or S
  MOD_RES (11)..(12)..(13)..(14)..(15): Xaa is A or G
  MOD_RES (16)..(17)..(18)..(19): Xaa is A or G or is absent
EVVMDEYQKYXXXXXXXXXIFLMSIPSLETPVXXAKP

SEQ ID NO: 10632 - protein, 39 aa, Artificial Sequence
  GFR-binding peptide
  MOD_RES (33)..(34): Xaa is C or S
  MOD_RES (11)..(12)..(13)..(14)..(15): Xaa is A or G
  MOD_RES (16)..(17)..(18)..(19): Xaa is A or G or is absent
EVVMDNSLQEXXXXXXXXXYYVIPLPELRTPVXXTPPTS

SEQ ID NO: 10633 - protein, 41 aa, Artificial Sequence; identical to SEQ ID NO: 3185
  GFR-binding peptide
  MOD_RES (2)..(4)..(38): Xaa is C or S
  MOD_RES (16)..(17)..(18)..(19)..(20): Xaa is A or G
  MOD_RES (21)..(22)..(23)..(24): Xaa is A or G or is absent

SEQ ID NO: 10634 - protein, 40 aa, Artificial Sequence
  GFR-binding peptide
  MOD_RES (1)..(3)..(36)..(37): Xaa is C or S
  MOD_RES (14)..(15)..(16)..(17)..(18): Xaa is A or G
  MOD_RES (19)..(20)..(21)..(22): Xaa is A or G or is absent
XKXSKVVMEYQKYXXXXXXXXXIFLISIPSLDQPVXXPSA

SEQ ID NO: 10635 - protein, 36 aa, Artificial Sequence; identical to SEQ ID NO: 3187
  GFR-binding peptide
  MOD_RES (2)..(36): Xaa is C or S
  MOD_RES (14)..(15)..(16)..(17)..(18): Xaa is A or G
  MOD_RES (19)..(20)..(21)..(22): Xaa is A or G or is absent

SEQ ID NO: 10636 - protein, 36 aa, Artificial Sequence; identical to SEQ ID NO: 3189
  GFR-binding peptide
  MOD_RES (1)..(3)..(35)..(36): Xaa is C or S

SEQ ID NO: 10637 - protein, 42 aa, Artificial Sequence
  GFR-binding peptide
  MOD_RES (2)..(36)..(37): Xaa is C or S
  MOD_RES (14)..(15)..(16)..(17)..(18): Xaa is A or G
  MOD_RES (19)..(20)..(21)..(22): Xaa is A or G or is absent
GXGEVVMDEYQKYXXXXXXXXXIFLMSIPSLETPVXXAKPIK

SEQ ID NO: 10638 - protein, 31 aa, Artificial Sequence
  GFR-binding peptide
  MOD_RES (1)..(1): Xaa is C or S
XSKVIMEYQKYIKPTKGIIFLISIPSLDQSV

SEQ ID NO: 10639 - protein, 34 aa, Artificial Sequence; identical to SEQ ID NO: 3192
  GFR-binding peptide
  MOD_RES (1)..(34): Xaa is C or S
  MOD_RES (12)..(13)..(14)..(15)..(16): Xaa is A or G
  MOD_RES (17)..(18)..(19)..(20): Xaa is A or G or is absent

SEQ ID NO: 10640 - protein, 41 aa, Artificial Sequence; identical to SEQ ID NO: 3195
  GFR-binding peptide
  MOD_RES (1)..(3)..(36)..(37): Xaa is C or S
  MOD_RES (14)..(15)..(16)..(17)..(18): Xaa is A or G
  MOD_RES (19)..(20)..(21)..(22): Xaa is A or G or is absent

SEQ ID NO: 10641 - protein, 36 aa, Artificial Sequence
  GFR-binding peptide
  MOD_RES (1)..(35): Xaa is C or S
  MOD_RES (13)..(14)..(15)..(16)..(17): Xaa is A or G
  MOD_RES (18)..(19)..(20)..(21): Xaa is A or G or is absent
XSRVVMNNSLQEXXXXXXXXXYYLVTLPELKTPAXT

SEQ ID NO: 10642 - protein, 42 aa, Artificial Sequence; identical to SEQ ID NO: 3201
  GFR-binding peptide
  MOD_RES (1)..(3)..(37): Xaa is C or S
  MOD_RES (15)..(16)..(17)..(18)..(19): Xaa is A or G
  MOD_RES (20)..(21)..(22)..(23): Xaa is A or G or is absent

SEQ ID NO: 10643 - protein, 37 aa, Artificial Sequence
  GFR-binding peptide
  MOD_RES (32)..(33): Xaa is C or S
SRVVMNNSLQEIVNSSDDYYLVTLPELKTPAXXPKPV

SEQ ID NO: 10644 - protein, 37 aa, Artificial Sequence
  GFR-binding peptide
  MOD_RES (2)..(4): Xaa is C or S
  MOD_RES (16)..(17)..(18)..(19)..(20): Xaa is A or G
  MOD_RES (21)..(22)..(23)..(24): Xaa is A or G or is absent
RXGXGEVVMDNSLQEXXXXXXXXXYYLMTLPELETPV

SEQ ID NO: 10645 - protein, 36 aa, Artificial Sequence
  GFR-binding peptide
  MOD_RES (2)..(34)..(35): Xaa is C or S
GXGEVVMDEYQKYVVKENEDIFLMSIPSLETPVXXA

SEQ ID NO: 10646 - protein, 37 aa, Artificial Sequence
  GFR-binding peptide
  MOD_RES (2)..(33)..(34): Xaa is C or S
KXSKVVMNSLQEVKPTRGVYYVIPLPELDQPVXXPSA

SEQ ID NO: 10647 - protein, 39 aa, Artificial Sequence; identical to SEQ ID NO: 3207
  GFR-binding peptide
  MOD_RES (34)..(35): Xaa is C or S
  MOD_RES (12)..(13)..(14)..(15)..(16): Xaa is A or G
  MOD_RES (17)..(18)..(19)..(20): Xaa is A or G or is absent

SEQ ID NO: 10648 - protein, 34 aa, Artificial Sequence; identical to SEQ ID NO: 3208
  GFR-binding peptide
  MOD_RES (33)..(34): Xaa is C or S
  MOD_RES (11)..(12)..(13)..(14)..(15): Xaa is A or G
  MOD_RES (16)..(17)..(18)..(19): Xaa is A or G or is absent

SEQ ID NO: 10649 - protein, 40 aa, Artificial Sequence; identical to SEQ ID NO: 3209
  GFR-binding peptide
  MOD_RES (2)..(4)..(36)..(37): Xaa is C or S

SEQ ID NO: 10650 - protein, 30 aa, Artificial Sequence
  GFR-binding peptide
EVVMDEYQKYVVNNASDIFLISIPSLRTPV

SEQ ID NO: 10651 - protein, 35 aa, Artificial Sequence
  GFR-binding peptide
  MOD_RES (1)..(35): Xaa is C or S
  MOD_RES (13)..(14)..(15)..(16)..(17): Xaa is A or G
  MOD_RES (18)..(19)..(20)..(21): Xaa is A or G or is absent
XSRVVMNNSLQEXXXXXXXXXYYVVPLPELKTPAX

SEQ ID NO: 10652 - protein, 34 aa, Artificial Sequence
  GFR-binding peptide
  MOD_RES (1)..(34): Xaa is C or S
  MOD_RES (12)..(13)..(14)..(15)..(16): Xaa is A or G
  MOD_RES (17)..(18)..(19)..(20): Xaa is A or G or is absent
XSKVIMNSLQEXXXXXXXXXYYVIPLPELDQSVX

SEQ ID NO: 10653 - protein, 37 aa, Artificial Sequence; identical to SEQ ID NO: 3211
  GFR-binding peptide
  MOD_RES (1)..(35): Xaa is C or S
  MOD_RES (13)..(14)..(15)..(16)..(17): Xaa is A or G
  MOD_RES (18)..(19)..(20)..(21): Xaa is A or G or is absent

SEQ ID NO: 10654 - protein, 34 aa, Artificial Sequence
  GFR-binding peptide
  MOD_RES (31)..(32): Xaa is C or S
SRVIMNSLQEVKPKRGVYYLITLPELAQPVXXPA

SEQ ID NO: 10655 - protein, 41 aa, Artificial Sequence
  GFR-binding peptide
  MOD_RES (2)..(36): Xaa is C or S
  MOD_RES (14)..(15)..(16)..(17)..(18): Xaa is A or G
  MOD_RES (19)..(20)..(21)..(22): Xaa is A or G or is absent
GXSRVVMNNSLQEXXXXXXXXXYYVVPLPELKTPAXTPKTV

SEQ ID NO: 10656 - protein, 37 aa, Artificial Sequence
  GFR-binding peptide
  MOD_RES (1)..(33)..(34): Xaa is C or S
XSEVVMDQYNKLVVNNASDLYLISIASLRTPVXXTPP

SEQ ID NO: 10657 - protein, 39 aa, Artificial Sequence
  GFR-binding peptide
  MOD_RES (33)..(34): Xaa is C or S
  MOD_RES (11)..(12)..(13)..(14)..(15): Xaa is A or G
  MOD_RES (16)..(17)..(18)..(19): Xaa is A or G or is absent
EVVMDRYKKLXXXXXXXXXFYLISIANLRTPVXXTPPTS

SEQ ID NO: 10658 - protein, 40 aa, Artificial Sequence
  GFR-binding peptide
  MOD_RES (1)..(34)..(35): Xaa is C or S
  MOD_RES (12)..(13)..(14)..(15)..(16): Xaa is A or G
  MOD_RES (17)..(18)..(19)..(20): Xaa is A or G or is absent
XSRVIMEYQKYXXXXXXXXXIFLISIPSLAQPVXXPAASA

SEQ ID NO: 10659 - protein, 36 aa, Artificial Sequence
  GFR-binding peptide
  MOD_RES (1)..(33)..(34): Xaa is C or S
XSRVVMNNSLQEIVNSSDDYYLVTLPELKTPAXXPK

SEQ ID NO: 10660 - protein, 37 aa, Artificial Sequence; identical to SEQ ID NO: 3222
  GFR-binding peptide
  MOD_RES (2)..(36)..(37): Xaa is C or S
  MOD_RES (14)..(15)..(16)..(17)..(18): Xaa is A or G
  MOD_RES (19)..(20)..(21)..(22): Xaa is A or G or is absent

SEQ ID NO: 10661 - protein, 37 aa, Artificial Sequence; identical to SEQ ID NO: 3223
  GFR-binding peptide
  MOD_RES (2)..(4)..(36)..(37): Xaa is C or S

SEQ ID NO: 10662 - protein, 39 aa, Artificial Sequence
  GFR-binding peptide
  MOD_RES (1)..(33)..(34): Xaa is C or S
XARVVMNNSLQEIVNSSDDYYLVTLPELQTPAXXPKPVT

SEQ ID NO: 10663 - protein, 35 aa, Artificial Sequence
  GFR-binding peptide
  MOD_RES (2)..(35): Xaa is C or S
  MOD_RES (13)..(14)..(15)..(16)..(17): Xaa is A or G
  MOD_RES (18)..(19)..(20)..(21): Xaa is A or G or is absent
KXSKVVMNSLQEXXXXXXXXXYYVIPLPELDQPVX

SEQ ID NO: 10664 - protein, 36 aa, Artificial Sequence
  GFR-binding peptide
  MOD_RES (33)..(34): Xaa is C or S
  MOD_RES (11)..(12)..(13)..(14)..(15): Xaa is A or G
  MOD_RES (16)..(17)..(18)..(19): Xaa is A or G or is absent
RVVMNNSLQEXXXXXXXXXYYVVPLPELKTPAXXPK

SEQ ID NO: 10665 - protein, 43 aa, Artificial Sequence; identical to SEQ ID NO: 3229
  GFR-binding peptide
  MOD_RES (2)..(4)..(37)..(38): Xaa is C or S
  MOD_RES (15)..(16)..(17)..(18)..(19): Xaa is A or G
  MOD_RES (20)..(21)..(22)..(23): Xaa is A or G or is absent

SEQ ID NO: 10666 - protein, 39 aa, Artificial Sequence
  GFR-binding peptide
  MOD_RES (2)..(34)..(35): Xaa is C or S
GXGEVVMENSLQEVVKDYEDYYLMTLPELETPVXXAKPI

SEQ ID NO: 10667 - protein, 42 aa, Artificial Sequence; identical to SEQ ID NO: 3231
  GFR-binding peptide
  MOD_RES (2)..(4)..(36)..(37): Xaa is C or S

SEQ ID NO: 10668 - protein, 34 aa, Artificial Sequence; identical to SEQ ID NO: 3234
  GFR-binding peptide
  MOD_RES (1)..(1): Xaa is C or S
  MOD_RES (13)..(14)..(15)..(16)..(17): Xaa is A or G
  MOD_RES (18)..(19)..(20)..(21): Xaa is A or G or is absent

SEQ ID NO: 10669 - protein, 35 aa, Artificial Sequence
  GFR-binding peptide
  MOD_RES (2)..(2): Xaa is C or S
  MOD_RES (14)..(15)..(16)..(17)..(18): Xaa is A or G
  MOD_RES (19)..(20)..(21)..(22): Xaa is A or G or is absent
GXSRVVMNNSLQEXXXXXXXXXYYLVTLPELKTPA

SEQ ID NO: 10670 - protein, 37 aa, Artificial Sequence
  GFR-binding peptide
  MOD_RES (2)..(36): Xaa is C or S
  MOD_RES (14)..(15)..(16)..(17)..(18): Xaa is A or G
  MOD_RES (19)..(20)..(21)..(22): Xaa is A or G or is absent
GXSRVVMNNSLQEXXXXXXXXXYYLVTLPELKTPAXT

SEQ ID NO: 10671 - protein, 42 aa, Artificial Sequence; identical to SEQ ID NO: 3238
  GFR-binding peptide
  MOD_RES (2)..(4)..(38)..(39): Xaa is C or S
  MOD_RES (16)..(17)..(18)..(19)..(20): Xaa is A or G
  MOD_RES (21)..(22)..(23)..(24): Xaa is A or G or is absent

SEQ ID NO: 10672 - protein, 33 aa, Artificial Sequence; identical to SEQ ID NO: 3241
  GFR-binding peptide
  MOD_RES (1)..(32)..(33): Xaa is C or S

SEQ ID NO: 10673 - protein, 37 aa, Artificial Sequence
  GFR-binding peptide
  MOD_RES (2)..(4)..(36)..(37): Xaa is C or S
HXGXSRVVMNNSLQEIVNSSDDYYVVPLPELKTPAXX

SEQ ID NO: 10674 - protein, 40 aa, Artificial Sequence
  GFR-binding peptide
  MOD_RES (1)..(3)..(35)..(36): Xaa is C or S
XGXSEVVMDNSLQEVVNNASDYYVIPLPELRTPVXXTPPT

SEQ ID NO: 10675 - protein, 41 aa, Artificial Sequence
  GFR-binding peptide
  MOD_RES (2)..(4)..(35)..(36): Xaa is C or S
SXKXSKVVMNSLQEVKPTRGVYYLITLPELDQPVXXPSASA

SEQ ID NO: 10676 - protein, 36 aa, Artificial Sequence
  GFR-binding peptide
  MOD_RES (33)..(34): Xaa is C or S
  MOD_RES (11)..(12)..(13)..(14)..(15): Xaa is A or G
  MOD_RES (16)..(17)..(18)..(19): Xaa is A or G or is absent
EVVMDNSLQEXXXXXXXXXYYLMTLPELETPVXXAK

SEQ ID NO: 10677 - protein, 33 aa, Artificial Sequence; identical to SEQ ID NO: 3248
  GFR-binding peptide
  MOD_RES (31)..(32): Xaa is C or S

SEQ ID NO: 10678 - protein, 33 aa, Artificial Sequence; identical to SEQ ID NO: 3250
  GFR-binding peptide
  MOD_RES (31)..(32): Xaa is C or S

SEQ ID NO: 10679 - protein, 35 aa, Artificial Sequence
  GFR-binding peptide
  MOD_RES (1)..(3)..(35): Xaa is C or S
XGXSEVVMDNSLQEVVNNASDYYLITLPELRTPVX

SEQ ID NO: 10680 - protein, 35 aa, Artificial Sequence
  GFR-binding peptide
  MOD_RES (34)..(34): Xaa is C or S
  MOD_RES (12)..(13)..(14)..(15)..(16): Xaa is A or G
  MOD_RES (17)..(18)..(19)..(20): Xaa is A or G or is absent
SRVVMNNSLQEXXXXXXXXXYYVVPLPELKTPAXT

SEQ ID NO: 10681 - protein, 35 aa, Artificial Sequence; identical to SEQ ID NO: 3254
  GFR-binding peptide
  MOD_RES (31)..(32): Xaa is C or S

SEQ ID NO: 10682 - protein, 40 aa, Artificial Sequence
  GFR-binding peptide
  MOD_RES (2)..(36)..(37): Xaa is C or S
  MOD_RES (14)..(15)..(16)..(17)..(18): Xaa is A or G
  MOD_RES (19)..(20)..(21)..(22): Xaa is A or G or is absent
GXGEVVMENSLQEXXXXXXXXXYYLMTLPELETPVXXAKP

SEQ ID NO: 10683 - protein, 36 aa, Artificial Sequence
  GFR-binding peptide
  MOD_RES (31)..(32): Xaa is C or S
SRVIMEYQKYVKPKRGVIFLISIPSLAQPVXXPAAS

SEQ ID NO: 10684 - protein, 32 aa, Artificial Sequence; identical to SEQ ID NO: 3256
  GFR-binding peptide
  MOD_RES (2)..(2): Xaa is C or S

SEQ ID NO: 10685 - protein, 41 aa, Artificial Sequence
  GFR-binding peptide
  MOD_RES (2)..(4)..(36)..(37): Xaa is C or S
HXGXARVVMNEYQKYIVNSSDDIFLVSIPSLQTPAXXPKPV

SEQ ID NO: 10686 - protein, 40 aa, Artificial Sequence
  GFR-binding peptide
  MOD_RES (1)..(3)..(34)..(35): Xaa is C or S
XKXSKVIMEYQKYIKPTKGIIFLISIPSLDQSVXXPSASA

SEQ ID NO: 10687 - protein, 42 aa, Artificial Sequence
  GFR-binding peptide
  MOD_RES (1)..(3)..(36)..(37): Xaa is C or S
  MOD_RES (14)..(15)..(16)..(17)..(18): Xaa is A or G
  MOD_RES (19)..(20)..(21)..(22): Xaa is A or G or is absent
XKXSKVVMNSLQEXXXXXXXXXYYVIPLPELDQPVXXPSASA

SEQ ID NO: 10688 - protein, 41 aa, Artificial Sequence
  GFR-binding peptide
  MOD_RES (2)..(4)..(38)..(39): Xaa is C or S
  MOD_RES (16)..(17)..(18)..(19)..(20): Xaa is A or G
  MOD_RES (21)..(22)..(23)..(24): Xaa is A or G or is absent
RXGXSEVVMDQYNKLXXXXXXXXXLYLISIASLRTPVXXTP

SEQ ID NO: 10689 - protein, 37 aa, Artificial Sequence
  GFR-binding peptide
  MOD_RES (34)..(35): Xaa is C or S
  MOD_RES (12)..(13)..(14)..(15)..(16): Xaa is A or G
  MOD_RES (17)..(18)..(19)..(20): Xaa is A or G or is absent
GEVVMEEYQKYXXXXXXXXXIFLMSIPSLETPVXXAK

SEQ ID NO: 10690 - protein, 40 aa, Artificial Sequence
  GFR-binding peptide
  MOD_RES (1)..(3)..(34)..(35): Xaa is C or S
XKXSKVIMNSLQEIKPTKGIYYVIPLPELDQSVXXPSASA

SEQ ID NO: 10691 - protein, 34 aa, Artificial Sequence
  GFR-binding peptide
  MOD_RES (1)..(34): Xaa is C or S
  MOD_RES (12)..(13)..(14)..(15)..(16): Xaa is A or G
  MOD_RES (17)..(18)..(19)..(20): Xaa is A or G or is absent
XSKVVMNSLQEXXXXXXXXXYYLITLPELDQPVX

SEQ ID NO: 10692 - protein, 36 aa, Artificial Sequence
  GFR-binding peptide
  MOD_RES (33)..(34): Xaa is C or S
  MOD_RES (11)..(12)..(13)..(14)..(15): Xaa is A or G
  MOD_RES (16)..(17)..(18)..(19): Xaa is A or G or is absent
EVVMDNSLQEXXXXXXXXXYYVMPLPELETPVXXAK

SEQ ID NO: 10693 - protein, 39 aa, Artificial Sequence; identical to SEQ ID NO: 3259
  GFR-binding peptide
  MOD_RES (1)..(3)..(36)..(37): Xaa is C or S
  MOD_RES (14)..(15)..(16)..(17)..(18): Xaa is A or G
  MOD_RES (19)..(20)..(21)..(22): Xaa is A or G or is absent

SEQ ID NO: 10694 - protein, 42 aa, Artificial Sequence
  GFR-binding peptide
  MOD_RES (2)..(4)..(38)..(39): Xaa is C or S
  MOD_RES (16)..(17)..(18)..(19)..(20): Xaa is A or G
  MOD_RES (21)..(22)..(23)..(24): Xaa is A or G or is absent
RXGXSEVVMDEYQKYXXXXXXXXXIFLISIPSLRTPVXXTPP

SEQ ID NO: 10695 - protein, 38 aa, Artificial Sequence; identical to SEQ ID NO: 3260
  GFR-binding peptide
  MOD_RES (1)..(3)..(35)..(36): Xaa is C or S

SEQ ID NO: 10696 - protein, 38 aa, Artificial Sequence
  GFR-binding peptide
  MOD_RES (33)..(34): Xaa is C or S
  MOD_RES (11)..(12)..(13)..(14)..(15): Xaa is A or G
  MOD_RES (16)..(17)..(18)..(19): Xaa is A or G or is absent
SRVIMNSLQEXXXXXXXXXYYLITLPELAQPVXXPAAS

SEQ ID NO: 10697 - protein, 35 aa, Artificial Sequence
  GFR-binding peptide
  MOD_RES (32)..(33): Xaa is C or S
GEVVMENSLQEVVKDYEDYYLMTLPELETPVXXAK

SEQ ID NO: 10698 - protein, 36 aa, Artificial Sequence; identical to SEQ ID NO: 3261
  GFR-binding peptide
  MOD_RES (2)..(4)..(36): Xaa is C or S

SEQ ID NO: 10699 - protein, 33 aa, Artificial Sequence
  GFR-binding peptide
  MOD_RES (1)..(3): Xaa is C or S
XKXSRVIMNSLQEVKPKRGVYYVIPLPELAQPV

SEQ ID NO: 10700 - protein, 36 aa, Artificial Sequence
  GFR-binding peptide
  MOD_RES (33)..(34): Xaa is C or S
  MOD_RES (11)..(12)..(13)..(14)..(15): Xaa is A or G
  MOD_RES (16)..(17)..(18)..(19): Xaa is A or G or is absent
RVVMNNSLQEXXXXXXXXXYYLVTLPELKTPAXXPK

SEQ ID NO: 10701 - protein, 41 aa, Artificial Sequence
  GFR-binding peptide
  MOD_RES (2)..(35)..(36): Xaa is C or S
  MOD_RES (13)..(14)..(15)..(16)..(17): Xaa is A or G
  MOD_RES (18)..(19)..(20)..(21): Xaa is A or G or is absent
KXSKVVMNSLQEXXXXXXXXXYYLITLPELDQPVXXPSASA

SEQ ID NO: 10702 - protein, 35 aa, Artificial Sequence
  GFR-binding peptide
  MOD_RES (2)..(4)..(35): Xaa is C or S
SXKXSKVIMEYQKYIKPTKGIIFLISIPSLDQSVX

SEQ ID NO: 10703 - protein, 32 aa, Artificial Sequence; identical to SEQ ID NO: 3264
  GFR-binding peptide
  MOD_RES (11)..(12)..(13)..(14)..(15): Xaa is A or G
  MOD_RES (16)..(17)..(18)..(19): Xaa is A or G or is absent

SEQ ID NO: 10704 - protein, 37 aa, Artificial Sequence
  GFR-binding peptide
  MOD_RES (2)..(35)..(36): Xaa is C or S
  MOD_RES (13)..(14)..(15)..(16)..(17): Xaa is A or G
  MOD_RES (18)..(19)..(20)..(21): Xaa is A or G or is absent
KXSKVVMEYQKYXXXXXXXXXIFLISIPSLDQPVXXP

SEQ ID NO: 10705 - protein, 33 aa, Artificial Sequence
  GFR-binding peptide
  MOD_RES (1)..(3): Xaa is C or S
XKXSRVIMEYQKYVKPKRGVIFLISIPSLAQPV

SEQ ID NO: 10706 - protein, 35 aa, Artificial Sequence
  GFR-binding peptide
  MOD_RES (31)..(32): Xaa is C or S
EVVMDQYNKLVVNNASDLYLISIASLRTPVXXTPP

SEQ ID NO: 10707 - protein, 42 aa, Artificial Sequence; identical to SEQ ID NO: 3269
  GFR-binding peptide
  MOD_RES (2)..(4)..(36)..(37): Xaa is C or S

SEQ ID NO: 10708 - protein, 42 aa, Artificial Sequence; identical to SEQ ID NO: 3271
  GFR-binding peptide
  MOD_RES (1)..(3)..(37)..(38): Xaa is C or S
  MOD_RES (15)..(16)..(17)..(18)..(19): Xaa is A or G
  MOD_RES (20)..(21)..(22)..(23): Xaa is A or G or is absent

SEQ ID NO: 10709 - protein, 38 aa, Artificial Sequence
  GFR-binding peptide
  MOD_RES (1)..(3)..(36)..(37): Xaa is C or S
  MOD_RES (14)..(15)..(16)..(17)..(18): Xaa is A or G
  MOD_RES (19)..(20)..(21)..(22): Xaa is A or G or is absent
XKXSKVIMEYQKYXXXXXXXXXIFLISIPSLDQSVXXP

SEQ ID NO: 10710 - protein, 42 aa, Artificial Sequence; identical to SEQ ID NO: 3272
  GFR-binding peptide
  MOD_RES (2)..(4)..(36)..(37): Xaa is C or S

SEQ ID NO: 10711 - protein, 36 aa, Artificial Sequence
  GFR-binding peptide
  MOD_RES (2)..(4): Xaa is C or S
  MOD_RES (15)..(16)..(17)..(18)..(19): Xaa is A or G
  MOD_RES (20)..(21)..(22)..(23): Xaa is A or G or is absent
SXKXSKVIMEYQKYXXXXXXXXXIFLISIPSLDQSV

SEQ ID NO: 10712 - protein, 37 aa, Artificial Sequence
  GFR-binding peptide
  MOD_RES (1)..(35)..(36): Xaa is C or S
  MOD_RES (13)..(14)..(15)..(16)..(17): Xaa is A or G
  MOD_RES (18)..(19)..(20)..(21): Xaa is A or G or is absent
XSRVVMNEYQKYXXXXXXXXXIFLVSIPSLKTPAXXP

SEQ ID NO: 10713 - protein, 35 aa, Artificial Sequence
  GFR-binding peptide
  MOD_RES (2)..(4): Xaa is C or S
HXGXARVVMNNSLQEIVNSSDDYYVVPLPELQTPA

SEQ ID NO: 10714 - protein, 38 aa, Artificial Sequence; identical to SEQ ID NO: 3274
  GFR-binding peptide
  MOD_RES (1)..(3)..(37)..(38): Xaa is C or S
  MOD_RES (15)..(16)..(17)..(18)..(19): Xaa is A or G
  MOD_RES (20)..(21)..(22)..(23): Xaa is A or G or is absent

SEQ ID NO: 10715 - protein, 35 aa, Artificial Sequence; identical to SEQ ID NO: 3276
  GFR-binding peptide
  MOD_RES (33)..(34): Xaa is C or S
  MOD_RES (11)..(12)..(13)..(14)..(15): Xaa is A or G
  MOD_RES (16)..(17)..(18)..(19): Xaa is A or G or is absent

SEQ ID NO: 10716 - protein, 32 aa, Artificial Sequence
  GFR-binding peptide
  MOD_RES (11)..(12)..(13)..(14)..(15): Xaa is A or G
  MOD_RES (16)..(17)..(18)..(19): Xaa is A or G or is absent
EVVMEEYQKYXXXXXXXXXIFLMSIPSLETPV

SEQ ID NO: 10717 - protein, 32 aa, Artificial Sequence; identical to SEQ ID NO: 3280
  GFR-binding peptide
  MOD_RES (1)..(1): Xaa is C or S

SEQ ID NO: 10718 - protein, 33 aa, Artificial Sequence; identical to SEQ ID NO: 3281
  GFR-binding peptide
  MOD_RES (2)..(33): Xaa is C or S

SEQ ID NO: 10719 - protein, 38 aa, Artificial Sequence
  GFR-binding peptide
  MOD_RES (1)..(3)..(34)..(35): Xaa is C or S
XKXSRVIMNSLQEVKPKRGVYYVIPLPELAQPVXXPAA

SEQ ID NO: 10720 - protein, 36 aa, Artificial Sequence
  GFR-binding peptide
  MOD_RES (1)..(32)..(33): Xaa is C or S
XSKVIMEYQKYIKPTKGIIFLISIPSLDQSVXXPSA

SEQ ID NO: 10721 - protein, 36 aa, Artificial Sequence
  GFR-binding peptide
  MOD_RES (1)..(3): Xaa is C or S
  MOD_RES (15)..(16)..(17)..(18)..(19): Xaa is A or G
  MOD_RES (20)..(21)..(22)..(23): Xaa is A or G or is absent
XGXARVVMNNSLQEXXXXXXXXXYYVVPLPELQTPA

SEQ ID NO: 10722 - protein, 35 aa, Artificial Sequence; identical to SEQ ID NO: 3283
  GFR-binding peptide
  MOD_RES (1)..(35): Xaa is C or S
  MOD_RES (13)..(14)..(15)..(16)..(17): Xaa is A or G
  MOD_RES (18)..(19)..(20)..(21): Xaa is A or G or is absent

SEQ ID NO: 10723 - protein, 36 aa, Artificial Sequence; identical to SEQ ID NO: 3288
  GFR-binding peptide
  MOD_RES (2)..(4)..(36): Xaa is C or S

SEQ ID NO: 10724 - protein, 36 aa, Artificial Sequence
  GFR-binding peptide
  MOD_RES (33)..(34): Xaa is C or S
  MOD_RES (11)..(12)..(13)..(14)..(15): Xaa is A or G
  MOD_RES (16)..(17)..(18)..(19): Xaa is A or G or is absent
RVVMNEYQKYXXXXXXXXXIFLVSIPSLQTPAXXPK

SEQ ID NO: 10725 - protein, 36 aa, Artificial Sequence
  GFR-binding peptide
  MOD_RES (34)..(35): Xaa is C or S
  MOD_RES (12)..(13)..(14)..(15)..(16): Xaa is A or G
  MOD_RES (17)..(18)..(19)..(20): Xaa is A or G or is absent
ARVVMNEYQKYXXXXXXXXXIFLVSIPSLQTPAXXP

SEQ ID NO: 10726 - protein, 38 aa, Artificial Sequence
  GFR-binding peptide
  MOD_RES (2)..(34)..(35): Xaa is C or S
GXSRVVMNEYQKYIVNSSDDIFLVSIPSLKTPAXXPKP

SEQ ID NO: 10727 - protein, 32 aa, Artificial Sequence
  GFR-binding peptide
  MOD_RES (11)..(12)..(13)..(14)..(15): Xaa is A or G
  MOD_RES (16)..(17)..(18)..(19): Xaa is A or G or is absent
SRVIMEYQKYXXXXXXXXXIFLISIPSLAQPV

SEQ ID NO: 10728 - protein, 41 aa, Artificial Sequence
  GFR-binding peptide
  MOD_RES (2)..(36)..(37): Xaa is C or S
  MOD_RES (14)..(15)..(16)..(17)..(18): Xaa is A or G
  MOD_RES (19)..(20)..(21)..(22): Xaa is A or G or is absent
GXGEVVMDNSLQEXXXXXXXXXYYVMPLPELETPVXXAKPI

SEQ ID NO: 10729 - protein, 41 aa, Artificial Sequence; identical to SEQ ID NO: 3292
  GFR-binding peptide
  MOD_RES (1)..(3)..(36)..(37): Xaa is C or S
  MOD_RES (14)..(15)..(16)..(17)..(18): Xaa is A or G
  MOD_RES (19)..(20)..(21)..(22): Xaa is A or G or is absent

SEQ ID NO: 10730 - protein, 38 aa, Artificial Sequence
  GFR-binding peptide
  MOD_RES (1)..(3)..(37)..(38): Xaa is C or S
  MOD_RES (15)..(16)..(17)..(18)..(19): Xaa is A or G
  MOD_RES (20)..(21)..(22)..(23): Xaa is A or G or is absent
XGXGEVVMDEYQKYXXXXXXXXXIFLMSIPSLETPVXX

SEQ ID NO: 10731 - protein, 39 aa, Artificial Sequence
  GFR-binding peptide
  MOD_RES (1)..(33): Xaa is C or S
XSRVVMNEYQKYIVNSSDDIFLVSIPSLKTPAXTPKTVH

SEQ ID NO: 10732 - protein, 42 aa, Artificial Sequence
  GFR-binding peptide
  MOD_RES (1)..(3)..(37)..(38): Xaa is C or S
  MOD_RES (15)..(16)..(17)..(18)..(19): Xaa is A or G
  MOD_RES (20)..(21)..(22)..(23): Xaa is A or G or is absent
XGXSEVVMDNSLQEXXXXXXXXXYYLITLPELRTPVXXTPPT

SEQ ID NO: 10733 - protein, 37 aa, Artificial Sequence; identical to SEQ ID NO: 3297
  GFR-binding peptide
  MOD_RES (2)..(4): Xaa is C or S
  MOD_RES (16)..(17)..(18)..(19)..(20): Xaa is A or G
  MOD_RES (21)..(22)..(23)..(24): Xaa is A or G or is absent

SEQ ID NO: 10734 - protein, 36 aa, Artificial Sequence
  GFR-binding peptide
  MOD_RES (2)..(4)..(36): Xaa is C or S
RXGXGEVVMENSLQEVVKDYEDYYLMTLPELETPVX

SEQ ID NO: 10735 - protein, 35 aa, Artificial Sequence; identical to SEQ ID NO: 3299
  GFR-binding peptide
  MOD_RES (2)..(2): Xaa is C or S
  MOD_RES (14)..(15)..(16)..(17)..(18): Xaa is A or G
  MOD_RES (19)..(20)..(21)..(22): Xaa is A or G or is absent

SEQ ID NO: 10736 - protein, 39 aa, Artificial Sequence
  GFR-binding peptide
  MOD_RES (2)..(4)..(35)..(36): Xaa is C or S
SXKXSRVIMEYQKYVKPKRGVIFLISIPSLAQPVXXPAA

SEQ ID NO: 10737 - protein, 42 aa, Artificial Sequence
  GFR-binding peptide
  MOD_RES (2)..(4)..(36)..(37): Xaa is C or S
RXGXGEVVMDEYQKYVVKENEDIFLMSIPSLETPVXXAKPIK

SEQ ID NO: 10738 - protein, 38 aa, Artificial Sequence
  GFR-binding peptide
  MOD_RES (2)..(4)..(37)..(38): Xaa is C or S
  MOD_RES (15)..(16)..(17)..(18)..(19): Xaa is A or G
  MOD_RES (20)..(21)..(22)..(23): Xaa is A or G or is absent
SXKXSKVIMNSLQEXXXXXXXXXYYVIPLPELDQSVXX

SEQ ID NO: 10739 - protein, 33 aa, Artificial Sequence
  GFR-binding peptide
  MOD_RES (1)..(1): Xaa is C or S
  MOD_RES (12)..(13)..(14)..(15)..(16): Xaa is A or G
  MOD_RES (17)..(18)..(19)..(20): Xaa is A or G or is absent
XSKVIMNSLQEXXXXXXXXXYYVIPLPELDQSV

SEQ ID NO: 10740 - protein, 38 aa, Artificial Sequence
  GFR-binding peptide
  MOD_RES (1)..(33)..(34): Xaa is C or S
XSEVVMDNSLQEVVNNASDYYVIPLPELRTPVXXTPPT

SEQ ID NO: 10741 - protein, 38 aa, Artificial Sequence
  GFR-binding peptide
  MOD_RES (2)..(4)..(35)..(36): Xaa is C or S
SXKXSKVVMNSLQEVKPTRGVYYLITLPELDQPVXXPS

SEQ ID NO: 10742 - protein, 38 aa, Artificial Sequence
  GFR-binding peptide
  MOD_RES (2)..(4)..(37)..(38): Xaa is C or S
  MOD_RES (15)..(16)..(17)..(18)..(19): Xaa is A or G
  MOD_RES (20)..(21)..(22)..(23): Xaa is A or G or is absent
SXKXSKVVMEYQKYXXXXXXXXXIFLISIPSLDQPVXX

SEQ ID NO: 10743 - protein, 37 aa, Artificial Sequence
  GFR-binding peptide
  MOD_RES (1)..(34)..(35): Xaa is C or S
  MOD_RES (12)..(13)..(14)..(15)..(16): Xaa is A or G
  MOD_RES (17)..(18)..(19)..(20): Xaa is A or G or is absent
XSKVVMNSLQEXXXXXXXXXYYLITLPELDQPVXXPS

SEQ ID NO: 10744 - protein, 36 aa, Artificial Sequence; identical to SEQ ID NO: 3301
  GFR-binding peptide
  MOD_RES (2)..(34)..(35): Xaa is C or S

SEQ ID NO: 10745 - protein, 37 aa, Artificial Sequence; identical to SEQ ID NO: 3302
  GFR-binding peptide
  MOD_RES (31)..(31): Xaa is C or S

SEQ ID NO: 10746 - protein, 33 aa, Artificial Sequence
  GFR-binding peptide
  MOD_RES (32)..(33): Xaa is C or S
ARVVMNNSLQEIVNSSDDYYLVTLPELQTPAXX

SEQ ID NO: 10747 - protein, 37 aa, Artificial Sequence
  GFR-binding peptide
  MOD_RES (1)..(3)..(35)..(36): Xaa is C or S
XGXGEVVMENSLQEVVKDYEDYYVMPLPELETPVXXA

SEQ ID NO: 10748 - protein, 32 aa, Artificial Sequence
  GFR-binding peptide
  MOD_RES (32)..(32): Xaa is C or S
SEVVMDQYNKLVVNNASDLYLISIASLRTPVX

SEQ ID NO: 10749 - protein, 37 aa, Artificial Sequence
  GFR-binding peptide
  MOD_RES (32)..(33): Xaa is C or S
ARVVMNNSLQEIVNSSDDYYLVTLPELQTPAXXPKPV

SEQ ID NO: 10750 - protein, 37 aa, Artificial Sequence
  GFR-binding peptide
  MOD_RES (2)..(4): Xaa is C or S
  MOD_RES (16)..(17)..(18)..(19)..(20): Xaa is A or G
  MOD_RES (21)..(22)..(23)..(24): Xaa is A or G or is absent
RXGXGEVVMENSLQEXXXXXXXXXYYLMTLPELETPV

SEQ ID NO: 10751 - protein, 42 aa, Artificial Sequence
  GFR-binding peptide
  MOD_RES (1)..(3)..(37)..(38): Xaa is C or S
  MOD_RES (15)..(16)..(17)..(18)..(19): Xaa is A or G
  MOD_RES (20)..(21)..(22)..(23): Xaa is A or G or is absent
XGXGEVVMEEYQKYXXXXXXXXXIFLMSIPSLETPVXXAKPI

SEQ ID NO: 10752 - protein, 35 aa, Artificial Sequence
  GFR-binding peptide
  MOD_RES (2)..(34)..(35): Xaa is C or S
GXGEVVMENSLQEVVKDYEDYYLMTLPELETPVXX

SEQ ID NO: 10753 - protein, 37 aa, Artificial Sequence
  GFR-binding peptide
  MOD_RES (1)..(33)..(34): Xaa is C or S
XARVVMNNSLQEIVNSSDDYYVVPLPELQTPAXXPKP

SEQ ID NO: 10754 - protein, 39 aa, Artificial Sequence
  GFR-binding peptide
  MOD_RES (1)..(33)..(34): Xaa is C or S
XSEVVMDNSLQEVVNNASDYYLITLPELRTPVXXTPPTS

SEQ ID NO: 10755 - protein, 36 aa, Artificial Sequence
  GFR-binding peptide
  MOD_RES (1)..(3)..(34)..(35): Xaa is C or S
XKXSRVIMEYQKYVKPKRGVIFLISIPSLAQPVXXP

SEQ ID NO: 10756 - protein, 30 aa, Artificial Sequence
  GFR-binding peptide
SRVIMNSLQEVKPKRGVYYVIPLPELAQPV

SEQ ID NO: 10757 - protein, 39 aa, Artificial Sequence
  GFR-binding peptide
  MOD_RES (33)..(34): Xaa is C or S
  MOD_RES (11)..(12)..(13)..(14)..(15): Xaa is A or G
  MOD_RES (16)..(17)..(18)..(19): Xaa is A or G or is absent
EVVMDNSLQEXXXXXXXXXYYLITLPELRTPVXXTPPTS

SEQ ID NO: 10758 - protein, 37 aa, Artificial Sequence
  GFR-binding peptide
  MOD_RES (33)..(34): Xaa is C or S
  MOD_RES (11)..(12)..(13)..(14)..(15): Xaa is A or G
  MOD_RES (16)..(17)..(18)..(19): Xaa is A or G or is absent
EVVMENSLQEXXXXXXXXXYYLMTLPELETPVXXAKP

SEQ ID NO: 10759 - protein, 30 aa, Artificial Sequence
  GFR-binding peptide
EVVMEEYQKYVVKDYEDIFLMSIPSLETPV

SEQ ID NO: 10760 - protein, 38 aa, Artificial Sequence
  GFR-binding peptide
  MOD_RES (2)..(34)..(35): Xaa is C or S
GXGEVVMENSLQEVVKDYEDYYVMPLPELETPVXXAKP

SEQ ID NO: 10761 - protein, 40 aa, Artificial Sequence; identical to SEQ ID NO: 3321
  GFR-binding peptide
  MOD_RES (1)..(3)..(37)..(38): Xaa is C or S
  MOD_RES (15)..(16)..(17)..(18)..(19): Xaa is A or G
  MOD_RES (20)..(21)..(22)..(23): Xaa is A or G or is absent

SEQ ID NO: 10762 - protein, 37 aa, Artificial Sequence; identical to SEQ ID NO: 3322
  GFR-binding peptide
  MOD_RES (1)..(3)..(37): Xaa is C or S
  MOD_RES (15)..(16)..(17)..(18)..(19): Xaa is A or G
  MOD_RES (20)..(21)..(22)..(23): Xaa is A or G or is absent

SEQ ID NO: 10763 - protein, 36 aa, Artificial Sequence
  GFR-binding peptide
  MOD_RES (2)..(35)..(36): Xaa is C or S
  MOD_RES (13)..(14)..(15)..(16)..(17): Xaa is A or G
  MOD_RES (18)..(19)..(20)..(21): Xaa is A or G or is absent
KXSKVIMNSLQEXXXXXXXXXYYVIPLPELDQSVXX

SEQ ID NO: 10764 - protein, 39 aa, Artificial Sequence; identical to SEQ ID NO: 3330
  GFR-binding peptide
  MOD_RES (1)..(33)..(34): Xaa is C or S

SEQ ID NO: 10765 - protein, 37 aa, Artificial Sequence
  GFR-binding peptide
  MOD_RES (2)..(34)..(35): Xaa is C or S
GXSEVVMDQYNKLVVNNASDLYLISIASLRTPVXXTP

SEQ ID NO: 10766 - protein, 33 aa, Artificial Sequence
  GFR-binding peptide
  MOD_RES (31)..(31): Xaa is C or S
RVVMNEYQKYIVNSSDDIFLVSIPSLKTPAXTP

SEQ ID NO: 10767 - protein, 38 aa, Artificial Sequence; identical to SEQ ID NO: 3332
  GFR-binding peptide
  MOD_RES (1)..(3)..(36)..(37): Xaa is C or S
  MOD_RES (14)..(15)..(16)..(17)..(18): Xaa is A or G
  MOD_RES (19)..(20)..(21)..(22): Xaa is A or G or is absent

SEQ ID NO: 10768 - protein, 41 aa, Artificial Sequence
  GFR-binding peptide
  MOD_RES (1)..(3)..(35)..(36): Xaa is C or S
XGXGEVVMEEYQKYVVKDYEDIFLMSIPSLETPVXXAKPIS

SEQ ID NO: 10769 - protein, 43 aa, Artificial Sequence
  GFR-binding peptide
  MOD_RES (2)..(4)..(38)..(39): Xaa is C or S
  MOD_RES (16)..(17)..(18)..(19)..(20): Xaa is A or G
  MOD_RES (21)..(22)..(23)..(24): Xaa is A or G or is absent
HXGXSRVVMNNSLQEXXXXXXXXXYYVVPLPELKTPAXXPKPV

SEQ ID NO: 10770 - protein, 43 aa, Artificial Sequence
  GFR-binding peptide
  MOD_RES (1)..(3)..(37)..(38): Xaa is C or S
  MOD_RES (15)..(16)..(17)..(18)..(19): Xaa is A or G
  MOD_RES (20)..(21)..(22)..(23): Xaa is A or G or is absent
XGXSEVVMDNSLQEXXXXXXXXXYYLITLPELRTPVXXTPPTS

SEQ ID NO: 10771 - protein, 37 aa, Artificial Sequence; identical to SEQ ID NO: 3339
  GFR-binding peptide
  MOD_RES (1)..(32)..(33): Xaa is C or S

SEQ ID NO: 10772 - protein, 37 aa, Artificial Sequence; identical to SEQ ID NO: 3341
  GFR-binding peptide
  MOD_RES (2)..(35)..(36): Xaa is C or S
  MOD_RES (13)..(14)..(15)..(16)..(17): Xaa is A or G
  MOD_RES (18)..(19)..(20)..(21): Xaa is A or G or is absent

SEQ ID NO: 10773 - protein, 33 aa, Artificial Sequence
  GFR-binding peptide
  MOD_RES (1)..(1): Xaa is C or S
  MOD_RES (12)..(13)..(14)..(15)..(16): Xaa is A or G
  MOD_RES (17)..(18)..(19)..(20): Xaa is A or G or is absent
XSKVVMNSLQEXXXXXXXXXYYVIPLPELDQPV

SEQ ID NO: 10774 - protein, 37 aa, Artificial Sequence; identical to SEQ ID NO: 3342
  GFR-binding peptide
  MOD_RES (1)..(32)..(33): Xaa is C or S

SEQ ID NO: 10775 - protein, 36 aa, Artificial Sequence
  GFR-binding peptide
  MOD_RES (2)..(34)..(35): Xaa is C or S
GXSEVVMDEYQKYVVNNASDIFLISIPSLRTPVXXT

SEQ ID NO: 10776 - protein, 41 aa, Artificial Sequence; identical to SEQ ID NO: 3344
  GFR-binding peptide
  MOD_RES (1)..(35)..(36): Xaa is C or S
  MOD_RES (13)..(14)..(15)..(16)..(17): Xaa is A or G
  MOD_RES (18)..(19)..(20)..(21): Xaa is A or G or is absent

SEQ ID NO: 10777 - protein, 36 aa, Artificial Sequence; identical to SEQ ID NO: 3347
  GFR-binding peptide
  MOD_RES (2)..(4): Xaa is C or S
  MOD_RES (15)..(16)..(17)..(18)..(19): Xaa is A or G
  MOD_RES (20)..(21)..(22)..(23): Xaa is A or G or is absent

SEQ ID NO: 10778 - protein, 42 aa, Artificial Sequence; identical to SEQ ID NO: 3348
  GFR-binding peptide
  MOD_RES (2)..(4)..(38)..(39): Xaa is C or S
  MOD_RES (16)..(17)..(18)..(19)..(20): Xaa is A or G
  MOD_RES (21)..(22)..(23)..(24): Xaa is A or G or is absent

SEQ ID NO: 10779 - protein, 37 aa, Artificial Sequence; identical to SEQ ID NO: 3350
  GFR-binding peptide
  MOD_RES (2)..(35)..(36): Xaa is C or S
  MOD_RES (13)..(14)..(15)..(16)..(17): Xaa is A or G
  MOD_RES (18)..(19)..(20)..(21): Xaa is A or G or is absent

SEQ ID NO: 10780 - protein, 40 aa, Artificial Sequence
  GFR-binding peptide
  MOD_RES (2)..(34)..(35): Xaa is C or S
GXARVVMNEYQKYIVNSSDDIFLVSIPSLQTPAXXPKPVT

SEQ ID NO: 10781 - protein, 43 aa, Artificial Sequence; identical to SEQ ID NO: 3356
  GFR-binding peptide
  MOD_RES (1)..(3)..(37)..(38): Xaa is C or S
  MOD_RES (15)..(16)..(17)..(18)..(19): Xaa is A or G
  MOD_RES (20)..(21)..(22)..(23): Xaa is A or G or is absent

SEQ ID NO: 10782 - protein, 32 aa, Artificial Sequence
  GFR-binding peptide
  MOD_RES (2)..(2): Xaa is C or S
KXSKVIMNSLQEIKPTKGIYYVIPLPELDQSV

SEQ ID NO: 10783 - protein, 36 aa, Artificial Sequence; identical to SEQ ID NO: 3358
  GFR-binding peptide
  MOD_RES (1)..(35)..(36): Xaa is C or S
  MOD_RES (13)..(14)..(15)..(16)..(17): Xaa is A or G
  MOD_RES (18)..(19)..(20)..(21): Xaa is A or G or is absent

SEQ ID NO: 10784 - protein, 38 aa, Artificial Sequence
  GFR-binding peptide
  MOD_RES (32)..(33): Xaa is C or S
ARVVMNNSLQEIVNSSDDYYVVPLPELQTPAXXPKPVT

SEQ ID NO: 10785 - protein, 34 aa, Artificial Sequence
  GFR-binding peptide
  MOD_RES (1)..(3)..(34): Xaa is C or S
XKXSKVVMEYQKYVKPTRGVIFLISIPSLDQPVX

SEQ ID NO: 10786 - protein, 35 aa, Artificial Sequence
  GFR-binding peptide
  MOD_RES (32)..(32): Xaa is C or S
SRVVMNEYQKYIVNSSDDIFLVSIPSLKTPAXTPK

SEQ ID NO: 10787 - protein, 36 aa, Artificial Sequence; identical to SEQ ID NO: 3367
  GFR-binding peptide
  MOD_RES (1)..(3)..(35)..(36): Xaa is C or S

SEQ ID NO: 10788 - protein, 35 aa, Artificial Sequence
  GFR-binding peptide
  MOD_RES (31)..(32): Xaa is C or S
SKVVMEYQKYVKPTRGVIFLISIPSLDQPVXXPSA

SEQ ID NO: 10789 - protein, 37 aa, Artificial Sequence; identical to SEQ ID NO: 3368
  GFR-binding peptide
  MOD_RES (2)..(4)..(36)..(37): Xaa is C or S

SEQ ID NO: 10790 - protein, 36 aa, Artificial Sequence; identical to SEQ ID NO: 3370
  GFR-binding peptide
  MOD_RES (1)..(35)..(36): Xaa is C or S
  MOD_RES (13)..(14)..(15)..(16)..(17): Xaa is A or G
  MOD_RES (18)..(19)..(20)..(21): Xaa is A or G or is absent

SEQ ID NO: 10791 - protein, 39 aa, Artificial Sequence
  GFR-binding peptide
  MOD_RES (2)..(36)..(37): Xaa is C or S
  MOD_RES (14)..(15)..(16)..(17)..(18): Xaa is A or G
  MOD_RES (19)..(20)..(21)..(22): Xaa is A or G or is absent
GXARVVMNEYQKYXXXXXXXXXIFLVSIPSLQTPAXXPK

SEQ ID NO: 10792 - protein, 37 aa, Artificial Sequence; identical to SEQ ID NO: 3372
  GFR-binding peptide
  MOD_RES (1)..(3)..(37): Xaa is C or S
  MOD_RES (15)..(16)..(17)..(18)..(19): Xaa is A or G
  MOD_RES (20)..(21)..(22)..(23): Xaa is A or G or is absent

SEQ ID NO: 10793 - protein, 33 aa, Artificial Sequence
  GFR-binding peptide
  MOD_RES (33)..(33): Xaa is C or S
  MOD_RES (11)..(12)..(13)..(14)..(15): Xaa is A or G
  MOD_RES (16)..(17)..(18)..(19): Xaa is A or G or is absent
EVVMDNSLQEXXXXXXXXXYYLMTLPELETPVX

SEQ ID NO: 10794 - protein, 31 aa, Artificial Sequence
  GFR-binding peptide
GEVVMDNSLQEVVKENEDYYVMPLPELETPV

SEQ ID NO: 10795 - protein, 37 aa, Artificial Sequence; identical to SEQ ID NO: 3373
  GFR-binding peptide
  MOD_RES (1)..(3)..(34)..(35): Xaa is C or S

SEQ ID NO: 10796 - protein, 39 aa, Artificial Sequence
  GFR-binding peptide
  MOD_RES (34)..(35): Xaa is C or S
  MOD_RES (12)..(13)..(14)..(15)..(16): Xaa is A or G
  MOD_RES (17)..(18)..(19)..(20): Xaa is A or G or is absent
GEVVMENSLQEXXXXXXXXXYYLMTLPELETPVXXAKPI

SEQ ID NO: 10797 - protein, 40 aa, Artificial Sequence
  GFR-binding peptide
  MOD_RES (2)..(34)..(35): Xaa is C or S
GXGEVVMDNSLQEVVKENEDYYLMTLPELETPVXXAKPIK

SEQ ID NO: 10798 - protein, 38 aa, Artificial Sequence; identical to SEQ ID NO: 3376
  GFR-binding peptide
  MOD_RES (32)..(33): Xaa is C or S

SEQ ID NO: 10799 - protein, 36 aa, Artificial Sequence; identical to SEQ ID NO: 3377
  GFR-binding peptide
  MOD_RES (2)..(33)..(34): Xaa is C or S

SEQ ID NO: 10800 - protein, 36 aa, Artificial Sequence
  GFR-binding peptide
  MOD_RES (2)..(36): Xaa is C or S
  MOD_RES (14)..(15)..(16)..(17)..(18): Xaa is A or G
  MOD_RES (19)..(20)..(21)..(22): Xaa is A or G or is absent
GXSEVVMDNSLQEXXXXXXXXXYYVIPLPELRTPVX

SEQ ID NO: 10801 - protein, 42 aa, Artificial Sequence; identical to SEQ ID NO: 3378
  GFR-binding peptide
  MOD_RES (1)..(3)..(37)..(38): Xaa is C or S
  MOD_RES (15)..(16)..(17)..(18)..(19): Xaa is A or G
  MOD_RES (20)..(21)..(22)..(23): Xaa is A or G or is absent

SEQ ID NO: 10802 - protein, 40 aa, Artificial Sequence
  GFR-binding peptide
  MOD_RES (2)..(4)..(37)..(38): Xaa is C or S
  MOD_RES (15)..(16)..(17)..(18)..(19): Xaa is A or G
  MOD_RES (20)..(21)..(22)..(23): Xaa is A or G or is absent
SXKXSKVVMEYQKYXXXXXXXXXIFLISIPSLDQPVXXPS

SEQ ID NO: 10803 - protein, 32 aa, Artificial Sequence
  GFR-binding peptide
  MOD_RES (11)..(12)..(13)..(14)..(15): Xaa is A or G
  MOD_RES (16)..(17)..(18)..(19): Xaa is A or G or is absent
EVVMDNSLQEXXXXXXXXXYYVMPLPELETPV

SEQ ID NO: 10804 - protein, 39 aa, Artificial Sequence
  GFR-binding peptide
  MOD_RES (2)..(34)..(35): Xaa is C or S
GXGEVVMDNSLQEVVKENEDYYVMPLPELETPVXXAKPI

SEQ ID NO: 10805 - protein, 41 aa, Artificial Sequence
  GFR-binding peptide
  MOD_RES (1)..(35)..(36): Xaa is C or S
  MOD_RES (13)..(14)..(15)..(16)..(17): Xaa is A or G
  MOD_RES (18)..(19)..(20)..(21): Xaa is A or G or is absent
XSEVVMDEYQKYXXXXXXXXXIFLISIPSLRTPVXXTPPTS

SEQ ID NO: 10806 - protein, 36 aa, Artificial Sequence; identical to SEQ ID NO: 3381
  GFR-binding peptide
  MOD_RES (1)..(3)..(34)..(35): Xaa is C or S

SEQ ID NO: 10807 - protein, 35 aa, Artificial Sequence
  GFR-binding peptide
  MOD_RES (34)..(35): Xaa is C or S
  MOD_RES (12)..(13)..(14)..(15)..(16): Xaa is A or G
  MOD_RES (17)..(18)..(19)..(20): Xaa is A or G or is absent
GEVVMENSLQEXXXXXXXXXYYLMTLPELETPVXX

SEQ ID NO: 10808 - protein, 38 aa, Artificial Sequence
  GFR-binding peptide
  MOD_RES (2)..(34)..(35): Xaa is C or S
GXARVVMNNSLQEIVNSSDDYYLVTLPELQTPAXXPKP

SEQ ID NO: 10809 - protein, 39 aa, Artificial Sequence; identical to SEQ ID NO: 3384
  GFR-binding peptide
  MOD_RES (34)..(35): Xaa is C or S
  MOD_RES (12)..(13)..(14)..(15)..(16): Xaa is A or G
  MOD_RES (17)..(18)..(19)..(20): Xaa is A or G or is absent

SEQ ID NO: 10810 - protein, 40 aa, Artificial Sequence
  GFR-binding peptide
  MOD_RES (1)..(3)..(35)..(36): Xaa is C or S
XGXSEVVMDRYKKLVVNNASDFYLISIANLRTPVXXTPPT

SEQ ID NO: 10811 - protein, 36 aa, Artificial Sequence; identical to SEQ ID NO: 3388
  GFR-binding peptide
  MOD_RES (2)..(4)..(36): Xaa is C or S

SEQ ID NO: 10812 - protein, 39 aa, Artificial Sequence
  GFR-binding peptide
  MOD_RES (2)..(4)..(38)..(39): Xaa is C or S
  MOD_RES (16)..(17)..(18)..(19)..(20): Xaa is A or G
  MOD_RES (21)..(22)..(23)..(24): Xaa is A or G or is absent
RXGXSEVVMDRYKKLXXXXXXXXXFYLISIANLRTPVXX

SEQ ID NO: 10813 - protein, 32 aa, Artificial Sequence; identical to SEQ ID NO: 3389
  GFR-binding peptide
  MOD_RES (11)..(12)..(13)..(14)..(15): Xaa is A or G
  MOD_RES (16)..(17)..(18)..(19): Xaa is A or G or is absent

SEQ ID NO: 10814 - protein, 38 aa, Artificial Sequence
  GFR-binding peptide
  MOD_RES (1)..(35)..(36): Xaa is C or S
  MOD_RES (13)..(14)..(15)..(16)..(17): Xaa is A or G
  MOD_RES (18)..(19)..(20)..(21): Xaa is A or G or is absent
XSRVVMNNSLQEXXXXXXXXXYYVVPLPELKTPAXXPK

SEQ ID NO: 10815 - protein, 31 aa, Artificial Sequence; identical to SEQ ID NO: 3392
  GFR-binding peptide
  MOD_RES (31)..(31): Xaa is C or S

SEQ ID NO: 10816 - protein, 34 aa, Artificial Sequence
  GFR-binding peptide
  MOD_RES (1)..(34): Xaa is C or S
  MOD_RES (12)..(13)..(14)..(15)..(16): Xaa is A or G
  MOD_RES (17)..(18)..(19)..(20): Xaa is A or G or is absent
XSKVIMEYQKYXXXXXXXXXIFLISIPSLDQSVX

SEQ ID NO: 10817 - protein, 36 aa, Artificial Sequence
  GFR-binding peptide
  MOD_RES (1)..(35)..(36): Xaa is C or S
  MOD_RES (13)..(14)..(15)..(16)..(17): Xaa is A or G
  MOD_RES (18)..(19)..(20)..(21): Xaa is A or G or is absent
XSEVVMDEYQKYXXXXXXXXXIFLISIPSLRTPVXX

SEQ ID NO: 10818 - protein, 35 aa, Artificial Sequence
  GFR-binding peptide
  MOD_RES (2)..(4)..(35): Xaa is C or S
SXKXSKVIMNSLQEIKPTKGIYYVIPLPELDQSVX

SEQ ID NO: 10819 - protein, 39 aa, Artificial Sequence
  GFR-binding peptide
  MOD_RES (1)..(3)..(37)..(38): Xaa is C or S
  MOD_RES (15)..(16)..(17)..(18)..(19): Xaa is A or G
  MOD_RES (20)..(21)..(22)..(23): Xaa is A or G or is absent
XGXARVVMNNSLQEXXXXXXXXXYYLVTLPELQTPAXXP

SEQ ID NO: 10820 - protein, 39 aa, Artificial Sequence
  GFR-binding peptide
  MOD_RES (2)..(4)..(38)..(39): Xaa is C or S
  MOD_RES (16)..(17)..(18)..(19)..(20): Xaa is A or G
  MOD_RES (21)..(22)..(23)..(24): Xaa is A or G or is absent
HXGXARVVMNEYQKYXXXXXXXXXIFLVSIPSLQTPAXX

SEQ ID NO: 10821 - protein, 38 aa, Artificial Sequence
  GFR-binding peptide
  MOD_RES (2)..(4)..(36): Xaa is C or S
HXGXSRVVMNEYQKYIVNSSDDIFLVSIPSLKTPAXTP

SEQ ID NO: 10822 - protein, 39 aa, Artificial Sequence
  GFR-binding peptide
  MOD_RES (2)..(36): Xaa is C or S
  MOD_RES (14)..(15)..(16)..(17)..(18): Xaa is A or G
  MOD_RES (19)..(20)..(21)..(22): Xaa is A or G or is absent
GXSRVVMNNSLQEXXXXXXXXXYYLVTLPELKTPAXTPK

SEQ ID NO: 10823 - protein, 39 aa, Artificial Sequence; identical to SEQ ID NO: 3403
  GFR-binding peptide
  MOD_RES (2)..(34)..(35): Xaa is C or S

SEQ ID NO: 10824 - protein, 39 aa, Artificial Sequence
  GFR-binding peptide
  MOD_RES (1)..(34)..(35): Xaa is C or S
  MOD_RES (12)..(13)..(14)..(15)..(16): Xaa is A or G
  MOD_RES (17)..(18)..(19)..(20): Xaa is A or G or is absent
XSKVVMEYQKYXXXXXXXXXIFLISIPSLDQPVXXPSAS

SEQ ID NO: 10825 - protein, 35 aa, Artificial Sequence; identical to SEQ ID NO: 3404
  GFR-binding peptide
  MOD_RES (2)..(34)..(35): Xaa is C or S

SEQ ID NO: 10826 - protein, 40 aa, Artificial Sequence
  GFR-binding peptide
  MOD_RES (2)..(4)..(36)..(37): Xaa is C or S
RXGXSEVVMDNSLQEVVNNASDYYLITLPELRTPVXXTPP

SEQ ID NO: 10827 - protein, 36 aa, Artificial Sequence
  GFR-binding peptide
  MOD_RES (1)..(33): Xaa is C or S
XSRVVMNEYQKYIVNSSDDIFLVSIPSLKTPAXTPK

SEQ ID NO: 10828 - protein, 40 aa, Artificial Sequence
  GFR-binding peptide
  MOD_RES (34)..(35): Xaa is C or S
  MOD_RES (12)..(13)..(14)..(15)..(16): Xaa is A or G
  MOD_RES (17)..(18)..(19)..(20): Xaa is A or G or is absent
SEVVMDEYQKYXXXXXXXXXIFLISIPSLRTPVXXTPPTS

SEQ ID NO: 10829 - protein, 37 aa, Artificial Sequence
  GFR-binding peptide
  MOD_RES (1)..(33)..(34): Xaa is C or S
XGEVVMDNSLQEVVKENEDYYLMTLPELETPVXXAKP

SEQ ID NO: 10830 - protein, 36 aa, Artificial Sequence
  GFR-binding peptide
  MOD_RES (2)..(36): Xaa is C or S
  MOD_RES (14)..(15)..(16)..(17)..(18): Xaa is A or G
  MOD_RES (19)..(20)..(21)..(22): Xaa is A or G or is absent
GXGEVVMDNSLQEXXXXXXXXXYYVMPLPELETPVX

SEQ ID NO: 10831 - protein, 33 aa, Artificial Sequence
  GFR-binding peptide
  MOD_RES (32)..(33): Xaa is C or S
GEVVMENSLQEVVKDYEDYYLMTLPELETPVXX

SEQ ID NO: 10832 - protein, 40 aa, Artificial Sequence
  GFR-binding peptide
  MOD_RES (2)..(36): Xaa is C or S
  MOD_RES (14)..(15)..(16)..(17)..(18): Xaa is A or G
  MOD_RES (19)..(20)..(21)..(22): Xaa is A or G or is absent
GXSRVVMNNSLQEXXXXXXXXXYYLVTLPELKTPAXTPKT

SEQ ID NO: 10833 - protein, 34 aa, Artificial Sequence
  GFR-binding peptide
  MOD_RES (34)..(34): Xaa is C or S
  MOD_RES (12)..(13)..(14)..(15)..(16): Xaa is A or G
  MOD_RES (17)..(18)..(19)..(20): Xaa is A or G or is absent
GEVVMDNSLQEXXXXXXXXXYYVMPLPELETPVX

SEQ ID NO: 10834 - protein, 40 aa, Artificial Sequence; identical to SEQ ID NO: 3411
  GFR-binding peptide
  MOD_RES (1)..(34)..(35): Xaa is C or S
  MOD_RES (12)..(13)..(14)..(15)..(16): Xaa is A or G
  MOD_RES (17)..(18)..(19)..(20): Xaa is A or G or is absent

SEQ ID NO: 10835 - protein, 37 aa, Artificial Sequence
  GFR-binding peptide
  MOD_RES (2)..(35)..(36): Xaa is C or S
  MOD_RES (13)..(14)..(15)..(16)..(17): Xaa is A or G
  MOD_RES (18)..(19)..(20)..(21): Xaa is A or G or is absent
KXSKVVMNSLQEXXXXXXXXXYYLITLPELDQPVXXP

SEQ ID NO: 10836 - protein, 37 aa, Artificial Sequence
  GFR-binding peptide
  MOD_RES (1)..(33): Xaa is C or S
XSRVVMNNSLQEIVNSSDDYYVVPLPELKTPAXTPKT

SEQ ID NO: 10837 - protein, 39 aa, Artificial Sequence; identical to SEQ ID NO: 3413
  GFR-binding peptide
  MOD_RES (33)..(34): Xaa is C or S
  MOD_RES (11)..(12)..(13)..(14)..(15): Xaa is A or G
  MOD_RES (16)..(17)..(18)..(19): Xaa is A or G or is absent

SEQ ID NO: 10838 - protein, 36 aa, Artificial Sequence; identical to SEQ ID NO: 3414
  GFR-binding peptide
  MOD_RES (2)..(33)..(34): Xaa is C or S

SEQ ID NO: 10839 - protein, 36 aa, Artificial Sequence
  GFR-binding peptide
  MOD_RES (31)..(32): Xaa is C or S
SKVIMEYQKYIKPTKGIIFLISIPSLDQSVXXPSAS

SEQ ID NO: 10840 - protein, 42 aa, Artificial Sequence
  GFR-binding peptide
  MOD_RES (2)..(4)..(37)..(38): Xaa is C or S
  MOD_RES (15)..(16)..(17)..(18)..(19): Xaa is A or G
  MOD_RES (20)..(21)..(22)..(23): Xaa is A or G or is absent
SXKXSKVVMNSLQEXXXXXXXXXYYVIPLPELDQPVXXPSAS

SEQ ID NO: 10841 - protein, 40 aa, Artificial Sequence; identical to SEQ ID NO: 3417
  GFR-binding peptide
  MOD_RES (2)..(34)..(35): Xaa is C or S

SEQ ID NO: 10842 - protein, 36 aa, Artificial Sequence; identical to SEQ ID NO: 3418
  GFR-binding peptide
  MOD_RES (33)..(34): Xaa is C or S
  MOD_RES (11)..(12)..(13)..(14)..(15): Xaa is A or G
  MOD_RES (16)..(17)..(18)..(19): Xaa is A or G or is absent

SEQ ID NO: 10843 - protein, 35 aa, Artificial Sequence
  GFR-binding peptide
  MOD_RES (31)..(32): Xaa is C or S
SKVVMNSLQEVKPTRGVYYVIPLPELDQPVXXPSA

SEQ ID NO: 10844 - protein, 41 aa, Artificial Sequence
  GFR-binding peptide
  MOD_RES (1)..(35)..(36): Xaa is C or S
  MOD_RES (13)..(14)..(15)..(16)..(17): Xaa is A or G
  MOD_RES (18)..(19)..(20)..(21): Xaa is A or G or is absent
XGEVVMDNSLQEXXXXXXXXXYYLMTLPELETPVXXAKPIK

SEQ ID NO: 10845 - protein, 43 aa, Artificial Sequence; identical to SEQ ID NO: 3427
  GFR-binding peptide
  MOD_RES (2)..(4)..(38)..(39): Xaa is C or S
  MOD_RES (16)..(17)..(18)..(19)..(20): Xaa is A or G
  MOD_RES (21)..(22)..(23)..(24): Xaa is A or G or is absent

SEQ ID NO: 10846 - protein, 38 aa, Artificial Sequence
  GFR-binding peptide
  MOD_RES (2)..(35)..(36): Xaa is C or S
  MOD_RES (13)..(14)..(15)..(16)..(17): Xaa is A or G
  MOD_RES (18)..(19)..(20)..(21): Xaa is A or G or is absent
KXSKVVMEYQKYXXXXXXXXXIFLISIPSLDQPVXXPS

SEQ ID NO: 10847 - protein, 40 aa, Artificial Sequence
  GFR-binding peptide
  MOD_RES (34)..(34): Xaa is C or S
  MOD_RES (12)..(13)..(14)..(15)..(16): Xaa is A or G
  MOD_RES (17)..(18)..(19)..(20): Xaa is A or G or is absent
SRVVMNNSLQEXXXXXXXXXYYLVTLPELKTPAXTPKTVH

SEQ ID NO: 10848 - protein, 35 aa, Artificial Sequence; identical to SEQ ID NO: 3434
  GFR-binding peptide
  MOD_RES (1)..(33)..(34): Xaa is C or S

SEQ ID NO: 10849 - protein, 38 aa, Artificial Sequence; identical to SEQ ID NO: 3435
  GFR-binding peptide
  MOD_RES (2)..(34)..(35): Xaa is C or S

SEQ ID NO: 10850 - protein, 37 aa, Artificial Sequence
  GFR-binding peptide
  MOD_RES (2)..(4)..(36)..(37): Xaa is C or S
RXGXGEVVMENSLQEVVKDYEDYYLMTLPELETPVXX

SEQ ID NO: 10851 - protein, 39 aa, Artificial Sequence
  GFR-binding peptide
  MOD_RES (2)..(4)..(38)..(39): Xaa is C or S
  MOD_RES (16)..(17)..(18)..(19)..(20): Xaa is A or G
  MOD_RES (21)..(22)..(23)..(24): Xaa is A or G or is absent
RXGXSEVVMDNSLQEXXXXXXXXXYYVIPLPELRTPVXX

SEQ ID NO: 10852 - protein, 32 aa, Artificial Sequence; identical to SEQ ID NO: 3436
  GFR-binding peptide
  MOD_RES (1)..(1): Xaa is C or S

SEQ ID NO: 10853 - protein, 38 aa, Artificial Sequence; identical to SEQ ID NO: 3437
  GFR-binding peptide
  MOD_RES (1)..(35)..(36): Xaa is C or S
  MOD_RES (13)..(14)..(15)..(16)..(17): Xaa is A or G
  MOD_RES (18)..(19)..(20)..(21): Xaa is A or G or is absent

SEQ ID NO: 10854 - protein, 37 aa, Artificial Sequence; identical to SEQ ID NO: 3438
  GFR-binding peptide
  MOD_RES (33)..(34): Xaa is C or S
  MOD_RES (11)..(12)..(13)..(14)..(15): Xaa is A or G
  MOD_RES (16)..(17)..(18)..(19): Xaa is A or G or is absent

SEQ ID NO: 10855 - protein, 40 aa, Artificial Sequence; identical to SEQ ID NO: 3439
  GFR-binding peptide
  MOD_RES (2)..(4)..(35)..(36): Xaa is C or S

SEQ ID NO: 10856 - protein, 44 aa, Artificial Sequence
  GFR-binding peptide
  MOD_RES (2)..(4)..(38)..(39): Xaa is C or S
  MOD_RES (16)..(17)..(18)..(19)..(20): Xaa is A or G
  MOD_RES (21)..(22)..(23)..(24): Xaa is A or G or is absent
RXGXSEVVMDRYKKLXXXXXXXXXFYLISIANLRTPVXXTPPTS

SEQ ID NO: 10857 - protein, 41 aa, Artificial Sequence
  GFR-binding peptide
  MOD_RES (1)..(3)..(35)..(36): Xaa is C or S
XGXARVVMNNSLQEIVNSSDDYYLVTLPELQTPAXXPKPVT

SEQ ID NO: 10858 - protein, 40 aa, Artificial Sequence; identical to SEQ ID NO: 3440
  GFR-binding peptide
  MOD_RES (2)..(36)..(37): Xaa is C or S
  MOD_RES (14)..(15)..(16)..(17)..(18): Xaa is A or G
  MOD_RES (19)..(20)..(21)..(22): Xaa is A or G or is absent

SEQ ID NO: 10859 - protein, 38 aa, Artificial Sequence
  GFR-binding peptide
  MOD_RES (2)..(4)..(35)..(36): Xaa is C or S
SXKXSKVVMEYQKYVKPTRGVIFLISIPSLDQPVXXPS

SEQ ID NO: 10860 - protein, 35 aa, Artificial Sequence; identical to SEQ ID NO: 3441
  GFR-binding peptide
  MOD_RES (34)..(35): Xaa is C or S
  MOD_RES (12)..(13)..(14)..(15)..(16): Xaa is A or G
  MOD_RES (17)..(18)..(19)..(20): Xaa is A or G or is absent

SEQ ID NO: 10861 - protein, 30 aa, Artificial Sequence; identical to SEQ ID NO: 3442
  GFR-binding peptide

SEQ ID NO: 10862 - protein, 43 aa, Artificial Sequence
  GFR-binding peptide
  MOD_RES (2)..(4)..(37)..(38): Xaa is C or S
  MOD_RES (15)..(16)..(17)..(18)..(19): Xaa is A or G
  MOD_RES (20)..(21)..(22)..(23): Xaa is A or G or is absent
SXKXSRVIMNSLQEXXXXXXXXXYYVIPLPELAQPVXXPAASA

SEQ ID NO: 10863 - protein, 32 aa, Artificial Sequence
  GFR-binding peptide
  MOD_RES (31)..(32): Xaa is C or S
EVVMDEYQKYVVKENEDIFLMSIPSLETPVXX

SEQ ID NO: 10864 - protein, 37 aa, Artificial Sequence
  GFR-binding peptide
  MOD_RES (31)..(32): Xaa is C or S
EVVMDNSLQEVVNNASDYYVIPLPELRTPVXXTPPTS

SEQ ID NO: 10865 - protein, 37 aa, Artificial Sequence
  GFR-binding peptide
  MOD_RES (1)..(3)..(37): Xaa is C or S
  MOD_RES (15)..(16)..(17)..(18)..(19): Xaa is A or G
  MOD_RES (20)..(21)..(22)..(23): Xaa is A or G or is absent
XGXGEVVMDNSLQEXXXXXXXXXYYVMPLPELETPVX

SEQ ID NO: 10866 - protein, 34 aa, Artificial Sequence
  GFR-binding peptide
  MOD_RES (1)..(33)..(34): Xaa is C or S
XSRVVMNNSLQEIVNSSDDYYVVPLPELKTPAXX

SEQ ID NO: 10867 - protein, 38 aa, Artificial Sequence
  GFR-binding peptide
  MOD_RES (2)..(4)..(36)..(37): Xaa is C or S
HXGXSRVVMNNSLQEIVNSSDDYYVVPLPELKTPAXXP

SEQ ID NO: 10868 - protein, 33 aa, Artificial Sequence
  GFR-binding peptide
  MOD_RES (31)..(31): Xaa is C or S
RVVMNNSLQEIVNSSDDYYVVPLPELKTPAXTP

SEQ ID NO: 10869 - protein, 38 aa, Artificial Sequence
  GFR-binding peptide
  MOD_RES (2)..(4)..(36)..(37): Xaa is C or S
HXGXARVVMNEYQKYIVNSSDDIFLVSIPSLQTPAXXP

SEQ ID NO: 10870 - protein, 37 aa, Artificial Sequence; identical to SEQ ID NO: 3451
  GFR-binding peptide
  MOD_RES (34)..(35): Xaa is C or S
  MOD_RES (12)..(13)..(14)..(15)..(16): Xaa is A or G
  MOD_RES (17)..(18)..(19)..(20): Xaa is A or G or is absent

SEQ ID NO: 10871 - protein, 40 aa, Artificial Sequence
  GFR-binding peptide
  MOD_RES (34)..(35): Xaa is C or S
  MOD_RES (12)..(13)..(14)..(15)..(16): Xaa is A or G
  MOD_RES (17)..(18)..(19)..(20): Xaa is A or G or is absent
SEVVMDNSLQEXXXXXXXXXYYVIPLPELRTPVXXTPPTS

SEQ ID NO: 10872 - protein, 33 aa, Artificial Sequence
  GFR-binding peptide
  MOD_RES (32)..(33): Xaa is C or S
SEVVMDEYQKYVVNNASDIFLISIPSLRTPVXX

SEQ ID NO: 10873 - protein, 36 aa, Artificial Sequence
  GFR-binding peptide
  MOD_RES (2)..(33)..(34): Xaa is C or S
KXSRVIMEYQKYVKPKRGVIFLISIPSLAQPVXXPA

SEQ ID NO: 10874 - protein, 39 aa, Artificial Sequence
  GFR-binding peptide
  MOD_RES (1)..(35)..(36): Xaa is C or S
  MOD_RES (13)..(14)..(15)..(16)..(17): Xaa is A or G
  MOD_RES (18)..(19)..(20)..(21): Xaa is A or G or is absent
XSEVVMDNSLQEXXXXXXXXXYYVIPLPELRTPVXXTPP

SEQ ID NO: 10875 - protein, 38 aa, Artificial Sequence; identical to SEQ ID NO: 3459
  GFR-binding peptide
  MOD_RES (1)..(32)..(33): Xaa is C or S

SEQ ID NO: 10876 - protein, 34 aa, Artificial Sequence
  GFR-binding peptide
  MOD_RES (2)..(33)..(34): Xaa is C or S
KXSKVVMNSLQEVKPTRGVYYLITLPELDQPVXX

SEQ ID NO: 10877 - protein, 39 aa, Artificial Sequence; identical to SEQ ID NO: 3462
  GFR-binding peptide
  MOD_RES (1)..(33)..(34): Xaa is C or S

SEQ ID NO: 10878 - protein, 41 aa, Artificial Sequence
  GFR-binding peptide
  MOD_RES (1)..(3)..(35)..(36): Xaa is C or S
XGXGEVVMENSLQEVVKDYEDYYLMTLPELETPVXXAKPIS

SEQ ID NO: 10879 - protein, 41 aa, Artificial Sequence
  GFR-binding peptide
  MOD_RES (1)..(3)..(37)..(38): Xaa is C or S
  MOD_RES (15)..(16)..(17)..(18)..(19): Xaa is A or G
  MOD_RES (20)..(21)..(22)..(23): Xaa is A or G or is absent
XGXARVVMNNSLQEXXXXXXXXXYYVVPLPELQTPAXXPKP

SEQ ID NO: 10880 - protein, 34 aa, Artificial Sequence; identical to SEQ ID NO: 3465
  GFR-binding peptide
  MOD_RES (31)..(32): Xaa is C or S

SEQ ID NO: 10881 - protein, 39 aa, Artificial Sequence
  GFR-binding peptide
  MOD_RES (2)..(4)..(35)..(36): Xaa is C or S
SXKXSKVIMNSLQEIKPTKGIYYVIPLPELDQSVXXPSA

SEQ ID NO: 10882 - protein, 34 aa, Artificial Sequence
  GFR-binding peptide
  MOD_RES (31)..(32): Xaa is C or S
RVVMNNSLQEIVNSSDDYYLVTLPELQTPAXXPK

SEQ ID NO: 10883 - protein, 39 aa, Artificial Sequence; identical to SEQ ID NO: 3468
  GFR-binding peptide
  MOD_RES (2)..(34)..(35): Xaa is C or S

SEQ ID NO: 10884 - protein, 37 aa, Artificial Sequence; identical to SEQ ID NO: 3470
  GFR-binding peptide
  MOD_RES (1)..(3)..(37): Xaa is C or S
  MOD_RES (15)..(16)..(17)..(18)..(19): Xaa is A or G
  MOD_RES (20)..(21)..(22)..(23): Xaa is A or G or is absent

SEQ ID NO: 10885 - protein, 34 aa, Artificial Sequence
  GFR-binding peptide
  MOD_RES (31)..(32): Xaa is C or S
RVVMNNSLQEIVNSSDDYYVVPLPELQTPAXXPK

SEQ ID NO: 10886 - protein, 43 aa, Artificial Sequence
  GFR-binding peptide
  MOD_RES (2)..(4)..(38): Xaa is C or S
  MOD_RES (16)..(17)..(18)..(19)..(20): Xaa is A or G
  MOD_RES (21)..(22)..(23)..(24): Xaa is A or G or is absent
HXGXSRVVMNNSLQEXXXXXXXXXYYVVPLPELKTPAXTPKTV

SEQ ID NO: 10887 - protein, 40 aa, Artificial Sequence
  GFR-binding peptide
  MOD_RES (2)..(4)..(38): Xaa is C or S
  MOD_RES (16)..(17)..(18)..(19)..(20): Xaa is A or G
  MOD_RES (21)..(22)..(23)..(24): Xaa is A or G or is absent
HXGXSRVVMNNSLQEXXXXXXXXXYYLVTLPELKTPAXTP

SEQ ID NO: 10888 - protein, 42 aa, Artificial Sequence
  GFR-binding peptide
  MOD_RES (1)..(3)..(37)..(38): Xaa is C or S
  MOD_RES (15)..(16)..(17)..(18)..(19): Xaa is A or G
  MOD_RES (20)..(21)..(22)..(23): Xaa is A or G or is absent
XGXSEVVMDRYKKLXXXXXXXXXFYLISIANLRTPVXXTPPT

SEQ ID NO: 10889 - protein, 39 aa, Artificial Sequence
  GFR-binding peptide
  MOD_RES (1)..(3)..(37)..(38): Xaa is C or S
  MOD_RES (15)..(16)..(17)..(18)..(19): Xaa is A or G
  MOD_RES (20)..(21)..(22)..(23): Xaa is A or G or is absent
XGXGEVVMDNSLQEXXXXXXXXXYYVMPLPELETPVXXA

SEQ ID NO: 10890 - protein, 33 aa, Artificial Sequence; identical to SEQ ID NO: 3472
  GFR-binding peptide
  MOD_RES (2)..(2): Xaa is C or S

SEQ ID NO: 10891 - protein, 38 aa, Artificial Sequence
  GFR-binding peptide
  MOD_RES (2)..(4)..(36)..(37): Xaa is C or S
RXGXGEVVMEEYQKYVVKDYEDIFLMSIPSLETPVXXA

SEQ ID NO: 10892 - protein, 37 aa, Artificial Sequence; identical to SEQ ID NO: 3475
  GFR-binding peptide
  MOD_RES (34)..(35): Xaa is C or S
  MOD_RES (12)..(13)..(14)..(15)..(16): Xaa is A or G
  MOD_RES (17)..(18)..(19)..(20): Xaa is A or G or is absent

SEQ ID NO: 10893 - protein, 38 aa, Artificial Sequence
  GFR-binding peptide
  MOD_RES (1)..(34)..(35): Xaa is C or S
  MOD_RES (12)..(13)..(14)..(15)..(16): Xaa is A or G
  MOD_RES (17)..(18)..(19)..(20): Xaa is A or G or is absent
XSKVIMEYQKYXXXXXXXXXIFLISIPSLDQSVXXPSA

SEQ ID NO: 10894 - protein, 40 aa, Artificial Sequence
  GFR-binding peptide
  MOD_RES (34)..(35): Xaa is C or S
  MOD_RES (12)..(13)..(14)..(15)..(16): Xaa is A or G
  MOD_RES (17)..(18)..(19)..(20): Xaa is A or G or is absent
SRVVMNEYQKYXXXXXXXXXIFLVSIPSLKTPAXXPKPVY

SEQ ID NO: 10895 - protein, 34 aa, Artificial Sequence; identical to SEQ ID NO: 3477
  GFR-binding peptide
  MOD_RES (2)..(4): Xaa is C or S

SEQ ID NO: 10896 - protein, 42 aa, Artificial Sequence
  GFR-binding peptide
  MOD_RES (2)..(36)..(37): Xaa is C or S
  MOD_RES (14)..(15)..(16)..(17)..(18): Xaa is A or G
  MOD_RES (19)..(20)..(21)..(22): Xaa is A or G or is absent
GXSEVVMDRYKKLXXXXXXXXXFYLISIANLRTPVXXTPPTS

SEQ ID NO: 10897 - protein, 35 aa, Artificial Sequence; identical to SEQ ID NO: 3481
  GFR-binding peptide
  MOD_RES (31)..(32): Xaa is C or S

SEQ ID NO: 10898 - protein, 36 aa, Artificial Sequence
  GFR-binding peptide
  MOD_RES (1)..(33)..(34): Xaa is C or S
XARVVMNNSLQEIVNSSDDYYLVTLPELQTPAXXPK

SEQ ID NO: 10899 - protein, 38 aa, Artificial Sequence
  GFR-binding peptide
  MOD_RES (33)..(34): Xaa is C or S
  MOD_RES (11)..(12)..(13)..(14)..(15): Xaa is A or G
  MOD_RES (16)..(17)..(18)..(19): Xaa is A or G or is absent
EVVMEEYQKYXXXXXXXXXIFLMSIPSLETPVXXAKPI

SEQ ID NO: 10900 - protein, 35 aa, Artificial Sequence; identical to SEQ ID NO: 3487
  GFR-binding peptide
  MOD_RES (34)..(35): Xaa is C or S
  MOD_RES (12)..(13)..(14)..(15)..(16): Xaa is A or G
  MOD_RES (17)..(18)..(19)..(20): Xaa is A or G or is absent

SEQ ID NO: 10901 - protein, 36 aa, Artificial Sequence
  GFR-binding peptide
  MOD_RES (2)..(34)..(35): Xaa is C or S
GXARVVMNNSLQEIVNSSDDYYVVPLPELQTPAXXP

SEQ ID NO: 10902 - protein, 32 aa, Artificial Sequence
  GFR-binding peptide
  MOD_RES (1)..(1): Xaa is C or S
XSEVVMDRYKKLVVNNASDFYLISIANLRTPV

SEQ ID NO: 10903 - protein, 33 aa, Artificial Sequence
  GFR-binding peptide
  MOD_RES (2)..(2): Xaa is C or S
GXARVVMNNSLQEIVNSSDDYYVVPLPELQTPA

SEQ ID NO: 10904 - protein, 39 aa, Artificial Sequence; identical to SEQ ID NO: 3490
  GFR-binding peptide
  MOD_RES (1)..(3)..(35)..(36): Xaa is C or S

SEQ ID NO: 10905 - protein, 32 aa, Artificial Sequence
  GFR-binding peptide
  MOD_RES (32)..(32): Xaa is C or S
SEVVMDNSLQEVVNNASDYYVIPLPELRTPVX

SEQ ID NO: 10906 - protein, 40 aa, Artificial Sequence
  GFR-binding peptide
  MOD_RES (2)..(35)..(36): Xaa is C or S
  MOD_RES (13)..(14)..(15)..(16)..(17): Xaa is A or G
  MOD_RES (18)..(19)..(20)..(21): Xaa is A or G or is absent
KXSRVIMNSLQEXXXXXXXXXYYLITLPELAQPVXXPAAS

SEQ ID NO: 10907 - protein, 40 aa, Artificial Sequence
  GFR-binding peptide
  MOD_RES (2)..(34)..(35): Xaa is C or S
GXGEVVMENSLQEVVKDYEDYYVMPLPELETPVXXAKPIS

SEQ ID NO: 10908 - protein, 41 aa, Artificial Sequence; identical to SEQ ID NO: 3493
  GFR-binding peptide
  MOD_RES (1)..(3)..(36)..(37): Xaa is C or S
  MOD_RES (14)..(15)..(16)..(17)..(18): Xaa is A or G
  MOD_RES (19)..(20)..(21)..(22): Xaa is A or G or is absent

SEQ ID NO: 10909 - protein, 37 aa, Artificial Sequence; identical to SEQ ID NO: 3494
  GFR-binding peptide
  MOD_RES (33)..(34): Xaa is C or S
  MOD_RES (11)..(12)..(13)..(14)..(15): Xaa is A or G
  MOD_RES (16)..(17)..(18)..(19): Xaa is A or G or is absent

SEQ ID NO: 10910 - protein, 37 aa, Artificial Sequence
  GFR-binding peptide
  MOD_RES (32)..(32): Xaa is C or S
SRVVMNEYQKYIVNSSDDIFLVSIPSLKTPAXTPKTV

SEQ ID NO: 10911 - protein, 34 aa, Artificial Sequence; identical to SEQ ID NO: 3496
  GFR-binding peptide
  MOD_RES (33)..(34): Xaa is C or S
  MOD_RES (11)..(12)..(13)..(14)..(15): Xaa is A or G
  MOD_RES (16)..(17)..(18)..(19): Xaa is A or G or is absent

SEQ ID NO: 10912 - protein, 39 aa, Artificial Sequence; identical to SEQ ID NO: 3499
  GFR-binding peptide
  MOD_RES (2)..(36)..(37): Xaa is C or S
  MOD_RES (14)..(15)..(16)..(17)..(18): Xaa is A or G
  MOD_RES (19)..(20)..(21)..(22): Xaa is A or G or is absent

SEQ ID NO: 10913 - protein, 39 aa, Artificial Sequence
  GFR-binding peptide
  MOD_RES (1)..(35)..(36): Xaa is C or S
  MOD_RES (13)..(14)..(15)..(16)..(17): Xaa is A or G
  MOD_RES (18)..(19)..(20)..(21): Xaa is A or G or is absent
XGEVVMDEYQKYXXXXXXXXXIFLMSIPSLETPVXXAKP

SEQ ID NO: 10914 - protein, 32 aa, Artificial Sequence
  GFR-binding peptide
  MOD_RES (31)..(31): Xaa is C or S
RVVMNNSLQEIVNSSDDYYVVPLPELKTPAXT

SEQ ID NO: 10915 - protein, 40 aa, Artificial Sequence; identical to SEQ ID NO: 3503
  GFR-binding peptide
  MOD_RES (1)..(3)..(35)..(36): Xaa is C or S

SEQ ID NO: 10916 - protein, 35 aa, Artificial Sequence
  GFR-binding peptide
  MOD_RES (34)..(34): Xaa is C or S
  MOD_RES (12)..(13)..(14)..(15)..(16): Xaa is A or G
  MOD_RES (17)..(18)..(19)..(20): Xaa is A or G or is absent
SRVVMNNSLQEXXXXXXXXXYYLVTLPELKTPAXT

SEQ ID NO: 10917 - protein, 35 aa, Artificial Sequence
  GFR-binding peptide
  MOD_RES (31)..(32): Xaa is C or S
EVVMDRYKKLVVNNASDFYLISIANLRTPVXXTPP

SEQ ID NO: 10918 - protein, 33 aa, Artificial Sequence
  GFR-binding peptide
  MOD_RES (31)..(32): Xaa is C or S
EVVMDNSLQEVVKENEDYYLMTLPELETPVXXA

SEQ ID NO: 10919 - protein, 36 aa, Artificial Sequence
  GFR-binding peptide
  MOD_RES (2)..(36): Xaa is C or S
  MOD_RES (14)..(15)..(16)..(17)..(18): Xaa is A or G
  MOD_RES (19)..(20)..(21)..(22): Xaa is A or G or is absent
GXSRVVMNNSLQEXXXXXXXXXYYLVTLPELKTPAX

SEQ ID NO: 10920 - protein, 33 aa, Artificial Sequence
  GFR-binding peptide
  MOD_RES (12)..(13)..(14)..(15)..(16): Xaa is A or G
  MOD_RES (17)..(18)..(19)..(20): Xaa is A or G or is absent
ARVVMNNSLQEXXXXXXXXXYYLVTLPELQTPA

SEQ ID NO: 10921 - protein, 34 aa, Artificial Sequence
  GFR-binding peptide
  MOD_RES (33)..(33): Xaa is C or S
  MOD_RES (11)..(12)..(13)..(14)..(15): Xaa is A or G
  MOD_RES (16)..(17)..(18)..(19): Xaa is A or G or is absent
RVVMNNSLQEXXXXXXXXXYYLVTLPELKTPAXT

SEQ ID NO: 10922 - protein, 34 aa, Artificial Sequence; identical to SEQ ID NO: 3512
  GFR-binding peptide
  MOD_RES (32)..(32): Xaa is C or S

SEQ ID NO: 10923 - protein, 34 aa, Artificial Sequence; identical to SEQ ID NO: 3514
  GFR-binding peptide
  MOD_RES (34)..(34): Xaa is C or S
  MOD_RES (12)..(13)..(14)..(15)..(16): Xaa is A or G
  MOD_RES (17)..(18)..(19)..(20): Xaa is A or G or is absent

SEQ ID NO: 10924 - protein, 37 aa, Artificial Sequence; identical to SEQ ID NO: 3515
  GFR-binding peptide
  MOD_RES (2)..(4)..(35)..(36): Xaa is C or S

SEQ ID NO: 10925 - protein, 37 aa, Artificial Sequence; identical to SEQ ID NO: 3516
  GFR-binding peptide
  MOD_RES (1)..(3)..(36)..(37): Xaa is C or S
  MOD_RES (14)..(15)..(16)..(17)..(18): Xaa is A or G
  MOD_RES (19)..(20)..(21)..(22): Xaa is A or G or is absent

SEQ ID NO: 10926 - protein, 34 aa, Artificial Sequence; identical to SEQ ID NO: 3517
  GFR-binding peptide
  MOD_RES (2)..(34): Xaa is C or S

SEQ ID NO: 10927 - protein, 32 aa, Artificial Sequence
  GFR-binding peptide
  MOD_RES (2)..(2): Xaa is C or S
KXSKVIMEYQKYIKPTKGIIFLISIPSLDQSV

SEQ ID NO: 10928 - protein, 42 aa, Artificial Sequence
  GFR-binding peptide
  MOD_RES (2)..(4)..(37)..(38): Xaa is C or S
  MOD_RES (15)..(16)..(17)..(18)..(19): Xaa is A or G
  MOD_RES (20)..(21)..(22)..(23): Xaa is A or G or is absent
SXKXSKVIMEYQKYXXXXXXXXXIFLISIPSLDQSVXXPSAS

SEQ ID NO: 10929 - protein, 41 aa, Artificial Sequence
  GFR-binding peptide
  MOD_RES (1)..(3)..(35)..(36): Xaa is C or S
XGXSEVVMDNSLQEVVNNASDYYVIPLPELRTPVXXTPPTS

SEQ ID NO: 10930 - protein, 37 aa, Artificial Sequence
  GFR-binding peptide
  MOD_RES (2)..(34)..(35): Xaa is C or S
GXGEVVMDNSLQEVVKENEDYYLMTLPELETPVXXAK

SEQ ID NO: 10931 - protein, 37 aa, Artificial Sequence
  GFR-binding peptide
  MOD_RES (2)..(33)..(34): Xaa is C or S
KXSKVVMNSLQEVKPTRGVYYLITLPELDQPVXXPSA

SEQ ID NO: 10932 - protein, 32 aa, Artificial Sequence; identical to SEQ ID NO: 3520
  GFR-binding peptide
  MOD_RES (1)..(1): Xaa is C or S

SEQ ID NO: 10933 - protein, 42 aa, Artificial Sequence; identical to SEQ ID NO: 3521
  GFR-binding peptide
  MOD_RES (2)..(4)..(36): Xaa is C or S

SEQ ID NO: 10934 - protein, 41 aa, Artificial Sequence; identical to SEQ ID NO: 3522
  GFR-binding peptide
  MOD_RES (2)..(4)..(37)..(38): Xaa is C or S
  MOD_RES (15)..(16)..(17)..(18)..(19): Xaa is A or G
  MOD_RES (20)..(21)..(22)..(23): Xaa is A or G or is absent

SEQ ID NO: 10935 - protein, 39 aa, Artificial Sequence
  GFR-binding peptide
  MOD_RES (2)..(4)..(36)..(37): Xaa is C or S
RXGXGEVVMDNSLQEVVKENEDYYLMTLPELETPVXXAK

SEQ ID NO: 10936 - protein, 34 aa, Artificial Sequence; identical to SEQ ID NO: 3524
  GFR-binding peptide
  MOD_RES (1)..(32)..(33): Xaa is C or S

SEQ ID NO: 10937 - protein, 36 aa, Artificial Sequence; identical to SEQ ID NO: 3527
  GFR-binding peptide
  MOD_RES (1)..(3)..(34)..(35): Xaa is C or S

SEQ ID NO: 10938 - protein, 38 aa, Artificial Sequence; identical to SEQ ID NO: 3528
  GFR-binding peptide
  MOD_RES (2)..(4)..(35)..(36): Xaa is C or S

SEQ ID NO: 10939 - protein, 41 aa, Artificial Sequence
  GFR-binding peptide
  MOD_RES (1)..(3)..(35)..(36): Xaa is C or S
XGXARVVMNEYQKYIVNSSDDIFLVSIPSLQTPAXXPKPVT

SEQ ID NO: 10940 - protein, 39 aa, Artificial Sequence
  GFR-binding peptide
  MOD_RES (1)..(3)..(37)..(38): Xaa is C or S
  MOD_RES (15)..(16)..(17)..(18)..(19): Xaa is A or G
  MOD_RES (20)..(21)..(22)..(23): Xaa is A or G or is absent
XGXARVVMNEYQKYXXXXXXXXXIFLVSIPSLQTPAXXP

SEQ ID NO: 10941 - protein, 36 aa, Artificial Sequence
  GFR-binding peptide
  MOD_RES (2)..(4)..(36): Xaa is C or S
RXGXGEVVMDEYQKYVVKENEDIFLMSIPSLETPVX

SEQ ID NO: 10942 - protein, 36 aa, Artificial Sequence; identical to SEQ ID NO: 3537
  GFR-binding peptide
  MOD_RES (32)..(33): Xaa is C or S

SEQ ID NO: 10943 - protein, 35 aa, Artificial Sequence
  GFR-binding peptide
  MOD_RES (1)..(3)..(35): Xaa is C or S
XGXGEVVMDEYQKYVVKENEDIFLMSIPSLETPVX

SEQ ID NO: 10944 - protein, 40 aa, Artificial Sequence
  GFR-binding peptide
  MOD_RES (1)..(35)..(36): Xaa is C or S
  MOD_RES (13)..(14)..(15)..(16)..(17): Xaa is A or G
  MOD_RES (18)..(19)..(20)..(21): Xaa is A or G or is absent
XARVVMNEYQKYXXXXXXXXXIFLVSIPSLQTPAXXPKPV

SEQ ID NO: 10945 - protein, 38 aa, Artificial Sequence
  GFR-binding peptide
  MOD_RES (1)..(3)..(34)..(35): Xaa is C or S
XKXSKVIMEYQKYIKPTKGIIFLISIPSLDQSVXXPSA

SEQ ID NO: 10946 - protein, 37 aa, Artificial Sequence
  GFR-binding peptide
  MOD_RES (34)..(34): Xaa is C or S
  MOD_RES (12)..(13)..(14)..(15)..(16): Xaa is A or G
  MOD_RES (17)..(18)..(19)..(20): Xaa is A or G or is absent
SRVVMNNSLQEXXXXXXXXXYYLVTLPELKTPAXTPK

SEQ ID NO: 10947 - protein, 43 aa, Artificial Sequence
  GFR-binding peptide
  MOD_RES (1)..(3)..(37)..(38): Xaa is C or S
  MOD_RES (15)..(16)..(17)..(18)..(19): Xaa is A or G
  MOD_RES (20)..(21)..(22)..(23): Xaa is A or G or is absent
XGXSEVVMDRYKKLXXXXXXXXXFYLISIANLRTPVXXTPPTS

SEQ ID NO: 10948 - protein, 35 aa, Artificial Sequence
  GFR-binding peptide
  MOD_RES (1)..(35): Xaa is C or S
  MOD_RES (13)..(14)..(15)..(16)..(17): Xaa is A or G
  MOD_RES (18)..(19)..(20)..(21): Xaa is A or G or is absent
XGEVVMDNSLQEXXXXXXXXXYYLMTLPELETPVX

SEQ ID NO: 10949 - protein, 36 aa, Artificial Sequence
  GFR-binding peptide
  MOD_RES (2)..(4)..(36): Xaa is C or S
RXGXGEVVMDNSLQEVVKENEDYYLMTLPELETPVX

SEQ ID NO: 10950 - protein, 41 aa, Artificial Sequence
  GFR-binding peptide
  MOD_RES (2)..(36)..(37): Xaa is C or S
  MOD_RES (14)..(15)..(16)..(17)..(18): Xaa is A or G
  MOD_RES (19)..(20)..(21)..(22): Xaa is A or G or is absent
GXSEVVMDQYNKLXXXXXXXXXLYLISIASLRTPVXXTPPT

SEQ ID NO: 10951 - protein, 35 aa, Artificial Sequence
  GFR-binding peptide
  MOD_RES (2)..(34)..(35): Xaa is C or S
GXSEVVMDNSLQEVVNNASDYYLITLPELRTPVXX

SEQ ID NO: 10952 - protein, 39 aa, Artificial Sequence
  GFR-binding peptide
  MOD_RES (1)..(33)..(34): Xaa is C or S
XSEVVMDEYQKYVVNNASDIFLISIPSLRTPVXXTPPTS

SEQ ID NO: 10953 - protein, 42 aa, Artificial Sequence
  GFR-binding peptide
  MOD_RES (1)..(3)..(37)..(38): Xaa is C or S
  MOD_RES (15)..(16)..(17)..(18)..(19): Xaa is A or G
  MOD_RES (20)..(21)..(22)..(23): Xaa is A or G or is absent
XGXARVVMNNSLQEXXXXXXXXXYYLVTLPELQTPAXXPKPV

SEQ ID NO: 10954 - protein, 40 aa, Artificial Sequence
  GFR-binding peptide
  MOD_RES (1)..(3)..(37)..(38): Xaa is C or S
  MOD_RES (15)..(16)..(17)..(18)..(19): Xaa is A or G
  MOD_RES (20)..(21)..(22)..(23): Xaa is A or G or is absent
XGXGEVVMDNSLQEXXXXXXXXXYYLMTLPELETPVXXAK

SEQ ID NO: 10955 - protein, 37 aa, Artificial Sequence
  GFR-binding peptide
  MOD_RES (2)..(36)..(37): Xaa is C or S
  MOD_RES (14)..(15)..(16)..(17)..(18): Xaa is A or G
  MOD_RES (19)..(20)..(21)..(22): Xaa is A or G or is absent
GXGEVVMENSLQEXXXXXXXXXYYLMTLPELETPVXX

SEQ ID NO: 10956 - protein, 34 aa, Artificial Sequence; identical to SEQ ID NO: 3547
  GFR-binding peptide
  MOD_RES (2)..(33)..(34): Xaa is C or S

SEQ ID NO: 10957 - protein, 38 aa, Artificial Sequence
  GFR-binding peptide
  MOD_RES (33)..(34): Xaa is C or S
  MOD_RES (11)..(12)..(13)..(14)..(15): Xaa is A or G
  MOD_RES (16)..(17)..(18)..(19): Xaa is A or G or is absent
RVVMNNSLQEXXXXXXXXXYYVVPLPELKTPAXXPKPV

SEQ ID NO: 10958 - protein, 34 aa, Artificial Sequence
  GFR-binding peptide
  MOD_RES (1)..(3): Xaa is C or S
XGXSRVVMNNSLQEIVNSSDDYYLVTLPELKTPA

SEQ ID NO: 10959 - protein, 39 aa, Artificial Sequence; identical to SEQ ID NO: 3548
  GFR-binding peptide
  MOD_RES (1)..(35)..(36): Xaa is C or S
  MOD_RES (13)..(14)..(15)..(16)..(17): Xaa is A or G
  MOD_RES (18)..(19)..(20)..(21): Xaa is A or G or is absent

SEQ ID NO: 10960 - protein, 34 aa, Artificial Sequence; identical to SEQ ID NO: 3549
  GFR-binding peptide
  MOD_RES (2)..(2): Xaa is C or S
  MOD_RES (13)..(14)..(15)..(16)..(17): Xaa is A or G
  MOD_RES (18)..(19)..(20)..(21): Xaa is A or G or is absent

SEQ ID NO: 10961 - protein, 43 aa, Artificial Sequence
  GFR-binding peptide
  MOD_RES (1)..(3)..(37)..(38): Xaa is C or S
  MOD_RES (15)..(16)..(17)..(18)..(19): Xaa is A or G
  MOD_RES (20)..(21)..(22)..(23): Xaa is A or G or is absent
XGXGEVVMDNSLQEXXXXXXXXXYYLMTLPELETPVXXAKPIK

SEQ ID NO: 10962 - protein, 32 aa, Artificial Sequence
  GFR-binding peptide
  MOD_RES (1)..(1): Xaa is C or S
XSRVVMNNSLQEIVNSSDDYYVVPLPELKTPA

SEQ ID NO: 10963 - protein, 37 aa, Artificial Sequence
  GFR-binding peptide
  MOD_RES (1)..(3)..(35)..(36): Xaa is C or S
XGXSEVVMDNSLQEVVNNASDYYLITLPELRTPVXXT

SEQ ID NO: 10964 - protein, 36 aa, Artificial Sequence
  GFR-binding peptide
  MOD_RES (2)..(4)..(36): Xaa is C or S
HXGXSRVVMNEYQKYIVNSSDDIFLVSIPSLKTPAX

SEQ ID NO: 10965 - protein, 40 aa, Artificial Sequence; identical to SEQ ID NO: 3550
  GFR-binding peptide
  MOD_RES (2)..(4)..(38)..(39): Xaa is C or S
  MOD_RES (16)..(17)..(18)..(19)..(20): Xaa is A or G
  MOD_RES (21)..(22)..(23)..(24): Xaa is A or G or is absent

SEQ ID NO: 10966 - protein, 38 aa, Artificial Sequence
  GFR-binding peptide
  MOD_RES (32)..(33): Xaa is C or S
GEVVMDNSLQEVVKENEDYYVMPLPELETPVXXAKPIK

SEQ ID NO: 10967 - protein, 36 aa, Artificial Sequence
  GFR-binding peptide
  MOD_RES (1)..(34)..(35): Xaa is C or S
  MOD_RES (12)..(13)..(14)..(15)..(16): Xaa is A or G
  MOD_RES (17)..(18)..(19)..(20): Xaa is A or G or is absent
XSKVIMEYQKYXXXXXXXXXIFLISIPSLDQSVXXP

SEQ ID NO: 10968 - protein, 37 aa, Artificial Sequence
  GFR-binding peptide
  MOD_RES (2)..(4)..(36): Xaa is C or S
HXGXSRVVMNEYQKYIVNSSDDIFLVSIPSLKTPAXT

SEQ ID NO: 10969 - protein, 39 aa, Artificial Sequence
  GFR-binding peptide
  MOD_RES (34)..(35): Xaa is C or S
  MOD_RES (12)..(13)..(14)..(15)..(16): Xaa is A or G
  MOD_RES (17)..(18)..(19)..(20): Xaa is A or G or is absent
ARVVMNEYQKYXXXXXXXXXIFLVSIPSLQTPAXXPKPV

SEQ ID NO: 10970 - protein, 43 aa, Artificial Sequence
  GFR-binding peptide
  MOD_RES (1)..(3)..(37): Xaa is C or S
  MOD_RES (15)..(16)..(17)..(18)..(19): Xaa is A or G
  MOD_RES (20)..(21)..(22)..(23): Xaa is A or G or is absent
XGXSRVVMNNSLQEXXXXXXXXXYYLVTLPELKTPAXTPKTVH

SEQ ID NO: 10971 - protein, 34 aa, Artificial Sequence; identical to SEQ ID NO: 3551
  GFR-binding peptide
  MOD_RES (32)..(33): Xaa is C or S

SEQ ID NO: 10972 - protein, 31 aa, Artificial Sequence
  GFR-binding peptide
  MOD_RES (31)..(31): Xaa is C or S
EVVMDNSLQEVVKENEDYYVMPLPELETPVX

SEQ ID NO: 10973 - protein, 37 aa, Artificial Sequence
  GFR-binding peptide
  MOD_RES (1)..(3)..(35)..(36): Xaa is C or S
XGXSEVVMDEYQKYVVNNASDIFLISIPSLRTPVXXT

SEQ ID NO: 10974 - protein, 38 aa, Artificial Sequence
  GFR-binding peptide
  MOD_RES (34)..(35): Xaa is C or S
  MOD_RES (12)..(13)..(14)..(15)..(16): Xaa is A or G
  MOD_RES (17)..(18)..(19)..(20): Xaa is A or G or is absent
SRVVMNNSLQEXXXXXXXXXYYLVTLPELKTPAXXPKP

SEQ ID NO: 10975 - protein, 34 aa, Artificial Sequence
  GFR-binding peptide
  MOD_RES (1)..(3): Xaa is C or S
XGXSRVVMNEYQKYIVNSSDDIFLVSIPSLKTPA

SEQ ID NO: 10976 - protein, 39 aa, Artificial Sequence; identical to SEQ ID NO: 3556
  GFR-binding peptide
  MOD_RES (2)..(33)..(34): Xaa is C or S

SEQ ID NO: 10977 - protein, 41 aa, Artificial Sequence
  GFR-binding peptide
  MOD_RES (1)..(3)..(35)..(36): Xaa is C or S
XGXGEVVMDNSLQEVVKENEDYYVMPLPELETPVXXAKPIK

SEQ ID NO: 10978 - protein, 30 aa, Artificial Sequence
  GFR-binding peptide
EVVMENSLQEVVKDYEDYYVMPLPELETPV

SEQ ID NO: 10979 - protein, 39 aa, Artificial Sequence; identical to SEQ ID NO: 3560
  GFR-binding peptide
  MOD_RES (1)..(3)..(37)..(38): Xaa is C or S
  MOD_RES (15)..(16)..(17)..(18)..(19): Xaa is A or G
  MOD_RES (20)..(21)..(22)..(23): Xaa is A or G or is absent

SEQ ID NO: 10980 - protein, 35 aa, Artificial Sequence; identical to SEQ ID NO: 3562
  GFR-binding peptide
  MOD_RES (2)..(4): Xaa is C or S

SEQ ID NO: 10981 - protein, 36 aa, Artificial Sequence; identical to SEQ ID NO: 3563
  GFR-binding peptide
  MOD_RES (31)..(32): Xaa is C or S

SEQ ID NO: 10982 - protein, 33 aa, Artificial Sequence
  GFR-binding peptide
  MOD_RES (32)..(33): Xaa is C or S
SEVVMDRYKKLVVNNASDFYLISIANLRTPVXX

SEQ ID NO: 10983 - protein, 36 aa, Artificial Sequence
  GFR-binding peptide
  MOD_RES (2)..(34): Xaa is C or S
GXSRVVMNNSLQEIVNSSDDYYLVTLPELKTPAXTP

SEQ ID NO: 10984 - protein, 35 aa, Artificial Sequence
  GFR-binding peptide
  MOD_RES (1)..(3)..(34)..(35): Xaa is C or S
XKXSKVVMNSLQEVKPTRGVYYLITLPELDQPVXX

SEQ ID NO: 10985 - protein, 36 aa, Artificial Sequence
  GFR-binding peptide
  MOD_RES (1)..(35)..(36): Xaa is C or S
  MOD_RES (13)..(14)..(15)..(16)..(17): Xaa is A or G
  MOD_RES (18)..(19)..(20)..(21): Xaa is A or G or is absent
XGEVVMENSLQEXXXXXXXXXYYLMTLPELETPVXX

SEQ ID NO: 10986 - protein, 35 aa, Artificial Sequence
  GFR-binding peptide
  MOD_RES (1)..(3)..(35): Xaa is C or S
XGXGEVVMDNSLQEVVKENEDYYLMTLPELETPVX

SEQ ID NO: 10987 - protein, 43 aa, Artificial Sequence
  GFR-binding peptide
  MOD_RES (2)..(4)..(38)..(39): Xaa is C or S
  MOD_RES (16)..(17)..(18)..(19)..(20): Xaa is A or G
  MOD_RES (21)..(22)..(23)..(24): Xaa is A or G or is absent
RXGXSEVVMDNSLQEXXXXXXXXXYYLITLPELRTPVXXTPPT

SEQ ID NO: 10988 - protein, 30 aa, Artificial Sequence; identical to SEQ ID NO: 3571
  GFR-binding peptide

SEQ ID NO: 10989 - protein, 36 aa, Artificial Sequence
  GFR-binding peptide
  MOD_RES (2)..(34)..(35): Xaa is C or S
GXSRVVMNNSLQEIVNSSDDYYLVTLPELKTPAXXP

SEQ ID NO: 10990 - protein, 40 aa, Artificial Sequence
  GFR-binding peptide
  MOD_RES (2)..(34)..(35): Xaa is C or S
GXARVVMNNSLQEIVNSSDDYYVVPLPELQTPAXXPKPVT

SEQ ID NO: 10991 - protein, 39 aa, Artificial Sequence
  GFR-binding peptide
  MOD_RES (2)..(4)..(38)..(39): Xaa is C or S
  MOD_RES (16)..(17)..(18)..(19)..(20): Xaa is A or G
  MOD_RES (21)..(22)..(23)..(24): Xaa is A or G or is absent
HXGXARVVMNNSLQEXXXXXXXXXYYLVTLPELQTPAXX

SEQ ID NO: 10992 - protein, 38 aa, Artificial Sequence; identical to SEQ ID NO: 3573
  GFR-binding peptide
  MOD_RES (2)..(4)..(35)..(36): Xaa is C or S

SEQ ID NO: 10993 - protein, 32 aa, Artificial Sequence
  GFR-binding peptide
  MOD_RES (2)..(2): Xaa is C or S
KXSKVVMNSLQEVKPTRGVYYVIPLPELDQPV

SEQ ID NO: 10994 - protein, 36 aa, Artificial Sequence; identical to SEQ ID NO: 3575
  GFR-binding peptide
  MOD_RES (2)..(35)..(36): Xaa is C or S
  MOD_RES (13)..(14)..(15)..(16)..(17): Xaa is A or G
  MOD_RES (18)..(19)..(20)..(21): Xaa is A or G or is absent

SEQ ID NO: 10995 - protein, 40 aa, Artificial Sequence; identical to SEQ ID NO: 3576
  GFR-binding peptide
  MOD_RES (2)..(36)..(37): Xaa is C or S
  MOD_RES (14)..(15)..(16)..(17)..(18): Xaa is A or G
  MOD_RES (19)..(20)..(21)..(22): Xaa is A or G or is absent

SEQ ID NO: 10996 - protein, 35 aa, Artificial Sequence
  GFR-binding peptide
  MOD_RES (2)..(34)..(35): Xaa is C or S
GXSEVVMDEYQKYVVNNASDIFLISIPSLRTPVXX

SEQ ID NO: 10997 - protein, 37 aa, Artificial Sequence
  GFR-binding peptide
  MOD_RES (31)..(31): Xaa is C or S
RVVMNNSLQEIVNSSDDYYLVTLPELKTPAXTPKTVH

SEQ ID NO: 10998 - protein, 37 aa, Artificial Sequence
  GFR-binding peptide
  MOD_RES (2)..(34)..(35): Xaa is C or S
GXGEVVMEEYQKYVVKDYEDIFLMSIPSLETPVXXAK

SEQ ID NO: 10999 - protein, 36 aa, Artificial Sequence; identical to SEQ ID NO: 3589
  GFR-binding peptide
  MOD_RES (1)..(3)..(36): Xaa is C or S
  MOD_RES (14)..(15)..(16)..(17)..(18): Xaa is A or G
  MOD_RES (19)..(20)..(21)..(22): Xaa is A or G or is absent

SEQ ID NO: 11000 - protein, 41 aa, Artificial Sequence
  GFR-binding peptide
  MOD_RES (2)..(35)..(36): Xaa is C or S
  MOD_RES (13)..(14)..(15)..(16)..(17): Xaa is A or G
  MOD_RES (18)..(19)..(20)..(21): Xaa is A or G or is absent
KXSKVVMEYQKYXXXXXXXXXIFLISIPSLDQPVXXPSASA

SEQ ID NO: 11001 - protein, 37 aa, Artificial Sequence
  GFR-binding peptide
  MOD_RES (2)..(34)..(35): Xaa is C or S
GXSRVVMNEYQKYIVNSSDDIFLVSIPSLKTPAXXPK

SEQ ID NO: 11002 - protein, 40 aa, Artificial Sequence
  GFR-binding peptide
  MOD_RES (1)..(3)..(36)..(37): Xaa is C or S
  MOD_RES (14)..(15)..(16)..(17)..(18): Xaa is A or G
  MOD_RES (19)..(20)..(21)..(22): Xaa is A or G or is absent
XKXSRVIMEYQKYXXXXXXXXXIFLISIPSLAQPVXXPAA

SEQ ID NO: 11003 - protein, 37 aa, Artificial Sequence
  GFR-binding peptide
  MOD_RES (2)..(4)..(35)..(36): Xaa is C or S
SXKXSKVVMEYQKYVKPTRGVIFLISIPSLDQPVXXP

SEQ ID NO: 11004 - protein, 38 aa, Artificial Sequence; identical to SEQ ID NO: 3596
  GFR-binding peptide
  MOD_RES (2)..(4)..(36): Xaa is C or S

SEQ ID NO: 11005 - protein, 34 aa, Artificial Sequence
  GFR-binding peptide
  MOD_RES (34)..(34): Xaa is C or S
  MOD_RES (12)..(13)..(14)..(15)..(16): Xaa is A or G
  MOD_RES (17)..(18)..(19)..(20): Xaa is A or G or is absent
GEVVMENSLQEXXXXXXXXXYYLMTLPELETPVX

SEQ ID NO: 11006 - protein, 32 aa, Artificial Sequence; identical to SEQ ID NO: 3599
  GFR-binding peptide
  MOD_RES (31)..(32): Xaa is C or S

SEQ ID NO: 11007 - protein, 42 aa, Artificial Sequence; identical to SEQ ID NO: 3601
  GFR-binding peptide
  MOD_RES (1)..(3)..(36)..(37): Xaa is C or S
  MOD_RES (14)..(15)..(16)..(17)..(18): Xaa is A or G
  MOD_RES (19)..(20)..(21)..(22): Xaa is A or G or is absent

SEQ ID NO: 11008 - protein, 35 aa, Artificial Sequence
  GFR-binding peptide
  MOD_RES (31)..(32): Xaa is C or S
RVVMNNSLQEIVNSSDDYYLVTLPELQTPAXXPKP

SEQ ID NO: 11009 - protein, 37 aa, Artificial Sequence
  GFR-binding peptide
  MOD_RES (2)..(4)..(36): Xaa is C or S
HXGXSRVVMNNSLQEIVNSSDDYYLVTLPELKTPAXT

SEQ ID NO: 11010 - protein, 41 aa, Artificial Sequence
  GFR-binding peptide
  MOD_RES (2)..(4)..(37)..(38): Xaa is C or S
  MOD_RES (15)..(16)..(17)..(18)..(19): Xaa is A or G
  MOD_RES (20)..(21)..(22)..(23): Xaa is A or G or is absent
SXKXSKVIMNSLQEXXXXXXXXXYYVIPLPELDQSVXXPSA

SEQ ID NO: 11011 - protein, 38 aa, Artificial Sequence
  GFR-binding peptide
  MOD_RES (1)..(34)..(35): Xaa is C or S
  MOD_RES (12)..(13)..(14)..(15)..(16): Xaa is A or G
  MOD_RES (17)..(18)..(19)..(20): Xaa is A or G or is absent
XSKVVMEYQKYXXXXXXXXXIFLISIPSLDQPVXXPSA

SEQ ID NO: 11012 - protein, 37 aa, Artificial Sequence
  GFR-binding peptide
  MOD_RES (1)..(35)..(36): Xaa is C or S
  MOD_RES (13)..(14)..(15)..(16)..(17): Xaa is A or G
  MOD_RES (18)..(19)..(20)..(21): Xaa is A or G or is absent
XGEVVMEEYQKYXXXXXXXXXIFLMSIPSLETPVXXA

SEQ ID NO: 11013 - protein, 41 aa, Artificial Sequence; identical to SEQ ID NO: 3608
  GFR-binding peptide
  MOD_RES (1)..(3)..(35)..(36): Xaa is C or S

SEQ ID NO: 11014 - protein, 40 aa, Artificial Sequence
  GFR-binding peptide
  MOD_RES (34)..(35): Xaa is C or S
  MOD_RES (12)..(13)..(14)..(15)..(16): Xaa is A or G
  MOD_RES (17)..(18)..(19)..(20): Xaa is A or G or is absent
GEVVMDNSLQEXXXXXXXXXYYVMPLPELETPVXXAKPIK

SEQ ID NO: 11015 - protein, 32 aa, Artificial Sequence
  GFR-binding peptide
  MOD_RES (1)..(1): Xaa is C or S
XSEVVMDEYQKYVVNNASDIFLISIPSLRTPV

SEQ ID NO: 11016 - protein, 39 aa, Artificial Sequence; identical to SEQ ID NO: 3609
  GFR-binding peptide
  MOD_RES (1)..(3)..(34)..(35): Xaa is C or S

SEQ ID NO: 11017 - protein, 34 aa, Artificial Sequence
  GFR-binding peptide
  MOD_RES (2)..(34): Xaa is C or S
GXGEVVMDNSLQEVVKENEDYYVMPLPELETPVX

SEQ ID NO: 11018 - protein, 38 aa, Artificial Sequence
  GFR-binding peptide
  MOD_RES (1)..(33)..(34): Xaa is C or S
XSEVVMDEYQKYVVNNASDIFLISIPSLRTPVXXTPPT

SEQ ID NO: 11019 - protein, 36 aa, Artificial Sequence
  GFR-binding peptide
  MOD_RES (1)..(35)..(36): Xaa is C or S
  MOD_RES (13)..(14)..(15)..(16)..(17): Xaa is A or G
  MOD_RES (18)..(19)..(20)..(21): Xaa is A or G or is absent
XARVVMNNSLQEXXXXXXXXXYYLVTLPELQTPAXX

SEQ ID NO: 11020 - protein, 40 aa, Artificial Sequence
  GFR-binding peptide
  MOD_RES (34)..(35): Xaa is C or S
  MOD_RES (12)..(13)..(14)..(15)..(16): Xaa is A or G
  MOD_RES (17)..(18)..(19)..(20): Xaa is A or G or is absent
GEVVMDNSLQEXXXXXXXXXYYLMTLPELETPVXXAKPIK

SEQ ID NO: 11021 - protein, 31 aa, Artificial Sequence; identical to SEQ ID NO: 3611
  GFR-binding peptide

SEQ ID NO: 11022 - protein, 40 aa, Artificial Sequence
  GFR-binding peptide
  MOD_RES (2)..(34): Xaa is C or S
GXSRVVMNNSLQEIVNSSDDYYLVTLPELKTPAXTPKTVH

SEQ ID NO: 11023 - protein, 35 aa, Artificial Sequence
  GFR-binding peptide
  MOD_RES (2)..(33)..(34): Xaa is C or S
KXSRVIMNSLQEVKPKRGVYYVIPLPELAQPVXXP

SEQ ID NO: 11024 - protein, 37 aa, Artificial Sequence
  GFR-binding peptide
  MOD_RES (2)..(4): Xaa is C or S
  MOD_RES (16)..(17)..(18)..(19)..(20): Xaa is A or G
  MOD_RES (21)..(22)..(23)..(24): Xaa is A or G or is absent
HXGXARVVMNNSLQEXXXXXXXXXYYVVPLPELQTPA

SEQ ID NO: 11025 - protein, 39 aa, Artificial Sequence
  GFR-binding peptide
  MOD_RES (1)..(33)..(34): Xaa is C or S
XGEVVMDEYQKYVVKENEDIFLMSIPSLETPVXXAKPIK

SEQ ID NO: 11026 - protein, 37 aa, Artificial Sequence
  GFR-binding peptide
  MOD_RES (2)..(36)..(37): Xaa is C or S
  MOD_RES (14)..(15)..(16)..(17)..(18): Xaa is A or G
  MOD_RES (19)..(20)..(21)..(22): Xaa is A or G or is absent
GXGEVVMEEYQKYXXXXXXXXXIFLMSIPSLETPVXX

SEQ ID NO: 11027 - protein, 38 aa, Artificial Sequence
  GFR-binding peptide
  MOD_RES (2)..(34)..(35): Xaa is C or S
GXSEVVMDQYNKLVVNNASDLYLISIASLRTPVXXTPP

SEQ ID NO: 11028 - protein, 37 aa, Artificial Sequence
  GFR-binding peptide
  MOD_RES (2)..(34)..(35): Xaa is C or S
GXGEVVMENSLQEVVKDYEDYYVMPLPELETPVXXAK

SEQ ID NO: 11029 - protein, 34 aa, Artificial Sequence
  GFR-binding peptide
  MOD_RES (1)..(33)..(34): Xaa is C or S
XSEVVMDEYQKYVVNNASDIFLISIPSLRTPVXX

SEQ ID NO: 11030 - protein, 34 aa, Artificial Sequence; identical to SEQ ID NO: 3615
  GFR-binding peptide
  MOD_RES (31)..(32): Xaa is C or S

SEQ ID NO: 11031 - protein, 39 aa, Artificial Sequence
  GFR-binding peptide
  MOD_RES (2)..(36)..(37): Xaa is C or S
  MOD_RES (14)..(15)..(16)..(17)..(18): Xaa is A or G
  MOD_RES (19)..(20)..(21)..(22): Xaa is A or G or is absent
GXGEVVMDNSLQEXXXXXXXXXYYVMPLPELETPVXXAK

SEQ ID NO: 11032 - protein, 36 aa, Artificial Sequence
  GFR-binding peptide
  MOD_RES (31)..(32): Xaa is C or S
EVVMDNSLQEVVKENEDYYLMTLPELETPVXXAKPI

SEQ ID NO: 11033 - protein, 37 aa, Artificial Sequence
  GFR-binding peptide
  MOD_RES (2)..(4)..(36)..(37): Xaa is C or S
HXGXARVVMNNSLQEIVNSSDDYYVVPLPELQTPAXX

SEQ ID NO: 11034 - protein, 35 aa, Artificial Sequence
  GFR-binding peptide
  MOD_RES (33)..(34): Xaa is C or S
  MOD_RES (11)..(12)..(13)..(14)..(15): Xaa is A or G
  MOD_RES (16)..(17)..(18)..(19): Xaa is A or G or is absent
EVVMDEYQKYXXXXXXXXXIFLISIPSLRTPVXXT

SEQ ID NO: 11035 - protein, 38 aa, Artificial Sequence; identical to SEQ ID NO: 3618
  GFR-binding peptide
  MOD_RES (33)..(34): Xaa is C or S
  MOD_RES (11)..(12)..(13)..(14)..(15): Xaa is A or G
  MOD_RES (16)..(17)..(18)..(19): Xaa is A or G or is absent

SEQ ID NO: 11036 - protein, 37 aa, Artificial Sequence
  GFR-binding peptide
  MOD_RES (1)..(35)..(36): Xaa is C or S
  MOD_RES (13)..(14)..(15)..(16)..(17): Xaa is A or G
  MOD_RES (18)..(19)..(20)..(21): Xaa is A or G or is absent
XSEVVMDRYKKLXXXXXXXXXFYLISIANLRTPVXXT

SEQ ID NO: 11037 - protein, 40 aa, Artificial Sequence; identical to SEQ ID NO: 3621
  GFR-binding peptide
  MOD_RES (2)..(4)..(37)..(38): Xaa is C or S
  MOD_RES (15)..(16)..(17)..(18)..(19): Xaa is A or G
  MOD_RES (20)..(21)..(22)..(23): Xaa is A or G or is absent

SEQ ID NO: 11038 - protein, 30 aa, Artificial Sequence
  GFR-binding peptide
RVVMNNSLQEIVNSSDDYYLVTLPELKTPA

SEQ ID NO: 11039 - protein, 38 aa, Artificial Sequence
  GFR-binding peptide
  MOD_RES (1)..(3)..(37)..(38): Xaa is C or S
  MOD_RES (15)..(16)..(17)..(18)..(19): Xaa is A or G
  MOD_RES (20)..(21)..(22)..(23): Xaa is A or G or is absent
XGXARVVMNNSLQEXXXXXXXXXYYVVPLPELQTPAXX

SEQ ID NO: 11040 - protein, 39 aa, Artificial Sequence
  GFR-binding peptide
  MOD_RES (2)..(4)..(36)..(37): Xaa is C or S
HXGXARVVMNNSLQEIVNSSDDYYVVPLPELQTPAXXPK

SEQ ID NO: 11041 - protein, 39 aa, Artificial Sequence
  GFR-binding peptide
  MOD_RES (33)..(34): Xaa is C or S
  MOD_RES (11)..(12)..(13)..(14)..(15): Xaa is A or G
  MOD_RES (16)..(17)..(18)..(19): Xaa is A or G or is absent
EVVMDEYQKYXXXXXXXXXIFLMSIPSLETPVXXAKPIK

SEQ ID NO: 11042 - protein, 41 aa, Artificial Sequence
  GFR-binding peptide
  MOD_RES (2)..(35)..(36): Xaa is C or S
  MOD_RES (13)..(14)..(15)..(16)..(17): Xaa is A or G
  MOD_RES (18)..(19)..(20)..(21): Xaa is A or G or is absent
KXSRVIMNSLQEXXXXXXXXXYYVIPLPELAQPVXXPAASA

SEQ ID NO: 11043 - protein, 33 aa, Artificial Sequence; identical to SEQ ID NO: 3626
  GFR-binding peptide
  MOD_RES (1)..(33): Xaa is C or S

SEQ ID NO: 11044 - protein, 43 aa, Artificial Sequence
  GFR-binding peptide
  MOD_RES (2)..(4)..(38)..(39): Xaa is C or S
  MOD_RES (16)..(17)..(18)..(19)..(20): Xaa is A or G
  MOD_RES (21)..(22)..(23)..(24): Xaa is A or G or is absent
RXGXGEVVMDNSLQEXXXXXXXXXYYLMTLPELETPVXXAKPI

SEQ ID NO: 11045 - protein, 43 aa, Artificial Sequence; identical to SEQ ID NO: 3628
  GFR-binding peptide
  MOD_RES (1)..(3)..(37)..(38): Xaa is C or S
  MOD_RES (15)..(16)..(17)..(18)..(19): Xaa is A or G
  MOD_RES (20)..(21)..(22)..(23): Xaa is A or G or is absent

SEQ ID NO: 11046 - protein, 42 aa, Artificial Sequence
  GFR-binding peptide
  MOD_RES (2)..(4)..(36)..(37): Xaa is C or S
RXGXGEVVMENSLQEVVKDYEDYYVMPLPELETPVXXAKPIS

SEQ ID NO: 11047 - protein, 38 aa, Artificial Sequence; identical to SEQ ID NO: 3630
  GFR-binding peptide
  MOD_RES (33)..(34): Xaa is C or S
  MOD_RES (11)..(12)..(13)..(14)..(15): Xaa is A or G
  MOD_RES (16)..(17)..(18)..(19): Xaa is A or G or is absent

SEQ ID NO: 11048 - protein, 34 aa, Artificial Sequence; identical to SEQ ID NO: 3631
  GFR-binding peptide
  MOD_RES (1)..(33)..(34): Xaa is C or S

SEQ ID NO: 11049 - protein, 37 aa, Artificial Sequence
  GFR-binding peptide
  MOD_RES (2)..(34)..(35): Xaa is C or S
GXSRVVMNNSLQEIVNSSDDYYLVTLPELKTPAXXPK

SEQ ID NO: 11050 - protein, 34 aa, Artificial Sequence
  GFR-binding peptide
  MOD_RES (2)..(33)..(34): Xaa is C or S
KXSKVIMNSLQEIKPTKGIYYVIPLPELDQSVXX

SEQ ID NO: 11051 - protein, 38 aa, Artificial Sequence
  GFR-binding peptide
  MOD_RES (2)..(33)..(34): Xaa is C or S
KXSKVIMNSLQEIKPTKGIYYVIPLPELDQSVXXPSAS

SEQ ID NO: 11052 - protein, 37 aa, Artificial Sequence
  GFR-binding peptide
  MOD_RES (33)..(33): Xaa is C or S
  MOD_RES (11)..(12)..(13)..(14)..(15): Xaa is A or G
  MOD_RES (16)..(17)..(18)..(19): Xaa is A or G or is absent
RVVMNNSLQEXXXXXXXXXYYLVTLPELKTPAXTPKT

SEQ ID NO: 11053 - protein, 34 aa, Artificial Sequence
  GFR-binding peptide
  MOD_RES (32)..(33): Xaa is C or S
SRVVMNNSLQEIVNSSDDYYLVTLPELKTPAXXP

SEQ ID NO: 11054 - protein, 35 aa, Artificial Sequence; identical to SEQ ID NO: 3637
  GFR-binding peptide
  MOD_RES (2)..(35): Xaa is C or S
  MOD_RES (13)..(14)..(15)..(16)..(17): Xaa is A or G
  MOD_RES (18)..(19)..(20)..(21): Xaa is A or G or is absent

SEQ ID NO: 11055 - protein, 37 aa, Artificial Sequence
  GFR-binding peptide
  MOD_RES (1)..(33)..(34): Xaa is C or S
XARVVMNNSLQEIVNSSDDYYLVTLPELQTPAXXPKP

SEQ ID NO: 11056 - protein, 36 aa, Artificial Sequence; identical to SEQ ID NO: 3639
  GFR-binding peptide
  MOD_RES (2)..(4)..(35)..(36): Xaa is C or S

SEQ ID NO: 11057 - protein, 36 aa, Artificial Sequence; identical to SEQ ID NO: 3640
  GFR-binding peptide
  MOD_RES (1)..(35)..(36): Xaa is C or S
  MOD_RES (13)..(14)..(15)..(16)..(17): Xaa is A or G
  MOD_RES (18)..(19)..(20)..(21): Xaa is A or G or is absent

SEQ ID NO: 11058 - protein, 42 aa, Artificial Sequence
  GFR-binding peptide
  MOD_RES (2)..(4)..(36): Xaa is C or S
HXGXSRVVMNNSLQEIVNSSDDYYLVTLPELKTPAXTPKTVH

SEQ ID NO: 11059 - protein, 32 aa, Artificial Sequence; identical to SEQ ID NO: 3643
  GFR-binding peptide
  MOD_RES (1)..(1): Xaa is C or S

SEQ ID NO: 11060 - protein, 33 aa, Artificial Sequence
  GFR-binding peptide
  MOD_RES (32)..(33): Xaa is C or S
ARVVMNNSLQEIVNSSDDYYVVPLPELQTPAXX

SEQ ID NO: 11061 - protein, 38 aa, Artificial Sequence; identical to SEQ ID NO: 3644
  GFR-binding peptide
  MOD_RES (1)..(33)..(34): Xaa is C or S

SEQ ID NO: 11062 - protein, 37 aa, Artificial Sequence; identical to SEQ ID NO: 3645
  GFR-binding peptide
  MOD_RES (31)..(32): Xaa is C or S

SEQ ID NO: 11063 - protein, 40 aa, Artificial Sequence
  GFR-binding peptide
  MOD_RES (1)..(3)..(35)..(36): Xaa is C or S
XGXGEVVMDNSLQEVVKENEDYYVMPLPELETPVXXAKPI

SEQ ID NO: 11064 - protein, 38 aa, Artificial Sequence; identical to SEQ ID NO: 3648
  GFR-binding peptide
  MOD_RES (2)..(36)..(37): Xaa is C or S
  MOD_RES (14)..(15)..(16)..(17)..(18): Xaa is A or G
  MOD_RES (19)..(20)..(21)..(22): Xaa is A or G or is absent

SEQ ID NO: 11065 - protein, 37 aa, Artificial Sequence; identical to SEQ ID NO: 3649
  GFR-binding peptide
  MOD_RES (1)..(34)..(35): Xaa is C or S
  MOD_RES (12)..(13)..(14)..(15)..(16): Xaa is A or G
  MOD_RES (17)..(18)..(19)..(20): Xaa is A or G or is absent

SEQ ID NO: 11066 - protein, 31 aa, Artificial Sequence
  GFR-binding peptide
  MOD_RES (31)..(31): Xaa is C or S
RVVMNNSLQEIVNSSDDYYLVTLPELQTPAX

SEQ ID NO: 11067 - protein, 35 aa, Artificial Sequence
  GFR-binding peptide
  MOD_RES (33)..(34): Xaa is C or S
  MOD_RES (11)..(12)..(13)..(14)..(15): Xaa is A or G
  MOD_RES (16)..(17)..(18)..(19): Xaa is A or G or is absent
EVVMEEYQKYXXXXXXXXXIFLMSIPSLETPVXXA

SEQ ID NO: 11068 - protein, 42 aa, Artificial Sequence
  GFR-binding peptide
  MOD_RES (1)..(3)..(37): Xaa is C or S
  MOD_RES (15)..(16)..(17)..(18)..(19): Xaa is A or G
  MOD_RES (20)..(21)..(22)..(23): Xaa is A or G or is absent
XGXSRVVMNNSLQEXXXXXXXXXYYLVTLPELKTPAXTPKTV

SEQ ID NO: 11069 - protein, 31 aa, Artificial Sequence; identical to SEQ ID NO: 3652
  GFR-binding peptide

SEQ ID NO: 11070 - protein, 37 aa, Artificial Sequence; identical to SEQ ID NO: 3653
  GFR-binding peptide
  MOD_RES (2)..(34)..(35): Xaa is C or S

SEQ ID NO: 11071 - protein, 36 aa, Artificial Sequence
  GFR-binding peptide
  MOD_RES (33)..(34): Xaa is C or S
  MOD_RES (11)..(12)..(13)..(14)..(15): Xaa is A or G
  MOD_RES (16)..(17)..(18)..(19): Xaa is A or G or is absent
SKVVMNSLQEXXXXXXXXXYYLITLPELDQPVXXPS

SEQ ID NO: 11072 - protein, 36 aa, Artificial Sequence
  GFR-binding peptide
  MOD_RES (33)..(34): Xaa is C or S
  MOD_RES (11)..(12)..(13)..(14)..(15): Xaa is A or G
  MOD_RES (16)..(17)..(18)..(19): Xaa is A or G or is absent
EVVMDNSLQEXXXXXXXXXYYLITLPELRTPVXXTP

SEQ ID NO: 11073 - protein, 37 aa, Artificial Sequence
  GFR-binding peptide
  MOD_RES (2)..(4)..(36)..(37): Xaa is C or S
RXGXGEVVMEEYQKYVVKDYEDIFLMSIPSLETPVXX

SEQ ID NO: 11074 - protein, 42 aa, Artificial Sequence
  GFR-binding peptide
  MOD_RES (2)..(4)..(36)..(37): Xaa is C or S
RXGXSEVVMDEYQKYVVNNASDIFLISIPSLRTPVXXTPPTS

SEQ ID NO: 11075 - protein, 33 aa, Artificial Sequence
  GFR-binding peptide
  MOD_RES (33)..(33): Xaa is C or S
  MOD_RES (11)..(12)..(13)..(14)..(15): Xaa is A or G
  MOD_RES (16)..(17)..(18)..(19): Xaa is A or G or is absent
RVVMNNSLQEXXXXXXXXXYYVVPLPELKTPAX

SEQ ID NO: 11076 - protein, 40 aa, Artificial Sequence
  GFR-binding peptide
  MOD_RES (2)..(35)..(36): Xaa is C or S
  MOD_RES (13)..(14)..(15)..(16)..(17): Xaa is A or G
  MOD_RES (18)..(19)..(20)..(21): Xaa is A or G or is absent
KXSKVVMEYQKYXXXXXXXXXIFLISIPSLDQPVXXPSAS

SEQ ID NO: 11077 - protein, 36 aa, Artificial Sequence; identical to SEQ ID NO: 3658
  GFR-binding peptide
  MOD_RES (32)..(33): Xaa is C or S

SEQ ID NO: 11078 - protein, 37 aa, Artificial Sequence
  GFR-binding peptide
  MOD_RES (33)..(34): Xaa is C or S
  MOD_RES (11)..(12)..(13)..(14)..(15): Xaa is A or G
  MOD_RES (16)..(17)..(18)..(19): Xaa is A or G or is absent
EVVMENSLQEXXXXXXXXXYYVMPLPELETPVXXAKP

SEQ ID NO: 11079 - protein, 33 aa, Artificial Sequence
  GFR-binding peptide
  MOD_RES (33)..(33): Xaa is C or S
  MOD_RES (11)..(12)..(13)..(14)..(15): Xaa is A or G
  MOD_RES (16)..(17)..(18)..(19): Xaa is A or G or is absent
RVVMNNSLQEXXXXXXXXXYYLVTLPELKTPAX

SEQ ID NO: 11080 - protein, 40 aa, Artificial Sequence
  GFR-binding peptide
  MOD_RES (2)..(4)..(35)..(36): Xaa is C or S
SXKXSKVVMNSLQEVKPTRGVYYVIPLPELDQPVXXPSAS

SEQ ID NO: 11081 - protein, 36 aa, Artificial Sequence; identical to SEQ ID NO: 3661
  GFR-binding peptide
  MOD_RES (1)..(3)..(35)..(36): Xaa is C or S

SEQ ID NO: 11082 - protein, 36 aa, Artificial Sequence
  GFR-binding peptide
  MOD_RES (2)..(4): Xaa is C or S
  MOD_RES (15)..(16)..(17)..(18)..(19): Xaa is A or G
  MOD_RES (20)..(21)..(22)..(23): Xaa is A or G or is absent
SXKXSKVIMNSLQEXXXXXXXXXYYVIPLPELDQSV

SEQ ID NO: 11083 - protein, 37 aa, Artificial Sequence; identical to SEQ ID NO: 3663
  GFR-binding peptide
  MOD_RES (2)..(4)..(37): Xaa is C or S
  MOD_RES (15)..(16)..(17)..(18)..(19): Xaa is A or G
  MOD_RES (20)..(21)..(22)..(23): Xaa is A or G or is absent

SEQ ID NO: 11084 - protein, 41 aa, Artificial Sequence; identical to SEQ ID NO: 3668
  GFR-binding peptide
  MOD_RES (1)..(3)..(35)..(36): Xaa is C or S

SEQ ID NO: 11085 - protein, 34 aa, Artificial Sequence; identical to SEQ ID NO: 3669
  GFR-binding peptide
  MOD_RES (33)..(34): Xaa is C or S
  MOD_RES (11)..(12)..(13)..(14)..(15): Xaa is A or G
  MOD_RES (16)..(17)..(18)..(19): Xaa is A or G or is absent

SEQ ID NO: 11086 - protein, 38 aa, Artificial Sequence
  GFR-binding peptide
  MOD_RES (1)..(35)..(36): Xaa is C or S
  MOD_RES (13)..(14)..(15)..(16)..(17): Xaa is A or G
  MOD_RES (18)..(19)..(20)..(21): Xaa is A or G or is absent
XSEVVMDEYQKYXXXXXXXXXIFLISIPSLRTPVXXTP

SEQ ID NO: 11087 - protein, 42 aa, Artificial Sequence
  GFR-binding peptide
  MOD_RES (1)..(3)..(37)..(38): Xaa is C or S
  MOD_RES (15)..(16)..(17)..(18)..(19): Xaa is A or G
  MOD_RES (20)..(21)..(22)..(23): Xaa is A or G or is absent
XGXGEVVMENSLQEXXXXXXXXXYYLMTLPELETPVXXAKPI

SEQ ID NO: 11088 - protein, 32 aa, Artificial Sequence
  GFR-binding peptide
  MOD_RES (1)..(1): Xaa is C or S
XGEVVMENSLQEVVKDYEDYYLMTLPELETPV

SEQ ID NO: 11089 - protein, 32 aa, Artificial Sequence
  GFR-binding peptide
  MOD_RES (11)..(12)..(13)..(14)..(15): Xaa is A or G
  MOD_RES (16)..(17)..(18)..(19): Xaa is A or G or is absent
RVVMNNSLQEXXXXXXXXXYYVVPLPELKTPA

SEQ ID NO: 11090 - protein, 36 aa, Artificial Sequence
  GFR-binding peptide
  MOD_RES (1)..(3)..(36): Xaa is C or S
  MOD_RES (14)..(15)..(16)..(17)..(18): Xaa is A or G
  MOD_RES (19)..(20)..(21)..(22): Xaa is A or G or is absent
XKXSKVVMEYQKYXXXXXXXXXIFLISIPSLDQPVX

SEQ ID NO: 11091 - protein, 37 aa, Artificial Sequence
  GFR-binding peptide
  MOD_RES (31)..(32): Xaa is C or S
EVVMDEYQKYVVNNASDIFLISIPSLRTPVXXTPPTS

SEQ ID NO: 11092 - protein, 40 aa, Artificial Sequence; identical to SEQ ID NO: 3675
  GFR-binding peptide
  MOD_RES (1)..(35)..(36): Xaa is C or S
  MOD_RES (13)..(14)..(15)..(16)..(17): Xaa is A or G
  MOD_RES (18)..(19)..(20)..(21): Xaa is A or G or is absent

SEQ ID NO: 11093 - protein, 36 aa, Artificial Sequence
  GFR-binding peptide
  MOD_RES (31)..(32): Xaa is C or S
EVVMDNSLQEVVNNASDYYLITLPELRTPVXXTPPT

SEQ ID NO: 11094 - protein, 32 aa, Artificial Sequence
  GFR-binding peptide
  MOD_RES (31)..(32): Xaa is C or S
EVVMDNSLQEVVKENEDYYVMPLPELETPVXX

SEQ ID NO: 11095 - protein, 38 aa, Artificial Sequence
  GFR-binding peptide
  MOD_RES (1)..(3)..(34)..(35): Xaa is C or S
XKXSKVVMEYQKYVKPTRGVIFLISIPSLDQPVXXPSA

SEQ ID NO: 11096 - protein, 34 aa, Artificial Sequence; identical to SEQ ID NO: 3682
  GFR-binding peptide
  MOD_RES (1)..(32)..(33): Xaa is C or S

SEQ ID NO: 11097 - protein, 35 aa, Artificial Sequence; identical to SEQ ID NO: 3685
  GFR-binding peptide
  MOD_RES (33)..(34): Xaa is C or S
  MOD_RES (11)..(12)..(13)..(14)..(15): Xaa is A or G
  MOD_RES (16)..(17)..(18)..(19): Xaa is A or G or is absent

SEQ ID NO: 11098 - protein, 40 aa, Artificial Sequence
  GFR-binding peptide
  MOD_RES (2)..(36)..(37): Xaa is C or S
  MOD_RES (14)..(15)..(16)..(17)..(18): Xaa is A or G
  MOD_RES (19)..(20)..(21)..(22): Xaa is A or G or is absent
GXSRVVMNNSLQEXXXXXXXXXYYVVPLPELKTPAXXPKP

SEQ ID NO: 11099 - protein, 33 aa, Artificial Sequence
  GFR-binding peptide
  MOD_RES (1)..(3): Xaa is C or S
XKXSKVVMEYQKYVKPTRGVIFLISIPSLDQPV

SEQ ID NO: 11100 - protein, 36 aa, Artificial Sequence
  GFR-binding peptide
  MOD_RES (1)..(3): Xaa is C or S
  MOD_RES (15)..(16)..(17)..(18)..(19): Xaa is A or G
  MOD_RES (20)..(21)..(22)..(23): Xaa is A or G or is absent
XGXGEVVMDEYQKYXXXXXXXXXIFLMSIPSLETPV

SEQ ID NO: 11101 - protein, 38 aa, Artificial Sequence
  GFR-binding peptide
  MOD_RES (33)..(34): Xaa is C or S
  MOD_RES (11)..(12)..(13)..(14)..(15): Xaa is A or G
  MOD_RES (16)..(17)..(18)..(19): Xaa is A or G or is absent
RVVMNNSLQEXXXXXXXXXYYLVTLPELKTPAXXPKPV

SEQ ID NO: 11102 - protein, 38 aa, Artificial Sequence; identical to SEQ ID NO: 3687
  GFR-binding peptide
  MOD_RES (1)..(3)..(37)..(38): Xaa is C or S
  MOD_RES (15)..(16)..(17)..(18)..(19): Xaa is A or G
  MOD_RES (20)..(21)..(22)..(23): Xaa is A or G or is absent

SEQ ID NO: 11103 - protein, 40 aa, Artificial Sequence
  GFR-binding peptide
  MOD_RES (1)..(35)..(36): Xaa is C or S
  MOD_RES (13)..(14)..(15)..(16)..(17): Xaa is A or G
  MOD_RES (18)..(19)..(20)..(21): Xaa is A or G or is absent
XSRVVMNNSLQEXXXXXXXXXYYLVTLPELKTPAXXPKPV

SEQ ID NO: 11104 - protein, 34 aa, Artificial Sequence
  GFR-binding peptide
  MOD_RES (32)..(33): Xaa is C or S
GEVVMDEYQKYVVKENEDIFLMSIPSLETPVXXA

SEQ ID NO: 11105 - protein, 32 aa, Artificial Sequence
  GFR-binding peptide
  MOD_RES (1)..(32): Xaa is C or S
XSRVIMEYQKYVKPKRGVIFLISIPSLAQPVX

SEQ ID NO: 11106 - protein, 42 aa, Artificial Sequence
  GFR-binding peptide
  MOD_RES (1)..(3)..(37)..(38): Xaa is C or S
  MOD_RES (15)..(16)..(17)..(18)..(19): Xaa is A or G
  MOD_RES (20)..(21)..(22)..(23): Xaa is A or G or is absent
XGXGEVVMDNSLQEXXXXXXXXXYYLMTLPELETPVXXAKPI

SEQ ID NO: 11107 - protein, 38 aa, Artificial Sequence; identical to SEQ ID NO: 3688
  GFR-binding peptide
  MOD_RES (2)..(35)..(36): Xaa is C or S
  MOD_RES (13)..(14)..(15)..(16)..(17): Xaa is A or G
  MOD_RES (18)..(19)..(20)..(21): Xaa is A or G or is absent

SEQ ID NO: 11108 - protein, 41 aa, Artificial Sequence; identical to SEQ ID NO: 3689
  GFR-binding peptide
  MOD_RES (2)..(4)..(35)..(36): Xaa is C or S

SEQ ID NO: 11109 - protein, 37 aa, Artificial Sequence
  GFR-binding peptide
  MOD_RES (2)..(34)..(35): Xaa is C or S
GXARVVMNNSLQEIVNSSDDYYLVTLPELQTPAXXPK

SEQ ID NO: 11110 - protein, 40 aa, Artificial Sequence; identical to SEQ ID NO: 3691
  GFR-binding peptide
  MOD_RES (1)..(3)..(34)..(35): Xaa is C or S

SEQ ID NO: 11111 - protein, 34 aa, Artificial Sequence; identical to SEQ ID NO: 3692
  GFR-binding peptide
  MOD_RES (2)..(34): Xaa is C or S

SEQ ID NO: 11112 - protein, 41 aa, Artificial Sequence
  GFR-binding peptide
  MOD_RES (2)..(4)..(37)..(38): Xaa is C or S
  MOD_RES (15)..(16)..(17)..(18)..(19): Xaa is A or G
  MOD_RES (20)..(21)..(22)..(23): Xaa is A or G or is absent
SXKXSRVIMEYQKYXXXXXXXXXIFLISIPSLAQPVXXPAA

SEQ ID NO: 11113 - protein, 39 aa, Artificial Sequence
  GFR-binding peptide
  MOD_RES (1)..(35): Xaa is C or S
  MOD_RES (13)..(14)..(15)..(16)..(17): Xaa is A or G
  MOD_RES (18)..(19)..(20)..(21): Xaa is A or G or is absent
XSRVVMNNSLQEXXXXXXXXXYYLVTLPELKTPAXTPKT

SEQ ID NO: 11114 - protein, 38 aa, Artificial Sequence
  GFR-binding peptide
  MOD_RES (2)..(4)..(38): Xaa is C or S
  MOD_RES (16)..(17)..(18)..(19)..(20): Xaa is A or G
  MOD_RES (21)..(22)..(23)..(24): Xaa is A or G or is absent
HXGXARVVMNNSLQEXXXXXXXXXYYVVPLPELQTPAX

SEQ ID NO: 11115 - protein, 41 aa, Artificial Sequence; identical to SEQ ID NO: 3695
  GFR-binding peptide
  MOD_RES (2)..(35)..(36): Xaa is C or S
  MOD_RES (13)..(14)..(15)..(16)..(17): Xaa is A or G
  MOD_RES (18)..(19)..(20)..(21): Xaa is A or G or is absent

SEQ ID NO: 11116 - protein, 34 aa, Artificial Sequence; identical to SEQ ID NO: 3696
  GFR-binding peptide
  MOD_RES (1)..(33)..(34): Xaa is C or S

SEQ ID NO: 11117 - protein, 38 aa, Artificial Sequence
  GFR-binding peptide
  MOD_RES (33)..(34): Xaa is C or S
  MOD_RES (11)..(12)..(13)..(14)..(15): Xaa is A or G
  MOD_RES (16)..(17)..(18)..(19): Xaa is A or G or is absent
SKVVMNSLQEXXXXXXXXXYYVIPLPELDQPVXXPSAS

SEQ ID NO: 11118 - protein, 37 aa, Artificial Sequence; identical to SEQ ID NO: 3697
  GFR-binding peptide
  MOD_RES (31)..(32): Xaa is C or S

SEQ ID NO: 11119 - protein, 40 aa, Artificial Sequence
  GFR-binding peptide
  MOD_RES (34)..(35): Xaa is C or S
  MOD_RES (12)..(13)..(14)..(15)..(16): Xaa is A or G
  MOD_RES (17)..(18)..(19)..(20): Xaa is A or G or is absent
GEVVMENSLQEXXXXXXXXXYYLMTLPELETPVXXAKPIS

SEQ ID NO: 11120 - protein, 41 aa, Artificial Sequence
  GFR-binding peptide
  MOD_RES (2)..(4)..(38)..(39): Xaa is C or S
  MOD_RES (16)..(17)..(18)..(19)..(20): Xaa is A or G
  MOD_RES (21)..(22)..(23)..(24): Xaa is A or G or is absent
HXGXSRVVMNNSLQEXXXXXXXXXYYLVTLPELKTPAXXPK

SEQ ID NO: 11121 - protein, 32 aa, Artificial Sequence
  GFR-binding peptide
  MOD_RES (31)..(31): Xaa is C or S
RVVMNEYQKYIVNSSDDIFLVSIPSLKTPAXT

SEQ ID NO: 11122 - protein, 42 aa, Artificial Sequence; identical to SEQ ID NO: 3700
  GFR-binding peptide
  MOD_RES (2)..(36)..(37): Xaa is C or S
  MOD_RES (14)..(15)..(16)..(17)..(18): Xaa is A or G
  MOD_RES (19)..(20)..(21)..(22): Xaa is A or G or is absent

SEQ ID NO: 11123 - protein, 36 aa, Artificial Sequence; identical to SEQ ID NO: 3702
  GFR-binding peptide
  MOD_RES (2)..(4)..(35)..(36): Xaa is C or S

SEQ ID NO: 11124 - protein, 37 aa, Artificial Sequence
  GFR-binding peptide
  MOD_RES (2)..(4)..(37): Xaa is C or S
  MOD_RES (15)..(16)..(17)..(18)..(19): Xaa is A or G
  MOD_RES (20)..(21)..(22)..(23): Xaa is A or G or is absent
SXKXSKVIMEYQKYXXXXXXXXXIFLISIPSLDQSVX

SEQ ID NO: 11125 - protein, 36 aa, Artificial Sequence; identical to SEQ ID NO: 3704
  GFR-binding peptide
  MOD_RES (31)..(32): Xaa is C or S

SEQ ID NO: 11126 - protein, 37 aa, Artificial Sequence
  GFR-binding peptide
  MOD_RES (1)..(3)..(35): Xaa is C or S
XGXSRVVMNEYQKYIVNSSDDIFLVSIPSLKTPAXTP

SEQ ID NO: 11127 - protein, 37 aa, Artificial Sequence
  GFR-binding peptide
  MOD_RES (33)..(34): Xaa is C or S
  MOD_RES (11)..(12)..(13)..(14)..(15): Xaa is A or G
  MOD_RES (16)..(17)..(18)..(19): Xaa is A or G or is absent
SRVIMEYQKYXXXXXXXXXIFLISIPSLAQPVXXPAA

SEQ ID NO: 11128 - protein, 37 aa, Artificial Sequence
  GFR-binding peptide
  MOD_RES (33)..(33): Xaa is C or S
  MOD_RES (11)..(12)..(13)..(14)..(15): Xaa is A or G
  MOD_RES (16)..(17)..(18)..(19): Xaa is A or G or is absent
RVVMNNSLQEXXXXXXXXXYYVVPLPELKTPAXTPKT

SEQ ID NO: 11129 - protein, 40 aa, Artificial Sequence
  GFR-binding peptide
  MOD_RES (2)..(4)..(38)..(39): Xaa is C or S
  MOD_RES (16)..(17)..(18)..(19)..(20): Xaa is A or G
  MOD_RES (21)..(22)..(23)..(24): Xaa is A or G or is absent
RXGXSEVVMDRYKKLXXXXXXXXXFYLISIANLRTPVXXT

SEQ ID NO: 11130 - protein, 40 aa, Artificial Sequence; identical to SEQ ID NO: 3705
  GFR-binding peptide
  MOD_RES (2)..(34)..(35): Xaa is C or S

SEQ ID NO: 11131 - protein, 33 aa, Artificial Sequence; identical to SEQ ID NO: 3706
  GFR-binding peptide
  MOD_RES (32)..(33): Xaa is C or S

SEQ ID NO: 11132 - protein, 36 aa, Artificial Sequence; identical to SEQ ID NO: 3707
  GFR-binding peptide
  MOD_RES (33)..(34): Xaa is C or S
  MOD_RES (11)..(12)..(13)..(14)..(15): Xaa is A or G
  MOD_RES (16)..(17)..(18)..(19): Xaa is A or G or is absent

SEQ ID NO: 11133 - protein, 37 aa, Artificial Sequence
  GFR-binding peptide
  MOD_RES (2)..(33)..(34): Xaa is C or S
KXSKVVMEYQKYVKPTRGVIFLISIPSLDQPVXXPSA

SEQ ID NO: 11134 - protein, 36 aa, Artificial Sequence
  GFR-binding peptide
  MOD_RES (33)..(34): Xaa is C or S
  MOD_RES (11)..(12)..(13)..(14)..(15): Xaa is A or G
  MOD_RES (16)..(17)..(18)..(19): Xaa is A or G or is absent
EVVMDNSLQEXXXXXXXXXYYVIPLPELRTPVXXTP

SEQ ID NO: 11135 - protein, 40 aa, Artificial Sequence
  GFR-binding peptide
  MOD_RES (34)..(35): Xaa is C or S
  MOD_RES (12)..(13)..(14)..(15)..(16): Xaa is A or G
  MOD_RES (17)..(18)..(19)..(20): Xaa is A or G or is absent
SRVVMNNSLQEXXXXXXXXXYYVVPLPELKTPAXXPKPVY

SEQ ID NO: 11136 - protein, 37 aa, Artificial Sequence
  GFR-binding peptide
  MOD_RES (2)..(36)..(37): Xaa is C or S
  MOD_RES (14)..(15)..(16)..(17)..(18): Xaa is A or G
  MOD_RES (19)..(20)..(21)..(22): Xaa is A or G or is absent
GXSEVVMDRYKKLXXXXXXXXXFYLISIANLRTPVXX

SEQ ID NO: 11137 - protein, 37 aa, Artificial Sequence; identical to SEQ ID NO: 3710
  GFR-binding peptide
  MOD_RES (2)..(4)..(36)..(37): Xaa is C or S

SEQ ID NO: 11138 - protein, 38 aa, Artificial Sequence; identical to SEQ ID NO: 3711
  GFR-binding peptide
  MOD_RES (1)..(3)..(36)..(37): Xaa is C or S
  MOD_RES (14)..(15)..(16)..(17)..(18): Xaa is A or G
  MOD_RES (19)..(20)..(21)..(22): Xaa is A or G or is absent

SEQ ID NO: 11139 - protein, 41 aa, Artificial Sequence
  GFR-binding peptide
  MOD_RES (1)..(35)..(36): Xaa is C or S
  MOD_RES (13)..(14)..(15)..(16)..(17): Xaa is A or G
  MOD_RES (18)..(19)..(20)..(21): Xaa is A or G or is absent
XGEVVMEEYQKYXXXXXXXXXIFLMSIPSLETPVXXAKPIS

SEQ ID NO: 11140 - protein, 36 aa, Artificial Sequence; identical to SEQ ID NO: 3716
  GFR-binding peptide
  MOD_RES (31)..(32): Xaa is C or S

SEQ ID NO: 11141 - protein, 39 aa, Artificial Sequence
  GFR-binding peptide
  MOD_RES (2)..(36)..(37): Xaa is C or S
  MOD_RES (14)..(15)..(16)..(17)..(18): Xaa is A or G
  MOD_RES (19)..(20)..(21)..(22): Xaa is A or G or is absent
GXGEVVMDEYQKYXXXXXXXXXIFLMSIPSLETPVXXAK

SEQ ID NO: 11142 - protein, 39 aa, Artificial Sequence
  GFR-binding peptide
  MOD_RES (2)..(4)..(35)..(36): Xaa is C or S
SXKXSRVIMNSLQEVKPKRGVYYLITLPELAQPVXXPAA

SEQ ID NO: 11143 - protein, 40 aa, Artificial Sequence
  GFR-binding peptide
  MOD_RES (1)..(3)..(35)..(36): Xaa is C or S
XGXARVVMNNSLQEIVNSSDDYYVVPLPELQTPAXXPKPV

SEQ ID NO: 11144 - protein, 43 aa, Artificial Sequence
  GFR-binding peptide
  MOD_RES (1)..(3)..(37)..(38): Xaa is C or S
  MOD_RES (15)..(16)..(17)..(18)..(19): Xaa is A or G
  MOD_RES (20)..(21)..(22)..(23): Xaa is A or G or is absent
XGXGEVVMDNSLQEXXXXXXXXXYYVMPLPELETPVXXAKPIK

SEQ ID NO: 11145 - protein, 33 aa, Artificial Sequence
  GFR-binding peptide
  MOD_RES (12)..(13)..(14)..(15)..(16): Xaa is A or G
  MOD_RES (17)..(18)..(19)..(20): Xaa is A or G or is absent
ARVVMNNSLQEXXXXXXXXXYYVVPLPELQTPA

SEQ ID NO: 11146 - protein, 32 aa, Artificial Sequence
  GFR-binding peptide
  MOD_RES (31)..(32): Xaa is C or S
RVVMNNSLQEIVNSSDDYYLVTLPELQTPAXX

SEQ ID NO: 11147 - protein, 42 aa, Artificial Sequence
  GFR-binding peptide
  MOD_RES (2)..(4)..(38)..(39): Xaa is C or S
  MOD_RES (16)..(17)..(18)..(19)..(20): Xaa is A or G
  MOD_RES (21)..(22)..(23)..(24): Xaa is A or G or is absent
HXGXARVVMNNSLQEXXXXXXXXXYYLVTLPELQTPAXXPKP

SEQ ID NO: 11148 - protein, 34 aa, Artificial Sequence
  GFR-binding peptide
  MOD_RES (32)..(33): Xaa is C or S
SRVVMNNSLQEIVNSSDDYYVVPLPELKTPAXXP

SEQ ID NO: 11149 - protein, 40 aa, Artificial Sequence
  GFR-binding peptide
  MOD_RES (2)..(34): Xaa is C or S
GXSRVVMNEYQKYIVNSSDDIFLVSIPSLKTPAXTPKTVH

SEQ ID NO: 11150 - protein, 38 aa, Artificial Sequence
  GFR-binding peptide
  MOD_RES (1)..(32)..(33): Xaa is C or S
XSKVIMEYQKYIKPTKGIIFLISIPSLDQSVXXPSASA

SEQ ID NO: 11151 - protein, 41 aa, Artificial Sequence
  GFR-binding peptide
  MOD_RES (1)..(3)..(35)..(36): Xaa is C or S
XGXSRVVMNNSLQEIVNSSDDYYVVPLPELKTPAXXPKPVY

SEQ ID NO: 11152 - protein, 35 aa, Artificial Sequence
  GFR-binding peptide
  MOD_RES (1)..(3)..(35): Xaa is C or S
XGXGEVVMEEYQKYVVKDYEDIFLMSIPSLETPVX

SEQ ID NO: 11153 - protein, 38 aa, Artificial Sequence; identical to SEQ ID NO: 3723
  GFR-binding peptide
  MOD_RES (2)..(35)..(36): Xaa is C or S
  MOD_RES (13)..(14)..(15)..(16)..(17): Xaa is A or G
  MOD_RES (18)..(19)..(20)..(21): Xaa is A or G or is absent

SEQ ID NO: 11154 - protein, 34 aa, Artificial Sequence
  GFR-binding peptide
  MOD_RES (2)..(4): Xaa is C or S
SXKXSKVVMNSLQEVKPTRGVYYVIPLPELDQPV

SEQ ID NO: 11155 - protein, 40 aa, Artificial Sequence
  GFR-binding peptide
  MOD_RES (1)..(3)..(36)..(37): Xaa is C or S
  MOD_RES (14)..(15)..(16)..(17)..(18): Xaa is A or G
  MOD_RES (19)..(20)..(21)..(22): Xaa is A or G or is absent
XKXSKVIMEYQKYXXXXXXXXXIFLISIPSLDQSVXXPSA

SEQ ID NO: 11156 - protein, 38 aa, Artificial Sequence
  GFR-binding peptide
  MOD_RES (1)..(3)..(37): Xaa is C or S
  MOD_RES (15)..(16)..(17)..(18)..(19): Xaa is A or G
  MOD_RES (20)..(21)..(22)..(23): Xaa is A or G or is absent
XGXSRVVMNNSLQEXXXXXXXXXYYLVTLPELKTPAXT

SEQ ID NO: 11157 - protein, 39 aa, Artificial Sequence
  GFR-binding peptide
  MOD_RES (2)..(33)..(34): Xaa is C or S
KXSRVIMNSLQEVKPKRGVYYVIPLPELAQPVXXPAASA

SEQ ID NO: 11158 - protein, 40 aa, Artificial Sequence
  GFR-binding peptide
  MOD_RES (1)..(3)..(37)..(38): Xaa is C or S
  MOD_RES (15)..(16)..(17)..(18)..(19): Xaa is A or G
  MOD_RES (20)..(21)..(22)..(23): Xaa is A or G or is absent
XGXGEVVMENSLQEXXXXXXXXXYYVMPLPELETPVXXAK

SEQ ID NO: 11159 - protein, 39 aa, Artificial Sequence
  GFR-binding peptide
  MOD_RES (34)..(35): Xaa is C or S
  MOD_RES (12)..(13)..(14)..(15)..(16): Xaa is A or G
  MOD_RES (17)..(18)..(19)..(20): Xaa is A or G or is absent
SEVVMDEYQKYXXXXXXXXXIFLISIPSLRTPVXXTPPT

SEQ ID NO: 11160 - protein, 36 aa, Artificial Sequence
  GFR-binding peptide
  MOD_RES (1)..(3)..(35)..(36): Xaa is C or S
XGXSRVVMNNSLQEIVNSSDDYYVVPLPELKTPAXX

SEQ ID NO: 11161 - protein, 36 aa, Artificial Sequence; identical to SEQ ID NO: 3728
  GFR-binding peptide
  MOD_RES (1)..(3)..(35)..(36): Xaa is C or S

SEQ ID NO: 11162 - protein, 36 aa, Artificial Sequence
  GFR-binding peptide
  MOD_RES (2)..(34): Xaa is C or S
GXSRVVMNEYQKYIVNSSDDIFLVSIPSLKTPAXTP

SEQ ID NO: 11163 - protein, 39 aa, Artificial Sequence
  GFR-binding peptide
  MOD_RES (1)..(33)..(34): Xaa is C or S
XGEVVMENSLQEVVKDYEDYYVMPLPELETPVXXAKPIS

SEQ ID NO: 11164 - protein, 38 aa, Artificial Sequence; identical to SEQ ID NO: 3731
  GFR-binding peptide
  MOD_RES (1)..(35)..(36): Xaa is C or S
  MOD_RES (13)..(14)..(15)..(16)..(17): Xaa is A or G
  MOD_RES (18)..(19)..(20)..(21): Xaa is A or G or is absent

SEQ ID NO: 11165 - protein, 35 aa, Artificial Sequence
  GFR-binding peptide
  MOD_RES (2)..(2): Xaa is C or S
  MOD_RES (14)..(15)..(16)..(17)..(18): Xaa is A or G
  MOD_RES (19)..(20)..(21)..(22): Xaa is A or G or is absent
GXGEVVMDNSLQEXXXXXXXXXYYLMTLPELETPV

SEQ ID NO: 11166 - protein, 39 aa, Artificial Sequence; identical to SEQ ID NO: 3732
  GFR-binding peptide
  MOD_RES (33)..(34): Xaa is C or S
  MOD_RES (11)..(12)..(13)..(14)..(15): Xaa is A or G
  MOD_RES (16)..(17)..(18)..(19): Xaa is A or G or is absent

SEQ ID NO: 11167 - protein, 39 aa, Artificial Sequence
  GFR-binding peptide
  MOD_RES (1)..(3)..(35)..(36): Xaa is C or S
XGXGEVVMENSLQEVVKDYEDYYVMPLPELETPVXXAKP

SEQ ID NO: 11168 - protein, 39 aa, Artificial Sequence; identical to SEQ ID NO: 3738
  GFR-binding peptide
  MOD_RES (34)..(35): Xaa is C or S
  MOD_RES (12)..(13)..(14)..(15)..(16): Xaa is A or G
  MOD_RES (17)..(18)..(19)..(20): Xaa is A or G or is absent

SEQ ID NO: 11169 - protein, 37 aa, Artificial Sequence
  GFR-binding peptide
  MOD_RES (2)..(4): Xaa is C or S
  MOD_RES (16)..(17)..(18)..(19)..(20): Xaa is A or G
  MOD_RES (21)..(22)..(23)..(24): Xaa is A or G or is absent
HXGXARVVMNEYQKYXXXXXXXXXIFLVSIPSLQTPA

SEQ ID NO: 11170 - protein, 38 aa, Artificial Sequence
  GFR-binding peptide
  MOD_RES (34)..(35): Xaa is C or S
  MOD_RES (12)..(13)..(14)..(15)..(16): Xaa is A or G
  MOD_RES (17)..(18)..(19)..(20): Xaa is A or G or is absent
SEVVMDNSLQEXXXXXXXXXYYLITLPELRTPVXXTPP

SEQ ID NO: 11171 - protein, 42 aa, Artificial Sequence
  GFR-binding peptide
  MOD_RES (1)..(3)..(37)..(38): Xaa is C or S
  MOD_RES (15)..(16)..(17)..(18)..(19): Xaa is A or G
  MOD_RES (20)..(21)..(22)..(23): Xaa is A or G or is absent
XGXARVVMNNSLQEXXXXXXXXXYYVVPLPELQTPAXXPKPV

SEQ ID NO: 11172 - protein, 33 aa, Artificial Sequence
  GFR-binding peptide
  MOD_RES (1)..(3): Xaa is C or S
XKXSKVIMEYQKYIKPTKGIIFLISIPSLDQSV

SEQ ID NO: 11173 - protein, 35 aa, Artificial Sequence
  GFR-binding peptide
  MOD_RES (1)..(3)..(35): Xaa is C or S
XGXGEVVMENSLQEVVKDYEDYYLMTLPELETPVX

SEQ ID NO: 11174 - protein, 37 aa, Artificial Sequence
  GFR-binding peptide
  MOD_RES (1)..(3)..(35): Xaa is C or S
XGXSRVVMNNSLQEIVNSSDDYYLVTLPELKTPAXTP

SEQ ID NO: 11175 - protein, 42 aa, Artificial Sequence
  GFR-binding peptide
  MOD_RES (2)..(4)..(37)..(38): Xaa is C or S
  MOD_RES (15)..(16)..(17)..(18)..(19): Xaa is A or G
  MOD_RES (20)..(21)..(22)..(23): Xaa is A or G or is absent
SXKXSRVIMNSLQEXXXXXXXXXYYVIPLPELAQPVXXPAAS

SEQ ID NO: 11176 - protein, 34 aa, Artificial Sequence
  GFR-binding peptide
  MOD_RES (1)..(1): Xaa is C or S
  MOD_RES (13)..(14)..(15)..(16)..(17): Xaa is A or G
  MOD_RES (18)..(19)..(20)..(21): Xaa is A or G or is absent
XGEVVMDNSLQEXXXXXXXXXYYLMTLPELETPV

SEQ ID NO: 11177 - protein, 43 aa, Artificial Sequence
  GFR-binding peptide
  MOD_RES (2)..(4)..(38)..(39): Xaa is C or S
  MOD_RES (16)..(17)..(18)..(19)..(20): Xaa is A or G
  MOD_RES (21)..(22)..(23)..(24): Xaa is A or G or is absent
HXGXSRVVMNNSLQEXXXXXXXXXYYLVTLPELKTPAXXPKPV

SEQ ID NO: 11178 - protein, 36 aa, Artificial Sequence; identical to SEQ ID NO: 3747
  GFR-binding peptide
  MOD_RES (1)..(3): Xaa is C or S
  MOD_RES (15)..(16)..(17)..(18)..(19): Xaa is A or G
  MOD_RES (20)..(21)..(22)..(23): Xaa is A or G or is absent

SEQ ID NO: 11179 - protein, 37 aa, Artificial Sequence
  GFR-binding peptide
  MOD_RES (2)..(35)..(36): Xaa is C or S
  MOD_RES (13)..(14)..(15)..(16)..(17): Xaa is A or G
  MOD_RES (18)..(19)..(20)..(21): Xaa is A or G or is absent
KXSRVIMNSLQEXXXXXXXXXYYVIPLPELAQPVXXP

SEQ ID NO: 11180 - protein, 42 aa, Artificial Sequence
  GFR-binding peptide
  MOD_RES (1)..(3)..(37)..(38): Xaa is C or S
  MOD_RES (15)..(16)..(17)..(18)..(19): Xaa is A or G
  MOD_RES (20)..(21)..(22)..(23): Xaa is A or G or is absent
XGXSRVVMNEYQKYXXXXXXXXXIFLVSIPSLKTPAXXPKPV

SEQ ID NO: 11181 - protein, 37 aa, Artificial Sequence; identical to SEQ ID NO: 3749
  GFR-binding peptide
  MOD_RES (2)..(4)..(37): Xaa is C or S
  MOD_RES (15)..(16)..(17)..(18)..(19): Xaa is A or G
  MOD_RES (20)..(21)..(22)..(23): Xaa is A or G or is absent

SEQ ID NO: 11182 - protein, 39 aa, Artificial Sequence; identical to SEQ ID NO: 3750
  GFR-binding peptide
  MOD_RES (1)..(3)..(34)..(35): Xaa is C or S

SEQ ID NO: 11183 - protein, 40 aa, Artificial Sequence
  GFR-binding peptide
  MOD_RES (1)..(3)..(37)..(38): Xaa is C or S
  MOD_RES (15)..(16)..(17)..(18)..(19): Xaa is A or G
  MOD_RES (20)..(21)..(22)..(23): Xaa is A or G or is absent
XGXGEVVMDNSLQEXXXXXXXXXYYVMPLPELETPVXXAK

SEQ ID NO: 11184 - protein, 36 aa, Artificial Sequence
  GFR-binding peptide
  MOD_RES (2)..(4)..(36): Xaa is C or S
RXGXGEVVMEEYQKYVVKDYEDIFLMSIPSLETPVX

SEQ ID NO: 11185 - protein, 37 aa, Artificial Sequence; identical to SEQ ID NO: 3752
  GFR-binding peptide
  MOD_RES (1)..(35)..(36): Xaa is C or S
  MOD_RES (13)..(14)..(15)..(16)..(17): Xaa is A or G
  MOD_RES (18)..(19)..(20)..(21): Xaa is A or G or is absent

SEQ ID NO: 11186 - protein, 40 aa, Artificial Sequence
  GFR-binding peptide
  MOD_RES (1)..(3)..(37)..(38): Xaa is C or S
  MOD_RES (15)..(16)..(17)..(18)..(19): Xaa is A or G
  MOD_RES (20)..(21)..(22)..(23): Xaa is A or G or is absent
XGXGEVVMENSLQEXXXXXXXXXYYLMTLPELETPVXXAK

SEQ ID NO: 11187 - protein, 38 aa, Artificial Sequence; identical to SEQ ID NO: 3755
  GFR-binding peptide
  MOD_RES (2)..(36)..(37): Xaa is C or S
  MOD_RES (14)..(15)..(16)..(17)..(18): Xaa is A or G
  MOD_RES (19)..(20)..(21)..(22): Xaa is A or G or is absent

SEQ ID NO: 11188 - protein, 37 aa, Artificial Sequence; identical to SEQ ID NO: 3756
  GFR-binding peptide
  MOD_RES (34)..(35): Xaa is C or S
  MOD_RES (12)..(13)..(14)..(15)..(16): Xaa is A or G
  MOD_RES (17)..(18)..(19)..(20): Xaa is A or G or is absent

SEQ ID NO: 11189 - protein, 38 aa, Artificial Sequence
  GFR-binding peptide
  MOD_RES (1)..(3)..(35)..(36): Xaa is C or S
XGXARVVMNNSLQEIVNSSDDYYVVPLPELQTPAXXPK

SEQ ID NO: 11190 - protein, 37 aa, Artificial Sequence
  GFR-binding peptide
  MOD_RES (31)..(32): Xaa is C or S
SKVVMNSLQEVKPTRGVYYLITLPELDQPVXXPSASA

SEQ ID NO: 11191 - protein, 38 aa, Artificial Sequence; identical to SEQ ID NO: 3758
  GFR-binding peptide
  MOD_RES (2)..(4)..(38): Xaa is C or S
  MOD_RES (16)..(17)..(18)..(19)..(20): Xaa is A or G
  MOD_RES (21)..(22)..(23)..(24): Xaa is A or G or is absent

SEQ ID NO: 11192 - protein, 36 aa, Artificial Sequence; identical to SEQ ID NO: 3760
  GFR-binding peptide
  MOD_RES (2)..(35)..(36): Xaa is C or S
  MOD_RES (13)..(14)..(15)..(16)..(17): Xaa is A or G
  MOD_RES (18)..(19)..(20)..(21): Xaa is A or G or is absent

SEQ ID NO: 11193 - protein, 37 aa, Artificial Sequence; identical to SEQ ID NO: 3761
  GFR-binding peptide
  MOD_RES (31)..(32): Xaa is C or S

SEQ ID NO: 11194 - protein, 37 aa, Artificial Sequence; identical to SEQ ID NO: 3762
  GFR-binding peptide
  MOD_RES (34)..(35): Xaa is C or S
  MOD_RES (12)..(13)..(14)..(15)..(16): Xaa is A or G
  MOD_RES (17)..(18)..(19)..(20): Xaa is A or G or is absent

SEQ ID NO: 11195 - protein, 37 aa, Artificial Sequence
  GFR-binding peptide
  MOD_RES (1)..(3)..(36)..(37): Xaa is C or S
  MOD_RES (14)..(15)..(16)..(17)..(18): Xaa is A or G
  MOD_RES (19)..(20)..(21)..(22): Xaa is A or G or is absent
XKXSKVVMEYQKYXXXXXXXXXIFLISIPSLDQPVXX

SEQ ID NO: 11196 - protein, 41 aa, Artificial Sequence; identical to SEQ ID NO: 3765
  GFR-binding peptide
  MOD_RES (2)..(36)..(37): Xaa is C or S
  MOD_RES (14)..(15)..(16)..(17)..(18): Xaa is A or G
  MOD_RES (19)..(20)..(21)..(22): Xaa is A or G or is absent

SEQ ID NO: 11197 - protein, 37 aa, Artificial Sequence; identical to SEQ ID NO: 3768
  GFR-binding peptide
  MOD_RES (33)..(34): Xaa is C or S
  MOD_RES (11)..(12)..(13)..(14)..(15): Xaa is A or G
  MOD_RES (16)..(17)..(18)..(19): Xaa is A or G or is absent

SEQ ID NO: 11198 - protein, 38 aa, Artificial Sequence; identical to SEQ ID NO: 3770
  GFR-binding peptide
  MOD_RES (2)..(34)..(35): Xaa is C or S

SEQ ID NO: 11199 - protein, 34 aa, Artificial Sequence; identical to SEQ ID NO: 3771
  GFR-binding peptide
  MOD_RES (33)..(34): Xaa is C or S
  MOD_RES (11)..(12)..(13)..(14)..(15): Xaa is A or G
  MOD_RES (16)..(17)..(18)..(19): Xaa is A or G or is absent

SEQ ID NO: 11200 - protein, 41 aa, Artificial Sequence
  GFR-binding peptide
  MOD_RES (1)..(35)..(36): Xaa is C or S
  MOD_RES (13)..(14)..(15)..(16)..(17): Xaa is A or G
  MOD_RES (18)..(19)..(20)..(21): Xaa is A or G or is absent
XARVVMNNSLQEXXXXXXXXXYYVVPLPELQTPAXXPKPVT

SEQ ID NO: 11201 - protein, 33 aa, Artificial Sequence
  GFR-binding peptide
  MOD_RES (33)..(33): Xaa is C or S
  MOD_RES (11)..(12)..(13)..(14)..(15): Xaa is A or G
  MOD_RES (16)..(17)..(18)..(19): Xaa is A or G or is absent
SRVIMNSLQEXXXXXXXXXYYVIPLPELAQPVX

SEQ ID NO: 11202 - protein, 38 aa, Artificial Sequence
  GFR-binding peptide
  MOD_RES (33)..(34): Xaa is C or S
  MOD_RES (11)..(12)..(13)..(14)..(15): Xaa is A or G
  MOD_RES (16)..(17)..(18)..(19): Xaa is A or G or is absent
SKVVMEYQKYXXXXXXXXXIFLISIPSLDQPVXXPSAS

SEQ ID NO: 11203 - protein, 32 aa, Artificial Sequence
  GFR-binding peptide
  MOD_RES (31)..(32): Xaa is C or S
RVVMNNSLQEIVNSSDDYYLVTLPELKTPAXX

SEQ ID NO: 11204 - protein, 42 aa, Artificial Sequence
  GFR-binding peptide
  MOD_RES (2)..(4)..(38): Xaa is C or S
  MOD_RES (16)..(17)..(18)..(19)..(20): Xaa is A or G
  MOD_RES (21)..(22)..(23)..(24): Xaa is A or G or is absent
HXGXSRVVMNNSLQEXXXXXXXXXYYVVPLPELKTPAXTPKT

SEQ ID NO: 11205 - protein, 35 aa, Artificial Sequence
  GFR-binding peptide
  MOD_RES (2)..(35): Xaa is C or S
  MOD_RES (13)..(14)..(15)..(16)..(17): Xaa is A or G
  MOD_RES (18)..(19)..(20)..(21): Xaa is A or G or is absent
KXSRVIMEYQKYXXXXXXXXXIFLISIPSLAQPVX

SEQ ID NO: 11206 - protein, 37 aa, Artificial Sequence
  GFR-binding peptide
  MOD_RES (2)..(36)..(37): Xaa is C or S
  MOD_RES (14)..(15)..(16)..(17)..(18): Xaa is A or G
  MOD_RES (19)..(20)..(21)..(22): Xaa is A or G or is absent
GXARVVMNEYQKYXXXXXXXXXIFLVSIPSLQTPAXX

SEQ ID NO: 11207 - protein, 36 aa, Artificial Sequence; identical to SEQ ID NO: 3777
  GFR-binding peptide
  MOD_RES (1)..(35)..(36): Xaa is C or S
  MOD_RES (13)..(14)..(15)..(16)..(17): Xaa is A or G
  MOD_RES (18)..(19)..(20)..(21): Xaa is A or G or is absent

SEQ ID NO: 11208 - protein, 31 aa, Artificial Sequence; identical to SEQ ID NO: 3779
  GFR-binding peptide
  MOD_RES (1)..(1): Xaa is C or S

SEQ ID NO: 11209 - protein, 39 aa, Artificial Sequence; identical to SEQ ID NO: 3781
  GFR-binding peptide
  MOD_RES (1)..(3)..(36)..(37): Xaa is C or S
  MOD_RES (14)..(15)..(16)..(17)..(18): Xaa is A or G
  MOD_RES (19)..(20)..(21)..(22): Xaa is A or G or is absent

SEQ ID NO: 11210 - protein, 36 aa, Artificial Sequence
  GFR-binding peptide
  MOD_RES (2)..(34)..(35): Xaa is C or S
GXGEVVMDNSLQEVVKENEDYYVMPLPELETPVXXA

SEQ ID NO: 11211 - protein, 38 aa, Artificial Sequence
  GFR-binding peptide
  MOD_RES (1)..(32)..(33): Xaa is C or S
XSRVIMNSLQEVKPKRGVYYLITLPELAQPVXXPAASA

SEQ ID NO: 11212 - protein, 35 aa, Artificial Sequence
  GFR-binding peptide
  MOD_RES (2)..(4): Xaa is C or S
RXGXGEVVMDNSLQEVVKENEDYYVMPLPELETPV

SEQ ID NO: 11213 - protein, 40 aa, Artificial Sequence
  GFR-binding peptide
  MOD_RES (1)..(3)..(35)..(36): Xaa is C or S
XGXGEVVMENSLQEVVKDYEDYYVMPLPELETPVXXAKPI

SEQ ID NO: 11214 - protein, 36 aa, Artificial Sequence; identical to SEQ ID NO: 3786
  GFR-binding peptide
  MOD_RES (1)..(3): Xaa is C or S
  MOD_RES (15)..(16)..(17)..(18)..(19): Xaa is A or G
  MOD_RES (20)..(21)..(22)..(23): Xaa is A or G or is absent

SEQ ID NO: 11215 - protein, 40 aa, Artificial Sequence
  GFR-binding peptide
  MOD_RES (1)..(35)..(36): Xaa is C or S
  MOD_RES (13)..(14)..(15)..(16)..(17): Xaa is A or G
  MOD_RES (18)..(19)..(20)..(21): Xaa is A or G or is absent
XSEVVMDRYKKLXXXXXXXXXFYLISIANLRTPVXXTPPT

SEQ ID NO: 11216 - protein, 35 aa, Artificial Sequence; identical to SEQ ID NO: 3788
  GFR-binding peptide
  MOD_RES (2)..(2): Xaa is C or S
  MOD_RES (14)..(15)..(16)..(17)..(18): Xaa is A or G
  MOD_RES (19)..(20)..(21)..(22): Xaa is A or G or is absent

SEQ ID NO: 11217 - protein, 41 aa, Artificial Sequence; identical to SEQ ID NO: 3789
  GFR-binding peptide
  MOD_RES (2)..(4)..(36)..(37): Xaa is C or S

SEQ ID NO: 11218 - protein, 33 aa, Artificial Sequence
  GFR-binding peptide
  MOD_RES (1)..(32)..(33): Xaa is C or S
XSKVIMEYQKYIKPTKGIIFLISIPSLDQSVXX

SEQ ID NO: 11219 - protein, 40 aa, Artificial Sequence; identical to SEQ ID NO: 3795
  GFR-binding peptide
  MOD_RES (2)..(36)..(37): Xaa is C or S
  MOD_RES (14)..(15)..(16)..(17)..(18): Xaa is A or G
  MOD_RES (19)..(20)..(21)..(22): Xaa is A or G or is absent

SEQ ID NO: 11220 - protein, 37 aa, Artificial Sequence
  GFR-binding peptide
  MOD_RES (33)..(34): Xaa is C or S
  MOD_RES (11)..(12)..(13)..(14)..(15): Xaa is A or G
  MOD_RES (16)..(17)..(18)..(19): Xaa is A or G or is absent
EVVMDRYKKLXXXXXXXXXFYLISIANLRTPVXXTPP

SEQ ID NO: 11221 - protein, 36 aa, Artificial Sequence; identical to SEQ ID NO: 3797
  GFR-binding peptide
  MOD_RES (2)..(4)..(36): Xaa is C or S

SEQ ID NO: 11222 - protein, 35 aa, Artificial Sequence
  GFR-binding peptide
  MOD_RES (1)..(32)..(33): Xaa is C or S
XSKVVMNSLQEVKPTRGVYYLITLPELDQPVXXPS

SEQ ID NO: 11223 - protein, 37 aa, Artificial Sequence
  GFR-binding peptide
  MOD_RES (2)..(36)..(37): Xaa is C or S
  MOD_RES (14)..(15)..(16)..(17)..(18): Xaa is A or G
  MOD_RES (19)..(20)..(21)..(22): Xaa is A or G or is absent
GXGEVVMDEYQKYXXXXXXXXXIFLMSIPSLETPVXX

SEQ ID NO: 11224 - protein, 39 aa, Artificial Sequence
  GFR-binding peptide
  MOD_RES (2)..(35)..(36): Xaa is C or S
  MOD_RES (13)..(14)..(15)..(16)..(17): Xaa is A or G
  MOD_RES (18)..(19)..(20)..(21): Xaa is A or G or is absent
KXSRVIMNSLQEXXXXXXXXXYYLITLPELAQPVXXPAA

SEQ ID NO: 11225 - protein, 39 aa, Artificial Sequence; identical to SEQ ID NO: 3801
  GFR-binding peptide
  MOD_RES (33)..(34): Xaa is C or S
  MOD_RES (11)..(12)..(13)..(14)..(15): Xaa is A or G
  MOD_RES (16)..(17)..(18)..(19): Xaa is A or G or is absent

SEQ ID NO: 11226 - protein, 39 aa, Artificial Sequence
  GFR-binding peptide
  MOD_RES (2)..(4)..(38)..(39): Xaa is C or S
  MOD_RES (16)..(17)..(18)..(19)..(20): Xaa is A or G
  MOD_RES (21)..(22)..(23)..(24): Xaa is A or G or is absent
RXGXGEVVMENSLQEXXXXXXXXXYYLMTLPELETPVXX

SEQ ID NO: 11227 - protein, 34 aa, Artificial Sequence
  GFR-binding peptide
  MOD_RES (1)..(1): Xaa is C or S
  MOD_RES (13)..(14)..(15)..(16)..(17): Xaa is A or G
  MOD_RES (18)..(19)..(20)..(21): Xaa is A or G or is absent
XGEVVMEEYQKYXXXXXXXXXIFLMSIPSLETPV

SEQ ID NO: 11228 - protein, 35 aa, Artificial Sequence
  GFR-binding peptide
  MOD_RES (34)..(35): Xaa is C or S
  MOD_RES (12)..(13)..(14)..(15)..(16): Xaa is A or G
  MOD_RES (17)..(18)..(19)..(20): Xaa is A or G or is absent
GEVVMDNSLQEXXXXXXXXXYYVMPLPELETPVXX

SEQ ID NO: 11229 - protein, 34 aa, Artificial Sequence; identical to SEQ ID NO: 3803
  GFR-binding peptide
  MOD_RES (1)..(33)..(34): Xaa is C or S

SEQ ID NO: 11230 - protein, 39 aa, Artificial Sequence; identical to SEQ ID NO: 3805
  GFR-binding peptide
  MOD_RES (2)..(4)..(37)..(38): Xaa is C or S
  MOD_RES (15)..(16)..(17)..(18)..(19): Xaa is A or G
  MOD_RES (20)..(21)..(22)..(23): Xaa is A or G or is absent

SEQ ID NO: 11231 - protein, 39 aa, Artificial Sequence
  GFR-binding peptide
  MOD_RES (34)..(35): Xaa is C or S
  MOD_RES (12)..(13)..(14)..(15)..(16): Xaa is A or G
  MOD_RES (17)..(18)..(19)..(20): Xaa is A or G or is absent
GEVVMENSLQEXXXXXXXXXYYVMPLPELETPVXXAKPI

SEQ ID NO: 11232 - protein, 35 aa, Artificial Sequence; identical to SEQ ID NO: 3809
  GFR-binding peptide
  MOD_RES (1)..(34)..(35): Xaa is C or S
  MOD_RES (12)..(13)..(14)..(15)..(16): Xaa is A or G
  MOD_RES (17)..(18)..(19)..(20): Xaa is A or G or is absent

SEQ ID NO: 11233 - protein, 36 aa, Artificial Sequence
  GFR-binding peptide
  MOD_RES (31)..(32): Xaa is C or S
EVVMDNSLQEVVKENEDYYVMPLPELETPVXXAKPI

SEQ ID NO: 11234 - protein, 34 aa, Artificial Sequence
  GFR-binding peptide
  MOD_RES (1)..(3): Xaa is C or S
XGXSEVVMDQYNKLVVNNASDLYLISIASLRTPV

SEQ ID NO: 11235 - protein, 42 aa, Artificial Sequence
  GFR-binding peptide
  MOD_RES (2)..(4)..(38)..(39): Xaa is C or S
  MOD_RES (16)..(17)..(18)..(19)..(20): Xaa is A or G
  MOD_RES (21)..(22)..(23)..(24): Xaa is A or G or is absent
RXGXSEVVMDNSLQEXXXXXXXXXYYLITLPELRTPVXXTPP

SEQ ID NO: 11236 - protein, 40 aa, Artificial Sequence
  GFR-binding peptide
  MOD_RES (34)..(35): Xaa is C or S
  MOD_RES (12)..(13)..(14)..(15)..(16): Xaa is A or G
  MOD_RES (17)..(18)..(19)..(20): Xaa is A or G or is absent
SRVVMNNSLQEXXXXXXXXXYYLVTLPELKTPAXXPKPVY

SEQ ID NO: 11237 - protein, 43 aa, Artificial Sequence
  GFR-binding peptide
  MOD_RES (2)..(4)..(38): Xaa is C or S
  MOD_RES (16)..(17)..(18)..(19)..(20): Xaa is A or G
  MOD_RES (21)..(22)..(23)..(24): Xaa is A or G or is absent
HXGXSRVVMNEYQKYXXXXXXXXXIFLVSIPSLKTPAXTPKTV

SEQ ID NO: 11238 - protein, 32 aa, Artificial Sequence
  GFR-binding peptide
  MOD_RES (31)..(32): Xaa is C or S
RVVMNNSLQEIVNSSDDYYVVPLPELQTPAXX

SEQ ID NO: 11239 - protein, 38 aa, Artificial Sequence; identical to SEQ ID NO: 3817
  GFR-binding peptide
  MOD_RES (1)..(3)..(36)..(37): Xaa is C or S
  MOD_RES (14)..(15)..(16)..(17)..(18): Xaa is A or G
  MOD_RES (19)..(20)..(21)..(22): Xaa is A or G or is absent

SEQ ID NO: 11240 - protein, 39 aa, Artificial Sequence; identical to SEQ ID NO: 3818
  GFR-binding peptide
  MOD_RES (1)..(33)..(34): Xaa is C or S

SEQ ID NO: 11241 - protein, 35 aa, Artificial Sequence; identical to SEQ ID NO: 3820
  GFR-binding peptide
  MOD_RES (2)..(33)..(34): Xaa is C or S

SEQ ID NO: 11242 - protein, 40 aa, Artificial Sequence
  GFR-binding peptide
  MOD_RES (2)..(36)..(37): Xaa is C or S
  MOD_RES (14)..(15)..(16)..(17)..(18): Xaa is A or G
  MOD_RES (19)..(20)..(21)..(22): Xaa is A or G or is absent
GXSEVVMDNSLQEXXXXXXXXXYYLITLPELRTPVXXTPP

SEQ ID NO: 11243 - protein, 36 aa, Artificial Sequence; identical to SEQ ID NO: 3823
  GFR-binding peptide
  MOD_RES (2)..(4)..(36): Xaa is C or S

SEQ ID NO: 11244 - protein, 35 aa, Artificial Sequence; identical to SEQ ID NO: 3825
  GFR-binding peptide
  MOD_RES (31)..(32): Xaa is C or S

SEQ ID NO: 11245 - protein, 37 aa, Artificial Sequence
  GFR-binding peptide
  MOD_RES (2)..(34)..(35): Xaa is C or S
GXGEVVMDEYQKYVVKENEDIFLMSIPSLETPVXXAK

SEQ ID NO: 11246 - protein, 40 aa, Artificial Sequence
  GFR-binding peptide
  MOD_RES (2)..(34)..(35): Xaa is C or S
GXSRVVMNNSLQEIVNSSDDYYVVPLPELKTPAXXPKPVY

SEQ ID NO: 11247 - protein, 36 aa, Artificial Sequence
  GFR-binding peptide
  MOD_RES (1)..(32)..(33): Xaa is C or S
XSRVIMEYQKYVKPKRGVIFLISIPSLAQPVXXPAA

SEQ ID NO: 11248 - protein, 32 aa, Artificial Sequence; identical to SEQ ID NO: 3829
  GFR-binding peptide
  MOD_RES (1)..(1): Xaa is C or S

SEQ ID NO: 11249 - protein, 42 aa, Artificial Sequence
  GFR-binding peptide
  MOD_RES (2)..(36)..(37): Xaa is C or S
  MOD_RES (14)..(15)..(16)..(17)..(18): Xaa is A or G
  MOD_RES (19)..(20)..(21)..(22): Xaa is A or G or is absent
GXGEVVMDNSLQEXXXXXXXXXYYLMTLPELETPVXXAKPIK

SEQ ID NO: 11250 - protein, 38 aa, Artificial Sequence
  GFR-binding peptide
  MOD_RES (2)..(36)..(37): Xaa is C or S
  MOD_RES (14)..(15)..(16)..(17)..(18): Xaa is A or G
  MOD_RES (19)..(20)..(21)..(22): Xaa is A or G or is absent
GXGEVVMENSLQEXXXXXXXXXYYLMTLPELETPVXXA

SEQ ID NO: 11251 - protein, 33 aa, Artificial Sequence
  GFR-binding peptide
  MOD_RES (32)..(33): Xaa is C or S
ARVVMNEYQKYIVNSSDDIFLVSIPSLQTPAXX

SEQ ID NO: 11252 - protein, 33 aa, Artificial Sequence
  GFR-binding peptide
  MOD_RES (32)..(33): Xaa is C or S
SEVVMDNSLQEVVNNASDYYLITLPELRTPVXX

SEQ ID NO: 11253 - protein, 43 aa, Artificial Sequence; identical to SEQ ID NO: 3832
  GFR-binding peptide
  MOD_RES (1)..(3)..(37)..(38): Xaa is C or S
  MOD_RES (15)..(16)..(17)..(18)..(19): Xaa is A or G
  MOD_RES (20)..(21)..(22)..(23): Xaa is A or G or is absent

SEQ ID NO: 11254 - protein, 33 aa, Artificial Sequence
  GFR-binding peptide
  MOD_RES (33)..(33): Xaa is C or S
  MOD_RES (11)..(12)..(13)..(14)..(15): Xaa is A or G
  MOD_RES (16)..(17)..(18)..(19): Xaa is A or G or is absent
EVVMENSLQEXXXXXXXXXYYVMPLPELETPVX

SEQ ID NO: 11255 - protein, 40 aa, Artificial Sequence
  GFR-binding peptide
  MOD_RES (2)..(4)..(37)..(38): Xaa is C or S
  MOD_RES (15)..(16)..(17)..(18)..(19): Xaa is A or G
  MOD_RES (20)..(21)..(22)..(23): Xaa is A or G or is absent
SXKXSRVIMEYQKYXXXXXXXXXIFLISIPSLAQPVXXPA

SEQ ID NO: 11256 - protein, 37 aa, Artificial Sequence
  GFR-binding peptide
  MOD_RES (32)..(33): Xaa is C or S
ARVVMNEYQKYIVNSSDDIFLVSIPSLQTPAXXPKPV

SEQ ID NO: 11257 - protein, 33 aa, Artificial Sequence
  GFR-binding peptide
  MOD_RES (12)..(13)..(14)..(15)..(16): Xaa is A or G
  MOD_RES (17)..(18)..(19)..(20): Xaa is A or G or is absent
ARVVMNEYQKYXXXXXXXXXIFLVSIPSLQTPA

SEQ ID NO: 11258 - protein, 39 aa, Artificial Sequence
  GFR-binding peptide
  MOD_RES (1)..(3)..(35)..(36): Xaa is C or S
XGXARVVMNNSLQEIVNSSDDYYVVPLPELQTPAXXPKP

SEQ ID NO: 11259 - protein, 34 aa, Artificial Sequence
  GFR-binding peptide
  MOD_RES (33)..(34): Xaa is C or S
  MOD_RES (11)..(12)..(13)..(14)..(15): Xaa is A or G
  MOD_RES (16)..(17)..(18)..(19): Xaa is A or G or is absent
EVVMDNSLQEXXXXXXXXXYYVMPLPELETPVXX

SEQ ID NO: 11260 - protein, 40 aa, Artificial Sequence; identical to SEQ ID NO: 3838
  GFR-binding peptide
  MOD_RES (1)..(3)..(35)..(36): Xaa is C or S

SEQ ID NO: 11261 - protein, 33 aa, Artificial Sequence
  GFR-binding peptide
  MOD_RES (2)..(2): Xaa is C or S
GXSEVVMDNSLQEVVNNASDYYLITLPELRTPV

SEQ ID NO: 11262 - protein, 39 aa, Artificial Sequence
  GFR-binding peptide
  MOD_RES (2)..(33)..(34): Xaa is C or S
KXSKVVMNSLQEVKPTRGVYYLITLPELDQPVXXPSASA

SEQ ID NO: 11263 - protein, 36 aa, Artificial Sequence
  GFR-binding peptide
  MOD_RES (1)..(35)..(36): Xaa is C or S
  MOD_RES (13)..(14)..(15)..(16)..(17): Xaa is A or G
  MOD_RES (18)..(19)..(20)..(21): Xaa is A or G or is absent
XGEVVMDEYQKYXXXXXXXXXIFLMSIPSLETPVXX

SEQ ID NO: 11264 - protein, 39 aa, Artificial Sequence; identical to SEQ ID NO: 3840
  GFR-binding peptide
  MOD_RES (2)..(34): Xaa is C or S

SEQ ID NO: 11265 - protein, 41 aa, Artificial Sequence
  GFR-binding peptide
  MOD_RES (1)..(35): Xaa is C or S
  MOD_RES (13)..(14)..(15)..(16)..(17): Xaa is A or G
  MOD_RES (18)..(19)..(20)..(21): Xaa is A or G or is absent
XSRVVMNNSLQEXXXXXXXXXYYVVPLPELKTPAXTPKTVH

SEQ ID NO: 11266 - protein, 40 aa, Artificial Sequence; identical to SEQ ID NO: 3845
  GFR-binding peptide
  MOD_RES (2)..(34)..(35): Xaa is C or S

SEQ ID NO: 11267 - protein, 34 aa, Artificial Sequence
  GFR-binding peptide
  MOD_RES (31)..(32): Xaa is C or S
SRVIMEYQKYVKPKRGVIFLISIPSLAQPVXXPA

SEQ ID NO: 11268 - protein, 42 aa, Artificial Sequence
  GFR-binding peptide
  MOD_RES (2)..(4)..(36)..(37): Xaa is C or S
RXGXGEVVMDNSLQEVVKENEDYYLMTLPELETPVXXAKPIK

SEQ ID NO: 11269 - protein, 38 aa, Artificial Sequence
  GFR-binding peptide
  MOD_RES (2)..(4)..(38): Xaa is C or S
  MOD_RES (16)..(17)..(18)..(19)..(20): Xaa is A or G
  MOD_RES (21)..(22)..(23)..(24): Xaa is A or G or is absent
HXGXARVVMNEYQKYXXXXXXXXXIFLVSIPSLQTPAX

SEQ ID NO: 11270 - protein, 39 aa, Artificial Sequence
  GFR-binding peptide
  MOD_RES (2)..(4)..(36)..(37): Xaa is C or S
RXGXGEVVMENSLQEVVKDYEDYYLMTLPELETPVXXAK

SEQ ID NO: 11271 - protein, 34 aa, Artificial Sequence; identical to SEQ ID NO: 3846
  GFR-binding peptide
  MOD_RES (2)..(33)..(34): Xaa is C or S

SEQ ID NO: 11272 - protein, 38 aa, Artificial Sequence
  GFR-binding peptide
  MOD_RES (2)..(33)..(34): Xaa is C or S
KXSKVVMNSLQEVKPTRGVYYVIPLPELDQPVXXPSAS

SEQ ID NO: 11273 - protein, 36 aa, Artificial Sequence; identical to SEQ ID NO: 3849
  GFR-binding peptide
  MOD_RES (33)..(34): Xaa is C or S
  MOD_RES (11)..(12)..(13)..(14)..(15): Xaa is A or G
  MOD_RES (16)..(17)..(18)..(19): Xaa is A or G or is absent

SEQ ID NO: 11274 - protein, 38 aa, Artificial Sequence
  GFR-binding peptide
  MOD_RES (1)..(3)..(35)..(36): Xaa is C or S
XGXSRVVMNNSLQEIVNSSDDYYVVPLPELKTPAXXPK

SEQ ID NO: 11275 - protein, 37 aa, Artificial Sequence
  GFR-binding peptide
  MOD_RES (1)..(35): Xaa is C or S
  MOD_RES (13)..(14)..(15)..(16)..(17): Xaa is A or G
  MOD_RES (18)..(19)..(20)..(21): Xaa is A or G or is absent
XSRVVMNEYQKYXXXXXXXXXIFLVSIPSLKTPAXTP

SEQ ID NO: 11276 - protein, 35 aa, Artificial Sequence
  GFR-binding peptide
  MOD_RES (32)..(33): Xaa is C or S
SRVVMNNSLQEIVNSSDDYYVVPLPELKTPAXXPK

SEQ ID NO: 11277 - protein, 34 aa, Artificial Sequence
  GFR-binding peptide
  MOD_RES (33)..(34): Xaa is C or S
  MOD_RES (11)..(12)..(13)..(14)..(15): Xaa is A or G
  MOD_RES (16)..(17)..(18)..(19): Xaa is A or G or is absent
RVVMNEYQKYXXXXXXXXXIFLVSIPSLQTPAXX

SEQ ID NO: 11278 - protein, 38 aa, Artificial Sequence
  GFR-binding peptide
  MOD_RES (2)..(36)..(37): Xaa is C or S
  MOD_RES (14)..(15)..(16)..(17)..(18): Xaa is A or G
  MOD_RES (19)..(20)..(21)..(22): Xaa is A or G or is absent
GXSEVVMDRYKKLXXXXXXXXXFYLISIANLRTPVXXT

SEQ ID NO: 11279 - protein, 40 aa, Artificial Sequence
  GFR-binding peptide
  MOD_RES (1)..(34)..(35): Xaa is C or S
  MOD_RES (12)..(13)..(14)..(15)..(16): Xaa is A or G
  MOD_RES (17)..(18)..(19)..(20): Xaa is A or G or is absent
XSKVIMNSLQEXXXXXXXXXYYVIPLPELDQSVXXPSASA

SEQ ID NO: 11280 - protein, 34 aa, Artificial Sequence
  GFR-binding peptide
  MOD_RES (34)..(34): Xaa is C or S
  MOD_RES (12)..(13)..(14)..(15)..(16): Xaa is A or G
  MOD_RES (17)..(18)..(19)..(20): Xaa is A or G or is absent
ARVVMNEYQKYXXXXXXXXXIFLVSIPSLQTPAX

SEQ ID NO: 11281 - protein, 35 aa, Artificial Sequence
  GFR-binding peptide
  MOD_RES (2)..(34)..(35): Xaa is C or S
GXGEVVMEEYQKYVVKDYEDIFLMSIPSLETPVXX

SEQ ID NO: 11282 - protein, 35 aa, Artificial Sequence
  GFR-binding peptide
  MOD_RES (31)..(32): Xaa is C or S
SKVIMNSLQEIKPTKGIYYVIPLPELDQSVXXPSA

SEQ ID NO: 11283 - protein, 37 aa, Artificial Sequence
  GFR-binding peptide
  MOD_RES (34)..(35): Xaa is C or S
  MOD_RES (12)..(13)..(14)..(15)..(16): Xaa is A or G
  MOD_RES (17)..(18)..(19)..(20): Xaa is A or G or is absent
SEVVMDNSLQEXXXXXXXXXYYLITLPELRTPVXXTP

SEQ ID NO: 11284 - protein, 37 aa, Artificial Sequence
  GFR-binding peptide
  MOD_RES (1)..(3)..(34)..(35): Xaa is C or S
XKXSKVVMEYQKYVKPTRGVIFLISIPSLDQPVXXPS

SEQ ID NO: 11285 - protein, 37 aa, Artificial Sequence
  GFR-binding peptide
  MOD_RES (33)..(34): Xaa is C or S
  MOD_RES (11)..(12)..(13)..(14)..(15): Xaa is A or G
  MOD_RES (16)..(17)..(18)..(19): Xaa is A or G or is absent
SRVIMNSLQEXXXXXXXXXYYVIPLPELAQPVXXPAA

SEQ ID NO: 11286 - protein, 37 aa, Artificial Sequence
  GFR-binding peptide
  MOD_RES (2)..(4)..(35)..(36): Xaa is C or S
SXKXSRVIMNSLQEVKPKRGVYYVIPLPELAQPVXXP

SEQ ID NO: 11287 - protein, 36 aa, Artificial Sequence; identical to SEQ ID NO: 3855
  GFR-binding peptide
  MOD_RES (1)..(3)..(34)..(35): Xaa is C or S

SEQ ID NO: 11288 - protein, 37 aa, Artificial Sequence
  GFR-binding peptide
  MOD_RES (2)..(4)..(35)..(36): Xaa is C or S
SXKXSKVVMNSLQEVKPTRGVYYLITLPELDQPVXXP

SEQ ID NO: 11289 - protein, 34 aa, Artificial Sequence
  GFR-binding peptide
  MOD_RES (1)..(3): Xaa is C or S
XGXSEVVMDNSLQEVVNNASDYYVIPLPELRTPV

SEQ ID NO: 11290 - protein, 34 aa, Artificial Sequence
  GFR-binding peptide
  MOD_RES (1)..(1): Xaa is C or S
  MOD_RES (13)..(14)..(15)..(16)..(17): Xaa is A or G
  MOD_RES (18)..(19)..(20)..(21): Xaa is A or G or is absent
XSEVVMDNSLQEXXXXXXXXXYYLITLPELRTPV

SEQ ID NO: 11291 - protein, 38 aa, Artificial Sequence; identical to SEQ ID NO: 3859
  GFR-binding peptide
  MOD_RES (34)..(35): Xaa is C or S
  MOD_RES (12)..(13)..(14)..(15)..(16): Xaa is A or G
  MOD_RES (17)..(18)..(19)..(20): Xaa is A or G or is absent

SEQ ID NO: 11292 - protein, 40 aa, Artificial Sequence; identical to SEQ ID NO: 3861
  GFR-binding peptide
  MOD_RES (34)..(35): Xaa is C or S
  MOD_RES (12)..(13)..(14)..(15)..(16): Xaa is A or G
  MOD_RES (17)..(18)..(19)..(20): Xaa is A or G or is absent

SEQ ID NO: 11293 - protein, 32 aa, Artificial Sequence
  GFR-binding peptide
  MOD_RES (31)..(32): Xaa is C or S
EVVMDEYQKYVVNNASDIFLISIPSLRTPVXX

SEQ ID NO: 11294 - protein, 39 aa, Artificial Sequence
  GFR-binding peptide
  MOD_RES (2)..(35)..(36): Xaa is C or S
  MOD_RES (13)..(14)..(15)..(16)..(17): Xaa is A or G
  MOD_RES (18)..(19)..(20)..(21): Xaa is A or G or is absent
KXSKVVMEYQKYXXXXXXXXXIFLISIPSLDQPVXXPSA

SEQ ID NO: 11295 - protein, 39 aa, Artificial Sequence
  GFR-binding peptide
  MOD_RES (1)..(3)..(35)..(36): Xaa is C or S
XGXSEVVMDQYNKLVVNNASDLYLISIASLRTPVXXTPP

SEQ ID NO: 11296 - protein, 38 aa, Artificial Sequence; identical to SEQ ID NO: 3868
  GFR-binding peptide
  MOD_RES (1)..(3)..(35)..(36): Xaa is C or S

SEQ ID NO: 11297 - protein, 37 aa, Artificial Sequence
  GFR-binding peptide
  MOD_RES (2)..(4): Xaa is C or S
  MOD_RES (16)..(17)..(18)..(19)..(20): Xaa is A or G
  MOD_RES (21)..(22)..(23)..(24): Xaa is A or G or is absent
RXGXSEVVMDNSLQEXXXXXXXXXYYVIPLPELRTPV

SEQ ID NO: 11298 - protein, 34 aa, Artificial Sequence
  GFR-binding peptide
  MOD_RES (33)..(34): Xaa is C or S
  MOD_RES (11)..(12)..(13)..(14)..(15): Xaa is A or G
  MOD_RES (16)..(17)..(18)..(19): Xaa is A or G or is absent
EVVMDEYQKYXXXXXXXXXIFLISIPSLRTPVXX

SEQ ID NO: 11299 - protein, 40 aa, Artificial Sequence
  GFR-binding peptide
  MOD_RES (2)..(4)..(36): Xaa is C or S
HXGXSRVVMNNSLQEIVNSSDDYYVVPLPELKTPAXTPKT

SEQ ID NO: 11300 - protein, 36 aa, Artificial Sequence
  GFR-binding peptide
  MOD_RES (32)..(33): Xaa is C or S
SEVVMDEYQKYVVNNASDIFLISIPSLRTPVXXTPP

SEQ ID NO: 11301 - protein, 36 aa, Artificial Sequence; identical to SEQ ID NO: 3875
  GFR-binding peptide
  MOD_RES (2)..(4)..(36): Xaa is C or S

SEQ ID NO: 11302 - protein, 42 aa, Artificial Sequence; identical to SEQ ID NO: 3876
  GFR-binding peptide
  MOD_RES (2)..(4)..(37)..(38): Xaa is C or S
  MOD_RES (15)..(16)..(17)..(18)..(19): Xaa is A or G
  MOD_RES (20)..(21)..(22)..(23): Xaa is A or G or is absent

SEQ ID NO: 11303 - protein, 33 aa, Artificial Sequence; identical to SEQ ID NO: 3877
  GFR-binding peptide
  MOD_RES (32)..(33): Xaa is C or S

SEQ ID NO: 11304 - protein, 38 aa, Artificial Sequence
  GFR-binding peptide
  MOD_RES (2)..(4)..(38): Xaa is C or S
  MOD_RES (16)..(17)..(18)..(19)..(20): Xaa is A or G
  MOD_RES (21)..(22)..(23)..(24): Xaa is A or G or is absent
RXGXSEVVMDQYNKLXXXXXXXXXLYLISIASLRTPVX

SEQ ID NO: 11305 - protein, 35 aa, Artificial Sequence
  GFR-binding peptide
  MOD_RES (32)..(33): Xaa is C or S
SEVVMDQYNKLVVNNASDLYLISIASLRTPVXXTP

SEQ ID NO: 11306 - protein, 39 aa, Artificial Sequence
  GFR-binding peptide
  MOD_RES (1)..(3)..(35)..(36): Xaa is C or S
XGXSRVVMNNSLQEIVNSSDDYYVVPLPELKTPAXXPKP

SEQ ID NO: 11307 - protein, 39 aa, Artificial Sequence; identical to SEQ ID NO: 3883
  GFR-binding peptide
  MOD_RES (1)..(3)..(35)..(36): Xaa is C or S

SEQ ID NO: 11308 - protein, 39 aa, Artificial Sequence
  GFR-binding peptide
  MOD_RES (2)..(34)..(35): Xaa is C or S
GXGEVVMDEYQKYVVKENEDIFLMSIPSLETPVXXAKPI

SEQ ID NO: 11309 - protein, 33 aa, Artificial Sequence; identical to SEQ ID NO: 3886
  GFR-binding peptide
  MOD_RES (2)..(2): Xaa is C or S

SEQ ID NO: 11310 - protein, 38 aa, Artificial Sequence; identical to SEQ ID NO: 3888
  GFR-binding peptide
  MOD_RES (1)..(3)..(34)..(35): Xaa is C or S

SEQ ID NO: 11311 - protein, 41 aa, Artificial Sequence
  GFR-binding peptide
  MOD_RES (1)..(35)..(36): Xaa is C or S
  MOD_RES (13)..(14)..(15)..(16)..(17): Xaa is A or G
  MOD_RES (18)..(19)..(20)..(21): Xaa is A or G or is absent
XGEVVMDNSLQEXXXXXXXXXYYVMPLPELETPVXXAKPIK

SEQ ID NO: 11312 - protein, 37 aa, Artificial Sequence
  GFR-binding peptide
  MOD_RES (1)..(3)..(36)..(37): Xaa is C or S
  MOD_RES (14)..(15)..(16)..(17)..(18): Xaa is A or G
  MOD_RES (19)..(20)..(21)..(22): Xaa is A or G or is absent
XKXSKVIMEYQKYXXXXXXXXXIFLISIPSLDQSVXX

SEQ ID NO: 11313 - protein, 37 aa, Artificial Sequence
  GFR-binding peptide
  MOD_RES (1)..(32)..(33): Xaa is C or S
XSRVIMNSLQEVKPKRGVYYLITLPELAQPVXXPAAS

SEQ ID NO: 11314 - protein, 42 aa, Artificial Sequence
  GFR-binding peptide
  MOD_RES (2)..(36): Xaa is C or S
  MOD_RES (14)..(15)..(16)..(17)..(18): Xaa is A or G
  MOD_RES (19)..(20)..(21)..(22): Xaa is A or G or is absent
GXSRVVMNNSLQEXXXXXXXXXYYVVPLPELKTPAXTPKTVH

SEQ ID NO: 11315 - protein, 41 aa, Artificial Sequence
  GFR-binding peptide
  MOD_RES (1)..(3)..(35): Xaa is C or S
XGXSRVVMNNSLQEIVNSSDDYYVVPLPELKTPAXTPKTVH

SEQ ID NO: 11316 - protein, 40 aa, Artificial Sequence; identical to SEQ ID NO: 3895
  GFR-binding peptide
  MOD_RES (1)..(3)..(35)..(36): Xaa is C or S

SEQ ID NO: 11317 - protein, 35 aa, Artificial Sequence
  GFR-binding peptide
  MOD_RES (31)..(32): Xaa is C or S
RVVMNNSLQEIVNSSDDYYVVPLPELQTPAXXPKP

SEQ ID NO: 11318 - protein, 34 aa, Artificial Sequence; identical to SEQ ID NO: 3896
  GFR-binding peptide
  MOD_RES (1)..(3): Xaa is C or S

SEQ ID NO: 11319 - protein, 42 aa, Artificial Sequence; identical to SEQ ID NO: 3898
  GFR-binding peptide
  MOD_RES (2)..(4)..(36)..(37): Xaa is C or S

SEQ ID NO: 11320 - protein, 36 aa, Artificial Sequence; identical to SEQ ID NO: 3899
  GFR-binding peptide
  MOD_RES (2)..(34)..(35): Xaa is C or S

SEQ ID NO: 11321 - protein, 33 aa, Artificial Sequence
  GFR-binding peptide
  MOD_RES (12)..(13)..(14)..(15)..(16): Xaa is A or G
  MOD_RES (17)..(18)..(19)..(20): Xaa is A or G or is absent
GEVVMDNSLQEXXXXXXXXXYYLMTLPELETPV

SEQ ID NO: 11322 - protein, 37 aa, Artificial Sequence; identical to SEQ ID NO: 3901
  GFR-binding peptide
  MOD_RES (2)..(4)..(35)..(36): Xaa is C or S

SEQ ID NO: 11323 - protein, 38 aa, Artificial Sequence
  GFR-binding peptide
  MOD_RES (2)..(34)..(35): Xaa is C or S
GXSRVVMNNSLQEIVNSSDDYYLVTLPELKTPAXXPKP

SEQ ID NO: 11324 - protein, 30 aa, Artificial Sequence
  GFR-binding peptide
RVVMNNSLQEIVNSSDDYYLVTLPELQTPA

SEQ ID NO: 11325 - protein, 38 aa, Artificial Sequence
  GFR-binding peptide
  MOD_RES (1)..(3)..(36)..(37): Xaa is C or S
  MOD_RES (14)..(15)..(16)..(17)..(18): Xaa is A or G
  MOD_RES (19)..(20)..(21)..(22): Xaa is A or G or is absent
XKXSKVVMNSLQEXXXXXXXXXYYVIPLPELDQPVXXP

SEQ ID NO: 11326 - protein, 43 aa, Artificial Sequence
  GFR-binding peptide
  MOD_RES (2)..(4)..(38)..(39): Xaa is C or S
  MOD_RES (16)..(17)..(18)..(19)..(20): Xaa is A or G
  MOD_RES (21)..(22)..(23)..(24): Xaa is A or G or is absent
RXGXGEVVMENSLQEXXXXXXXXXYYVMPLPELETPVXXAKPI

SEQ ID NO: 11327 - protein, 37 aa, Artificial Sequence; identical to SEQ ID NO: 3907
  GFR-binding peptide
  MOD_RES (1)..(3)..(37): Xaa is C or S
  MOD_RES (15)..(16)..(17)..(18)..(19): Xaa is A or G
  MOD_RES (20)..(21)..(22)..(23): Xaa is A or G or is absent

SEQ ID NO: 11328 - protein, 34 aa, Artificial Sequence; identical to SEQ ID NO: 3908
  GFR-binding peptide
  MOD_RES (32)..(33): Xaa is C or S

SEQ ID NO: 11329 - protein, 35 aa, Artificial Sequence
  GFR-binding peptide
  MOD_RES (2)..(34)..(35): Xaa is C or S
GXSEVVMDNSLQEVVNNASDYYVIPLPELRTPVXX

SEQ ID NO: 11330 - protein, 35 aa, Artificial Sequence; identical to SEQ ID NO: 3910
  GFR-binding peptide
  MOD_RES (31)..(32): Xaa is C or S

SEQ ID NO: 11331 - protein, 41 aa, Artificial Sequence; identical to SEQ ID NO: 3911
  GFR-binding peptide
  MOD_RES (2)..(35)..(36): Xaa is C or S
  MOD_RES (13)..(14)..(15)..(16)..(17): Xaa is A or G
  MOD_RES (18)..(19)..(20)..(21): Xaa is A or G or is absent

SEQ ID NO: 11332 - protein, 35 aa, Artificial Sequence
  GFR-binding peptide
  MOD_RES (1)..(3): Xaa is C or S
  MOD_RES (14)..(15)..(16)..(17)..(18): Xaa is A or G
  MOD_RES (19)..(20)..(21)..(22): Xaa is A or G or is absent
XKXSRVIMNSLQEXXXXXXXXXYYVIPLPELAQPV

SEQ ID NO: 11333 - protein, 41 aa, Artificial Sequence
  GFR-binding peptide
  MOD_RES (2)..(4)..(38)..(39): Xaa is C or S
  MOD_RES (16)..(17)..(18)..(19)..(20): Xaa is A or G
  MOD_RES (21)..(22)..(23)..(24): Xaa is A or G or is absent
RXGXSEVVMDRYKKLXXXXXXXXXFYLISIANLRTPVXXTP

SEQ ID NO: 11334 - protein, 41 aa, Artificial Sequence
  GFR-binding peptide
  MOD_RES (2)..(4)..(38)..(39): Xaa is C or S
  MOD_RES (16)..(17)..(18)..(19)..(20): Xaa is A or G
  MOD_RES (21)..(22)..(23)..(24): Xaa is A or G or is absent
RXGXSEVVMDNSLQEXXXXXXXXXYYVIPLPELRTPVXXTP

SEQ ID NO: 11335 - protein, 37 aa, Artificial Sequence
  GFR-binding peptide
  MOD_RES (32)..(33): Xaa is C or S
GEVVMENSLQEVVKDYEDYYVMPLPELETPVXXAKPI

SEQ ID NO: 11336 - protein, 37 aa, Artificial Sequence
  GFR-binding peptide
  MOD_RES (1)..(3)..(37): Xaa is C or S
  MOD_RES (15)..(16)..(17)..(18)..(19): Xaa is A or G
  MOD_RES (20)..(21)..(22)..(23): Xaa is A or G or is absent
XGXGEVVMENSLQEXXXXXXXXXYYVMPLPELETPVX

SEQ ID NO: 11337 - protein, 39 aa, Artificial Sequence; identical to SEQ ID NO: 3918
  GFR-binding peptide
  MOD_RES (33)..(34): Xaa is C or S
  MOD_RES (11)..(12)..(13)..(14)..(15): Xaa is A or G
  MOD_RES (16)..(17)..(18)..(19): Xaa is A or G or is absent

SEQ ID NO: 11338 - protein, 31 aa, Artificial Sequence
  GFR-binding peptide
  MOD_RES (31)..(31): Xaa is C or S
EVVMDEYQKYVVKENEDIFLMSIPSLETPVX

SEQ ID NO: 11339 - protein, 38 aa, Artificial Sequence
  GFR-binding peptide
  MOD_RES (34)..(35): Xaa is C or S
  MOD_RES (12)..(13)..(14)..(15)..(16): Xaa is A or G
  MOD_RES (17)..(18)..(19)..(20): Xaa is A or G or is absent
SRVVMNNSLQEXXXXXXXXXYYVVPLPELKTPAXXPKP

SEQ ID NO: 11340 - protein, 37 aa, Artificial Sequence; identical to SEQ ID NO: 3923
  GFR-binding peptide
  MOD_RES (2)..(4)..(36): Xaa is C or S

SEQ ID NO: 11341 - protein, 39 aa, Artificial Sequence
  GFR-binding peptide
  MOD_RES (1)..(3)..(37)..(38): Xaa is C or S
  MOD_RES (15)..(16)..(17)..(18)..(19): Xaa is A or G
  MOD_RES (20)..(21)..(22)..(23): Xaa is A or G or is absent
XGXGEVVMDNSLQEXXXXXXXXXYYLMTLPELETPVXXA

SEQ ID NO: 11342 - protein, 38 aa, Artificial Sequence; identical to SEQ ID NO: 3927
  GFR-binding peptide
  MOD_RES (33)..(34): Xaa is C or S
  MOD_RES (11)..(12)..(13)..(14)..(15): Xaa is A or G
  MOD_RES (16)..(17)..(18)..(19): Xaa is A or G or is absent

SEQ ID NO: 11343 - protein, 37 aa, Artificial Sequence
  GFR-binding peptide
  MOD_RES (2)..(36)..(37): Xaa is C or S
  MOD_RES (14)..(15)..(16)..(17)..(18): Xaa is A or G
  MOD_RES (19)..(20)..(21)..(22): Xaa is A or G or is absent
GXSEVVMDEYQKYXXXXXXXXXIFLISIPSLRTPVXX

SEQ ID NO: 11344 - protein, 34 aa, Artificial Sequence
  GFR-binding peptide
  MOD_RES (1)..(32)..(33): Xaa is C or S
XSKVVMEYQKYVKPTRGVIFLISIPSLDQPVXXP

SEQ ID NO: 11345 - protein, 35 aa, Artificial Sequence; identical to SEQ ID NO: 3930
  GFR-binding peptide
  MOD_RES (1)..(33)..(34): Xaa is C or S

SEQ ID NO: 11346 - protein, 41 aa, Artificial Sequence
  GFR-binding peptide
  MOD_RES (2)..(36)..(37): Xaa is C or S
  MOD_RES (14)..(15)..(16)..(17)..(18): Xaa is A or G
  MOD_RES (19)..(20)..(21)..(22): Xaa is A or G or is absent
GXSRVVMNNSLQEXXXXXXXXXYYVVPLPELKTPAXXPKPV

SEQ ID NO: 11347 - protein, 35 aa, Artificial Sequence; identical to SEQ ID NO: 3931
  GFR-binding peptide
  MOD_RES (33)..(34): Xaa is C or S
  MOD_RES (11)..(12)..(13)..(14)..(15): Xaa is A or G
  MOD_RES (16)..(17)..(18)..(19): Xaa is A or G or is absent

SEQ ID NO: 11348 - protein, 32 aa, Artificial Sequence
  GFR-binding peptide
  MOD_RES (32)..(32): Xaa is C or S
GEVVMEEYQKYVVKDYEDIFLMSIPSLETPVX

SEQ ID NO: 11349 - protein, 35 aa, Artificial Sequence; identical to SEQ ID NO: 3933
  GFR-binding peptide
  MOD_RES (1)..(3)..(34)..(35): Xaa is C or S

SEQ ID NO: 11350 - protein, 35 aa, Artificial Sequence
  GFR-binding peptide
  MOD_RES (32)..(33): Xaa is C or S
SEVVMDRYKKLVVNNASDFYLISIANLRTPVXXTP

SEQ ID NO: 11351 - protein, 39 aa, Artificial Sequence
  GFR-binding peptide
  MOD_RES (2)..(4)..(36): Xaa is C or S
HXGXSRVVMNEYQKYIVNSSDDIFLVSIPSLKTPAXTPK

SEQ ID NO: 11352 - protein, 35 aa, Artificial Sequence
  GFR-binding peptide
  MOD_RES (33)..(34): Xaa is C or S
  MOD_RES (11)..(12)..(13)..(14)..(15): Xaa is A or G
  MOD_RES (16)..(17)..(18)..(19): Xaa is A or G or is absent
SKVVMEYQKYXXXXXXXXXIFLISIPSLDQPVXXP

SEQ ID NO: 11353 - protein, 37 aa, Artificial Sequence
  GFR-binding peptide
  MOD_RES (1)..(32)..(33): Xaa is C or S
XSRVIMNSLQEVKPKRGVYYVIPLPELAQPVXXPAAS

SEQ ID NO: 11354 - protein, 34 aa, Artificial Sequence
  GFR-binding peptide
  MOD_RES (2)..(4): Xaa is C or S
SXKXSKVIMEYQKYIKPTKGIIFLISIPSLDQSV

SEQ ID NO: 11355 - protein, 38 aa, Artificial Sequence; identical to SEQ ID NO: 3941
  GFR-binding peptide
  MOD_RES (1)..(33): Xaa is C or S

SEQ ID NO: 11356 - protein, 38 aa, Artificial Sequence; identical to SEQ ID NO: 3942
  GFR-binding peptide
  MOD_RES (2)..(4)..(37)..(38): Xaa is C or S
  MOD_RES (15)..(16)..(17)..(18)..(19): Xaa is A or G
  MOD_RES (20)..(21)..(22)..(23): Xaa is A or G or is absent

SEQ ID NO: 11357 - protein, 35 aa, Artificial Sequence; identical to SEQ ID NO: 3943
  GFR-binding peptide
  MOD_RES (1)..(3)..(34)..(35): Xaa is C or S

SEQ ID NO: 11358 - protein, 35 aa, Artificial Sequence
  GFR-binding peptide
  MOD_RES (32)..(33): Xaa is C or S
SEVVMDEYQKYVVNNASDIFLISIPSLRTPVXXTP

SEQ ID NO: 11359 - protein, 35 aa, Artificial Sequence
  GFR-binding peptide
  MOD_RES (1)..(34)..(35): Xaa is C or S
  MOD_RES (12)..(13)..(14)..(15)..(16): Xaa is A or G
  MOD_RES (17)..(18)..(19)..(20): Xaa is A or G or is absent
XSKVIMNSLQEXXXXXXXXXYYVIPLPELDQSVXX

SEQ ID NO: 11360 - protein, 41 aa, Artificial Sequence; identical to SEQ ID NO: 3947
  GFR-binding peptide
  MOD_RES (1)..(3)..(35): Xaa is C or S

SEQ ID NO: 11361 - protein, 39 aa, Artificial Sequence; identical to SEQ ID NO: 3948
  GFR-binding peptide
  MOD_RES (1)..(3)..(37)..(38): Xaa is C or S
  MOD_RES (15)..(16)..(17)..(18)..(19): Xaa is A or G
  MOD_RES (20)..(21)..(22)..(23): Xaa is A or G or is absent

SEQ ID NO: 11362 - protein, 39 aa, Artificial Sequence; identical to SEQ ID NO: 3949
  GFR-binding peptide
  MOD_RES (2)..(36)..(37): Xaa is C or S
  MOD_RES (14)..(15)..(16)..(17)..(18): Xaa is A or G
  MOD_RES (19)..(20)..(21)..(22): Xaa is A or G or is absent

SEQ ID NO: 11363 - protein, 34 aa, Artificial Sequence; identical to SEQ ID NO: 3950
  GFR-binding peptide
  MOD_RES (1)..(3): Xaa is C or S

SEQ ID NO: 11364 - protein, 38 aa, Artificial Sequence
  GFR-binding peptide
  MOD_RES (1)..(33)..(34): Xaa is C or S
XGEVVMDEYQKYVVKENEDIFLMSIPSLETPVXXAKPI

SEQ ID NO: 11365 - protein, 36 aa, Artificial Sequence
  GFR-binding peptide
  MOD_RES (1)..(3)..(34)..(35): Xaa is C or S
XKXSKVVMNSLQEVKPTRGVYYLITLPELDQPVXXP

SEQ ID NO: 11366 - protein, 40 aa, Artificial Sequence
  GFR-binding peptide
  MOD_RES (2)..(4)..(36)..(37): Xaa is C or S
RXGXGEVVMENSLQEVVKDYEDYYVMPLPELETPVXXAKP

SEQ ID NO: 11367 - protein, 40 aa, Artificial Sequence; identical to SEQ ID NO: 3952
  GFR-binding peptide
  MOD_RES (34)..(35): Xaa is C or S
  MOD_RES (12)..(13)..(14)..(15)..(16): Xaa is A or G
  MOD_RES (17)..(18)..(19)..(20): Xaa is A or G or is absent

SEQ ID NO: 11368 - protein, 33 aa, Artificial Sequence
  GFR-binding peptide
  MOD_RES (32)..(33): Xaa is C or S
GEVVMENSLQEVVKDYEDYYVMPLPELETPVXX

SEQ ID NO: 11369 - protein, 40 aa, Artificial Sequence
  GFR-binding peptide
  MOD_RES (2)..(35)..(36): Xaa is C or S
  MOD_RES (13)..(14)..(15)..(16)..(17): Xaa is A or G
  MOD_RES (18)..(19)..(20)..(21): Xaa is A or G or is absent
KXSRVIMNSLQEXXXXXXXXXYYVIPLPELAQPVXXPAAS

SEQ ID NO: 11370 - protein, 38 aa, Artificial Sequence
  GFR-binding peptide
  MOD_RES (1)..(33): Xaa is C or S
XSRVVMNEYQKYIVNSSDDIFLVSIPSLKTPAXTPKTV

SEQ ID NO: 11371 - protein, 38 aa, Artificial Sequence
  GFR-binding peptide
  MOD_RES (1)..(3)..(35)..(36): Xaa is C or S
XGXSEVVMDQYNKLVVNNASDLYLISIASLRTPVXXTP

SEQ ID NO: 11372 - protein, 36 aa, Artificial Sequence
  GFR-binding peptide
  MOD_RES (2)..(36): Xaa is C or S
  MOD_RES (14)..(15)..(16)..(17)..(18): Xaa is A or G
  MOD_RES (19)..(20)..(21)..(22): Xaa is A or G or is absent
GXGEVVMENSLQEXXXXXXXXXYYVMPLPELETPVX

SEQ ID NO: 11373 - protein, 37 aa, Artificial Sequence
  GFR-binding peptide
  MOD_RES (1)..(35)..(36): Xaa is C or S
  MOD_RES (13)..(14)..(15)..(16)..(17): Xaa is A or G
  MOD_RES (18)..(19)..(20)..(21): Xaa is A or G or is absent
XARVVMNNSLQEXXXXXXXXXYYLVTLPELQTPAXXP

SEQ ID NO: 11374 - protein, 39 aa, Artificial Sequence; identical to SEQ ID NO: 3955
  GFR-binding peptide
  MOD_RES (2)..(4)..(36)..(37): Xaa is C or S

SEQ ID NO: 11375 - protein, 43 aa, Artificial Sequence; identical to SEQ ID NO: 3956
  GFR-binding peptide
  MOD_RES (2)..(4)..(37)..(38): Xaa is C or S
  MOD_RES (15)..(16)..(17)..(18)..(19): Xaa is A or G
  MOD_RES (20)..(21)..(22)..(23): Xaa is A or G or is absent

SEQ ID NO: 11376 - protein, 41 aa, Artificial Sequence
  GFR-binding peptide
  MOD_RES (1)..(3)..(37)..(38): Xaa is C or S
  MOD_RES (15)..(16)..(17)..(18)..(19): Xaa is A or G
  MOD_RES (20)..(21)..(22)..(23): Xaa is A or G or is absent
XGXGEVVMENSLQEXXXXXXXXXYYLMTLPELETPVXXAKP

SEQ ID NO: 11377 - protein, 37 aa, Artificial Sequence
  GFR-binding peptide
  MOD_RES (2)..(4): Xaa is C or S
  MOD_RES (16)..(17)..(18)..(19)..(20): Xaa is A or G
  MOD_RES (21)..(22)..(23)..(24): Xaa is A or G or is absent
RXGXSEVVMDRYKKLXXXXXXXXXFYLISIANLRTPV

SEQ ID NO: 11378 - protein, 35 aa, Artificial Sequence
  GFR-binding peptide
  MOD_RES (1)..(35): Xaa is C or S
  MOD_RES (13)..(14)..(15)..(16)..(17): Xaa is A or G
  MOD_RES (18)..(19)..(20)..(21): Xaa is A or G or is absent
XSEVVMDNSLQEXXXXXXXXXYYVIPLPELRTPVX

SEQ ID NO: 11379 - protein, 36 aa, Artificial Sequence
  GFR-binding peptide
  MOD_RES (1)..(3): Xaa is C or S
  MOD_RES (15)..(16)..(17)..(18)..(19): Xaa is A or G
  MOD_RES (20)..(21)..(22)..(23): Xaa is A or G or is absent
XGXSEVVMDEYQKYXXXXXXXXXIFLISIPSLRTPV

SEQ ID NO: 11380 - protein, 38 aa, Artificial Sequence; identical to SEQ ID NO: 3960
  GFR-binding peptide
  MOD_RES (33)..(34): Xaa is C or S
  MOD_RES (11)..(12)..(13)..(14)..(15): Xaa is A or G
  MOD_RES (16)..(17)..(18)..(19): Xaa is A or G or is absent

SEQ ID NO: 11381 - protein, 39 aa, Artificial Sequence
  GFR-binding peptide
  MOD_RES (2)..(34): Xaa is C or S
GXSRVVMNNSLQEIVNSSDDYYLVTLPELKTPAXTPKTV

SEQ ID NO: 11382 - protein, 33 aa, Artificial Sequence
  GFR-binding peptide
  MOD_RES (31)..(31): Xaa is C or S
RVVMNNSLQEIVNSSDDYYLVTLPELKTPAXTP

SEQ ID NO: 11383 - protein, 37 aa, Artificial Sequence; identical to SEQ ID NO: 3967
  GFR-binding peptide
  MOD_RES (2)..(4)..(36)..(37): Xaa is C or S

SEQ ID NO: 11384 - protein, 36 aa, Artificial Sequence
  GFR-binding peptide
  MOD_RES (1)..(33)..(34): Xaa is C or S
XSRVVMNEYQKYIVNSSDDIFLVSIPSLKTPAXXPK

SEQ ID NO: 11385 - protein, 34 aa, Artificial Sequence; identical to SEQ ID NO: 3968
  GFR-binding peptide
  MOD_RES (1)..(34): Xaa is C or S
  MOD_RES (12)..(13)..(14)..(15)..(16): Xaa is A or G
  MOD_RES (17)..(18)..(19)..(20): Xaa is A or G or is absent

SEQ ID NO: 11386 - protein, 31 aa, Artificial Sequence
  GFR-binding peptide
  MOD_RES (31)..(31): Xaa is C or S
EVVMDEYQKYVVNNASDIFLISIPSLRTPVX

SEQ ID NO: 11387 - protein, 44 aa, Artificial Sequence
  GFR-binding peptide
  MOD_RES (2)..(4)..(38)..(39): Xaa is C or S
  MOD_RES (16)..(17)..(18)..(19)..(20): Xaa is A or G
  MOD_RES (21)..(22)..(23)..(24): Xaa is A or G or is absent
HXGXSRVVMNNSLQEXXXXXXXXXYYLVTLPELKTPAXXPKPVY

SEQ ID NO: 11388 - protein, 41 aa, Artificial Sequence
  GFR-binding peptide
  MOD_RES (1)..(3)..(36)..(37): Xaa is C or S
  MOD_RES (14)..(15)..(16)..(17)..(18): Xaa is A or G
  MOD_RES (19)..(20)..(21)..(22): Xaa is A or G or is absent
XKXSKVVMNSLQEXXXXXXXXXYYLITLPELDQPVXXPSAS

SEQ ID NO: 11389 - protein, 34 aa, Artificial Sequence; identical to SEQ ID NO: 3969
  GFR-binding peptide
  MOD_RES (1)..(33)..(34): Xaa is C or S

SEQ ID NO: 11390 - protein, 37 aa, Artificial Sequence
  GFR-binding peptide
  MOD_RES (1)..(35)..(36): Xaa is C or S
  MOD_RES (13)..(14)..(15)..(16)..(17): Xaa is A or G
  MOD_RES (18)..(19)..(20)..(21): Xaa is A or G or is absent
XSEVVMDEYQKYXXXXXXXXXIFLISIPSLRTPVXXT

SEQ ID NO: 11391 - protein, 41 aa, Artificial Sequence
  GFR-binding peptide
  MOD_RES (1)..(35)..(36): Xaa is C or S
  MOD_RES (13)..(14)..(15)..(16)..(17): Xaa is A or G
  MOD_RES (18)..(19)..(20)..(21): Xaa is A or G or is absent
XSEVVMDRYKKLXXXXXXXXXFYLISIANLRTPVXXTPPTS

SEQ ID NO: 11392 - protein, 41 aa, Artificial Sequence
  GFR-binding peptide
  MOD_RES (2)..(4)..(38)..(39): Xaa is C or S
  MOD_RES (16)..(17)..(18)..(19)..(20): Xaa is A or G
  MOD_RES (21)..(22)..(23)..(24): Xaa is A or G or is absent
RXGXGEVVMEEYQKYXXXXXXXXXIFLMSIPSLETPVXXAK

SEQ ID NO: 11393 - protein, 39 aa, Artificial Sequence; identical to SEQ ID NO: 3972
  GFR-binding peptide
  MOD_RES (33)..(34): Xaa is C or S
  MOD_RES (11)..(12)..(13)..(14)..(15): Xaa is A or G
  MOD_RES (16)..(17)..(18)..(19): Xaa is A or G or is absent

SEQ ID NO: 11394 - protein, 39 aa, Artificial Sequence
  GFR-binding peptide
  MOD_RES (1)..(3)..(34)..(35): Xaa is C or S
XKXSRVIMNSLQEVKPKRGVYYLITLPELAQPVXXPAAS

SEQ ID NO: 11395 - protein, 34 aa, Artificial Sequence
  GFR-binding peptide
  MOD_RES (1)..(33)..(34): Xaa is C or S
XSEVVMDQYNKLVVNNASDLYLISIASLRTPVXX

SEQ ID NO: 11396 - protein, 34 aa, Artificial Sequence
  GFR-binding peptide
  MOD_RES (34)..(34): Xaa is C or S
  MOD_RES (12)..(13)..(14)..(15)..(16): Xaa is A or G
  MOD_RES (17)..(18)..(19)..(20): Xaa is A or G or is absent
ARVVMNNSLQEXXXXXXXXXYYLVTLPELQTPAX

SEQ ID NO: 11397 - protein, 34 aa, Artificial Sequence; identical to SEQ ID NO: 3976
  GFR-binding peptide
  MOD_RES (31)..(32): Xaa is C or S

SEQ ID NO: 11398 - protein, 36 aa, Artificial Sequence; identical to SEQ ID NO: 3978
  GFR-binding peptide
  MOD_RES (1)..(3)..(34)..(35): Xaa is C or S

SEQ ID NO: 11399 - protein, 41 aa, Artificial Sequence; identical to SEQ ID NO: 3981
  GFR-binding peptide
  MOD_RES (1)..(3)..(37)..(38): Xaa is C or S
  MOD_RES (15)..(16)..(17)..(18)..(19): Xaa is A or G
  MOD_RES (20)..(21)..(22)..(23): Xaa is A or G or is absent

SEQ ID NO: 11400 - protein, 42 aa, Artificial Sequence
  GFR-binding peptide
  MOD_RES (1)..(3)..(36)..(37): Xaa is C or S
  MOD_RES (14)..(15)..(16)..(17)..(18): Xaa is A or G
  MOD_RES (19)..(20)..(21)..(22): Xaa is A or G or is absent
XKXSRVIMEYQKYXXXXXXXXXIFLISIPSLAQPVXXPAASA

SEQ ID NO: 11401 - protein, 39 aa, Artificial Sequence; identical to SEQ ID NO: 3982
  GFR-binding peptide
  MOD_RES (2)..(35)..(36): Xaa is C or S
  MOD_RES (13)..(14)..(15)..(16)..(17): Xaa is A or G
  MOD_RES (18)..(19)..(20)..(21): Xaa is A or G or is absent

SEQ ID NO: 11402 - protein, 40 aa, Artificial Sequence
  GFR-binding peptide
  MOD_RES (1)..(34)..(35): Xaa is C or S
  MOD_RES (12)..(13)..(14)..(15)..(16): Xaa is A or G
  MOD_RES (17)..(18)..(19)..(20): Xaa is A or G or is absent
XSRVIMNSLQEXXXXXXXXXYYLITLPELAQPVXXPAASA

SEQ ID NO: 11403 - protein, 38 aa, Artificial Sequence; identical to SEQ ID NO: 3983
  GFR-binding peptide
  MOD_RES (1)..(35): Xaa is C or S
  MOD_RES (13)..(14)..(15)..(16)..(17): Xaa is A or G
  MOD_RES (18)..(19)..(20)..(21): Xaa is A or G or is absent

SEQ ID NO: 11404 - protein, 38 aa, Artificial Sequence
  GFR-binding peptide
  MOD_RES (2)..(4)..(38): Xaa is C or S
  MOD_RES (16)..(17)..(18)..(19)..(20): Xaa is A or G
  MOD_RES (21)..(22)..(23)..(24): Xaa is A or G or is absent
RXGXGEVVMENSLQEXXXXXXXXXYYVMPLPELETPVX

SEQ ID NO: 11405 - protein, 42 aa, Artificial Sequence
  GFR-binding peptide
  MOD_RES (2)..(4)..(38)..(39): Xaa is C or S
  MOD_RES (16)..(17)..(18)..(19)..(20): Xaa is A or G
  MOD_RES (21)..(22)..(23)..(24): Xaa is A or G or is absent
RXGXGEVVMENSLQEXXXXXXXXXYYLMTLPELETPVXXAKP

SEQ ID NO: 11406 - protein, 37 aa, Artificial Sequence
  GFR-binding peptide
  MOD_RES (2)..(36): Xaa is C or S
  MOD_RES (14)..(15)..(16)..(17)..(18): Xaa is A or G
  MOD_RES (19)..(20)..(21)..(22): Xaa is A or G or is absent
GXSRVVMNEYQKYXXXXXXXXXIFLVSIPSLKTPAXT

SEQ ID NO: 11407 - protein, 36 aa, Artificial Sequence; identical to SEQ ID NO: 3985
  GFR-binding peptide
  MOD_RES (1)..(34)..(35): Xaa is C or S
  MOD_RES (12)..(13)..(14)..(15)..(16): Xaa is A or G
  MOD_RES (17)..(18)..(19)..(20): Xaa is A or G or is absent

SEQ ID NO: 11408 - protein, 35 aa, Artificial Sequence; identical to SEQ ID NO: 3986
  GFR-binding peptide
  MOD_RES (31)..(32): Xaa is C or S

SEQ ID NO: 11409 - protein, 35 aa, Artificial Sequence
  GFR-binding peptide
  MOD_RES (2)..(2): Xaa is C or S
  MOD_RES (14)..(15)..(16)..(17)..(18): Xaa is A or G
  MOD_RES (19)..(20)..(21)..(22): Xaa is A or G or is absent
GXSRVVMNEYQKYXXXXXXXXXIFLVSIPSLKTPA

SEQ ID NO: 11410 - protein, 41 aa, Artificial Sequence
  GFR-binding peptide
  MOD_RES (2)..(36)..(37): Xaa is C or S
  MOD_RES (14)..(15)..(16)..(17)..(18): Xaa is A or G
  MOD_RES (19)..(20)..(21)..(22): Xaa is A or G or is absent
GXARVVMNEYQKYXXXXXXXXXIFLVSIPSLQTPAXXPKPV

SEQ ID NO: 11411 - protein, 39 aa, Artificial Sequence
  GFR-binding peptide
  MOD_RES (1)..(3)..(35)..(36): Xaa is C or S
XGXSEVVMDNSLQEVVNNASDYYVIPLPELRTPVXXTPP

SEQ ID NO: 11412 - protein, 41 aa, Artificial Sequence
  GFR-binding peptide
  MOD_RES (1)..(3)..(37)..(38): Xaa is C or S
  MOD_RES (15)..(16)..(17)..(18)..(19): Xaa is A or G
  MOD_RES (20)..(21)..(22)..(23): Xaa is A or G or is absent
XGXSEVVMDEYQKYXXXXXXXXXIFLISIPSLRTPVXXTPP

SEQ ID NO: 11413 - protein, 40 aa, Artificial Sequence
  GFR-binding peptide
  MOD_RES (2)..(35)..(36): Xaa is C or S
  MOD_RES (13)..(14)..(15)..(16)..(17): Xaa is A or G
  MOD_RES (18)..(19)..(20)..(21): Xaa is A or G or is absent
KXSKVIMNSLQEXXXXXXXXXYYVIPLPELDQSVXXPSAS

SEQ ID NO: 11414 - protein, 38 aa, Artificial Sequence
  GFR-binding peptide
  MOD_RES (1)..(35)..(36): Xaa is C or S
  MOD_RES (13)..(14)..(15)..(16)..(17): Xaa is A or G
  MOD_RES (18)..(19)..(20)..(21): Xaa is A or G or is absent
XGEVVMDNSLQEXXXXXXXXXYYLMTLPELETPVXXAK

SEQ ID NO: 11415 - protein, 39 aa, Artificial Sequence; identical to SEQ ID NO: 3990
  GFR-binding peptide
  MOD_RES (1)..(35): Xaa is C or S
  MOD_RES (13)..(14)..(15)..(16)..(17): Xaa is A or G
  MOD_RES (18)..(19)..(20)..(21): Xaa is A or G or is absent

SEQ ID NO: 11416 - protein, 38 aa, Artificial Sequence
  GFR-binding peptide
  MOD_RES (2)..(36)..(37): Xaa is C or S
  MOD_RES (14)..(15)..(16)..(17)..(18): Xaa is A or G
  MOD_RES (19)..(20)..(21)..(22): Xaa is A or G or is absent
GXSEVVMDEYQKYXXXXXXXXXIFLISIPSLRTPVXXT

SEQ ID NO: 11417 - protein, 34 aa, Artificial Sequence
  GFR-binding peptide
  MOD_RES (32)..(33): Xaa is C or S
SEVVMDNSLQEVVNNASDYYLITLPELRTPVXXT

SEQ ID NO: 11418 - protein, 37 aa, Artificial Sequence; identical to SEQ ID NO: 3997
  GFR-binding peptide
  MOD_RES (1)..(3)..(35)..(36): Xaa is C or S

SEQ ID NO: 11419 - protein, 39 aa, Artificial Sequence
  GFR-binding peptide
  MOD_RES (34)..(34): Xaa is C or S
  MOD_RES (12)..(13)..(14)..(15)..(16): Xaa is A or G
  MOD_RES (17)..(18)..(19)..(20): Xaa is A or G or is absent
SRVVMNNSLQEXXXXXXXXXYYLVTLPELKTPAXTPKTV

SEQ ID NO: 11420 - protein, 34 aa, Artificial Sequence
  GFR-binding peptide
  MOD_RES (31)..(32): Xaa is C or S
RVVMNNSLQEIVNSSDDYYLVTLPELKTPAXXPK

SEQ ID NO: 11421 - protein, 36 aa, Artificial Sequence; identical to SEQ ID NO: 4000
  GFR-binding peptide
  MOD_RES (31)..(32): Xaa is C or S

SEQ ID NO: 11422 - protein, 31 aa, Artificial Sequence
  GFR-binding peptide
  MOD_RES (31)..(31): Xaa is C or S
RVVMNNSLQEIVNSSDDYYLVTLPELKTPAX

SEQ ID NO: 11423 - protein, 33 aa, Artificial Sequence
  GFR-binding peptide
  MOD_RES (32)..(33): Xaa is C or S
GEVVMEEYQKYVVKDYEDIFLMSIPSLETPVXX

SEQ ID NO: 11424 - protein, 39 aa, Artificial Sequence; identical to SEQ ID NO: 4003
  GFR-binding peptide
  MOD_RES (1)..(3)..(35)..(36): Xaa is C or S

SEQ ID NO: 11425 - protein, 40 aa, Artificial Sequence; identical to SEQ ID NO: 4004
  GFR-binding peptide
  MOD_RES (1)..(3)..(37)..(38): Xaa is C or S
  MOD_RES (15)..(16)..(17)..(18)..(19): Xaa is A or G
  MOD_RES (20)..(21)..(22)..(23): Xaa is A or G or is absent

SEQ ID NO: 11426 - protein, 34 aa, Artificial Sequence
  GFR-binding peptide
  MOD_RES (1)..(3): Xaa is C or S
XGXARVVMNNSLQEIVNSSDDYYLVTLPELQTPA

SEQ ID NO: 11427 - protein, 33 aa, Artificial Sequence
  GFR-binding peptide
  MOD_RES (2)..(33): Xaa is C or S
KXSKVVMNSLQEVKPTRGVYYLITLPELDQPVX

SEQ ID NO: 11428 - protein, 38 aa, Artificial Sequence
  GFR-binding peptide
  MOD_RES (1)..(3)..(35)..(36): Xaa is C or S
XGXSEVVMDNSLQEVVNNASDYYVIPLPELRTPVXXTP

SEQ ID NO: 11429 - protein, 38 aa, Artificial Sequence
  GFR-binding peptide
  MOD_RES (2)..(36)..(37): Xaa is C or S
  MOD_RES (14)..(15)..(16)..(17)..(18): Xaa is A or G
  MOD_RES (19)..(20)..(21)..(22): Xaa is A or G or is absent
GXGEVVMDEYQKYXXXXXXXXXIFLMSIPSLETPVXXA

SEQ ID NO: 11430 - protein, 38 aa, Artificial Sequence
  GFR-binding peptide
  MOD_RES (2)..(4)..(38): Xaa is C or S
  MOD_RES (16)..(17)..(18)..(19)..(20): Xaa is A or G
  MOD_RES (21)..(22)..(23)..(24): Xaa is A or G or is absent
RXGXGEVVMDNSLQEXXXXXXXXXYYLMTLPELETPVX

SEQ ID NO: 11431 - protein, 34 aa, Artificial Sequence
  GFR-binding peptide
  MOD_RES (32)..(33): Xaa is C or S
SRVVMNEYQKYIVNSSDDIFLVSIPSLKTPAXXP

SEQ ID NO: 11432 - protein, 40 aa, Artificial Sequence
  GFR-binding peptide
  MOD_RES (2)..(4)..(36)..(37): Xaa is C or S
RXGXGEVVMDEYQKYVVKENEDIFLMSIPSLETPVXXAKP

SEQ ID NO: 11433 - protein, 40 aa, Artificial Sequence
  GFR-binding peptide
  MOD_RES (2)..(36)..(37): Xaa is C or S
  MOD_RES (14)..(15)..(16)..(17)..(18): Xaa is A or G
  MOD_RES (19)..(20)..(21)..(22): Xaa is A or G or is absent
GXGEVVMEEYQKYXXXXXXXXXIFLMSIPSLETPVXXAKP

SEQ ID NO: 11434 - protein, 36 aa, Artificial Sequence; identical to SEQ ID NO: 4007
  GFR-binding peptide
  MOD_RES (1)..(32)..(33): Xaa is C or S

SEQ ID NO: 11435 - protein, 43 aa, Artificial Sequence
  GFR-binding peptide
  MOD_RES (2)..(4)..(38)..(39): Xaa is C or S
  MOD_RES (16)..(17)..(18)..(19)..(20): Xaa is A or G
  MOD_RES (21)..(22)..(23)..(24): Xaa is A or G or is absent
HXGXARVVMNEYQKYXXXXXXXXXIFLVSIPSLQTPAXXPKPV

SEQ ID NO: 11436 - protein, 38 aa, Artificial Sequence
  GFR-binding peptide
  MOD_RES (2)..(34)..(35): Xaa is C or S
GXGEVVMDNSLQEVVKENEDYYLMTLPELETPVXXAKP

SEQ ID NO: 11437 - protein, 37 aa, Artificial Sequence
  GFR-binding peptide
  MOD_RES (1)..(3)..(34)..(35): Xaa is C or S
XKXSKVIMEYQKYIKPTKGIIFLISIPSLDQSVXXPS

SEQ ID NO: 11438 - protein, 37 aa, Artificial Sequence
  GFR-binding peptide
  MOD_RES (2)..(4): Xaa is C or S
  MOD_RES (16)..(17)..(18)..(19)..(20): Xaa is A or G
  MOD_RES (21)..(22)..(23)..(24): Xaa is A or G or is absent
RXGXSEVVMDEYQKYXXXXXXXXXIFLISIPSLRTPV

SEQ ID NO: 11439 - protein, 36 aa, Artificial Sequence
  GFR-binding peptide
  MOD_RES (2)..(4)..(35)..(36): Xaa is C or S
SXKXSRVIMNSLQEVKPKRGVYYVIPLPELAQPVXX

SEQ ID NO: 11440 - protein, 34 aa, Artificial Sequence; identical to SEQ ID NO: 4013
  GFR-binding peptide
  MOD_RES (2)..(2): Xaa is C or S
  MOD_RES (13)..(14)..(15)..(16)..(17): Xaa is A or G
  MOD_RES (18)..(19)..(20)..(21): Xaa is A or G or is absent

SEQ ID NO: 11441 - protein, 38 aa, Artificial Sequence; identical to SEQ ID NO: 4014
  GFR-binding peptide
  MOD_RES (1)..(3)..(35)..(36): Xaa is C or S

SEQ ID NO: 11442 - protein, 34 aa, Artificial Sequence
  GFR-binding peptide
  MOD_RES (2)..(33)..(34): Xaa is C or S
KXSKVVMNSLQEVKPTRGVYYVIPLPELDQPVXX

SEQ ID NO: 11443 - protein, 37 aa, Artificial Sequence; identical to SEQ ID NO: 4016
  GFR-binding peptide
  MOD_RES (1)..(32)..(33): Xaa is C or S

SEQ ID NO: 11444 - protein, 39 aa, Artificial Sequence; identical to SEQ ID NO: 4017
  GFR-binding peptide
  MOD_RES (1)..(35)..(36): Xaa is C or S
  MOD_RES (13)..(14)..(15)..(16)..(17): Xaa is A or G
  MOD_RES (18)..(19)..(20)..(21): Xaa is A or G or is absent

SEQ ID NO: 11445 - protein, 39 aa, Artificial Sequence
  GFR-binding peptide
  MOD_RES (2)..(4)..(36)..(37): Xaa is C or S
RXGXSEVVMDRYKKLVVNNASDFYLISIANLRTPVXXTP

SEQ ID NO: 11446 - protein, 39 aa, Artificial Sequence
  GFR-binding peptide
  MOD_RES (2)..(36)..(37): Xaa is C or S
  MOD_RES (14)..(15)..(16)..(17)..(18): Xaa is A or G
  MOD_RES (19)..(20)..(21)..(22): Xaa is A or G or is absent
GXGEVVMEEYQKYXXXXXXXXXIFLMSIPSLETPVXXAK

SEQ ID NO: 11447 - protein, 34 aa, Artificial Sequence; identical to SEQ ID NO: 4020
  GFR-binding peptide
  MOD_RES (33)..(33): Xaa is C or S
  MOD_RES (11)..(12)..(13)..(14)..(15): Xaa is A or G
  MOD_RES (16)..(17)..(18)..(19): Xaa is A or G or is absent

SEQ ID NO: 11448 - protein, 34 aa, Artificial Sequence
  GFR-binding peptide
  MOD_RES (33)..(34): Xaa is C or S
  MOD_RES (11)..(12)..(13)..(14)..(15): Xaa is A or G
  MOD_RES (16)..(17)..(18)..(19): Xaa is A or G or is absent
EVVMDQYNKLXXXXXXXXXLYLISIASLRTPVXX

SEQ ID NO: 11449 - protein, 35 aa, Artificial Sequence
  GFR-binding peptide
  MOD_RES (1)..(32)..(33): Xaa is C or S
XSKVVMNSLQEVKPTRGVYYVIPLPELDQPVXXPS

SEQ ID NO: 11450 - protein, 37 aa, Artificial Sequence; identical to SEQ ID NO: 4024
  GFR-binding peptide
  MOD_RES (1)..(3)..(35)..(36): Xaa is C or S

SEQ ID NO: 11451 - protein, 37 aa, Artificial Sequence
  GFR-binding peptide
  MOD_RES (33)..(33): Xaa is C or S
  MOD_RES (11)..(12)..(13)..(14)..(15): Xaa is A or G
  MOD_RES (16)..(17)..(18)..(19): Xaa is A or G or is absent
RVVMNEYQKYXXXXXXXXXIFLVSIPSLKTPAXTPKT

SEQ ID NO: 11452 - protein, 41 aa, Artificial Sequence
  GFR-binding peptide
  MOD_RES (2)..(36)..(37): Xaa is C or S
  MOD_RES (14)..(15)..(16)..(17)..(18): Xaa is A or G
  MOD_RES (19)..(20)..(21)..(22): Xaa is A or G or is absent
GXGEVVMDEYQKYXXXXXXXXXIFLMSIPSLETPVXXAKPI

SEQ ID NO: 11453 - protein, 42 aa, Artificial Sequence
  GFR-binding peptide
  MOD_RES (1)..(3)..(37)..(38): Xaa is C or S
  MOD_RES (15)..(16)..(17)..(18)..(19): Xaa is A or G
  MOD_RES (20)..(21)..(22)..(23): Xaa is A or G or is absent
XGXSEVVMDNSLQEXXXXXXXXXYYVIPLPELRTPVXXTPPT

SEQ ID NO: 11454 - protein, 37 aa, Artificial Sequence; identical to SEQ ID NO: 4025
  GFR-binding peptide
  MOD_RES (2)..(36)..(37): Xaa is C or S
  MOD_RES (14)..(15)..(16)..(17)..(18): Xaa is A or G
  MOD_RES (19)..(20)..(21)..(22): Xaa is A or G or is absent

SEQ ID NO: 11455 - protein, 42 aa, Artificial Sequence; identical to SEQ ID NO: 4026
  GFR-binding peptide
  MOD_RES (2)..(4)..(36)..(37): Xaa is C or S

SEQ ID NO: 11456 - protein, 34 aa, Artificial Sequence
  GFR-binding peptide
  MOD_RES (2)..(34): Xaa is C or S
GXSRVVMNNSLQEIVNSSDDYYVVPLPELKTPAX

SEQ ID NO: 11457 - protein, 35 aa, Artificial Sequence
  GFR-binding peptide
  MOD_RES (31)..(32): Xaa is C or S
RVVMNNSLQEIVNSSDDYYLVTLPELKTPAXXPKP

SEQ ID NO: 11458 - protein, 36 aa, Artificial Sequence
  GFR-binding peptide
  MOD_RES (1)..(3)..(35)..(36): Xaa is C or S
XGXGEVVMENSLQEVVKDYEDYYVMPLPELETPVXX

SEQ ID NO: 11459 - protein, 32 aa, Artificial Sequence
  GFR-binding peptide
  MOD_RES (11)..(12)..(13)..(14)..(15): Xaa is A or G
  MOD_RES (16)..(17)..(18)..(19): Xaa is A or G or is absent
SRVIMNSLQEXXXXXXXXXYYVIPLPELAQPV

SEQ ID NO: 11460 - protein, 39 aa, Artificial Sequence
  GFR-binding peptide
  MOD_RES (2)..(35)..(36): Xaa is C or S
  MOD_RES (13)..(14)..(15)..(16)..(17): Xaa is A or G
  MOD_RES (18)..(19)..(20)..(21): Xaa is A or G or is absent
KXSKVIMNSLQEXXXXXXXXXYYVIPLPELDQSVXXPSA

SEQ ID NO: 11461 - protein, 34 aa, Artificial Sequence
  GFR-binding peptide
  MOD_RES (31)..(32): Xaa is C or S
SRVIMNSLQEVKPKRGVYYVIPLPELAQPVXXPA

SEQ ID NO: 11462 - protein, 41 aa, Artificial Sequence; identical to SEQ ID NO: 4033
  GFR-binding peptide
  MOD_RES (1)..(3)..(37)..(38): Xaa is C or S
  MOD_RES (15)..(16)..(17)..(18)..(19): Xaa is A or G
  MOD_RES (20)..(21)..(22)..(23): Xaa is A or G or is absent

SEQ ID NO: 11463 - protein, 41 aa, Artificial Sequence
  GFR-binding peptide
  MOD_RES (2)..(36): Xaa is C or S
  MOD_RES (14)..(15)..(16)..(17)..(18): Xaa is A or G
  MOD_RES (19)..(20)..(21)..(22): Xaa is A or G or is absent
GXSRVVMNEYQKYXXXXXXXXXIFLVSIPSLKTPAXTPKTV

SEQ ID NO: 11464 - protein, 38 aa, Artificial Sequence
  GFR-binding peptide
  MOD_RES (2)..(4)..(36)..(37): Xaa is C or S
RXGXSEVVMDRYKKLVVNNASDFYLISIANLRTPVXXT

SEQ ID NO: 11465 - protein, 42 aa, Artificial Sequence
  GFR-binding peptide
  MOD_RES (2)..(36)..(37): Xaa is C or S
  MOD_RES (14)..(15)..(16)..(17)..(18): Xaa is A or G
  MOD_RES (19)..(20)..(21)..(22): Xaa is A or G or is absent
GXSRVVMNNSLQEXXXXXXXXXYYVVPLPELKTPAXXPKPVY

SEQ ID NO: 11466 - protein, 33 aa, Artificial Sequence
  GFR-binding peptide
  MOD_RES (1)..(32)..(33): Xaa is C or S
XSKVVMEYQKYVKPTRGVIFLISIPSLDQPVXX

SEQ ID NO: 11467 - protein, 37 aa, Artificial Sequence
  GFR-binding peptide
  MOD_RES (33)..(34): Xaa is C or S
  MOD_RES (11)..(12)..(13)..(14)..(15): Xaa is A or G
  MOD_RES (16)..(17)..(18)..(19): Xaa is A or G or is absent
SRVIMNSLQEXXXXXXXXXYYLITLPELAQPVXXPAA

SEQ ID NO: 11468 - protein, 43 aa, Artificial Sequence
  GFR-binding peptide
  MOD_RES (2)..(4)..(37)..(38): Xaa is C or S
  MOD_RES (15)..(16)..(17)..(18)..(19): Xaa is A or G
  MOD_RES (20)..(21)..(22)..(23): Xaa is A or G or is absent
SXKXSKVVMEYQKYXXXXXXXXXIFLISIPSLDQPVXXPSASA

SEQ ID NO: 11469 - protein, 36 aa, Artificial Sequence
  GFR-binding peptide
  MOD_RES (34)..(35): Xaa is C or S
  MOD_RES (12)..(13)..(14)..(15)..(16): Xaa is A or G
  MOD_RES (17)..(18)..(19)..(20): Xaa is A or G or is absent
SEVVMDQYNKLXXXXXXXXXLYLISIASLRTPVXXT

SEQ ID NO: 11470 - protein, 44 aa, Artificial Sequence
  GFR-binding peptide
  MOD_RES (2)..(4)..(38)..(39): Xaa is C or S
  MOD_RES (16)..(17)..(18)..(19)..(20): Xaa is A or G
  MOD_RES (21)..(22)..(23)..(24): Xaa is A or G or is absent
RXGXSEVVMDQYNKLXXXXXXXXXLYLISIASLRTPVXXTPPTS

SEQ ID NO: 11471 - protein, 37 aa, Artificial Sequence
  GFR-binding peptide
  MOD_RES (33)..(34): Xaa is C or S
  MOD_RES (11)..(12)..(13)..(14)..(15): Xaa is A or G
  MOD_RES (16)..(17)..(18)..(19): Xaa is A or G or is absent
RVVMNNSLQEXXXXXXXXXYYVVPLPELQTPAXXPKP

SEQ ID NO: 11472 - protein, 38 aa, Artificial Sequence
  GFR-binding peptide
  MOD_RES (1)..(35)..(36): Xaa is C or S
  MOD_RES (13)..(14)..(15)..(16)..(17): Xaa is A or G
  MOD_RES (18)..(19)..(20)..(21): Xaa is A or G or is absent
XSRVVMNNSLQEXXXXXXXXXYYLVTLPELKTPAXXPK

SEQ ID NO: 11473 - protein, 35 aa, Artificial Sequence
  GFR-binding peptide
  MOD_RES (2)..(34): Xaa is C or S
GXSRVVMNEYQKYIVNSSDDIFLVSIPSLKTPAXT

SEQ ID NO: 11474 - protein, 41 aa, Artificial Sequence
  GFR-binding peptide
  MOD_RES (2)..(4)..(38)..(39): Xaa is C or S
  MOD_RES (16)..(17)..(18)..(19)..(20): Xaa is A or G
  MOD_RES (21)..(22)..(23)..(24): Xaa is A or G or is absent
RXGXSEVVMDEYQKYXXXXXXXXXIFLISIPSLRTPVXXTP

SEQ ID NO: 11475 - protein, 38 aa, Artificial Sequence
  GFR-binding peptide
  MOD_RES (2)..(4)..(37)..(38): Xaa is C or S
  MOD_RES (15)..(16)..(17)..(18)..(19): Xaa is A or G
  MOD_RES (20)..(21)..(22)..(23): Xaa is A or G or is absent
SXKXSRVIMEYQKYXXXXXXXXXIFLISIPSLAQPVXX

SEQ ID NO: 11476 - protein, 42 aa, Artificial Sequence; identical to SEQ ID NO: 4042
  GFR-binding peptide
  MOD_RES (2)..(4)..(38)..(39): Xaa is C or S
  MOD_RES (16)..(17)..(18)..(19)..(20): Xaa is A or G
  MOD_RES (21)..(22)..(23)..(24): Xaa is A or G or is absent

SEQ ID NO: 11477 - protein, 40 aa, Artificial Sequence; identical to SEQ ID NO: 4047
  GFR-binding peptide
  MOD_RES (2)..(4)..(38)..(39): Xaa is C or S
  MOD_RES (16)..(17)..(18)..(19)..(20): Xaa is A or G
  MOD_RES (21)..(22)..(23)..(24): Xaa is A or G or is absent

SEQ ID NO: 11478 - protein, 37 aa, Artificial Sequence
  GFR-binding peptide
  MOD_RES (33)..(34): Xaa is C or S
  MOD_RES (11)..(12)..(13)..(14)..(15): Xaa is A or G
  MOD_RES (16)..(17)..(18)..(19): Xaa is A or G or is absent
EVVMEEYQKYXXXXXXXXXIFLMSIPSLETPVXXAKP

SEQ ID NO: 11479 - protein, 35 aa, Artificial Sequence
  GFR-binding peptide
  MOD_RES (32)..(33): Xaa is C or S
GEVVMDNSLQEVVKENEDYYVMPLPELETPVXXAK

SEQ ID NO: 11480 - protein, 34 aa, Artificial Sequence
  GFR-binding peptide
  MOD_RES (33)..(33): Xaa is C or S
  MOD_RES (11)..(12)..(13)..(14)..(15): Xaa is A or G
  MOD_RES (16)..(17)..(18)..(19): Xaa is A or G or is absent
RVVMNEYQKYXXXXXXXXXIFLVSIPSLKTPAXT

SEQ ID NO: 11481 - protein, 40 aa, Artificial Sequence
  GFR-binding peptide
  MOD_RES (2)..(4)..(35)..(36): Xaa is C or S
SXKXSRVIMNSLQEVKPKRGVYYLITLPELAQPVXXPAAS

SEQ ID NO: 11482 - protein, 40 aa, Artificial Sequence; identical to SEQ ID NO: 4049
  GFR-binding peptide
  MOD_RES (1)..(35)..(36): Xaa is C or S
  MOD_RES (13)..(14)..(15)..(16)..(17): Xaa is A or G
  MOD_RES (18)..(19)..(20)..(21): Xaa is A or G or is absent

SEQ ID NO: 11483 - protein, 40 aa, Artificial Sequence; identical to SEQ ID NO: 4050
  GFR-binding peptide
  MOD_RES (2)..(35)..(36): Xaa is C or S
  MOD_RES (13)..(14)..(15)..(16)..(17): Xaa is A or G
  MOD_RES (18)..(19)..(20)..(21): Xaa is A or G or is absent

SEQ ID NO: 11484 - protein, 41 aa, Artificial Sequence
  GFR-binding peptide
  MOD_RES (1)..(3)..(37)..(38): Xaa is C or S
  MOD_RES (15)..(16)..(17)..(18)..(19): Xaa is A or G
  MOD_RES (20)..(21)..(22)..(23): Xaa is A or G or is absent
XGXSRVVMNEYQKYXXXXXXXXXIFLVSIPSLKTPAXXPKP

SEQ ID NO: 11485 - protein, 36 aa, Artificial Sequence
  GFR-binding peptide
  MOD_RES (1)..(34)..(35): Xaa is C or S
  MOD_RES (12)..(13)..(14)..(15)..(16): Xaa is A or G
  MOD_RES (17)..(18)..(19)..(20): Xaa is A or G or is absent
XSKVVMNSLQEXXXXXXXXXYYVIPLPELDQPVXXP

SEQ ID NO: 11486 - protein, 35 aa, Artificial Sequence; identical to SEQ ID NO: 4057
  GFR-binding peptide
  MOD_RES (1)..(3): Xaa is C or S
  MOD_RES (14)..(15)..(16)..(17)..(18): Xaa is A or G
  MOD_RES (19)..(20)..(21)..(22): Xaa is A or G or is absent

SEQ ID NO: 11487 - protein, 38 aa, Artificial Sequence; identical to SEQ ID NO: 4058
  GFR-binding peptide
  MOD_RES (2)..(4)..(36)..(37): Xaa is C or S

SEQ ID NO: 11488 - protein, 39 aa, Artificial Sequence
  GFR-binding peptide
  MOD_RES (33)..(34): Xaa is C or S
  MOD_RES (11)..(12)..(13)..(14)..(15): Xaa is A or G
  MOD_RES (16)..(17)..(18)..(19): Xaa is A or G or is absent
SKVVMEYQKYXXXXXXXXXIFLISIPSLDQPVXXPSASA

SEQ ID NO: 11489 - protein, 36 aa, Artificial Sequence; identical to SEQ ID NO: 4059
  GFR-binding peptide
  MOD_RES (2)..(4): Xaa is C or S
  MOD_RES (15)..(16)..(17)..(18)..(19): Xaa is A or G
  MOD_RES (20)..(21)..(22)..(23): Xaa is A or G or is absent

SEQ ID NO: 11490 - protein, 35 aa, Artificial Sequence; identical to SEQ ID NO: 4060
  GFR-binding peptide
  MOD_RES (2)..(34): Xaa is C or S

SEQ ID NO: 11491 - protein, 38 aa, Artificial Sequence
  GFR-binding peptide
  MOD_RES (2)..(34)..(35): Xaa is C or S
GXGEVVMDEYQKYVVKENEDIFLMSIPSLETPVXXAKP

SEQ ID NO: 11492 - protein, 33 aa, Artificial Sequence
  GFR-binding peptide
  MOD_RES (33)..(33): Xaa is C or S
  MOD_RES (11)..(12)..(13)..(14)..(15): Xaa is A or G
  MOD_RES (16)..(17)..(18)..(19): Xaa is A or G or is absent
EVVMENSLQEXXXXXXXXXYYLMTLPELETPVX

SEQ ID NO: 11493 - protein, 33 aa, Artificial Sequence
  GFR-binding peptide
  MOD_RES (1)..(33): Xaa is C or S
XSEVVMDQYNKLVVNNASDLYLISIASLRTPVX

SEQ ID NO: 11494 - protein, 38 aa, Artificial Sequence
  GFR-binding peptide
  MOD_RES (2)..(36): Xaa is C or S
  MOD_RES (14)..(15)..(16)..(17)..(18): Xaa is A or G
  MOD_RES (19)..(20)..(21)..(22): Xaa is A or G or is absent
GXSRVVMNEYQKYXXXXXXXXXIFLVSIPSLKTPAXTP

SEQ ID NO: 11495 - protein, 34 aa, Artificial Sequence
  GFR-binding peptide
  MOD_RES (33)..(34): Xaa is C or S
  MOD_RES (11)..(12)..(13)..(14)..(15): Xaa is A or G
  MOD_RES (16)..(17)..(18)..(19): Xaa is A or G or is absent
EVVMDNSLQEXXXXXXXXXYYLMTLPELETPVXX

SEQ ID NO: 11496 - protein, 39 aa, Artificial Sequence
  GFR-binding peptide
  MOD_RES (2)..(35)..(36): Xaa is C or S
  MOD_RES (13)..(14)..(15)..(16)..(17): Xaa is A or G
  MOD_RES (18)..(19)..(20)..(21): Xaa is A or G or is absent
KXSRVIMNSLQEXXXXXXXXXYYVIPLPELAQPVXXPAA

SEQ ID NO: 11497 - protein, 32 aa, Artificial Sequence; identical to SEQ ID NO: 4064
  GFR-binding peptide
  MOD_RES (2)..(2): Xaa is C or S

SEQ ID NO: 11498 - protein, 33 aa, Artificial Sequence; identical to SEQ ID NO: 4065
  GFR-binding peptide
  MOD_RES (33)..(33): Xaa is C or S
  MOD_RES (11)..(12)..(13)..(14)..(15): Xaa is A or G
  MOD_RES (16)..(17)..(18)..(19): Xaa is A or G or is absent

SEQ ID NO: 11499 - protein, 41 aa, Artificial Sequence
  GFR-binding peptide
  MOD_RES (2)..(4)..(36)..(37): Xaa is C or S
HXGXSRVVMNNSLQEIVNSSDDYYVVPLPELKTPAXXPKPV

SEQ ID NO: 11500 - protein, 36 aa, Artificial Sequence
  GFR-binding peptide
  MOD_RES (2)..(35)..(36): Xaa is C or S
  MOD_RES (13)..(14)..(15)..(16)..(17): Xaa is A or G
  MOD_RES (18)..(19)..(20)..(21): Xaa is A or G or is absent
KXSRVIMNSLQEXXXXXXXXXYYLITLPELAQPVXX

SEQ ID NO: 11501 - protein, 40 aa, Artificial Sequence; identical to SEQ ID NO: 4070
  GFR-binding peptide
  MOD_RES (2)..(4)..(38)..(39): Xaa is C or S
  MOD_RES (16)..(17)..(18)..(19)..(20): Xaa is A or G
  MOD_RES (21)..(22)..(23)..(24): Xaa is A or G or is absent

SEQ ID NO: 11502 - protein, 40 aa, Artificial Sequence
  GFR-binding peptide
  MOD_RES (1)..(3)..(37)..(38): Xaa is C or S
  MOD_RES (15)..(16)..(17)..(18)..(19): Xaa is A or G
  MOD_RES (20)..(21)..(22)..(23): Xaa is A or G or is absent
XGXARVVMNNSLQEXXXXXXXXXYYLVTLPELQTPAXXPK

SEQ ID NO: 11503 - protein, 39 aa, Artificial Sequence
  GFR-binding peptide
  MOD_RES (2)..(34)..(35): Xaa is C or S
GXGEVVMENSLQEVVKDYEDYYVMPLPELETPVXXAKPI

SEQ ID NO: 11504 - protein, 39 aa, Artificial Sequence; identical to SEQ ID NO: 4073
  GFR-binding peptide
  MOD_RES (1)..(35)..(36): Xaa is C or S
  MOD_RES (13)..(14)..(15)..(16)..(17): Xaa is A or G
  MOD_RES (18)..(19)..(20)..(21): Xaa is A or G or is absent

SEQ ID NO: 11505 - protein, 39 aa, Artificial Sequence; identical to SEQ ID NO: 4075
  GFR-binding peptide
  MOD_RES (1)..(33)..(34): Xaa is C or S

SEQ ID NO: 11506 - protein, 32 aa, Artificial Sequence
  GFR-binding peptide
  MOD_RES (1)..(1): Xaa is C or S
XSEVVMDQYNKLVVNNASDLYLISIASLRTPV

SEQ ID NO: 11507 - protein, 43 aa, Artificial Sequence
  GFR-binding peptide
  MOD_RES (1)..(3)..(37)..(38): Xaa is C or S
  MOD_RES (15)..(16)..(17)..(18)..(19): Xaa is A or G
  MOD_RES (20)..(21)..(22)..(23): Xaa is A or G or is absent
XGXGEVVMENSLQEXXXXXXXXXYYLMTLPELETPVXXAKPIS

SEQ ID NO: 11508 - protein, 32 aa, Artificial Sequence
  GFR-binding peptide
  MOD_RES (31)..(32): Xaa is C or S
SKVVMNSLQEVKPTRGVYYLITLPELDQPVXX

SEQ ID NO: 11509 - protein, 39 aa, Artificial Sequence
  GFR-binding peptide
  MOD_RES (34)..(34): Xaa is C or S
  MOD_RES (12)..(13)..(14)..(15)..(16): Xaa is A or G
  MOD_RES (17)..(18)..(19)..(20): Xaa is A or G or is absent
SRVVMNNSLQEXXXXXXXXXYYVVPLPELKTPAXTPKTV

SEQ ID NO: 11510 - protein, 38 aa, Artificial Sequence
  GFR-binding peptide
  MOD_RES (2)..(36)..(37): Xaa is C or S
  MOD_RES (14)..(15)..(16)..(17)..(18): Xaa is A or G
  MOD_RES (19)..(20)..(21)..(22): Xaa is A or G or is absent
GXSRVVMNNSLQEXXXXXXXXXYYVVPLPELKTPAXXP

SEQ ID NO: 11511 - protein, 44 aa, Artificial Sequence
  GFR-binding peptide
  MOD_RES (2)..(4)..(38)..(39): Xaa is C or S
  MOD_RES (16)..(17)..(18)..(19)..(20): Xaa is A or G
  MOD_RES (21)..(22)..(23)..(24): Xaa is A or G or is absent
RXGXGEVVMENSLQEXXXXXXXXXYYLMTLPELETPVXXAKPIS

SEQ ID NO: 11512 - protein, 40 aa, Artificial Sequence; identical to SEQ ID NO: 4081
  GFR-binding peptide
  MOD_RES (2)..(4)..(36)..(37): Xaa is C or S

SEQ ID NO: 11513 - protein, 31 aa, Artificial Sequence
  GFR-binding peptide
  MOD_RES (31)..(31): Xaa is C or S
SKVVMNSLQEVKPTRGVYYLITLPELDQPVX

SEQ ID NO: 11514 - protein, 35 aa, Artificial Sequence; identical to SEQ ID NO: 4082
  GFR-binding peptide
  MOD_RES (33)..(34): Xaa is C or S
  MOD_RES (11)..(12)..(13)..(14)..(15): Xaa is A or G
  MOD_RES (16)..(17)..(18)..(19): Xaa is A or G or is absent

SEQ ID NO: 11515 - protein, 34 aa, Artificial Sequence
  GFR-binding peptide
  MOD_RES (32)..(33): Xaa is C or S
GEVVMDNSLQEVVKENEDYYLMTLPELETPVXXA

SEQ ID NO: 11516 - protein, 37 aa, Artificial Sequence
  GFR-binding peptide
  MOD_RES (1)..(33)..(34): Xaa is C or S
XSRVVMNEYQKYIVNSSDDIFLVSIPSLKTPAXXPKP

SEQ ID NO: 11517 - protein, 36 aa, Artificial Sequence; identical to SEQ ID NO: 4086
  GFR-binding peptide
  MOD_RES (1)..(3): Xaa is C or S
  MOD_RES (15)..(16)..(17)..(18)..(19): Xaa is A or G
  MOD_RES (20)..(21)..(22)..(23): Xaa is A or G or is absent

SEQ ID NO: 11518 - protein, 38 aa, Artificial Sequence; identical to SEQ ID NO: 4087
  GFR-binding peptide
  MOD_RES (34)..(35): Xaa is C or S
  MOD_RES (12)..(13)..(14)..(15)..(16): Xaa is A or G
  MOD_RES (17)..(18)..(19)..(20): Xaa is A or G or is absent

SEQ ID NO: 11519 - protein, 30 aa, Artificial Sequence; identical to SEQ ID NO: 4088
  GFR-binding peptide

SEQ ID NO: 11520 - protein, 32 aa, Artificial Sequence
  GFR-binding peptide
  MOD_RES (11)..(12)..(13)..(14)..(15): Xaa is A or G
  MOD_RES (16)..(17)..(18)..(19): Xaa is A or G or is absent
SRVIMNSLQEXXXXXXXXXYYLITLPELAQPV

SEQ ID NO: 11521 - protein, 40 aa, Artificial Sequence
  GFR-binding peptide
  MOD_RES (1)..(3)..(37): Xaa is C or S
  MOD_RES (15)..(16)..(17)..(18)..(19): Xaa is A or G
  MOD_RES (20)..(21)..(22)..(23): Xaa is A or G or is absent
XGXSRVVMNEYQKYXXXXXXXXXIFLVSIPSLKTPAXTPK

SEQ ID NO: 11522 - protein, 38 aa, Artificial Sequence; identical to SEQ ID NO: 4089
  GFR-binding peptide
  MOD_RES (1)..(3)..(37)..(38): Xaa is C or S
  MOD_RES (15)..(16)..(17)..(18)..(19): Xaa is A or G
  MOD_RES (20)..(21)..(22)..(23): Xaa is A or G or is absent

SEQ ID NO: 11523 - protein, 37 aa, Artificial Sequence
  GFR-binding peptide
  MOD_RES (33)..(34): Xaa is C or S
  MOD_RES (11)..(12)..(13)..(14)..(15): Xaa is A or G
  MOD_RES (16)..(17)..(18)..(19): Xaa is A or G or is absent
RVVMNNSLQEXXXXXXXXXYYLVTLPELQTPAXXPKP

SEQ ID NO: 11524 - protein, 36 aa, Artificial Sequence; identical to SEQ ID NO: 4090
  GFR-binding peptide
  MOD_RES (33)..(34): Xaa is C or S
  MOD_RES (11)..(12)..(13)..(14)..(15): Xaa is A or G
  MOD_RES (16)..(17)..(18)..(19): Xaa is A or G or is absent

SEQ ID NO: 11525 - protein, 34 aa, Artificial Sequence
  GFR-binding peptide
  MOD_RES (34)..(34): Xaa is C or S
  MOD_RES (12)..(13)..(14)..(15)..(16): Xaa is A or G
  MOD_RES (17)..(18)..(19)..(20): Xaa is A or G or is absent
GEVVMDEYQKYXXXXXXXXXIFLMSIPSLETPVX

SEQ ID NO: 11526 - protein, 38 aa, Artificial Sequence; identical to SEQ ID NO: 4094
  GFR-binding peptide
  MOD_RES (2)..(34)..(35): Xaa is C or S

SEQ ID NO: 11527 - protein, 38 aa, Artificial Sequence
  GFR-binding peptide
  MOD_RES (2)..(4)..(38): Xaa is C or S
  MOD_RES (16)..(17)..(18)..(19)..(20): Xaa is A or G
  MOD_RES (21)..(22)..(23)..(24): Xaa is A or G or is absent
RXGXGEVVMEEYQKYXXXXXXXXXIFLMSIPSLETPVX

SEQ ID NO: 11528 - protein, 40 aa, Artificial Sequence; identical to SEQ ID NO: 4098
  GFR-binding peptide
  MOD_RES (1)..(3)..(34)..(35): Xaa is C or S

SEQ ID NO: 11529 - protein, 34 aa, Artificial Sequence; identical to SEQ ID NO: 4100
  GFR-binding peptide
  MOD_RES (1)..(34): Xaa is C or S
  MOD_RES (12)..(13)..(14)..(15)..(16): Xaa is A or G
  MOD_RES (17)..(18)..(19)..(20): Xaa is A or G or is absent

SEQ ID NO: 11530 - protein, 38 aa, Artificial Sequence; identical to SEQ ID NO: 4101
  GFR-binding peptide
  MOD_RES (1)..(32)..(33): Xaa is C or S

SEQ ID NO: 11531 - protein, 40 aa, Artificial Sequence
  GFR-binding peptide
  MOD_RES (2)..(4)..(38)..(39): Xaa is C or S
  MOD_RES (16)..(17)..(18)..(19)..(20): Xaa is A or G
  MOD_RES (21)..(22)..(23)..(24): Xaa is A or G or is absent
RXGXGEVVMENSLQEXXXXXXXXXYYLMTLPELETPVXXA

SEQ ID NO: 11532 - protein, 37 aa, Artificial Sequence
  GFR-binding peptide
  MOD_RES (2)..(4)..(37): Xaa is C or S
  MOD_RES (15)..(16)..(17)..(18)..(19): Xaa is A or G
  MOD_RES (20)..(21)..(22)..(23): Xaa is A or G or is absent
SXKXSKVVMNSLQEXXXXXXXXXYYLITLPELDQPVX

SEQ ID NO: 11533 - protein, 39 aa, Artificial Sequence; identical to SEQ ID NO: 4104
  GFR-binding peptide
  MOD_RES (1)..(3)..(34)..(35): Xaa is C or S

SEQ ID NO: 11534 - protein, 31 aa, Artificial Sequence
  GFR-binding peptide
SRVVMNEYQKYIVNSSDDIFLVSIPSLKTPA

SEQ ID NO: 11535 - protein, 34 aa, Artificial Sequence; identical to SEQ ID NO: 4107
  GFR-binding peptide
  MOD_RES (31)..(32): Xaa is C or S

SEQ ID NO: 11536 - protein, 40 aa, Artificial Sequence
  GFR-binding peptide
  MOD_RES (2)..(34)..(35): Xaa is C or S
GXGEVVMDEYQKYVVKENEDIFLMSIPSLETPVXXAKPIK

SEQ ID NO: 11537 - protein, 42 aa, Artificial Sequence; identical to SEQ ID NO: 4109
  GFR-binding peptide
  MOD_RES (1)..(3)..(37)..(38): Xaa is C or S
  MOD_RES (15)..(16)..(17)..(18)..(19): Xaa is A or G
  MOD_RES (20)..(21)..(22)..(23): Xaa is A or G or is absent

SEQ ID NO: 11538 - protein, 41 aa, Artificial Sequence; identical to SEQ ID NO: 4111
  GFR-binding peptide
  MOD_RES (2)..(36)..(37): Xaa is C or S
  MOD_RES (14)..(15)..(16)..(17)..(18): Xaa is A or G
  MOD_RES (19)..(20)..(21)..(22): Xaa is A or G or is absent

SEQ ID NO: 11539 - protein, 34 aa, Artificial Sequence
  GFR-binding peptide
  MOD_RES (1)..(34): Xaa is C or S
  MOD_RES (12)..(13)..(14)..(15)..(16): Xaa is A or G
  MOD_RES (17)..(18)..(19)..(20): Xaa is A or G or is absent
XSKVVMNSLQEXXXXXXXXXYYVIPLPELDQPVX

SEQ ID NO: 11540 - protein, 35 aa, Artificial Sequence
  GFR-binding peptide
  MOD_RES (2)..(4): Xaa is C or S
RXGXSEVVMDNSLQEVVNNASDYYVIPLPELRTPV

SEQ ID NO: 11541 - protein, 40 aa, Artificial Sequence
  GFR-binding peptide
  MOD_RES (1)..(3)..(34)..(35): Xaa is C or S
XKXSRVIMNSLQEVKPKRGVYYLITLPELAQPVXXPAASA

SEQ ID NO: 11542 - protein, 33 aa, Artificial Sequence
  GFR-binding peptide
  MOD_RES (2)..(33): Xaa is C or S
KXSKVVMNSLQEVKPTRGVYYVIPLPELDQPVX

SEQ ID NO: 11543 - protein, 32 aa, Artificial Sequence
  GFR-binding peptide
  MOD_RES (2)..(2): Xaa is C or S
KXSKVVMNSLQEVKPTRGVYYLITLPELDQPV

SEQ ID NO: 11544 - protein, 32 aa, Artificial Sequence
  GFR-binding peptide
  MOD_RES (32)..(32): Xaa is C or S
ARVVMNEYQKYIVNSSDDIFLVSIPSLQTPAX

SEQ ID NO: 11545 - protein, 36 aa, Artificial Sequence; identical to SEQ ID NO: 4119
  GFR-binding peptide
  MOD_RES (2)..(4)..(35)..(36): Xaa is C or S

SEQ ID NO: 11546 - protein, 36 aa, Artificial Sequence; identical to SEQ ID NO: 4120
  GFR-binding peptide
  MOD_RES (1)..(33)..(34): Xaa is C or S

SEQ ID NO: 11547 - protein, 34 aa, Artificial Sequence
  GFR-binding peptide
  MOD_RES (1)..(32)..(33): Xaa is C or S
XSRVIMNSLQEVKPKRGVYYLITLPELAQPVXXP

SEQ ID NO: 11548 - protein, 36 aa, Artificial Sequence; identical to SEQ ID NO: 4122
  GFR-binding peptide
  MOD_RES (31)..(32): Xaa is C or S

SEQ ID NO: 11549 - protein, 37 aa, Artificial Sequence
  GFR-binding peptide
  MOD_RES (31)..(32): Xaa is C or S
RVVMNNSLQEIVNSSDDYYLVTLPELQTPAXXPKPVT

SEQ ID NO: 11550 - protein, 37 aa, Artificial Sequence
  GFR-binding peptide
  MOD_RES (32)..(33): Xaa is C or S
ARVVMNNSLQEIVNSSDDYYVVPLPELQTPAXXPKPV

SEQ ID NO: 11551 - protein, 35 aa, Artificial Sequence
  GFR-binding peptide
  MOD_RES (33)..(34): Xaa is C or S
  MOD_RES (11)..(12)..(13)..(14)..(15): Xaa is A or G
  MOD_RES (16)..(17)..(18)..(19): Xaa is A or G or is absent
EVVMDNSLQEXXXXXXXXXYYLITLPELRTPVXXT

SEQ ID NO: 11552 - protein, 39 aa, Artificial Sequence
  GFR-binding peptide
  MOD_RES (1)..(35)..(36): Xaa is C or S
  MOD_RES (13)..(14)..(15)..(16)..(17): Xaa is A or G
  MOD_RES (18)..(19)..(20)..(21): Xaa is A or G or is absent
XGEVVMENSLQEXXXXXXXXXYYLMTLPELETPVXXAKP

SEQ ID NO: 11553 - protein, 35 aa, Artificial Sequence; identical to SEQ ID NO: 4126
  GFR-binding peptide
  MOD_RES (31)..(32): Xaa is C or S

SEQ ID NO: 11554 - protein, 32 aa, Artificial Sequence
  GFR-binding peptide
  MOD_RES (32)..(32): Xaa is C or S
GEVVMENSLQEVVKDYEDYYVMPLPELETPVX

SEQ ID NO: 11555 - protein, 31 aa, Artificial Sequence
  GFR-binding peptide
GEVVMDEYQKYVVKENEDIFLMSIPSLETPV

SEQ ID NO: 11556 - protein, 37 aa, Artificial Sequence; identical to SEQ ID NO: 4129
  GFR-binding peptide
  MOD_RES (1)..(32)..(33): Xaa is C or S

SEQ ID NO: 11557 - protein, 36 aa, Artificial Sequence
  GFR-binding peptide
  MOD_RES (2)..(4)..(35)..(36): Xaa is C or S
SXKXSKVVMNSLQEVKPTRGVYYLITLPELDQPVXX

SEQ ID NO: 11558 - protein, 44 aa, Artificial Sequence
  GFR-binding peptide
  MOD_RES (2)..(4)..(38)..(39): Xaa is C or S
  MOD_RES (16)..(17)..(18)..(19)..(20): Xaa is A or G
  MOD_RES (21)..(22)..(23)..(24): Xaa is A or G or is absent
HXGXARVVMNNSLQEXXXXXXXXXYYLVTLPELQTPAXXPKPVT

SEQ ID NO: 11559 - protein, 37 aa, Artificial Sequence; identical to SEQ ID NO: 4134
  GFR-binding peptide
  MOD_RES (1)..(33)..(34): Xaa is C or S

SEQ ID NO: 11560 - protein, 41 aa, Artificial Sequence; identical to SEQ ID NO: 4135
  GFR-binding peptide
  MOD_RES (2)..(4)..(37)..(38): Xaa is C or S
  MOD_RES (15)..(16)..(17)..(18)..(19): Xaa is A or G
  MOD_RES (20)..(21)..(22)..(23): Xaa is A or G or is absent

SEQ ID NO: 11561 - protein, 36 aa, Artificial Sequence
  GFR-binding peptide
  MOD_RES (2)..(36): Xaa is C or S
  MOD_RES (14)..(15)..(16)..(17)..(18): Xaa is A or G
  MOD_RES (19)..(20)..(21)..(22): Xaa is A or G or is absent
GXARVVMNNSLQEXXXXXXXXXYYVVPLPELQTPAX

SEQ ID NO: 11562 - protein, 38 aa, Artificial Sequence
  GFR-binding peptide
  MOD_RES (2)..(34)..(35): Xaa is C or S
GXARVVMNEYQKYIVNSSDDIFLVSIPSLQTPAXXPKP

SEQ ID NO: 11563 - protein, 40 aa, Artificial Sequence; identical to SEQ ID NO: 4144
  GFR-binding peptide
  MOD_RES (1)..(34)..(35): Xaa is C or S
  MOD_RES (12)..(13)..(14)..(15)..(16): Xaa is A or G
  MOD_RES (17)..(18)..(19)..(20): Xaa is A or G or is absent

SEQ ID NO: 11564 - protein, 37 aa, Artificial Sequence
  GFR-binding peptide
  MOD_RES (1)..(3)..(35)..(36): Xaa is C or S
XGXGEVVMDNSLQEVVKENEDYYVMPLPELETPVXXA

SEQ ID NO: 11565 - protein, 34 aa, Artificial Sequence; identical to SEQ ID NO: 4147
  GFR-binding peptide
  MOD_RES (1)..(1): Xaa is C or S
  MOD_RES (13)..(14)..(15)..(16)..(17): Xaa is A or G
  MOD_RES (18)..(19)..(20)..(21): Xaa is A or G or is absent

SEQ ID NO: 11566 - protein, 32 aa, Artificial Sequence
  GFR-binding peptide
  MOD_RES (11)..(12)..(13)..(14)..(15): Xaa is A or G
  MOD_RES (16)..(17)..(18)..(19): Xaa is A or G or is absent
SKVIMNSLQEXXXXXXXXXYYVIPLPELDQSV

SEQ ID NO: 11567 - protein, 37 aa, Artificial Sequence
  GFR-binding peptide
  MOD_RES (2)..(33)..(34): Xaa is C or S
KXSRVIMNSLQEVKPKRGVYYLITLPELAQPVXXPAA

SEQ ID NO: 11568 - protein, 33 aa, Artificial Sequence
  GFR-binding peptide
  MOD_RES (33)..(33): Xaa is C or S
  MOD_RES (11)..(12)..(13)..(14)..(15): Xaa is A or G
  MOD_RES (16)..(17)..(18)..(19): Xaa is A or G or is absent
SRVIMNSLQEXXXXXXXXXYYLITLPELAQPVX

SEQ ID NO: 11569 - protein, 40 aa, Artificial Sequence; identical to SEQ ID NO: 4150
  GFR-binding peptide
  MOD_RES (1)..(34)..(35): Xaa is C or S
  MOD_RES (12)..(13)..(14)..(15)..(16): Xaa is A or G
  MOD_RES (17)..(18)..(19)..(20): Xaa is A or G or is absent

SEQ ID NO: 11570 - protein, 33 aa, Artificial Sequence
  GFR-binding peptide
  MOD_RES (33)..(33): Xaa is C or S
  MOD_RES (11)..(12)..(13)..(14)..(15): Xaa is A or G
  MOD_RES (16)..(17)..(18)..(19): Xaa is A or G or is absent
SKVIMNSLQEXXXXXXXXXYYVIPLPELDQSVX

SEQ ID NO: 11571 - protein, 38 aa, Artificial Sequence
  GFR-binding peptide
  MOD_RES (2)..(4)..(35)..(36): Xaa is C or S
SXKXSRVIMNSLQEVKPKRGVYYVIPLPELAQPVXXPA

SEQ ID NO: 11572 - protein, 39 aa, Artificial Sequence
  GFR-binding peptide
  MOD_RES (34)..(34): Xaa is C or S
  MOD_RES (12)..(13)..(14)..(15)..(16): Xaa is A or G
  MOD_RES (17)..(18)..(19)..(20): Xaa is A or G or is absent
SRVVMNEYQKYXXXXXXXXXIFLVSIPSLKTPAXTPKTV

SEQ ID NO: 11573 - protein, 38 aa, Artificial Sequence; identical to SEQ ID NO: 4155
  GFR-binding peptide
  MOD_RES (2)..(4)..(36)..(37): Xaa is C or S

SEQ ID NO: 11574 - protein, 33 aa, Artificial Sequence; identical to SEQ ID NO: 4158
  GFR-binding peptide
  MOD_RES (31)..(32): Xaa is C or S

SEQ ID NO: 11575 - protein, 39 aa, Artificial Sequence; identical to SEQ ID NO: 4159
  GFR-binding peptide
  MOD_RES (2)..(4)..(36): Xaa is C or S

SEQ ID NO: 11576 - protein, 40 aa, Artificial Sequence
  GFR-binding peptide
  MOD_RES (2)..(4)..(37)..(38): Xaa is C or S
  MOD_RES (15)..(16)..(17)..(18)..(19): Xaa is A or G
  MOD_RES (20)..(21)..(22)..(23): Xaa is A or G or is absent
SXKXSKVIMNSLQEXXXXXXXXXYYVIPLPELDQSVXXPS

SEQ ID NO: 11577 - protein, 34 aa, Artificial Sequence
  GFR-binding peptide
  MOD_RES (32)..(33): Xaa is C or S
SEVVMDQYNKLVVNNASDLYLISIASLRTPVXXT

SEQ ID NO: 11578 - protein, 39 aa, Artificial Sequence
  GFR-binding peptide
  MOD_RES (2)..(4)..(37)..(38): Xaa is C or S
  MOD_RES (15)..(16)..(17)..(18)..(19): Xaa is A or G
  MOD_RES (20)..(21)..(22)..(23): Xaa is A or G or is absent
SXKXSRVIMEYQKYXXXXXXXXXIFLISIPSLAQPVXXP

SEQ ID NO: 11579 - protein, 35 aa, Artificial Sequence
  GFR-binding peptide
  MOD_RES (33)..(34): Xaa is C or S
  MOD_RES (11)..(12)..(13)..(14)..(15): Xaa is A or G
  MOD_RES (16)..(17)..(18)..(19): Xaa is A or G or is absent
RVVMNEYQKYXXXXXXXXXIFLVSIPSLQTPAXXP

SEQ ID NO: 11580 - protein, 39 aa, Artificial Sequence; identical to SEQ ID NO: 4168
  GFR-binding peptide
  MOD_RES (2)..(4)..(38)..(39): Xaa is C or S
  MOD_RES (16)..(17)..(18)..(19)..(20): Xaa is A or G
  MOD_RES (21)..(22)..(23)..(24): Xaa is A or G or is absent

SEQ ID NO: 11581 - protein, 35 aa, Artificial Sequence; identical to SEQ ID NO: 4169
  GFR-binding peptide
  MOD_RES (2)..(2): Xaa is C or S
  MOD_RES (14)..(15)..(16)..(17)..(18): Xaa is A or G
  MOD_RES (19)..(20)..(21)..(22): Xaa is A or G or is absent

SEQ ID NO: 11582 - protein, 38 aa, Artificial Sequence
  GFR-binding peptide
  MOD_RES (2)..(4)..(36)..(37): Xaa is C or S
RXGXGEVVMENSLQEVVKDYEDYYLMTLPELETPVXXA

SEQ ID NO: 11583 - protein, 37 aa, Artificial Sequence
  GFR-binding peptide
  MOD_RES (2)..(33)..(34): Xaa is C or S
KXSKVIMEYQKYIKPTKGIIFLISIPSLDQSVXXPSA

SEQ ID NO: 11584 - protein, 39 aa, Artificial Sequence
  GFR-binding peptide
  MOD_RES (2)..(4)..(36): Xaa is C or S
HXGXSRVVMNNSLQEIVNSSDDYYLVTLPELKTPAXTPK

SEQ ID NO: 11585 - protein, 40 aa, Artificial Sequence
  GFR-binding peptide
  MOD_RES (1)..(3)..(37)..(38): Xaa is C or S
  MOD_RES (15)..(16)..(17)..(18)..(19): Xaa is A or G
  MOD_RES (20)..(21)..(22)..(23): Xaa is A or G or is absent
XGXARVVMNNSLQEXXXXXXXXXYYVVPLPELQTPAXXPK

SEQ ID NO: 11586 - protein, 37 aa, Artificial Sequence; identical to SEQ ID NO: 4172
  GFR-binding peptide
  MOD_RES (31)..(32): Xaa is C or S

SEQ ID NO: 11587 - protein, 38 aa, Artificial Sequence; identical to SEQ ID NO: 4174
  GFR-binding peptide
  MOD_RES (2)..(4)..(38): Xaa is C or S
  MOD_RES (16)..(17)..(18)..(19)..(20): Xaa is A or G
  MOD_RES (21)..(22)..(23)..(24): Xaa is A or G or is absent

SEQ ID NO: 11588 - protein, 38 aa, Artificial Sequence
  GFR-binding peptide
  MOD_RES (1)..(3)..(36)..(37): Xaa is C or S
  MOD_RES (14)..(15)..(16)..(17)..(18): Xaa is A or G
  MOD_RES (19)..(20)..(21)..(22): Xaa is A or G or is absent
XKXSRVIMNSLQEXXXXXXXXXYYVIPLPELAQPVXXP

SEQ ID NO: 11589 - protein, 34 aa, Artificial Sequence
  GFR-binding peptide
  MOD_RES (34)..(34): Xaa is C or S
  MOD_RES (12)..(13)..(14)..(15)..(16): Xaa is A or G
  MOD_RES (17)..(18)..(19)..(20): Xaa is A or G or is absent
GEVVMDNSLQEXXXXXXXXXYYLMTLPELETPVX

SEQ ID NO: 11590 - protein, 35 aa, Artificial Sequence; identical to SEQ ID NO: 4176
  GFR-binding peptide
  MOD_RES (1)..(35): Xaa is C or S
  MOD_RES (13)..(14)..(15)..(16)..(17): Xaa is A or G
  MOD_RES (18)..(19)..(20)..(21): Xaa is A or G or is absent

SEQ ID NO: 11591 - protein, 34 aa, Artificial Sequence
  GFR-binding peptide
  MOD_RES (1)..(32)..(33): Xaa is C or S
XSRVIMNSLQEVKPKRGVYYVIPLPELAQPVXXP

SEQ ID NO: 11592 - protein, 38 aa, Artificial Sequence; identical to SEQ ID NO: 4178
  GFR-binding peptide
  MOD_RES (1)..(3)..(37): Xaa is C or S
  MOD_RES (15)..(16)..(17)..(18)..(19): Xaa is A or G
  MOD_RES (20)..(21)..(22)..(23): Xaa is A or G or is absent

SEQ ID NO: 11593 - protein, 41 aa, Artificial Sequence
  GFR-binding peptide
  MOD_RES (2)..(4)..(36): Xaa is C or S
HXGXSRVVMNNSLQEIVNSSDDYYVVPLPELKTPAXTPKTV

SEQ ID NO: 11594 - protein, 36 aa, Artificial Sequence
  GFR-binding peptide
  MOD_RES (2)..(4)..(35)..(36): Xaa is C or S
SXKXSKVVMEYQKYVKPTRGVIFLISIPSLDQPVXX

SEQ ID NO: 11595 - protein, 41 aa, Artificial Sequence; identical to SEQ ID NO: 4180
  GFR-binding peptide
  MOD_RES (1)..(35)..(36): Xaa is C or S
  MOD_RES (13)..(14)..(15)..(16)..(17): Xaa is A or G
  MOD_RES (18)..(19)..(20)..(21): Xaa is A or G or is absent

SEQ ID NO: 11596 - protein, 34 aa, Artificial Sequence
  GFR-binding peptide
  MOD_RES (1)..(1): Xaa is C or S
  MOD_RES (13)..(14)..(15)..(16)..(17): Xaa is A or G
  MOD_RES (18)..(19)..(20)..(21): Xaa is A or G or is absent
XGEVVMDNSLQEXXXXXXXXXYYVMPLPELETPV

SEQ ID NO: 11597 - protein, 38 aa, Artificial Sequence; identical to SEQ ID NO: 4182
  GFR-binding peptide
  MOD_RES (2)..(4)..(35)..(36): Xaa is C or S

SEQ ID NO: 11598 - protein, 35 aa, Artificial Sequence; identical to SEQ ID NO: 4183
  GFR-binding peptide
  MOD_RES (1)..(33)..(34): Xaa is C or S

SEQ ID NO: 11599 - protein, 36 aa, Artificial Sequence
  GFR-binding peptide
  MOD_RES (32)..(33): Xaa is C or S
SEVVMDNSLQEVVNNASDYYVIPLPELRTPVXXTPP

SEQ ID NO: 11600 - protein, 38 aa, Artificial Sequence; identical to SEQ ID NO: 4186
  GFR-binding peptide
  MOD_RES (1)..(32)..(33): Xaa is C or S

SEQ ID NO: 11601 - protein, 40 aa, Artificial Sequence
  GFR-binding peptide
  MOD_RES (1)..(35)..(36): Xaa is C or S
  MOD_RES (13)..(14)..(15)..(16)..(17): Xaa is A or G
  MOD_RES (18)..(19)..(20)..(21): Xaa is A or G or is absent
XGEVVMDNSLQEXXXXXXXXXYYLMTLPELETPVXXAKPI

SEQ ID NO: 11602 - protein, 33 aa, Artificial Sequence
  GFR-binding peptide
  MOD_RES (2)..(2): Xaa is C or S
GXSEVVMDQYNKLVVNNASDLYLISIASLRTPV

SEQ ID NO: 11603 - protein, 34 aa, Artificial Sequence; identical to SEQ ID NO: 4189
  GFR-binding peptide
  MOD_RES (32)..(33): Xaa is C or S

SEQ ID NO: 11604 - protein, 35 aa, Artificial Sequence
  GFR-binding peptide
  MOD_RES (2)..(2): Xaa is C or S
  MOD_RES (14)..(15)..(16)..(17)..(18): Xaa is A or G
  MOD_RES (19)..(20)..(21)..(22): Xaa is A or G or is absent
GXSEVVMDNSLQEXXXXXXXXXYYLITLPELRTPV

SEQ ID NO: 11605 - protein, 36 aa, Artificial Sequence
  GFR-binding peptide
  MOD_RES (1)..(3)..(35)..(36): Xaa is C or S
XGXGEVVMDNSLQEVVKENEDYYVMPLPELETPVXX

SEQ ID NO: 11606 - protein, 34 aa, Artificial Sequence
  GFR-binding peptide
  MOD_RES (2)..(34): Xaa is C or S
GXARVVMNNSLQEIVNSSDDYYVVPLPELQTPAX

SEQ ID NO: 11607 - protein, 37 aa, Artificial Sequence; identical to SEQ ID NO: 4197
  GFR-binding peptide
  MOD_RES (1)..(3)..(35)..(36): Xaa is C or S

SEQ ID NO: 11608 - protein, 35 aa, Artificial Sequence
  GFR-binding peptide
  MOD_RES (34)..(35): Xaa is C or S
  MOD_RES (12)..(13)..(14)..(15)..(16): Xaa is A or G
  MOD_RES (17)..(18)..(19)..(20): Xaa is A or G or is absent
ARVVMNNSLQEXXXXXXXXXYYLVTLPELQTPAXX

SEQ ID NO: 11609 - protein, 37 aa, Artificial Sequence
  GFR-binding peptide
  MOD_RES (2)..(4)..(37): Xaa is C or S
  MOD_RES (15)..(16)..(17)..(18)..(19): Xaa is A or G
  MOD_RES (20)..(21)..(22)..(23): Xaa is A or G or is absent
SXKXSKVVMNSLQEXXXXXXXXXYYVIPLPELDQPVX

SEQ ID NO: 11610 - protein, 35 aa, Artificial Sequence
  GFR-binding peptide
  MOD_RES (1)..(35): Xaa is C or S
  MOD_RES (13)..(14)..(15)..(16)..(17): Xaa is A or G
  MOD_RES (18)..(19)..(20)..(21): Xaa is A or G or is absent
XGEVVMDNSLQEXXXXXXXXXYYVMPLPELETPVX

SEQ ID NO: 11611 - protein, 41 aa, Artificial Sequence; identical to SEQ ID NO: 4201
  GFR-binding peptide
  MOD_RES (2)..(4)..(35)..(36): Xaa is C or S

SEQ ID NO: 11612 - protein, 32 aa, Artificial Sequence; identical to SEQ ID NO: 4202
  GFR-binding peptide
  MOD_RES (11)..(12)..(13)..(14)..(15): Xaa is A or G
  MOD_RES (16)..(17)..(18)..(19): Xaa is A or G or is absent

SEQ ID NO: 11613 - protein, 35 aa, Artificial Sequence
  GFR-binding peptide
  MOD_RES (33)..(34): Xaa is C or S
  MOD_RES (11)..(12)..(13)..(14)..(15): Xaa is A or G
  MOD_RES (16)..(17)..(18)..(19): Xaa is A or G or is absent
EVVMDNSLQEXXXXXXXXXYYVIPLPELRTPVXXT

SEQ ID NO: 11614 - protein, 39 aa, Artificial Sequence
  GFR-binding peptide
  MOD_RES (33)..(34): Xaa is C or S
  MOD_RES (11)..(12)..(13)..(14)..(15): Xaa is A or G
  MOD_RES (16)..(17)..(18)..(19): Xaa is A or G or is absent
EVVMDNSLQEXXXXXXXXXYYVMPLPELETPVXXAKPIK

SEQ ID NO: 11615 - protein, 39 aa, Artificial Sequence
  GFR-binding peptide
  MOD_RES (33)..(34): Xaa is C or S
  MOD_RES (11)..(12)..(13)..(14)..(15): Xaa is A or G
  MOD_RES (16)..(17)..(18)..(19): Xaa is A or G or is absent
EVVMDNSLQEXXXXXXXXXYYLMTLPELETPVXXAKPIK

SEQ ID NO: 11616 - protein, 38 aa, Artificial Sequence; identical to SEQ ID NO: 4207
  GFR-binding peptide
  MOD_RES (2)..(36)..(37): Xaa is C or S
  MOD_RES (14)..(15)..(16)..(17)..(18): Xaa is A or G
  MOD_RES (19)..(20)..(21)..(22): Xaa is A or G or is absent

SEQ ID NO: 11617 - protein, 35 aa, Artificial Sequence
  GFR-binding peptide
  MOD_RES (34)..(35): Xaa is C or S
  MOD_RES (12)..(13)..(14)..(15)..(16): Xaa is A or G
  MOD_RES (17)..(18)..(19)..(20): Xaa is A or G or is absent
GEVVMDEYQKYXXXXXXXXXIFLMSIPSLETPVXX

SEQ ID NO: 11618 - protein, 39 aa, Artificial Sequence
  GFR-binding peptide
  MOD_RES (1)..(3)..(37)..(38): Xaa is C or S
  MOD_RES (15)..(16)..(17)..(18)..(19): Xaa is A or G
  MOD_RES (20)..(21)..(22)..(23): Xaa is A or G or is absent
XGXSEVVMDRYKKLXXXXXXXXXFYLISIANLRTPVXXT

SEQ ID NO: 11619 - protein, 32 aa, Artificial Sequence
  GFR-binding peptide
  MOD_RES (31)..(32): Xaa is C or S
EVVMDNSLQEVVNNASDYYVIPLPELRTPVXX

SEQ ID NO: 11620 - protein, 38 aa, Artificial Sequence
  GFR-binding peptide
  MOD_RES (2)..(35)..(36): Xaa is C or S
  MOD_RES (13)..(14)..(15)..(16)..(17): Xaa is A or G
  MOD_RES (18)..(19)..(20)..(21): Xaa is A or G or is absent
KXSRVIMNSLQEXXXXXXXXXYYLITLPELAQPVXXPA

SEQ ID NO: 11621 - protein, 35 aa, Artificial Sequence
  GFR-binding peptide
  MOD_RES (1)..(3)..(35): Xaa is C or S
XGXSEVVMDRYKKLVVNNASDFYLISIANLRTPVX

SEQ ID NO: 11622 - protein, 33 aa, Artificial Sequence; identical to SEQ ID NO: 4211
  GFR-binding peptide
  MOD_RES (33)..(33): Xaa is C or S
  MOD_RES (11)..(12)..(13)..(14)..(15): Xaa is A or G
  MOD_RES (16)..(17)..(18)..(19): Xaa is A or G or is absent

SEQ ID NO: 11623 - protein, 39 aa, Artificial Sequence
  GFR-binding peptide
  MOD_RES (2)..(36)..(37): Xaa is C or S
  MOD_RES (14)..(15)..(16)..(17)..(18): Xaa is A or G
  MOD_RES (19)..(20)..(21)..(22): Xaa is A or G or is absent
GXSEVVMDNSLQEXXXXXXXXXYYLITLPELRTPVXXTP

SEQ ID NO: 11624 - protein, 36 aa, Artificial Sequence
  GFR-binding peptide
  MOD_RES (1)..(34)..(35): Xaa is C or S
  MOD_RES (12)..(13)..(14)..(15)..(16): Xaa is A or G
  MOD_RES (17)..(18)..(19)..(20): Xaa is A or G or is absent
XSRVIMNSLQEXXXXXXXXXYYVIPLPELAQPVXXP

SEQ ID NO: 11625 - protein, 36 aa, Artificial Sequence
  GFR-binding peptide
  MOD_RES (1)..(3)..(36): Xaa is C or S
  MOD_RES (14)..(15)..(16)..(17)..(18): Xaa is A or G
  MOD_RES (19)..(20)..(21)..(22): Xaa is A or G or is absent
XKXSKVVMNSLQEXXXXXXXXXYYLITLPELDQPVX

SEQ ID NO: 11626 - protein, 37 aa, Artificial Sequence; identical to SEQ ID NO: 4215
  GFR-binding peptide
  MOD_RES (1)..(35)..(36): Xaa is C or S
  MOD_RES (13)..(14)..(15)..(16)..(17): Xaa is A or G
  MOD_RES (18)..(19)..(20)..(21): Xaa is A or G or is absent

SEQ ID NO: 11627 - protein, 36 aa, Artificial Sequence; identical to SEQ ID NO: 4218
  GFR-binding peptide
  MOD_RES (1)..(3)..(35)..(36): Xaa is C or S

SEQ ID NO: 11628 - protein, 37 aa, Artificial Sequence
  GFR-binding peptide
  MOD_RES (2)..(35)..(36): Xaa is C or S
  MOD_RES (13)..(14)..(15)..(16)..(17): Xaa is A or G
  MOD_RES (18)..(19)..(20)..(21): Xaa is A or G or is absent
KXSRVIMNSLQEXXXXXXXXXYYLITLPELAQPVXXP

SEQ ID NO: 11629 - protein, 31 aa, Artificial Sequence
  GFR-binding peptide
  MOD_RES (31)..(31): Xaa is C or S
EVVMDNSLQEVVNNASDYYVIPLPELRTPVX

SEQ ID NO: 11630 - protein, 32 aa, Artificial Sequence; identical to SEQ ID NO: 4220
  GFR-binding peptide
  MOD_RES (1)..(32): Xaa is C or S

SEQ ID NO: 11631 - protein, 40 aa, Artificial Sequence
  GFR-binding peptide
  MOD_RES (2)..(36)..(37): Xaa is C or S
  MOD_RES (14)..(15)..(16)..(17)..(18): Xaa is A or G
  MOD_RES (19)..(20)..(21)..(22): Xaa is A or G or is absent
GXARVVMNEYQKYXXXXXXXXXIFLVSIPSLQTPAXXPKP

SEQ ID NO: 11632 - protein, 31 aa, Artificial Sequence; identical to SEQ ID NO: 4221
  GFR-binding peptide
  MOD_RES (1)..(1): Xaa is C or S

SEQ ID NO: 11633 - protein, 37 aa, Artificial Sequence; identical to SEQ ID NO: 4223
  GFR-binding peptide
  MOD_RES (2)..(36)..(37): Xaa is C or S
  MOD_RES (14)..(15)..(16)..(17)..(18): Xaa is A or G
  MOD_RES (19)..(20)..(21)..(22): Xaa is A or G or is absent

SEQ ID NO: 11634 - protein, 40 aa, Artificial Sequence
  GFR-binding peptide
  MOD_RES (2)..(4)..(36)..(37): Xaa is C or S
RXGXSEVVMDEYQKYVVNNASDIFLISIPSLRTPVXXTPP

SEQ ID NO: 11635 - protein, 35 aa, Artificial Sequence
  GFR-binding peptide
  MOD_RES (2)..(34): Xaa is C or S
GXSRVVMNNSLQEIVNSSDDYYLVTLPELKTPAXT

SEQ ID NO: 11636 - protein, 36 aa, Artificial Sequence
  GFR-binding peptide
  MOD_RES (2)..(4): Xaa is C or S
  MOD_RES (15)..(16)..(17)..(18)..(19): Xaa is A or G
  MOD_RES (20)..(21)..(22)..(23): Xaa is A or G or is absent
SXKXSRVIMEYQKYXXXXXXXXXIFLISIPSLAQPV

SEQ ID NO: 11637 - protein, 40 aa, Artificial Sequence; identical to SEQ ID NO: 4226
  GFR-binding peptide
  MOD_RES (1)..(3)..(34)..(35): Xaa is C or S

SEQ ID NO: 11638 - protein, 42 aa, Artificial Sequence
  GFR-binding peptide
  MOD_RES (2)..(4)..(37)..(38): Xaa is C or S
  MOD_RES (15)..(16)..(17)..(18)..(19): Xaa is A or G
  MOD_RES (20)..(21)..(22)..(23): Xaa is A or G or is absent
SXKXSKVVMEYQKYXXXXXXXXXIFLISIPSLDQPVXXPSAS

SEQ ID NO: 11639 - protein, 38 aa, Artificial Sequence; identical to SEQ ID NO: 4227
  GFR-binding peptide
  MOD_RES (1)..(34)..(35): Xaa is C or S
  MOD_RES (12)..(13)..(14)..(15)..(16): Xaa is A or G
  MOD_RES (17)..(18)..(19)..(20): Xaa is A or G or is absent

SEQ ID NO: 11640 - protein, 42 aa, Artificial Sequence
  GFR-binding peptide
  MOD_RES (2)..(36)..(37): Xaa is C or S
  MOD_RES (14)..(15)..(16)..(17)..(18): Xaa is A or G
  MOD_RES (19)..(20)..(21)..(22): Xaa is A or G or is absent
GXSRVVMNNSLQEXXXXXXXXXYYLVTLPELKTPAXXPKPVY

SEQ ID NO: 11641 - protein, 36 aa, Artificial Sequence; identical to SEQ ID NO: 4228
  GFR-binding peptide
  MOD_RES (1)..(33)..(34): Xaa is C or S

SEQ ID NO: 11642 - protein, 40 aa, Artificial Sequence
  GFR-binding peptide
  MOD_RES (2)..(4)..(37)..(38): Xaa is C or S
  MOD_RES (15)..(16)..(17)..(18)..(19): Xaa is A or G
  MOD_RES (20)..(21)..(22)..(23): Xaa is A or G or is absent
SXKXSKVIMEYQKYXXXXXXXXXIFLISIPSLDQSVXXPS

SEQ ID NO: 11643 - protein, 39 aa, Artificial Sequence; identical to SEQ ID NO: 4229
  GFR-binding peptide
  MOD_RES (1)..(33)..(34): Xaa is C or S

SEQ ID NO: 11644 - protein, 39 aa, Artificial Sequence
  GFR-binding peptide
  MOD_RES (33)..(34): Xaa is C or S
  MOD_RES (11)..(12)..(13)..(14)..(15): Xaa is A or G
  MOD_RES (16)..(17)..(18)..(19): Xaa is A or G or is absent
EVVMEEYQKYXXXXXXXXXIFLMSIPSLETPVXXAKPIS

SEQ ID NO: 11645 - protein, 37 aa, Artificial Sequence; identical to SEQ ID NO: 4230
  GFR-binding peptide
  MOD_RES (2)..(4)..(35)..(36): Xaa is C or S

SEQ ID NO: 11646 - protein, 36 aa, Artificial Sequence
  GFR-binding peptide
  MOD_RES (1)..(3): Xaa is C or S
  MOD_RES (15)..(16)..(17)..(18)..(19): Xaa is A or G
  MOD_RES (20)..(21)..(22)..(23): Xaa is A or G or is absent
XGXSEVVMDQYNKLXXXXXXXXXLYLISIASLRTPV

SEQ ID NO: 11647 - protein, 35 aa, Artificial Sequence
  GFR-binding peptide
  MOD_RES (2)..(2): Xaa is C or S
  MOD_RES (14)..(15)..(16)..(17)..(18): Xaa is A or G
  MOD_RES (19)..(20)..(21)..(22): Xaa is A or G or is absent
GXSRVVMNNSLQEXXXXXXXXXYYVVPLPELKTPA

SEQ ID NO: 11648 - protein, 34 aa, Artificial Sequence
  GFR-binding peptide
  MOD_RES (1)..(32)..(33): Xaa is C or S
XSKVIMEYQKYIKPTKGIIFLISIPSLDQSVXXP

SEQ ID NO: 11649 - protein, 35 aa, Artificial Sequence
  GFR-binding peptide
  MOD_RES (1)..(3): Xaa is C or S
  MOD_RES (14)..(15)..(16)..(17)..(18): Xaa is A or G
  MOD_RES (19)..(20)..(21)..(22): Xaa is A or G or is absent
XKXSRVIMNSLQEXXXXXXXXXYYLITLPELAQPV

SEQ ID NO: 11650 - protein, 39 aa, Artificial Sequence
  GFR-binding peptide
  MOD_RES (2)..(33)..(34): Xaa is C or S
KXSKVIMEYQKYIKPTKGIIFLISIPSLDQSVXXPSASA

SEQ ID NO: 11651 - protein, 42 aa, Artificial Sequence; identical to SEQ ID NO: 4234
  GFR-binding peptide
  MOD_RES (2)..(4)..(37)..(38): Xaa is C or S
  MOD_RES (15)..(16)..(17)..(18)..(19): Xaa is A or G
  MOD_RES (20)..(21)..(22)..(23): Xaa is A or G or is absent

SEQ ID NO: 11652 - protein, 36 aa, Artificial Sequence
  GFR-binding peptide
  MOD_RES (31)..(31): Xaa is C or S
RVVMNNSLQEIVNSSDDYYVVPLPELKTPAXTPKTV

SEQ ID NO: 11653 - protein, 35 aa, Artificial Sequence
  GFR-binding peptide
  MOD_RES (2)..(35): Xaa is C or S
  MOD_RES (13)..(14)..(15)..(16)..(17): Xaa is A or G
  MOD_RES (18)..(19)..(20)..(21): Xaa is A or G or is absent
KXSRVIMNSLQEXXXXXXXXXYYVIPLPELAQPVX

SEQ ID NO: 11654 - protein, 43 aa, Artificial Sequence; identical to SEQ ID NO: 4238
  GFR-binding peptide
  MOD_RES (1)..(3)..(37): Xaa is C or S
  MOD_RES (15)..(16)..(17)..(18)..(19): Xaa is A or G
  MOD_RES (20)..(21)..(22)..(23): Xaa is A or G or is absent

SEQ ID NO: 11655 - protein, 41 aa, Artificial Sequence
  GFR-binding peptide
  MOD_RES (2)..(4)..(37)..(38): Xaa is C or S
  MOD_RES (15)..(16)..(17)..(18)..(19): Xaa is A or G
  MOD_RES (20)..(21)..(22)..(23): Xaa is A or G or is absent
SXKXSKVIMEYQKYXXXXXXXXXIFLISIPSLDQSVXXPSA

SEQ ID NO: 11656 - protein, 44 aa, Artificial Sequence; identical to SEQ ID NO: 4243
  GFR-binding peptide
  MOD_RES (2)..(4)..(38)..(39): Xaa is C or S
  MOD_RES (16)..(17)..(18)..(19)..(20): Xaa is A or G
  MOD_RES (21)..(22)..(23)..(24): Xaa is A or G or is absent

SEQ ID NO: 11657 - protein, 35 aa, Artificial Sequence
  GFR-binding peptide
  MOD_RES (1)..(3)..(35): Xaa is C or S
XGXSEVVMDNSLQEVVNNASDYYVIPLPELRTPVX

SEQ ID NO: 11658 - protein, 34 aa, Artificial Sequence
  GFR-binding peptide
  MOD_RES (32)..(33): Xaa is C or S
GEVVMENSLQEVVKDYEDYYVMPLPELETPVXXA

SEQ ID NO: 11659 - protein, 33 aa, Artificial Sequence
  GFR-binding peptide
  MOD_RES (31)..(32): Xaa is C or S
EVVMEEYQKYVVKDYEDIFLMSIPSLETPVXXA

SEQ ID NO: 11660 - protein, 34 aa, Artificial Sequence
  GFR-binding peptide
  MOD_RES (1)..(32)..(33): Xaa is C or S
XSKVVMNSLQEVKPTRGVYYVIPLPELDQPVXXP

SEQ ID NO: 11661 - protein, 35 aa, Artificial Sequence; identical to SEQ ID NO: 4251
  GFR-binding peptide
  MOD_RES (2)..(4)..(35): Xaa is C or S

SEQ ID NO: 11662 - protein, 40 aa, Artificial Sequence
  GFR-binding peptide
  MOD_RES (1)..(35)..(36): Xaa is C or S
  MOD_RES (13)..(14)..(15)..(16)..(17): Xaa is A or G
  MOD_RES (18)..(19)..(20)..(21): Xaa is A or G or is absent
XGEVVMDNSLQEXXXXXXXXXYYVMPLPELETPVXXAKPI

SEQ ID NO: 11663 - protein, 32 aa, Artificial Sequence
  GFR-binding peptide
  MOD_RES (1)..(1): Xaa is C or S
XGEVVMDEYQKYVVKENEDIFLMSIPSLETPV

SEQ ID NO: 11664 - protein, 39 aa, Artificial Sequence
  GFR-binding peptide
  MOD_RES (2)..(4)..(36)..(37): Xaa is C or S
RXGXGEVVMEEYQKYVVKDYEDIFLMSIPSLETPVXXAK

SEQ ID NO: 11665 - protein, 38 aa, Artificial Sequence
  GFR-binding peptide
  MOD_RES (2)..(34)..(35): Xaa is C or S
GXARVVMNNSLQEIVNSSDDYYVVPLPELQTPAXXPKP

SEQ ID NO: 11666 - protein, 33 aa, Artificial Sequence
  GFR-binding peptide
  MOD_RES (33)..(33): Xaa is C or S
  MOD_RES (11)..(12)..(13)..(14)..(15): Xaa is A or G
  MOD_RES (16)..(17)..(18)..(19): Xaa is A or G or is absent
SKVIMEYQKYXXXXXXXXXIFLISIPSLDQSVX

SEQ ID NO: 11667 - protein, 41 aa, Artificial Sequence; identical to SEQ ID NO: 4256
  GFR-binding peptide
  MOD_RES (2)..(4)..(36)..(37): Xaa is C or S

SEQ ID NO: 11668 - protein, 38 aa, Artificial Sequence
  GFR-binding peptide
  MOD_RES (1)..(35)..(36): Xaa is C or S
  MOD_RES (13)..(14)..(15)..(16)..(17): Xaa is A or G
  MOD_RES (18)..(19)..(20)..(21): Xaa is A or G or is absent
XGEVVMDNSLQEXXXXXXXXXYYVMPLPELETPVXXAK

SEQ ID NO: 11669 - protein, 37 aa, Artificial Sequence
  GFR-binding peptide
  MOD_RES (2)..(4)..(36)..(37): Xaa is C or S
RXGXSEVVMDEYQKYVVNNASDIFLISIPSLRTPVXX

SEQ ID NO: 11670 - protein, 36 aa, Artificial Sequence
  GFR-binding peptide
  MOD_RES (1)..(3)..(34)..(35): Xaa is C or S
XKXSKVIMEYQKYIKPTKGIIFLISIPSLDQSVXXP

SEQ ID NO: 11671 - protein, 43 aa, Artificial Sequence
  GFR-binding peptide
  MOD_RES (2)..(4)..(38)..(39): Xaa is C or S
  MOD_RES (16)..(17)..(18)..(19)..(20): Xaa is A or G
  MOD_RES (21)..(22)..(23)..(24): Xaa is A or G or is absent
RXGXGEVVMEEYQKYXXXXXXXXXIFLMSIPSLETPVXXAKPI

SEQ ID NO: 11672 - protein, 37 aa, Artificial Sequence
  GFR-binding peptide
  MOD_RES (32)..(32): Xaa is C or S
SRVVMNNSLQEIVNSSDDYYVVPLPELKTPAXTPKTV

SEQ ID NO: 11673 - protein, 32 aa, Artificial Sequence
  GFR-binding peptide
  MOD_RES (32)..(32): Xaa is C or S
SEVVMDEYQKYVVNNASDIFLISIPSLRTPVX

SEQ ID NO: 11674 - protein, 36 aa, Artificial Sequence
  GFR-binding peptide
  MOD_RES (1)..(3)..(35)..(36): Xaa is C or S
XGXGEVVMEEYQKYVVKDYEDIFLMSIPSLETPVXX

SEQ ID NO: 11675 - protein, 33 aa, Artificial Sequence
  GFR-binding peptide
  MOD_RES (1)..(33): Xaa is C or S
XSEVVMDRYKKLVVNNASDFYLISIANLRTPVX

SEQ ID NO: 11676 - protein, 35 aa, Artificial Sequence
  GFR-binding peptide
  MOD_RES (34)..(35): Xaa is C or S
  MOD_RES (12)..(13)..(14)..(15)..(16): Xaa is A or G
  MOD_RES (17)..(18)..(19)..(20): Xaa is A or G or is absent
ARVVMNEYQKYXXXXXXXXXIFLVSIPSLQTPAXX

SEQ ID NO: 11677 - protein, 35 aa, Artificial Sequence
  GFR-binding peptide
  MOD_RES (1)..(33)..(34): Xaa is C or S
XGEVVMDNSLQEVVKENEDYYLMTLPELETPVXXA

SEQ ID NO: 11678 - protein, 37 aa, Artificial Sequence; identical to SEQ ID NO: 4263
  GFR-binding peptide
  MOD_RES (34)..(34): Xaa is C or S
  MOD_RES (12)..(13)..(14)..(15)..(16): Xaa is A or G
  MOD_RES (17)..(18)..(19)..(20): Xaa is A or G or is absent

SEQ ID NO: 11679 - protein, 39 aa, Artificial Sequence
  GFR-binding peptide
  MOD_RES (2)..(4)..(37)..(38): Xaa is C or S
  MOD_RES (15)..(16)..(17)..(18)..(19): Xaa is A or G
  MOD_RES (20)..(21)..(22)..(23): Xaa is A or G or is absent
SXKXSKVVMEYQKYXXXXXXXXXIFLISIPSLDQPVXXP

SEQ ID NO: 11680 - protein, 37 aa, Artificial Sequence
  GFR-binding peptide
  MOD_RES (2)..(4)..(37): Xaa is C or S
  MOD_RES (15)..(16)..(17)..(18)..(19): Xaa is A or G
  MOD_RES (20)..(21)..(22)..(23): Xaa is A or G or is absent
SXKXSKVVMEYQKYXXXXXXXXXIFLISIPSLDQPVX

SEQ ID NO: 11681 - protein, 36 aa, Artificial Sequence; identical to SEQ ID NO: 4265
  GFR-binding peptide
  MOD_RES (2)..(33)..(34): Xaa is C or S

SEQ ID NO: 11682 - protein, 40 aa, Artificial Sequence
  GFR-binding peptide
  MOD_RES (2)..(4)..(36)..(37): Xaa is C or S
RXGXGEVVMENSLQEVVKDYEDYYLMTLPELETPVXXAKP

SEQ ID NO: 11683 - protein, 37 aa, Artificial Sequence
  GFR-binding peptide
  MOD_RES (1)..(34)..(35): Xaa is C or S
  MOD_RES (12)..(13)..(14)..(15)..(16): Xaa is A or G
  MOD_RES (17)..(18)..(19)..(20): Xaa is A or G or is absent
XSKVIMNSLQEXXXXXXXXXYYVIPLPELDQSVXXPS

SEQ ID NO: 11684 - protein, 36 aa, Artificial Sequence
  GFR-binding peptide
  MOD_RES (1)..(3)..(35)..(36): Xaa is C or S
XGXSEVVMDRYKKLVVNNASDFYLISIANLRTPVXX

SEQ ID NO: 11685 - protein, 36 aa, Artificial Sequence
  GFR-binding peptide
  MOD_RES (2)..(35)..(36): Xaa is C or S
  MOD_RES (13)..(14)..(15)..(16)..(17): Xaa is A or G
  MOD_RES (18)..(19)..(20)..(21): Xaa is A or G or is absent
KXSRVIMNSLQEXXXXXXXXXYYVIPLPELAQPVXX

SEQ ID NO: 11686 - protein, 35 aa, Artificial Sequence
  GFR-binding peptide
  MOD_RES (33)..(34): Xaa is C or S
  MOD_RES (11)..(12)..(13)..(14)..(15): Xaa is A or G
  MOD_RES (16)..(17)..(18)..(19): Xaa is A or G or is absent
EVVMDRYKKLXXXXXXXXXFYLISIANLRTPVXXT

SEQ ID NO: 11687 - protein, 38 aa, Artificial Sequence
  GFR-binding peptide
  MOD_RES (2)..(34)..(35): Xaa is C or S
GXGEVVMENSLQEVVKDYEDYYLMTLPELETPVXXAKP

SEQ ID NO: 11688 - protein, 39 aa, Artificial Sequence
  GFR-binding peptide
  MOD_RES (2)..(33)..(34): Xaa is C or S
KXSKVVMNSLQEVKPTRGVYYVIPLPELDQPVXXPSASA

SEQ ID NO: 11689 - protein, 41 aa, Artificial Sequence
  GFR-binding peptide
  MOD_RES (2)..(4)..(38)..(39): Xaa is C or S
  MOD_RES (16)..(17)..(18)..(19)..(20): Xaa is A or G
  MOD_RES (21)..(22)..(23)..(24): Xaa is A or G or is absent
RXGXGEVVMDNSLQEXXXXXXXXXYYLMTLPELETPVXXAK

SEQ ID NO: 11690 - protein, 42 aa, Artificial Sequence; identical to SEQ ID NO: 4271
  GFR-binding peptide
  MOD_RES (1)..(3)..(37)..(38): Xaa is C or S
  MOD_RES (15)..(16)..(17)..(18)..(19): Xaa is A or G
  MOD_RES (20)..(21)..(22)..(23): Xaa is A or G or is absent

SEQ ID NO: 11691 - protein, 34 aa, Artificial Sequence
  GFR-binding peptide
  MOD_RES (2)..(34): Xaa is C or S
GXSEVVMDEYQKYVVNNASDIFLISIPSLRTPVX

SEQ ID NO: 11692 - protein, 34 aa, Artificial Sequence; identical to SEQ ID NO: 4272
  GFR-binding peptide
  MOD_RES (1)..(32)..(33): Xaa is C or S

SEQ ID NO: 11693 - protein, 36 aa, Artificial Sequence
  GFR-binding peptide
  MOD_RES (2)..(33)..(34): Xaa is C or S
KXSKVVMNSLQEVKPTRGVYYVIPLPELDQPVXXPS

SEQ ID NO: 11694 - protein, 36 aa, Artificial Sequence
  GFR-binding peptide
  MOD_RES (1)..(33)..(34): Xaa is C or S
XGEVVMDNSLQEVVKENEDYYVMPLPELETPVXXAK

SEQ ID NO: 11695 - protein, 39 aa, Artificial Sequence; identical to SEQ ID NO: 4275
  GFR-binding peptide
  MOD_RES (2)..(36)..(37): Xaa is C or S
  MOD_RES (14)..(15)..(16)..(17)..(18): Xaa is A or G
  MOD_RES (19)..(20)..(21)..(22): Xaa is A or G or is absent

SEQ ID NO: 11696 - protein, 34 aa, Artificial Sequence; identical to SEQ ID NO: 4277
  GFR-binding peptide
  MOD_RES (1)..(1): Xaa is C or S
  MOD_RES (13)..(14)..(15)..(16)..(17): Xaa is A or G
  MOD_RES (18)..(19)..(20)..(21): Xaa is A or G or is absent

SEQ ID NO: 11697 - protein, 39 aa, Artificial Sequence; identical to SEQ ID NO: 4278
  GFR-binding peptide
  MOD_RES (1)..(33): Xaa is C or S

SEQ ID NO: 11698 - protein, 31 aa, Artificial Sequence
  GFR-binding peptide
  MOD_RES (31)..(31): Xaa is C or S
EVVMDRYKKLVVNNASDFYLISIANLRTPVX

SEQ ID NO: 11699 - protein, 36 aa, Artificial Sequence
  GFR-binding peptide
  MOD_RES (2)..(33)..(34): Xaa is C or S
KXSKVIMEYQKYIKPTKGIIFLISIPSLDQSVXXPS

SEQ ID NO: 11700 - protein, 40 aa, Artificial Sequence; identical to SEQ ID NO: 4280
  GFR-binding peptide
  MOD_RES (34)..(34): Xaa is C or S
  MOD_RES (12)..(13)..(14)..(15)..(16): Xaa is A or G
  MOD_RES (17)..(18)..(19)..(20): Xaa is A or G or is absent

SEQ ID NO: 11701 - protein, 40 aa, Artificial Sequence
  GFR-binding peptide
  MOD_RES (2)..(4)..(36)..(37): Xaa is C or S
HXGXARVVMNNSLQEIVNSSDDYYLVTLPELQTPAXXPKP

SEQ ID NO: 11702 - protein, 37 aa, Artificial Sequence
  GFR-binding peptide
  MOD_RES (1)..(35)..(36): Xaa is C or S
  MOD_RES (13)..(14)..(15)..(16)..(17): Xaa is A or G
  MOD_RES (18)..(19)..(20)..(21): Xaa is A or G or is absent
XGEVVMDNSLQEXXXXXXXXXYYLMTLPELETPVXXA

SEQ ID NO: 11703 - protein, 39 aa, Artificial Sequence
  GFR-binding peptide
  MOD_RES (1)..(3)..(37)..(38): Xaa is C or S
  MOD_RES (15)..(16)..(17)..(18)..(19): Xaa is A or G
  MOD_RES (20)..(21)..(22)..(23): Xaa is A or G or is absent
XGXGEVVMENSLQEXXXXXXXXXYYLMTLPELETPVXXA

SEQ ID NO: 11704 - protein, 40 aa, Artificial Sequence
  GFR-binding peptide
  MOD_RES (1)..(3)..(34)..(35): Xaa is C or S
XKXSRVIMNSLQEVKPKRGVYYVIPLPELAQPVXXPAASA

SEQ ID NO: 11705 - protein, 35 aa, Artificial Sequence
  GFR-binding peptide
  MOD_RES (1)..(3)..(35): Xaa is C or S
XGXSRVVMNNSLQEIVNSSDDYYLVTLPELKTPAX

SEQ ID NO: 11706 - protein, 33 aa, Artificial Sequence
  GFR-binding peptide
  MOD_RES (1)..(32)..(33): Xaa is C or S
XSRVIMNSLQEVKPKRGVYYVIPLPELAQPVXX

SEQ ID NO: 11707 - protein, 39 aa, Artificial Sequence; identical to SEQ ID NO: 4283
  GFR-binding peptide
  MOD_RES (2)..(33)..(34): Xaa is C or S

SEQ ID NO: 11708 - protein, 37 aa, Artificial Sequence
  GFR-binding peptide
  MOD_RES (2)..(34)..(35): Xaa is C or S
GXGEVVMDNSLQEVVKENEDYYVMPLPELETPVXXAK

SEQ ID NO: 11709 - protein, 35 aa, Artificial Sequence
  GFR-binding peptide
  MOD_RES (2)..(34)..(35): Xaa is C or S
GXARVVMNEYQKYIVNSSDDIFLVSIPSLQTPAXX

SEQ ID NO: 11710 - protein, 42 aa, Artificial Sequence
  GFR-binding peptide
  MOD_RES (2)..(4)..(36)..(37): Xaa is C or S
HXGXARVVMNNSLQEIVNSSDDYYVVPLPELQTPAXXPKPVT

SEQ ID NO: 11711 - protein, 34 aa, Artificial Sequence
  GFR-binding peptide
  MOD_RES (1)..(1): Xaa is C or S
  MOD_RES (13)..(14)..(15)..(16)..(17): Xaa is A or G
  MOD_RES (18)..(19)..(20)..(21): Xaa is A or G or is absent
XGEVVMDEYQKYXXXXXXXXXIFLMSIPSLETPV

SEQ ID NO: 11712 - protein, 37 aa, Artificial Sequence; identical to SEQ ID NO: 4286
  GFR-binding peptide
  MOD_RES (1)..(3)..(37): Xaa is C or S
  MOD_RES (15)..(16)..(17)..(18)..(19): Xaa is A or G
  MOD_RES (20)..(21)..(22)..(23): Xaa is A or G or is absent

SEQ ID NO: 11713 - protein, 40 aa, Artificial Sequence
  GFR-binding peptide
  MOD_RES (2)..(4)..(35)..(36): Xaa is C or S
SXKXSKVIMNSLQEIKPTKGIYYVIPLPELDQSVXXPSAS

SEQ ID NO: 11714 - protein, 40 aa, Artificial Sequence
  GFR-binding peptide
  MOD_RES (1)..(3)..(37)..(38): Xaa is C or S
  MOD_RES (15)..(16)..(17)..(18)..(19): Xaa is A or G
  MOD_RES (20)..(21)..(22)..(23): Xaa is A or G or is absent
XGXSRVVMNEYQKYXXXXXXXXXIFLVSIPSLKTPAXXPK

SEQ ID NO: 11715 - protein, 37 aa, Artificial Sequence
  GFR-binding peptide
  MOD_RES (34)..(35): Xaa is C or S
  MOD_RES (12)..(13)..(14)..(15)..(16): Xaa is A or G
  MOD_RES (17)..(18)..(19)..(20): Xaa is A or G or is absent
SEVVMDNSLQEXXXXXXXXXYYVIPLPELRTPVXXTP

SEQ ID NO: 11716 - protein, 39 aa, Artificial Sequence
  GFR-binding peptide
  MOD_RES (2)..(4)..(36)..(37): Xaa is C or S
HXGXARVVMNEYQKYIVNSSDDIFLVSIPSLQTPAXXPK

SEQ ID NO: 11717 - protein, 35 aa, Artificial Sequence
  GFR-binding peptide
  MOD_RES (34)..(35): Xaa is C or S
  MOD_RES (12)..(13)..(14)..(15)..(16): Xaa is A or G
  MOD_RES (17)..(18)..(19)..(20): Xaa is A or G or is absent
GEVVMDNSLQEXXXXXXXXXYYLMTLPELETPVXX

SEQ ID NO: 11718 - protein, 36 aa, Artificial Sequence
  GFR-binding peptide
  MOD_RES (1)..(3)..(36): Xaa is C or S
  MOD_RES (14)..(15)..(16)..(17)..(18): Xaa is A or G
  MOD_RES (19)..(20)..(21)..(22): Xaa is A or G or is absent
XKXSRVIMNSLQEXXXXXXXXXYYLITLPELAQPVX

SEQ ID NO: 11719 - protein, 38 aa, Artificial Sequence; identical to SEQ ID NO: 4294
  GFR-binding peptide
  MOD_RES (33)..(34): Xaa is C or S
  MOD_RES (11)..(12)..(13)..(14)..(15): Xaa is A or G
  MOD_RES (16)..(17)..(18)..(19): Xaa is A or G or is absent

SEQ ID NO: 11720 - protein, 33 aa, Artificial Sequence; identical to SEQ ID NO: 4295
  GFR-binding peptide
  MOD_RES (2)..(33): Xaa is C or S

SEQ ID NO: 11721 - protein, 39 aa, Artificial Sequence
  GFR-binding peptide
  MOD_RES (2)..(36)..(37): Xaa is C or S
  MOD_RES (14)..(15)..(16)..(17)..(18): Xaa is A or G
  MOD_RES (19)..(20)..(21)..(22): Xaa is A or G or is absent
GXSRVVMNNSLQEXXXXXXXXXYYLVTLPELKTPAXXPK

SEQ ID NO: 11722 - protein, 39 aa, Artificial Sequence; identical to SEQ ID NO: 4297
  GFR-binding peptide
  MOD_RES (2)..(4)..(38)..(39): Xaa is C or S
  MOD_RES (16)..(17)..(18)..(19)..(20): Xaa is A or G
  MOD_RES (21)..(22)..(23)..(24): Xaa is A or G or is absent

SEQ ID NO: 11723 - protein, 41 aa, Artificial Sequence
  GFR-binding peptide
  MOD_RES (1)..(3)..(36)..(37): Xaa is C or S
  MOD_RES (14)..(15)..(16)..(17)..(18): Xaa is A or G
  MOD_RES (19)..(20)..(21)..(22): Xaa is A or G or is absent
XKXSKVIMNSLQEXXXXXXXXXYYVIPLPELDQSVXXPSAS

SEQ ID NO: 11724 - protein, 33 aa, Artificial Sequence; identical to SEQ ID NO: 4298
  GFR-binding peptide
  MOD_RES (2)..(33): Xaa is C or S

SEQ ID NO: 11725 - protein, 37 aa, Artificial Sequence; identical to SEQ ID NO: 4299
  GFR-binding peptide
  MOD_RES (2)..(36)..(37): Xaa is C or S
  MOD_RES (14)..(15)..(16)..(17)..(18): Xaa is A or G
  MOD_RES (19)..(20)..(21)..(22): Xaa is A or G or is absent

SEQ ID NO: 11726 - protein, 37 aa, Artificial Sequence; identical to SEQ ID NO: 4303
  GFR-binding peptide
  MOD_RES (2)..(34)..(35): Xaa is C or S

SEQ ID NO: 11727 - protein, 38 aa, Artificial Sequence; identical to SEQ ID NO: 4304
  GFR-binding peptide
  MOD_RES (1)..(35)..(36): Xaa is C or S
  MOD_RES (13)..(14)..(15)..(16)..(17): Xaa is A or G
  MOD_RES (18)..(19)..(20)..(21): Xaa is A or G or is absent

SEQ ID NO: 11728 - protein, 39 aa, Artificial Sequence
  GFR-binding peptide
  MOD_RES (2)..(34)..(35): Xaa is C or S
GXSRVVMNNSLQEIVNSSDDYYLVTLPELKTPAXXPKPV

SEQ ID NO: 11729 - protein, 33 aa, Artificial Sequence
  GFR-binding peptide
  MOD_RES (12)..(13)..(14)..(15)..(16): Xaa is A or G
  MOD_RES (17)..(18)..(19)..(20): Xaa is A or G or is absent
SEVVMDNSLQEXXXXXXXXXYYLITLPELRTPV

SEQ ID NO: 11730 - protein, 40 aa, Artificial Sequence; identical to SEQ ID NO: 4305
  GFR-binding peptide
  MOD_RES (2)..(4)..(36)..(37): Xaa is C or S

SEQ ID NO: 11731 - protein, 36 aa, Artificial Sequence; identical to SEQ ID NO: 4306
  GFR-binding peptide
  MOD_RES (2)..(4)..(35)..(36): Xaa is C or S

SEQ ID NO: 11732 - protein, 36 aa, Artificial Sequence
  GFR-binding peptide
  MOD_RES (1)..(3)..(35)..(36): Xaa is C or S
XGXARVVMNNSLQEIVNSSDDYYVVPLPELQTPAXX

SEQ ID NO: 11733 - protein, 37 aa, Artificial Sequence
  GFR-binding peptide
  MOD_RES (1)..(3)..(37): Xaa is C or S
  MOD_RES (15)..(16)..(17)..(18)..(19): Xaa is A or G
  MOD_RES (20)..(21)..(22)..(23): Xaa is A or G or is absent
XGXGEVVMDEYQKYXXXXXXXXXIFLMSIPSLETPVX

SEQ ID NO: 11734 - protein, 32 aa, Artificial Sequence; identical to SEQ ID NO: 4308
  GFR-binding peptide
  MOD_RES (31)..(32): Xaa is C or S

SEQ ID NO: 11735 - protein, 33 aa, Artificial Sequence; identical to SEQ ID NO: 4310
  GFR-binding peptide
  MOD_RES (33)..(33): Xaa is C or S
  MOD_RES (11)..(12)..(13)..(14)..(15): Xaa is A or G
  MOD_RES (16)..(17)..(18)..(19): Xaa is A or G or is absent

SEQ ID NO: 11736 - protein, 37 aa, Artificial Sequence
  GFR-binding peptide
  MOD_RES (33)..(34): Xaa is C or S
  MOD_RES (11)..(12)..(13)..(14)..(15): Xaa is A or G
  MOD_RES (16)..(17)..(18)..(19): Xaa is A or G or is absent
EVVMDNSLQEXXXXXXXXXYYLMTLPELETPVXXAKP

SEQ ID NO: 11737 - protein, 41 aa, Artificial Sequence
  GFR-binding peptide
  MOD_RES (2)..(4)..(38)..(39): Xaa is C or S
  MOD_RES (16)..(17)..(18)..(19)..(20): Xaa is A or G
  MOD_RES (21)..(22)..(23)..(24): Xaa is A or G or is absent
RXGXGEVVMENSLQEXXXXXXXXXYYVMPLPELETPVXXAK

SEQ ID NO: 11738 - protein, 32 aa, Artificial Sequence; identical to SEQ ID NO: 4313
  GFR-binding peptide
  MOD_RES (1)..(1): Xaa is C or S

SEQ ID NO: 11739 - protein, 41 aa, Artificial Sequence; identical to SEQ ID NO: 4314
  GFR-binding peptide
  MOD_RES (1)..(3)..(35)..(36): Xaa is C or S

SEQ ID NO: 11740 - protein, 37 aa, Artificial Sequence
  GFR-binding peptide
  MOD_RES (1)..(34)..(35): Xaa is C or S
  MOD_RES (12)..(13)..(14)..(15)..(16): Xaa is A or G
  MOD_RES (17)..(18)..(19)..(20): Xaa is A or G or is absent
XSKVVMEYQKYXXXXXXXXXIFLISIPSLDQPVXXPS

SEQ ID NO: 11741 - protein, 36 aa, Artificial Sequence
  GFR-binding peptide
  MOD_RES (2)..(33)..(34): Xaa is C or S
KXSKVVMEYQKYVKPTRGVIFLISIPSLDQPVXXPS

SEQ ID NO: 11742 - protein, 44 aa, Artificial Sequence
  GFR-binding peptide
  MOD_RES (2)..(4)..(38)..(39): Xaa is C or S
  MOD_RES (16)..(17)..(18)..(19)..(20): Xaa is A or G
  MOD_RES (21)..(22)..(23)..(24): Xaa is A or G or is absent
RXGXGEVVMDEYQKYXXXXXXXXXIFLMSIPSLETPVXXAKPIK

SEQ ID NO: 11743 - protein, 38 aa, Artificial Sequence; identical to SEQ ID NO: 4322
  GFR-binding peptide
  MOD_RES (33)..(34): Xaa is C or S
  MOD_RES (11)..(12)..(13)..(14)..(15): Xaa is A or G
  MOD_RES (16)..(17)..(18)..(19): Xaa is A or G or is absent

SEQ ID NO: 11744 - protein, 33 aa, Artificial Sequence
  GFR-binding peptide
  MOD_RES (2)..(2): Xaa is C or S
GXARVVMNNSLQEIVNSSDDYYLVTLPELQTPA

SEQ ID NO: 11745 - protein, 38 aa, Artificial Sequence
  GFR-binding peptide
  MOD_RES (2)..(4)..(38): Xaa is C or S
  MOD_RES (16)..(17)..(18)..(19)..(20): Xaa is A or G
  MOD_RES (21)..(22)..(23)..(24): Xaa is A or G or is absent
RXGXSEVVMDNSLQEXXXXXXXXXYYLITLPELRTPVX

SEQ ID NO: 11746 - protein, 38 aa, Artificial Sequence
  GFR-binding peptide
  MOD_RES (1)..(35)..(36): Xaa is C or S
  MOD_RES (13)..(14)..(15)..(16)..(17): Xaa is A or G
  MOD_RES (18)..(19)..(20)..(21): Xaa is A or G or is absent
XARVVMNEYQKYXXXXXXXXXIFLVSIPSLQTPAXXPK

SEQ ID NO: 11747 - protein, 38 aa, Artificial Sequence; identical to SEQ ID NO: 4329
  GFR-binding peptide
  MOD_RES (1)..(33)..(34): Xaa is C or S

SEQ ID NO: 11748 - protein, 35 aa, Artificial Sequence; identical to SEQ ID NO: 4331
  GFR-binding peptide
  MOD_RES (34)..(35): Xaa is C or S
  MOD_RES (12)..(13)..(14)..(15)..(16): Xaa is A or G
  MOD_RES (17)..(18)..(19)..(20): Xaa is A or G or is absent

SEQ ID NO: 11749 - protein, 36 aa, Artificial Sequence; identical to SEQ ID NO: 4332
  GFR-binding peptide
  MOD_RES (2)..(36): Xaa is C or S
  MOD_RES (14)..(15)..(16)..(17)..(18): Xaa is A or G
  MOD_RES (19)..(20)..(21)..(22): Xaa is A or G or is absent

SEQ ID NO: 11750 - protein, 38 aa, Artificial Sequence
  GFR-binding peptide
  MOD_RES (33)..(34): Xaa is C or S
  MOD_RES (11)..(12)..(13)..(14)..(15): Xaa is A or G
  MOD_RES (16)..(17)..(18)..(19): Xaa is A or G or is absent
SRVIMEYQKYXXXXXXXXXIFLISIPSLAQPVXXPAAS

SEQ ID NO: 11751 - protein, 33 aa, Artificial Sequence; identical to SEQ ID NO: 4335
  GFR-binding peptide
  MOD_RES (1)..(1): Xaa is C or S
  MOD_RES (12)..(13)..(14)..(15)..(16): Xaa is A or G
  MOD_RES (17)..(18)..(19)..(20): Xaa is A or G or is absent

SEQ ID NO: 11752 - protein, 37 aa, Artificial Sequence
  GFR-binding peptide
  MOD_RES (2)..(34)..(35): Xaa is C or S
GXARVVMNEYQKYIVNSSDDIFLVSIPSLQTPAXXPK

SEQ ID NO: 11753 - protein, 35 aa, Artificial Sequence; identical to SEQ ID NO: 4337
  GFR-binding peptide
  MOD_RES (2)..(2): Xaa is C or S
  MOD_RES (14)..(15)..(16)..(17)..(18): Xaa is A or G
  MOD_RES (19)..(20)..(21)..(22): Xaa is A or G or is absent

SEQ ID NO: 11754 - protein, 34 aa, Artificial Sequence; identical to SEQ ID NO: 4338
  GFR-binding peptide
  MOD_RES (1)..(34): Xaa is C or S
  MOD_RES (12)..(13)..(14)..(15)..(16): Xaa is A or G
  MOD_RES (17)..(18)..(19)..(20): Xaa is A or G or is absent

SEQ ID NO: 11755 - protein, 40 aa, Artificial Sequence
  GFR-binding peptide
  MOD_RES (2)..(35)..(36): Xaa is C or S
  MOD_RES (13)..(14)..(15)..(16)..(17): Xaa is A or G
  MOD_RES (18)..(19)..(20)..(21): Xaa is A or G or is absent
KXSRVIMEYQKYXXXXXXXXXIFLISIPSLAQPVXXPAAS

SEQ ID NO: 11756 - protein, 37 aa, Artificial Sequence
  GFR-binding peptide
  MOD_RES (1)..(35)..(36): Xaa is C or S
  MOD_RES (13)..(14)..(15)..(16)..(17): Xaa is A or G
  MOD_RES (18)..(19)..(20)..(21): Xaa is A or G or is absent
XGEVVMENSLQEXXXXXXXXXYYVMPLPELETPVXXA

SEQ ID NO: 11757 - protein, 42 aa, Artificial Sequence
  GFR-binding peptide
  MOD_RES (1)..(3)..(36)..(37): Xaa is C or S
  MOD_RES (14)..(15)..(16)..(17)..(18): Xaa is A or G
  MOD_RES (19)..(20)..(21)..(22): Xaa is A or G or is absent
XKXSRVIMNSLQEXXXXXXXXXYYLITLPELAQPVXXPAASA

SEQ ID NO: 11758 - protein, 43 aa, Artificial Sequence
  GFR-binding peptide
  MOD_RES (2)..(4)..(37)..(38): Xaa is C or S
  MOD_RES (15)..(16)..(17)..(18)..(19): Xaa is A or G
  MOD_RES (20)..(21)..(22)..(23): Xaa is A or G or is absent
SXKXSRVIMNSLQEXXXXXXXXXYYLITLPELAQPVXXPAASA

SEQ ID NO: 11759 - protein, 32 aa, Artificial Sequence; identical to SEQ ID NO: 4346
  GFR-binding peptide
  MOD_RES (11)..(12)..(13)..(14)..(15): Xaa is A or G
  MOD_RES (16)..(17)..(18)..(19): Xaa is A or G or is absent

SEQ ID NO: 11760 - protein, 38 aa, Artificial Sequence
  GFR-binding peptide
  MOD_RES (2)..(36)..(37): Xaa is C or S
  MOD_RES (14)..(15)..(16)..(17)..(18): Xaa is A or G
  MOD_RES (19)..(20)..(21)..(22): Xaa is A or G or is absent
GXGEVVMENSLQEXXXXXXXXXYYVMPLPELETPVXXA

SEQ ID NO: 11761 - protein, 32 aa, Artificial Sequence
  GFR-binding peptide
  MOD_RES (31)..(32): Xaa is C or S
RVVMNNSLQEIVNSSDDYYVVPLPELKTPAXX

SEQ ID NO: 11762 - protein, 39 aa, Artificial Sequence; identical to SEQ ID NO: 4349
  GFR-binding peptide
  MOD_RES (1)..(3)..(37)..(38): Xaa is C or S
  MOD_RES (15)..(16)..(17)..(18)..(19): Xaa is A or G
  MOD_RES (20)..(21)..(22)..(23): Xaa is A or G or is absent

SEQ ID NO: 11763 - protein, 33 aa, Artificial Sequence; identical to SEQ ID NO: 4350
  GFR-binding peptide
  MOD_RES (33)..(33): Xaa is C or S
  MOD_RES (11)..(12)..(13)..(14)..(15): Xaa is A or G
  MOD_RES (16)..(17)..(18)..(19): Xaa is A or G or is absent

SEQ ID NO: 11764 - protein, 36 aa, Artificial Sequence
  GFR-binding peptide
  MOD_RES (2)..(34)..(35): Xaa is C or S
GXARVVMNNSLQEIVNSSDDYYLVTLPELQTPAXXP

SEQ ID NO: 11765 - protein, 34 aa, Artificial Sequence; identical to SEQ ID NO: 4351
  GFR-binding peptide
  MOD_RES (1)..(32)..(33): Xaa is C or S

SEQ ID NO: 11766 - protein, 37 aa, Artificial Sequence
  GFR-binding peptide
  MOD_RES (1)..(35)..(36): Xaa is C or S
  MOD_RES (13)..(14)..(15)..(16)..(17): Xaa is A or G
  MOD_RES (18)..(19)..(20)..(21): Xaa is A or G or is absent
XSEVVMDNSLQEXXXXXXXXXYYVIPLPELRTPVXXT

SEQ ID NO: 11767 - protein, 34 aa, Artificial Sequence
  GFR-binding peptide
  MOD_RES (1)..(3): Xaa is C or S
XGXGEVVMDNSLQEVVKENEDYYVMPLPELETPV

SEQ ID NO: 11768 - protein, 39 aa, Artificial Sequence
  GFR-binding peptide
  MOD_RES (1)..(3)..(36)..(37): Xaa is C or S
  MOD_RES (14)..(15)..(16)..(17)..(18): Xaa is A or G
  MOD_RES (19)..(20)..(21)..(22): Xaa is A or G or is absent
XKXSKVVMNSLQEXXXXXXXXXYYVIPLPELDQPVXXPS

SEQ ID NO: 11769 - protein, 37 aa, Artificial Sequence
  GFR-binding peptide
  MOD_RES (31)..(32): Xaa is C or S
EVVMENSLQEVVKDYEDYYVMPLPELETPVXXAKPIS

SEQ ID NO: 11770 - protein, 36 aa, Artificial Sequence
  GFR-binding peptide
  MOD_RES (1)..(3): Xaa is C or S
  MOD_RES (15)..(16)..(17)..(18)..(19): Xaa is A or G
  MOD_RES (20)..(21)..(22)..(23): Xaa is A or G or is absent
XGXARVVMNEYQKYXXXXXXXXXIFLVSIPSLQTPA

SEQ ID NO: 11771 - protein, 36 aa, Artificial Sequence; identical to SEQ ID NO: 4355
  GFR-binding peptide
  MOD_RES (31)..(32): Xaa is C or S

SEQ ID NO: 11772 - protein, 33 aa, Artificial Sequence
  GFR-binding peptide
  MOD_RES (31)..(32): Xaa is C or S
SKVIMNSLQEIKPTKGIYYVIPLPELDQSVXXP

SEQ ID NO: 11773 - protein, 41 aa, Artificial Sequence
  GFR-binding peptide
  MOD_RES (2)..(36)..(37): Xaa is C or S
  MOD_RES (14)..(15)..(16)..(17)..(18): Xaa is A or G
  MOD_RES (19)..(20)..(21)..(22): Xaa is A or G or is absent
GXGEVVMEEYQKYXXXXXXXXXIFLMSIPSLETPVXXAKPI

SEQ ID NO: 11774 - protein, 37 aa, Artificial Sequence; identical to SEQ ID NO: 4357
  GFR-binding peptide
  MOD_RES (2)..(4): Xaa is C or S
  MOD_RES (16)..(17)..(18)..(19)..(20): Xaa is A or G
  MOD_RES (21)..(22)..(23)..(24): Xaa is A or G or is absent

SEQ ID NO: 11775 - protein, 36 aa, Artificial Sequence; identical to SEQ ID NO: 4358
  GFR-binding peptide
  MOD_RES (2)..(36): Xaa is C or S
  MOD_RES (14)..(15)..(16)..(17)..(18): Xaa is A or G
  MOD_RES (19)..(20)..(21)..(22): Xaa is A or G or is absent

SEQ ID NO: 11776 - protein, 38 aa, Artificial Sequence
  GFR-binding peptide
  MOD_RES (2)..(4)..(35)..(36): Xaa is C or S
SXKXSKVIMNSLQEIKPTKGIYYVIPLPELDQSVXXPS

SEQ ID NO: 11777 - protein, 42 aa, Artificial Sequence; identical to SEQ ID NO: 4359
  GFR-binding peptide
  MOD_RES (2)..(4)..(38)..(39): Xaa is C or S
  MOD_RES (16)..(17)..(18)..(19)..(20): Xaa is A or G
  MOD_RES (21)..(22)..(23)..(24): Xaa is A or G or is absent

SEQ ID NO: 11778 - protein, 42 aa, Artificial Sequence; identical to SEQ ID NO: 4360
  GFR-binding peptide
  MOD_RES (2)..(36)..(37): Xaa is C or S
  MOD_RES (14)..(15)..(16)..(17)..(18): Xaa is A or G
  MOD_RES (19)..(20)..(21)..(22): Xaa is A or G or is absent

SEQ ID NO: 11779 - protein, 40 aa, Artificial Sequence
  GFR-binding peptide
  MOD_RES (34)..(35): Xaa is C or S
  MOD_RES (12)..(13)..(14)..(15)..(16): Xaa is A or G
  MOD_RES (17)..(18)..(19)..(20): Xaa is A or G or is absent
GEVVMEEYQKYXXXXXXXXXIFLMSIPSLETPVXXAKPIS

SEQ ID NO: 11780 - protein, 34 aa, Artificial Sequence; identical to SEQ ID NO: 4364
  GFR-binding peptide
  MOD_RES (1)..(1): Xaa is C or S
  MOD_RES (13)..(14)..(15)..(16)..(17): Xaa is A or G
  MOD_RES (18)..(19)..(20)..(21): Xaa is A or G or is absent

SEQ ID NO: 11781 - protein, 38 aa, Artificial Sequence
  GFR-binding peptide
  MOD_RES (34)..(35): Xaa is C or S
  MOD_RES (12)..(13)..(14)..(15)..(16): Xaa is A or G
  MOD_RES (17)..(18)..(19)..(20): Xaa is A or G or is absent
ARVVMNEYQKYXXXXXXXXXIFLVSIPSLQTPAXXPKP

SEQ ID NO: 11782 - protein, 32 aa, Artificial Sequence
  GFR-binding peptide
  MOD_RES (11)..(12)..(13)..(14)..(15): Xaa is A or G
  MOD_RES (16)..(17)..(18)..(19): Xaa is A or G or is absent
RVVMNNSLQEXXXXXXXXXYYLVTLPELQTPA

SEQ ID NO: 11783 - protein, 34 aa, Artificial Sequence
  GFR-binding peptide
  MOD_RES (31)..(32): Xaa is C or S
EVVMENSLQEVVKDYEDYYLMTLPELETPVXXAK

SEQ ID NO: 11784 - protein, 39 aa, Artificial Sequence; identical to SEQ ID NO: 4365
  GFR-binding peptide
  MOD_RES (1)..(35)..(36): Xaa is C or S
  MOD_RES (13)..(14)..(15)..(16)..(17): Xaa is A or G
  MOD_RES (18)..(19)..(20)..(21): Xaa is A or G or is absent

SEQ ID NO: 11785 - protein, 36 aa, Artificial Sequence
  GFR-binding peptide
  MOD_RES (1)..(3)..(36): Xaa is C or S
  MOD_RES (14)..(15)..(16)..(17)..(18): Xaa is A or G
  MOD_RES (19)..(20)..(21)..(22): Xaa is A or G or is absent
XKXSKVVMNSLQEXXXXXXXXXYYVIPLPELDQPVX

SEQ ID NO: 11786 - protein, 32 aa, Artificial Sequence
  GFR-binding peptide
  MOD_RES (1)..(32): Xaa is C or S
XSKVVMNSLQEVKPTRGVYYLITLPELDQPVX

SEQ ID NO: 11787 - protein, 39 aa, Artificial Sequence
  GFR-binding peptide
  MOD_RES (1)..(35)..(36): Xaa is C or S
  MOD_RES (13)..(14)..(15)..(16)..(17): Xaa is A or G
  MOD_RES (18)..(19)..(20)..(21): Xaa is A or G or is absent
XSRVVMNEYQKYXXXXXXXXXIFLVSIPSLKTPAXXPKP

SEQ ID NO: 11788 - protein, 36 aa, Artificial Sequence
  GFR-binding peptide
  MOD_RES (31)..(32): Xaa is C or S
SKVVMNSLQEVKPTRGVYYVIPLPELDQPVXXPSAS

SEQ ID NO: 11789 - protein, 37 aa, Artificial Sequence
  GFR-binding peptide
  MOD_RES (2)..(34)..(35): Xaa is C or S
GXSEVVMDNSLQEVVNNASDYYLITLPELRTPVXXTP

SEQ ID NO: 11790 - protein, 35 aa, Artificial Sequence; identical to SEQ ID NO: 4369
  GFR-binding peptide
  MOD_RES (33)..(34): Xaa is C or S
  MOD_RES (11)..(12)..(13)..(14)..(15): Xaa is A or G
  MOD_RES (16)..(17)..(18)..(19): Xaa is A or G or is absent

SEQ ID NO: 11791 - protein, 41 aa, Artificial Sequence
  GFR-binding peptide
  MOD_RES (1)..(3)..(37)..(38): Xaa is C or S
  MOD_RES (15)..(16)..(17)..(18)..(19): Xaa is A or G
  MOD_RES (20)..(21)..(22)..(23): Xaa is A or G or is absent
XGXARVVMNNSLQEXXXXXXXXXYYLVTLPELQTPAXXPKP

SEQ ID NO: 11792 - protein, 34 aa, Artificial Sequence
  GFR-binding peptide
  MOD_RES (1)..(3): Xaa is C or S
XGXGEVVMDEYQKYVVKENEDIFLMSIPSLETPV

SEQ ID NO: 11793 - protein, 37 aa, Artificial Sequence
  GFR-binding peptide
  MOD_RES (31)..(32): Xaa is C or S
SRVIMNSLQEVKPKRGVYYVIPLPELAQPVXXPAASA

SEQ ID NO: 11794 - protein, 40 aa, Artificial Sequence
  GFR-binding peptide
  MOD_RES (2)..(4)..(38)..(39): Xaa is C or S
  MOD_RES (16)..(17)..(18)..(19)..(20): Xaa is A or G
  MOD_RES (21)..(22)..(23)..(24): Xaa is A or G or is absent
RXGXSEVVMDQYNKLXXXXXXXXXLYLISIASLRTPVXXT

SEQ ID NO: 11795 - protein, 37 aa, Artificial Sequence
  GFR-binding peptide
  MOD_RES (1)..(3)..(36)..(37): Xaa is C or S
  MOD_RES (14)..(15)..(16)..(17)..(18): Xaa is A or G
  MOD_RES (19)..(20)..(21)..(22): Xaa is A or G or is absent
XKXSRVIMNSLQEXXXXXXXXXYYLITLPELAQPVXX

SEQ ID NO: 11796 - protein, 40 aa, Artificial Sequence
  GFR-binding peptide
  MOD_RES (2)..(4)..(38)..(39): Xaa is C or S
  MOD_RES (16)..(17)..(18)..(19)..(20): Xaa is A or G
  MOD_RES (21)..(22)..(23)..(24): Xaa is A or G or is absent
HXGXARVVMNNSLQEXXXXXXXXXYYVVPLPELQTPAXXP

SEQ ID NO: 11797 - protein, 35 aa, Artificial Sequence
  GFR-binding peptide
  MOD_RES (31)..(31): Xaa is C or S
RVVMNEYQKYIVNSSDDIFLVSIPSLKTPAXTPKT

SEQ ID NO: 11798 - protein, 39 aa, Artificial Sequence; identical to SEQ ID NO: 4370
  GFR-binding peptide
  MOD_RES (2)..(36): Xaa is C or S
  MOD_RES (14)..(15)..(16)..(17)..(18): Xaa is A or G
  MOD_RES (19)..(20)..(21)..(22): Xaa is A or G or is absent

SEQ ID NO: 11799 - protein, 39 aa, Artificial Sequence; identical to SEQ ID NO: 4371
  GFR-binding peptide
  MOD_RES (34)..(35): Xaa is C or S
  MOD_RES (12)..(13)..(14)..(15)..(16): Xaa is A or G
  MOD_RES (17)..(18)..(19)..(20): Xaa is A or G or is absent

SEQ ID NO: 11800 - protein, 35 aa, Artificial Sequence
  GFR-binding peptide
  MOD_RES (2)..(4): Xaa is C or S
RXGXSEVVMDRYKKLVVNNASDFYLISIANLRTPV

SEQ ID NO: 11801 - protein, 36 aa, Artificial Sequence; identical to SEQ ID NO: 4373
  GFR-binding peptide
  MOD_RES (2)..(34): Xaa is C or S

SEQ ID NO: 11802 - protein, 44 aa, Artificial Sequence
  GFR-binding peptide
  MOD_RES (2)..(4)..(38)..(39): Xaa is C or S
  MOD_RES (16)..(17)..(18)..(19)..(20): Xaa is A or G
  MOD_RES (21)..(22)..(23)..(24): Xaa is A or G or is absent
RXGXGEVVMEEYQKYXXXXXXXXXIFLMSIPSLETPVXXAKPIS

SEQ ID NO: 11803 - protein, 34 aa, Artificial Sequence
  GFR-binding peptide
  MOD_RES (32)..(33): Xaa is C or S
SEVVMDEYQKYVVNNASDIFLISIPSLRTPVXXT

SEQ ID NO: 11804 - protein, 40 aa, Artificial Sequence; identical to SEQ ID NO: 4376
  GFR-binding peptide
  MOD_RES (2)..(34)..(35): Xaa is C or S

SEQ ID NO: 11805 - protein, 38 aa, Artificial Sequence
  GFR-binding peptide
  MOD_RES (34)..(35): Xaa is C or S
  MOD_RES (12)..(13)..(14)..(15)..(16): Xaa is A or G
  MOD_RES (17)..(18)..(19)..(20): Xaa is A or G or is absent
SEVVMDRYKKLXXXXXXXXXFYLISIANLRTPVXXTPP

SEQ ID NO: 11806 - protein, 43 aa, Artificial Sequence
  GFR-binding peptide
  MOD_RES (2)..(4)..(38)..(39): Xaa is C or S
  MOD_RES (16)..(17)..(18)..(19)..(20): Xaa is A or G
  MOD_RES (21)..(22)..(23)..(24): Xaa is A or G or is absent
HXGXARVVMNNSLQEXXXXXXXXXYYVVPLPELQTPAXXPKPV

SEQ ID NO: 11807 - protein, 37 aa, Artificial Sequence; identical to SEQ ID NO: 4380
  GFR-binding peptide
  MOD_RES (2)..(34)..(35): Xaa is C or S

SEQ ID NO: 11808 - protein, 37 aa, Artificial Sequence
  GFR-binding peptide
  MOD_RES (34)..(35): Xaa is C or S
  MOD_RES (12)..(13)..(14)..(15)..(16): Xaa is A or G
  MOD_RES (17)..(18)..(19)..(20): Xaa is A or G or is absent
GEVVMDEYQKYXXXXXXXXXIFLMSIPSLETPVXXAK

SEQ ID NO: 11809 - protein, 35 aa, Artificial Sequence; identical to SEQ ID NO: 4381
  GFR-binding peptide
  MOD_RES (1)..(3): Xaa is C or S
  MOD_RES (14)..(15)..(16)..(17)..(18): Xaa is A or G
  MOD_RES (19)..(20)..(21)..(22): Xaa is A or G or is absent

SEQ ID NO: 11810 - protein, 36 aa, Artificial Sequence
  GFR-binding peptide
  MOD_RES (1)..(35)..(36): Xaa is C or S
  MOD_RES (13)..(14)..(15)..(16)..(17): Xaa is A or G
  MOD_RES (18)..(19)..(20)..(21): Xaa is A or G or is absent
XARVVMNNSLQEXXXXXXXXXYYVVPLPELQTPAXX

SEQ ID NO: 11811 - protein, 36 aa, Artificial Sequence
  GFR-binding peptide
  MOD_RES (2)..(4)..(36): Xaa is C or S
RXGXSEVVMDEYQKYVVNNASDIFLISIPSLRTPVX

SEQ ID NO: 11812 - protein, 36 aa, Artificial Sequence; identical to SEQ ID NO: 4386
  GFR-binding peptide
  MOD_RES (2)..(4): Xaa is C or S
  MOD_RES (15)..(16)..(17)..(18)..(19): Xaa is A or G
  MOD_RES (20)..(21)..(22)..(23): Xaa is A or G or is absent

SEQ ID NO: 11813 - protein, 42 aa, Artificial Sequence; identical to SEQ ID NO: 4387
  GFR-binding peptide
  MOD_RES (2)..(4)..(38): Xaa is C or S
  MOD_RES (16)..(17)..(18)..(19)..(20): Xaa is A or G
  MOD_RES (21)..(22)..(23)..(24): Xaa is A or G or is absent

SEQ ID NO: 11814 - protein, 34 aa, Artificial Sequence
  GFR-binding peptide
  MOD_RES (1)..(34): Xaa is C or S
  MOD_RES (12)..(13)..(14)..(15)..(16): Xaa is A or G
  MOD_RES (17)..(18)..(19)..(20): Xaa is A or G or is absent
XSRVIMEYQKYXXXXXXXXXIFLISIPSLAQPVX

SEQ ID NO: 11815 - protein, 44 aa, Artificial Sequence
  GFR-binding peptide
  MOD_RES (2)..(4)..(38): Xaa is C or S
  MOD_RES (16)..(17)..(18)..(19)..(20): Xaa is A or G
  MOD_RES (21)..(22)..(23)..(24): Xaa is A or G or is absent
HXGXSRVVMNNSLQEXXXXXXXXXYYVVPLPELKTPAXTPKTVH

SEQ ID NO: 11816 - protein, 39 aa, Artificial Sequence
  GFR-binding peptide
  MOD_RES (2)..(33)..(34): Xaa is C or S
KXSKVIMNSLQEIKPTKGIYYVIPLPELDQSVXXPSASA

SEQ ID NO: 11817 - protein, 42 aa, Artificial Sequence; identical to SEQ ID NO: 4388
  GFR-binding peptide
  MOD_RES (2)..(4)..(38)..(39): Xaa is C or S
  MOD_RES (16)..(17)..(18)..(19)..(20): Xaa is A or G
  MOD_RES (21)..(22)..(23)..(24): Xaa is A or G or is absent

SEQ ID NO: 11818 - protein, 37 aa, Artificial Sequence
  GFR-binding peptide
  MOD_RES (2)..(33)..(34): Xaa is C or S
KXSRVIMEYQKYVKPKRGVIFLISIPSLAQPVXXPAA

SEQ ID NO: 11819 - protein, 36 aa, Artificial Sequence
  GFR-binding peptide
  MOD_RES (34)..(35): Xaa is C or S
  MOD_RES (12)..(13)..(14)..(15)..(16): Xaa is A or G
  MOD_RES (17)..(18)..(19)..(20): Xaa is A or G or is absent
SEVVMDRYKKLXXXXXXXXXFYLISIANLRTPVXXT

SEQ ID NO: 11820 - protein, 33 aa, Artificial Sequence; identical to SEQ ID NO: 4390
  GFR-binding peptide
  MOD_RES (1)..(3): Xaa is C or S

SEQ ID NO: 11821 - protein, 37 aa, Artificial Sequence
  GFR-binding peptide
  MOD_RES (33)..(34): Xaa is C or S
  MOD_RES (11)..(12)..(13)..(14)..(15): Xaa is A or G
  MOD_RES (16)..(17)..(18)..(19): Xaa is A or G or is absent
EVVMDQYNKLXXXXXXXXXLYLISIASLRTPVXXTPP

SEQ ID NO: 11822 - protein, 38 aa, Artificial Sequence; identical to SEQ ID NO: 4394
  GFR-binding peptide
  MOD_RES (33)..(34): Xaa is C or S
  MOD_RES (11)..(12)..(13)..(14)..(15): Xaa is A or G
  MOD_RES (16)..(17)..(18)..(19): Xaa is A or G or is absent

SEQ ID NO: 11823 - protein, 40 aa, Artificial Sequence
  GFR-binding peptide
  MOD_RES (2)..(36)..(37): Xaa is C or S
  MOD_RES (14)..(15)..(16)..(17)..(18): Xaa is A or G
  MOD_RES (19)..(20)..(21)..(22): Xaa is A or G or is absent
GXGEVVMDNSLQEXXXXXXXXXYYVMPLPELETPVXXAKP

SEQ ID NO: 11824 - protein, 38 aa, Artificial Sequence
  GFR-binding peptide
  MOD_RES (2)..(35)..(36): Xaa is C or S
  MOD_RES (13)..(14)..(15)..(16)..(17): Xaa is A or G
  MOD_RES (18)..(19)..(20)..(21): Xaa is A or G or is absent
KXSKVVMNSLQEXXXXXXXXXYYLITLPELDQPVXXPS

SEQ ID NO: 11825 - protein, 39 aa, Artificial Sequence; identical to SEQ ID NO: 4397
  GFR-binding peptide
  MOD_RES (33)..(34): Xaa is C or S
  MOD_RES (11)..(12)..(13)..(14)..(15): Xaa is A or G
  MOD_RES (16)..(17)..(18)..(19): Xaa is A or G or is absent

SEQ ID NO: 11826 - protein, 35 aa, Artificial Sequence
  GFR-binding peptide
  MOD_RES (34)..(35): Xaa is C or S
  MOD_RES (12)..(13)..(14)..(15)..(16): Xaa is A or G
  MOD_RES (17)..(18)..(19)..(20): Xaa is A or G or is absent
SRVVMNEYQKYXXXXXXXXXIFLVSIPSLKTPAXX

SEQ ID NO: 11827 - protein, 35 aa, Artificial Sequence
  GFR-binding peptide
  MOD_RES (32)..(33): Xaa is C or S
SRVVMNNSLQEIVNSSDDYYLVTLPELKTPAXXPK

SEQ ID NO: 11828 - protein, 36 aa, Artificial Sequence
  GFR-binding peptide
  MOD_RES (31)..(32): Xaa is C or S
SRVIMNSLQEVKPKRGVYYLITLPELAQPVXXPAAS

SEQ ID NO: 11829 - protein, 35 aa, Artificial Sequence; identical to SEQ ID NO: 4403
  GFR-binding peptide
  MOD_RES (2)..(34)..(35): Xaa is C or S

SEQ ID NO: 11830 - protein, 38 aa, Artificial Sequence
  GFR-binding peptide
  MOD_RES (32)..(33): Xaa is C or S
SEVVMDNSLQEVVNNASDYYLITLPELRTPVXXTPPTS

SEQ ID NO: 11831 - protein, 40 aa, Artificial Sequence; identical to SEQ ID NO: 4406
  GFR-binding peptide
  MOD_RES (2)..(4)..(36)..(37): Xaa is C or S

SEQ ID NO: 11832 - protein, 34 aa, Artificial Sequence; identical to SEQ ID NO: 4409
  GFR-binding peptide
  MOD_RES (2)..(34): Xaa is C or S

SEQ ID NO: 11833 - protein, 41 aa, Artificial Sequence
  GFR-binding peptide
  MOD_RES (2)..(36)..(37): Xaa is C or S
  MOD_RES (14)..(15)..(16)..(17)..(18): Xaa is A or G
  MOD_RES (19)..(20)..(21)..(22): Xaa is A or G or is absent
GXGEVVMENSLQEXXXXXXXXXYYLMTLPELETPVXXAKPI

SEQ ID NO: 11834 - protein, 32 aa, Artificial Sequence
  GFR-binding peptide
  MOD_RES (1)..(1): Xaa is C or S
XGEVVMDNSLQEVVKENEDYYVMPLPELETPV

SEQ ID NO: 11835 - protein, 35 aa, Artificial Sequence; identical to SEQ ID NO: 4412
  GFR-binding peptide
  MOD_RES (2)..(33)..(34): Xaa is C or S

SEQ ID NO: 11836 - protein, 35 aa, Artificial Sequence; identical to SEQ ID NO: 4414
  GFR-binding peptide
  MOD_RES (1)..(3)..(34)..(35): Xaa is C or S

SEQ ID NO: 11837 - protein, 32 aa, Artificial Sequence
  GFR-binding peptide
  MOD_RES (32)..(32): Xaa is C or S
ARVVMNNSLQEIVNSSDDYYVVPLPELQTPAX

SEQ ID NO: 11838 - protein, 38 aa, Artificial Sequence
  GFR-binding peptide
  MOD_RES (33)..(34): Xaa is C or S
  MOD_RES (11)..(12)..(13)..(14)..(15): Xaa is A or G
  MOD_RES (16)..(17)..(18)..(19): Xaa is A or G or is absent
RVVMNEYQKYXXXXXXXXXIFLVSIPSLKTPAXXPKPV

SEQ ID NO: 11839 - protein, 39 aa, Artificial Sequence
  GFR-binding peptide
  MOD_RES (2)..(4)..(36)..(37): Xaa is C or S
HXGXSRVVMNNSLQEIVNSSDDYYVVPLPELKTPAXXPK

SEQ ID NO: 11840 - protein, 33 aa, Artificial Sequence; identical to SEQ ID NO: 4417
  GFR-binding peptide
  MOD_RES (31)..(32): Xaa is C or S

SEQ ID NO: 11841 - protein, 36 aa, Artificial Sequence; identical to SEQ ID NO: 4418
  GFR-binding peptide
  MOD_RES (2)..(35)..(36): Xaa is C or S
  MOD_RES (13)..(14)..(15)..(16)..(17): Xaa is A or G
  MOD_RES (18)..(19)..(20)..(21): Xaa is A or G or is absent

SEQ ID NO: 11842 - protein, 33 aa, Artificial Sequence; identical to SEQ ID NO: 4419
  GFR-binding peptide
  MOD_RES (31)..(32): Xaa is C or S

SEQ ID NO: 11843 - protein, 38 aa, Artificial Sequence
  GFR-binding peptide
  MOD_RES (2)..(4)..(36)..(37): Xaa is C or S
HXGXSRVVMNEYQKYIVNSSDDIFLVSIPSLKTPAXXP

SEQ ID NO: 11844 - protein, 40 aa, Artificial Sequence; identical to SEQ ID NO: 4422
  GFR-binding peptide
  MOD_RES (2)..(36): Xaa is C or S
  MOD_RES (14)..(15)..(16)..(17)..(18): Xaa is A or G
  MOD_RES (19)..(20)..(21)..(22): Xaa is A or G or is absent

SEQ ID NO: 11845 - protein, 40 aa, Artificial Sequence
  GFR-binding peptide
  MOD_RES (2)..(4)..(36)..(37): Xaa is C or S
RXGXSEVVMDQYNKLVVNNASDLYLISIASLRTPVXXTPP

SEQ ID NO: 11846 - protein, 42 aa, Artificial Sequence
  GFR-binding peptide
  MOD_RES (2)..(36)..(37): Xaa is C or S
  MOD_RES (14)..(15)..(16)..(17)..(18): Xaa is A or G
  MOD_RES (19)..(20)..(21)..(22): Xaa is A or G or is absent
GXSRVVMNEYQKYXXXXXXXXXIFLVSIPSLKTPAXXPKPVY

SEQ ID NO: 11847 - protein, 43 aa, Artificial Sequence
  GFR-binding peptide
  MOD_RES (1)..(3)..(37)..(38): Xaa is C or S
  MOD_RES (15)..(16)..(17)..(18)..(19): Xaa is A or G
  MOD_RES (20)..(21)..(22)..(23): Xaa is A or G or is absent
XGXGEVVMENSLQEXXXXXXXXXYYVMPLPELETPVXXAKPIS

SEQ ID NO: 11848 - protein, 34 aa, Artificial Sequence
  GFR-binding peptide
  MOD_RES (1)..(3): Xaa is C or S
XGXGEVVMENSLQEVVKDYEDYYLMTLPELETPV

SEQ ID NO: 11849 - protein, 34 aa, Artificial Sequence
  GFR-binding peptide
  MOD_RES (1)..(32)..(33): Xaa is C or S
XSRVIMEYQKYVKPKRGVIFLISIPSLAQPVXXP

SEQ ID NO: 11850 - protein, 33 aa, Artificial Sequence; identical to SEQ ID NO: 4426
  GFR-binding peptide
  MOD_RES (31)..(32): Xaa is C or S

SEQ ID NO: 11851 - protein, 41 aa, Artificial Sequence; identical to SEQ ID NO: 4427
  GFR-binding peptide
  MOD_RES (2)..(36)..(37): Xaa is C or S
  MOD_RES (14)..(15)..(16)..(17)..(18): Xaa is A or G
  MOD_RES (19)..(20)..(21)..(22): Xaa is A or G or is absent

SEQ ID NO: 11852 - protein, 36 aa, Artificial Sequence
  GFR-binding peptide
  MOD_RES (1)..(3)..(34)..(35): Xaa is C or S
XKXSKVVMNSLQEVKPTRGVYYVIPLPELDQPVXXP

SEQ ID NO: 11853 - protein, 38 aa, Artificial Sequence; identical to SEQ ID NO: 4428
  GFR-binding peptide
  MOD_RES (2)..(33)..(34): Xaa is C or S

SEQ ID NO: 11854 - protein, 36 aa, Artificial Sequence; identical to SEQ ID NO: 4429
  GFR-binding peptide
  MOD_RES (1)..(34)..(35): Xaa is C or S
  MOD_RES (12)..(13)..(14)..(15)..(16): Xaa is A or G
  MOD_RES (17)..(18)..(19)..(20): Xaa is A or G or is absent

SEQ ID NO: 11855 - protein, 42 aa, Artificial Sequence
  GFR-binding peptide
  MOD_RES (2)..(4)..(36)..(37): Xaa is C or S
HXGXARVVMNNSLQEIVNSSDDYYLVTLPELQTPAXXPKPVT

SEQ ID NO: 11856 - protein, 33 aa, Artificial Sequence
  GFR-binding peptide
  MOD_RES (33)..(33): Xaa is C or S
  MOD_RES (11)..(12)..(13)..(14)..(15): Xaa is A or G
  MOD_RES (16)..(17)..(18)..(19): Xaa is A or G or is absent
EVVMDEYQKYXXXXXXXXXIFLMSIPSLETPVX

SEQ ID NO: 11857 - protein, 36 aa, Artificial Sequence
  GFR-binding peptide
  MOD_RES (1)..(35)..(36): Xaa is C or S
  MOD_RES (13)..(14)..(15)..(16)..(17): Xaa is A or G
  MOD_RES (18)..(19)..(20)..(21): Xaa is A or G or is absent
XGEVVMEEYQKYXXXXXXXXXIFLMSIPSLETPVXX

SEQ ID NO: 11858 - protein, 36 aa, Artificial Sequence; identical to SEQ ID NO: 4430
  GFR-binding peptide
  MOD_RES (33)..(34): Xaa is C or S
  MOD_RES (11)..(12)..(13)..(14)..(15): Xaa is A or G
  MOD_RES (16)..(17)..(18)..(19): Xaa is A or G or is absent

SEQ ID NO: 11859 - protein, 34 aa, Artificial Sequence; identical to SEQ ID NO: 4432
  GFR-binding peptide
  MOD_RES (2)..(2): Xaa is C or S
  MOD_RES (13)..(14)..(15)..(16)..(17): Xaa is A or G
  MOD_RES (18)..(19)..(20)..(21): Xaa is A or G or is absent

SEQ ID NO: 11860 - protein, 37 aa, Artificial Sequence
  GFR-binding peptide
  MOD_RES (31)..(31): Xaa is C or S
RVVMNEYQKYIVNSSDDIFLVSIPSLKTPAXTPKTVH

SEQ ID NO: 11861 - protein, 38 aa, Artificial Sequence
  GFR-binding peptide
  MOD_RES (2)..(4)..(36)..(37): Xaa is C or S
RXGXGEVVMDNSLQEVVKENEDYYVMPLPELETPVXXA

SEQ ID NO: 11862 - protein, 38 aa, Artificial Sequence
  GFR-binding peptide
  MOD_RES (32)..(33): Xaa is C or S
GEVVMDEYQKYVVKENEDIFLMSIPSLETPVXXAKPIK

SEQ ID NO: 11863 - protein, 33 aa, Artificial Sequence; identical to SEQ ID NO: 4435
  GFR-binding peptide
  MOD_RES (1)..(32)..(33): Xaa is C or S

SEQ ID NO: 11864 - protein, 31 aa, Artificial Sequence
  GFR-binding peptide
ARVVMNEYQKYIVNSSDDIFLVSIPSLQTPA

SEQ ID NO: 11865 - protein, 35 aa, Artificial Sequence
  GFR-binding peptide
  MOD_RES (33)..(34): Xaa is C or S
  MOD_RES (11)..(12)..(13)..(14)..(15): Xaa is A or G
  MOD_RES (16)..(17)..(18)..(19): Xaa is A or G or is absent
EVVMENSLQEXXXXXXXXXYYVMPLPELETPVXXA

SEQ ID NO: 11866 - protein, 36 aa, Artificial Sequence
  GFR-binding peptide
  MOD_RES (1)..(33)..(34): Xaa is C or S
XGEVVMDEYQKYVVKENEDIFLMSIPSLETPVXXAK

SEQ ID NO: 11867 - protein, 40 aa, Artificial Sequence
  GFR-binding peptide
  MOD_RES (2)..(4)..(38)..(39): Xaa is C or S
  MOD_RES (16)..(17)..(18)..(19)..(20): Xaa is A or G
  MOD_RES (21)..(22)..(23)..(24): Xaa is A or G or is absent
RXGXSEVVMDNSLQEXXXXXXXXXYYLITLPELRTPVXXT

SEQ ID NO: 11868 - protein, 35 aa, Artificial Sequence
  GFR-binding peptide
  MOD_RES (33)..(34): Xaa is C or S
  MOD_RES (11)..(12)..(13)..(14)..(15): Xaa is A or G
  MOD_RES (16)..(17)..(18)..(19): Xaa is A or G or is absent
SRVIMNSLQEXXXXXXXXXYYVIPLPELAQPVXXP

SEQ ID NO: 11869 - protein, 34 aa, Artificial Sequence
  GFR-binding peptide
  MOD_RES (34)..(34): Xaa is C or S
  MOD_RES (12)..(13)..(14)..(15)..(16): Xaa is A or G
  MOD_RES (17)..(18)..(19)..(20): Xaa is A or G or is absent
GEVVMEEYQKYXXXXXXXXXIFLMSIPSLETPVX

SEQ ID NO: 11870 - protein, 35 aa, Artificial Sequence
  GFR-binding peptide
  MOD_RES (33)..(34): Xaa is C or S
  MOD_RES (11)..(12)..(13)..(14)..(15): Xaa is A or G
  MOD_RES (16)..(17)..(18)..(19): Xaa is A or G or is absent
SRVIMNSLQEXXXXXXXXXYYLITLPELAQPVXXP

SEQ ID NO: 11871 - protein, 32 aa, Artificial Sequence; identical to SEQ ID NO: 4443
  GFR-binding peptide
  MOD_RES (2)..(2): Xaa is C or S

SEQ ID NO: 11872 - protein, 38 aa, Artificial Sequence; identical to SEQ ID NO: 4446
  GFR-binding peptide
  MOD_RES (34)..(35): Xaa is C or S
  MOD_RES (12)..(13)..(14)..(15)..(16): Xaa is A or G
  MOD_RES (17)..(18)..(19)..(20): Xaa is A or G or is absent

SEQ ID NO: 11873 - protein, 41 aa, Artificial Sequence
  GFR-binding peptide
  MOD_RES (1)..(3)..(36)..(37): Xaa is C or S
  MOD_RES (14)..(15)..(16)..(17)..(18): Xaa is A or G
  MOD_RES (19)..(20)..(21)..(22): Xaa is A or G or is absent
XKXSRVIMNSLQEXXXXXXXXXYYVIPLPELAQPVXXPAAS

SEQ ID NO: 11874 - protein, 38 aa, Artificial Sequence; identical to SEQ ID NO: 4448
  GFR-binding peptide
  MOD_RES (2)..(34)..(35): Xaa is C or S

SEQ ID NO: 11875 - protein, 36 aa, Artificial Sequence
  GFR-binding peptide
  MOD_RES (1)..(3)..(35): Xaa is C or S
XGXSRVVMNNSLQEIVNSSDDYYVVPLPELKTPAXT

SEQ ID NO: 11876 - protein, 39 aa, Artificial Sequence; identical to SEQ ID NO: 4450
  GFR-binding peptide
  MOD_RES (2)..(4)..(35)..(36): Xaa is C or S

SEQ ID NO: 11877 - protein, 33 aa, Artificial Sequence
  GFR-binding peptide
  MOD_RES (1)..(1): Xaa is C or S
  MOD_RES (12)..(13)..(14)..(15)..(16): Xaa is A or G
  MOD_RES (17)..(18)..(19)..(20): Xaa is A or G or is absent
XSKVVMNSLQEXXXXXXXXXYYLITLPELDQPV

SEQ ID NO: 11878 - protein, 36 aa, Artificial Sequence
  GFR-binding peptide
  MOD_RES (34)..(35): Xaa is C or S
  MOD_RES (12)..(13)..(14)..(15)..(16): Xaa is A or G
  MOD_RES (17)..(18)..(19)..(20): Xaa is A or G or is absent
SRVVMNNSLQEXXXXXXXXXYYLVTLPELKTPAXXP

SEQ ID NO: 11879 - protein, 32 aa, Artificial Sequence; identical to SEQ ID NO: 4453
  GFR-binding peptide
  MOD_RES (11)..(12)..(13)..(14)..(15): Xaa is A or G
  MOD_RES (16)..(17)..(18)..(19): Xaa is A or G or is absent

SEQ ID NO: 11880 - protein, 37 aa, Artificial Sequence
  GFR-binding peptide
  MOD_RES (2)..(4)..(36)..(37): Xaa is C or S
RXGXSEVVMDQYNKLVVNNASDLYLISIASLRTPVXX

SEQ ID NO: 11881 - protein, 43 aa, Artificial Sequence; identical to SEQ ID NO: 4454
  GFR-binding peptide
  MOD_RES (2)..(4)..(37)..(38): Xaa is C or S
  MOD_RES (15)..(16)..(17)..(18)..(19): Xaa is A or G
  MOD_RES (20)..(21)..(22)..(23): Xaa is A or G or is absent

SEQ ID NO: 11882 - protein, 31 aa, Artificial Sequence
  GFR-binding peptide
  MOD_RES (31)..(31): Xaa is C or S
SRVIMEYQKYVKPKRGVIFLISIPSLAQPVX

SEQ ID NO: 11883 - protein, 38 aa, Artificial Sequence
  GFR-binding peptide
  MOD_RES (34)..(35): Xaa is C or S
  MOD_RES (12)..(13)..(14)..(15)..(16): Xaa is A or G
  MOD_RES (17)..(18)..(19)..(20): Xaa is A or G or is absent
SEVVMDEYQKYXXXXXXXXXIFLISIPSLRTPVXXTPP

SEQ ID NO: 11884 - protein, 39 aa, Artificial Sequence; identical to SEQ ID NO: 4457
  GFR-binding peptide
  MOD_RES (2)..(34)..(35): Xaa is C or S

SEQ ID NO: 11885 - protein, 41 aa, Artificial Sequence; identical to SEQ ID NO: 4458
  GFR-binding peptide
  MOD_RES (2)..(36)..(37): Xaa is C or S
  MOD_RES (14)..(15)..(16)..(17)..(18): Xaa is A or G
  MOD_RES (19)..(20)..(21)..(22): Xaa is A or G or is absent

SEQ ID NO: 11886 - protein, 36 aa, Artificial Sequence; identical to SEQ ID NO: 4459
  GFR-binding peptide
  MOD_RES (2)..(4): Xaa is C or S
  MOD_RES (15)..(16)..(17)..(18)..(19): Xaa is A or G
  MOD_RES (20)..(21)..(22)..(23): Xaa is A or G or is absent

SEQ ID NO: 11887 - protein, 37 aa, Artificial Sequence
  GFR-binding peptide
  MOD_RES (2)..(4)..(35)..(36): Xaa is C or S
SXKXSRVIMNSLQEVKPKRGVYYLITLPELAQPVXXP

SEQ ID NO: 11888 - protein, 37 aa, Artificial Sequence
  GFR-binding peptide
  MOD_RES (2)..(34)..(35): Xaa is C or S
GXARVVMNNSLQEIVNSSDDYYVVPLPELQTPAXXPK

SEQ ID NO: 11889 - protein, 30 aa, Artificial Sequence
  GFR-binding peptide
EVVMDQYNKLVVNNASDLYLISIASLRTPV

SEQ ID NO: 11890 - protein, 37 aa, Artificial Sequence
  GFR-binding peptide
  MOD_RES (33)..(34): Xaa is C or S
  MOD_RES (11)..(12)..(13)..(14)..(15): Xaa is A or G
  MOD_RES (16)..(17)..(18)..(19): Xaa is A or G or is absent
EVVMDEYQKYXXXXXXXXXIFLISIPSLRTPVXXTPP

SEQ ID NO: 11891 - protein, 36 aa, Artificial Sequence
  GFR-binding peptide
  MOD_RES (1)..(3)..(35)..(36): Xaa is C or S
XGXSEVVMDNSLQEVVNNASDYYLITLPELRTPVXX

SEQ ID NO: 11892 - protein, 36 aa, Artificial Sequence
  GFR-binding peptide
  MOD_RES (34)..(34): Xaa is C or S
  MOD_RES (12)..(13)..(14)..(15)..(16): Xaa is A or G
  MOD_RES (17)..(18)..(19)..(20): Xaa is A or G or is absent
SRVVMNNSLQEXXXXXXXXXYYVVPLPELKTPAXTP

SEQ ID NO: 11893 - protein, 37 aa, Artificial Sequence
  GFR-binding peptide
  MOD_RES (2)..(34)..(35): Xaa is C or S
GXGEVVMENSLQEVVKDYEDYYLMTLPELETPVXXAK

SEQ ID NO: 11894 - protein, 34 aa, Artificial Sequence; identical to SEQ ID NO: 4461
  GFR-binding peptide
  MOD_RES (1)..(3)..(34): Xaa is C or S

SEQ ID NO: 11895 - protein, 38 aa, Artificial Sequence
  GFR-binding peptide
  MOD_RES (1)..(3)..(36)..(37): Xaa is C or S
  MOD_RES (14)..(15)..(16)..(17)..(18): Xaa is A or G
  MOD_RES (19)..(20)..(21)..(22): Xaa is A or G or is absent
XKXSKVVMEYQKYXXXXXXXXXIFLISIPSLDQPVXXP

SEQ ID NO: 11896 - protein, 37 aa, Artificial Sequence
  GFR-binding peptide
  MOD_RES (2)..(4): Xaa is C or S
  MOD_RES (16)..(17)..(18)..(19)..(20): Xaa is A or G
  MOD_RES (21)..(22)..(23)..(24): Xaa is A or G or is absent
HXGXSRVVMNEYQKYXXXXXXXXXIFLVSIPSLKTPA

SEQ ID NO: 11897 - protein, 40 aa, Artificial Sequence; identical to SEQ ID NO: 4463
  GFR-binding peptide
  MOD_RES (2)..(4)..(37)..(38): Xaa is C or S
  MOD_RES (15)..(16)..(17)..(18)..(19): Xaa is A or G
  MOD_RES (20)..(21)..(22)..(23): Xaa is A or G or is absent

SEQ ID NO: 11898 - protein, 38 aa, Artificial Sequence
  GFR-binding peptide
  MOD_RES (1)..(32)..(33): Xaa is C or S
XSKVIMNSLQEIKPTKGIYYVIPLPELDQSVXXPSASA

SEQ ID NO: 11899 - protein, 41 aa, Artificial Sequence
  GFR-binding peptide
  MOD_RES (2)..(4)..(37)..(38): Xaa is C or S
  MOD_RES (15)..(16)..(17)..(18)..(19): Xaa is A or G
  MOD_RES (20)..(21)..(22)..(23): Xaa is A or G or is absent
SXKXSKVVMNSLQEXXXXXXXXXYYVIPLPELDQPVXXPSA

SEQ ID NO: 11900 - protein, 34 aa, Artificial Sequence; identical to SEQ ID NO: 4466
  GFR-binding peptide
  MOD_RES (31)..(32): Xaa is C or S

SEQ ID NO: 11901 - protein, 31 aa, Artificial Sequence
  GFR-binding peptide
  MOD_RES (31)..(31): Xaa is C or S
RVVMNNSLQEIVNSSDDYYVVPLPELQTPAX

SEQ ID NO: 11902 - protein, 44 aa, Artificial Sequence; identical to SEQ ID NO: 4467
  GFR-binding peptide
  MOD_RES (2)..(4)..(38)..(39): Xaa is C or S
  MOD_RES (16)..(17)..(18)..(19)..(20): Xaa is A or G
  MOD_RES (21)..(22)..(23)..(24): Xaa is A or G or is absent

SEQ ID NO: 11903 - protein, 35 aa, Artificial Sequence
  GFR-binding peptide
  MOD_RES (2)..(4)..(35): Xaa is C or S
SXKXSKVVMNSLQEVKPTRGVYYLITLPELDQPVX

SEQ ID NO: 11904 - protein, 38 aa, Artificial Sequence
  GFR-binding peptide
  MOD_RES (32)..(33): Xaa is C or S
SRVVMNNSLQEIVNSSDDYYVVPLPELKTPAXXPKPVY

SEQ ID NO: 11905 - protein, 38 aa, Artificial Sequence; identical to SEQ ID NO: 4470
  GFR-binding peptide
  MOD_RES (2)..(35)..(36): Xaa is C or S
  MOD_RES (13)..(14)..(15)..(16)..(17): Xaa is A or G
  MOD_RES (18)..(19)..(20)..(21): Xaa is A or G or is absent

SEQ ID NO: 11906 - protein, 37 aa, Artificial Sequence; identical to SEQ ID NO: 4472
  GFR-binding peptide
  MOD_RES (2)..(34)..(35): Xaa is C or S

SEQ ID NO: 11907 - protein, 43 aa, Artificial Sequence
  GFR-binding peptide
  MOD_RES (1)..(3)..(37)..(38): Xaa is C or S
  MOD_RES (15)..(16)..(17)..(18)..(19): Xaa is A or G
  MOD_RES (20)..(21)..(22)..(23): Xaa is A or G or is absent
XGXSEVVMDNSLQEXXXXXXXXXYYVIPLPELRTPVXXTPPTS

SEQ ID NO: 11908 - protein, 36 aa, Artificial Sequence
  GFR-binding peptide
  MOD_RES (1)..(33)..(34): Xaa is C or S
XSRVVMNNSLQEIVNSSDDYYVVPLPELKTPAXXPK

SEQ ID NO: 11909 - protein, 41 aa, Artificial Sequence
  GFR-binding peptide
  MOD_RES (2)..(35)..(36): Xaa is C or S
  MOD_RES (13)..(14)..(15)..(16)..(17): Xaa is A or G
  MOD_RES (18)..(19)..(20)..(21): Xaa is A or G or is absent
KXSRVIMEYQKYXXXXXXXXXIFLISIPSLAQPVXXPAASA

SEQ ID NO: 11910 - protein, 37 aa, Artificial Sequence
  GFR-binding peptide
  MOD_RES (33)..(34): Xaa is C or S
  MOD_RES (11)..(12)..(13)..(14)..(15): Xaa is A or G
  MOD_RES (16)..(17)..(18)..(19): Xaa is A or G or is absent
EVVMDNSLQEXXXXXXXXXYYVMPLPELETPVXXAKP

SEQ ID NO: 11911 - protein, 34 aa, Artificial Sequence; identical to SEQ ID NO: 4479
  GFR-binding peptide
  MOD_RES (33)..(34): Xaa is C or S
  MOD_RES (11)..(12)..(13)..(14)..(15): Xaa is A or G
  MOD_RES (16)..(17)..(18)..(19): Xaa is A or G or is absent

SEQ ID NO: 11912 - protein, 39 aa, Artificial Sequence
  GFR-binding peptide
  MOD_RES (34)..(35): Xaa is C or S
  MOD_RES (12)..(13)..(14)..(15)..(16): Xaa is A or G
  MOD_RES (17)..(18)..(19)..(20): Xaa is A or G or is absent
SRVVMNNSLQEXXXXXXXXXYYVVPLPELKTPAXXPKPV

SEQ ID NO: 11913 - protein, 38 aa, Artificial Sequence
  GFR-binding peptide
  MOD_RES (1)..(3)..(35)..(36): Xaa is C or S
XGXSEVVMDRYKKLVVNNASDFYLISIANLRTPVXXTP

SEQ ID NO: 11914 - protein, 35 aa, Artificial Sequence
  GFR-binding peptide
  MOD_RES (2)..(33)..(34): Xaa is C or S
KXSKVIMEYQKYIKPTKGIIFLISIPSLDQSVXXP

SEQ ID NO: 11915 - protein, 39 aa, Artificial Sequence; identical to SEQ ID NO: 4483
  GFR-binding peptide
  MOD_RES (1)..(34)..(35): Xaa is C or S
  MOD_RES (12)..(13)..(14)..(15)..(16): Xaa is A or G
  MOD_RES (17)..(18)..(19)..(20): Xaa is A or G or is absent

SEQ ID NO: 11916 - protein, 36 aa, Artificial Sequence
  GFR-binding peptide
  MOD_RES (2)..(4)..(36): Xaa is C or S
RXGXSEVVMDRYKKLVVNNASDFYLISIANLRTPVX

SEQ ID NO: 11917 - protein, 34 aa, Artificial Sequence; identical to SEQ ID NO: 4486
  GFR-binding peptide
  MOD_RES (2)..(33)..(34): Xaa is C or S

SEQ ID NO: 11918 - protein, 35 aa, Artificial Sequence
  GFR-binding peptide
  MOD_RES (1)..(33)..(34): Xaa is C or S
XSRVVMNNSLQEIVNSSDDYYLVTLPELKTPAXXP

SEQ ID NO: 11919 - protein, 36 aa, Artificial Sequence
  GFR-binding peptide
  MOD_RES (2)..(4): Xaa is C or S
  MOD_RES (15)..(16)..(17)..(18)..(19): Xaa is A or G
  MOD_RES (20)..(21)..(22)..(23): Xaa is A or G or is absent
SXKXSRVIMNSLQEXXXXXXXXXYYLITLPELAQPV

SEQ ID NO: 11920 - protein, 33 aa, Artificial Sequence
  GFR-binding peptide
  MOD_RES (12)..(13)..(14)..(15)..(16): Xaa is A or G
  MOD_RES (17)..(18)..(19)..(20): Xaa is A or G or is absent
GEVVMDEYQKYXXXXXXXXXIFLMSIPSLETPV

SEQ ID NO: 11921 - protein, 39 aa, Artificial Sequence
  GFR-binding peptide
  MOD_RES (2)..(4)..(38): Xaa is C or S
  MOD_RES (16)..(17)..(18)..(19)..(20): Xaa is A or G
  MOD_RES (21)..(22)..(23)..(24): Xaa is A or G or is absent
HXGXSRVVMNEYQKYXXXXXXXXXIFLVSIPSLKTPAXT

SEQ ID NO: 11922 - protein, 41 aa, Artificial Sequence; identical to SEQ ID NO: 4488
  GFR-binding peptide
  MOD_RES (1)..(3)..(35)..(36): Xaa is C or S

SEQ ID NO: 11923 - protein, 33 aa, Artificial Sequence; identical to SEQ ID NO: 4489
  GFR-binding peptide
  MOD_RES (32)..(33): Xaa is C or S

SEQ ID NO: 11924 - protein, 34 aa, Artificial Sequence
  GFR-binding peptide
  MOD_RES (34)..(34): Xaa is C or S
  MOD_RES (12)..(13)..(14)..(15)..(16): Xaa is A or G
  MOD_RES (17)..(18)..(19)..(20): Xaa is A or G or is absent
SRVVMNEYQKYXXXXXXXXXIFLVSIPSLKTPAX

SEQ ID NO: 11925 - protein, 38 aa, Artificial Sequence; identical to SEQ ID NO: 4490
  GFR-binding peptide
  MOD_RES (1)..(32)..(33): Xaa is C or S

SEQ ID NO: 11926 - protein, 33 aa, Artificial Sequence
  GFR-binding peptide
  MOD_RES (32)..(33): Xaa is C or S
SRVVMNNSLQEIVNSSDDYYVVPLPELKTPAXX

SEQ ID NO: 11927 - protein, 35 aa, Artificial Sequence
  GFR-binding peptide
  MOD_RES (1)..(34)..(35): Xaa is C or S
  MOD_RES (12)..(13)..(14)..(15)..(16): Xaa is A or G
  MOD_RES (17)..(18)..(19)..(20): Xaa is A or G or is absent
XSKVVMNSLQEXXXXXXXXXYYVIPLPELDQPVXX

SEQ ID NO: 11928 - protein, 38 aa, Artificial Sequence; identical to SEQ ID NO: 4492
  GFR-binding peptide
  MOD_RES (1)..(3)..(34)..(35): Xaa is C or S

SEQ ID NO: 11929 - protein, 37 aa, Artificial Sequence
  GFR-binding peptide
  MOD_RES (33)..(34): Xaa is C or S
  MOD_RES (11)..(12)..(13)..(14)..(15): Xaa is A or G
  MOD_RES (16)..(17)..(18)..(19): Xaa is A or G or is absent
RVVMNNSLQEXXXXXXXXXYYLVTLPELKTPAXXPKP

SEQ ID NO: 11930 - protein, 35 aa, Artificial Sequence
  GFR-binding peptide
  MOD_RES (1)..(3): Xaa is C or S
  MOD_RES (14)..(15)..(16)..(17)..(18): Xaa is A or G
  MOD_RES (19)..(20)..(21)..(22): Xaa is A or G or is absent
XKXSKVVMNSLQEXXXXXXXXXYYVIPLPELDQPV

SEQ ID NO: 11931 - protein, 36 aa, Artificial Sequence; identical to SEQ ID NO: 4495
  GFR-binding peptide
  MOD_RES (1)..(34)..(35): Xaa is C or S
  MOD_RES (12)..(13)..(14)..(15)..(16): Xaa is A or G
  MOD_RES (17)..(18)..(19)..(20): Xaa is A or G or is absent

SEQ ID NO: 11932 - protein, 36 aa, Artificial Sequence
  GFR-binding peptide
  MOD_RES (2)..(33)..(34): Xaa is C or S
KXSKVIMNSLQEIKPTKGIYYVIPLPELDQSVXXPS

SEQ ID NO: 11933 - protein, 40 aa, Artificial Sequence; identical to SEQ ID NO: 4498
  GFR-binding peptide
  MOD_RES (2)..(35)..(36): Xaa is C or S
  MOD_RES (13)..(14)..(15)..(16)..(17): Xaa is A or G
  MOD_RES (18)..(19)..(20)..(21): Xaa is A or G or is absent

SEQ ID NO: 11934 - protein, 36 aa, Artificial Sequence
  GFR-binding peptide
  MOD_RES (32)..(33): Xaa is C or S
GEVVMDNSLQEVVKENEDYYLMTLPELETPVXXAKP

SEQ ID NO: 11935 - protein, 36 aa, Artificial Sequence
  GFR-binding peptide
  MOD_RES (2)..(36): Xaa is C or S
  MOD_RES (14)..(15)..(16)..(17)..(18): Xaa is A or G
  MOD_RES (19)..(20)..(21)..(22): Xaa is A or G or is absent
GXSEVVMDQYNKLXXXXXXXXXLYLISIASLRTPVX

SEQ ID NO: 11936 - protein, 38 aa, Artificial Sequence
  GFR-binding peptide
  MOD_RES (2)..(36)..(37): Xaa is C or S
  MOD_RES (14)..(15)..(16)..(17)..(18): Xaa is A or G
  MOD_RES (19)..(20)..(21)..(22): Xaa is A or G or is absent
GXARVVMNEYQKYXXXXXXXXXIFLVSIPSLQTPAXXP

SEQ ID NO: 11937 - protein, 37 aa, Artificial Sequence; identical to SEQ ID NO: 4499
  GFR-binding peptide
  MOD_RES (2)..(34)..(35): Xaa is C or S

SEQ ID NO: 11938 - protein, 34 aa, Artificial Sequence; identical to SEQ ID NO: 4501
  GFR-binding peptide
  MOD_RES (2)..(2): Xaa is C or S
  MOD_RES (13)..(14)..(15)..(16)..(17): Xaa is A or G
  MOD_RES (18)..(19)..(20)..(21): Xaa is A or G or is absent

SEQ ID NO: 11939 - protein, 40 aa, Artificial Sequence; identical to SEQ ID NO: 4502
  GFR-binding peptide
  MOD_RES (2)..(36)..(37): Xaa is C or S
  MOD_RES (14)..(15)..(16)..(17)..(18): Xaa is A or G
  MOD_RES (19)..(20)..(21)..(22): Xaa is A or G or is absent

SEQ ID NO: 11940 - protein, 34 aa, Artificial Sequence
  GFR-binding peptide
  MOD_RES (33)..(34): Xaa is C or S
  MOD_RES (11)..(12)..(13)..(14)..(15): Xaa is A or G
  MOD_RES (16)..(17)..(18)..(19): Xaa is A or G or is absent
SKVVMEYQKYXXXXXXXXXIFLISIPSLDQPVXX

SEQ ID NO: 11941 - protein, 32 aa, Artificial Sequence
  GFR-binding peptide
  MOD_RES (11)..(12)..(13)..(14)..(15): Xaa is A or G
  MOD_RES (16)..(17)..(18)..(19): Xaa is A or G or is absent
RVVMNNSLQEXXXXXXXXXYYLVTLPELKTPA

SEQ ID NO: 11942 - protein, 34 aa, Artificial Sequence
  GFR-binding peptide
  MOD_RES (1)..(33)..(34): Xaa is C or S
XGEVVMENSLQEVVKDYEDYYVMPLPELETPVXX

SEQ ID NO: 11943 - protein, 41 aa, Artificial Sequence
  GFR-binding peptide
  MOD_RES (2)..(4)..(36)..(37): Xaa is C or S
RXGXGEVVMEEYQKYVVKDYEDIFLMSIPSLETPVXXAKPI

SEQ ID NO: 11944 - protein, 37 aa, Artificial Sequence; identical to SEQ ID NO: 4505
  GFR-binding peptide
  MOD_RES (2)..(4)..(35)..(36): Xaa is C or S

SEQ ID NO: 11945 - protein, 42 aa, Artificial Sequence
  GFR-binding peptide
  MOD_RES (1)..(3)..(36)..(37): Xaa is C or S
  MOD_RES (14)..(15)..(16)..(17)..(18): Xaa is A or G
  MOD_RES (19)..(20)..(21)..(22): Xaa is A or G or is absent
XKXSKVIMNSLQEXXXXXXXXXYYVIPLPELDQSVXXPSASA

SEQ ID NO: 11946 - protein, 37 aa, Artificial Sequence
  GFR-binding peptide
  MOD_RES (2)..(4)..(36)..(37): Xaa is C or S
RXGXSEVVMDRYKKLVVNNASDFYLISIANLRTPVXX

SEQ ID NO: 11947 - protein, 36 aa, Artificial Sequence; identical to SEQ ID NO: 4509
  GFR-binding peptide
  MOD_RES (1)..(35): Xaa is C or S
  MOD_RES (13)..(14)..(15)..(16)..(17): Xaa is A or G
  MOD_RES (18)..(19)..(20)..(21): Xaa is A or G or is absent

SEQ ID NO: 11948 - protein, 36 aa, Artificial Sequence
  GFR-binding peptide
  MOD_RES (32)..(33): Xaa is C or S
GEVVMDNSLQEVVKENEDYYVMPLPELETPVXXAKP

SEQ ID NO: 11949 - protein, 42 aa, Artificial Sequence
  GFR-binding peptide
  MOD_RES (2)..(4)..(37)..(38): Xaa is C or S
  MOD_RES (15)..(16)..(17)..(18)..(19): Xaa is A or G
  MOD_RES (20)..(21)..(22)..(23): Xaa is A or G or is absent
SXKXSRVIMNSLQEXXXXXXXXXYYLITLPELAQPVXXPAAS

SEQ ID NO: 11950 - protein, 41 aa, Artificial Sequence
  GFR-binding peptide
  MOD_RES (1)..(3)..(37)..(38): Xaa is C or S
  MOD_RES (15)..(16)..(17)..(18)..(19): Xaa is A or G
  MOD_RES (20)..(21)..(22)..(23): Xaa is A or G or is absent
XGXSRVVMNNSLQEXXXXXXXXXYYVVPLPELKTPAXXPKP

SEQ ID NO: 11951 - protein, 35 aa, Artificial Sequence; identical to SEQ ID NO: 4513
  GFR-binding peptide
  MOD_RES (34)..(35): Xaa is C or S
  MOD_RES (12)..(13)..(14)..(15)..(16): Xaa is A or G
  MOD_RES (17)..(18)..(19)..(20): Xaa is A or G or is absent

SEQ ID NO: 11952 - protein, 38 aa, Artificial Sequence
  GFR-binding peptide
  MOD_RES (32)..(33): Xaa is C or S
GEVVMDNSLQEVVKENEDYYLMTLPELETPVXXAKPIK

SEQ ID NO: 11953 - protein, 39 aa, Artificial Sequence; identical to SEQ ID NO: 4514
  GFR-binding peptide
  MOD_RES (2)..(36)..(37): Xaa is C or S
  MOD_RES (14)..(15)..(16)..(17)..(18): Xaa is A or G
  MOD_RES (19)..(20)..(21)..(22): Xaa is A or G or is absent

SEQ ID NO: 11954 - protein, 32 aa, Artificial Sequence
  GFR-binding peptide
  MOD_RES (32)..(32): Xaa is C or S
ARVVMNNSLQEIVNSSDDYYLVTLPELQTPAX

SEQ ID NO: 11955 - protein, 39 aa, Artificial Sequence
  GFR-binding peptide
  MOD_RES (1)..(35)..(36): Xaa is C or S
  MOD_RES (13)..(14)..(15)..(16)..(17): Xaa is A or G
  MOD_RES (18)..(19)..(20)..(21): Xaa is A or G or is absent
XARVVMNNSLQEXXXXXXXXXYYVVPLPELQTPAXXPKP

SEQ ID NO: 11956 - protein, 38 aa, Artificial Sequence
  GFR-binding peptide
  MOD_RES (2)..(4)..(36): Xaa is C or S
HXGXSRVVMNNSLQEIVNSSDDYYVVPLPELKTPAXTP

SEQ ID NO: 11957 - protein, 41 aa, Artificial Sequence
  GFR-binding peptide
  MOD_RES (1)..(35)..(36): Xaa is C or S
  MOD_RES (13)..(14)..(15)..(16)..(17): Xaa is A or G
  MOD_RES (18)..(19)..(20)..(21): Xaa is A or G or is absent
XSRVVMNNSLQEXXXXXXXXXYYVVPLPELKTPAXXPKPVY

SEQ ID NO: 11958 - protein, 42 aa, Artificial Sequence
  GFR-binding peptide
  MOD_RES (2)..(4)..(38): Xaa is C or S
  MOD_RES (16)..(17)..(18)..(19)..(20): Xaa is A or G
  MOD_RES (21)..(22)..(23)..(24): Xaa is A or G or is absent
HXGXSRVVMNNSLQEXXXXXXXXXYYLVTLPELKTPAXTPKT

SEQ ID NO: 11959 - protein, 40 aa, Artificial Sequence
  GFR-binding peptide
  MOD_RES (1)..(34)..(35): Xaa is C or S
  MOD_RES (12)..(13)..(14)..(15)..(16): Xaa is A or G
  MOD_RES (17)..(18)..(19)..(20): Xaa is A or G or is absent
XSRVIMNSLQEXXXXXXXXXYYVIPLPELAQPVXXPAASA

SEQ ID NO: 11960 - protein, 39 aa, Artificial Sequence
  GFR-binding peptide
  MOD_RES (1)..(3)..(37): Xaa is C or S
  MOD_RES (15)..(16)..(17)..(18)..(19): Xaa is A or G
  MOD_RES (20)..(21)..(22)..(23): Xaa is A or G or is absent
XGXSRVVMNEYQKYXXXXXXXXXIFLVSIPSLKTPAXTP

SEQ ID NO: 11961 - protein, 36 aa, Artificial Sequence
  GFR-binding peptide
  MOD_RES (31)..(32): Xaa is C or S
EVVMDQYNKLVVNNASDLYLISIASLRTPVXXTPPT

SEQ ID NO: 11962 - protein, 39 aa, Artificial Sequence
  GFR-binding peptide
  MOD_RES (2)..(4)..(38)..(39): Xaa is C or S
  MOD_RES (16)..(17)..(18)..(19)..(20): Xaa is A or G
  MOD_RES (21)..(22)..(23)..(24): Xaa is A or G or is absent
RXGXSEVVMDQYNKLXXXXXXXXXLYLISIASLRTPVXX

SEQ ID NO: 11963 - protein, 36 aa, Artificial Sequence; identical to SEQ ID NO: 4522
  GFR-binding peptide
  MOD_RES (1)..(33): Xaa is C or S

SEQ ID NO: 11964 - protein, 42 aa, Artificial Sequence
  GFR-binding peptide
  MOD_RES (1)..(3)..(36)..(37): Xaa is C or S
  MOD_RES (14)..(15)..(16)..(17)..(18): Xaa is A or G
  MOD_RES (19)..(20)..(21)..(22): Xaa is A or G or is absent
XKXSRVIMNSLQEXXXXXXXXXYYVIPLPELAQPVXXPAASA

SEQ ID NO: 11965 - protein, 35 aa, Artificial Sequence; identical to SEQ ID NO: 4523
  GFR-binding peptide
  MOD_RES (33)..(34): Xaa is C or S
  MOD_RES (11)..(12)..(13)..(14)..(15): Xaa is A or G
  MOD_RES (16)..(17)..(18)..(19): Xaa is A or G or is absent

SEQ ID NO: 11966 - protein, 38 aa, Artificial Sequence
  GFR-binding peptide
  MOD_RES (1)..(35)..(36): Xaa is C or S
  MOD_RES (13)..(14)..(15)..(16)..(17): Xaa is A or G
  MOD_RES (18)..(19)..(20)..(21): Xaa is A or G or is absent
XSEVVMDNSLQEXXXXXXXXXYYVIPLPELRTPVXXTP

SEQ ID NO: 11967 - protein, 40 aa, Artificial Sequence
  GFR-binding peptide
  MOD_RES (1)..(3)..(34)..(35): Xaa is C or S
XKXSRVIMEYQKYVKPKRGVIFLISIPSLAQPVXXPAASA

SEQ ID NO: 11968 - protein, 31 aa, Artificial Sequence
  GFR-binding peptide
SEVVMDQYNKLVVNNASDLYLISIASLRTPV

SEQ ID NO: 11969 - protein, 34 aa, Artificial Sequence; identical to SEQ ID NO: 4529
  GFR-binding peptide
  MOD_RES (2)..(4): Xaa is C or S

SEQ ID NO: 11970 - protein, 33 aa, Artificial Sequence
  GFR-binding peptide
  MOD_RES (2)..(33): Xaa is C or S
KXSKVIMNSLQEIKPTKGIYYVIPLPELDQSVX

SEQ ID NO: 11971 - protein, 37 aa, Artificial Sequence; identical to SEQ ID NO: 4531
  GFR-binding peptide
  MOD_RES (33)..(33): Xaa is C or S
  MOD_RES (11)..(12)..(13)..(14)..(15): Xaa is A or G
  MOD_RES (16)..(17)..(18)..(19): Xaa is A or G or is absent

SEQ ID NO: 11972 - protein, 37 aa, Artificial Sequence
  GFR-binding peptide
  MOD_RES (34)..(35): Xaa is C or S
  MOD_RES (12)..(13)..(14)..(15)..(16): Xaa is A or G
  MOD_RES (17)..(18)..(19)..(20): Xaa is A or G or is absent
ARVVMNNSLQEXXXXXXXXXYYVVPLPELQTPAXXPK

SEQ ID NO: 11973 - protein, 36 aa, Artificial Sequence
  GFR-binding peptide
  MOD_RES (1)..(3)..(35): Xaa is C or S
XGXSRVVMNEYQKYIVNSSDDIFLVSIPSLKTPAXT

SEQ ID NO: 11974 - protein, 36 aa, Artificial Sequence; identical to SEQ ID NO: 4534
  GFR-binding peptide
  MOD_RES (32)..(33): Xaa is C or S

SEQ ID NO: 11975 - protein, 39 aa, Artificial Sequence
  GFR-binding peptide
  MOD_RES (2)..(36)..(37): Xaa is C or S
  MOD_RES (14)..(15)..(16)..(17)..(18): Xaa is A or G
  MOD_RES (19)..(20)..(21)..(22): Xaa is A or G or is absent
GXSRVVMNEYQKYXXXXXXXXXIFLVSIPSLKTPAXXPK

SEQ ID NO: 11976 - protein, 38 aa, Artificial Sequence
  GFR-binding peptide
  MOD_RES (1)..(3)..(35)..(36): Xaa is C or S
XGXGEVVMENSLQEVVKDYEDYYVMPLPELETPVXXAK

SEQ ID NO: 11977 - protein, 34 aa, Artificial Sequence; identical to SEQ ID NO: 4538
  GFR-binding peptide
  MOD_RES (2)..(33)..(34): Xaa is C or S

SEQ ID NO: 11978 - protein, 38 aa, Artificial Sequence; identical to SEQ ID NO: 4542
  GFR-binding peptide
  MOD_RES (2)..(34): Xaa is C or S

SEQ ID NO: 11979 - protein, 32 aa, Artificial Sequence
  GFR-binding peptide
  MOD_RES (31)..(32): Xaa is C or S
RVVMNEYQKYIVNSSDDIFLVSIPSLQTPAXX

SEQ ID NO: 11980 - protein, 39 aa, Artificial Sequence; identical to SEQ ID NO: 4545
  GFR-binding peptide
  MOD_RES (2)..(4)..(36)..(37): Xaa is C or S

SEQ ID NO: 11981 - protein, 36 aa, Artificial Sequence; identical to SEQ ID NO: 4546
  GFR-binding peptide
  MOD_RES (2)..(4)..(36): Xaa is C or S

SEQ ID NO: 11982 - protein, 38 aa, Artificial Sequence
  GFR-binding peptide
  MOD_RES (2)..(4)..(35)..(36): Xaa is C or S
SXKXSKVIMEYQKYIKPTKGIIFLISIPSLDQSVXXPS

SEQ ID NO: 11983 - protein, 38 aa, Artificial Sequence
  GFR-binding peptide
  MOD_RES (32)..(33): Xaa is C or S
SEVVMDNSLQEVVNNASDYYVIPLPELRTPVXXTPPTS

SEQ ID NO: 11984 - protein, 35 aa, Artificial Sequence
  GFR-binding peptide
  MOD_RES (2)..(33)..(34): Xaa is C or S
KXSKVVMNSLQEVKPTRGVYYVIPLPELDQPVXXP

SEQ ID NO: 11985 - protein, 41 aa, Artificial Sequence; identical to SEQ ID NO: 4549
  GFR-binding peptide
  MOD_RES (1)..(35): Xaa is C or S
  MOD_RES (13)..(14)..(15)..(16)..(17): Xaa is A or G
  MOD_RES (18)..(19)..(20)..(21): Xaa is A or G or is absent

SEQ ID NO: 11986 - protein, 40 aa, Artificial Sequence; identical to SEQ ID NO: 4553
  GFR-binding peptide
  MOD_RES (34)..(35): Xaa is C or S
  MOD_RES (12)..(13)..(14)..(15)..(16): Xaa is A or G
  MOD_RES (17)..(18)..(19)..(20): Xaa is A or G or is absent

SEQ ID NO: 11987 - protein, 39 aa, Artificial Sequence
  GFR-binding peptide
  MOD_RES (1)..(3)..(36)..(37): Xaa is C or S
  MOD_RES (14)..(15)..(16)..(17)..(18): Xaa is A or G
  MOD_RES (19)..(20)..(21)..(22): Xaa is A or G or is absent
XKXSKVVMNSLQEXXXXXXXXXYYLITLPELDQPVXXPS

SEQ ID NO: 11988 - protein, 37 aa, Artificial Sequence
  GFR-binding peptide
  MOD_RES (2)..(33)..(34): Xaa is C or S
KXSRVIMNSLQEVKPKRGVYYVIPLPELAQPVXXPAA

SEQ ID NO: 11989 - protein, 33 aa, Artificial Sequence; identical to SEQ ID NO: 4554
  GFR-binding peptide
  MOD_RES (33)..(33): Xaa is C or S
  MOD_RES (11)..(12)..(13)..(14)..(15): Xaa is A or G
  MOD_RES (16)..(17)..(18)..(19): Xaa is A or G or is absent

SEQ ID NO: 11990 - protein, 37 aa, Artificial Sequence
  GFR-binding peptide
  MOD_RES (32)..(32): Xaa is C or S
SRVVMNNSLQEIVNSSDDYYLVTLPELKTPAXTPKTV

SEQ ID NO: 11991 - protein, 36 aa, Artificial Sequence; identical to SEQ ID NO: 4556
  GFR-binding peptide
  MOD_RES (1)..(33)..(34): Xaa is C or S

SEQ ID NO: 11992 - protein, 35 aa, Artificial Sequence; identical to SEQ ID NO: 4558
  GFR-binding peptide
  MOD_RES (2)..(2): Xaa is C or S
  MOD_RES (14)..(15)..(16)..(17)..(18): Xaa is A or G
  MOD_RES (19)..(20)..(21)..(22): Xaa is A or G or is absent

SEQ ID NO: 11993 - protein, 35 aa, Artificial Sequence
  GFR-binding peptide
  MOD_RES (31)..(32): Xaa is C or S
SKVIMEYQKYIKPTKGIIFLISIPSLDQSVXXPSA

SEQ ID NO: 11994 - protein, 32 aa, Artificial Sequence
  GFR-binding peptide
  MOD_RES (31)..(32): Xaa is C or S
SRVIMNSLQEVKPKRGVYYVIPLPELAQPVXX

SEQ ID NO: 11995 - protein, 41 aa, Artificial Sequence
  GFR-binding peptide
  MOD_RES (2)..(4)..(36)..(37): Xaa is C or S
RXGXGEVVMENSLQEVVKDYEDYYLMTLPELETPVXXAKPI

SEQ ID NO: 11996 - protein, 37 aa, Artificial Sequence
  GFR-binding peptide
  MOD_RES (34)..(35): Xaa is C or S
  MOD_RES (12)..(13)..(14)..(15)..(16): Xaa is A or G
  MOD_RES (17)..(18)..(19)..(20): Xaa is A or G or is absent
SRVVMNNSLQEXXXXXXXXXYYVVPLPELKTPAXXPK

SEQ ID NO: 11997 - protein, 35 aa, Artificial Sequence
  GFR-binding peptide
  MOD_RES (2)..(4)..(35): Xaa is C or S
SXKXSRVIMNSLQEVKPKRGVYYVIPLPELAQPVX

SEQ ID NO: 11998 - protein, 36 aa, Artificial Sequence
  GFR-binding peptide
  MOD_RES (1)..(33)..(34): Xaa is C or S
XSEVVMDEYQKYVVNNASDIFLISIPSLRTPVXXTP

SEQ ID NO: 11999 - protein, 38 aa, Artificial Sequence; identical to SEQ ID NO: 4566
  GFR-binding peptide
  MOD_RES (1)..(3)..(36)..(37): Xaa is C or S
  MOD_RES (14)..(15)..(16)..(17)..(18): Xaa is A or G
  MOD_RES (19)..(20)..(21)..(22): Xaa is A or G or is absent

SEQ ID NO: 12000 - protein, 40 aa, Artificial Sequence
  GFR-binding peptide
  MOD_RES (2)..(34)..(35): Xaa is C or S
GXGEVVMENSLQEVVKDYEDYYLMTLPELETPVXXAKPIS

SEQ ID NO: 12001 - protein, 35 aa, Artificial Sequence
  GFR-binding peptide
  MOD_RES (2)..(2): Xaa is C or S
  MOD_RES (14)..(15)..(16)..(17)..(18): Xaa is A or G
  MOD_RES (19)..(20)..(21)..(22): Xaa is A or G or is absent
GXGEVVMDNSLQEXXXXXXXXXYYVMPLPELETPV

SEQ ID NO: 12002 - protein, 32 aa, Artificial Sequence
  GFR-binding peptide
  MOD_RES (11)..(12)..(13)..(14)..(15): Xaa is A or G
  MOD_RES (16)..(17)..(18)..(19): Xaa is A or G or is absent
EVVMDNSLQEXXXXXXXXXYYLITLPELRTPV

SEQ ID NO: 12003 - protein, 39 aa, Artificial Sequence; identical to SEQ ID NO: 4570
  GFR-binding peptide
  MOD_RES (1)..(3)..(35)..(36): Xaa is C or S

SEQ ID NO: 12004 - protein, 40 aa, Artificial Sequence
  GFR-binding peptide
  MOD_RES (2)..(34)..(35): Xaa is C or S
GXARVVMNNSLQEIVNSSDDYYLVTLPELQTPAXXPKPVT

SEQ ID NO: 12005 - protein, 33 aa, Artificial Sequence
  GFR-binding peptide
  MOD_RES (32)..(33): Xaa is C or S
SRVVMNNSLQEIVNSSDDYYLVTLPELKTPAXX

SEQ ID NO: 12006 - protein, 35 aa, Artificial Sequence
  GFR-binding peptide
  MOD_RES (2)..(2): Xaa is C or S
  MOD_RES (14)..(15)..(16)..(17)..(18): Xaa is A or G
  MOD_RES (19)..(20)..(21)..(22): Xaa is A or G or is absent
GXSEVVMDQYNKLXXXXXXXXXLYLISIASLRTPV

SEQ ID NO: 12007 - protein, 40 aa, Artificial Sequence; identical to SEQ ID NO: 4578
  GFR-binding peptide
  MOD_RES (1)..(3)..(36)..(37): Xaa is C or S
  MOD_RES (14)..(15)..(16)..(17)..(18): Xaa is A or G
  MOD_RES (19)..(20)..(21)..(22): Xaa is A or G or is absent

SEQ ID NO: 12008 - protein, 35 aa, Artificial Sequence
  GFR-binding peptide
  MOD_RES (1)..(35): Xaa is C or S
  MOD_RES (13)..(14)..(15)..(16)..(17): Xaa is A or G
  MOD_RES (18)..(19)..(20)..(21): Xaa is A or G or is absent
XARVVMNNSLQEXXXXXXXXXYYVVPLPELQTPAX

SEQ ID NO: 12009 - protein, 39 aa, Artificial Sequence
  GFR-binding peptide
  MOD_RES (2)..(33)..(34): Xaa is C or S
KXSKVVMEYQKYVKPTRGVIFLISIPSLDQPVXXPSASA

SEQ ID NO: 12010 - protein, 41 aa, Artificial Sequence
  GFR-binding peptide
  MOD_RES (2)..(36)..(37): Xaa is C or S
  MOD_RES (14)..(15)..(16)..(17)..(18): Xaa is A or G
  MOD_RES (19)..(20)..(21)..(22): Xaa is A or G or is absent
GXSRVVMNNSLQEXXXXXXXXXYYLVTLPELKTPAXXPKPV

SEQ ID NO: 12011 - protein, 37 aa, Artificial Sequence; identical to SEQ ID NO: 4583
  GFR-binding peptide
  MOD_RES (2)..(35)..(36): Xaa is C or S
  MOD_RES (13)..(14)..(15)..(16)..(17): Xaa is A or G
  MOD_RES (18)..(19)..(20)..(21): Xaa is A or G or is absent

SEQ ID NO: 12012 - protein, 35 aa, Artificial Sequence
  GFR-binding peptide
  MOD_RES (1)..(35): Xaa is C or S
  MOD_RES (13)..(14)..(15)..(16)..(17): Xaa is A or G
  MOD_RES (18)..(19)..(20)..(21): Xaa is A or G or is absent
XGEVVMEEYQKYXXXXXXXXXIFLMSIPSLETPVX

SEQ ID NO: 12013 - protein, 31 aa, Artificial Sequence; identical to SEQ ID NO: 4585
  GFR-binding peptide

SEQ ID NO: 12014 - protein, 35 aa, Artificial Sequence; identical to SEQ ID NO: 4588
  GFR-binding peptide
  MOD_RES (2)..(35): Xaa is C or S
  MOD_RES (13)..(14)..(15)..(16)..(17): Xaa is A or G
  MOD_RES (18)..(19)..(20)..(21): Xaa is A or G or is absent

SEQ ID NO: 12015 - protein, 39 aa, Artificial Sequence
  GFR-binding peptide
  MOD_RES (1)..(3)..(37)..(38): Xaa is C or S
  MOD_RES (15)..(16)..(17)..(18)..(19): Xaa is A or G
  MOD_RES (20)..(21)..(22)..(23): Xaa is A or G or is absent
XGXSRVVMNEYQKYXXXXXXXXXIFLVSIPSLKTPAXXP

SEQ ID NO: 12016 - protein, 39 aa, Artificial Sequence
  GFR-binding peptide
  MOD_RES (33)..(34): Xaa is C or S
  MOD_RES (11)..(12)..(13)..(14)..(15): Xaa is A or G
  MOD_RES (16)..(17)..(18)..(19): Xaa is A or G or is absent
SKVVMNSLQEXXXXXXXXXYYVIPLPELDQPVXXPSASA

SEQ ID NO: 12017 - protein, 35 aa, Artificial Sequence
  GFR-binding peptide
  MOD_RES (32)..(33): Xaa is C or S
GEVVMDEYQKYVVKENEDIFLMSIPSLETPVXXAK

SEQ ID NO: 12018 - protein, 42 aa, Artificial Sequence
  GFR-binding peptide
  MOD_RES (2)..(36)..(37): Xaa is C or S
  MOD_RES (14)..(15)..(16)..(17)..(18): Xaa is A or G
  MOD_RES (19)..(20)..(21)..(22): Xaa is A or G or is absent
GXSEVVMDNSLQEXXXXXXXXXYYLITLPELRTPVXXTPPTS

SEQ ID NO: 12019 - protein, 36 aa, Artificial Sequence
  GFR-binding peptide
  MOD_RES (2)..(4)..(36): Xaa is C or S
RXGXSEVVMDNSLQEVVNNASDYYLITLPELRTPVX

SEQ ID NO: 12020 - protein, 37 aa, Artificial Sequence; identical to SEQ ID NO: 4589
  GFR-binding peptide
  MOD_RES (1)..(35)..(36): Xaa is C or S
  MOD_RES (13)..(14)..(15)..(16)..(17): Xaa is A or G
  MOD_RES (18)..(19)..(20)..(21): Xaa is A or G or is absent

SEQ ID NO: 12021 - protein, 33 aa, Artificial Sequence; identical to SEQ ID NO: 4591
  GFR-binding peptide
  MOD_RES (31)..(31): Xaa is C or S

SEQ ID NO: 12022 - protein, 33 aa, Artificial Sequence; identical to SEQ ID NO: 4592
  GFR-binding peptide
  MOD_RES (1)..(32)..(33): Xaa is C or S

SEQ ID NO: 12023 - protein, 37 aa, Artificial Sequence
  GFR-binding peptide
  MOD_RES (1)..(3)..(35)..(36): Xaa is C or S
XGXSEVVMDQYNKLVVNNASDLYLISIASLRTPVXXT

SEQ ID NO: 12024 - protein, 41 aa, Artificial Sequence; identical to SEQ ID NO: 4595
  GFR-binding peptide
  MOD_RES (1)..(35)..(36): Xaa is C or S
  MOD_RES (13)..(14)..(15)..(16)..(17): Xaa is A or G
  MOD_RES (18)..(19)..(20)..(21): Xaa is A or G or is absent

SEQ ID NO: 12025 - protein, 36 aa, Artificial Sequence; identical to SEQ ID NO: 4596
  GFR-binding peptide
  MOD_RES (1)..(33)..(34): Xaa is C or S

SEQ ID NO: 12026 - protein, 38 aa, Artificial Sequence
  GFR-binding peptide
  MOD_RES (1)..(3)..(37)..(38): Xaa is C or S
  MOD_RES (15)..(16)..(17)..(18)..(19): Xaa is A or G
  MOD_RES (20)..(21)..(22)..(23): Xaa is A or G or is absent
XGXSEVVMDQYNKLXXXXXXXXXLYLISIASLRTPVXX

SEQ ID NO: 12027 - protein, 38 aa, Artificial Sequence; identical to SEQ ID NO: 4600
  GFR-binding peptide
  MOD_RES (2)..(4)..(36)..(37): Xaa is C or S

SEQ ID NO: 12028 - protein, 34 aa, Artificial Sequence; identical to SEQ ID NO: 4601
  GFR-binding peptide
  MOD_RES (1)..(3)..(34): Xaa is C or S

SEQ ID NO: 12029 - protein, 35 aa, Artificial Sequence
  GFR-binding peptide
  MOD_RES (32)..(32): Xaa is C or S
SRVVMNNSLQEIVNSSDDYYVVPLPELKTPAXTPK

SEQ ID NO: 12030 - protein, 39 aa, Artificial Sequence
  GFR-binding peptide
  MOD_RES (1)..(3)..(36)..(37): Xaa is C or S
  MOD_RES (14)..(15)..(16)..(17)..(18): Xaa is A or G
  MOD_RES (19)..(20)..(21)..(22): Xaa is A or G or is absent
XKXSKVIMEYQKYXXXXXXXXXIFLISIPSLDQSVXXPS

SEQ ID NO: 12031 - protein, 36 aa, Artificial Sequence
  GFR-binding peptide
  MOD_RES (2)..(4)..(36): Xaa is C or S
RXGXSEVVMDQYNKLVVNNASDLYLISIASLRTPVX

SEQ ID NO: 12032 - protein, 36 aa, Artificial Sequence
  GFR-binding peptide
  MOD_RES (1)..(32)..(33): Xaa is C or S
XSRVIMNSLQEVKPKRGVYYVIPLPELAQPVXXPAA

SEQ ID NO: 12033 - protein, 33 aa, Artificial Sequence
  GFR-binding peptide
  MOD_RES (1)..(33): Xaa is C or S
XSEVVMDEYQKYVVNNASDIFLISIPSLRTPVX

SEQ ID NO: 12034 - protein, 39 aa, Artificial Sequence; identical to SEQ ID NO: 4606
  GFR-binding peptide
  MOD_RES (2)..(34)..(35): Xaa is C or S

SEQ ID NO: 12035 - protein, 41 aa, Artificial Sequence
  GFR-binding peptide
  MOD_RES (2)..(35)..(36): Xaa is C or S
  MOD_RES (13)..(14)..(15)..(16)..(17): Xaa is A or G
  MOD_RES (18)..(19)..(20)..(21): Xaa is A or G or is absent
KXSKVIMEYQKYXXXXXXXXXIFLISIPSLDQSVXXPSASA

SEQ ID NO: 12036 - protein, 37 aa, Artificial Sequence
  GFR-binding peptide
  MOD_RES (2)..(4)..(37): Xaa is C or S
  MOD_RES (15)..(16)..(17)..(18)..(19): Xaa is A or G
  MOD_RES (20)..(21)..(22)..(23): Xaa is A or G or is absent
SXKXSRVIMEYQKYXXXXXXXXXIFLISIPSLAQPVX

SEQ ID NO: 12037 - protein, 33 aa, Artificial Sequence
  GFR-binding peptide
  MOD_RES (33)..(33): Xaa is C or S
  MOD_RES (11)..(12)..(13)..(14)..(15): Xaa is A or G
  MOD_RES (16)..(17)..(18)..(19): Xaa is A or G or is absent
EVVMDRYKKLXXXXXXXXXFYLISIANLRTPVX

SEQ ID NO: 12038 - protein, 36 aa, Artificial Sequence; identical to SEQ ID NO: 4614
  GFR-binding peptide
  MOD_RES (1)..(3)..(35)..(36): Xaa is C or S

SEQ ID NO: 12039 - protein, 36 aa, Artificial Sequence
  GFR-binding peptide
  MOD_RES (2)..(34): Xaa is C or S
GXSRVVMNNSLQEIVNSSDDYYVVPLPELKTPAXTP

SEQ ID NO: 12040 - protein, 37 aa, Artificial Sequence
  GFR-binding peptide
  MOD_RES (1)..(3)..(34)..(35): Xaa is C or S
XKXSKVVMNSLQEVKPTRGVYYLITLPELDQPVXXPS

SEQ ID NO: 12041 - protein, 39 aa, Artificial Sequence
  GFR-binding peptide
  MOD_RES (1)..(3)..(35): Xaa is C or S
XGXSRVVMNNSLQEIVNSSDDYYLVTLPELKTPAXTPKT

SEQ ID NO: 12042 - protein, 34 aa, Artificial Sequence
  GFR-binding peptide
  MOD_RES (31)..(32): Xaa is C or S
EVVMDNSLQEVVKENEDYYLMTLPELETPVXXAK

SEQ ID NO: 12043 - protein, 32 aa, Artificial Sequence
  GFR-binding peptide
  MOD_RES (11)..(12)..(13)..(14)..(15): Xaa is A or G
  MOD_RES (16)..(17)..(18)..(19): Xaa is A or G or is absent
SKVVMEYQKYXXXXXXXXXIFLISIPSLDQPV

SEQ ID NO: 12044 - protein, 37 aa, Artificial Sequence; identical to SEQ ID NO: 4624
  GFR-binding peptide
  MOD_RES (1)..(3)..(35): Xaa is C or S

SEQ ID NO: 12045 - protein, 36 aa, Artificial Sequence; identical to SEQ ID NO: 4625
  GFR-binding peptide
  MOD_RES (1)..(32)..(33): Xaa is C or S

SEQ ID NO: 12046 - protein, 35 aa, Artificial Sequence
  GFR-binding peptide
  MOD_RES (2)..(4): Xaa is C or S
RXGXSEVVMDEYQKYVVNNASDIFLISIPSLRTPV

SEQ ID NO: 12047 - protein, 33 aa, Artificial Sequence; identical to SEQ ID NO: 4627
  GFR-binding peptide
  MOD_RES (1)..(3): Xaa is C or S

SEQ ID NO: 12048 - protein, 37 aa, Artificial Sequence
  GFR-binding peptide
  MOD_RES (33)..(34): Xaa is C or S
  MOD_RES (11)..(12)..(13)..(14)..(15): Xaa is A or G
  MOD_RES (16)..(17)..(18)..(19): Xaa is A or G or is absent
RVVMNNSLQEXXXXXXXXXYYVVPLPELKTPAXXPKP

SEQ ID NO: 12049 - protein, 42 aa, Artificial Sequence
  GFR-binding peptide
  MOD_RES (2)..(36)..(37): Xaa is C or S
  MOD_RES (14)..(15)..(16)..(17)..(18): Xaa is A or G
  MOD_RES (19)..(20)..(21)..(22): Xaa is A or G or is absent
GXGEVVMENSLQEXXXXXXXXXYYVMPLPELETPVXXAKPIS

SEQ ID NO: 12050 - protein, 37 aa, Artificial Sequence; identical to SEQ ID NO: 4629
  GFR-binding peptide
  MOD_RES (2)..(34)..(35): Xaa is C or S

SEQ ID NO: 12051 - protein, 39 aa, Artificial Sequence; identical to SEQ ID NO: 4630
  GFR-binding peptide
  MOD_RES (1)..(34)..(35): Xaa is C or S
  MOD_RES (12)..(13)..(14)..(15)..(16): Xaa is A or G
  MOD_RES (17)..(18)..(19)..(20): Xaa is A or G or is absent

SEQ ID NO: 12052 - protein, 33 aa, Artificial Sequence
  GFR-binding peptide
  MOD_RES (1)..(32)..(33): Xaa is C or S
XSRVIMNSLQEVKPKRGVYYLITLPELAQPVXX

SEQ ID NO: 12053 - protein, 33 aa, Artificial Sequence
  GFR-binding peptide
  MOD_RES (31)..(32): Xaa is C or S
SRVIMNSLQEVKPKRGVYYLITLPELAQPVXXP

SEQ ID NO: 12054 - protein, 42 aa, Artificial Sequence; identical to SEQ ID NO: 4632
  GFR-binding peptide
  MOD_RES (1)..(3)..(37)..(38): Xaa is C or S
  MOD_RES (15)..(16)..(17)..(18)..(19): Xaa is A or G
  MOD_RES (20)..(21)..(22)..(23): Xaa is A or G or is absent

SEQ ID NO: 12055 - protein, 42 aa, Artificial Sequence
  GFR-binding peptide
  MOD_RES (2)..(36)..(37): Xaa is C or S
  MOD_RES (14)..(15)..(16)..(17)..(18): Xaa is A or G
  MOD_RES (19)..(20)..(21)..(22): Xaa is A or G or is absent
GXSEVVMDEYQKYXXXXXXXXXIFLISIPSLRTPVXXTPPTS

SEQ ID NO: 12056 - protein, 38 aa, Artificial Sequence; identical to SEQ ID NO: 4633
  GFR-binding peptide
  MOD_RES (2)..(4)..(36)..(37): Xaa is C or S

SEQ ID NO: 12057 - protein, 38 aa, Artificial Sequence
  GFR-binding peptide
  MOD_RES (2)..(35)..(36): Xaa is C or S
  MOD_RES (13)..(14)..(15)..(16)..(17): Xaa is A or G
  MOD_RES (18)..(19)..(20)..(21): Xaa is A or G or is absent
KXSRVIMNSLQEXXXXXXXXXYYVIPLPELAQPVXXPA

SEQ ID NO: 12058 - protein, 40 aa, Artificial Sequence
  GFR-binding peptide
  MOD_RES (1)..(3)..(35): Xaa is C or S
XGXSRVVMNEYQKYIVNSSDDIFLVSIPSLKTPAXTPKTV

SEQ ID NO: 12059 - protein, 38 aa, Artificial Sequence
  GFR-binding peptide
  MOD_RES (1)..(33)..(34): Xaa is C or S
XSRVVMNNSLQEIVNSSDDYYVVPLPELKTPAXXPKPV

SEQ ID NO: 12060 - protein, 39 aa, Artificial Sequence; identical to SEQ ID NO: 4637
  GFR-binding peptide
  MOD_RES (2)..(4)..(36)..(37): Xaa is C or S

SEQ ID NO: 12061 - protein, 37 aa, Artificial Sequence
  GFR-binding peptide
  MOD_RES (1)..(3)..(36)..(37): Xaa is C or S
  MOD_RES (14)..(15)..(16)..(17)..(18): Xaa is A or G
  MOD_RES (19)..(20)..(21)..(22): Xaa is A or G or is absent
XKXSKVVMNSLQEXXXXXXXXXYYVIPLPELDQPVXX

SEQ ID NO: 12062 - protein, 36 aa, Artificial Sequence
  GFR-binding peptide
  MOD_RES (32)..(33): Xaa is C or S
GEVVMENSLQEVVKDYEDYYLMTLPELETPVXXAKP

SEQ ID NO: 12063 - protein, 38 aa, Artificial Sequence
  GFR-binding peptide
  MOD_RES (34)..(35): Xaa is C or S
  MOD_RES (12)..(13)..(14)..(15)..(16): Xaa is A or G
  MOD_RES (17)..(18)..(19)..(20): Xaa is A or G or is absent
SRVVMNEYQKYXXXXXXXXXIFLVSIPSLKTPAXXPKP

SEQ ID NO: 12064 - protein, 34 aa, Artificial Sequence
  GFR-binding peptide
  MOD_RES (1)..(32)..(33): Xaa is C or S
XSKVVMNSLQEVKPTRGVYYLITLPELDQPVXXP

SEQ ID NO: 12065 - protein, 40 aa, Artificial Sequence
  GFR-binding peptide
  MOD_RES (34)..(34): Xaa is C or S
  MOD_RES (12)..(13)..(14)..(15)..(16): Xaa is A or G
  MOD_RES (17)..(18)..(19)..(20): Xaa is A or G or is absent
SRVVMNNSLQEXXXXXXXXXYYVVPLPELKTPAXTPKTVH

SEQ ID NO: 12066 - protein, 38 aa, Artificial Sequence
  GFR-binding peptide
  MOD_RES (2)..(34)..(35): Xaa is C or S
GXSEVVMDNSLQEVVNNASDYYLITLPELRTPVXXTPP

SEQ ID NO: 12067 - protein, 38 aa, Artificial Sequence; identical to SEQ ID NO: 4641
  GFR-binding peptide
  MOD_RES (1)..(3)..(34)..(35): Xaa is C or S

SEQ ID NO: 12068 - protein, 34 aa, Artificial Sequence
  GFR-binding peptide
  MOD_RES (2)..(2): Xaa is C or S
  MOD_RES (13)..(14)..(15)..(16)..(17): Xaa is A or G
  MOD_RES (18)..(19)..(20)..(21): Xaa is A or G or is absent
KXSKVVMNSLQEXXXXXXXXXYYLITLPELDQPV

SEQ ID NO: 12069 - protein, 39 aa, Artificial Sequence
  GFR-binding peptide
  MOD_RES (1)..(34)..(35): Xaa is C or S
  MOD_RES (12)..(13)..(14)..(15)..(16): Xaa is A or G
  MOD_RES (17)..(18)..(19)..(20): Xaa is A or G or is absent
XSKVVMNSLQEXXXXXXXXXYYLITLPELDQPVXXPSAS

SEQ ID NO: 12070 - protein, 39 aa, Artificial Sequence
  GFR-binding peptide
  MOD_RES (1)..(3)..(34)..(35): Xaa is C or S
XKXSRVIMNSLQEVKPKRGVYYVIPLPELAQPVXXPAAS

SEQ ID NO: 12071 - protein, 39 aa, Artificial Sequence; identical to SEQ ID NO: 4643
  GFR-binding peptide
  MOD_RES (2)..(35)..(36): Xaa is C or S
  MOD_RES (13)..(14)..(15)..(16)..(17): Xaa is A or G
  MOD_RES (18)..(19)..(20)..(21): Xaa is A or G or is absent

SEQ ID NO: 12072 - protein, 33 aa, Artificial Sequence
  GFR-binding peptide
  MOD_RES (2)..(33): Xaa is C or S
KXSRVIMNSLQEVKPKRGVYYLITLPELAQPVX

SEQ ID NO: 12073 - protein, 38 aa, Artificial Sequence
  GFR-binding peptide
  MOD_RES (2)..(36)..(37): Xaa is C or S
  MOD_RES (14)..(15)..(16)..(17)..(18): Xaa is A or G
  MOD_RES (19)..(20)..(21)..(22): Xaa is A or G or is absent
GXARVVMNNSLQEXXXXXXXXXYYLVTLPELQTPAXXP

SEQ ID NO: 12074 - protein, 38 aa, Artificial Sequence; identical to SEQ ID NO: 4645
  GFR-binding peptide
  MOD_RES (1)..(34)..(35): Xaa is C or S
  MOD_RES (12)..(13)..(14)..(15)..(16): Xaa is A or G
  MOD_RES (17)..(18)..(19)..(20): Xaa is A or G or is absent

SEQ ID NO: 12075 - protein, 30 aa, Artificial Sequence
  GFR-binding peptide
EVVMDEYQKYVVKENEDIFLMSIPSLETPV

SEQ ID NO: 12076 - protein, 39 aa, Artificial Sequence
  GFR-binding peptide
  MOD_RES (1)..(3)..(34)..(35): Xaa is C or S
XKXSRVIMEYQKYVKPKRGVIFLISIPSLAQPVXXPAAS

SEQ ID NO: 12077 - protein, 34 aa, Artificial Sequence
  GFR-binding peptide
  MOD_RES (1)..(1): Xaa is C or S
  MOD_RES (13)..(14)..(15)..(16)..(17): Xaa is A or G
  MOD_RES (18)..(19)..(20)..(21): Xaa is A or G or is absent
XSRVVMNNSLQEXXXXXXXXXYYLVTLPELKTPA

SEQ ID NO: 12078 - protein, 41 aa, Artificial Sequence
  GFR-binding peptide
  MOD_RES (2)..(4)..(36)..(37): Xaa is C or S
HXGXARVVMNNSLQEIVNSSDDYYVVPLPELQTPAXXPKPV

SEQ ID NO: 12079 - protein, 40 aa, Artificial Sequence
  GFR-binding peptide
  MOD_RES (1)..(3)..(37)..(38): Xaa is C or S
  MOD_RES (15)..(16)..(17)..(18)..(19): Xaa is A or G
  MOD_RES (20)..(21)..(22)..(23): Xaa is A or G or is absent
XGXSEVVMDQYNKLXXXXXXXXXLYLISIASLRTPVXXTP

SEQ ID NO: 12080 - protein, 40 aa, Artificial Sequence
  GFR-binding peptide
  MOD_RES (34)..(35): Xaa is C or S
  MOD_RES (12)..(13)..(14)..(15)..(16): Xaa is A or G
  MOD_RES (17)..(18)..(19)..(20): Xaa is A or G or is absent
SEVVMDNSLQEXXXXXXXXXYYLITLPELRTPVXXTPPTS

SEQ ID NO: 12081 - protein, 36 aa, Artificial Sequence
  GFR-binding peptide
  MOD_RES (34)..(35): Xaa is C or S
  MOD_RES (12)..(13)..(14)..(15)..(16): Xaa is A or G
  MOD_RES (17)..(18)..(19)..(20): Xaa is A or G or is absent
ARVVMNNSLQEXXXXXXXXXYYLVTLPELQTPAXXP

SEQ ID NO: 12082 - protein, 38 aa, Artificial Sequence; identical to SEQ ID NO: 4649
  GFR-binding peptide
  MOD_RES (1)..(3)..(34)..(35): Xaa is C or S

SEQ ID NO: 12083 - protein, 36 aa, Artificial Sequence
  GFR-binding peptide
  MOD_RES (1)..(3)..(35)..(36): Xaa is C or S
XGXARVVMNEYQKYIVNSSDDIFLVSIPSLQTPAXX

SEQ ID NO: 12084 - protein, 36 aa, Artificial Sequence
  GFR-binding peptide
  MOD_RES (31)..(32): Xaa is C or S
EVVMENSLQEVVKDYEDYYVMPLPELETPVXXAKPI

SEQ ID NO: 12085 - protein, 35 aa, Artificial Sequence; identical to SEQ ID NO: 4652
  GFR-binding peptide
  MOD_RES (33)..(34): Xaa is C or S
  MOD_RES (11)..(12)..(13)..(14)..(15): Xaa is A or G
  MOD_RES (16)..(17)..(18)..(19): Xaa is A or G or is absent

SEQ ID NO: 12086 - protein, 36 aa, Artificial Sequence
  GFR-binding peptide
  MOD_RES (31)..(32): Xaa is C or S
EVVMENSLQEVVKDYEDYYLMTLPELETPVXXAKPI

SEQ ID NO: 12087 - protein, 37 aa, Artificial Sequence
  GFR-binding peptide
  MOD_RES (2)..(4): Xaa is C or S
  MOD_RES (16)..(17)..(18)..(19)..(20): Xaa is A or G
  MOD_RES (21)..(22)..(23)..(24): Xaa is A or G or is absent
RXGXSEVVMDNSLQEXXXXXXXXXYYLITLPELRTPV

SEQ ID NO: 12088 - protein, 34 aa, Artificial Sequence
  GFR-binding peptide
  MOD_RES (2)..(34): Xaa is C or S
GXSEVVMDNSLQEVVNNASDYYVIPLPELRTPVX

SEQ ID NO: 12089 - protein, 34 aa, Artificial Sequence; identical to SEQ ID NO: 4658
  GFR-binding peptide
  MOD_RES (34)..(34): Xaa is C or S
  MOD_RES (12)..(13)..(14)..(15)..(16): Xaa is A or G
  MOD_RES (17)..(18)..(19)..(20): Xaa is A or G or is absent

SEQ ID NO: 12090 - protein, 34 aa, Artificial Sequence
  GFR-binding peptide
  MOD_RES (2)..(34): Xaa is C or S
GXGEVVMDNSLQEVVKENEDYYLMTLPELETPVX

SEQ ID NO: 12091 - protein, 36 aa, Artificial Sequence
  GFR-binding peptide
  MOD_RES (1)..(32)..(33): Xaa is C or S
XSKVVMEYQKYVKPTRGVIFLISIPSLDQPVXXPSA

SEQ ID NO: 12092 - protein, 31 aa, Artificial Sequence; identical to SEQ ID NO: 4662
  GFR-binding peptide

SEQ ID NO: 12093 - protein, 41 aa, Artificial Sequence
  GFR-binding peptide
  MOD_RES (1)..(35)..(36): Xaa is C or S
  MOD_RES (13)..(14)..(15)..(16)..(17): Xaa is A or G
  MOD_RES (18)..(19)..(20)..(21): Xaa is A or G or is absent
XSEVVMDNSLQEXXXXXXXXXYYVIPLPELRTPVXXTPPTS

SEQ ID NO: 12094 - protein, 35 aa, Artificial Sequence; identical to SEQ ID NO: 4663
  GFR-binding peptide
  MOD_RES (33)..(34): Xaa is C or S
  MOD_RES (11)..(12)..(13)..(14)..(15): Xaa is A or G
  MOD_RES (16)..(17)..(18)..(19): Xaa is A or G or is absent

SEQ ID NO: 12095 - protein, 40 aa, Artificial Sequence
  GFR-binding peptide
  MOD_RES (2)..(4)..(38)..(39): Xaa is C or S
  MOD_RES (16)..(17)..(18)..(19)..(20): Xaa is A or G
  MOD_RES (21)..(22)..(23)..(24): Xaa is A or G or is absent
HXGXARVVMNNSLQEXXXXXXXXXYYLVTLPELQTPAXXP

SEQ ID NO: 12096 - protein, 35 aa, Artificial Sequence
  GFR-binding peptide
  MOD_RES (2)..(4)..(35): Xaa is C or S
SXKXSRVIMEYQKYVKPKRGVIFLISIPSLAQPVX

SEQ ID NO: 12097 - protein, 40 aa, Artificial Sequence; identical to SEQ ID NO: 4666
  GFR-binding peptide
  MOD_RES (1)..(3)..(35)..(36): Xaa is C or S

SEQ ID NO: 12098 - protein, 39 aa, Artificial Sequence
  GFR-binding peptide
  MOD_RES (1)..(3)..(36)..(37): Xaa is C or S
  MOD_RES (14)..(15)..(16)..(17)..(18): Xaa is A or G
  MOD_RES (19)..(20)..(21)..(22): Xaa is A or G or is absent
XKXSRVIMEYQKYXXXXXXXXXIFLISIPSLAQPVXXPA

SEQ ID NO: 12099 - protein, 38 aa, Artificial Sequence; identical to SEQ ID NO: 4667
  GFR-binding peptide
  MOD_RES (33)..(34): Xaa is C or S
  MOD_RES (11)..(12)..(13)..(14)..(15): Xaa is A or G
  MOD_RES (16)..(17)..(18)..(19): Xaa is A or G or is absent

SEQ ID NO: 12100 - protein, 34 aa, Artificial Sequence
  GFR-binding peptide
  MOD_RES (31)..(32): Xaa is C or S
EVVMDNSLQEVVKENEDYYVMPLPELETPVXXAK

SEQ ID NO: 12101 - protein, 37 aa, Artificial Sequence
  GFR-binding peptide
  MOD_RES (33)..(34): Xaa is C or S
  MOD_RES (11)..(12)..(13)..(14)..(15): Xaa is A or G
  MOD_RES (16)..(17)..(18)..(19): Xaa is A or G or is absent
SKVIMNSLQEXXXXXXXXXYYVIPLPELDQSVXXPSA

SEQ ID NO: 12102 - protein, 33 aa, Artificial Sequence; identical to SEQ ID NO: 4674
  GFR-binding peptide
  MOD_RES (1)..(1): Xaa is C or S
  MOD_RES (12)..(13)..(14)..(15)..(16): Xaa is A or G
  MOD_RES (17)..(18)..(19)..(20): Xaa is A or G or is absent

SEQ ID NO: 12103 - protein, 38 aa, Artificial Sequence
  GFR-binding peptide
  MOD_RES (2)..(35)..(36): Xaa is C or S
  MOD_RES (13)..(14)..(15)..(16)..(17): Xaa is A or G
  MOD_RES (18)..(19)..(20)..(21): Xaa is A or G or is absent
KXSKVIMNSLQEXXXXXXXXXYYVIPLPELDQSVXXPS

SEQ ID NO: 12104 - protein, 36 aa, Artificial Sequence
  GFR-binding peptide
  MOD_RES (1)..(35)..(36): Xaa is C or S
  MOD_RES (13)..(14)..(15)..(16)..(17): Xaa is A or G
  MOD_RES (18)..(19)..(20)..(21): Xaa is A or G or is absent
XSEVVMDQYNKLXXXXXXXXXLYLISIASLRTPVXX

SEQ ID NO: 12105 - protein, 39 aa, Artificial Sequence
  GFR-binding peptide
  MOD_RES (2)..(34)..(35): Xaa is C or S
GXARVVMNNSLQEIVNSSDDYYVVPLPELQTPAXXPKPV

SEQ ID NO: 12106 - protein, 35 aa, Artificial Sequence
  GFR-binding peptide
  MOD_RES (2)..(34)..(35): Xaa is C or S
GXSEVVMDQYNKLVVNNASDLYLISIASLRTPVXX

SEQ ID NO: 12107 - protein, 40 aa, Artificial Sequence
  GFR-binding peptide
  MOD_RES (1)..(35): Xaa is C or S
  MOD_RES (13)..(14)..(15)..(16)..(17): Xaa is A or G
  MOD_RES (18)..(19)..(20)..(21): Xaa is A or G or is absent
XSRVVMNNSLQEXXXXXXXXXYYVVPLPELKTPAXTPKTV

SEQ ID NO: 12108 - protein, 34 aa, Artificial Sequence
  GFR-binding peptide
  MOD_RES (2)..(33)..(34): Xaa is C or S
KXSRVIMNSLQEVKPKRGVYYLITLPELAQPVXX

SEQ ID NO: 12109 - protein, 36 aa, Artificial Sequence; identical to SEQ ID NO: 4682
  GFR-binding peptide
  MOD_RES (2)..(33)..(34): Xaa is C or S

SEQ ID NO: 12110 - protein, 32 aa, Artificial Sequence; identical to SEQ ID NO: 4685
  GFR-binding peptide
  MOD_RES (1)..(32): Xaa is C or S

SEQ ID NO: 12111 - protein, 39 aa, Artificial Sequence
  GFR-binding peptide
  MOD_RES (34)..(35): Xaa is C or S
  MOD_RES (12)..(13)..(14)..(15)..(16): Xaa is A or G
  MOD_RES (17)..(18)..(19)..(20): Xaa is A or G or is absent
ARVVMNNSLQEXXXXXXXXXYYVVPLPELQTPAXXPKPV

SEQ ID NO: 12112 - protein, 36 aa, Artificial Sequence; identical to SEQ ID NO: 4686
  GFR-binding peptide
  MOD_RES (2)..(35)..(36): Xaa is C or S
  MOD_RES (13)..(14)..(15)..(16)..(17): Xaa is A or G
  MOD_RES (18)..(19)..(20)..(21): Xaa is A or G or is absent

SEQ ID NO: 12113 - protein, 34 aa, Artificial Sequence
  GFR-binding peptide
  MOD_RES (31)..(32): Xaa is C or S
EVVMDNSLQEVVNNASDYYVIPLPELRTPVXXTP

SEQ ID NO: 12114 - protein, 33 aa, Artificial Sequence
  GFR-binding peptide
  MOD_RES (32)..(33): Xaa is C or S
SEVVMDNSLQEVVNNASDYYVIPLPELRTPVXX

SEQ ID NO: 12115 - protein, 39 aa, Artificial Sequence
  GFR-binding peptide
  MOD_RES (2)..(35)..(36): Xaa is C or S
  MOD_RES (13)..(14)..(15)..(16)..(17): Xaa is A or G
  MOD_RES (18)..(19)..(20)..(21): Xaa is A or G or is absent
KXSKVVMNSLQEXXXXXXXXXYYLITLPELDQPVXXPSA

SEQ ID NO: 12116 - protein, 37 aa, Artificial Sequence
  GFR-binding peptide
  MOD_RES (1)..(3)..(37): Xaa is C or S
  MOD_RES (15)..(16)..(17)..(18)..(19): Xaa is A or G
  MOD_RES (20)..(21)..(22)..(23): Xaa is A or G or is absent
XGXSRVVMNNSLQEXXXXXXXXXYYVVPLPELKTPAX

SEQ ID NO: 12117 - protein, 32 aa, Artificial Sequence; identical to SEQ ID NO: 4688
  GFR-binding peptide
  MOD_RES (31)..(32): Xaa is C or S

SEQ ID NO: 12118 - protein, 37 aa, Artificial Sequence
  GFR-binding peptide
  MOD_RES (1)..(3)..(37): Xaa is C or S
  MOD_RES (15)..(16)..(17)..(18)..(19): Xaa is A or G
  MOD_RES (20)..(21)..(22)..(23): Xaa is A or G or is absent
XGXSEVVMDRYKKLXXXXXXXXXFYLISIANLRTPVX

SEQ ID NO: 12119 - protein, 38 aa, Artificial Sequence; identical to SEQ ID NO: 4689
  GFR-binding peptide
  MOD_RES (1)..(33)..(34): Xaa is C or S

SEQ ID NO: 12120 - protein, 36 aa, Artificial Sequence; identical to SEQ ID NO: 4691
  GFR-binding peptide
  MOD_RES (1)..(35)..(36): Xaa is C or S
  MOD_RES (13)..(14)..(15)..(16)..(17): Xaa is A or G
  MOD_RES (18)..(19)..(20)..(21): Xaa is A or G or is absent

SEQ ID NO: 12121 - protein, 33 aa, Artificial Sequence
  GFR-binding peptide
  MOD_RES (2)..(33): Xaa is C or S
KXSKVVMEYQKYVKPTRGVIFLISIPSLDQPVX

SEQ ID NO: 12122 - protein, 36 aa, Artificial Sequence
  GFR-binding peptide
  MOD_RES (1)..(3): Xaa is C or S
  MOD_RES (15)..(16)..(17)..(18)..(19): Xaa is A or G
  MOD_RES (20)..(21)..(22)..(23): Xaa is A or G or is absent
XGXSEVVMDNSLQEXXXXXXXXXYYVIPLPELRTPV

SEQ ID NO: 12123 - protein, 38 aa, Artificial Sequence
  GFR-binding peptide
  MOD_RES (2)..(4)..(36): Xaa is C or S
HXGXSRVVMNNSLQEIVNSSDDYYLVTLPELKTPAXTP

SEQ ID NO: 12124 - protein, 35 aa, Artificial Sequence
  GFR-binding peptide
  MOD_RES (32)..(32): Xaa is C or S
SRVVMNNSLQEIVNSSDDYYLVTLPELKTPAXTPK

SEQ ID NO: 12125 - protein, 36 aa, Artificial Sequence; identical to SEQ ID NO: 4696
  GFR-binding peptide
  MOD_RES (1)..(34)..(35): Xaa is C or S
  MOD_RES (12)..(13)..(14)..(15)..(16): Xaa is A or G
  MOD_RES (17)..(18)..(19)..(20): Xaa is A or G or is absent

SEQ ID NO: 12126 - protein, 35 aa, Artificial Sequence
  GFR-binding peptide
  MOD_RES (1)..(3)..(35): Xaa is C or S
XGXGEVVMDNSLQEVVKENEDYYVMPLPELETPVX

SEQ ID NO: 12127 - protein, 33 aa, Artificial Sequence; identical to SEQ ID NO: 4697
  GFR-binding peptide
  MOD_RES (33)..(33): Xaa is C or S
  MOD_RES (11)..(12)..(13)..(14)..(15): Xaa is A or G
  MOD_RES (16)..(17)..(18)..(19): Xaa is A or G or is absent

SEQ ID NO: 12128 - protein, 34 aa, Artificial Sequence; identical to SEQ ID NO: 4699
  GFR-binding peptide
  MOD_RES (2)..(33)..(34): Xaa is C or S

SEQ ID NO: 12129 - protein, 37 aa, Artificial Sequence; identical to SEQ ID NO: 4700
  GFR-binding peptide
  MOD_RES (2)..(36)..(37): Xaa is C or S
  MOD_RES (14)..(15)..(16)..(17)..(18): Xaa is A or G
  MOD_RES (19)..(20)..(21)..(22): Xaa is A or G or is absent

SEQ ID NO: 12130 - protein, 38 aa, Artificial Sequence
  GFR-binding peptide
  MOD_RES (2)..(33)..(34): Xaa is C or S
KXSKVIMEYQKYIKPTKGIIFLISIPSLDQSVXXPSAS

SEQ ID NO: 12131 - protein, 38 aa, Artificial Sequence; identical to SEQ ID NO: 4701
  GFR-binding peptide
  MOD_RES (1)..(33)..(34): Xaa is C or S

SEQ ID NO: 12132 - protein, 37 aa, Artificial Sequence
  GFR-binding peptide
  MOD_RES (2)..(35)..(36): Xaa is C or S
  MOD_RES (13)..(14)..(15)..(16)..(17): Xaa is A or G
  MOD_RES (18)..(19)..(20)..(21): Xaa is A or G or is absent
KXSKVIMNSLQEXXXXXXXXXYYVIPLPELDQSVXXP

SEQ ID NO: 12133 - protein, 36 aa, Artificial Sequence; identical to SEQ ID NO: 4702
  GFR-binding peptide
  MOD_RES (1)..(33)..(34): Xaa is C or S

SEQ ID NO: 12134 - protein, 43 aa, Artificial Sequence; identical to SEQ ID NO: 4703
  GFR-binding peptide
  MOD_RES (1)..(3)..(37)..(38): Xaa is C or S
  MOD_RES (15)..(16)..(17)..(18)..(19): Xaa is A or G
  MOD_RES (20)..(21)..(22)..(23): Xaa is A or G or is absent

SEQ ID NO: 12135 - protein, 34 aa, Artificial Sequence
  GFR-binding peptide
  MOD_RES (33)..(34): Xaa is C or S
  MOD_RES (11)..(12)..(13)..(14)..(15): Xaa is A or G
  MOD_RES (16)..(17)..(18)..(19): Xaa is A or G or is absent
EVVMDNSLQEXXXXXXXXXYYLITLPELRTPVXX

SEQ ID NO: 12136 - protein, 38 aa, Artificial Sequence
  GFR-binding peptide
  MOD_RES (2)..(33)..(34): Xaa is C or S
KXSRVIMNSLQEVKPKRGVYYVIPLPELAQPVXXPAAS

SEQ ID NO: 12137 - protein, 31 aa, Artificial Sequence; identical to SEQ ID NO: 4704
  GFR-binding peptide
  MOD_RES (31)..(31): Xaa is C or S

SEQ ID NO: 12138 - protein, 34 aa, Artificial Sequence; identical to SEQ ID NO: 4705
  GFR-binding peptide
  MOD_RES (2)..(34): Xaa is C or S

SEQ ID NO: 12139 - protein, 36 aa, Artificial Sequence; identical to SEQ ID NO: 4708
  GFR-binding peptide
  MOD_RES (1)..(35)..(36): Xaa is C or S
  MOD_RES (13)..(14)..(15)..(16)..(17): Xaa is A or G
  MOD_RES (18)..(19)..(20)..(21): Xaa is A or G or is absent

SEQ ID NO: 12140 - protein, 35 aa, Artificial Sequence; identical to SEQ ID NO: 4710
  GFR-binding peptide
  MOD_RES (1)..(3)..(34)..(35): Xaa is C or S

SEQ ID NO: 12141 - protein, 38 aa, Artificial Sequence; identical to SEQ ID NO: 4711
  GFR-binding peptide
  MOD_RES (2)..(4)..(35)..(36): Xaa is C or S

SEQ ID NO: 12142 - protein, 37 aa, Artificial Sequence
  GFR-binding peptide
  MOD_RES (1)..(3)..(35)..(36): Xaa is C or S
XGXSRVVMNEYQKYIVNSSDDIFLVSIPSLKTPAXXP

SEQ ID NO: 12143 - protein, 43 aa, Artificial Sequence
  GFR-binding peptide
  MOD_RES (1)..(3)..(37): Xaa is C or S
  MOD_RES (15)..(16)..(17)..(18)..(19): Xaa is A or G
  MOD_RES (20)..(21)..(22)..(23): Xaa is A or G or is absent
XGXSRVVMNNSLQEXXXXXXXXXYYVVPLPELKTPAXTPKTVH

SEQ ID NO: 12144 - protein, 44 aa, Artificial Sequence; identical to SEQ ID NO: 4717
  GFR-binding peptide
  MOD_RES (2)..(4)..(38): Xaa is C or S
  MOD_RES (16)..(17)..(18)..(19)..(20): Xaa is A or G
  MOD_RES (21)..(22)..(23)..(24): Xaa is A or G or is absent

SEQ ID NO: 12145 - protein, 36 aa, Artificial Sequence
  GFR-binding peptide
  MOD_RES (33)..(34): Xaa is C or S
  MOD_RES (11)..(12)..(13)..(14)..(15): Xaa is A or G
  MOD_RES (16)..(17)..(18)..(19): Xaa is A or G or is absent
SKVIMNSLQEXXXXXXXXXYYVIPLPELDQSVXXPS

SEQ ID NO: 12146 - protein, 41 aa, Artificial Sequence
  GFR-binding peptide
  MOD_RES (2)..(36)..(37): Xaa is C or S
  MOD_RES (14)..(15)..(16)..(17)..(18): Xaa is A or G
  MOD_RES (19)..(20)..(21)..(22): Xaa is A or G or is absent
GXARVVMNNSLQEXXXXXXXXXYYVVPLPELQTPAXXPKPV

SEQ ID NO: 12147 - protein, 36 aa, Artificial Sequence; identical to SEQ ID NO: 4719
  GFR-binding peptide
  MOD_RES (1)..(3)..(35)..(36): Xaa is C or S

SEQ ID NO: 12148 - protein, 38 aa, Artificial Sequence
  GFR-binding peptide
  MOD_RES (2)..(36)..(37): Xaa is C or S
  MOD_RES (14)..(15)..(16)..(17)..(18): Xaa is A or G
  MOD_RES (19)..(20)..(21)..(22): Xaa is A or G or is absent
GXSRVVMNEYQKYXXXXXXXXXIFLVSIPSLKTPAXXP

SEQ ID NO: 12149 - protein, 35 aa, Artificial Sequence
  GFR-binding peptide
  MOD_RES (1)..(35): Xaa is C or S
  MOD_RES (13)..(14)..(15)..(16)..(17): Xaa is A or G
  MOD_RES (18)..(19)..(20)..(21): Xaa is A or G or is absent
XSRVVMNNSLQEXXXXXXXXXYYLVTLPELKTPAX

SEQ ID NO: 12150 - protein, 41 aa, Artificial Sequence; identical to SEQ ID NO: 4720
  GFR-binding peptide
  MOD_RES (1)..(3)..(37)..(38): Xaa is C or S
  MOD_RES (15)..(16)..(17)..(18)..(19): Xaa is A or G
  MOD_RES (20)..(21)..(22)..(23): Xaa is A or G or is absent

SEQ ID NO: 12151 - protein, 38 aa, Artificial Sequence; identical to SEQ ID NO: 4722
  GFR-binding peptide
  MOD_RES (2)..(4)..(38): Xaa is C or S
  MOD_RES (16)..(17)..(18)..(19)..(20): Xaa is A or G
  MOD_RES (21)..(22)..(23)..(24): Xaa is A or G or is absent

SEQ ID NO: 12152 - protein, 37 aa, Artificial Sequence; identical to SEQ ID NO: 4723
  GFR-binding peptide
  MOD_RES (1)..(32)..(33): Xaa is C or S

SEQ ID NO: 12153 - protein, 37 aa, Artificial Sequence
  GFR-binding peptide
  MOD_RES (1)..(32)..(33): Xaa is C or S
XSKVVMEYQKYVKPTRGVIFLISIPSLDQPVXXPSAS

SEQ ID NO: 12154 - protein, 37 aa, Artificial Sequence
  GFR-binding peptide
  MOD_RES (31)..(32): Xaa is C or S
EVVMENSLQEVVKDYEDYYLMTLPELETPVXXAKPIS

SEQ ID NO: 12155 - protein, 35 aa, Artificial Sequence
  GFR-binding peptide
  MOD_RES (31)..(32): Xaa is C or S
SKVVMNSLQEVKPTRGVYYLITLPELDQPVXXPSA

SEQ ID NO: 12156 - protein, 41 aa, Artificial Sequence; identical to SEQ ID NO: 4727
  GFR-binding peptide
  MOD_RES (2)..(4)..(38)..(39): Xaa is C or S
  MOD_RES (16)..(17)..(18)..(19)..(20): Xaa is A or G
  MOD_RES (21)..(22)..(23)..(24): Xaa is A or G or is absent

SEQ ID NO: 12157 - protein, 37 aa, Artificial Sequence
  GFR-binding peptide
  MOD_RES (33)..(34): Xaa is C or S
  MOD_RES (11)..(12)..(13)..(14)..(15): Xaa is A or G
  MOD_RES (16)..(17)..(18)..(19): Xaa is A or G or is absent
RVVMNEYQKYXXXXXXXXXIFLVSIPSLQTPAXXPKP

SEQ ID NO: 12158 - protein, 38 aa, Artificial Sequence
  GFR-binding peptide
  MOD_RES (1)..(3)..(35)..(36): Xaa is C or S
XGXGEVVMEEYQKYVVKDYEDIFLMSIPSLETPVXXAK

SEQ ID NO: 12159 - protein, 37 aa, Artificial Sequence; identical to SEQ ID NO: 4731
  GFR-binding peptide
  MOD_RES (32)..(33): Xaa is C or S

SEQ ID NO: 12160 - protein, 38 aa, Artificial Sequence; identical to SEQ ID NO: 4733
  GFR-binding peptide
  MOD_RES (2)..(4)..(37)..(38): Xaa is C or S
  MOD_RES (15)..(16)..(17)..(18)..(19): Xaa is A or G
  MOD_RES (20)..(21)..(22)..(23): Xaa is A or G or is absent

SEQ ID NO: 12161 - protein, 38 aa, Artificial Sequence
  GFR-binding peptide
  MOD_RES (32)..(33): Xaa is C or S
SEVVMDEYQKYVVNNASDIFLISIPSLRTPVXXTPPTS

SEQ ID NO: 12162 - protein, 35 aa, Artificial Sequence
  GFR-binding peptide
  MOD_RES (34)..(34): Xaa is C or S
  MOD_RES (12)..(13)..(14)..(15)..(16): Xaa is A or G
  MOD_RES (17)..(18)..(19)..(20): Xaa is A or G or is absent
SRVVMNEYQKYXXXXXXXXXIFLVSIPSLKTPAXT

SEQ ID NO: 12163 - protein, 40 aa, Artificial Sequence
  GFR-binding peptide
  MOD_RES (34)..(35): Xaa is C or S
  MOD_RES (12)..(13)..(14)..(15)..(16): Xaa is A or G
  MOD_RES (17)..(18)..(19)..(20): Xaa is A or G or is absent
GEVVMDEYQKYXXXXXXXXXIFLMSIPSLETPVXXAKPIK

SEQ ID NO: 12164 - protein, 41 aa, Artificial Sequence
  GFR-binding peptide
  MOD_RES (1)..(3)..(37)..(38): Xaa is C or S
  MOD_RES (15)..(16)..(17)..(18)..(19): Xaa is A or G
  MOD_RES (20)..(21)..(22)..(23): Xaa is A or G or is absent
XGXGEVVMDNSLQEXXXXXXXXXYYLMTLPELETPVXXAKP

SEQ ID NO: 12165 - protein, 32 aa, Artificial Sequence; identical to SEQ ID NO: 4735
  GFR-binding peptide
  MOD_RES (31)..(32): Xaa is C or S

SEQ ID NO: 12166 - protein, 34 aa, Artificial Sequence; identical to SEQ ID NO: 4737
  GFR-binding peptide
  MOD_RES (1)..(3): Xaa is C or S

SEQ ID NO: 12167 - protein, 36 aa, Artificial Sequence
  GFR-binding peptide
  MOD_RES (32)..(33): Xaa is C or S
SRVVMNNSLQEIVNSSDDYYVVPLPELKTPAXXPKP

SEQ ID NO: 12168 - protein, 34 aa, Artificial Sequence; identical to SEQ ID NO: 4738
  GFR-binding peptide
  MOD_RES (34)..(34): Xaa is C or S
  MOD_RES (12)..(13)..(14)..(15)..(16): Xaa is A or G
  MOD_RES (17)..(18)..(19)..(20): Xaa is A or G or is absent

SEQ ID NO: 12169 - protein, 38 aa, Artificial Sequence
  GFR-binding peptide
  MOD_RES (1)..(35)..(36): Xaa is C or S
  MOD_RES (13)..(14)..(15)..(16)..(17): Xaa is A or G
  MOD_RES (18)..(19)..(20)..(21): Xaa is A or G or is absent
XSEVVMDRYKKLXXXXXXXXXFYLISIANLRTPVXXTP

SEQ ID NO: 12170 - protein, 36 aa, Artificial Sequence
  GFR-binding peptide
  MOD_RES (1)..(33)..(34): Xaa is C or S
XSEVVMDNSLQEVVNNASDYYVIPLPELRTPVXXTP

SEQ ID NO: 12171 - protein, 39 aa, Artificial Sequence; identical to SEQ ID NO: 4744
  GFR-binding peptide
  MOD_RES (2)..(34)..(35): Xaa is C or S

SEQ ID NO: 12172 - protein, 38 aa, Artificial Sequence
  GFR-binding peptide
  MOD_RES (2)..(36)..(37): Xaa is C or S
  MOD_RES (14)..(15)..(16)..(17)..(18): Xaa is A or G
  MOD_RES (19)..(20)..(21)..(22): Xaa is A or G or is absent
GXGEVVMDNSLQEXXXXXXXXXYYVMPLPELETPVXXA

SEQ ID NO: 12173 - protein, 38 aa, Artificial Sequence
  GFR-binding peptide
  MOD_RES (1)..(33)..(34): Xaa is C or S
XARVVMNEYQKYIVNSSDDIFLVSIPSLQTPAXXPKPV

SEQ ID NO: 12174 - protein, 39 aa, Artificial Sequence
  GFR-binding peptide
  MOD_RES (2)..(36)..(37): Xaa is C or S
  MOD_RES (14)..(15)..(16)..(17)..(18): Xaa is A or G
  MOD_RES (19)..(20)..(21)..(22): Xaa is A or G or is absent
GXGEVVMENSLQEXXXXXXXXXYYVMPLPELETPVXXAK

SEQ ID NO: 12175 - protein, 39 aa, Artificial Sequence
  GFR-binding peptide
  MOD_RES (34)..(35): Xaa is C or S
  MOD_RES (12)..(13)..(14)..(15)..(16): Xaa is A or G
  MOD_RES (17)..(18)..(19)..(20): Xaa is A or G or is absent
SEVVMDNSLQEXXXXXXXXXYYVIPLPELRTPVXXTPPT

SEQ ID NO: 12176 - protein, 41 aa, Artificial Sequence
  GFR-binding peptide
  MOD_RES (2)..(35)..(36): Xaa is C or S
  MOD_RES (13)..(14)..(15)..(16)..(17): Xaa is A or G
  MOD_RES (18)..(19)..(20)..(21): Xaa is A or G or is absent
KXSRVIMNSLQEXXXXXXXXXYYLITLPELAQPVXXPAASA

SEQ ID NO: 12177 - protein, 35 aa, Artificial Sequence
  GFR-binding peptide
  MOD_RES (1)..(34)..(35): Xaa is C or S
  MOD_RES (12)..(13)..(14)..(15)..(16): Xaa is A or G
  MOD_RES (17)..(18)..(19)..(20): Xaa is A or G or is absent
XSRVIMEYQKYXXXXXXXXXIFLISIPSLAQPVXX

SEQ ID NO: 12178 - protein, 40 aa, Artificial Sequence
  GFR-binding peptide
  MOD_RES (1)..(35)..(36): Xaa is C or S
  MOD_RES (13)..(14)..(15)..(16)..(17): Xaa is A or G
  MOD_RES (18)..(19)..(20)..(21): Xaa is A or G or is absent
XSEVVMDQYNKLXXXXXXXXXLYLISIASLRTPVXXTPPT

SEQ ID NO: 12179 - protein, 32 aa, Artificial Sequence
  GFR-binding peptide
  MOD_RES (1)..(1): Xaa is C or S
XARVVMNNSLQEIVNSSDDYYVVPLPELQTPA

SEQ ID NO: 12180 - protein, 33 aa, Artificial Sequence; identical to SEQ ID NO: 4745
  GFR-binding peptide
  MOD_RES (32)..(33): Xaa is C or S

SEQ ID NO: 12181 - protein, 40 aa, Artificial Sequence
  GFR-binding peptide
  MOD_RES (2)..(4)..(38)..(39): Xaa is C or S
  MOD_RES (16)..(17)..(18)..(19)..(20): Xaa is A or G
  MOD_RES (21)..(22)..(23)..(24): Xaa is A or G or is absent
RXGXSEVVMDNSLQEXXXXXXXXXYYVIPLPELRTPVXXT

SEQ ID NO: 12182 - protein, 41 aa, Artificial Sequence
  GFR-binding peptide
  MOD_RES (1)..(35)..(36): Xaa is C or S
  MOD_RES (13)..(14)..(15)..(16)..(17): Xaa is A or G
  MOD_RES (18)..(19)..(20)..(21): Xaa is A or G or is absent
XGEVVMENSLQEXXXXXXXXXYYVMPLPELETPVXXAKPIS

SEQ ID NO: 12183 - protein, 33 aa, Artificial Sequence
  GFR-binding peptide
  MOD_RES (31)..(32): Xaa is C or S
EVVMDEYQKYVVKENEDIFLMSIPSLETPVXXA

SEQ ID NO: 12184 - protein, 39 aa, Artificial Sequence
  GFR-binding peptide
  MOD_RES (33)..(34): Xaa is C or S
  MOD_RES (11)..(12)..(13)..(14)..(15): Xaa is A or G
  MOD_RES (16)..(17)..(18)..(19): Xaa is A or G or is absent
SKVVMNSLQEXXXXXXXXXYYLITLPELDQPVXXPSASA

SEQ ID NO: 12185 - protein, 39 aa, Artificial Sequence
  GFR-binding peptide
  MOD_RES (2)..(4)..(36)..(37): Xaa is C or S
HXGXARVVMNNSLQEIVNSSDDYYLVTLPELQTPAXXPK

SEQ ID NO: 12186 - protein, 34 aa, Artificial Sequence
  GFR-binding peptide
  MOD_RES (31)..(32): Xaa is C or S
EVVMDNSLQEVVNNASDYYLITLPELRTPVXXTP

SEQ ID NO: 12187 - protein, 36 aa, Artificial Sequence
  GFR-binding peptide
  MOD_RES (1)..(33)..(34): Xaa is C or S
XARVVMNNSLQEIVNSSDDYYVVPLPELQTPAXXPK

SEQ ID NO: 12188 - protein, 35 aa, Artificial Sequence
  GFR-binding peptide
  MOD_RES (2)..(4): Xaa is C or S
RXGXGEVVMEEYQKYVVKDYEDIFLMSIPSLETPV

SEQ ID NO: 12189 - protein, 32 aa, Artificial Sequence
  GFR-binding peptide
  MOD_RES (31)..(32): Xaa is C or S
SKVVMEYQKYVKPTRGVIFLISIPSLDQPVXX

SEQ ID NO: 12190 - protein, 39 aa, Artificial Sequence; identical to SEQ ID NO: 4751
  GFR-binding peptide
  MOD_RES (1)..(3)..(37)..(38): Xaa is C or S
  MOD_RES (15)..(16)..(17)..(18)..(19): Xaa is A or G
  MOD_RES (20)..(21)..(22)..(23): Xaa is A or G or is absent

SEQ ID NO: 12191 - protein, 37 aa, Artificial Sequence; identical to SEQ ID NO: 4752
  GFR-binding peptide
  MOD_RES (31)..(32): Xaa is C or S

SEQ ID NO: 12192 - protein, 35 aa, Artificial Sequence; identical to SEQ ID NO: 4754
  GFR-binding peptide
  MOD_RES (1)..(3)..(35): Xaa is C or S

SEQ ID NO: 12193 - protein, 31 aa, Artificial Sequence
  GFR-binding peptide
  MOD_RES (1)..(1): Xaa is C or S
XSRVIMNSLQEVKPKRGVYYVIPLPELAQPV

SEQ ID NO: 12194 - protein, 34 aa, Artificial Sequence
  GFR-binding peptide
  MOD_RES (1)..(33)..(34): Xaa is C or S
XGEVVMDEYQKYVVKENEDIFLMSIPSLETPVXX

SEQ ID NO: 12195 - protein, 31 aa, Artificial Sequence
  GFR-binding peptide
  MOD_RES (31)..(31): Xaa is C or S
SKVVMNSLQEVKPTRGVYYVIPLPELDQPVX

SEQ ID NO: 12196 - protein, 33 aa, Artificial Sequence; identical to SEQ ID NO: 4755
  GFR-binding peptide
  MOD_RES (31)..(32): Xaa is C or S

SEQ ID NO: 12197 - protein, 34 aa, Artificial Sequence
  GFR-binding peptide
  MOD_RES (31)..(31): Xaa is C or S
RVVMNEYQKYIVNSSDDIFLVSIPSLKTPAXTPK

SEQ ID NO: 12198 - protein, 35 aa, Artificial Sequence
  GFR-binding peptide
  MOD_RES (1)..(33)..(34): Xaa is C or S
XARVVMNNSLQEIVNSSDDYYLVTLPELQTPAXXP

SEQ ID NO: 12199 - protein, 38 aa, Artificial Sequence
  GFR-binding peptide
  MOD_RES (2)..(36)..(37): Xaa is C or S
  MOD_RES (14)..(15)..(16)..(17)..(18): Xaa is A or G
  MOD_RES (19)..(20)..(21)..(22): Xaa is A or G or is absent
GXSEVVMDNSLQEXXXXXXXXXYYVIPLPELRTPVXXT

SEQ ID NO: 12200 - protein, 37 aa, Artificial Sequence; identical to SEQ ID NO: 4757
  GFR-binding peptide
  MOD_RES (1)..(3)..(35)..(36): Xaa is C or S

SEQ ID NO: 12201 - protein, 34 aa, Artificial Sequence; identical to SEQ ID NO: 4758
  GFR-binding peptide
  MOD_RES (1)..(3): Xaa is C or S

SEQ ID NO: 12202 - protein, 39 aa, Artificial Sequence
  GFR-binding peptide
  MOD_RES (1)..(3)..(35)..(36): Xaa is C or S
XGXGEVVMDNSLQEVVKENEDYYVMPLPELETPVXXAKP

SEQ ID NO: 12203 - protein, 32 aa, Artificial Sequence; identical to SEQ ID NO: 4760
  GFR-binding peptide
  MOD_RES (32)..(32): Xaa is C or S

SEQ ID NO: 12204 - protein, 37 aa, Artificial Sequence
  GFR-binding peptide
  MOD_RES (33)..(34): Xaa is C or S
  MOD_RES (11)..(12)..(13)..(14)..(15): Xaa is A or G
  MOD_RES (16)..(17)..(18)..(19): Xaa is A or G or is absent
SKVIMEYQKYXXXXXXXXXIFLISIPSLDQSVXXPSA

SEQ ID NO: 12205 - protein, 34 aa, Artificial Sequence; identical to SEQ ID NO: 4761
  GFR-binding peptide
  MOD_RES (31)..(32): Xaa is C or S

SEQ ID NO: 12206 - protein, 40 aa, Artificial Sequence
  GFR-binding peptide
  MOD_RES (2)..(4)..(38)..(39): Xaa is C or S
  MOD_RES (16)..(17)..(18)..(19)..(20): Xaa is A or G
  MOD_RES (21)..(22)..(23)..(24): Xaa is A or G or is absent
RXGXGEVVMEEYQKYXXXXXXXXXIFLMSIPSLETPVXXA

SEQ ID NO: 12207 - protein, 40 aa, Artificial Sequence
  GFR-binding peptide
  MOD_RES (34)..(35): Xaa is C or S
  MOD_RES (12)..(13)..(14)..(15)..(16): Xaa is A or G
  MOD_RES (17)..(18)..(19)..(20): Xaa is A or G or is absent
ARVVMNNSLQEXXXXXXXXXYYVVPLPELQTPAXXPKPVT

SEQ ID NO: 12208 - protein, 38 aa, Artificial Sequence
  GFR-binding peptide
  MOD_RES (1)..(3)..(37): Xaa is C or S
  MOD_RES (15)..(16)..(17)..(18)..(19): Xaa is A or G
  MOD_RES (20)..(21)..(22)..(23): Xaa is A or G or is absent
XGXSRVVMNNSLQEXXXXXXXXXYYVVPLPELKTPAXT

SEQ ID NO: 12209 - protein, 33 aa, Artificial Sequence; identical to SEQ ID NO: 4770
  GFR-binding peptide
  MOD_RES (1)..(3): Xaa is C or S

SEQ ID NO: 12210 - protein, 40 aa, Artificial Sequence; identical to SEQ ID NO: 4771
  GFR-binding peptide
  MOD_RES (1)..(3)..(37)..(38): Xaa is C or S
  MOD_RES (15)..(16)..(17)..(18)..(19): Xaa is A or G
  MOD_RES (20)..(21)..(22)..(23): Xaa is A or G or is absent

SEQ ID NO: 12211 - protein, 37 aa, Artificial Sequence
  GFR-binding peptide
  MOD_RES (2)..(4)..(36)..(37): Xaa is C or S
RXGXSEVVMDNSLQEVVNNASDYYLITLPELRTPVXX

SEQ ID NO: 12212 - protein, 39 aa, Artificial Sequence; identical to SEQ ID NO: 4773
  GFR-binding peptide
  MOD_RES (1)..(3)..(34)..(35): Xaa is C or S

SEQ ID NO: 12213 - protein, 37 aa, Artificial Sequence
  GFR-binding peptide
  MOD_RES (2)..(34)..(35): Xaa is C or S
GXSEVVMDRYKKLVVNNASDFYLISIANLRTPVXXTP

SEQ ID NO: 12214 - protein, 40 aa, Artificial Sequence; identical to SEQ ID NO: 4777
  GFR-binding peptide
  MOD_RES (2)..(4)..(35)..(36): Xaa is C or S

SEQ ID NO: 12215 - protein, 36 aa, Artificial Sequence
  GFR-binding peptide
  MOD_RES (1)..(32)..(33): Xaa is C or S
XSRVIMNSLQEVKPKRGVYYLITLPELAQPVXXPAA

SEQ ID NO: 12216 - protein, 39 aa, Artificial Sequence; identical to SEQ ID NO: 4779
  GFR-binding peptide
  MOD_RES (1)..(3)..(35)..(36): Xaa is C or S

SEQ ID NO: 12217 - protein, 33 aa, Artificial Sequence; identical to SEQ ID NO: 4783
  GFR-binding peptide
  MOD_RES (31)..(32): Xaa is C or S

SEQ ID NO: 12218 - protein, 36 aa, Artificial Sequence
  GFR-binding peptide
  MOD_RES (2)..(35)..(36): Xaa is C or S
  MOD_RES (13)..(14)..(15)..(16)..(17): Xaa is A or G
  MOD_RES (18)..(19)..(20)..(21): Xaa is A or G or is absent
KXSKVIMEYQKYXXXXXXXXXIFLISIPSLDQSVXX

SEQ ID NO: 12219 - protein, 34 aa, Artificial Sequence
  GFR-binding peptide
  MOD_RES (2)..(2): Xaa is C or S
  MOD_RES (13)..(14)..(15)..(16)..(17): Xaa is A or G
  MOD_RES (18)..(19)..(20)..(21): Xaa is A or G or is absent
KXSKVVMEYQKYXXXXXXXXXIFLISIPSLDQPV

SEQ ID NO: 12220 - protein, 36 aa, Artificial Sequence
  GFR-binding peptide
  MOD_RES (32)..(33): Xaa is C or S
GEVVMENSLQEVVKDYEDYYVMPLPELETPVXXAKP

SEQ ID NO: 12221 - protein, 34 aa, Artificial Sequence
  GFR-binding peptide
  MOD_RES (31)..(32): Xaa is C or S
EVVMENSLQEVVKDYEDYYVMPLPELETPVXXAK

SEQ ID NO: 12222 - protein, 35 aa, Artificial Sequence
  GFR-binding peptide
  MOD_RES (2)..(35): Xaa is C or S
  MOD_RES (13)..(14)..(15)..(16)..(17): Xaa is A or G
  MOD_RES (18)..(19)..(20)..(21): Xaa is A or G or is absent
KXSKVIMEYQKYXXXXXXXXXIFLISIPSLDQSVX

SEQ ID NO: 12223 - protein, 35 aa, Artificial Sequence; identical to SEQ ID NO: 4789
  GFR-binding peptide
  MOD_RES (1)..(35): Xaa is C or S
  MOD_RES (13)..(14)..(15)..(16)..(17): Xaa is A or G
  MOD_RES (18)..(19)..(20)..(21): Xaa is A or G or is absent

SEQ ID NO: 12224 - protein, 34 aa, Artificial Sequence
  GFR-binding peptide
  MOD_RES (31)..(32): Xaa is C or S
EVVMDRYKKLVVNNASDFYLISIANLRTPVXXTP

SEQ ID NO: 12225 - protein, 39 aa, Artificial Sequence
  GFR-binding peptide
  MOD_RES (2)..(4)..(38)..(39): Xaa is C or S
  MOD_RES (16)..(17)..(18)..(19)..(20): Xaa is A or G
  MOD_RES (21)..(22)..(23)..(24): Xaa is A or G or is absent
RXGXSEVVMDNSLQEXXXXXXXXXYYLITLPELRTPVXX

SEQ ID NO: 12226 - protein, 38 aa, Artificial Sequence; identical to SEQ ID NO: 4795
  GFR-binding peptide
  MOD_RES (2)..(4)..(38): Xaa is C or S
  MOD_RES (16)..(17)..(18)..(19)..(20): Xaa is A or G
  MOD_RES (21)..(22)..(23)..(24): Xaa is A or G or is absent

SEQ ID NO: 12227 - protein, 38 aa, Artificial Sequence; identical to SEQ ID NO: 4796
  GFR-binding peptide
  MOD_RES (2)..(33)..(34): Xaa is C or S

SEQ ID NO: 12228 - protein, 33 aa, Artificial Sequence
  GFR-binding peptide
  MOD_RES (1)..(33): Xaa is C or S
XGEVVMENSLQEVVKDYEDYYVMPLPELETPVX

SEQ ID NO: 12229 - protein, 43 aa, Artificial Sequence
  GFR-binding peptide
  MOD_RES (2)..(4)..(37)..(38): Xaa is C or S
  MOD_RES (15)..(16)..(17)..(18)..(19): Xaa is A or G
  MOD_RES (20)..(21)..(22)..(23): Xaa is A or G or is absent
SXKXSKVIMNSLQEXXXXXXXXXYYLITLPELDQSVXXPSASA

SEQ ID NO: 12230 - protein, 36 aa, Artificial Sequence
  GFR-binding peptide
  MOD_RES (1)..(33)..(34): Xaa is C or S
XGEVVMENSLQEVVKDYEDYYVMPLPELETPVXXAK

SEQ ID NO: 12231 - protein, 34 aa, Artificial Sequence
  GFR-binding peptide
  MOD_RES (31)..(32): Xaa is C or S
RVVMNNSLQEIVNSSDDYYVVPLPELKTPAXXPK

SEQ ID NO: 12232 - protein, 36 aa, Artificial Sequence; identical to SEQ ID NO: 4799
  GFR-binding peptide
  MOD_RES (31)..(32): Xaa is C or S

SEQ ID NO: 12233 - protein, 36 aa, Artificial Sequence
  GFR-binding peptide
  MOD_RES (31)..(32): Xaa is C or S
RVVMNNSLQEIVNSSDDYYVVPLPELKTPAXXPKPV

SEQ ID NO: 12234 - protein, 39 aa, Artificial Sequence
  GFR-binding peptide
  MOD_RES (2)..(4)..(38)..(39): Xaa is C or S
  MOD_RES (16)..(17)..(18)..(19)..(20): Xaa is A or G
  MOD_RES (21)..(22)..(23)..(24): Xaa is A or G or is absent
RXGXGEVVMDEYQKYXXXXXXXXXIFLMSIPSLETPVXX

SEQ ID NO: 12235 - protein, 34 aa, Artificial Sequence; identical to SEQ ID NO: 4805
  GFR-binding peptide
  MOD_RES (31)..(32): Xaa is C or S

SEQ ID NO: 12236 - protein, 36 aa, Artificial Sequence
  GFR-binding peptide
  MOD_RES (2)..(34)..(35): Xaa is C or S
GXGEVVMDNSLQEVVKENEDYYLMTLPELETPVXXA

SEQ ID NO: 12237 - protein, 40 aa, Artificial Sequence
  GFR-binding peptide
  MOD_RES (1)..(35)..(36): Xaa is C or S
  MOD_RES (13)..(14)..(15)..(16)..(17): Xaa is A or G
  MOD_RES (18)..(19)..(20)..(21): Xaa is A or G or is absent
XSRVVMNNSLQEXXXXXXXXXYYVVPLPELKTPAXXPKPV

SEQ ID NO: 12238 - protein, 40 aa, Artificial Sequence
  GFR-binding peptide
  MOD_RES (2)..(36)..(37): Xaa is C or S
  MOD_RES (14)..(15)..(16)..(17)..(18): Xaa is A or G
  MOD_RES (19)..(20)..(21)..(22): Xaa is A or G or is absent
GXGEVVMENSLQEXXXXXXXXXYYVMPLPELETPVXXAKP

SEQ ID NO: 12239 - protein, 38 aa, Artificial Sequence
  GFR-binding peptide
  MOD_RES (1)..(3)..(36)..(37): Xaa is C or S
  MOD_RES (14)..(15)..(16)..(17)..(18): Xaa is A or G
  MOD_RES (19)..(20)..(21)..(22): Xaa is A or G or is absent
XKXSKVIMNSLQEXXXXXXXXXYYVIPLPELDQSVXXP

SEQ ID NO: 12240 - protein, 39 aa, Artificial Sequence
  GFR-binding peptide
  MOD_RES (1)..(33)..(34): Xaa is C or S
XSEVVMDNSLQEVVNNASDYYVIPLPELRTPVXXTPPTS

SEQ ID NO: 12241 - protein, 35 aa, Artificial Sequence
  GFR-binding peptide
  MOD_RES (34)..(35): Xaa is C or S
  MOD_RES (12)..(13)..(14)..(15)..(16): Xaa is A or G
  MOD_RES (17)..(18)..(19)..(20): Xaa is A or G or is absent
SEVVMDNSLQEXXXXXXXXXYYLITLPELRTPVXX

SEQ ID NO: 12242 - protein, 39 aa, Artificial Sequence
  GFR-binding peptide
  MOD_RES (2)..(4)..(35)..(36): Xaa is C or S
SXKXSKVVMNSLQEVKPTRGVYYVIPLPELDQPVXXPSA

SEQ ID NO: 12243 - protein, 39 aa, Artificial Sequence
  GFR-binding peptide
  MOD_RES (1)..(33)..(34): Xaa is C or S
XSRVVMNEYQKYIVNSSDDIFLVSIPSLKTPAXXPKPVY

SEQ ID NO: 12244 - protein, 44 aa, Artificial Sequence
  GFR-binding peptide
  MOD_RES (2)..(4)..(38)..(39): Xaa is C or S
  MOD_RES (16)..(17)..(18)..(19)..(20): Xaa is A or G
  MOD_RES (21)..(22)..(23)..(24): Xaa is A or G or is absent
RXGXSEVVMDNSLQEXXXXXXXXXYYLITLPELRTPVXXTPPTS

SEQ ID NO: 12245 - protein, 38 aa, Artificial Sequence
  GFR-binding peptide
  MOD_RES (1)..(3)..(34)..(35): Xaa is C or S
XKXSKVVMNSLQEVKPTRGVYYLITLPELDQPVXXPSA

SEQ ID NO: 12246 - protein, 37 aa, Artificial Sequence
  GFR-binding peptide
  MOD_RES (1)..(3)..(36)..(37): Xaa is C or S
  MOD_RES (14)..(15)..(16)..(17)..(18): Xaa is A or G
  MOD_RES (19)..(20)..(21)..(22): Xaa is A or G or is absent
XKXSRVIMNSLQEXXXXXXXXXYYVIPLPELAQPVXX

SEQ ID NO: 12247 - protein, 37 aa, Artificial Sequence
  GFR-binding peptide
  MOD_RES (2)..(34)..(35): Xaa is C or S
GXSRVVMNNSLQEIVNSSDDYYVVPLPELKTPAXXPK

SEQ ID NO: 12248 - protein, 37 aa, Artificial Sequence
  GFR-binding peptide
  MOD_RES (31)..(32): Xaa is C or S
SKVIMNSLQEIKPTKGIYYVIPLPELDQSVXXPSASA

SEQ ID NO: 12249 - protein, 37 aa, Artificial Sequence; identical to SEQ ID NO: 4814
  GFR-binding peptide
  MOD_RES (31)..(32): Xaa is C or S

SEQ ID NO: 12250 - protein, 38 aa, Artificial Sequence
  GFR-binding peptide
  MOD_RES (34)..(35): Xaa is C or S
  MOD_RES (12)..(13)..(14)..(15)..(16): Xaa is A or G
  MOD_RES (17)..(18)..(19)..(20): Xaa is A or G or is absent
GEVVMEEYQKYXXXXXXXXXIFLMSIPSLETPVXXAKP

SEQ ID NO: 12251 - protein, 32 aa, Artificial Sequence
  GFR-binding peptide
  MOD_RES (32)..(32): Xaa is C or S
SEVVMDNSLQEVVNNASDYYLITLPELRTPVX

SEQ ID NO: 12252 - protein, 39 aa, Artificial Sequence
  GFR-binding peptide
  MOD_RES (1)..(3)..(35)..(36): Xaa is C or S
XGXGEVVMENSLQEVVKDYEDYYLMTLPELETPVXXAKP

SEQ ID NO: 12253 - protein, 36 aa, Artificial Sequence; identical to SEQ ID NO: 4818
  GFR-binding peptide
  MOD_RES (33)..(34): Xaa is C or S
  MOD_RES (11)..(12)..(13)..(14)..(15): Xaa is A or G
  MOD_RES (16)..(17)..(18)..(19): Xaa is A or G or is absent

SEQ ID NO: 12254 - protein, 37 aa, Artificial Sequence; identical to SEQ ID NO: 4819
  GFR-binding peptide
  MOD_RES (33)..(34): Xaa is C or S
  MOD_RES (11)..(12)..(13)..(14)..(15): Xaa is A or G
  MOD_RES (16)..(17)..(18)..(19): Xaa is A or G or is absent

SEQ ID NO: 12255 - protein, 41 aa, Artificial Sequence
  GFR-binding peptide
  MOD_RES (2)..(36)..(37): Xaa is C or S
  MOD_RES (14)..(15)..(16)..(17)..(18): Xaa is A or G
  MOD_RES (19)..(20)..(21)..(22): Xaa is A or G or is absent
GXSRVVMNEYQKYXXXXXXXXXIFLVSIPSLKTPAXXPKPV

SEQ ID NO: 12256 - protein, 37 aa, Artificial Sequence; identical to SEQ ID NO: 4825
  GFR-binding peptide
  MOD_RES (32)..(33): Xaa is C or S

SEQ ID NO: 12257 - protein, 33 aa, Artificial Sequence; identical to SEQ ID NO: 4827
  GFR-binding peptide
  MOD_RES (1)..(32)..(33): Xaa is C or S

SEQ ID NO: 12258 - protein, 36 aa, Artificial Sequence; identical to SEQ ID NO: 4829
  GFR-binding peptide
  MOD_RES (2)..(34)..(35): Xaa is C or S

SEQ ID NO: 12259 - protein, 42 aa, Artificial Sequence
  GFR-binding peptide
  MOD_RES (2)..(4)..(36)..(37): Xaa is C or S
RXGXSEVVMDQYNKLVVNNASDLYLISIASLRTPVXXTPPTS

SEQ ID NO: 12260 - protein, 33 aa, Artificial Sequence; identical to SEQ ID NO: 4831
  GFR-binding peptide
  MOD_RES (2)..(33): Xaa is C or S

SEQ ID NO: 12261 - protein, 35 aa, Artificial Sequence
  GFR-binding peptide
  MOD_RES (1)..(35): Xaa is C or S
  MOD_RES (13)..(14)..(15)..(16)..(17): Xaa is A or G
  MOD_RES (18)..(19)..(20)..(21): Xaa is A or G or is absent
XSEVVMDQYNKLXXXXXXXXXLYLISIASLRTPVX

SEQ ID NO: 12262 - protein, 37 aa, Artificial Sequence; identical to SEQ ID NO: 4832
  GFR-binding peptide
  MOD_RES (32)..(33): Xaa is C or S

SEQ ID NO: 12263 - protein, 32 aa, Artificial Sequence
  GFR-binding peptide
  MOD_RES (1)..(1): Xaa is C or S
XGEVVMEEYQKYVVKDYEDIFLMSIPSLETPV

SEQ ID NO: 12264 - protein, 38 aa, Artificial Sequence
  GFR-binding peptide
  MOD_RES (2)..(4)..(36)..(37): Xaa is C or S
RXGXSEVVMDQYNKLVVNNASDLYLISIASLRTPVXXT

SEQ ID NO: 12265 - protein, 39 aa, Artificial Sequence
  GFR-binding peptide
  MOD_RES (2)..(4)..(38)..(39): Xaa is C or S
  MOD_RES (16)..(17)..(18)..(19)..(20): Xaa is A or G
  MOD_RES (21)..(22)..(23)..(24): Xaa is A or G or is absent
HXGXARVVMNNSLQEXXXXXXXXXYYVVPLPELQTPAXX

SEQ ID NO: 12266 - protein, 41 aa, Artificial Sequence
  GFR-binding peptide
  MOD_RES (1)..(3)..(37)..(38): Xaa is C or S
  MOD_RES (15)..(16)..(17)..(18)..(19): Xaa is A or G
  MOD_RES (20)..(21)..(22)..(23): Xaa is A or G or is absent
XGXSEVVMDNSLQEXXXXXXXXXYYLITLPELRTPVXXTPP

SEQ ID NO: 12267 - protein, 38 aa, Artificial Sequence; identical to SEQ ID NO: 4837
  GFR-binding peptide
  MOD_RES (2)..(4)..(37)..(38): Xaa is C or S
  MOD_RES (15)..(16)..(17)..(18)..(19): Xaa is A or G
  MOD_RES (20)..(21)..(22)..(23): Xaa is A or G or is absent

SEQ ID NO: 12268 - protein, 39 aa, Artificial Sequence; identical to SEQ ID NO: 4838
  GFR-binding peptide
  MOD_RES (1)..(33)..(34): Xaa is C or S

SEQ ID NO: 12269 - protein, 36 aa, Artificial Sequence; identical to SEQ ID NO: 4839
  GFR-binding peptide
  MOD_RES (31)..(32): Xaa is C or S

SEQ ID NO: 12270 - protein, 43 aa, Artificial Sequence
  GFR-binding peptide
  MOD_RES (1)..(3)..(37)..(38): Xaa is C or S
  MOD_RES (15)..(16)..(17)..(18)..(19): Xaa is A or G
  MOD_RES (20)..(21)..(22)..(23): Xaa is A or G or is absent
XGXARVVMNNSLQEXXXXXXXXXYYVVPLPELQTPAXXPKPVT

SEQ ID NO: 12271 - protein, 34 aa, Artificial Sequence
  GFR-binding peptide
  MOD_RES (33)..(34): Xaa is C or S
  MOD_RES (11)..(12)..(13)..(14)..(15): Xaa is A or G
  MOD_RES (16)..(17)..(18)..(19): Xaa is A or G or is absent
SKVVMNSLQEXXXXXXXXXYYVIPLPELDQPVXX

SEQ ID NO: 12272 - protein, 37 aa, Artificial Sequence; identical to SEQ ID NO: 4841
  GFR-binding peptide
  MOD_RES (31)..(32): Xaa is C or S

SEQ ID NO: 12273 - protein, 35 aa, Artificial Sequence
  GFR-binding peptide
  MOD_RES (2)..(34)..(35): Xaa is C or S
GXSRVVMNNSLQEIVNSSDDYYVVPLPELKTPAXX

SEQ ID NO: 12274 - protein, 37 aa, Artificial Sequence; identical to SEQ ID NO: 4844
  GFR-binding peptide
  MOD_RES (33)..(34): Xaa is C or S
  MOD_RES (11)..(12)..(13)..(14)..(15): Xaa is A or G
  MOD_RES (16)..(17)..(18)..(19): Xaa is A or G or is absent

SEQ ID NO: 12275 - protein, 33 aa, Artificial Sequence
  GFR-binding peptide
  MOD_RES (33)..(33): Xaa is C or S
  MOD_RES (11)..(12)..(13)..(14)..(15): Xaa is A or G
  MOD_RES (16)..(17)..(18)..(19): Xaa is A or G or is absent
EVVMDQYNKLXXXXXXXXXLYLISIASLRTPVX

SEQ ID NO: 12276 - protein, 33 aa, Artificial Sequence
  GFR-binding peptide
  MOD_RES (32)..(32): Xaa is C or S
SRVVMNNSLQEIVNSSDDYYVVPLPELKTPAXT

SEQ ID NO: 12277 - protein, 37 aa, Artificial Sequence
  GFR-binding peptide
  MOD_RES (1)..(3)..(36)..(37): Xaa is C or S
  MOD_RES (14)..(15)..(16)..(17)..(18): Xaa is A or G
  MOD_RES (19)..(20)..(21)..(22): Xaa is A or G or is absent
XKXSKVVMNSLQEXXXXXXXXXYYLITLPELDQPVXX

SEQ ID NO: 12278 - protein, 39 aa, Artificial Sequence; identical to SEQ ID NO: 4849
  GFR-binding peptide
  MOD_RES (2)..(4)..(35)..(36): Xaa is C or S

SEQ ID NO: 12279 - protein, 39 aa, Artificial Sequence
  GFR-binding peptide
  MOD_RES (2)..(33)..(34): Xaa is C or S
KXSRVIMNSLQEVKPKRGVYYLITLPELAQPVXXPAASA

SEQ ID NO: 12280 - protein, 34 aa, Artificial Sequence
  GFR-binding peptide
  MOD_RES (2)..(4): Xaa is C or S
SXKXSRVIMEYQKYVKPKRGVIFLISIPSLAQPV

SEQ ID NO: 12281 - protein, 39 aa, Artificial Sequence
  GFR-binding peptide
  MOD_RES (2)..(4)..(36)..(37): Xaa is C or S
RXGXSEVVMDQYNKLVVNNASDLYLISIASLRTPVXXTP

SEQ ID NO: 12282 - protein, 32 aa, Artificial Sequence; identical to SEQ ID NO: 4852
  GFR-binding peptide
  MOD_RES (32)..(32): Xaa is C or S

SEQ ID NO: 12283 - protein, 37 aa, Artificial Sequence; identical to SEQ ID NO: 4854
  GFR-binding peptide
  MOD_RES (1)..(3)..(35)..(36): Xaa is C or S

SEQ ID NO: 12284 - protein, 38 aa, Artificial Sequence; identical to SEQ ID NO: 4855
  GFR-binding peptide
  MOD_RES (1)..(33)..(34): Xaa is C or S

SEQ ID NO: 12285 - protein, 35 aa, Artificial Sequence
  GFR-binding peptide
  MOD_RES (31)..(32): Xaa is C or S
EVVMDEYQKYVVNNASDIFLISIPSLRTPVXXTPP

SEQ ID NO: 12286 - protein, 39 aa, Artificial Sequence
  GFR-binding peptide
  MOD_RES (1)..(3)..(37)..(38): Xaa is C or S
  MOD_RES (15)..(16)..(17)..(18)..(19): Xaa is A or G
  MOD_RES (20)..(21)..(22)..(23): Xaa is A or G or is absent
XGXARVVMNNSLQEXXXXXXXXXYYVVPLPELQTPAXXP

SEQ ID NO: 12287 - protein, 37 aa, Artificial Sequence; identical to SEQ ID NO: 4858
  GFR-binding peptide
  MOD_RES (33)..(34): Xaa is C or S
  MOD_RES (11)..(12)..(13)..(14)..(15): Xaa is A or G
  MOD_RES (16)..(17)..(18)..(19): Xaa is A or G or is absent

SEQ ID NO: 12288 - protein, 41 aa, Artificial Sequence; identical to SEQ ID NO: 4860
  GFR-binding peptide
  MOD_RES (1)..(35)..(36): Xaa is C or S
  MOD_RES (13)..(14)..(15)..(16)..(17): Xaa is A or G
  MOD_RES (18)..(19)..(20)..(21): Xaa is A or G or is absent

SEQ ID NO: 12289 - protein, 36 aa, Artificial Sequence
  GFR-binding peptide
  MOD_RES (1)..(3)..(34)..(35): Xaa is C or S
XKXSRVIMNSLQEVKPKRGVYYLITLPELAQPVXXP

SEQ ID NO: 12290 - protein, 41 aa, Artificial Sequence; identical to SEQ ID NO: 4861
  GFR-binding peptide
  MOD_RES (2)..(4)..(38)..(39): Xaa is C or S
  MOD_RES (16)..(17)..(18)..(19)..(20): Xaa is A or G
  MOD_RES (21)..(22)..(23)..(24): Xaa is A or G or is absent

SEQ ID NO: 12291 - protein, 32 aa, Artificial Sequence; identical to SEQ ID NO: 4862
  GFR-binding peptide
  MOD_RES (32)..(32): Xaa is C or S

SEQ ID NO: 12292 - protein, 40 aa, Artificial Sequence; identical to SEQ ID NO: 4864
  GFR-binding peptide
  MOD_RES (2)..(35)..(36): Xaa is C or S
  MOD_RES (13)..(14)..(15)..(16)..(17): Xaa is A or G
  MOD_RES (18)..(19)..(20)..(21): Xaa is A or G or is absent

SEQ ID NO: 12293 - protein, 36 aa, Artificial Sequence; identical to SEQ ID NO: 4865
  GFR-binding peptide
  MOD_RES (1)..(3)..(34)..(35): Xaa is C or S

SEQ ID NO: 12294 - protein, 37 aa, Artificial Sequence; identical to SEQ ID NO: 4867
  GFR-binding peptide
  MOD_RES (2)..(4): Xaa is C or S
  MOD_RES (16)..(17)..(18)..(19)..(20): Xaa is A or G
  MOD_RES (21)..(22)..(23)..(24): Xaa is A or G or is absent

SEQ ID NO: 12295 - protein, 36 aa, Artificial Sequence; identical to SEQ ID NO: 4868
  GFR-binding peptide
  MOD_RES (1)..(3)..(34)..(35): Xaa is C or S

SEQ ID NO: 12296 - protein, 40 aa, Artificial Sequence; identical to SEQ ID NO: 4870
  GFR-binding peptide
  MOD_RES (2)..(34)..(35): Xaa is C or S

SEQ ID NO: 12297 - protein, 39 aa, Artificial Sequence; identical to SEQ ID NO: 4871
  GFR-binding peptide
  MOD_RES (2)..(4)..(36)..(37): Xaa is C or S

SEQ ID NO: 12298 - protein, 34 aa, Artificial Sequence
  GFR-binding peptide
  MOD_RES (2)..(2): Xaa is C or S
  MOD_RES (13)..(14)..(15)..(16)..(17): Xaa is A or G
  MOD_RES (18)..(19)..(20)..(21): Xaa is A or G or is absent
KXSKVIMNSLQEXXXXXXXXXYYVIPLPELDQSV

SEQ ID NO: 12299 - protein, 38 aa, Artificial Sequence
  GFR-binding peptide
  MOD_RES (1)..(33)..(34): Xaa is C or S
XARVVMNNSLQEIVNSSDDYYVVPLPELQTPAXXPKPV

SEQ ID NO: 12300 - protein, 38 aa, Artificial Sequence
  GFR-binding peptide
  MOD_RES (2)..(4)..(37)..(38): Xaa is C or S
  MOD_RES (15)..(16)..(17)..(18)..(19): Xaa is A or G
  MOD_RES (20)..(21)..(22)..(23): Xaa is A or G or is absent
SXKXSRVIMNSLQEXXXXXXXXXYYLITLPELAQPVXX

SEQ ID NO: 12301 - protein, 37 aa, Artificial Sequence
  GFR-binding peptide
  MOD_RES (1)..(33)..(34): Xaa is C or S
XSEVVMDNSLQEVVNNASDYYLITLPELRTPVXXTPP

SEQ ID NO: 12302 - protein, 35 aa, Artificial Sequence
  GFR-binding peptide
  MOD_RES (1)..(32)..(33): Xaa is C or S
XSRVIMNSLQEVKPKRGVYYLITLPELAQPVXXPA

SEQ ID NO: 12303 - protein, 35 aa, Artificial Sequence
  GFR-binding peptide
  MOD_RES (31)..(32): Xaa is C or S
EVVMDEYQKYVVKENEDIFLMSIPSLETPVXXAKP

SEQ ID NO: 12304 - protein, 32 aa, Artificial Sequence
  GFR-binding peptide
  MOD_RES (1)..(32): Xaa is C or S
XSKVVMNSLQEVKPTRGVYYVIPLPELDQPVX

SEQ ID NO: 12305 - protein, 36 aa, Artificial Sequence
  GFR-binding peptide
  MOD_RES (1)..(3)..(34)..(35): Xaa is C or S
XKXSKVIMNSLQEIKPTKGIYYVIPLPELDQSVXXP

SEQ ID NO: 12306 - protein, 35 aa, Artificial Sequence; identical to SEQ ID NO: 4875
  GFR-binding peptide
  MOD_RES (1)..(3): Xaa is C or S
  MOD_RES (14)..(15)..(16)..(17)..(18): Xaa is A or G
  MOD_RES (19)..(20)..(21)..(22): Xaa is A or G or is absent

SEQ ID NO: 12307 - protein, 31 aa, Artificial Sequence
  GFR-binding peptide
  MOD_RES (1)..(1): Xaa is C or S
XSKVIMNSLQEIKPTKGIYYVIPLPELDQSV

SEQ ID NO: 12308 - protein, 37 aa, Artificial Sequence
  GFR-binding peptide
  MOD_RES (1)..(3)..(35)..(36): Xaa is C or S
XGXARVVMNEYQKYIVNSSDDIFLVSIPSLQTPAXXP

SEQ ID NO: 12309 - protein, 40 aa, Artificial Sequence
  GFR-binding peptide
  MOD_RES (2)..(4)..(36)..(37): Xaa is C or S
HXGXARVVMNNSLQEIVNSSDDYYVVPLPELQTPAXXPKP

SEQ ID NO: 12310 - protein, 41 aa, Artificial Sequence
  GFR-binding peptide
  MOD_RES (2)..(4)..(36)..(37): Xaa is C or S
HXGXARVVMNNSLQEIVNSSDDYYLVTLPELQTPAXXPKPV

SEQ ID NO: 12311 - protein, 41 aa, Artificial Sequence; identical to SEQ ID NO: 4876
  GFR-binding peptide
  MOD_RES (1)..(3)..(35)..(36): Xaa is C or S

SEQ ID NO: 12312 - protein, 37 aa, Artificial Sequence; identical to SEQ ID NO: 4879
  GFR-binding peptide
  MOD_RES (1)..(32)..(33): Xaa is C or S

SEQ ID NO: 12313 - protein, 37 aa, Artificial Sequence; identical to SEQ ID NO: 4880
  GFR-binding peptide
  MOD_RES (2)..(4)..(35)..(36): Xaa is C or S

SEQ ID NO: 12314 - protein, 31 aa, Artificial Sequence; identical to SEQ ID NO: 4881
  GFR-binding peptide
  MOD_RES (31)..(31): Xaa is C or S

SEQ ID NO: 12315 - protein, 41 aa, Artificial Sequence
  GFR-binding peptide
  MOD_RES (2)..(4)..(38)..(39): Xaa is C or S
  MOD_RES (16)..(17)..(18)..(19)..(20): Xaa is A or G
  MOD_RES (21)..(22)..(23)..(24): Xaa is A or G or is absent
HXGXARVVMNEYQKYXXXXXXXXXIFLVSIPSLQTPAXXPK

SEQ ID NO: 12316 - protein, 41 aa, Artificial Sequence
  GFR-binding peptide
  MOD_RES (1)..(3)..(36)..(37): Xaa is C or S
  MOD_RES (14)..(15)..(16)..(17)..(18): Xaa is A or G
  MOD_RES (19)..(20)..(21)..(22): Xaa is A or G or is absent
XKXSKVVMEYQKYXXXXXXXXXIFLISIPSLDQPVXXPSAS

SEQ ID NO: 12317 - protein, 35 aa, Artificial Sequence
  GFR-binding peptide
  MOD_RES (32)..(33): Xaa is C or S
SRVVMNEYQKYIVNSSDDIFLVSIPSLKTPAXXPK

SEQ ID NO: 12318 - protein, 37 aa, Artificial Sequence
  GFR-binding peptide
  MOD_RES (2)..(36)..(37): Xaa is C or S
  MOD_RES (14)..(15)..(16)..(17)..(18): Xaa is A or G
  MOD_RES (19)..(20)..(21)..(22): Xaa is A or G or is absent
GXGEVVMDNSLQEXXXXXXXXXYYLMTLPELETPVXX

SEQ ID NO: 12319 - protein, 39 aa, Artificial Sequence; identical to SEQ ID NO: 4885
  GFR-binding peptide
  MOD_RES (2)..(4)..(36)..(37): Xaa is C or S

SEQ ID NO: 12320 - protein, 35 aa, Artificial Sequence
  GFR-binding peptide
  MOD_RES (1)..(32)..(33): Xaa is C or S
XSRVIMNSLQEVKPKRGVYYVIPLPELAQPVXXPA

SEQ ID NO: 12321 - protein, 40 aa, Artificial Sequence
  GFR-binding peptide
  MOD_RES (2)..(4)..(36)..(37): Xaa is C or S
HXGXSRVVMNNSLQEIVNSSDDYYVVPLPELKTPAXXPKP

SEQ ID NO: 12322 - protein, 34 aa, Artificial Sequence; identical to SEQ ID NO: 4886
  GFR-binding peptide
  MOD_RES (2)..(34): Xaa is C or S

SEQ ID NO: 12323 - protein, 35 aa, Artificial Sequence; identical to SEQ ID NO: 4888
  GFR-binding peptide
  MOD_RES (1)..(35): Xaa is C or S
  MOD_RES (13)..(14)..(15)..(16)..(17): Xaa is A or G
  MOD_RES (18)..(19)..(20)..(21): Xaa is A or G or is absent

SEQ ID NO: 12324 - protein, 38 aa, Artificial Sequence
  GFR-binding peptide
  MOD_RES (2)..(4)..(36)..(37): Xaa is C or S
RXGXGEVVMDEYQKYVVKENEDIFLMSIPSLETPVXXA

SEQ ID NO: 12325 - protein, 40 aa, Artificial Sequence
  GFR-binding peptide
  MOD_RES (1)..(34)..(35): Xaa is C or S
  MOD_RES (12)..(13)..(14)..(15)..(16): Xaa is A or G
  MOD_RES (17)..(18)..(19)..(20): Xaa is A or G or is absent
XSKVVMNSLQEXXXXXXXXXYYVIPLPELDQPVXXPSASA

SEQ ID NO: 12326 - protein, 39 aa, Artificial Sequence
  GFR-binding peptide
  MOD_RES (33)..(34): Xaa is C or S
  MOD_RES (11)..(12)..(13)..(14)..(15): Xaa is A or G
  MOD_RES (16)..(17)..(18)..(19): Xaa is A or G or is absent
RVVMNEYQKYXXXXXXXXXIFLVSIPSLQTPAXXPKPVT

SEQ ID NO: 12327 - protein, 42 aa, Artificial Sequence; identical to SEQ ID NO: 4890
  GFR-binding peptide
  MOD_RES (1)..(3)..(36)..(37): Xaa is C or S
  MOD_RES (14)..(15)..(16)..(17)..(18): Xaa is A or G
  MOD_RES (19)..(20)..(21)..(22): Xaa is A or G or is absent

SEQ ID NO: 12328 - protein, 41 aa, Artificial Sequence; identical to SEQ ID NO: 4891
  GFR-binding peptide
  MOD_RES (1)..(3)..(36)..(37): Xaa is C or S
  MOD_RES (14)..(15)..(16)..(17)..(18): Xaa is A or G
  MOD_RES (19)..(20)..(21)..(22): Xaa is A or G or is absent

SEQ ID NO: 12329 - protein, 37 aa, Artificial Sequence
  GFR-binding peptide
  MOD_RES (1)..(35)..(36): Xaa is C or S
  MOD_RES (13)..(14)..(15)..(16)..(17): Xaa is A or G
  MOD_RES (18)..(19)..(20)..(21): Xaa is A or G or is absent
XGEVVMENSLQEXXXXXXXXXYYLMTLPELETPVXXA

SEQ ID NO: 12330 - protein, 41 aa, Artificial Sequence; identical to SEQ ID NO: 4893
  GFR-binding peptide
  MOD_RES (1)..(3)..(37)..(38): Xaa is C or S
  MOD_RES (15)..(16)..(17)..(18)..(19): Xaa is A or G
  MOD_RES (20)..(21)..(22)..(23): Xaa is A or G or is absent

SEQ ID NO: 12331 - protein, 36 aa, Artificial Sequence
  GFR-binding peptide
  MOD_RES (1)..(33)..(34): Xaa is C or S
XGEVVMEEYQKYVVKDYEDIFLMSIPSLETPVXXAK

SEQ ID NO: 12332 - protein, 37 aa, Artificial Sequence
  GFR-binding peptide
  MOD_RES (34)..(34): Xaa is C or S
  MOD_RES (12)..(13)..(14)..(15)..(16): Xaa is A or G
  MOD_RES (17)..(18)..(19)..(20): Xaa is A or G or is absent
SRVVMNNSLQEXXXXXXXXXYYVVPLPELKTPAXTPK

SEQ ID NO: 12333 - protein, 37 aa, Artificial Sequence; identical to SEQ ID NO: 4895
  GFR-binding peptide
  MOD_RES (1)..(3)..(34)..(35): Xaa is C or S

SEQ ID NO: 12334 - protein, 40 aa, Artificial Sequence
  GFR-binding peptide
  MOD_RES (2)..(4)..(36)..(37): Xaa is C or S
RXGXGEVVMEEYQKYVVKDYEDIFLMSIPSLETPVXXAKP

SEQ ID NO: 12335 - protein, 36 aa, Artificial Sequence
  GFR-binding peptide
  MOD_RES (31)..(32): Xaa is C or S
SRVIMNSLQEVKPKRGVYYVIPLPELAQPVXXPAAS

SEQ ID NO: 12336 - protein, 35 aa, Artificial Sequence
  GFR-binding peptide
  MOD_RES (2)..(34)..(35): Xaa is C or S
GXARVVMNNSLQEIVNSSDDYYVVPLPELQTPAXX

SEQ ID NO: 12337 - protein, 39 aa, Artificial Sequence; identical to SEQ ID NO: 4897
  GFR-binding peptide
  MOD_RES (2)..(4)..(37)..(38): Xaa is C or S
  MOD_RES (15)..(16)..(17)..(18)..(19): Xaa is A or G
  MOD_RES (20)..(21)..(22)..(23): Xaa is A or G or is absent

SEQ ID NO: 12338 - protein, 35 aa, Artificial Sequence; identical to SEQ ID NO: 4899
  GFR-binding peptide
  MOD_RES (2)..(35): Xaa is C or S
  MOD_RES (13)..(14)..(15)..(16)..(17): Xaa is A or G
  MOD_RES (18)..(19)..(20)..(21): Xaa is A or G or is absent

SEQ ID NO: 12339 - protein, 39 aa, Artificial Sequence
  GFR-binding peptide
  MOD_RES (1)..(3)..(35)..(36): Xaa is C or S
XGXGEVVMDEYQKYVVKENEDIFLMSIPSLETPVXXAKP

SEQ ID NO: 12340 - protein, 35 aa, Artificial Sequence
  GFR-binding peptide
  MOD_RES (33)..(34): Xaa is C or S
  MOD_RES (11)..(12)..(13)..(14)..(15): Xaa is A or G
  MOD_RES (16)..(17)..(18)..(19): Xaa is A or G or is absent
EVVMDQYNKLXXXXXXXXXLYLISIASLRTPVXXT

SEQ ID NO: 12341 - protein, 37 aa, Artificial Sequence
  GFR-binding peptide
  MOD_RES (32)..(33): Xaa is C or S
SEVVMDNSLQEVVNNASDYYVIPLPELRTPVXXTPPT

SEQ ID NO: 12342 - protein, 35 aa, Artificial Sequence
  GFR-binding peptide
  MOD_RES (34)..(35): Xaa is C or S
  MOD_RES (12)..(13)..(14)..(15)..(16): Xaa is A or G
  MOD_RES (17)..(18)..(19)..(20): Xaa is A or G or is absent
GEVVMEEYQKYXXXXXXXXXIFLMSIPSLETPVXX

SEQ ID NO: 12343 - protein, 41 aa, Artificial Sequence
  GFR-binding peptide
  MOD_RES (2)..(36)..(37): Xaa is C or S
  MOD_RES (14)..(15)..(16)..(17)..(18): Xaa is A or G
  MOD_RES (19)..(20)..(21)..(22): Xaa is A or G or is absent
GXSEVVMDNSLQEXXXXXXXXXYYVIPLPELRTPVXXTPPT

SEQ ID NO: 12344 - protein, 37 aa, Artificial Sequence
  GFR-binding peptide
  MOD_RES (2)..(36)..(37): Xaa is C or S
  MOD_RES (14)..(15)..(16)..(17)..(18): Xaa is A or G
  MOD_RES (19)..(20)..(21)..(22): Xaa is A or G or is absent
GXSRVVMNEYQKYXXXXXXXXXIFLVSIPSLKTPAXX

SEQ ID NO: 12345 - protein, 42 aa, Artificial Sequence; identical to SEQ ID NO: 4906
  GFR-binding peptide
  MOD_RES (1)..(3)..(36)..(37): Xaa is C or S
  MOD_RES (14)..(15)..(16)..(17)..(18): Xaa is A or G
  MOD_RES (19)..(20)..(21)..(22): Xaa is A or G or is absent

SEQ ID NO: 12346 - protein, 34 aa, Artificial Sequence
  GFR-binding peptide
  MOD_RES (34)..(34): Xaa is C or S
  MOD_RES (12)..(13)..(14)..(15)..(16): Xaa is A or G
  MOD_RES (17)..(18)..(19)..(20): Xaa is A or G or is absent
SRVVMNNSLQEXXXXXXXXXYYLVTLPELKTPAX

SEQ ID NO: 12347 - protein, 32 aa, Artificial Sequence
  GFR-binding peptide
  MOD_RES (31)..(32): Xaa is C or S
EVVMENSLQEVVKDYEDYYVMPLPELETPVXX

SEQ ID NO: 12348 - protein, 32 aa, Artificial Sequence
  GFR-binding peptide
  MOD_RES (2)..(2): Xaa is C or S
KXSRVIMNSLQEVKPKRGVYYLITLPELAQPV

SEQ ID NO: 12349 - protein, 36 aa, Artificial Sequence
  GFR-binding peptide
  MOD_RES (1)..(3)..(34)..(35): Xaa is C or S
XKXSKVVMEYQKYVKPTRGVIFLISIPSLDQPVXXP

SEQ ID NO: 12350 - protein, 37 aa, Artificial Sequence
  GFR-binding peptide
  MOD_RES (34)..(35): Xaa is C or S
  MOD_RES (12)..(13)..(14)..(15)..(16): Xaa is A or G
  MOD_RES (17)..(18)..(19)..(20): Xaa is A or G or is absent
SEVVMDQYNKLXXXXXXXXXLYLISIASLRTPVXXTP

SEQ ID NO: 12351 - protein, 39 aa, Artificial Sequence
  GFR-binding peptide
  MOD_RES (1)..(33)..(34): Xaa is C or S
XARVVMNNSLQEIVNSSDDYYVVPLPELQTPAXXPKPVT

SEQ ID NO: 12352 - protein, 36 aa, Artificial Sequence
  GFR-binding peptide
  MOD_RES (2)..(36): Xaa is C or S
  MOD_RES (14)..(15)..(16)..(17)..(18): Xaa is A or G
  MOD_RES (19)..(20)..(21)..(22): Xaa is A or G or is absent
GXSEVVMDNSLQEXXXXXXXXXYYLITLPELRTPVX

SEQ ID NO: 12353 - protein, 40 aa, Artificial Sequence
  GFR-binding peptide
  MOD_RES (2)..(4)..(35)..(36): Xaa is C or S
SXKXSKVIMEYQKYIKPTKGIIFLISIPSLDQSVXXPSAS

SEQ ID NO: 12354 - protein, 34 aa, Artificial Sequence; identical to SEQ ID NO: 4913
  GFR-binding peptide
  MOD_RES (1)..(3)..(34): Xaa is C or S

SEQ ID NO: 12355 - protein, 39 aa, Artificial Sequence
  GFR-binding peptide
  MOD_RES (2)..(4)..(35)..(36): Xaa is C or S
SXKXSKVVMEYQKYVKPTRGVIFLISIPSLDQPVXXPSA

SEQ ID NO: 12356 - protein, 39 aa, Artificial Sequence; identical to SEQ ID NO: 4915
  GFR-binding peptide
  MOD_RES (2)..(33)..(34): Xaa is C or S

SEQ ID NO: 12357 - protein, 38 aa, Artificial Sequence; identical to SEQ ID NO: 4918
  GFR-binding peptide
  MOD_RES (2)..(35)..(36): Xaa is C or S
  MOD_RES (13)..(14)..(15)..(16)..(17): Xaa is A or G
  MOD_RES (18)..(19)..(20)..(21): Xaa is A or G or is absent

SEQ ID NO: 12358 - protein, 36 aa, Artificial Sequence
  GFR-binding peptide
  MOD_RES (33)..(34): Xaa is C or S
  MOD_RES (11)..(12)..(13)..(14)..(15): Xaa is A or G
  MOD_RES (16)..(17)..(18)..(19): Xaa is A or G or is absent
SKVIMEYQKYXXXXXXXXXIFLISIPSLDQSVXXPS

SEQ ID NO: 12359 - protein, 38 aa, Artificial Sequence
  GFR-binding peptide
  MOD_RES (2)..(4)..(38): Xaa is C or S
  MOD_RES (16)..(17)..(18)..(19)..(20): Xaa is A or G
  MOD_RES (21)..(22)..(23)..(24): Xaa is A or G or is absent
HXGXSRVVMNEYQKYXXXXXXXXXIFLVSIPSLKTPAX

SEQ ID NO: 12360 - protein, 35 aa, Artificial Sequence
  GFR-binding peptide
  MOD_RES (1)..(3): Xaa is C or S
  MOD_RES (14)..(15)..(16)..(17)..(18): Xaa is A or G
  MOD_RES (19)..(20)..(21)..(22): Xaa is A or G or is absent
XKXSKVIMEYQKYXXXXXXXXXIFLISIPSLDQSV

SEQ ID NO: 12361 - protein, 38 aa, Artificial Sequence
  GFR-binding peptide
  MOD_RES (1)..(35)..(36): Xaa is C or S
  MOD_RES (13)..(14)..(15)..(16)..(17): Xaa is A or G
  MOD_RES (18)..(19)..(20)..(21): Xaa is A or G or is absent
XGEVVMENSLQEXXXXXXXXXYYVMPLPELETPVXXAK

SEQ ID NO: 12362 - protein, 39 aa, Artificial Sequence; identical to SEQ ID NO: 4920
  GFR-binding peptide
  MOD_RES (2)..(4)..(38)..(39): Xaa is C or S
  MOD_RES (16)..(17)..(18)..(19)..(20): Xaa is A or G
  MOD_RES (21)..(22)..(23)..(24): Xaa is A or G or is absent

SEQ ID NO: 12363 - protein, 36 aa, Artificial Sequence
  GFR-binding peptide
  MOD_RES (2)..(35)..(36): Xaa is C or S
  MOD_RES (13)..(14)..(15)..(16)..(17): Xaa is A or G
  MOD_RES (18)..(19)..(20)..(21): Xaa is A or G or is absent
KXSKVVMNSLQEXXXXXXXXXYYLITLPELDQPVXX

SEQ ID NO: 12364 - protein, 44 aa, Artificial Sequence
  GFR-binding peptide
  MOD_RES (2)..(4)..(38)..(39): Xaa is C or S
  MOD_RES (16)..(17)..(18)..(19)..(20): Xaa is A or G
  MOD_RES (21)..(22)..(23)..(24): Xaa is A or G or is absent
HXGXARVVMNNSLQEXXXXXXXXXYYVVPLPELQTPAXXPKPVT

SEQ ID NO: 12365 - protein, 36 aa, Artificial Sequence
  GFR-binding peptide
  MOD_RES (1)..(35)..(36): Xaa is C or S
  MOD_RES (13)..(14)..(15)..(16)..(17): Xaa is A or G
  MOD_RES (18)..(19)..(20)..(21): Xaa is A or G or is absent
XSRVVMNNSLQEXXXXXXXXXYYLVTLPELKTPAXX

SEQ ID NO: 12366 - protein, 32 aa, Artificial Sequence; identical to SEQ ID NO: 4933
  GFR-binding peptide
  MOD_RES (1)..(1): Xaa is C or S

SEQ ID NO: 12367 - protein, 37 aa, Artificial Sequence
  GFR-binding peptide
  MOD_RES (31)..(32): Xaa is C or S
EVVMDNSLQEVVNNASDYYLITLPELRTPVXXTPPTS

SEQ ID NO: 12368 - protein, 36 aa, Artificial Sequence; identical to SEQ ID NO: 4935
  GFR-binding peptide
  MOD_RES (1)..(3): Xaa is C or S
  MOD_RES (15)..(16)..(17)..(18)..(19): Xaa is A or G
  MOD_RES (20)..(21)..(22)..(23): Xaa is A or G or is absent

SEQ ID NO: 12369 - protein, 38 aa, Artificial Sequence; identical to SEQ ID NO: 4936
  GFR-binding peptide
  MOD_RES (1)..(3)..(35)..(36): Xaa is C or S

SEQ ID NO: 12370 - protein, 37 aa, Artificial Sequence; identical to SEQ ID NO: 4938
  GFR-binding peptide
  MOD_RES (2)..(4)..(37): Xaa is C or S
  MOD_RES (15)..(16)..(17)..(18)..(19): Xaa is A or G
  MOD_RES (20)..(21)..(22)..(23): Xaa is A or G or is absent

SEQ ID NO: 12371 - protein, 37 aa, Artificial Sequence; identical to SEQ ID NO: 4943
  GFR-binding peptide
  MOD_RES (32)..(33): Xaa is C or S

SEQ ID NO: 12372 - protein, 36 aa, Artificial Sequence; identical to SEQ ID NO: 4944
  GFR-binding peptide
  MOD_RES (1)..(33)..(34): Xaa is C or S

SEQ ID NO: 12373 - protein, 37 aa, Artificial Sequence
  GFR-binding peptide
  MOD_RES (2)..(36)..(37): Xaa is C or S
  MOD_RES (14)..(15)..(16)..(17)..(18): Xaa is A or G
  MOD_RES (19)..(20)..(21)..(22): Xaa is A or G or is absent
GXARVVMNNSLQEXXXXXXXXXYYLVTLPELQTPAXX

SEQ ID NO: 12374 - protein, 35 aa, Artificial Sequence
  GFR-binding peptide
  MOD_RES (33)..(34): Xaa is C or S
  MOD_RES (11)..(12)..(13)..(14)..(15): Xaa is A or G
  MOD_RES (16)..(17)..(18)..(19): Xaa is A or G or is absent
EVVMENSLQEXXXXXXXXXYYLMTLPELETPVXXA

SEQ ID NO: 12375 - protein, 38 aa, Artificial Sequence
  GFR-binding peptide
  MOD_RES (2)..(4)..(36)..(37): Xaa is C or S
RXGXSEVVMDNSLQEVVNNASDYYLITLPELRTPVXXT

SEQ ID NO: 12376 - protein, 38 aa, Artificial Sequence
  GFR-binding peptide
  MOD_RES (1)..(3)..(37)..(38): Xaa is C or S
  MOD_RES (15)..(16)..(17)..(18)..(19): Xaa is A or G
  MOD_RES (20)..(21)..(22)..(23): Xaa is A or G or is absent
XGXGEVVMEEYQKYXXXXXXXXXIFLMSIPSLETPVXX

SEQ ID NO: 12377 - protein, 35 aa, Artificial Sequence
  GFR-binding peptide
  MOD_RES (1)..(33)..(34): Xaa is C or S
XSEVVMDNSLQEVVNNASDYYLITLPELRTPVXXT

SEQ ID NO: 12378 - protein, 34 aa, Artificial Sequence
  GFR-binding peptide
  MOD_RES (2)..(34): Xaa is C or S
GXSEVVMDQYNKLVVNNASDLYLISIASLRTPVX

SEQ ID NO: 12379 - protein, 41 aa, Artificial Sequence
  GFR-binding peptide
  MOD_RES (1)..(35)..(36): Xaa is C or S
  MOD_RES (13)..(14)..(15)..(16)..(17): Xaa is A or G
  MOD_RES (18)..(19)..(20)..(21): Xaa is A or G or is absent
XSEVVMDNSLQEXXXXXXXXXYYLITLPELRTPVXXTPPTS

SEQ ID NO: 12380 - protein, 34 aa, Artificial Sequence
  GFR-binding peptide
  MOD_RES (32)..(33): Xaa is C or S
GEVVMDNSLQEVVKENEDYYVMPLPELETPVXXA

SEQ ID NO: 12381 - protein, 40 aa, Artificial Sequence
  GFR-binding peptide
  MOD_RES (1)..(3)..(36)..(37): Xaa is C or S
  MOD_RES (14)..(15)..(16)..(17)..(18): Xaa is A or G
  MOD_RES (19)..(20)..(21)..(22): Xaa is A or G or is absent
XKXSKVVMNSLQEXXXXXXXXXYYVIPLPELDQPVXXPSA

SEQ ID NO: 12382 - protein, 37 aa, Artificial Sequence
  GFR-binding peptide
  MOD_RES (2)..(4)..(36)..(37): Xaa is C or S
RXGXSEVVMDNSLQEVVNNASDYYVIPLPELRTPVXX

SEQ ID NO: 12383 - protein, 36 aa, Artificial Sequence
  GFR-binding peptide
  MOD_RES (1)..(35)..(36): Xaa is C or S
  MOD_RES (13)..(14)..(15)..(16)..(17): Xaa is A or G
  MOD_RES (18)..(19)..(20)..(21): Xaa is A or G or is absent
XSRVVMNEYQKYXXXXXXXXXIFLVSIPSLKTPAXX

SEQ ID NO: 12384 - protein, 35 aa, Artificial Sequence; identical to SEQ ID NO: 4954
  GFR-binding peptide
  MOD_RES (1)..(33): Xaa is C or S

SEQ ID NO: 12385 - protein, 37 aa, Artificial Sequence
  GFR-binding peptide
  MOD_RES (1)..(35)..(36): Xaa is C or S
  MOD_RES (13)..(14)..(15)..(16)..(17): Xaa is A or G
  MOD_RES (18)..(19)..(20)..(21): Xaa is A or G or is absent
XGEVVMDNSLQEXXXXXXXXXYYVMPLPELETPVXXA

SEQ ID NO: 12386 - protein, 37 aa, Artificial Sequence
  GFR-binding peptide
  MOD_RES (2)..(4): Xaa is C or S
  MOD_RES (16)..(17)..(18)..(19)..(20): Xaa is A or G
  MOD_RES (21)..(22)..(23)..(24): Xaa is A or G or is absent
RXGXSEVVMDQYNKLXXXXXXXXXLYLISIASLRTPV

SEQ ID NO: 12387 - protein, 40 aa, Artificial Sequence
  GFR-binding peptide
  MOD_RES (2)..(36)..(37): Xaa is C or S
  MOD_RES (14)..(15)..(16)..(17)..(18): Xaa is A or G
  MOD_RES (19)..(20)..(21)..(22): Xaa is A or G or is absent
GXSEVVMDRYKKLXXXXXXXXXFYLISIANLRTPVXXTPP

SEQ ID NO: 12388 - protein, 30 aa, Artificial Sequence
  GFR-binding peptide
RVVMNNSLQEIVNSSDDYYVVPLPELQTPA

SEQ ID NO: 12389 - protein, 31 aa, Artificial Sequence
  GFR-binding peptide
  MOD_RES (1)..(1): Xaa is C or S
XSRVIMNSLQEVKPKRGVYYLITLPELAQPV

SEQ ID NO: 12390 - protein, 36 aa, Artificial Sequence; identical to SEQ ID NO: 4957
  GFR-binding peptide
  MOD_RES (33)..(34): Xaa is C or S
  MOD_RES (11)..(12)..(13)..(14)..(15): Xaa is A or G
  MOD_RES (16)..(17)..(18)..(19): Xaa is A or G or is absent

SEQ ID NO: 12391 - protein, 35 aa, Artificial Sequence; identical to SEQ ID NO: 4959
  GFR-binding peptide
  MOD_RES (1)..(32)..(33): Xaa is C or S

SEQ ID NO: 12392 - protein, 35 aa, Artificial Sequence
  GFR-binding peptide
  MOD_RES (1)..(3)..(35): Xaa is C or S
XGXSEVVMDEYQKYVVNNASDIFLISIPSLRTPVX

SEQ ID NO: 12393 - protein, 39 aa, Artificial Sequence; identical to SEQ ID NO: 4960
  GFR-binding peptide
  MOD_RES (33)..(34): Xaa is C or S
  MOD_RES (11)..(12)..(13)..(14)..(15): Xaa is A or G
  MOD_RES (16)..(17)..(18)..(19): Xaa is A or G or is absent

SEQ ID NO: 12394 - protein, 35 aa, Artificial Sequence
  GFR-binding peptide
  MOD_RES (2)..(34)..(35): Xaa is C or S
GXGEVVMDNSLQEVVKENEDYYLMTLPELETPVXX

SEQ ID NO: 12395 - protein, 35 aa, Artificial Sequence
  GFR-binding peptide
  MOD_RES (2)..(34)..(35): Xaa is C or S
GXSEVVMDRYKKLVVNNASDFYLISIANLRTPVXX

SEQ ID NO: 12396 - protein, 39 aa, Artificial Sequence
  GFR-binding peptide
  MOD_RES (1)..(33): Xaa is C or S
XSRVVMNNSLQEIVNSSDDYYLVTLPELKTPAXTPKTVH

SEQ ID NO: 12397 - protein, 38 aa, Artificial Sequence; identical to SEQ ID NO: 4964
  GFR-binding peptide
  MOD_RES (34)..(35): Xaa is C or S
  MOD_RES (12)..(13)..(14)..(15)..(16): Xaa is A or G
  MOD_RES (17)..(18)..(19)..(20): Xaa is A or G or is absent

SEQ ID NO: 12398 - protein, 30 aa, Artificial Sequence; identical to SEQ ID NO: 4966
  GFR-binding peptide

SEQ ID NO: 12399 - protein, 33 aa, Artificial Sequence; identical to SEQ ID NO: 4967
  GFR-binding peptide
  MOD_RES (1)..(32)..(33): Xaa is C or S

SEQ ID NO: 12400 - protein, 34 aa, Artificial Sequence
  GFR-binding peptide
  MOD_RES (2)..(33)..(34): Xaa is C or S
KXSKVIMEYQKYIKPTKGIIFLISIPSLDQSVXX

SEQ ID NO: 12401 - protein, 33 aa, Artificial Sequence
  GFR-binding peptide
  MOD_RES (33)..(33): Xaa is C or S
  MOD_RES (11)..(12)..(13)..(14)..(15): Xaa is A or G
  MOD_RES (16)..(17)..(18)..(19): Xaa is A or G or is absent
RVVMNEYQKYXXXXXXXXXIFLVSIPSLKTPAX

SEQ ID NO: 12402 - protein, 32 aa, Artificial Sequence
  GFR-binding peptide
  MOD_RES (1)..(1): Xaa is C or S
XGEVVMENSLQEVVKDYEDYYVMPLPELETPV

SEQ ID NO: 12403 - protein, 34 aa, Artificial Sequence; identical to SEQ ID NO: 4969
  GFR-binding peptide
  MOD_RES (34)..(34): Xaa is C or S
  MOD_RES (12)..(13)..(14)..(15)..(16): Xaa is A or G
  MOD_RES (17)..(18)..(19)..(20): Xaa is A or G or is absent

SEQ ID NO: 12404 - protein, 38 aa, Artificial Sequence; identical to SEQ ID NO: 4970
  GFR-binding peptide
  MOD_RES (34)..(35): Xaa is C or S
  MOD_RES (12)..(13)..(14)..(15)..(16): Xaa is A or G
  MOD_RES (17)..(18)..(19)..(20): Xaa is A or G or is absent

SEQ ID NO: 12405 - protein, 38 aa, Artificial Sequence
  GFR-binding peptide
  MOD_RES (1)..(34)..(35): Xaa is C or S
  MOD_RES (12)..(13)..(14)..(15)..(16): Xaa is A or G
  MOD_RES (17)..(18)..(19)..(20): Xaa is A or G or is absent
XSKVVMNSLQEXXXXXXXXXYYVIPLPELDQPVXXPSA

SEQ ID NO: 12406 - protein, 34 aa, Artificial Sequence
  GFR-binding peptide
  MOD_RES (1)..(33)..(34): Xaa is C or S
XARVVMNEYQKYIVNSSDDIFLVSIPSLQTPAXX

SEQ ID NO: 12407 - protein, 41 aa, Artificial Sequence
  GFR-binding peptide
  MOD_RES (2)..(36): Xaa is C or S
  MOD_RES (14)..(15)..(16)..(17)..(18): Xaa is A or G
  MOD_RES (19)..(20)..(21)..(22): Xaa is A or G or is absent
GXSRVVMNNSLQEXXXXXXXXXYYLVTLPELKTPAXTPKTV

SEQ ID NO: 12408 - protein, 33 aa, Artificial Sequence
  GFR-binding peptide
  MOD_RES (1)..(1): Xaa is C or S
  MOD_RES (12)..(13)..(14)..(15)..(16): Xaa is A or G
  MOD_RES (17)..(18)..(19)..(20): Xaa is A or G or is absent
XSRVIMNSLQEXXXXXXXXXYYVIPLPELAQPV

SEQ ID NO: 12409 - protein, 35 aa, Artificial Sequence; identical to SEQ ID NO: 4974
  GFR-binding peptide
  MOD_RES (2)..(4): Xaa is C or S

SEQ ID NO: 12410 - protein, 38 aa, Artificial Sequence; identical to SEQ ID NO: 4977
  GFR-binding peptide
  MOD_RES (2)..(36)..(37): Xaa is C or S
  MOD_RES (14)..(15)..(16)..(17)..(18): Xaa is A or G
  MOD_RES (19)..(20)..(21)..(22): Xaa is A or G or is absent

SEQ ID NO: 12411 - protein, 36 aa, Artificial Sequence
  GFR-binding peptide
  MOD_RES (34)..(35): Xaa is C or S
  MOD_RES (12)..(13)..(14)..(15)..(16): Xaa is A or G
  MOD_RES (17)..(18)..(19)..(20): Xaa is A or G or is absent
GEVVMDNSLQEXXXXXXXXXYYVMPLPELETPVXXA

SEQ ID NO: 12412 - protein, 38 aa, Artificial Sequence; identical to SEQ ID NO: 4980
  GFR-binding peptide
  MOD_RES (32)..(33): Xaa is C or S

SEQ ID NO: 12413 - protein, 37 aa, Artificial Sequence
  GFR-binding peptide
  MOD_RES (1)..(3)..(35)..(36): Xaa is C or S
XGXSRVVMNNSLQEIVNSSDDYYVVPLPELKTPAXXP

SEQ ID NO: 12414 - protein, 34 aa, Artificial Sequence
  GFR-binding peptide
  MOD_RES (1)..(34): Xaa is C or S
  MOD_RES (12)..(13)..(14)..(15)..(16): Xaa is A or G
  MOD_RES (17)..(18)..(19)..(20): Xaa is A or G or is absent
XSRVIMNSLQEXXXXXXXXXYYLITLPELAQPVX

SEQ ID NO: 12415 - protein, 34 aa, Artificial Sequence
  GFR-binding peptide
  MOD_RES (33)..(34): Xaa is C or S
  MOD_RES (11)..(12)..(13)..(14)..(15): Xaa is A or G
  MOD_RES (16)..(17)..(18)..(19): Xaa is A or G or is absent
RVVMNNSLQEXXXXXXXXXYYLVTLPELQTPAXX

SEQ ID NO: 12416 - protein, 43 aa, Artificial Sequence
  GFR-binding peptide
  MOD_RES (1)..(3)..(37)..(38): Xaa is C or S
  MOD_RES (15)..(16)..(17)..(18)..(19): Xaa is A or G
  MOD_RES (20)..(21)..(22)..(23): Xaa is A or G or is absent
XGXSEVVMDQYNKLXXXXXXXXXLYLISIASLRTPVXXTPPTS

SEQ ID NO: 12417 - protein, 34 aa, Artificial Sequence
  GFR-binding peptide
  MOD_RES (1)..(33): Xaa is C or S
XSRVVMNEYQKYIVNSSDDIFLVSIPSLKTPAXT

SEQ ID NO: 12418 - protein, 36 aa, Artificial Sequence
  GFR-binding peptide
  MOD_RES (2)..(36): Xaa is C or S
  MOD_RES (14)..(15)..(16)..(17)..(18): Xaa is A or G
  MOD_RES (19)..(20)..(21)..(22): Xaa is A or G or is absent
GXGEVVMEEYQKYXXXXXXXXXIFLMSIPSLETPVX

SEQ ID NO: 12419 - protein, 37 aa, Artificial Sequence
  GFR-binding peptide
  MOD_RES (1)..(35)..(36): Xaa is C or S
  MOD_RES (13)..(14)..(15)..(16)..(17): Xaa is A or G
  MOD_RES (18)..(19)..(20)..(21): Xaa is A or G or is absent
XGEVVMDEYQKYXXXXXXXXXIFLMSIPSLETPVXXA

SEQ ID NO: 12420 - protein, 38 aa, Artificial Sequence; identical to SEQ ID NO: 4984
  GFR-binding peptide
  MOD_RES (2)..(36)..(37): Xaa is C or S
  MOD_RES (14)..(15)..(16)..(17)..(18): Xaa is A or G
  MOD_RES (19)..(20)..(21)..(22): Xaa is A or G or is absent

SEQ ID NO: 12421 - protein, 38 aa, Artificial Sequence; identical to SEQ ID NO: 4985
  GFR-binding peptide
  MOD_RES (2)..(4)..(35)..(36): Xaa is C or S

SEQ ID NO: 12422 - protein, 37 aa, Artificial Sequence
  GFR-binding peptide
  MOD_RES (34)..(35): Xaa is C or S
  MOD_RES (12)..(13)..(14)..(15)..(16): Xaa is A or G
  MOD_RES (17)..(18)..(19)..(20): Xaa is A or G or is absent
GEVVMENSLQEXXXXXXXXXYYVMPLPELETPVXXAK

SEQ ID NO: 12423 - protein, 38 aa, Artificial Sequence
  GFR-binding peptide
  MOD_RES (1)..(3)..(37)..(38): Xaa is C or S
  MOD_RES (15)..(16)..(17)..(18)..(19): Xaa is A or G
  MOD_RES (20)..(21)..(22)..(23): Xaa is A or G or is absent
XGXARVVMNEYQKYXXXXXXXXXIFLVSIPSLQTPAXX

SEQ ID NO: 12424 - protein, 39 aa, Artificial Sequence
  GFR-binding peptide
  MOD_RES (1)..(35)..(36): Xaa is C or S
  MOD_RES (13)..(14)..(15)..(16)..(17): Xaa is A or G
  MOD_RES (18)..(19)..(20)..(21): Xaa is A or G or is absent
XSEVVMDQYNKLXXXXXXXXXLYLISIASLRTPVXXTPP

SEQ ID NO: 12425 - protein, 36 aa, Artificial Sequence
  GFR-binding peptide
  MOD_RES (1)..(3): Xaa is C or S
  MOD_RES (15)..(16)..(17)..(18)..(19): Xaa is A or G
  MOD_RES (20)..(21)..(22)..(23): Xaa is A or G or is absent
XGXSEVVMDNSLQEXXXXXXXXXYYLITLPELRTPV

SEQ ID NO: 12426 - protein, 32 aa, Artificial Sequence
  GFR-binding peptide
  MOD_RES (31)..(32): Xaa is C or S
EVVMDNSLQEVVNNASDYYLITLPELRTPVXX

SEQ ID NO: 12427 - protein, 34 aa, Artificial Sequence
  GFR-binding peptide
  MOD_RES (1)..(1): Xaa is C or S
  MOD_RES (13)..(14)..(15)..(16)..(17): Xaa is A or G
  MOD_RES (18)..(19)..(20)..(21): Xaa is A or G or is absent
XSEVVMDQYNKLXXXXXXXXXLYLISIASLRTPV

SEQ ID NO: 12428 - protein, 36 aa, Artificial Sequence
  GFR-binding peptide
  MOD_RES (1)..(34)..(35): Xaa is C or S
  MOD_RES (12)..(13)..(14)..(15)..(16): Xaa is A or G
  MOD_RES (17)..(18)..(19)..(20): Xaa is A or G or is absent
XSKVVMNSLQEXXXXXXXXXYYLITLPELDQPVXXP

SEQ ID NO: 12429 - protein, 41 aa, Artificial Sequence
  GFR-binding peptide
  MOD_RES (2)..(36)..(37): Xaa is C or S
  MOD_RES (14)..(15)..(16)..(17)..(18): Xaa is A or G
  MOD_RES (19)..(20)..(21)..(22): Xaa is A or G or is absent
GXGEVVMDNSLQEXXXXXXXXXYYLMTLPELETPVXXAKPI

SEQ ID NO: 12430 - protein, 39 aa, Artificial Sequence
  GFR-binding peptide
  MOD_RES (2)..(36)..(37): Xaa is C or S
  MOD_RES (14)..(15)..(16)..(17)..(18): Xaa is A or G
  MOD_RES (19)..(20)..(21)..(22): Xaa is A or G or is absent
GXSEVVMDRYKKLXXXXXXXXXFYLISIANLRTPVXXTP

SEQ ID NO: 12431 - protein, 38 aa, Artificial Sequence
  GFR-binding peptide
  MOD_RES (2)..(4)..(38): Xaa is C or S
  MOD_RES (16)..(17)..(18)..(19)..(20): Xaa is A or G
  MOD_RES (21)..(22)..(23)..(24): Xaa is A or G or is absent
RXGXSEVVMDNSLQEXXXXXXXXXYYVIPLPELRTPVX

SEQ ID NO: 12432 - protein, 38 aa, Artificial Sequence
  GFR-binding peptide
  MOD_RES (1)..(3)..(35)..(36): Xaa is C or S
XGXGEVVMDNSLQEVVKENEDYYLMTLPELETPVXXAK

SEQ ID NO: 12433 - protein, 39 aa, Artificial Sequence
  GFR-binding peptide
  MOD_RES (1)..(3)..(35)..(36): Xaa is C or S
XGXSEVVMDRYKKLVVNNASDFYLISIANLRTPVXXTPP

SEQ ID NO: 12434 - protein, 38 aa, Artificial Sequence; identical to SEQ ID NO: 4991
  GFR-binding peptide
  MOD_RES (2)..(33)..(34): Xaa is C or S

SEQ ID NO: 12435 - protein, 34 aa, Artificial Sequence; identical to SEQ ID NO: 4992
  GFR-binding peptide
  MOD_RES (31)..(32): Xaa is C or S

SEQ ID NO: 12436 - protein, 36 aa, Artificial Sequence
  GFR-binding peptide
  MOD_RES (34)..(35): Xaa is C or S
  MOD_RES (12)..(13)..(14)..(15)..(16): Xaa is A or G
  MOD_RES (17)..(18)..(19)..(20): Xaa is A or G or is absent
SEVVMDEYQKYXXXXXXXXXIFLISIPSLRTPVXXT

SEQ ID NO: 12437 - protein, 32 aa, Artificial Sequence
  GFR-binding peptide
  MOD_RES (32)..(32): Xaa is C or S
SRVVMNNSLQEIVNSSDDYYLVTLPELKTPAX

SEQ ID NO: 12438 - protein, 40 aa, Artificial Sequence
  GFR-binding peptide
  MOD_RES (2)..(34)..(35): Xaa is C or S
GXSRVVMNEYQKYIVNSSDDIFLVSIPSLKTPAXXPKPVY

SEQ ID NO: 12439 - protein, 41 aa, Artificial Sequence
  GFR-binding peptide
  MOD_RES (2)..(4)..(38)..(39): Xaa is C or S
  MOD_RES (16)..(17)..(18)..(19)..(20): Xaa is A or G
  MOD_RES (21)..(22)..(23)..(24): Xaa is A or G or is absent
RXGXGEVVMENSLQEXXXXXXXXXYYLMTLPELETPVXXAK

SEQ ID NO: 12440 - protein, 36 aa, Artificial Sequence
  GFR-binding peptide
  MOD_RES (1)..(34)..(35): Xaa is C or S
  MOD_RES (12)..(13)..(14)..(15)..(16): Xaa is A or G
  MOD_RES (17)..(18)..(19)..(20): Xaa is A or G or is absent
XSKVIMNSLQEXXXXXXXXXYYVIPLPELDQSVXXP

SEQ ID NO: 12441 - protein, 35 aa, Artificial Sequence; identical to SEQ ID NO: 5000
  GFR-binding peptide
  MOD_RES (2)..(34)..(35): Xaa is C or S

SEQ ID NO: 12442 - protein, 34 aa, Artificial Sequence
  GFR-binding peptide
  MOD_RES (1)..(1): Xaa is C or S
  MOD_RES (13)..(14)..(15)..(16)..(17): Xaa is A or G
  MOD_RES (18)..(19)..(20)..(21): Xaa is A or G or is absent
XSRVVMNNSLQEXXXXXXXXXYYVVPLPELKTPA

SEQ ID NO: 12443 - protein, 37 aa, Artificial Sequence; identical to SEQ ID NO: 5006
  GFR-binding peptide
  MOD_RES (1)..(3)..(34)..(35): Xaa is C or S

SEQ ID NO: 12444 - protein, 34 aa, Artificial Sequence
  GFR-binding peptide
  MOD_RES (33)..(34): Xaa is C or S
  MOD_RES (11)..(12)..(13)..(14)..(15): Xaa is A or G
  MOD_RES (16)..(17)..(18)..(19): Xaa is A or G or is absent
EVVMDNSLQEXXXXXXXXXYYVIPLPELRTPVXX

SEQ ID NO: 12445 - protein, 33 aa, Artificial Sequence
  GFR-binding peptide
  MOD_RES (31)..(32): Xaa is C or S
SKVVMNSLQEVKPTRGVYYVIPLPELDQPVXXP

SEQ ID NO: 12446 - protein, 37 aa, Artificial Sequence; identical to SEQ ID NO: 5009
  GFR-binding peptide
  MOD_RES (1)..(3)..(36)..(37): Xaa is C or S
  MOD_RES (14)..(15)..(16)..(17)..(18): Xaa is A or G
  MOD_RES (19)..(20)..(21)..(22): Xaa is A or G or is absent

SEQ ID NO: 12447 - protein, 37 aa, Artificial Sequence
  GFR-binding peptide
  MOD_RES (1)..(35)..(36): Xaa is C or S
  MOD_RES (13)..(14)..(15)..(16)..(17): Xaa is A or G
  MOD_RES (18)..(19)..(20)..(21): Xaa is A or G or is absent
XSRVVMNNSLQEXXXXXXXXXYYVVPLPELKTPAXXP

SEQ ID NO: 12448 - protein, 35 aa, Artificial Sequence; identical to SEQ ID NO: 5010
  GFR-binding peptide
  MOD_RES (1)..(33)..(34): Xaa is C or S

SEQ ID NO: 12449 - protein, 34 aa, Artificial Sequence; identical to SEQ ID NO: 5011
  GFR-binding peptide
  MOD_RES (1)..(34): Xaa is C or S
  MOD_RES (12)..(13)..(14)..(15)..(16): Xaa is A or G
  MOD_RES (17)..(18)..(19)..(20): Xaa is A or G or is absent

SEQ ID NO: 12450 - protein, 37 aa, Artificial Sequence
  GFR-binding peptide
  MOD_RES (1)..(3)..(35)..(36): Xaa is C or S
XGXARVVMNNSLQEIVNSSDDYYVVPLPELQTPAXXP

SEQ ID NO: 12451 - protein, 39 aa, Artificial Sequence
  GFR-binding peptide
  MOD_RES (2)..(34)..(35): Xaa is C or S
GXSEVVMDNSLQEVVNNASDYYLITLPELRTPVXXTPPT

SEQ ID NO: 12452 - protein, 37 aa, Artificial Sequence
  GFR-binding peptide
  MOD_RES (2)..(35)..(36): Xaa is C or S
  MOD_RES (13)..(14)..(15)..(16)..(17): Xaa is A or G
  MOD_RES (18)..(19)..(20)..(21): Xaa is A or G or is absent
KXSKVVMNSLQEXXXXXXXXXYYVIPLPELDQPVXXP

SEQ ID NO: 12453 - protein, 43 aa, Artificial Sequence; identical to SEQ ID NO: 5020
  GFR-binding peptide
  MOD_RES (2)..(4)..(38)..(39): Xaa is C or S
  MOD_RES (16)..(17)..(18)..(19)..(20): Xaa is A or G
  MOD_RES (21)..(22)..(23)..(24): Xaa is A or G or is absent

SEQ ID NO: 12454 - protein, 38 aa, Artificial Sequence
  GFR-binding peptide
  MOD_RES (2)..(4)..(36)..(37): Xaa is C or S
RXGXGEVVMDNSLQEVVKENEDYYLMTLPELETPVXXA

SEQ ID NO: 12455 - protein, 35 aa, Artificial Sequence
  GFR-binding peptide
  MOD_RES (2)..(2): Xaa is C or S
  MOD_RES (14)..(15)..(16)..(17)..(18): Xaa is A or G
  MOD_RES (19)..(20)..(21)..(22): Xaa is A or G or is absent
GXGEVVMENSLQEXXXXXXXXXYYLMTLPELETPV

SEQ ID NO: 12456 - protein, 34 aa, Artificial Sequence
  GFR-binding peptide
  MOD_RES (1)..(1): Xaa is C or S
  MOD_RES (13)..(14)..(15)..(16)..(17): Xaa is A or G
  MOD_RES (18)..(19)..(20)..(21): Xaa is A or G or is absent
XSRVVMNEYQKYXXXXXXXXXIFLVSIPSLKTPA

SEQ ID NO: 12457 - protein, 36 aa, Artificial Sequence; identical to SEQ ID NO: 5025
  GFR-binding peptide
  MOD_RES (2)..(35)..(36): Xaa is C or S
  MOD_RES (13)..(14)..(15)..(16)..(17): Xaa is A or G
  MOD_RES (18)..(19)..(20)..(21): Xaa is A or G or is absent

SEQ ID NO: 12458 - protein, 39 aa, Artificial Sequence
  GFR-binding peptide
  MOD_RES (1)..(34)..(35): Xaa is C or S
  MOD_RES (12)..(13)..(14)..(15)..(16): Xaa is A or G
  MOD_RES (17)..(18)..(19)..(20): Xaa is A or G or is absent
XSKVIMEYQKYXXXXXXXXXIFLISIPSLDQSVXXPSAS

SEQ ID NO: 12459 - protein, 40 aa, Artificial Sequence
  GFR-binding peptide
  MOD_RES (2)..(4)..(38)..(39): Xaa is C or S
  MOD_RES (16)..(17)..(18)..(19)..(20): Xaa is A or G
  MOD_RES (21)..(22)..(23)..(24): Xaa is A or G or is absent
HXGXSRVVMNNSLQEXXXXXXXXXYYVVPLPELKTPAXXP

SEQ ID NO: 12460 - protein, 37 aa, Artificial Sequence
  GFR-binding peptide
  MOD_RES (1)..(3)..(37): Xaa is C or S
  MOD_RES (15)..(16)..(17)..(18)..(19): Xaa is A or G
  MOD_RES (20)..(21)..(22)..(23): Xaa is A or G or is absent
XGXGEVVMEEYQKYXXXXXXXXXIFLMSIPSLETPVX

SEQ ID NO: 12461 - protein, 32 aa, Artificial Sequence; identical to SEQ ID NO: 5029
  GFR-binding peptide
  MOD_RES (32)..(32): Xaa is C or S

SEQ ID NO: 12462 - protein, 36 aa, Artificial Sequence; identical to SEQ ID NO: 5030
  GFR-binding peptide
  MOD_RES (33)..(34): Xaa is C or S
  MOD_RES (11)..(12)..(13)..(14)..(15): Xaa is A or G
  MOD_RES (16)..(17)..(18)..(19): Xaa is A or G or is absent

SEQ ID NO: 12463 - protein, 38 aa, Artificial Sequence
  GFR-binding peptide
  MOD_RES (2)..(34): Xaa is C or S
GXSRVVMNNSLQEIVNSSDDYYVVPLPELKTPAXTPKT

SEQ ID NO: 12464 - protein, 32 aa, Artificial Sequence; identical to SEQ ID NO: 5034
  GFR-binding peptide
  MOD_RES (32)..(32): Xaa is C or S

SEQ ID NO: 12465 - protein, 41 aa, Artificial Sequence; identical to SEQ ID NO: 5035
  GFR-binding peptide
  MOD_RES (2)..(4)..(38)..(39): Xaa is C or S
  MOD_RES (16)..(17)..(18)..(19)..(20): Xaa is A or G
  MOD_RES (21)..(22)..(23)..(24): Xaa is A or G or is absent

SEQ ID NO: 12466 - protein, 33 aa, Artificial Sequence
  GFR-binding peptide
  MOD_RES (33)..(33): Xaa is C or S
  MOD_RES (11)..(12)..(13)..(14)..(15): Xaa is A or G
  MOD_RES (16)..(17)..(18)..(19): Xaa is A or G or is absent
RVVMNEYQKYXXXXXXXXXIFLVSIPSLQTPAX

SEQ ID NO: 12467 - protein, 33 aa, Artificial Sequence
  GFR-binding peptide
  MOD_RES (2)..(2): Xaa is C or S
GXGEVVMEEYQKYVVKDYEDIFLMSIPSLETPV

SEQ ID NO: 12468 - protein, 32 aa, Artificial Sequence
  GFR-binding peptide
  MOD_RES (1)..(1): Xaa is C or S
XARVVMNEYQKYIVNSSDDIFLVSIPSLQTPA

SEQ ID NO: 12469 - protein, 38 aa, Artificial Sequence
  GFR-binding peptide
  MOD_RES (33)..(34): Xaa is C or S
  MOD_RES (11)..(12)..(13)..(14)..(15): Xaa is A or G
  MOD_RES (16)..(17)..(18)..(19): Xaa is A or G or is absent
RVVMNEYQKYXXXXXXXXXIFLVSIPSLQTPAXXPKPV

SEQ ID NO: 12470 - protein, 38 aa, Artificial Sequence
  GFR-binding peptide
  MOD_RES (2)..(34)..(35): Xaa is C or S
GXGEVVMDNSLQEVVKENEDYYVMPLPELETPVXXAKP

SEQ ID NO: 12471 - protein, 38 aa, Artificial Sequence
  GFR-binding peptide
  MOD_RES (2)..(36): Xaa is C or S
  MOD_RES (14)..(15)..(16)..(17)..(18): Xaa is A or G
  MOD_RES (19)..(20)..(21)..(22): Xaa is A or G or is absent
GXSRVVMNNSLQEXXXXXXXXXYYLVTLPELKTPAXTP

SEQ ID NO: 12472 - protein, 35 aa, Artificial Sequence
  GFR-binding peptide
  MOD_RES (1)..(33): Xaa is C or S
XSRVVMNNSLQEIVNSSDDYYVVPLPELKTPAXTP

SEQ ID NO: 12473 - protein, 33 aa, Artificial Sequence
  GFR-binding peptide
  MOD_RES (31)..(32): Xaa is C or S
RVVMNEYQKYIVNSSDDIFLVSIPSLKTPAXXP

SEQ ID NO: 12474 - protein, 37 aa, Artificial Sequence; identical to SEQ ID NO: 5044
  GFR-binding peptide
  MOD_RES (32)..(33): Xaa is C or S

SEQ ID NO: 12475 - protein, 32 aa, Artificial Sequence
  GFR-binding peptide
  MOD_RES (11)..(12)..(13)..(14)..(15): Xaa is A or G
  MOD_RES (16)..(17)..(18)..(19): Xaa is A or G or is absent
EVVMDNSLQEXXXXXXXXXYYLMTLPELETPV

SEQ ID NO: 12476 - protein, 38 aa, Artificial Sequence
  GFR-binding peptide
  MOD_RES (32)..(32): Xaa is C or S
SRVVMNNSLQEIVNSSDDYYVVPLPELKTPAXTPKTVH

SEQ ID NO: 12477 - protein, 40 aa, Artificial Sequence
  GFR-binding peptide
  MOD_RES (1)..(3)..(35)..(36): Xaa is C or S
XGXSEVVMDNSLQEVVNNASDYYLITLPELRTPVXXTPPT

SEQ ID NO: 12478 - protein, 35 aa, Artificial Sequence
  GFR-binding peptide
  MOD_RES (32)..(33): Xaa is C or S
ARVVMNNSLQEIVNSSDDYYLVTLPELQTPAXXPK

SEQ ID NO: 12479 - protein, 35 aa, Artificial Sequence
  GFR-binding peptide
  MOD_RES (2)..(35): Xaa is C or S
  MOD_RES (13)..(14)..(15)..(16)..(17): Xaa is A or G
  MOD_RES (18)..(19)..(20)..(21): Xaa is A or G or is absent
KXSKVVMEYQKYXXXXXXXXXIFLISIPSLDQPVX

SEQ ID NO: 12480 - protein, 35 aa, Artificial Sequence
  GFR-binding peptide
  MOD_RES (1)..(35): Xaa is C or S
  MOD_RES (13)..(14)..(15)..(16)..(17): Xaa is A or G
  MOD_RES (18)..(19)..(20)..(21): Xaa is A or G or is absent
XSRVVMNEYQKYXXXXXXXXXIFLVSIPSLKTPAX

SEQ ID NO: 12481 - protein, 35 aa, Artificial Sequence
  GFR-binding peptide
  MOD_RES (31)..(32): Xaa is C or S
SRVIMNSLQEVKPKRGVYYLITLPELAQPVXXPAA

SEQ ID NO: 12482 - protein, 40 aa, Artificial Sequence; identical to SEQ ID NO: 5053
  GFR-binding peptide
  MOD_RES (2)..(34)..(35): Xaa is C or S

SEQ ID NO: 12483 - protein, 35 aa, Artificial Sequence
  GFR-binding peptide
  MOD_RES (2)..(33)..(34): Xaa is C or S
KXSKVIMNSLQEIKPTKGIYYVIPLPELDQSVXXP

SEQ ID NO: 12484 - protein, 42 aa, Artificial Sequence; identical to SEQ ID NO: 5055
  GFR-binding peptide
  MOD_RES (2)..(36)..(37): Xaa is C or S
  MOD_RES (14)..(15)..(16)..(17)..(18): Xaa is A or G
  MOD_RES (19)..(20)..(21)..(22): Xaa is A or G or is absent

SEQ ID NO: 12485 - protein, 35 aa, Artificial Sequence; identical to SEQ ID NO: 5056
  GFR-binding peptide
  MOD_RES (1)..(3)..(35): Xaa is C or S

SEQ ID NO: 12486 - protein, 44 aa, Artificial Sequence
  GFR-binding peptide
  MOD_RES (2)..(4)..(38): Xaa is C or S
  MOD_RES (16)..(17)..(18)..(19)..(20): Xaa is A or G
  MOD_RES (21)..(22)..(23)..(24): Xaa is A or G or is absent
HXGXSRVVMNNSLQEXXXXXXXXXYYLVTLPELKTPAXTPKTVH

SEQ ID NO: 12487 - protein, 39 aa, Artificial Sequence; identical to SEQ ID NO: 5057
  GFR-binding peptide
  MOD_RES (34)..(35): Xaa is C or S
  MOD_RES (12)..(13)..(14)..(15)..(16): Xaa is A or G
  MOD_RES (17)..(18)..(19)..(20): Xaa is A or G or is absent

SEQ ID NO: 12488 - protein, 40 aa, Artificial Sequence
  GFR-binding peptide
  MOD_RES (2)..(4)..(36)..(37): Xaa is C or S
RXGXSEVVMDRYKKLVVNNASDFYLISIANLRTPVXXTPP

SEQ ID NO: 12489 - protein, 41 aa, Artificial Sequence; identical to SEQ ID NO: 5059
  GFR-binding peptide
  MOD_RES (1)..(3)..(36)..(37): Xaa is C or S
  MOD_RES (14)..(15)..(16)..(17)..(18): Xaa is A or G
  MOD_RES (19)..(20)..(21)..(22): Xaa is A or G or is absent

SEQ ID NO: 12490 - protein, 36 aa, Artificial Sequence
  GFR-binding peptide
  MOD_RES (32)..(33): Xaa is C or S
SEVVMDNSLQEVVNNASDYYLITLPELRTPVXXTPP

SEQ ID NO: 12491 - protein, 36 aa, Artificial Sequence; identical to SEQ ID NO: 5060
  GFR-binding peptide
  MOD_RES (31)..(32): Xaa is C or S

SEQ ID NO: 12492 - protein, 42 aa, Artificial Sequence
  GFR-binding peptide
  MOD_RES (2)..(4)..(38)..(39): Xaa is C or S
  MOD_RES (16)..(17)..(18)..(19)..(20): Xaa is A or G
  MOD_RES (21)..(22)..(23)..(24): Xaa is A or G or is absent
RXGXSEVVMDNSLQEXXXXXXXXXYYVIPLPELRTPVXXTPP

SEQ ID NO: 12493 - protein, 36 aa, Artificial Sequence
  GFR-binding peptide
  MOD_RES (2)..(35)..(36): Xaa is C or S
  MOD_RES (13)..(14)..(15)..(16)..(17): Xaa is A or G
  MOD_RES (18)..(19)..(20)..(21): Xaa is A or G or is absent
KXSKVVMEYQKYXXXXXXXXXIFLISIPSLDQPVXX

SEQ ID NO: 12494 - protein, 35 aa, Artificial Sequence
  GFR-binding peptide
  MOD_RES (2)..(33)..(34): Xaa is C or S
KXSRVIMNSLQEVKPKRGVYYLITLPELAQPVXXP

SEQ ID NO: 12495 - protein, 36 aa, Artificial Sequence
  GFR-binding peptide
  MOD_RES (32)..(33): Xaa is C or S
GEVVMDEYQKYVVKENEDIFLMSIPSLETPVXXAKP

SEQ ID NO: 12496 - protein, 36 aa, Artificial Sequence
  GFR-binding peptide
  MOD_RES (31)..(31): Xaa is C or S
RVVMNNSLQEIVNSSDDYYLVTLPELKTPAXTPKTV

SEQ ID NO: 12497 - protein, 38 aa, Artificial Sequence
  GFR-binding peptide
  MOD_RES (1)..(3)..(37)..(38): Xaa is C or S
  MOD_RES (15)..(16)..(17)..(18)..(19): Xaa is A or G
  MOD_RES (20)..(21)..(22)..(23): Xaa is A or G or is absent
XGXSEVVMDNSLQEXXXXXXXXXYYVIPLPELRTPVXX

SEQ ID NO: 12498 - protein, 31 aa, Artificial Sequence
  GFR-binding peptide
  MOD_RES (31)..(31): Xaa is C or S
RVVMNEYQKYIVNSSDDIFLVSIPSLKTPAX

SEQ ID NO: 12499 - protein, 38 aa, Artificial Sequence; identical to SEQ ID NO: 5067
  GFR-binding peptide
  MOD_RES (2)..(36)..(37): Xaa is C or S
  MOD_RES (14)..(15)..(16)..(17)..(18): Xaa is A or G
  MOD_RES (19)..(20)..(21)..(22): Xaa is A or G or is absent

SEQ ID NO: 12500 - protein, 37 aa, Artificial Sequence
  GFR-binding peptide
  MOD_RES (31)..(32): Xaa is C or S
SKVVMNSLQEVKPTRGVYYVIPLPELDQPVXXPSASA

SEQ ID NO: 12501 - protein, 42 aa, Artificial Sequence
  GFR-binding peptide
  MOD_RES (2)..(36)..(37): Xaa is C or S
  MOD_RES (14)..(15)..(16)..(17)..(18): Xaa is A or G
  MOD_RES (19)..(20)..(21)..(22): Xaa is A or G or is absent
GXARVVMNNSLQEXXXXXXXXXYYLVTLPELQTPAXXPKPVT

SEQ ID NO: 12502 - protein, 34 aa, Artificial Sequence
  GFR-binding peptide
  MOD_RES (1)..(33)..(34): Xaa is C or S
XSEVVMDRYKKLVVNNASDFYLISIANLRTPVXX

SEQ ID NO: 12503 - protein, 35 aa, Artificial Sequence
  GFR-binding peptide
  MOD_RES (33)..(34): Xaa is C or S
  MOD_RES (11)..(12)..(13)..(14)..(15): Xaa is A or G
  MOD_RES (16)..(17)..(18)..(19): Xaa is A or G or is absent
SKVVMNSLQEXXXXXXXXXYYVIPLPELDQPVXXP

SEQ ID NO: 12504 - protein, 33 aa, Artificial Sequence
  GFR-binding peptide
  MOD_RES (1)..(33): Xaa is C or S
XGEVVMDEYQKYVVKENEDIFLMSIPSLETPVX

SEQ ID NO: 12505 - protein, 35 aa, Artificial Sequence; identical to SEQ ID NO: 5074
  GFR-binding peptide
  MOD_RES (1)..(3)..(34)..(35): Xaa is C or S

SEQ ID NO: 12506 - protein, 39 aa, Artificial Sequence
  GFR-binding peptide
  MOD_RES (2)..(36)..(37): Xaa is C or S
  MOD_RES (14)..(15)..(16)..(17)..(18): Xaa is A or G
  MOD_RES (19)..(20)..(21)..(22): Xaa is A or G or is absent
GXARVVMNNSLQEXXXXXXXXXYYLVTLPELQTPAXXPK

SEQ ID NO: 12507 - protein, 32 aa, Artificial Sequence
  GFR-binding peptide
  MOD_RES (1)..(32): Xaa is C or S
XSKVVMEYQKYVKPTRGVIFLISIPSLDQPVX

SEQ ID NO: 12508 - protein, 41 aa, Artificial Sequence
  GFR-binding peptide
  MOD_RES (1)..(3)..(36)..(37): Xaa is C or S
  MOD_RES (14)..(15)..(16)..(17)..(18): Xaa is A or G
  MOD_RES (19)..(20)..(21)..(22): Xaa is A or G or is absent
XKXSRVIMNSLQEXXXXXXXXXYYLITLPELAQPVXXPAAS

SEQ ID NO: 12509 - protein, 35 aa, Artificial Sequence
  GFR-binding peptide
  MOD_RES (33)..(33): Xaa is C or S
  MOD_RES (11)..(12)..(13)..(14)..(15): Xaa is A or G
  MOD_RES (16)..(17)..(18)..(19): Xaa is A or G or is absent
RVVMNNSLQEXXXXXXXXXYYVVPLPELKTPAXTP

SEQ ID NO: 12510 - protein, 40 aa, Artificial Sequence
  GFR-binding peptide
  MOD_RES (2)..(36)..(37): Xaa is C or S
  MOD_RES (14)..(15)..(16)..(17)..(18): Xaa is A or G
  MOD_RES (19)..(20)..(21)..(22): Xaa is A or G or is absent
GXARVVMNNSLQEXXXXXXXXXYYLVTLPELQTPAXXPKP

SEQ ID NO: 12511 - protein, 37 aa, Artificial Sequence
  GFR-binding peptide
  MOD_RES (1)..(33)..(34): Xaa is C or S
XARVVMNEYQKYIVNSSDDIFLVSIPSLQTPAXXPKP

SEQ ID NO: 12512 - protein, 39 aa, Artificial Sequence
  GFR-binding peptide
  MOD_RES (2)..(34)..(35): Xaa is C or S
GXGEVVMEEYQKYVVKDYEDIFLMSIPSLETPVXXAKPI

SEQ ID NO: 12513 - protein, 33 aa, Artificial Sequence
  GFR-binding peptide
  MOD_RES (33)..(33): Xaa is C or S
  MOD_RES (11)..(12)..(13)..(14)..(15): Xaa is A or G
  MOD_RES (16)..(17)..(18)..(19): Xaa is A or G or is absent
EVVMDNSLQEXXXXXXXXXYYVMPLPELETPVX

SEQ ID NO: 12514 - protein, 35 aa, Artificial Sequence; identical to SEQ ID NO: 5079
  GFR-binding peptide
  MOD_RES (32)..(33): Xaa is C or S

SEQ ID NO: 12515 - protein, 36 aa, Artificial Sequence
  GFR-binding peptide
  MOD_RES (31)..(32): Xaa is C or S
SKVIMNSLQEIKPTKGIYYVIPLPELDQSVXXPSAS

SEQ ID NO: 12516 - protein, 37 aa, Artificial Sequence
  GFR-binding peptide
  MOD_RES (31)..(32): Xaa is C or S
EVVMDEYQKYVVKENEDIFLMSIPSLETPVXXAKPIK

SEQ ID NO: 12517 - protein, 39 aa, Artificial Sequence
  GFR-binding peptide
  MOD_RES (1)..(3)..(37)..(38): Xaa is C or S
  MOD_RES (15)..(16)..(17)..(18)..(19): Xaa is A or G
  MOD_RES (20)..(21)..(22)..(23): Xaa is A or G or is absent
XGXSEVVMDNSLQEXXXXXXXXXYYLITLPELRTPVXXT

SEQ ID NO: 12518 - protein, 35 aa, Artificial Sequence; identical to SEQ ID NO: 5088
  GFR-binding peptide
  MOD_RES (32)..(33): Xaa is C or S

SEQ ID NO: 12519 - protein, 38 aa, Artificial Sequence; identical to SEQ ID NO: 5091
  GFR-binding peptide
  MOD_RES (2)..(4)..(36)..(37): Xaa is C or S

SEQ ID NO: 12520 - protein, 34 aa, Artificial Sequence
  GFR-binding peptide
  MOD_RES (2)..(34): Xaa is C or S
GXSRVVMNEYQKYIVNSSDDIFLVSIPSLKTPAX

SEQ ID NO: 12521 - protein, 39 aa, Artificial Sequence
  GFR-binding peptide
  MOD_RES (1)..(35): Xaa is C or S
  MOD_RES (13)..(14)..(15)..(16)..(17): Xaa is A or G
  MOD_RES (18)..(19)..(20)..(21): Xaa is A or G or is absent
XSRVVMNNSLQEXXXXXXXXXYYVVPLPELKTPAXTPKT

SEQ ID NO: 12522 - protein, 38 aa, Artificial Sequence
  GFR-binding peptide
  MOD_RES (1)..(34)..(35): Xaa is C or S
  MOD_RES (12)..(13)..(14)..(15)..(16): Xaa is A or G
  MOD_RES (17)..(18)..(19)..(20): Xaa is A or G or is absent
XSRVIMNSLQEXXXXXXXXXYYVIPLPELAQPVXXPAA

SEQ ID NO: 12523 - protein, 36 aa, Artificial Sequence
  GFR-binding peptide
  MOD_RES (32)..(33): Xaa is C or S
SEVVMDQYNKLVVNNASDLYLISIASLRTPVXXTPP

SEQ ID NO: 12524 - protein, 36 aa, Artificial Sequence
  GFR-binding peptide
  MOD_RES (32)..(33): Xaa is C or S
GEVVMEEYQKYVVKDYEDIFLMSIPSLETPVXXAKP

SEQ ID NO: 12525 - protein, 42 aa, Artificial Sequence
  GFR-binding peptide
  MOD_RES (1)..(3)..(36)..(37): Xaa is C or S
  MOD_RES (14)..(15)..(16)..(17)..(18): Xaa is A or G
  MOD_RES (19)..(20)..(21)..(22): Xaa is A or G or is absent
XKXSKVVMEYQKYXXXXXXXXXIFLISIPSLDQPVXXPSASA

SEQ ID NO: 12526 - protein, 33 aa, Artificial Sequence; identical to SEQ ID NO: 5097
  GFR-binding peptide
  MOD_RES (2)..(2): Xaa is C or S

SEQ ID NO: 12527 - protein, 36 aa, Artificial Sequence; identical to SEQ ID NO: 5098
  GFR-binding peptide
  MOD_RES (1)..(32)..(33): Xaa is C or S

SEQ ID NO: 12528 - protein, 35 aa, Artificial Sequence
  GFR-binding peptide
  MOD_RES (2)..(2): Xaa is C or S
  MOD_RES (14)..(15)..(16)..(17)..(18): Xaa is A or G
  MOD_RES (19)..(20)..(21)..(22): Xaa is A or G or is absent
GXGEVVMENSLQEXXXXXXXXXYYVMPLPELETPV

SEQ ID NO: 12529 - protein, 37 aa, Artificial Sequence
  GFR-binding peptide
  MOD_RES (33)..(34): Xaa is C or S
  MOD_RES (11)..(12)..(13)..(14)..(15): Xaa is A or G
  MOD_RES (16)..(17)..(18)..(19): Xaa is A or G or is absent
RVVMNEYQKYXXXXXXXXXIFLVSIPSLKTPAXXPKP

SEQ ID NO: 12530 - protein, 36 aa, Artificial Sequence
  GFR-binding peptide
  MOD_RES (1)..(3): Xaa is C or S
  MOD_RES (15)..(16)..(17)..(18)..(19): Xaa is A or G
  MOD_RES (20)..(21)..(22)..(23): Xaa is A or G or is absent
XGXSRVVMNNSLQEXXXXXXXXXYYLVTLPELKTPA

SEQ ID NO: 12531 - protein, 38 aa, Artificial Sequence
  GFR-binding peptide
  MOD_RES (2)..(4)..(36)..(37): Xaa is C or S
RXGXSEVVMDEYQKYVVNNASDIFLISIPSLRTPVXXT

SEQ ID NO: 12532 - protein, 38 aa, Artificial Sequence; identical to SEQ ID NO: 5102
  GFR-binding peptide
  MOD_RES (1)..(35)..(36): Xaa is C or S
  MOD_RES (13)..(14)..(15)..(16)..(17): Xaa is A or G
  MOD_RES (18)..(19)..(20)..(21): Xaa is A or G or is absent

SEQ ID NO: 12533 - protein, 37 aa, Artificial Sequence
  GFR-binding peptide
  MOD_RES (1)..(3)..(37): Xaa is C or S
  MOD_RES (15)..(16)..(17)..(18)..(19): Xaa is A or G
  MOD_RES (20)..(21)..(22)..(23): Xaa is A or G or is absent
XGXSRVVMNEYQKYXXXXXXXXXIFLVSIPSLKTPAX

SEQ ID NO: 12534 - protein, 38 aa, Artificial Sequence; identical to SEQ ID NO: 5103
  GFR-binding peptide
  MOD_RES (33)..(34): Xaa is C or S
  MOD_RES (11)..(12)..(13)..(14)..(15): Xaa is A or G
  MOD_RES (16)..(17)..(18)..(19): Xaa is A or G or is absent

SEQ ID NO: 12535 - protein, 35 aa, Artificial Sequence; identical to SEQ ID NO: 5104
  GFR-binding peptide
  MOD_RES (31)..(31): Xaa is C or S

SEQ ID NO: 12536 - protein, 30 aa, Artificial Sequence; identical to SEQ ID NO: 5105
  GFR-binding peptide

SEQ ID NO: 12537 - protein, 31 aa, Artificial Sequence
  GFR-binding peptide
  MOD_RES (31)..(31): Xaa is C or S
EVVMDNSLQEVVNNASDYYLITLPELRTPVX

SEQ ID NO: 12538 - protein, 34 aa, Artificial Sequence
  GFR-binding peptide
  MOD_RES (31)..(32): Xaa is C or S
RVVMNEYQKYIVNSSDDIFLVSIPSLQTPAXXPK

SEQ ID NO: 12539 - protein, 39 aa, Artificial Sequence; identical to SEQ ID NO: 5106
  GFR-binding peptide
  MOD_RES (2)..(34)..(35): Xaa is C or S

SEQ ID NO: 12540 - protein, 40 aa, Artificial Sequence
  GFR-binding peptide
  MOD_RES (1)..(3)..(35)..(36): Xaa is C or S
XGXSEVVMDQYNKLVVNNASDLYLISIASLRTPVXXTPPT

SEQ ID NO: 12541 - protein, 34 aa, Artificial Sequence
  GFR-binding peptide
  MOD_RES (2)..(34): Xaa is C or S
GXARVVMNEYQKYIVNSSDDIFLVSIPSLQTPAX

SEQ ID NO: 12542 - protein, 36 aa, Artificial Sequence; identical to SEQ ID NO: 5114
  GFR-binding peptide
  MOD_RES (31)..(32): Xaa is C or S

SEQ ID NO: 12543 - protein, 33 aa, Artificial Sequence
  GFR-binding peptide
  MOD_RES (1)..(33): Xaa is C or S
XSRVVMNNSLQEIVNSSDDYYLVTLPELKTPAX

SEQ ID NO: 12544 - protein, 35 aa, Artificial Sequence; identical to SEQ ID NO: 5116
  GFR-binding peptide
  MOD_RES (32)..(33): Xaa is C or S

SEQ ID NO: 12545 - protein, 32 aa, Artificial Sequence; identical to SEQ ID NO: 5117
  GFR-binding peptide
  MOD_RES (31)..(32): Xaa is C or S

SEQ ID NO: 12546 - protein, 43 aa, Artificial Sequence
  GFR-binding peptide
  MOD_RES (2)..(4)..(38)..(39): Xaa is C or S
  MOD_RES (16)..(17)..(18)..(19)..(20): Xaa is A or G
  MOD_RES (21)..(22)..(23)..(24): Xaa is A or G or is absent
RXGXSEVVMDQYNKLXXXXXXXXXLYLISIASLRTPVXXTPPT

SEQ ID NO: 12547 - protein, 39 aa, Artificial Sequence
  GFR-binding peptide
  MOD_RES (2)..(34)..(35): Xaa is C or S
GXSEVVMDRYKKLVVNNASDFYLISIANLRTPVXXTPPT

SEQ ID NO: 12548 - protein, 39 aa, Artificial Sequence
  GFR-binding peptide
  MOD_RES (2)..(4)..(36)..(37): Xaa is C or S
RXGXSEVVMDEYQKYVVNNASDIFLISIPSLRTPVXXTP

SEQ ID NO: 12549 - protein, 35 aa, Artificial Sequence
  GFR-binding peptide
  MOD_RES (33)..(34): Xaa is C or S
  MOD_RES (11)..(12)..(13)..(14)..(15): Xaa is A or G
  MOD_RES (16)..(17)..(18)..(19): Xaa is A or G or is absent
SKVVMNSLQEXXXXXXXXXYYLITLPELDQPVXXP

SEQ ID NO: 12550 - protein, 38 aa, Artificial Sequence
  GFR-binding peptide
  MOD_RES (2)..(34)..(35): Xaa is C or S
GXSRVVMNNSLQEIVNSSDDYYVVPLPELKTPAXXPKP

SEQ ID NO: 12551 - protein, 43 aa, Artificial Sequence
  GFR-binding peptide
  MOD_RES (2)..(4)..(38)..(39): Xaa is C or S
  MOD_RES (16)..(17)..(18)..(19)..(20): Xaa is A or G
  MOD_RES (21)..(22)..(23)..(24): Xaa is A or G or is absent
HXGXSRVVMNEYQKYXXXXXXXXXIFLVSIPSLKTPAXXPKPV

SEQ ID NO: 12552 - protein, 34 aa, Artificial Sequence
  GFR-binding peptide
  MOD_RES (2)..(2): Xaa is C or S
  MOD_RES (13)..(14)..(15)..(16)..(17): Xaa is A or G
  MOD_RES (18)..(19)..(20)..(21): Xaa is A or G or is absent
KXSKVVMNSLQEXXXXXXXXXYYVIPLPELDQPV

SEQ ID NO: 12553 - protein, 35 aa, Artificial Sequence
  GFR-binding peptide
  MOD_RES (33)..(33): Xaa is C or S
  MOD_RES (11)..(12)..(13)..(14)..(15): Xaa is A or G
  MOD_RES (16)..(17)..(18)..(19): Xaa is A or G or is absent
RVVMNNSLQEXXXXXXXXXYYLVTLPELKTPAXTP

SEQ ID NO: 12554 - protein, 44 aa, Artificial Sequence
  GFR-binding peptide
  MOD_RES (2)..(4)..(38)..(39): Xaa is C or S
  MOD_RES (16)..(17)..(18)..(19)..(20): Xaa is A or G
  MOD_RES (21)..(22)..(23)..(24): Xaa is A or G or is absent
HXGXSRVVMNNSLQEXXXXXXXXXYYVVPLPELKTPAXXPKPVY

SEQ ID NO: 12555 - protein, 31 aa, Artificial Sequence
  GFR-binding peptide
  MOD_RES (1)..(1): Xaa is C or S
XSKVVMEYQKYVKPTRGVIFLISIPSLDQPV

SEQ ID NO: 12556 - protein, 36 aa, Artificial Sequence; identical to SEQ ID NO: 5122
  GFR-binding peptide
  MOD_RES (33)..(34): Xaa is C or S
  MOD_RES (11)..(12)..(13)..(14)..(15): Xaa is A or G
  MOD_RES (16)..(17)..(18)..(19): Xaa is A or G or is absent

SEQ ID NO: 12557 - protein, 39 aa, Artificial Sequence
  GFR-binding peptide
  MOD_RES (1)..(35)..(36): Xaa is C or S
  MOD_RES (13)..(14)..(15)..(16)..(17): Xaa is A or G
  MOD_RES (18)..(19)..(20)..(21): Xaa is A or G or is absent
XARVVMNNSLQEXXXXXXXXXYYLVTLPELQTPAXXPKP

SEQ ID NO: 12558 - protein, 35 aa, Artificial Sequence
  GFR-binding peptide
  MOD_RES (1)..(3)..(35): Xaa is C or S
XGXARVVMNNSLQEIVNSSDDYYLVTLPELQTPAX

SEQ ID NO: 12559 - protein, 34 aa, Artificial Sequence; identical to SEQ ID NO: 5124
  GFR-binding peptide
  MOD_RES (33)..(34): Xaa is C or S
  MOD_RES (11)..(12)..(13)..(14)..(15): Xaa is A or G
  MOD_RES (16)..(17)..(18)..(19): Xaa is A or G or is absent

SEQ ID NO: 12560 - protein, 38 aa, Artificial Sequence
  GFR-binding peptide
  MOD_RES (1)..(3)..(37)..(38): Xaa is C or S
  MOD_RES (15)..(16)..(17)..(18)..(19): Xaa is A or G
  MOD_RES (20)..(21)..(22)..(23): Xaa is A or G or is absent
XGXSEVVMDNSLQEXXXXXXXXXYYLITLPELRTPVXX

SEQ ID NO: 12561 - protein, 38 aa, Artificial Sequence
  GFR-binding peptide
  MOD_RES (1)..(33)..(34): Xaa is C or S
XGEVVMENSLQEVVKDYEDYYLMTLPELETPVXXAKPI

SEQ ID NO: 12562 - protein, 40 aa, Artificial Sequence
  GFR-binding peptide
  MOD_RES (1)..(35): Xaa is C or S
  MOD_RES (13)..(14)..(15)..(16)..(17): Xaa is A or G
  MOD_RES (18)..(19)..(20)..(21): Xaa is A or G or is absent
XSRVVMNNSLQEXXXXXXXXXYYLVTLPELKTPAXTPKTV

SEQ ID NO: 12563 - protein, 37 aa, Artificial Sequence
  GFR-binding peptide
  MOD_RES (2)..(4)..(36)..(37): Xaa is C or S
RXGXGEVVMDNSLQEVVKENEDYYVMPLPELETPVXX

SEQ ID NO: 12564 - protein, 34 aa, Artificial Sequence
  GFR-binding peptide
  MOD_RES (2)..(2): Xaa is C or S
  MOD_RES (13)..(14)..(15)..(16)..(17): Xaa is A or G
  MOD_RES (18)..(19)..(20)..(21): Xaa is A or G or is absent
KXSKVIMEYQKYXXXXXXXXXIFLISIPSLDQSV

SEQ ID NO: 12565 - protein, 32 aa, Artificial Sequence
  GFR-binding peptide
  MOD_RES (1)..(32): Xaa is C or S
XSKVIMEYQKYIKPTKGIIFLISIPSLDQSVX

SEQ ID NO: 12566 - protein, 44 aa, Artificial Sequence; identical to SEQ ID NO: 5130
  GFR-binding peptide
  MOD_RES (2)..(4)..(38)..(39): Xaa is C or S
  MOD_RES (16)..(17)..(18)..(19)..(20): Xaa is A or G
  MOD_RES (21)..(22)..(23)..(24): Xaa is A or G or is absent

SEQ ID NO: 12567 - protein, 42 aa, Artificial Sequence; identical to SEQ ID NO: 5131
  GFR-binding peptide
  MOD_RES (2)..(4)..(37)..(38): Xaa is C or S
  MOD_RES (15)..(16)..(17)..(18)..(19): Xaa is A or G
  MOD_RES (20)..(21)..(22)..(23): Xaa is A or G or is absent

SEQ ID NO: 12568 - protein, 37 aa, Artificial Sequence; identical to SEQ ID NO: 5132
  GFR-binding peptide
  MOD_RES (32)..(33): Xaa is C or S

SEQ ID NO: 12569 - protein, 37 aa, Artificial Sequence; identical to SEQ ID NO: 5133
  GFR-binding peptide
  MOD_RES (32)..(33): Xaa is C or S

SEQ ID NO: 12570 - protein, 40 aa, Artificial Sequence; identical to SEQ ID NO: 5134
  GFR-binding peptide
  MOD_RES (34)..(35): Xaa is C or S
  MOD_RES (12)..(13)..(14)..(15)..(16): Xaa is A or G
  MOD_RES (17)..(18)..(19)..(20): Xaa is A or G or is absent

SEQ ID NO: 12571 - protein, 39 aa, Artificial Sequence
  GFR-binding peptide
  MOD_RES (2)..(36)..(37): Xaa is C or S
  MOD_RES (14)..(15)..(16)..(17)..(18): Xaa is A or G
  MOD_RES (19)..(20)..(21)..(22): Xaa is A or G or is absent
GXARVVMNNSLQEXXXXXXXXXYYVVPLPELQTPAXXPK

SEQ ID NO: 12572 - protein, 43 aa, Artificial Sequence; identical to SEQ ID NO: 5136
  GFR-binding peptide
  MOD_RES (1)..(3)..(37)..(38): Xaa is C or S
  MOD_RES (15)..(16)..(17)..(18)..(19): Xaa is A or G
  MOD_RES (20)..(21)..(22)..(23): Xaa is A or G or is absent

SEQ ID NO: 12573 - protein, 32 aa, Artificial Sequence; identical to SEQ ID NO: 5137
  GFR-binding peptide
  MOD_RES (11)..(12)..(13)..(14)..(15): Xaa is A or G
  MOD_RES (16)..(17)..(18)..(19): Xaa is A or G or is absent

SEQ ID NO: 12574 - protein, 42 aa, Artificial Sequence
  GFR-binding peptide
  MOD_RES (2)..(4)..(38)..(39): Xaa is C or S
  MOD_RES (16)..(17)..(18)..(19)..(20): Xaa is A or G
  MOD_RES (21)..(22)..(23)..(24): Xaa is A or G or is absent
HXGXSRVVMNEYQKYXXXXXXXXXIFLVSIPSLKTPAXXPKP

SEQ ID NO: 12575 - protein, 39 aa, Artificial Sequence
  GFR-binding peptide
  MOD_RES (1)..(33)..(34): Xaa is C or S
XSEVVMDQYNKLVVNNASDLYLISIASLRTPVXXTPPTS

SEQ ID NO: 12576 - protein, 38 aa, Artificial Sequence; identical to SEQ ID NO: 5139
  GFR-binding peptide
  MOD_RES (2)..(34)..(35): Xaa is C or S

SEQ ID NO: 12577 - protein, 33 aa, Artificial Sequence; identical to SEQ ID NO: 5140
  GFR-binding peptide
  MOD_RES (12)..(13)..(14)..(15)..(16): Xaa is A or G
  MOD_RES (17)..(18)..(19)..(20): Xaa is A or G or is absent

SEQ ID NO: 12578 - protein, 40 aa, Artificial Sequence; identical to SEQ ID NO: 5142
  GFR-binding peptide
  MOD_RES (2)..(4)..(38)..(39): Xaa is C or S
  MOD_RES (16)..(17)..(18)..(19)..(20): Xaa is A or G
  MOD_RES (21)..(22)..(23)..(24): Xaa is A or G or is absent

SEQ ID NO: 12579 - protein, 36 aa, Artificial Sequence
  GFR-binding peptide
  MOD_RES (1)..(3)..(36): Xaa is C or S
  MOD_RES (14)..(15)..(16)..(17)..(18): Xaa is A or G
  MOD_RES (19)..(20)..(21)..(22): Xaa is A or G or is absent
XKXSKVIMEYQKYXXXXXXXXXIFLISIPSLDQSVX

SEQ ID NO: 12580 - protein, 35 aa, Artificial Sequence
  GFR-binding peptide
  MOD_RES (1)..(33)..(34): Xaa is C or S
XGEVVMENSLQEVVKDYEDYYLMTLPELETPVXXA

SEQ ID NO: 12581 - protein, 34 aa, Artificial Sequence
  GFR-binding peptide
  MOD_RES (1)..(33)..(34): Xaa is C or S
XGEVVMEEYQKYVVKDYEDIFLMSIPSLETPVXX

SEQ ID NO: 12582 - protein, 33 aa, Artificial Sequence
  GFR-binding peptide
  MOD_RES (33)..(33): Xaa is C or S
  MOD_RES (11)..(12)..(13)..(14)..(15): Xaa is A or G
  MOD_RES (16)..(17)..(18)..(19): Xaa is A or G or is absent
EVVMDEYQKYXXXXXXXXXIFLISIPSLRTPVX

SEQ ID NO: 12583 - protein, 40 aa, Artificial Sequence
  GFR-binding peptide
  MOD_RES (2)..(4)..(38)..(39): Xaa is C or S
  MOD_RES (16)..(17)..(18)..(19)..(20): Xaa is A or G
  MOD_RES (21)..(22)..(23)..(24): Xaa is A or G or is absent
HXGXSRVVMNEYQKYXXXXXXXXXIFLVSIPSLKTPAXXP

SEQ ID NO: 12584 - protein, 37 aa, Artificial Sequence; identical to SEQ ID NO: 5143
  GFR-binding peptide
  MOD_RES (31)..(32): Xaa is C or S

SEQ ID NO: 12585 - protein, 41 aa, Artificial Sequence
  GFR-binding peptide
  MOD_RES (1)..(3)..(37): Xaa is C or S
  MOD_RES (15)..(16)..(17)..(18)..(19): Xaa is A or G
  MOD_RES (20)..(21)..(22)..(23): Xaa is A or G or is absent
XGXSRVVMNEYQKYXXXXXXXXXIFLVSIPSLKTPAXTPKT

SEQ ID NO: 12586 - protein, 31 aa, Artificial Sequence
  GFR-binding peptide
  MOD_RES (31)..(31): Xaa is C or S
EVVMEEYQKYVVKDYEDIFLMSIPSLETPVX

SEQ ID NO: 12587 - protein, 40 aa, Artificial Sequence
  GFR-binding peptide
  MOD_RES (1)..(3)..(37)..(38): Xaa is C or S
  MOD_RES (15)..(16)..(17)..(18)..(19): Xaa is A or G
  MOD_RES (20)..(21)..(22)..(23): Xaa is A or G or is absent
XGXSEVVMDRYKKLXXXXXXXXXFYLISIANLRTPVXXTP

SEQ ID NO: 12588 - protein, 38 aa, Artificial Sequence
  GFR-binding peptide
  MOD_RES (1)..(33)..(34): Xaa is C or S
XGEVVMDNSLQEVVKENEDYYLMTLPELETPVXXAKPI

SEQ ID NO: 12589 - protein, 39 aa, Artificial Sequence; identical to SEQ ID NO: 5147
  GFR-binding peptide
  MOD_RES (1)..(33)..(34): Xaa is C or S

SEQ ID NO: 12590 - protein, 36 aa, Artificial Sequence; identical to SEQ ID NO: 5148
  GFR-binding peptide
  MOD_RES (2)..(4)..(35)..(36): Xaa is C or S

SEQ ID NO: 12591 - protein, 37 aa, Artificial Sequence; identical to SEQ ID NO: 5149
  GFR-binding peptide
  MOD_RES (34)..(35): Xaa is C or S
  MOD_RES (12)..(13)..(14)..(15)..(16): Xaa is A or G
  MOD_RES (17)..(18)..(19)..(20): Xaa is A or G or is absent

SEQ ID NO: 12592 - protein, 41 aa, Artificial Sequence; identical to SEQ ID NO: 5150
  GFR-binding peptide
  MOD_RES (1)..(3)..(37)..(38): Xaa is C or S
  MOD_RES (15)..(16)..(17)..(18)..(19): Xaa is A or G
  MOD_RES (20)..(21)..(22)..(23): Xaa is A or G or is absent

SEQ ID NO: 12593 - protein, 41 aa, Artificial Sequence; identical to SEQ ID NO: 5151
  GFR-binding peptide
  MOD_RES (2)..(36)..(37): Xaa is C or S
  MOD_RES (14)..(15)..(16)..(17)..(18): Xaa is A or G
  MOD_RES (19)..(20)..(21)..(22): Xaa is A or G or is absent

SEQ ID NO: 12594 - protein, 31 aa, Artificial Sequence; identical to SEQ ID NO: 5152
  GFR-binding peptide
  MOD_RES (31)..(31): Xaa is C or S

SEQ ID NO: 12595 - protein, 38 aa, Artificial Sequence
  GFR-binding peptide
  MOD_RES (34)..(35): Xaa is C or S
  MOD_RES (12)..(13)..(14)..(15)..(16): Xaa is A or G
  MOD_RES (17)..(18)..(19)..(20): Xaa is A or G or is absent
GEVVMENSLQEXXXXXXXXXYYLMTLPELETPVXXAKP

SEQ ID NO: 12596 - protein, 33 aa, Artificial Sequence
  GFR-binding peptide
  MOD_RES (31)..(32): Xaa is C or S
EVVMDRYKKLVVNNASDFYLISIANLRTPVXXT

SEQ ID NO: 12597 - protein, 35 aa, Artificial Sequence
  GFR-binding peptide
  MOD_RES (2)..(33)..(34): Xaa is C or S
KXSKVVMEYQKYVKPTRGVIFLISIPSLDQPVXXP

SEQ ID NO: 12598 - protein, 38 aa, Artificial Sequence
  GFR-binding peptide
  MOD_RES (1)..(3)..(35): Xaa is C or S
XGXSRVVMNNSLQEIVNSSDDYYLVTLPELKTPAXTPK

SEQ ID NO: 12599 - protein, 36 aa, Artificial Sequence; identical to SEQ ID NO: 5154
  GFR-binding peptide
  MOD_RES (2)..(34)..(35): Xaa is C or S

SEQ ID NO: 12600 - protein, 38 aa, Artificial Sequence; identical to SEQ ID NO: 5157
  GFR-binding peptide
  MOD_RES (2)..(4)..(36)..(37): Xaa is C or S

SEQ ID NO: 12601 - protein, 34 aa, Artificial Sequence; identical to SEQ ID NO: 5159
  GFR-binding peptide
  MOD_RES (2)..(34): Xaa is C or S

SEQ ID NO: 12602 - protein, 39 aa, Artificial Sequence
  GFR-binding peptide
  MOD_RES (2)..(36)..(37): Xaa is C or S
  MOD_RES (14)..(15)..(16)..(17)..(18): Xaa is A or G
  MOD_RES (19)..(20)..(21)..(22): Xaa is A or G or is absent
GXSEVVMDEYQKYXXXXXXXXXIFLISIPSLRTPVXXTP

SEQ ID NO: 12603 - protein, 42 aa, Artificial Sequence; identical to SEQ ID NO: 5160
  GFR-binding peptide
  MOD_RES (2)..(36): Xaa is C or S
  MOD_RES (14)..(15)..(16)..(17)..(18): Xaa is A or G
  MOD_RES (19)..(20)..(21)..(22): Xaa is A or G or is absent

SEQ ID NO: 12604 - protein, 39 aa, Artificial Sequence
  GFR-binding peptide
  MOD_RES (34)..(35): Xaa is C or S
  MOD_RES (12)..(13)..(14)..(15)..(16): Xaa is A or G
  MOD_RES (17)..(18)..(19)..(20): Xaa is A or G or is absent
GEVVMDNSLQEXXXXXXXXXYYVMPLPELETPVXXAKPI

SEQ ID NO: 12605 - protein, 38 aa, Artificial Sequence; identical to SEQ ID NO: 5164
  GFR-binding peptide
  MOD_RES (33)..(34): Xaa is C or S
  MOD_RES (11)..(12)..(13)..(14)..(15): Xaa is A or G
  MOD_RES (16)..(17)..(18)..(19): Xaa is A or G or is absent

SEQ ID NO: 12606 - protein, 43 aa, Artificial Sequence; identical to SEQ ID NO: 5165
  GFR-binding peptide
  MOD_RES (2)..(4)..(38): Xaa is C or S
  MOD_RES (16)..(17)..(18)..(19)..(20): Xaa is A or G
  MOD_RES (21)..(22)..(23)..(24): Xaa is A or G or is absent

SEQ ID NO: 12607 - protein, 35 aa, Artificial Sequence
  GFR-binding peptide
  MOD_RES (32)..(33): Xaa is C or S
GEVVMDNSLQEVVKENEDYYLMTLPELETPVXXAK

SEQ ID NO: 12608 - protein, 39 aa, Artificial Sequence
  GFR-binding peptide
  MOD_RES (33)..(34): Xaa is C or S
  MOD_RES (11)..(12)..(13)..(14)..(15): Xaa is A or G
  MOD_RES (16)..(17)..(18)..(19): Xaa is A or G or is absent
SRVIMNSLQEXXXXXXXXXYYVIPLPELAQPVXXPAASA

SEQ ID NO: 12609 - protein, 36 aa, Artificial Sequence
  GFR-binding peptide
  MOD_RES (2)..(33)..(34): Xaa is C or S
KXSRVIMNSLQEVKPKRGVYYLITLPELAQPVXXPA

SEQ ID NO: 12610 - protein, 40 aa, Artificial Sequence
  GFR-binding peptide
  MOD_RES (1)..(35)..(36): Xaa is C or S
  MOD_RES (13)..(14)..(15)..(16)..(17): Xaa is A or G
  MOD_RES (18)..(19)..(20)..(21): Xaa is A or G or is absent
XGEVVMENSLQEXXXXXXXXXYYVMPLPELETPVXXAKPI

SEQ ID NO: 12611 - protein, 41 aa, Artificial Sequence; identical to SEQ ID NO: 5167
  GFR-binding peptide
  MOD_RES (2)..(4)..(38)..(39): Xaa is C or S
  MOD_RES (16)..(17)..(18)..(19)..(20): Xaa is A or G
  MOD_RES (21)..(22)..(23)..(24): Xaa is A or G or is absent

SEQ ID NO: 12612 - protein, 37 aa, Artificial Sequence; identical to SEQ ID NO: 5168
  GFR-binding peptide
  MOD_RES (34)..(35): Xaa is C or S
  MOD_RES (12)..(13)..(14)..(15)..(16): Xaa is A or G
  MOD_RES (17)..(18)..(19)..(20): Xaa is A or G or is absent

SEQ ID NO: 12613 - protein, 34 aa, Artificial Sequence
  GFR-binding peptide
  MOD_RES (33)..(34): Xaa is C or S
  MOD_RES (11)..(12)..(13)..(14)..(15): Xaa is A or G
  MOD_RES (16)..(17)..(18)..(19): Xaa is A or G or is absent
RVVMNNSLQEXXXXXXXXXYYVVPLPELQTPAXX

SEQ ID NO: 12614 - protein, 32 aa, Artificial Sequence; identical to SEQ ID NO: 5171
  GFR-binding peptide
  MOD_RES (31)..(32): Xaa is C or S

SEQ ID NO: 12615 - protein, 33 aa, Artificial Sequence
  GFR-binding peptide
  MOD_RES (1)..(33): Xaa is C or S
XGEVVMEEYQKYVVKDYEDIFLMSIPSLETPVX

SEQ ID NO: 12616 - protein, 30 aa, Artificial Sequence; identical to SEQ ID NO: 5173
  GFR-binding peptide

SEQ ID NO: 12617 - protein, 36 aa, Artificial Sequence
  GFR-binding peptide
  MOD_RES (1)..(33)..(34): Xaa is C or S
XARVVMNEYQKYIVNSSDDIFLVSIPSLQTPAXXPK

SEQ ID NO: 12618 - protein, 33 aa, Artificial Sequence
  GFR-binding peptide
  MOD_RES (2)..(33): Xaa is C or S
KXSKVIMEYQKYIKPTKGIIFLISIPSLDQSVX

SEQ ID NO: 12619 - protein, 34 aa, Artificial Sequence; identical to SEQ ID NO: 5177
  GFR-binding peptide
  MOD_RES (33)..(34): Xaa is C or S
  MOD_RES (11)..(12)..(13)..(14)..(15): Xaa is A or G
  MOD_RES (16)..(17)..(18)..(19): Xaa is A or G or is absent

SEQ ID NO: 12620 - protein, 40 aa, Artificial Sequence
  GFR-binding peptide
  MOD_RES (2)..(4)..(38)..(39): Xaa is C or S
  MOD_RES (16)..(17)..(18)..(19)..(20): Xaa is A or G
  MOD_RES (21)..(22)..(23)..(24): Xaa is A or G or is absent
RXGXGEVVMDEYQKYXXXXXXXXXIFLMSIPSLETPVXXA

SEQ ID NO: 12621 - protein, 34 aa, Artificial Sequence
  GFR-binding peptide
  MOD_RES (32)..(33): Xaa is C or S
SEVVMDNSLQEVVNNASDYYVIPLPELRTPVXXT

SEQ ID NO: 12622 - protein, 33 aa, Artificial Sequence; identical to SEQ ID NO: 5180
  GFR-binding peptide
  MOD_RES (12)..(13)..(14)..(15)..(16): Xaa is A or G
  MOD_RES (17)..(18)..(19)..(20): Xaa is A or G or is absent

SEQ ID NO: 12623 - protein, 35 aa, Artificial Sequence
  GFR-binding peptide
  MOD_RES (31)..(32): Xaa is C or S
RVVMNEYQKYIVNSSDDIFLVSIPSLKTPAXXPKP

SEQ ID NO: 12624 - protein, 35 aa, Artificial Sequence; identical to SEQ ID NO: 5183
  GFR-binding peptide
  MOD_RES (1)..(35): Xaa is C or S
  MOD_RES (13)..(14)..(15)..(16)..(17): Xaa is A or G
  MOD_RES (18)..(19)..(20)..(21): Xaa is A or G or is absent

SEQ ID NO: 12625 - protein, 36 aa, Artificial Sequence; identical to SEQ ID NO: 5185
  GFR-binding peptide
  MOD_RES (2)..(33)..(34): Xaa is C or S

SEQ ID NO: 12626 - protein, 39 aa, Artificial Sequence
  GFR-binding peptide
  MOD_RES (1)..(3)..(37)..(38): Xaa is C or S
  MOD_RES (15)..(16)..(17)..(18)..(19): Xaa is A or G
  MOD_RES (20)..(21)..(22)..(23): Xaa is A or G or is absent
XGXSRVVMNNSLQEXXXXXXXXXYYVVPLPELKTPAXXP

SEQ ID NO: 12627 - protein, 33 aa, Artificial Sequence
  GFR-binding peptide
  MOD_RES (12)..(13)..(14)..(15)..(16): Xaa is A or G
  MOD_RES (17)..(18)..(19)..(20): Xaa is A or G or is absent
GEVVMEEYQKYXXXXXXXXXIFLMSIPSLETPV

SEQ ID NO: 12628 - protein, 40 aa, Artificial Sequence; identical to SEQ ID NO: 5190
  GFR-binding peptide
  MOD_RES (1)..(3)..(37)..(38): Xaa is C or S
  MOD_RES (15)..(16)..(17)..(18)..(19): Xaa is A or G
  MOD_RES (20)..(21)..(22)..(23): Xaa is A or G or is absent

SEQ ID NO: 12629 - protein, 42 aa, Artificial Sequence
  GFR-binding peptide
  MOD_RES (2)..(4)..(38)..(39): Xaa is C or S
  MOD_RES (16)..(17)..(18)..(19)..(20): Xaa is A or G
  MOD_RES (21)..(22)..(23)..(24): Xaa is A or G or is absent
RXGXGEVVMDEYQKYXXXXXXXXXIFLMSIPSLETPVXXAKP

SEQ ID NO: 12630 - protein, 33 aa, Artificial Sequence; identical to SEQ ID NO: 5193
  GFR-binding peptide
  MOD_RES (33)..(33): Xaa is C or S
  MOD_RES (11)..(12)..(13)..(14)..(15): Xaa is A or G
  MOD_RES (16)..(17)..(18)..(19): Xaa is A or G or is absent

SEQ ID NO: 12631 - protein, 38 aa, Artificial Sequence
  GFR-binding peptide
  MOD_RES (33)..(34): Xaa is C or S
  MOD_RES (11)..(12)..(13)..(14)..(15): Xaa is A or G
  MOD_RES (16)..(17)..(18)..(19): Xaa is A or G or is absent
SRVIMNSLQEXXXXXXXXXYYVIPLPELAQPVXXPAAS

SEQ ID NO: 12632 - protein, 35 aa, Artificial Sequence; identical to SEQ ID NO: 5195
  GFR-binding peptide
  MOD_RES (1)..(32)..(33): Xaa is C or S

SEQ ID NO: 12633 - protein, 39 aa, Artificial Sequence
  GFR-binding peptide
  MOD_RES (33)..(34): Xaa is C or S
  MOD_RES (11)..(12)..(13)..(14)..(15): Xaa is A or G
  MOD_RES (16)..(17)..(18)..(19): Xaa is A or G or is absent
SRVIMNSLQEXXXXXXXXXYYLITLPELAQPVXXPAASA

SEQ ID NO: 12634 - protein, 41 aa, Artificial Sequence
  GFR-binding peptide
  MOD_RES (1)..(3)..(35)..(36): Xaa is C or S
XGXGEVVMDEYQKYVVKENEDIFLMSIPSLETPVXXAKPIK

SEQ ID NO: 12635 - protein, 39 aa, Artificial Sequence
  GFR-binding peptide
  MOD_RES (2)..(4)..(36)..(37): Xaa is C or S
HXGXSRVVMNEYQKYIVNSSDDIFLVSIPSLKTPAXXPK

SEQ ID NO: 12636 - protein, 39 aa, Artificial Sequence
  GFR-binding peptide
  MOD_RES (1)..(33)..(34): Xaa is C or S
XGEVVMDNSLQEVVKENEDYYLMTLPELETPVXXAKPIK

SEQ ID NO: 12637 - protein, 35 aa, Artificial Sequence; identical to SEQ ID NO: 5202
  GFR-binding peptide
  MOD_RES (1)..(35): Xaa is C or S
  MOD_RES (13)..(14)..(15)..(16)..(17): Xaa is A or G
  MOD_RES (18)..(19)..(20)..(21): Xaa is A or G or is absent

SEQ ID NO: 12638 - protein, 43 aa, Artificial Sequence
  GFR-binding peptide
  MOD_RES (1)..(3)..(37)..(38): Xaa is C or S
  MOD_RES (15)..(16)..(17)..(18)..(19): Xaa is A or G
  MOD_RES (20)..(21)..(22)..(23): Xaa is A or G or is absent
XGXSRVVMNNSLQEXXXXXXXXXYYVVPLPELKTPAXXPKPVY

SEQ ID NO: 12639 - protein, 35 aa, Artificial Sequence; identical to SEQ ID NO: 5208
  GFR-binding peptide
  MOD_RES (1)..(34)..(35): Xaa is C or S
  MOD_RES (12)..(13)..(14)..(15)..(16): Xaa is A or G
  MOD_RES (17)..(18)..(19)..(20): Xaa is A or G or is absent

SEQ ID NO: 12640 - protein, 34 aa, Artificial Sequence
  GFR-binding peptide
  MOD_RES (2)..(4): Xaa is C or S
SXKXSKVVMEYQKYVKPTRGVIFLISIPSLDQPV

SEQ ID NO: 12641 - protein, 35 aa, Artificial Sequence
  GFR-binding peptide
  MOD_RES (1)..(35): Xaa is C or S
  MOD_RES (13)..(14)..(15)..(16)..(17): Xaa is A or G
  MOD_RES (18)..(19)..(20)..(21): Xaa is A or G or is absent
XSEVVMDEYQKYXXXXXXXXXIFLISIPSLRTPVX

SEQ ID NO: 12642 - protein, 43 aa, Artificial Sequence
  GFR-binding peptide
  MOD_RES (2)..(4)..(38)..(39): Xaa is C or S
  MOD_RES (16)..(17)..(18)..(19)..(20): Xaa is A or G
  MOD_RES (21)..(22)..(23)..(24): Xaa is A or G or is absent
RXGXSEVVMDNSLQEXXXXXXXXXYYVIPLPELRTPVXXTPPT

SEQ ID NO: 12643 - protein, 33 aa, Artificial Sequence
  GFR-binding peptide
  MOD_RES (1)..(1): Xaa is C or S
  MOD_RES (12)..(13)..(14)..(15)..(16): Xaa is A or G
  MOD_RES (17)..(18)..(19)..(20): Xaa is A or G or is absent
XSKVIMEYQKYXXXXXXXXXIFLISIPSLDQSV

SEQ ID NO: 12644 - protein, 40 aa, Artificial Sequence
  GFR-binding peptide
  MOD_RES (2)..(4)..(36)..(37): Xaa is C or S
HXGXSRVVMNNSLQEIVNSSDDYYLVTLPELKTPAXXPKP

SEQ ID NO: 12645 - protein, 37 aa, Artificial Sequence
  GFR-binding peptide
  MOD_RES (1)..(33)..(34): Xaa is C or S
XGEVVMEEYQKYVVKDYEDIFLMSIPSLETPVXXAKP

SEQ ID NO: 12646 - protein, 35 aa, Artificial Sequence
  GFR-binding peptide
  MOD_RES (2)..(35): Xaa is C or S
  MOD_RES (13)..(14)..(15)..(16)..(17): Xaa is A or G
  MOD_RES (18)..(19)..(20)..(21): Xaa is A or G or is absent
KXSKVIMNSLQEXXXXXXXXXYYVIPLPELDQSVX

SEQ ID NO: 12647 - protein, 34 aa, Artificial Sequence
  GFR-binding peptide
  MOD_RES (1)..(33)..(34): Xaa is C or S
XSRVVMNEYQKYIVNSSDDIFLVSIPSLKTPAXX

SEQ ID NO: 12648 - protein, 40 aa, Artificial Sequence
  GFR-binding peptide
  MOD_RES (2)..(4)..(38)..(39): Xaa is C or S
  MOD_RES (16)..(17)..(18)..(19)..(20): Xaa is A or G
  MOD_RES (21)..(22)..(23)..(24): Xaa is A or G or is absent
HXGXSRVVMNNSLQEXXXXXXXXXYYLVTLPELKTPAXXP

SEQ ID NO: 12649 - protein, 40 aa, Artificial Sequence
  GFR-binding peptide
  MOD_RES (1)..(3)..(37): Xaa is C or S
  MOD_RES (15)..(16)..(17)..(18)..(19): Xaa is A or G
  MOD_RES (20)..(21)..(22)..(23): Xaa is A or G or is absent
XGXSRVVMNNSLQEXXXXXXXXXYYLVTLPELKTPAXTPK

SEQ ID NO: 12650 - protein, 34 aa, Artificial Sequence; identical to SEQ ID NO: 5213
  GFR-binding peptide
  MOD_RES (1)..(3): Xaa is C or S

SEQ ID NO: 12651 - protein, 32 aa, Artificial Sequence; identical to SEQ ID NO: 5214
  GFR-binding peptide
  MOD_RES (31)..(32): Xaa is C or S

SEQ ID NO: 12652 - protein, 34 aa, Artificial Sequence
  GFR-binding peptide
  MOD_RES (33)..(34): Xaa is C or S
  MOD_RES (11)..(12)..(13)..(14)..(15): Xaa is A or G
  MOD_RES (16)..(17)..(18)..(19): Xaa is A or G or is absent
RVVMNNSLQEXXXXXXXXXYYVVPLPELKTPAXX

SEQ ID NO: 12653 - protein, 33 aa, Artificial Sequence
  GFR-binding peptide
  MOD_RES (33)..(33): Xaa is C or S
  MOD_RES (11)..(12)..(13)..(14)..(15): Xaa is A or G
  MOD_RES (16)..(17)..(18)..(19): Xaa is A or G or is absent
SKVVMNSLQEXXXXXXXXXYYLITLPELDQPVX

SEQ ID NO: 12654 - protein, 37 aa, Artificial Sequence
  GFR-binding peptide
  MOD_RES (1)..(35)..(36): Xaa is C or S
  MOD_RES (13)..(14)..(15)..(16)..(17): Xaa is A or G
  MOD_RES (18)..(19)..(20)..(21): Xaa is A or G or is absent
XSRVVMNNSLQEXXXXXXXXXYYLVTLPELKTPAXXP

SEQ ID NO: 12655 - protein, 37 aa, Artificial Sequence; identical to SEQ ID NO: 5217
  GFR-binding peptide
  MOD_RES (1)..(3)..(36)..(37): Xaa is C or S
  MOD_RES (14)..(15)..(16)..(17)..(18): Xaa is A or G
  MOD_RES (19)..(20)..(21)..(22): Xaa is A or G or is absent

SEQ ID NO: 12656 - protein, 36 aa, Artificial Sequence
  GFR-binding peptide
  MOD_RES (1)..(32)..(33): Xaa is C or S
XSKVVMNSLQEVKPTRGVYYVIPLPELDQPVXXPSA

SEQ ID NO: 12657 - protein, 40 aa, Artificial Sequence; identical to SEQ ID NO: 5220
  GFR-binding peptide
  MOD_RES (2)..(4)..(35)..(36): Xaa is C or S

SEQ ID NO: 12658 - protein, 37 aa, Artificial Sequence
  GFR-binding peptide
  MOD_RES (2)..(36): Xaa is C or S
  MOD_RES (14)..(15)..(16)..(17)..(18): Xaa is A or G
  MOD_RES (19)..(20)..(21)..(22): Xaa is A or G or is absent
GXSRVVMNNSLQEXXXXXXXXXYYVVPLPELKTPAXT

SEQ ID NO: 12659 - protein, 32 aa, Artificial Sequence
  GFR-binding peptide
  MOD_RES (31)..(32): Xaa is C or S
SKVIMEYQKYIKPTKGIIFLISIPSLDQSVXX

SEQ ID NO: 12660 - protein, 37 aa, Artificial Sequence; identical to SEQ ID NO: 5223
  GFR-binding peptide
  MOD_RES (31)..(32): Xaa is C or S

SEQ ID NO: 12661 - protein, 37 aa, Artificial Sequence
  GFR-binding peptide
  MOD_RES (2)..(35)..(36): Xaa is C or S
  MOD_RES (13)..(14)..(15)..(16)..(17): Xaa is A or G
  MOD_RES (18)..(19)..(20)..(21): Xaa is A or G or is absent
KXSRVIMEYQKYXXXXXXXXXIFLISIPSLAQPVXXP

SEQ ID NO: 12662 - protein, 32 aa, Artificial Sequence
  GFR-binding peptide
  MOD_RES (11)..(12)..(13)..(14)..(15): Xaa is A or G
  MOD_RES (16)..(17)..(18)..(19): Xaa is A or G or is absent
SKVVMNSLQEXXXXXXXXXYYVIPLPELDQPV

SEQ ID NO: 12663 - protein, 41 aa, Artificial Sequence; identical to SEQ ID NO: 5226
  GFR-binding peptide
  MOD_RES (2)..(4)..(35)..(36): Xaa is C or S

SEQ ID NO: 12664 - protein, 35 aa, Artificial Sequence; identical to SEQ ID NO: 5229
  GFR-binding peptide
  MOD_RES (33)..(34): Xaa is C or S
  MOD_RES (11)..(12)..(13)..(14)..(15): Xaa is A or G
  MOD_RES (16)..(17)..(18)..(19): Xaa is A or G or is absent

SEQ ID NO: 12665 - protein, 39 aa, Artificial Sequence; identical to SEQ ID NO: 5230
  GFR-binding peptide
  MOD_RES (2)..(4)..(38)..(39): Xaa is C or S
  MOD_RES (16)..(17)..(18)..(19)..(20): Xaa is A or G
  MOD_RES (21)..(22)..(23)..(24): Xaa is A or G or is absent

SEQ ID NO: 12666 - protein, 36 aa, Artificial Sequence
  GFR-binding peptide
  MOD_RES (34)..(35): Xaa is C or S
  MOD_RES (12)..(13)..(14)..(15)..(16): Xaa is A or G
  MOD_RES (17)..(18)..(19)..(20): Xaa is A or G or is absent
SEVVMDNSLQEXXXXXXXXXYYLITLPELRTPVXXT

SEQ ID NO: 12667 - protein, 31 aa, Artificial Sequence
  GFR-binding peptide
ARVVMNNSLQEIVNSSDDYYVVPLPELQTPA

SEQ ID NO: 12668 - protein, 34 aa, Artificial Sequence
  GFR-binding peptide
  MOD_RES (1)..(3): Xaa is C or S
XGXSRVVMNNSLQEIVNSSDDYYVVPLPELKTPA

SEQ ID NO: 12669 - protein, 37 aa, Artificial Sequence
  GFR-binding peptide
  MOD_RES (1)..(3)..(35)..(36): Xaa is C or S
XGXSEVVMDRYKKLVVNNASDFYLISIANLRTPVXXT

SEQ ID NO: 12670 - protein, 36 aa, Artificial Sequence; identical to SEQ ID NO: 5234
  GFR-binding peptide
  MOD_RES (1)..(32)..(33): Xaa is C or S

SEQ ID NO: 12671 - protein, 31 aa, Artificial Sequence; identical to SEQ ID NO: 5237
  GFR-binding peptide
  MOD_RES (31)..(31): Xaa is C or S

SEQ ID NO: 12672 - protein, 38 aa, Artificial Sequence
  GFR-binding peptide
  MOD_RES (32)..(32): Xaa is C or S
SRVVMNEYQKYIVNSSDDIFLVSIPSLKTPAXTPKTVH

SEQ ID NO: 12673 - protein, 40 aa, Artificial Sequence
  GFR-binding peptide
  MOD_RES (2)..(4)..(37)..(38): Xaa is C or S
  MOD_RES (15)..(16)..(17)..(18)..(19): Xaa is A or G
  MOD_RES (20)..(21)..(22)..(23): Xaa is A or G or is absent
SXKXSKVVMNSLQEXXXXXXXXXYYLITLPELDQPVXXPS

SEQ ID NO: 12674 - protein, 42 aa, Artificial Sequence; identical to SEQ ID NO: 5239
  GFR-binding peptide
  MOD_RES (2)..(4)..(37)..(38): Xaa is C or S
  MOD_RES (15)..(16)..(17)..(18)..(19): Xaa is A or G
  MOD_RES (20)..(21)..(22)..(23): Xaa is A or G or is absent

SEQ ID NO: 12675 - protein, 39 aa, Artificial Sequence
  GFR-binding peptide
  MOD_RES (33)..(34): Xaa is C or S
  MOD_RES (11)..(12)..(13)..(14)..(15): Xaa is A or G
  MOD_RES (16)..(17)..(18)..(19): Xaa is A or G or is absent
RVVMNNSLQEXXXXXXXXXYYLVTLPELKTPAXXPKPVY

SEQ ID NO: 12676 - protein, 41 aa, Artificial Sequence; identical to SEQ ID NO: 5241
  GFR-binding peptide
  MOD_RES (2)..(35)..(36): Xaa is C or S
  MOD_RES (13)..(14)..(15)..(16)..(17): Xaa is A or G
  MOD_RES (18)..(19)..(20)..(21): Xaa is A or G or is absent

SEQ ID NO: 12677 - protein, 41 aa, Artificial Sequence; identical to SEQ ID NO: 5242
  GFR-binding peptide
  MOD_RES (2)..(35)..(36): Xaa is C or S
  MOD_RES (13)..(14)..(15)..(16)..(17): Xaa is A or G
  MOD_RES (18)..(19)..(20)..(21): Xaa is A or G or is absent

SEQ ID NO: 12678 - protein, 39 aa, Artificial Sequence; identical to SEQ ID NO: 5244
  GFR-binding peptide
  MOD_RES (1)..(3)..(37)..(38): Xaa is C or S
  MOD_RES (15)..(16)..(17)..(18)..(19): Xaa is A or G
  MOD_RES (20)..(21)..(22)..(23): Xaa is A or G or is absent

SEQ ID NO: 12679 - protein, 35 aa, Artificial Sequence; identical to SEQ ID NO: 5245
  GFR-binding peptide
  MOD_RES (2)..(4): Xaa is C or S

SEQ ID NO: 12680 - protein, 36 aa, Artificial Sequence
  GFR-binding peptide
  MOD_RES (1)..(3): Xaa is C or S
  MOD_RES (15)..(16)..(17)..(18)..(19): Xaa is A or G
  MOD_RES (20)..(21)..(22)..(23): Xaa is A or G or is absent
XGXSEVVMDRYKKLXXXXXXXXXFYLISIANLRTPV

SEQ ID NO: 12681 - protein, 41 aa, Artificial Sequence
  GFR-binding peptide
  MOD_RES (2)..(4)..(38)..(39): Xaa is C or S
  MOD_RES (16)..(17)..(18)..(19)..(20): Xaa is A or G
  MOD_RES (21)..(22)..(23)..(24): Xaa is A or G or is absent
RXGXSEVVMDNSLQEXXXXXXXXXYYLITLPELRTPVXXTP

SEQ ID NO: 12682 - protein, 33 aa, Artificial Sequence
  GFR-binding peptide
  MOD_RES (2)..(2): Xaa is C or S
GXSEVVMDRYKKLVVNNASDFYLISIANLRTPV

SEQ ID NO: 12683 - protein, 38 aa, Artificial Sequence
  GFR-binding peptide
  MOD_RES (34)..(35): Xaa is C or S
  MOD_RES (12)..(13)..(14)..(15)..(16): Xaa is A or G
  MOD_RES (17)..(18)..(19)..(20): Xaa is A or G or is absent
GEVVMDNSLQEXXXXXXXXXYYLMTLPELETPVXXAKP

SEQ ID NO: 12684 - protein, 38 aa, Artificial Sequence; identical to SEQ ID NO: 5250
  GFR-binding peptide
  MOD_RES (1)..(3)..(35)..(36): Xaa is C or S

SEQ ID NO: 12685 - protein, 33 aa, Artificial Sequence
  GFR-binding peptide
  MOD_RES (1)..(33): Xaa is C or S
XGEVVMDNSLQEVVKENEDYYVMPLPELETPVX

SEQ ID NO: 12686 - protein, 33 aa, Artificial Sequence; identical to SEQ ID NO: 5255
  GFR-binding peptide
  MOD_RES (33)..(33): Xaa is C or S
  MOD_RES (11)..(12)..(13)..(14)..(15): Xaa is A or G
  MOD_RES (16)..(17)..(18)..(19): Xaa is A or G or is absent

SEQ ID NO: 12687 - protein, 40 aa, Artificial Sequence; identical to SEQ ID NO: 5256
  GFR-binding peptide
  MOD_RES (1)..(3)..(35)..(36): Xaa is C or S

SEQ ID NO: 12688 - protein, 33 aa, Artificial Sequence
  GFR-binding peptide
  MOD_RES (1)..(3): Xaa is C or S
XKXSKVVMNSLQEVKPTRGVYYVIPLPELDQPV

SEQ ID NO: 12689 - protein, 39 aa, Artificial Sequence; identical to SEQ ID NO: 5257
  GFR-binding peptide
  MOD_RES (2)..(33)..(34): Xaa is C or S

SEQ ID NO: 12690 - protein, 33 aa, Artificial Sequence
  GFR-binding peptide
  MOD_RES (31)..(32): Xaa is C or S
SKVVMNSLQEVKPTRGVYYLITLPELDQPVXXP

SEQ ID NO: 12691 - protein, 40 aa, Artificial Sequence; identical to SEQ ID NO: 5258
  GFR-binding peptide
  MOD_RES (2)..(36)..(37): Xaa is C or S
  MOD_RES (14)..(15)..(16)..(17)..(18): Xaa is A or G
  MOD_RES (19)..(20)..(21)..(22): Xaa is A or G or is absent

SEQ ID NO: 12692 - protein, 42 aa, Artificial Sequence
  GFR-binding peptide
  MOD_RES (2)..(36)..(37): Xaa is C or S
  MOD_RES (14)..(15)..(16)..(17)..(18): Xaa is A or G
  MOD_RES (19)..(20)..(21)..(22): Xaa is A or G or is absent
GXSEVVMDQYNKLXXXXXXXXXLYLISIASLRTPVXXTPPTS

SEQ ID NO: 12693 - protein, 33 aa, Artificial Sequence
  GFR-binding peptide
  MOD_RES (31)..(32): Xaa is C or S
RVVMNNSLQEIVNSSDDYYVVPLPELKTPAXXP

SEQ ID NO: 12694 - protein, 34 aa, Artificial Sequence
  GFR-binding peptide
  MOD_RES (33)..(34): Xaa is C or S
  MOD_RES (11)..(12)..(13)..(14)..(15): Xaa is A or G
  MOD_RES (16)..(17)..(18)..(19): Xaa is A or G or is absent
SKVVMNSLQEXXXXXXXXXYYLITLPELDQPVXX

SEQ ID NO: 12695 - protein, 43 aa, Artificial Sequence
  GFR-binding peptide
  MOD_RES (2)..(4)..(38)..(39): Xaa is C or S
  MOD_RES (16)..(17)..(18)..(19)..(20): Xaa is A or G
  MOD_RES (21)..(22)..(23)..(24): Xaa is A or G or is absent
RXGXGEVVMDNSLQEXXXXXXXXXYYVMPLPELETPVXXAKPI

SEQ ID NO: 12696 - protein, 39 aa, Artificial Sequence; identical to SEQ ID NO: 5265
  GFR-binding peptide
  MOD_RES (1)..(3)..(36)..(37): Xaa is C or S
  MOD_RES (14)..(15)..(16)..(17)..(18): Xaa is A or G
  MOD_RES (19)..(20)..(21)..(22): Xaa is A or G or is absent

SEQ ID NO: 12697 - protein, 33 aa, Artificial Sequence
  GFR-binding peptide
  MOD_RES (2)..(2): Xaa is C or S
GXGEVVMDEYQKYVVKENEDIFLMSIPSLETPV

SEQ ID NO: 12698 - protein, 39 aa, Artificial Sequence
  GFR-binding peptide
  MOD_RES (1)..(35)..(36): Xaa is C or S
  MOD_RES (13)..(14)..(15)..(16)..(17): Xaa is A or G
  MOD_RES (18)..(19)..(20)..(21): Xaa is A or G or is absent
XSRVVMNNSLQEXXXXXXXXXYYLVTLPELKTPAXXPKP

SEQ ID NO: 12699 - protein, 38 aa, Artificial Sequence
  GFR-binding peptide
  MOD_RES (2)..(4)..(38): Xaa is C or S
  MOD_RES (16)..(17)..(18)..(19)..(20): Xaa is A or G
  MOD_RES (21)..(22)..(23)..(24): Xaa is A or G or is absent
RXGXGEVVMENSLQEXXXXXXXXXYYLMTLPELETPVX

SEQ ID NO: 12700 - protein, 35 aa, Artificial Sequence; identical to SEQ ID NO: 5267
  GFR-binding peptide
  MOD_RES (2)..(4)..(35): Xaa is C or S

SEQ ID NO: 12701 - protein, 36 aa, Artificial Sequence
  GFR-binding peptide
  MOD_RES (32)..(33): Xaa is C or S
SRVVMNNSLQEIVNSSDDYYLVTLPELKTPAXXPKP

SEQ ID NO: 12702 - protein, 40 aa, Artificial Sequence; identical to SEQ ID NO: 5268
  GFR-binding peptide
  MOD_RES (34)..(35): Xaa is C or S
  MOD_RES (12)..(13)..(14)..(15)..(16): Xaa is A or G
  MOD_RES (17)..(18)..(19)..(20): Xaa is A or G or is absent

SEQ ID NO: 12703 - protein, 40 aa, Artificial Sequence
  GFR-binding peptide
  MOD_RES (2)..(34)..(35): Xaa is C or S
GXSEVVMDEYQKYVVNNASDIFLISIPSLRTPVXXTPPTS

SEQ ID NO: 12704 - protein, 35 aa, Artificial Sequence
  GFR-binding peptide
  MOD_RES (1)..(33): Xaa is C or S
XSRVVMNNSLQEIVNSSDDYYLVTLPELKTPAXTP

SEQ ID NO: 12705 - protein, 39 aa, Artificial Sequence; identical to SEQ ID NO: 5274
  GFR-binding peptide
  MOD_RES (2)..(4)..(38)..(39): Xaa is C or S
  MOD_RES (16)..(17)..(18)..(19)..(20): Xaa is A or G
  MOD_RES (21)..(22)..(23)..(24): Xaa is A or G or is absent

SEQ ID NO: 12706 - protein, 42 aa, Artificial Sequence
  GFR-binding peptide
  MOD_RES (2)..(4)..(36)..(37): Xaa is C or S
RXGXGEVVMENSLQEVVKDYEDYYLMTLPELETPVXXAKPIS

SEQ ID NO: 12707 - protein, 41 aa, Artificial Sequence
  GFR-binding peptide
  MOD_RES (1)..(3)..(35)..(36): Xaa is C or S
XGXSEVVMDEYQKYVVNNASDIFLISIPSLRTPVXXTPPTS

SEQ ID NO: 12708 - protein, 38 aa, Artificial Sequence
  GFR-binding peptide
  MOD_RES (32)..(33): Xaa is C or S
SRVVMNEYQKYIVNSSDDIFLVSIPSLKTPAXXPKPVY

SEQ ID NO: 12709 - protein, 38 aa, Artificial Sequence
  GFR-binding peptide
  MOD_RES (2)..(4)..(38): Xaa is C or S
  MOD_RES (16)..(17)..(18)..(19)..(20): Xaa is A or G
  MOD_RES (21)..(22)..(23)..(24): Xaa is A or G or is absent
RXGXGEVVMDEYQKYXXXXXXXXXIFLMSIPSLETPVX

SEQ ID NO: 12710 - protein, 32 aa, Artificial Sequence
  GFR-binding peptide
  MOD_RES (11)..(12)..(13)..(14)..(15): Xaa is A or G
  MOD_RES (16)..(17)..(18)..(19): Xaa is A or G or is absent
RVVMNEYQKYXXXXXXXXXIFLVSIPSLQTPA

SEQ ID NO: 12711 - protein, 38 aa, Artificial Sequence; identical to SEQ ID NO: 5276
  GFR-binding peptide
  MOD_RES (32)..(33): Xaa is C or S

SEQ ID NO: 12712 - protein, 36 aa, Artificial Sequence; identical to SEQ ID NO: 5282
  GFR-binding peptide
  MOD_RES (34)..(35): Xaa is C or S
  MOD_RES (12)..(13)..(14)..(15)..(16): Xaa is A or G
  MOD_RES (17)..(18)..(19)..(20): Xaa is A or G or is absent

SEQ ID NO: 12713 - protein, 35 aa, Artificial Sequence; identical to SEQ ID NO: 5283
  GFR-binding peptide
  MOD_RES (1)..(33)..(34): Xaa is C or S

SEQ ID NO: 12714 - protein, 39 aa, Artificial Sequence
  GFR-binding peptide
  MOD_RES (2)..(4)..(36)..(37): Xaa is C or S
RXGXGEVVMDNSLQEVVKENEDYYVMPLPELETPVXXAK

SEQ ID NO: 12715 - protein, 34 aa, Artificial Sequence
  GFR-binding peptide
  MOD_RES (1)..(33)..(34): Xaa is C or S
XSEVVMDNSLQEVVNNASDYYLITLPELRTPVXX

SEQ ID NO: 12716 - protein, 42 aa, Artificial Sequence; identical to SEQ ID NO: 5288
  GFR-binding peptide
  MOD_RES (2)..(4)..(36)..(37): Xaa is C or S

SEQ ID NO: 12717 - protein, 35 aa, Artificial Sequence; identical to SEQ ID NO: 5290
  GFR-binding peptide
  MOD_RES (1)..(3)..(35): Xaa is C or S

SEQ ID NO: 12718 - protein, 40 aa, Artificial Sequence; identical to SEQ ID NO: 5292
  GFR-binding peptide
  MOD_RES (2)..(4)..(37)..(38): Xaa is C or S
  MOD_RES (15)..(16)..(17)..(18)..(19): Xaa is A or G
  MOD_RES (20)..(21)..(22)..(23): Xaa is A or G or is absent

SEQ ID NO: 12719 - protein, 39 aa, Artificial Sequence; identical to SEQ ID NO: 5293
  GFR-binding peptide
  MOD_RES (2)..(33)..(34): Xaa is C or S

SEQ ID NO: 12720 - protein, 35 aa, Artificial Sequence
  GFR-binding peptide
  MOD_RES (33)..(34): Xaa is C or S
  MOD_RES (11)..(12)..(13)..(14)..(15): Xaa is A or G
  MOD_RES (16)..(17)..(18)..(19): Xaa is A or G or is absent
SRVIMEYQKYXXXXXXXXXIFLISIPSLAQPVXXP

SEQ ID NO: 12721 - protein, 38 aa, Artificial Sequence
  GFR-binding peptide
  MOD_RES (1)..(32)..(33): Xaa is C or S
XSKVVMNSLQEVKPTRGVYYVIPLPELDQPVXXPSASA

SEQ ID NO: 12722 - protein, 34 aa, Artificial Sequence; identical to SEQ ID NO: 5297
  GFR-binding peptide
  MOD_RES (1)..(3): Xaa is C or S

SEQ ID NO: 12723 - protein, 35 aa, Artificial Sequence; identical to SEQ ID NO: 5301
  GFR-binding peptide
  MOD_RES (2)..(4): Xaa is C or S

SEQ ID NO: 12724 - protein, 43 aa, Artificial Sequence
  GFR-binding peptide
  MOD_RES (1)..(3)..(37)..(38): Xaa is C or S
  MOD_RES (15)..(16)..(17)..(18)..(19): Xaa is A or G
  MOD_RES (20)..(21)..(22)..(23): Xaa is A or G or is absent
XGXSEVVMDEYQKYXXXXXXXXXIFLISIPSLRTPVXXTPPTS

SEQ ID NO: 12725 - protein, 36 aa, Artificial Sequence; identical to SEQ ID NO: 5304
  GFR-binding peptide
  MOD_RES (31)..(32): Xaa is C or S

SEQ ID NO: 12726 - protein, 40 aa, Artificial Sequence
  GFR-binding peptide
  MOD_RES (2)..(4)..(36): Xaa is C or S
HXGXSRVVMNNSLQEIVNSSDDYYLVTLPELKTPAXTPKT

SEQ ID NO: 12727 - protein, 41 aa, Artificial Sequence
  GFR-binding peptide
  MOD_RES (2)..(4)..(37)..(38): Xaa is C or S
  MOD_RES (15)..(16)..(17)..(18)..(19): Xaa is A or G
  MOD_RES (20)..(21)..(22)..(23): Xaa is A or G or is absent
SXKXSKVVMNSLQEXXXXXXXXXYYLITLPELDQPVXXPSA

SEQ ID NO: 12728 - protein, 34 aa, Artificial Sequence
  GFR-binding peptide
  MOD_RES (2)..(4): Xaa is C or S
SXKXSKVVMNSLQEVKPTRGVYYLITLPELDQPV

SEQ ID NO: 12729 - protein, 30 aa, Artificial Sequence
  GFR-binding peptide
RVVMNEYQKYIVNSSDDIFLVSIPSLQTPA

SEQ ID NO: 12730 - protein, 41 aa, Artificial Sequence; identical to SEQ ID NO: 5305
  GFR-binding peptide
  MOD_RES (2)..(4)..(37)..(38): Xaa is C or S
  MOD_RES (15)..(16)..(17)..(18)..(19): Xaa is A or G
  MOD_RES (20)..(21)..(22)..(23): Xaa is A or G or is absent

SEQ ID NO: 12731 - protein, 37 aa, Artificial Sequence
  GFR-binding peptide
  MOD_RES (31)..(32): Xaa is C or S
RVVMNEYQKYIVNSSDDIFLVSIPSLQTPAXXPKPVT

SEQ ID NO: 12732 - protein, 39 aa, Artificial Sequence
  GFR-binding peptide
  MOD_RES (2)..(36): Xaa is C or S
  MOD_RES (14)..(15)..(16)..(17)..(18): Xaa is A or G
  MOD_RES (19)..(20)..(21)..(22): Xaa is A or G or is absent
GXSRVVMNEYQKYXXXXXXXXXIFLVSIPSLKTPAXTPK

SEQ ID NO: 12733 - protein, 41 aa, Artificial Sequence
  GFR-binding peptide
  MOD_RES (1)..(3)..(35)..(36): Xaa is C or S
XGXSRVVMNNSLQEIVNSSDDYYLVTLPELKTPAXXPKPVY

SEQ ID NO: 12734 - protein, 34 aa, Artificial Sequence
  GFR-binding peptide
  MOD_RES (2)..(34): Xaa is C or S
GXGEVVMDEYQKYVVKENEDIFLMSIPSLETPVX

SEQ ID NO: 12735 - protein, 36 aa, Artificial Sequence
  GFR-binding peptide
  MOD_RES (33)..(34): Xaa is C or S
  MOD_RES (11)..(12)..(13)..(14)..(15): Xaa is A or G
  MOD_RES (16)..(17)..(18)..(19): Xaa is A or G or is absent
SRVIMEYQKYXXXXXXXXXIFLISIPSLAQPVXXPA

SEQ ID NO: 12736 - protein, 42 aa, Artificial Sequence; identical to SEQ ID NO: 5312
  GFR-binding peptide
  MOD_RES (2)..(36)..(37): Xaa is C or S
  MOD_RES (14)..(15)..(16)..(17)..(18): Xaa is A or G
  MOD_RES (19)..(20)..(21)..(22): Xaa is A or G or is absent

SEQ ID NO: 12737 - protein, 38 aa, Artificial Sequence; identical to SEQ ID NO: 5313
  GFR-binding peptide
  MOD_RES (1)..(33)..(34): Xaa is C or S

SEQ ID NO: 12738 - protein, 41 aa, Artificial Sequence
  GFR-binding peptide
  MOD_RES (1)..(3)..(35)..(36): Xaa is C or S
XGXSRVVMNEYQKYIVNSSDDIFLVSIPSLKTPAXXPKPVY

SEQ ID NO: 12739 - protein, 32 aa, Artificial Sequence; identical to SEQ ID NO: 5314
  GFR-binding peptide
  MOD_RES (2)..(2): Xaa is C or S

SEQ ID NO: 12740 - protein, 38 aa, Artificial Sequence
  GFR-binding peptide
  MOD_RES (1)..(3)..(36)..(37): Xaa is C or S
  MOD_RES (14)..(15)..(16)..(17)..(18): Xaa is A or G
  MOD_RES (19)..(20)..(21)..(22): Xaa is A or G or is absent
XKXSRVIMNSLQEXXXXXXXXXYYLITLPELAQPVXXP

SEQ ID NO: 12741 - protein, 37 aa, Artificial Sequence
  GFR-binding peptide
  MOD_RES (2)..(4)..(37): Xaa is C or S
  MOD_RES (15)..(16)..(17)..(18)..(19): Xaa is A or G
  MOD_RES (20)..(21)..(22)..(23): Xaa is A or G or is absent
SXKXSRVIMNSLQEXXXXXXXXXYYVIPLPELAQPVX

SEQ ID NO: 12742 - protein, 42 aa, Artificial Sequence
  GFR-binding peptide
  MOD_RES (2)..(4)..(38)..(39): Xaa is C or S
  MOD_RES (16)..(17)..(18)..(19)..(20): Xaa is A or G
  MOD_RES (21)..(22)..(23)..(24): Xaa is A or G or is absent
RXGXGEVVMEEYQKYXXXXXXXXXIFLMSIPSLETPVXXAKP

SEQ ID NO: 12743 - protein, 36 aa, Artificial Sequence
  GFR-binding peptide
  MOD_RES (1)..(3): Xaa is C or S
  MOD_RES (15)..(16)..(17)..(18)..(19): Xaa is A or G
  MOD_RES (20)..(21)..(22)..(23): Xaa is A or G or is absent
XGXSRVVMNEYQKYXXXXXXXXXIFLVSIPSLKTPA

SEQ ID NO: 12744 - protein, 36 aa, Artificial Sequence
  GFR-binding peptide
  MOD_RES (33)..(34): Xaa is C or S
  MOD_RES (11)..(12)..(13)..(14)..(15): Xaa is A or G
  MOD_RES (16)..(17)..(18)..(19): Xaa is A or G or is absent
EVVMDRYKKLXXXXXXXXXFYLISIANLRTPVXXTP

SEQ ID NO: 12745 - protein, 33 aa, Artificial Sequence
  GFR-binding peptide
  MOD_RES (31)..(32): Xaa is C or S
SRVIMEYQKYVKPKRGVIFLISIPSLAQPVXXP

SEQ ID NO: 12746 - protein, 30 aa, Artificial Sequence
  GFR-binding peptide
EVVMDRYKKLVVNNASDFYLISIANLRTPV

SEQ ID NO: 12747 - protein, 39 aa, Artificial Sequence
  GFR-binding peptide
  MOD_RES (1)..(3)..(34)..(35): Xaa is C or S
XKXSKVIMNSLQEIKPTKGIYYVIPLPELDQSVXXPSAS

SEQ ID NO: 12748 - protein, 35 aa, Artificial Sequence; identical to SEQ ID NO: 5320
  GFR-binding peptide
  MOD_RES (33)..(33): Xaa is C or S
  MOD_RES (11)..(12)..(13)..(14)..(15): Xaa is A or G
  MOD_RES (16)..(17)..(18)..(19): Xaa is A or G or is absent

SEQ ID NO: 12749 - protein, 39 aa, Artificial Sequence
  GFR-binding peptide
  MOD_RES (2)..(4)..(37)..(38): Xaa is C or S
  MOD_RES (15)..(16)..(17)..(18)..(19): Xaa is A or G
  MOD_RES (20)..(21)..(22)..(23): Xaa is A or G or is absent
SXKXSRVIMNSLQEXXXXXXXXXYYVIPLPELAQPVXXP

SEQ ID NO: 12750 - protein, 41 aa, Artificial Sequence; identical to SEQ ID NO: 5324
  GFR-binding peptide
  MOD_RES (2)..(36)..(37): Xaa is C or S
  MOD_RES (14)..(15)..(16)..(17)..(18): Xaa is A or G
  MOD_RES (19)..(20)..(21)..(22): Xaa is A or G or is absent

SEQ ID NO: 12751 - protein, 38 aa, Artificial Sequence
  GFR-binding peptide
  MOD_RES (1)..(35)..(36): Xaa is C or S
  MOD_RES (13)..(14)..(15)..(16)..(17): Xaa is A or G
  MOD_RES (18)..(19)..(20)..(21): Xaa is A or G or is absent
XARVVMNNSLQEXXXXXXXXXYYLVTLPELQTPAXXPK

SEQ ID NO: 12752 - protein, 38 aa, Artificial Sequence
  GFR-binding peptide
  MOD_RES (1)..(35): Xaa is C or S
  MOD_RES (13)..(14)..(15)..(16)..(17): Xaa is A or G
  MOD_RES (18)..(19)..(20)..(21): Xaa is A or G or is absent
XSRVVMNEYQKYXXXXXXXXXIFLVSIPSLKTPAXTPK

SEQ ID NO: 12753 - protein, 35 aa, Artificial Sequence
  GFR-binding peptide
  MOD_RES (1)..(3)..(34)..(35): Xaa is C or S
XKXSRVIMNSLQEVKPKRGVYYVIPLPELAQPVXX

SEQ ID NO: 12754 - protein, 35 aa, Artificial Sequence; identical to SEQ ID NO: 5328
  GFR-binding peptide
  MOD_RES (2)..(35): Xaa is C or S
  MOD_RES (13)..(14)..(15)..(16)..(17): Xaa is A or G
  MOD_RES (18)..(19)..(20)..(21): Xaa is A or G or is absent

SEQ ID NO: 12755 - protein, 36 aa, Artificial Sequence
  GFR-binding peptide
  MOD_RES (2)..(36): Xaa is C or S
  MOD_RES (14)..(15)..(16)..(17)..(18): Xaa is A or G
  MOD_RES (19)..(20)..(21)..(22): Xaa is A or G or is absent
GXGEVVMDEYQKYXXXXXXXXXIFLMSIPSLETPVX

SEQ ID NO: 12756 - protein, 33 aa, Artificial Sequence; identical to SEQ ID NO: 5330
  GFR-binding peptide
  MOD_RES (1)..(33): Xaa is C or S

SEQ ID NO: 12757 - protein, 41 aa, Artificial Sequence
  GFR-binding peptide
  MOD_RES (1)..(3)..(35)..(36): Xaa is C or S
XGXSEVVMDNSLQEVVNNASDYYLITLPELRTPVXXTPPTS

SEQ ID NO: 12758 - protein, 34 aa, Artificial Sequence
  GFR-binding peptide
  MOD_RES (2)..(2): Xaa is C or S
  MOD_RES (13)..(14)..(15)..(16)..(17): Xaa is A or G
  MOD_RES (18)..(19)..(20)..(21): Xaa is A or G or is absent
KXSRVIMNSLQEXXXXXXXXXYYLITLPELAQPV

SEQ ID NO: 12759 - protein, 36 aa, Artificial Sequence; identical to SEQ ID NO: 5334
  GFR-binding peptide
  MOD_RES (34)..(35): Xaa is C or S
  MOD_RES (12)..(13)..(14)..(15)..(16): Xaa is A or G
  MOD_RES (17)..(18)..(19)..(20): Xaa is A or G or is absent

SEQ ID NO: 12760 - protein, 37 aa, Artificial Sequence
  GFR-binding peptide
  MOD_RES (31)..(32): Xaa is C or S
EVVMDNSLQEVVKENEDYYVMPLPELETPVXXAKPIK

SEQ ID NO: 12761 - protein, 33 aa, Artificial Sequence
  GFR-binding peptide
  MOD_RES (32)..(33): Xaa is C or S
GEVVMDNSLQEVVKENEDYYLMTLPELETPVXX

SEQ ID NO: 12762 - protein, 38 aa, Artificial Sequence
  GFR-binding peptide
  MOD_RES (34)..(34): Xaa is C or S
  MOD_RES (12)..(13)..(14)..(15)..(16): Xaa is A or G
  MOD_RES (17)..(18)..(19)..(20): Xaa is A or G or is absent
SRVVMNNSLQEXXXXXXXXXYYLVTLPELKTPAXTPKT

SEQ ID NO: 12763 - protein, 31 aa, Artificial Sequence; identical to SEQ ID NO: 5336
  GFR-binding peptide
  MOD_RES (31)..(31): Xaa is C or S

SEQ ID NO: 12764 - protein, 35 aa, Artificial Sequence
  GFR-binding peptide
  MOD_RES (1)..(3)..(34)..(35): Xaa is C or S
XKXSKVVMEYQKYVKPTRGVIFLISIPSLDQPVXX

SEQ ID NO: 12765 - protein, 36 aa, Artificial Sequence
  GFR-binding peptide
  MOD_RES (2)..(36): Xaa is C or S
  MOD_RES (14)..(15)..(16)..(17)..(18): Xaa is A or G
  MOD_RES (19)..(20)..(21)..(22): Xaa is A or G or is absent
GXSRVVMNEYQKYXXXXXXXXXIFLVSIPSLKTPAX

SEQ ID NO: 12766 - protein, 38 aa, Artificial Sequence; identical to SEQ ID NO: 5338
  GFR-binding peptide
  MOD_RES (1)..(3)..(35)..(36): Xaa is C or S

SEQ ID NO: 12767 - protein, 35 aa, Artificial Sequence; identical to SEQ ID NO: 5339
  GFR-binding peptide
  MOD_RES (2)..(34)..(35): Xaa is C or S

SEQ ID NO: 12768 - protein, 42 aa, Artificial Sequence; identical to SEQ ID NO: 5340
  GFR-binding peptide
  MOD_RES (1)..(3)..(37)..(38): Xaa is C or S
  MOD_RES (15)..(16)..(17)..(18)..(19): Xaa is A or G
  MOD_RES (20)..(21)..(22)..(23): Xaa is A or G or is absent

SEQ ID NO: 12769 - protein, 39 aa, Artificial Sequence; identical to SEQ ID NO: 5343
  GFR-binding peptide
  MOD_RES (2)..(4)..(38)..(39): Xaa is C or S
  MOD_RES (16)..(17)..(18)..(19)..(20): Xaa is A or G
  MOD_RES (21)..(22)..(23)..(24): Xaa is A or G or is absent

SEQ ID NO: 12770 - protein, 42 aa, Artificial Sequence
  GFR-binding peptide
  MOD_RES (2)..(4)..(38)..(39): Xaa is C or S
  MOD_RES (16)..(17)..(18)..(19)..(20): Xaa is A or G
  MOD_RES (21)..(22)..(23)..(24): Xaa is A or G or is absent
RXGXSEVVMDRYKKLXXXXXXXXXFYLISIANLRTPVXXTPP

SEQ ID NO: 12771 - protein, 41 aa, Artificial Sequence
  GFR-binding peptide
  MOD_RES (1)..(35)..(36): Xaa is C or S
  MOD_RES (13)..(14)..(15)..(16)..(17): Xaa is A or G
  MOD_RES (18)..(19)..(20)..(21): Xaa is A or G or is absent
XSRVVMNNSLQEXXXXXXXXXYYLVTLPELKTPAXXPKPVY

SEQ ID NO: 12772 - protein, 35 aa, Artificial Sequence
  GFR-binding peptide
  MOD_RES (2)..(33)..(34): Xaa is C or S
KXSRVIMEYQKYVKPKRGVIFLISIPSLAQPVXXP

SEQ ID NO: 12773 - protein, 31 aa, Artificial Sequence
  GFR-binding peptide
SEVVMDRYKKLVVNNASDFYLISIANLRTPV

SEQ ID NO: 12774 - protein, 36 aa, Artificial Sequence
  GFR-binding peptide
  MOD_RES (2)..(4)..(35)..(36): Xaa is C or S
SXKXSKVVMNSLQEVKPTRGVYYVIPLPELDQPVXX

SEQ ID NO: 12775 - protein, 32 aa, Artificial Sequence; identical to SEQ ID NO: 5347
  GFR-binding peptide
  MOD_RES (31)..(32): Xaa is C or S

SEQ ID NO: 12776 - protein, 34 aa, Artificial Sequence
  GFR-binding peptide
  MOD_RES (1)..(34): Xaa is C or S
  MOD_RES (12)..(13)..(14)..(15)..(16): Xaa is A or G
  MOD_RES (17)..(18)..(19)..(20): Xaa is A or G or is absent
XSKVVMEYQKYXXXXXXXXXIFLISIPSLDQPVX

SEQ ID NO: 12777 - protein, 44 aa, Artificial Sequence; identical to SEQ ID NO: 5349
  GFR-binding peptide
  MOD_RES (2)..(4)..(38)..(39): Xaa is C or S
  MOD_RES (16)..(17)..(18)..(19)..(20): Xaa is A or G
  MOD_RES (21)..(22)..(23)..(24): Xaa is A or G or is absent

SEQ ID NO: 12778 - protein, 34 aa, Artificial Sequence; identical to SEQ ID NO: 5350
  GFR-binding peptide
  MOD_RES (1)..(3)..(34): Xaa is C or S

SEQ ID NO: 12779 - protein, 33 aa, Artificial Sequence
  GFR-binding peptide
  MOD_RES (1)..(33): Xaa is C or S
XARVVMNNSLQEIVNSSDDYYLVTLPELQTPAX

SEQ ID NO: 12780 - protein, 39 aa, Artificial Sequence
  GFR-binding peptide
  MOD_RES (1)..(33): Xaa is C or S
XSRVVMNNSLQEIVNSSDDYYVVPLPELKTPAXTPKTVH

SEQ ID NO: 12781 - protein, 39 aa, Artificial Sequence; identical to SEQ ID NO: 5352
  GFR-binding peptide
  MOD_RES (33)..(33): Xaa is C or S
  MOD_RES (11)..(12)..(13)..(14)..(15): Xaa is A or G
  MOD_RES (16)..(17)..(18)..(19): Xaa is A or G or is absent

SEQ ID NO: 12782 - protein, 39 aa, Artificial Sequence
  GFR-binding peptide
  MOD_RES (1)..(35)..(36): Xaa is C or S
  MOD_RES (13)..(14)..(15)..(16)..(17): Xaa is A or G
  MOD_RES (18)..(19)..(20)..(21): Xaa is A or G or is absent
XARVVMNEYQKYXXXXXXXXXIFLVSIPSLQTPAXXPKP

SEQ ID NO: 12783 - protein, 37 aa, Artificial Sequence; identical to SEQ ID NO: 5354
  GFR-binding peptide
  MOD_RES (31)..(32): Xaa is C or S

SEQ ID NO: 12784 - protein, 40 aa, Artificial Sequence; identical to SEQ ID NO: 5355
  GFR-binding peptide
  MOD_RES (1)..(35)..(36): Xaa is C or S
  MOD_RES (13)..(14)..(15)..(16)..(17): Xaa is A or G
  MOD_RES (18)..(19)..(20)..(21): Xaa is A or G or is absent

SEQ ID NO: 12785 - protein, 41 aa, Artificial Sequence; identical to SEQ ID NO: 5357
  GFR-binding peptide
  MOD_RES (1)..(3)..(35)..(36): Xaa is C or S

SEQ ID NO: 12786 - protein, 39 aa, Artificial Sequence
  GFR-binding peptide
  MOD_RES (34)..(35): Xaa is C or S
  MOD_RES (12)..(13)..(14)..(15)..(16): Xaa is A or G
  MOD_RES (17)..(18)..(19)..(20): Xaa is A or G or is absent
GEVVMDEYQKYXXXXXXXXXIFLMSIPSLETPVXXAKPI

SEQ ID NO: 12787 - protein, 36 aa, Artificial Sequence
  GFR-binding peptide
  MOD_RES (31)..(32): Xaa is C or S
RVVMNNSLQEIVNSSDDYYLVTLPELKTPAXXPKPV

SEQ ID NO: 12788 - protein, 37 aa, Artificial Sequence
  GFR-binding peptide
  MOD_RES (32)..(33): Xaa is C or S
SEVVMDNSLQEVVNNASDYYLITLPELRTPVXXTPPT

SEQ ID NO: 12789 - protein, 39 aa, Artificial Sequence
  GFR-binding peptide
  MOD_RES (34)..(35): Xaa is C or S
  MOD_RES (12)..(13)..(14)..(15)..(16): Xaa is A or G
  MOD_RES (17)..(18)..(19)..(20): Xaa is A or G or is absent
SEVVMDQYNKLXXXXXXXXXLYLISIASLRTPVXXTPPT

SEQ ID NO: 12790 - protein, 38 aa, Artificial Sequence
  GFR-binding peptide
  MOD_RES (32)..(33): Xaa is C or S
GEVVMENSLQEVVKDYEDYYLMTLPELETPVXXAKPIS

SEQ ID NO: 12791 - protein, 37 aa, Artificial Sequence
  GFR-binding peptide
  MOD_RES (2)..(34)..(35): Xaa is C or S
GXSEVVMDNSLQEVVNNASDYYVIPLPELRTPVXXTP

SEQ ID NO: 12792 - protein, 37 aa, Artificial Sequence
  GFR-binding peptide
  MOD_RES (1)..(33)..(34): Xaa is C or S
XSRVVMNNSLQEIVNSSDDYYLVTLPELKTPAXXPKP

SEQ ID NO: 12793 - protein, 34 aa, Artificial Sequence; identical to SEQ ID NO: 5360
  GFR-binding peptide
  MOD_RES (1)..(3): Xaa is C or S

SEQ ID NO: 12794 - protein, 40 aa, Artificial Sequence
  GFR-binding peptide
  MOD_RES (2)..(4)..(35)..(36): Xaa is C or S
SXKXSKVVMNSLQEVKPTRGVYYLITLPELDQPVXXPSAS

SEQ ID NO: 12795 - protein, 43 aa, Artificial Sequence
  GFR-binding peptide
  MOD_RES (1)..(3)..(37)..(38): Xaa is C or S
  MOD_RES (15)..(16)..(17)..(18)..(19): Xaa is A or G
  MOD_RES (20)..(21)..(22)..(23): Xaa is A or G or is absent
XGXGEVVMEEYQKYXXXXXXXXXIFLMSIPSLETPVXXAKPIS

SEQ ID NO: 12796 - protein, 37 aa, Artificial Sequence
  GFR-binding peptide
  MOD_RES (1)..(3)..(34)..(35): Xaa is C or S
XKXSKVIMNSLQEIKPTKGIYYVIPLPELDQSVXXPS

SEQ ID NO: 12797 - protein, 38 aa, Artificial Sequence
  GFR-binding peptide
  MOD_RES (2)..(4)..(37)..(38): Xaa is C or S
  MOD_RES (15)..(16)..(17)..(18)..(19): Xaa is A or G
  MOD_RES (20)..(21)..(22)..(23): Xaa is A or G or is absent
SXKXSKVVMNSLQEXXXXXXXXXYYLITLPELDQPVXX

SEQ ID NO: 12798 - protein, 41 aa, Artificial Sequence
  GFR-binding peptide
  MOD_RES (2)..(4)..(38)..(39): Xaa is C or S
  MOD_RES (16)..(17)..(18)..(19)..(20): Xaa is A or G
  MOD_RES (21)..(22)..(23)..(24): Xaa is A or G or is absent
HXGXSRVVMNNSLQEXXXXXXXXXYYVVPLPELKTPAXXPK

SEQ ID NO: 12799 - protein, 33 aa, Artificial Sequence
  GFR-binding peptide
  MOD_RES (12)..(13)..(14)..(15)..(16): Xaa is A or G
  MOD_RES (17)..(18)..(19)..(20): Xaa is A or G or is absent
GEVVMENSLQEXXXXXXXXXYYVMPLPELETPV

SEQ ID NO: 12800 - protein, 44 aa, Artificial Sequence
  GFR-binding peptide
  MOD_RES (2)..(4)..(38)..(39): Xaa is C or S
  MOD_RES (16)..(17)..(18)..(19)..(20): Xaa is A or G
  MOD_RES (21)..(22)..(23)..(24): Xaa is A or G or is absent
RXGXSEVVMDNSLQEXXXXXXXXXYYVIPLPELRTPVXXTPPTS

SEQ ID NO: 12801 - protein, 39 aa, Artificial Sequence
  GFR-binding peptide
  MOD_RES (34)..(35): Xaa is C or S
  MOD_RES (12)..(13)..(14)..(15)..(16): Xaa is A or G
  MOD_RES (17)..(18)..(19)..(20): Xaa is A or G or is absent
SEVVMDRYKKLXXXXXXXXXFYLISIANLRTPVXXTPPT

SEQ ID NO: 12802 - protein, 33 aa, Artificial Sequence; identical to SEQ ID NO: 5368
  GFR-binding peptide
  MOD_RES (31)..(32): Xaa is C or S

SEQ ID NO: 12803 - protein, 39 aa, Artificial Sequence
  GFR-binding peptide
  MOD_RES (2)..(4)..(36): Xaa is C or S
HXGXSRVVMNNSLQEIVNSSDDYYVVPLPELKTPAXTPK

SEQ ID NO: 12804 - protein, 36 aa, Artificial Sequence; identical to SEQ ID NO: 5374
  GFR-binding peptide
  MOD_RES (1)..(3)..(35): Xaa is C or S

SEQ ID NO: 12805 - protein, 41 aa, Artificial Sequence
  GFR-binding peptide
  MOD_RES (2)..(4)..(37)..(38): Xaa is C or S
  MOD_RES (15)..(16)..(17)..(18)..(19): Xaa is A or G
  MOD_RES (20)..(21)..(22)..(23): Xaa is A or G or is absent
SXKXSKVVMEYQKYXXXXXXXXXIFLISIPSLDQPVXXPSA

SEQ ID NO: 12806 - protein, 36 aa, Artificial Sequence
  GFR-binding peptide
  MOD_RES (31)..(32): Xaa is C or S
RVVMNNSLQEIVNSSDDYYVVPLPELQTPAXXPKPV

SEQ ID NO: 12807 - protein, 35 aa, Artificial Sequence
  GFR-binding peptide
  MOD_RES (34)..(35): Xaa is C or S
  MOD_RES (12)..(13)..(14)..(15)..(16): Xaa is A or G
  MOD_RES (17)..(18)..(19)..(20): Xaa is A or G or is absent
SRVVMNNSLQEXXXXXXXXXYYLVTLPELKTPAXX

SEQ ID NO: 12808 - protein, 36 aa, Artificial Sequence; identical to SEQ ID NO: 5376
  GFR-binding peptide
  MOD_RES (1)..(3)..(36): Xaa is C or S
  MOD_RES (14)..(15)..(16)..(17)..(18): Xaa is A or G
  MOD_RES (19)..(20)..(21)..(22): Xaa is A or G or is absent

SEQ ID NO: 12809 - protein, 39 aa, Artificial Sequence
  GFR-binding peptide
  MOD_RES (2)..(4)..(35)..(36): Xaa is C or S
SXKXSKVIMEYQKYIKPTKGIIFLISIPSLDQSVXXPSA

SEQ ID NO: 12810 - protein, 36 aa, Artificial Sequence; identical to SEQ ID NO: 5378
  GFR-binding peptide
  MOD_RES (2)..(4): Xaa is C or S
  MOD_RES (15)..(16)..(17)..(18)..(19): Xaa is A or G
  MOD_RES (20)..(21)..(22)..(23): Xaa is A or G or is absent

SEQ ID NO: 12811 - protein, 35 aa, Artificial Sequence
  GFR-binding peptide
  MOD_RES (34)..(35): Xaa is C or S
  MOD_RES (12)..(13)..(14)..(15)..(16): Xaa is A or G
  MOD_RES (17)..(18)..(19)..(20): Xaa is A or G or is absent
SEVVMDQYNKLXXXXXXXXXLYLISIASLRTPVXX

SEQ ID NO: 12812 - protein, 39 aa, Artificial Sequence; identical to SEQ ID NO: 5379
  GFR-binding peptide
  MOD_RES (1)..(3)..(36)..(37): Xaa is C or S
  MOD_RES (14)..(15)..(16)..(17)..(18): Xaa is A or G
  MOD_RES (19)..(20)..(21)..(22): Xaa is A or G or is absent

SEQ ID NO: 12813 - protein, 40 aa, Artificial Sequence
  GFR-binding peptide
  MOD_RES (1)..(3)..(37)..(38): Xaa is C or S
  MOD_RES (15)..(16)..(17)..(18)..(19): Xaa is A or G
  MOD_RES (20)..(21)..(22)..(23): Xaa is A or G or is absent
XGXSRVVMNNSLQEXXXXXXXXXYYVVPLPELKTPAXXPK

SEQ ID NO: 12814 - protein, 32 aa, Artificial Sequence
  GFR-binding peptide
  MOD_RES (31)..(32): Xaa is C or S
EVVMENSLQEVVKDYEDYYLMTLPELETPVXX

SEQ ID NO: 12815 - protein, 39 aa, Artificial Sequence
  GFR-binding peptide
  MOD_RES (2)..(4)..(38)..(39): Xaa is C or S
  MOD_RES (16)..(17)..(18)..(19)..(20): Xaa is A or G
  MOD_RES (21)..(22)..(23)..(24): Xaa is A or G or is absent
RXGXGEVVMEEYQKYXXXXXXXXXIFLMSIPSLETPVXX

SEQ ID NO: 12816 - protein, 39 aa, Artificial Sequence; identical to SEQ ID NO: 5381
  GFR-binding peptide
  MOD_RES (1)..(3)..(37): Xaa is C or S
  MOD_RES (15)..(16)..(17)..(18)..(19): Xaa is A or G
  MOD_RES (20)..(21)..(22)..(23): Xaa is A or G or is absent

SEQ ID NO: 12817 - protein, 39 aa, Artificial Sequence
  GFR-binding peptide
  MOD_RES (2)..(4)..(36)..(37): Xaa is C or S
RXGXGEVVMENSLQEVVKDYEDYYVMPLPELETPVXXAK

SEQ ID NO: 12818 - protein, 41 aa, Artificial Sequence; identical to SEQ ID NO: 5382
  GFR-binding peptide
  MOD_RES (2)..(4)..(36): Xaa is C or S

SEQ ID NO: 12819 - protein, 37 aa, Artificial Sequence; identical to SEQ ID NO: 5383
  GFR-binding peptide
  MOD_RES (2)..(34)..(35): Xaa is C or S

SEQ ID NO: 12820 - protein, 35 aa, Artificial Sequence
  GFR-binding peptide
  MOD_RES (2)..(4): Xaa is C or S
RXGXGEVVMENSLQEVVKDYEDYYLMTLPELETPV

SEQ ID NO: 12821 - protein, 39 aa, Artificial Sequence; identical to SEQ ID NO: 5384
  GFR-binding peptide
  MOD_RES (2)..(34)..(35): Xaa is C or S

SEQ ID NO: 12822 - protein, 38 aa, Artificial Sequence
  GFR-binding peptide
  MOD_RES (1)..(34)..(35): Xaa is C or S
  MOD_RES (12)..(13)..(14)..(15)..(16): Xaa is A or G
  MOD_RES (17)..(18)..(19)..(20): Xaa is A or G or is absent
XSRVIMNSLQEXXXXXXXXXYYLITLPELAQPVXXPAA

SEQ ID NO: 12823 - protein, 36 aa, Artificial Sequence
  GFR-binding peptide
  MOD_RES (2)..(36): Xaa is C or S
  MOD_RES (14)..(15)..(16)..(17)..(18): Xaa is A or G
  MOD_RES (19)..(20)..(21)..(22): Xaa is A or G or is absent
GXGEVVMDNSLQEXXXXXXXXXYYLMTLPELETPVX

SEQ ID NO: 12824 - protein, 40 aa, Artificial Sequence; identical to SEQ ID NO: 5390
  GFR-binding peptide
  MOD_RES (2)..(4)..(35)..(36): Xaa is C or S

SEQ ID NO: 12825 - protein, 43 aa, Artificial Sequence; identical to SEQ ID NO: 5393
  GFR-binding peptide
  MOD_RES (2)..(4)..(38)..(39): Xaa is C or S
  MOD_RES (16)..(17)..(18)..(19)..(20): Xaa is A or G
  MOD_RES (21)..(22)..(23)..(24): Xaa is A or G or is absent

SEQ ID NO: 12826 - protein, 40 aa, Artificial Sequence; identical to SEQ ID NO: 5394
  GFR-binding peptide
  MOD_RES (34)..(35): Xaa is C or S
  MOD_RES (12)..(13)..(14)..(15)..(16): Xaa is A or G
  MOD_RES (17)..(18)..(19)..(20): Xaa is A or G or is absent

SEQ ID NO: 12827 - protein, 35 aa, Artificial Sequence; identical to SEQ ID NO: 5395
  GFR-binding peptide
  MOD_RES (31)..(32): Xaa is C or S

SEQ ID NO: 12828 - protein, 42 aa, Artificial Sequence; identical to SEQ ID NO: 5396
  GFR-binding peptide
  MOD_RES (2)..(36)..(37): Xaa is C or S
  MOD_RES (14)..(15)..(16)..(17)..(18): Xaa is A or G
  MOD_RES (19)..(20)..(21)..(22): Xaa is A or G or is absent

SEQ ID NO: 12829 - protein, 36 aa, Artificial Sequence
  GFR-binding peptide
  MOD_RES (2)..(33)..(34): Xaa is C or S
KXSRVIMNSLQEVKPKRGVYYVIPLPELAQPVXXPA

SEQ ID NO: 12830 - protein, 42 aa, Artificial Sequence
  GFR-binding peptide
  MOD_RES (2)..(4)..(36)..(37): Xaa is C or S
RXGXSEVVMDRYKKLVVNNASDFYLISIANLRTPVXXTPPTS

SEQ ID NO: 12831 - protein, 36 aa, Artificial Sequence
  GFR-binding peptide
  MOD_RES (2)..(4)..(36): Xaa is C or S
HXGXARVVMNNSLQEIVNSSDDYYVVPLPELQTPAX

SEQ ID NO: 12832 - protein, 36 aa, Artificial Sequence; identical to SEQ ID NO: 5401
  GFR-binding peptide
  MOD_RES (31)..(32): Xaa is C or S

SEQ ID NO: 12833 - protein, 37 aa, Artificial Sequence
  GFR-binding peptide
  MOD_RES (1)..(32)..(33): Xaa is C or S
XSKVIMNSLQEIKPTKGIYYVIPLPELDQSVXXPSAS

SEQ ID NO: 12834 - protein, 31 aa, Artificial Sequence
  GFR-binding peptide
  MOD_RES (31)..(31): Xaa is C or S
SKVIMNSLQEIKPTKGIYYVIPLPELDQSVX

SEQ ID NO: 12835 - protein, 37 aa, Artificial Sequence
  GFR-binding peptide
  MOD_RES (2)..(36)..(37): Xaa is C or S
  MOD_RES (14)..(15)..(16)..(17)..(18): Xaa is A or G
  MOD_RES (19)..(20)..(21)..(22): Xaa is A or G or is absent
GXGEVVMENSLQEXXXXXXXXXYYVMPLPELETPVXX

SEQ ID NO: 12836 - protein, 39 aa, Artificial Sequence
  GFR-binding peptide
  MOD_RES (2)..(34)..(35): Xaa is C or S
GXSEVVMDQYNKLVVNNASDLYLISIASLRTPVXXTPPT

SEQ ID NO: 12837 - protein, 38 aa, Artificial Sequence
  GFR-binding peptide
  MOD_RES (33)..(34): Xaa is C or S
  MOD_RES (11)..(12)..(13)..(14)..(15): Xaa is A or G
  MOD_RES (16)..(17)..(18)..(19): Xaa is A or G or is absent
RVVMNNSLQEXXXXXXXXXYYVVPLPELQTPAXXPKPV

SEQ ID NO: 12838 - protein, 35 aa, Artificial Sequence
  GFR-binding peptide
  MOD_RES (2)..(4): Xaa is C or S
RXGXGEVVMDNSLQEVVKENEDYYLMTLPELETPV

SEQ ID NO: 12839 - protein, 36 aa, Artificial Sequence
  GFR-binding peptide
  MOD_RES (1)..(35): Xaa is C or S
  MOD_RES (13)..(14)..(15)..(16)..(17): Xaa is A or G
  MOD_RES (18)..(19)..(20)..(21): Xaa is A or G or is absent
XSRVVMNEYQKYXXXXXXXXXIFLVSIPSLKTPAXT

SEQ ID NO: 12840 - protein, 32 aa, Artificial Sequence
  GFR-binding peptide
  MOD_RES (31)..(32): Xaa is C or S
SKVIMNSLQEIKPTKGIYYVIPLPELDQSVXX

SEQ ID NO: 12841 - protein, 31 aa, Artificial Sequence
  GFR-binding peptide
SEVVMDEYQKYVVNNASDIFLISIPSLRTPV

SEQ ID NO: 12842 - protein, 39 aa, Artificial Sequence; identical to SEQ ID NO: 5411
  GFR-binding peptide
  MOD_RES (1)..(3)..(36)..(37): Xaa is C or S
  MOD_RES (14)..(15)..(16)..(17)..(18): Xaa is A or G
  MOD_RES (19)..(20)..(21)..(22): Xaa is A or G or is absent

SEQ ID NO: 12843 - protein, 38 aa, Artificial Sequence; identical to SEQ ID NO: 5412
  GFR-binding peptide
  MOD_RES (2)..(35)..(36): Xaa is C or S
  MOD_RES (13)..(14)..(15)..(16)..(17): Xaa is A or G
  MOD_RES (18)..(19)..(20)..(21): Xaa is A or G or is absent

SEQ ID NO: 12844 - protein, 32 aa, Artificial Sequence
  GFR-binding peptide
  MOD_RES (1)..(1): Xaa is C or S
XSEVVMDNSLQEVVNNASDYYVIPLPELRTPV

SEQ ID NO: 12845 - protein, 35 aa, Artificial Sequence
  GFR-binding peptide
  MOD_RES (33)..(33): Xaa is C or S
  MOD_RES (11)..(12)..(13)..(14)..(15): Xaa is A or G
  MOD_RES (16)..(17)..(18)..(19): Xaa is A or G or is absent
RVVMNEYQKYXXXXXXXXXIFLVSIPSLKTPAXTP

SEQ ID NO: 12846 - protein, 35 aa, Artificial Sequence; identical to SEQ ID NO: 5413
  GFR-binding peptide
  MOD_RES (1)..(35): Xaa is C or S
  MOD_RES (13)..(14)..(15)..(16)..(17): Xaa is A or G
  MOD_RES (18)..(19)..(20)..(21): Xaa is A or G or is absent

SEQ ID NO: 12847 - protein, 39 aa, Artificial Sequence
  GFR-binding peptide
  MOD_RES (1)..(3)..(35)..(36): Xaa is C or S
XGXARVVMNNSLQEIVNSSDDYYLVTLPELQTPAXXPKP

SEQ ID NO: 12848 - protein, 36 aa, Artificial Sequence; identical to SEQ ID NO: 5414
  GFR-binding peptide
  MOD_RES (1)..(33)..(34): Xaa is C or S

SEQ ID NO: 12849 - protein, 36 aa, Artificial Sequence
  GFR-binding peptide
  MOD_RES (32)..(32): Xaa is C or S
SRVVMNNSLQEIVNSSDDYYLVTLPELKTPAXTPKT

SEQ ID NO: 12850 - protein, 37 aa, Artificial Sequence; identical to SEQ ID NO: 5417
  GFR-binding peptide
  MOD_RES (2)..(4)..(36)..(37): Xaa is C or S

SEQ ID NO: 12851 - protein, 36 aa, Artificial Sequence; identical to SEQ ID NO: 5421
  GFR-binding peptide
  MOD_RES (2)..(36): Xaa is C or S
  MOD_RES (14)..(15)..(16)..(17)..(18): Xaa is A or G
  MOD_RES (19)..(20)..(21)..(22): Xaa is A or G or is absent

SEQ ID NO: 12852 - protein, 36 aa, Artificial Sequence; identical to SEQ ID NO: 5427
  GFR-binding peptide
  MOD_RES (33)..(34): Xaa is C or S
  MOD_RES (11)..(12)..(13)..(14)..(15): Xaa is A or G
  MOD_RES (16)..(17)..(18)..(19): Xaa is A or G or is absent

SEQ ID NO: 12853 - protein, 34 aa, Artificial Sequence
  GFR-binding peptide
  MOD_RES (1)..(33): Xaa is C or S
XSRVVMNNSLQEIVNSSDDYYVVPLPELKTPAXT

SEQ ID NO: 12854 - protein, 35 aa, Artificial Sequence
  GFR-binding peptide
  MOD_RES (31)..(32): Xaa is C or S
EVVMENSLQEVVKDYEDYYVMPLPELETPVXXAKP

SEQ ID NO: 12855 - protein, 38 aa, Artificial Sequence; identical to SEQ ID NO: 5435
  GFR-binding peptide
  MOD_RES (1)..(33)..(34): Xaa is C or S

SEQ ID NO: 12856 - protein, 40 aa, Artificial Sequence
  GFR-binding peptide
  MOD_RES (2)..(4)..(38): Xaa is C or S
  MOD_RES (16)..(17)..(18)..(19)..(20): Xaa is A or G
  MOD_RES (21)..(22)..(23)..(24): Xaa is A or G or is absent
HXGXSRVVMNEYQKYXXXXXXXXXIFLVSIPSLKTPAXTP

SEQ ID NO: 12857 - protein, 36 aa, Artificial Sequence; identical to SEQ ID NO: 5442
  GFR-binding peptide
  MOD_RES (1)..(35)..(36): Xaa is C or S
  MOD_RES (13)..(14)..(15)..(16)..(17): Xaa is A or G
  MOD_RES (18)..(19)..(20)..(21): Xaa is A or G or is absent

SEQ ID NO: 12858 - protein, 33 aa, Artificial Sequence
  GFR-binding peptide
  MOD_RES (12)..(13)..(14)..(15)..(16): Xaa is A or G
  MOD_RES (17)..(18)..(19)..(20): Xaa is A or G or is absent
SRVVMNNSLQEXXXXXXXXXYYVVPLPELKTPA

SEQ ID NO: 12859 - protein, 43 aa, Artificial Sequence
  GFR-binding peptide
  MOD_RES (1)..(3)..(37)..(38): Xaa is C or S
  MOD_RES (15)..(16)..(17)..(18)..(19): Xaa is A or G
  MOD_RES (20)..(21)..(22)..(23): Xaa is A or G or is absent
XGXARVVMNEYQKYXXXXXXXXXIFLVSIPSLQTPAXXPKPVT

SEQ ID NO: 12860 - protein, 32 aa, Artificial Sequence; identical to SEQ ID NO: 5443
  GFR-binding peptide
  MOD_RES (31)..(32): Xaa is C or S

SEQ ID NO: 12861 - protein, 37 aa, Artificial Sequence
  GFR-binding peptide
  MOD_RES (2)..(4)..(35)..(36): Xaa is C or S
SXKXSKVIMEYQKYIKPTKGIIFLISIPSLDQSVXXP

SEQ ID NO: 12862 - protein, 38 aa, Artificial Sequence; identical to SEQ ID NO: 5444
  GFR-binding peptide
  MOD_RES (2)..(4)..(38): Xaa is C or S
  MOD_RES (16)..(17)..(18)..(19)..(20): Xaa is A or G
  MOD_RES (21)..(22)..(23)..(24): Xaa is A or G or is absent

SEQ ID NO: 12863 - protein, 33 aa, Artificial Sequence; identical to SEQ ID NO: 5445
  GFR-binding peptide
  MOD_RES (31)..(32): Xaa is C or S

SEQ ID NO: 12864 - protein, 39 aa, Artificial Sequence
  GFR-binding peptide
  MOD_RES (1)..(3)..(35)..(36): Xaa is C or S
XGXARVVMNEYQKYIVNSSDDIFLVSIPSLQTPAXXPKP

SEQ ID NO: 12865 - protein, 39 aa, Artificial Sequence
  GFR-binding peptide
  MOD_RES (1)..(3)..(37)..(38): Xaa is C or S
  MOD_RES (15)..(16)..(17)..(18)..(19): Xaa is A or G
  MOD_RES (20)..(21)..(22)..(23): Xaa is A or G or is absent
XGXGEVVMENSLQEXXXXXXXXXYYVMPLPELETPVXXA

SEQ ID NO: 12866 - protein, 37 aa, Artificial Sequence
  GFR-binding peptide
  MOD_RES (1)..(35)..(36): Xaa is C or S
  MOD_RES (13)..(14)..(15)..(16)..(17): Xaa is A or G
  MOD_RES (18)..(19)..(20)..(21): Xaa is A or G or is absent
XSEVVMDQYNKLXXXXXXXXXLYLISIASLRTPVXXT

SEQ ID NO: 12867 - protein, 35 aa, Artificial Sequence; identical to SEQ ID NO: 5448
  GFR-binding peptide
  MOD_RES (1)..(3): Xaa is C or S
  MOD_RES (14)..(15)..(16)..(17)..(18): Xaa is A or G
  MOD_RES (19)..(20)..(21)..(22): Xaa is A or G or is absent

SEQ ID NO: 12868 - protein, 33 aa, Artificial Sequence
  GFR-binding peptide
  MOD_RES (12)..(13)..(14)..(15)..(16): Xaa is A or G
  MOD_RES (17)..(18)..(19)..(20): Xaa is A or G or is absent
SEVVMDRYKKLXXXXXXXXXFYLISIANLRTPV

SEQ ID NO: 12869 - protein, 33 aa, Artificial Sequence; identical to SEQ ID NO: 5451
  GFR-binding peptide
  MOD_RES (12)..(13)..(14)..(15)..(16): Xaa is A or G
  MOD_RES (17)..(18)..(19)..(20): Xaa is A or G or is absent

SEQ ID NO: 12870 - protein, 36 aa, Artificial Sequence; identical to SEQ ID NO: 5454
  GFR-binding peptide
  MOD_RES (32)..(33): Xaa is C or S

SEQ ID NO: 12871 - protein, 34 aa, Artificial Sequence; identical to SEQ ID NO: 5455
  GFR-binding peptide
  MOD_RES (31)..(32): Xaa is C or S

SEQ ID NO: 12872 - protein, 31 aa, Artificial Sequence
  GFR-binding peptide
  MOD_RES (31)..(31): Xaa is C or S
SKVVMEYQKYVKPTRGVIFLISIPSLDQPVX

SEQ ID NO: 12873 - protein, 41 aa, Artificial Sequence; identical to SEQ ID NO: 5456
  GFR-binding peptide
  MOD_RES (1)..(3)..(37)..(38): Xaa is C or S
  MOD_RES (15)..(16)..(17)..(18)..(19): Xaa is A or G
  MOD_RES (20)..(21)..(22)..(23): Xaa is A or G or is absent

SEQ ID NO: 12874 - protein, 31 aa, Artificial Sequence; identical to SEQ ID NO: 5457
  GFR-binding peptide
  MOD_RES (1)..(1): Xaa is C or S

SEQ ID NO: 12875 - protein, 40 aa, Artificial Sequence; identical to SEQ ID NO: 5459
  GFR-binding peptide
  MOD_RES (2)..(35)..(36): Xaa is C or S
  MOD_RES (13)..(14)..(15)..(16)..(17): Xaa is A or G
  MOD_RES (18)..(19)..(20)..(21): Xaa is A or G or is absent

SEQ ID NO: 12876 - protein, 39 aa, Artificial Sequence
  GFR-binding peptide
  MOD_RES (2)..(4)..(35)..(36): Xaa is C or S
SXKXSRVIMNSLQEVKPKRGVYYVIPLPELAQPVXXPAA

SEQ ID NO: 12877 - protein, 36 aa, Artificial Sequence
  GFR-binding peptide
  MOD_RES (1)..(3): Xaa is C or S
  MOD_RES (15)..(16)..(17)..(18)..(19): Xaa is A or G
  MOD_RES (20)..(21)..(22)..(23): Xaa is A or G or is absent
XGXGEVVMENSLQEXXXXXXXXXYYLMTLPELETPV

SEQ ID NO: 12878 - protein, 36 aa, Artificial Sequence
  GFR-binding peptide
  MOD_RES (31)..(32): Xaa is C or S
RVVMNNSLQEIVNSSDDYYLVTLPELQTPAXXPKPV

SEQ ID NO: 12879 - protein, 33 aa, Artificial Sequence
  GFR-binding peptide
  MOD_RES (12)..(13)..(14)..(15)..(16): Xaa is A or G
  MOD_RES (17)..(18)..(19)..(20): Xaa is A or G or is absent
SEVVMDQYNKLXXXXXXXXXLYLISIASLRTPV

SEQ ID NO: 12880 - protein, 36 aa, Artificial Sequence; identical to SEQ ID NO: 5463
  GFR-binding peptide
  MOD_RES (1)..(3): Xaa is C or S
  MOD_RES (15)..(16)..(17)..(18)..(19): Xaa is A or G
  MOD_RES (20)..(21)..(22)..(23): Xaa is A or G or is absent

SEQ ID NO: 12881 - protein, 33 aa, Artificial Sequence
  GFR-binding peptide
  MOD_RES (32)..(32): Xaa is C or S
SRVVMNNSLQEIVNSSDDYYLVTLPELKTPAXT

SEQ ID NO: 12882 - protein, 36 aa, Artificial Sequence
  GFR-binding peptide
  MOD_RES (1)..(33): Xaa is C or S
XSRVVMNNSLQEIVNSSDDYYVVPLPELKTPAXTPK

SEQ ID NO: 12883 - protein, 37 aa, Artificial Sequence
  GFR-binding peptide
  MOD_RES (2)..(36)..(37): Xaa is C or S
  MOD_RES (14)..(15)..(16)..(17)..(18): Xaa is A or G
  MOD_RES (19)..(20)..(21)..(22): Xaa is A or G or is absent
GXSEVVMDNSLQEXXXXXXXXXYYLITLPELRTPVXX

SEQ ID NO: 12884 - protein, 37 aa, Artificial Sequence
  GFR-binding peptide
  MOD_RES (32)..(33): Xaa is C or S
SEVVMDEYQKYVVNNASDIFLISIPSLRTPVXXTPPT

SEQ ID NO: 12885 - protein, 40 aa, Artificial Sequence
  GFR-binding peptide
  MOD_RES (34)..(35): Xaa is C or S
  MOD_RES (12)..(13)..(14)..(15)..(16): Xaa is A or G
  MOD_RES (17)..(18)..(19)..(20): Xaa is A or G or is absent
SEVVMDRYKKLXXXXXXXXXFYLISIANLRTPVXXTPPTS

SEQ ID NO: 12886 - protein, 37 aa, Artificial Sequence; identical to SEQ ID NO: 5474
  GFR-binding peptide
  MOD_RES (2)..(33)..(34): Xaa is C or S

SEQ ID NO: 12887 - protein, 38 aa, Artificial Sequence
  GFR-binding peptide
  MOD_RES (2)..(34): Xaa is C or S
GXSRVVMNNSLQEIVNSSDDYYLVTLPELKTPAXTPKT

SEQ ID NO: 12888 - protein, 44 aa, Artificial Sequence; identical to SEQ ID NO: 5477
  GFR-binding peptide
  MOD_RES (2)..(4)..(38)..(39): Xaa is C or S
  MOD_RES (16)..(17)..(18)..(19)..(20): Xaa is A or G
  MOD_RES (21)..(22)..(23)..(24): Xaa is A or G or is absent

SEQ ID NO: 12889 - protein, 38 aa, Artificial Sequence; identical to SEQ ID NO: 5479
  GFR-binding peptide
  MOD_RES (1)..(33)..(34): Xaa is C or S

SEQ ID NO: 12890 - protein, 37 aa, Artificial Sequence; identical to SEQ ID NO: 5480
  GFR-binding peptide
  MOD_RES (1)..(34)..(35): Xaa is C or S
  MOD_RES (12)..(13)..(14)..(15)..(16): Xaa is A or G
  MOD_RES (17)..(18)..(19)..(20): Xaa is A or G or is absent

SEQ ID NO: 12891 - protein, 33 aa, Artificial Sequence
  GFR-binding peptide
  MOD_RES (31)..(32): Xaa is C or S
RVVMNEYQKYIVNSSDDIFLVSIPSLQTPAXXP

SEQ ID NO: 12892 - protein, 36 aa, Artificial Sequence
  GFR-binding peptide
  MOD_RES (2)..(36): Xaa is C or S
  MOD_RES (14)..(15)..(16)..(17)..(18): Xaa is A or G
  MOD_RES (19)..(20)..(21)..(22): Xaa is A or G or is absent
GXSEVVMDEYQKYXXXXXXXXXIFLISIPSLRTPVX

SEQ ID NO: 12893 - protein, 40 aa, Artificial Sequence
  GFR-binding peptide
  MOD_RES (1)..(3)..(35)..(36): Xaa is C or S
XGXGEVVMENSLQEVVKDYEDYYLMTLPELETPVXXAKPI

SEQ ID NO: 12894 - protein, 39 aa, Artificial Sequence; identical to SEQ ID NO: 5484
  GFR-binding peptide
  MOD_RES (2)..(35)..(36): Xaa is C or S
  MOD_RES (13)..(14)..(15)..(16)..(17): Xaa is A or G
  MOD_RES (18)..(19)..(20)..(21): Xaa is A or G or is absent

SEQ ID NO: 12895 - protein, 32 aa, Artificial Sequence
  GFR-binding peptide
  MOD_RES (32)..(32): Xaa is C or S
GEVVMDEYQKYVVKENEDIFLMSIPSLETPVX

SEQ ID NO: 12896 - protein, 33 aa, Artificial Sequence
  GFR-binding peptide
  MOD_RES (12)..(13)..(14)..(15)..(16): Xaa is A or G
  MOD_RES (17)..(18)..(19)..(20): Xaa is A or G or is absent
SRVVMNNSLQEXXXXXXXXXYYLVTLPELKTPA

SEQ ID NO: 12897 - protein, 43 aa, Artificial Sequence; identical to SEQ ID NO: 5487
  GFR-binding peptide
  MOD_RES (2)..(4)..(38)..(39): Xaa is C or S
  MOD_RES (16)..(17)..(18)..(19)..(20): Xaa is A or G
  MOD_RES (21)..(22)..(23)..(24): Xaa is A or G or is absent

SEQ ID NO: 12898 - protein, 32 aa, Artificial Sequence; identical to SEQ ID NO: 5492
  GFR-binding peptide
  MOD_RES (31)..(32): Xaa is C or S

SEQ ID NO: 12899 - protein, 39 aa, Artificial Sequence
  GFR-binding peptide
  MOD_RES (1)..(34)..(35): Xaa is C or S
  MOD_RES (12)..(13)..(14)..(15)..(16): Xaa is A or G
  MOD_RES (17)..(18)..(19)..(20): Xaa is A or G or is absent
XSKVIMNSLQEXXXXXXXXXYYVIPLPELDQSVXXPSAS

SEQ ID NO: 12900 - protein, 40 aa, Artificial Sequence; identical to SEQ ID NO: 5494
  GFR-binding peptide
  MOD_RES (2)..(4)..(38): Xaa is C or S
  MOD_RES (16)..(17)..(18)..(19)..(20): Xaa is A or G
  MOD_RES (21)..(22)..(23)..(24): Xaa is A or G or is absent

SEQ ID NO: 12901 - protein, 35 aa, Artificial Sequence
  GFR-binding peptide
  MOD_RES (1)..(32)..(33): Xaa is C or S
XSKVIMEYQKYIKPTKGIIFLISIPSLDQSVXXPS

SEQ ID NO: 12902 - protein, 38 aa, Artificial Sequence
  GFR-binding peptide
  MOD_RES (1)..(3)..(34)..(35): Xaa is C or S
XKXSKVVMNSLQEVKPTRGVYYVIPLPELDQPVXXPSA

SEQ ID NO: 12903 - protein, 35 aa, Artificial Sequence; identical to SEQ ID NO: 5498
  GFR-binding peptide
  MOD_RES (2)..(2): Xaa is C or S
  MOD_RES (14)..(15)..(16)..(17)..(18): Xaa is A or G
  MOD_RES (19)..(20)..(21)..(22): Xaa is A or G or is absent

SEQ ID NO: 12904 - protein, 35 aa, Artificial Sequence
  GFR-binding peptide
  MOD_RES (32)..(33): Xaa is C or S
ARVVMNEYQKYIVNSSDDIFLVSIPSLQTPAXXPK

SEQ ID NO: 12905 - protein, 40 aa, Artificial Sequence
  GFR-binding peptide
  MOD_RES (2)..(35)..(36): Xaa is C or S
  MOD_RES (13)..(14)..(15)..(16)..(17): Xaa is A or G
  MOD_RES (18)..(19)..(20)..(21): Xaa is A or G or is absent
KXSKVIMEYQKYXXXXXXXXXIFLISIPSLDQSVXXPSAS

SEQ ID NO: 12906 - protein, 34 aa, Artificial Sequence; identical to SEQ ID NO: 5499
  GFR-binding peptide
  MOD_RES (2)..(2): Xaa is C or S
  MOD_RES (13)..(14)..(15)..(16)..(17): Xaa is A or G
  MOD_RES (18)..(19)..(20)..(21): Xaa is A or G or is absent

SEQ ID NO: 12907 - protein, 37 aa, Artificial Sequence
  GFR-binding peptide
  MOD_RES (1)..(33)..(34): Xaa is C or S
XSRVVMNNSLQEIVNSSDDYYVVPLPELKTPAXXPKP

SEQ ID NO: 12908 - protein, 39 aa, Artificial Sequence; identical to SEQ ID NO: 5501
  GFR-binding peptide
  MOD_RES (1)..(35)..(36): Xaa is C or S
  MOD_RES (13)..(14)..(15)..(16)..(17): Xaa is A or G
  MOD_RES (18)..(19)..(20)..(21): Xaa is A or G or is absent

SEQ ID NO: 12909 - protein, 40 aa, Artificial Sequence
  GFR-binding peptide
  MOD_RES (1)..(3)..(37)..(38): Xaa is C or S
  MOD_RES (15)..(16)..(17)..(18)..(19): Xaa is A or G
  MOD_RES (20)..(21)..(22)..(23): Xaa is A or G or is absent
XGXARVVMNEYQKYXXXXXXXXXIFLVSIPSLQTPAXXPK

SEQ ID NO: 12910 - protein, 36 aa, Artificial Sequence
  GFR-binding peptide
  MOD_RES (34)..(35): Xaa is C or S
  MOD_RES (12)..(13)..(14)..(15)..(16): Xaa is A or G
  MOD_RES (17)..(18)..(19)..(20): Xaa is A or G or is absent
GEVVMENSLQEXXXXXXXXXYYLMTLPELETPVXXA

SEQ ID NO: 12911 - protein, 35 aa, Artificial Sequence
  GFR-binding peptide
  MOD_RES (1)..(33): Xaa is C or S
XSRVVMNEYQKYIVNSSDDIFLVSIPSLKTPAXTP

SEQ ID NO: 12912 - protein, 35 aa, Artificial Sequence
  GFR-binding peptide
  MOD_RES (2)..(2): Xaa is C or S
  MOD_RES (14)..(15)..(16)..(17)..(18): Xaa is A or G
  MOD_RES (19)..(20)..(21)..(22): Xaa is A or G or is absent
GXARVVMNNSLQEXXXXXXXXXYYVVPLPELQTPA

SEQ ID NO: 12913 - protein, 35 aa, Artificial Sequence; identical to SEQ ID NO: 5503
  GFR-binding peptide
  MOD_RES (2)..(2): Xaa is C or S
  MOD_RES (14)..(15)..(16)..(17)..(18): Xaa is A or G
  MOD_RES (19)..(20)..(21)..(22): Xaa is A or G or is absent

SEQ ID NO: 12914 - protein, 42 aa, Artificial Sequence
  GFR-binding peptide
  MOD_RES (2)..(36): Xaa is C or S
  MOD_RES (14)..(15)..(16)..(17)..(18): Xaa is A or G
  MOD_RES (19)..(20)..(21)..(22): Xaa is A or G or is absent
GXSRVVMNNSLQEXXXXXXXXXYYLVTLPELKTPAXTPKTVH

SEQ ID NO: 12915 - protein, 40 aa, Artificial Sequence
  GFR-binding peptide
  MOD_RES (1)..(3)..(35)..(36): Xaa is C or S
XGXGEVVMEEYQKYVVKDYEDIFLMSIPSLETPVXXAKPI

SEQ ID NO: 12916 - protein, 38 aa, Artificial Sequence
  GFR-binding peptide
  MOD_RES (32)..(33): Xaa is C or S
GEVVMENSLQEVVKDYEDYYVMPLPELETPVXXAKPIS

SEQ ID NO: 12917 - protein, 39 aa, Artificial Sequence
  GFR-binding peptide
  MOD_RES (33)..(34): Xaa is C or S
  MOD_RES (11)..(12)..(13)..(14)..(15): Xaa is A or G
  MOD_RES (16)..(17)..(18)..(19): Xaa is A or G or is absent
RVVMNNSLQEXXXXXXXXXYYVVPLPELKTPAXXPKPVY

SEQ ID NO: 12918 - protein, 40 aa, Artificial Sequence
  GFR-binding peptide
  MOD_RES (1)..(35)..(36): Xaa is C or S
  MOD_RES (13)..(14)..(15)..(16)..(17): Xaa is A or G
  MOD_RES (18)..(19)..(20)..(21): Xaa is A or G or is absent
XGEVVMENSLQEXXXXXXXXXYYLMTLPELETPVXXAKPI

SEQ ID NO: 12919 - protein, 40 aa, Artificial Sequence; identical to SEQ ID NO: 5507
  GFR-binding peptide
  MOD_RES (1)..(3)..(36)..(37): Xaa is C or S
  MOD_RES (14)..(15)..(16)..(17)..(18): Xaa is A or G
  MOD_RES (19)..(20)..(21)..(22): Xaa is A or G or is absent

SEQ ID NO: 12920 - protein, 34 aa, Artificial Sequence
  GFR-binding peptide
  MOD_RES (34)..(34): Xaa is C or S
  MOD_RES (12)..(13)..(14)..(15)..(16): Xaa is A or G
  MOD_RES (17)..(18)..(19)..(20): Xaa is A or G or is absent
SEVVMDNSLQEXXXXXXXXXYYVIPLPELRTPVX

SEQ ID NO: 12921 - protein, 36 aa, Artificial Sequence; identical to SEQ ID NO: 5508
  GFR-binding peptide
  MOD_RES (2)..(36): Xaa is C or S
  MOD_RES (14)..(15)..(16)..(17)..(18): Xaa is A or G
  MOD_RES (19)..(20)..(21)..(22): Xaa is A or G or is absent

SEQ ID NO: 12922 - protein, 40 aa, Artificial Sequence
  GFR-binding peptide
  MOD_RES (34)..(35): Xaa is C or S
  MOD_RES (12)..(13)..(14)..(15)..(16): Xaa is A or G
  MOD_RES (17)..(18)..(19)..(20): Xaa is A or G or is absent
SEVVMDQYNKLXXXXXXXXXLYLISIASLRTPVXXTPPTS

SEQ ID NO: 12923 - protein, 37 aa, Artificial Sequence
  GFR-binding peptide
  MOD_RES (1)..(33)..(34): Xaa is C or S
XGEVVMENSLQEVVKDYEDYYLMTLPELETPVXXAKP

SEQ ID NO: 12924 - protein, 31 aa, Artificial Sequence
  GFR-binding peptide
SEVVMDNSLQEVVNNASDYYLITLPELRTPV

SEQ ID NO: 12925 - protein, 41 aa, Artificial Sequence; identical to SEQ ID NO: 5511
  GFR-binding peptide
  MOD_RES (1)..(35)..(36): Xaa is C or S
  MOD_RES (13)..(14)..(15)..(16)..(17): Xaa is A or G
  MOD_RES (18)..(19)..(20)..(21): Xaa is A or G or is absent

SEQ ID NO: 12926 - protein, 38 aa, Artificial Sequence
  GFR-binding peptide
  MOD_RES (1)..(33)..(34): Xaa is C or S
XGEVVMDNSLQEVVKENEDYYVMPLPELETPVXXAKPI

SEQ ID NO: 12927 - protein, 42 aa, Artificial Sequence
  GFR-binding peptide
  MOD_RES (2)..(4)..(36)..(37): Xaa is C or S
HXGXARVVMNEYQKYIVNSSDDIFLVSIPSLQTPAXXPKPVT

SEQ ID NO: 12928 - protein, 35 aa, Artificial Sequence
  GFR-binding peptide
  MOD_RES (31)..(32): Xaa is C or S
SRVIMEYQKYVKPKRGVIFLISIPSLAQPVXXPAA

SEQ ID NO: 12929 - protein, 33 aa, Artificial Sequence
  GFR-binding peptide
  MOD_RES (31)..(32): Xaa is C or S
EVVMDNSLQEVVNNASDYYVIPLPELRTPVXXT

SEQ ID NO: 12930 - protein, 36 aa, Artificial Sequence
  GFR-binding peptide
  MOD_RES (2)..(34)..(35): Xaa is C or S
GXSEVVMDNSLQEVVNNASDYYVIPLPELRTPVXXT

SEQ ID NO: 12931 - protein, 38 aa, Artificial Sequence
  GFR-binding peptide
  MOD_RES (1)..(34)..(35): Xaa is C or S
  MOD_RES (12)..(13)..(14)..(15)..(16): Xaa is A or G
  MOD_RES (17)..(18)..(19)..(20): Xaa is A or G or is absent
XSKVIMNSLQEXXXXXXXXXYYVIPLPELDQSVXXPSA

SEQ ID NO: 12932 - protein, 35 aa, Artificial Sequence; identical to SEQ ID NO: 5519
  GFR-binding peptide
  MOD_RES (31)..(32): Xaa is C or S

SEQ ID NO: 12933 - protein, 37 aa, Artificial Sequence; identical to SEQ ID NO: 5520
  GFR-binding peptide
  MOD_RES (1)..(35)..(36): Xaa is C or S
  MOD_RES (13)..(14)..(15)..(16)..(17): Xaa is A or G
  MOD_RES (18)..(19)..(20)..(21): Xaa is A or G or is absent

SEQ ID NO: 12934 - protein, 34 aa, Artificial Sequence
  GFR-binding peptide
  MOD_RES (34)..(34): Xaa is C or S
  MOD_RES (12)..(13)..(14)..(15)..(16): Xaa is A or G
  MOD_RES (17)..(18)..(19)..(20): Xaa is A or G or is absent
SEVVMDNSLQEXXXXXXXXXYYLITLPELRTPVX

SEQ ID NO: 12935 - protein, 35 aa, Artificial Sequence
  GFR-binding peptide
  MOD_RES (34)..(35): Xaa is C or S
  MOD_RES (12)..(13)..(14)..(15)..(16): Xaa is A or G
  MOD_RES (17)..(18)..(19)..(20): Xaa is A or G or is absent
SEVVMDNSLQEXXXXXXXXXYYVIPLPELRTPVXX

SEQ ID NO: 12936 - protein, 36 aa, Artificial Sequence
  GFR-binding peptide
  MOD_RES (2)..(34)..(35): Xaa is C or S
GXGEVVMENSLQEVVKDYEDYYLMTLPELETPVXXA

SEQ ID NO: 12937 - protein, 36 aa, Artificial Sequence
  GFR-binding peptide
  MOD_RES (33)..(34): Xaa is C or S
  MOD_RES (11)..(12)..(13)..(14)..(15): Xaa is A or G
  MOD_RES (16)..(17)..(18)..(19): Xaa is A or G or is absent
EVVMEEYQKYXXXXXXXXXIFLMSIPSLETPVXXAK

SEQ ID NO: 12938 - protein, 36 aa, Artificial Sequence
  GFR-binding peptide
  MOD_RES (32)..(32): Xaa is C or S
SRVVMNEYQKYIVNSSDDIFLVSIPSLKTPAXTPKT

SEQ ID NO: 12939 - protein, 40 aa, Artificial Sequence
  GFR-binding peptide
  MOD_RES (2)..(4)..(35)..(36): Xaa is C or S
SXKXSKVVMEYQKYVKPTRGVIFLISIPSLDQPVXXPSAS

SEQ ID NO: 12940 - protein, 40 aa, Artificial Sequence
  GFR-binding peptide
  MOD_RES (2)..(34)..(35): Xaa is C or S
GXSEVVMDNSLQEVVNNASDYYVIPLPELRTPVXXTPPTS

SEQ ID NO: 12941 - protein, 34 aa, Artificial Sequence
  GFR-binding peptide
  MOD_RES (33)..(34): Xaa is C or S
  MOD_RES (11)..(12)..(13)..(14)..(15): Xaa is A or G
  MOD_RES (16)..(17)..(18)..(19): Xaa is A or G or is absent
RVVMNNSLQEXXXXXXXXXYYLVTLPELKTPAXX

SEQ ID NO: 12942 - protein, 34 aa, Artificial Sequence
  GFR-binding peptide
  MOD_RES (32)..(33): Xaa is C or S
ARVVMNEYQKYIVNSSDDIFLVSIPSLQTPAXXP

SEQ ID NO: 12943 - protein, 38 aa, Artificial Sequence
  GFR-binding peptide
  MOD_RES (2)..(34)..(35): Xaa is C or S
GXSEVVMDRYKKLVVNNASDFYLISIANLRTPVXXTPP

SEQ ID NO: 12944 - protein, 37 aa, Artificial Sequence
  GFR-binding peptide
  MOD_RES (2)..(4)..(36)..(37): Xaa is C or S
RXGXGEVVMDEYQKYVVKENEDIFLMSIPSLETPVXX

SEQ ID NO: 12945 - protein, 31 aa, Artificial Sequence
  GFR-binding peptide
GEVVMENSLQEVVKDYEDYYVMPLPELETPV

SEQ ID NO: 12946 - protein, 43 aa, Artificial Sequence
  GFR-binding peptide
  MOD_RES (2)..(4)..(37)..(38): Xaa is C or S
  MOD_RES (15)..(16)..(17)..(18)..(19): Xaa is A or G
  MOD_RES (20)..(21)..(22)..(23): Xaa is A or G or is absent
SXKXSKVVMNSLQEXXXXXXXXXYYVIPLPELDQPVXXPSASA

SEQ ID NO: 12947 - protein, 39 aa, Artificial Sequence
  GFR-binding peptide
  MOD_RES (33)..(34): Xaa is C or S
  MOD_RES (11)..(12)..(13)..(14)..(15): Xaa is A or G
  MOD_RES (16)..(17)..(18)..(19): Xaa is A or G or is absent
EVVMENSLQEXXXXXXXXXYYVMPLPELETPVXXAKPIS

SEQ ID NO: 12948 - protein, 39 aa, Artificial Sequence
  GFR-binding peptide
  MOD_RES (33)..(34): Xaa is C or S
  MOD_RES (11)..(12)..(13)..(14)..(15): Xaa is A or G
  MOD_RES (16)..(17)..(18)..(19): Xaa is A or G or is absent
SRVIMEYQKYXXXXXXXXXIFLISIPSLAQPVXXPAASA

SEQ ID NO: 12949 - protein, 38 aa, Artificial Sequence; identical to SEQ ID NO: 5532
  GFR-binding peptide
  MOD_RES (33)..(34): Xaa is C or S
  MOD_RES (11)..(12)..(13)..(14)..(15): Xaa is A or G
  MOD_RES (16)..(17)..(18)..(19): Xaa is A or G or is absent

SEQ ID NO: 12950 - protein, 39 aa, Artificial Sequence; identical to SEQ ID NO: 5534
  GFR-binding peptide
  MOD_RES (2)..(36)..(37): Xaa is C or S
  MOD_RES (14)..(15)..(16)..(17)..(18): Xaa is A or G
  MOD_RES (19)..(20)..(21)..(22): Xaa is A or G or is absent

SEQ ID NO: 12951 - protein, 38 aa, Artificial Sequence; identical to SEQ ID NO: 5536
  GFR-binding peptide
  MOD_RES (2)..(36)..(37): Xaa is C or S
  MOD_RES (14)..(15)..(16)..(17)..(18): Xaa is A or G
  MOD_RES (19)..(20)..(21)..(22): Xaa is A or G or is absent

SEQ ID NO: 12952 - protein, 34 aa, Artificial Sequence
  GFR-binding peptide
  MOD_RES (31)..(32): Xaa is C or S
EVVMDQYNKLVVNNASDLYLISIASLRTPVXXTP

SEQ ID NO: 12953 - protein, 37 aa, Artificial Sequence
  GFR-binding peptide
  MOD_RES (32)..(33): Xaa is C or S
GEVVMDEYQKYVVKENEDIFLMSIPSLETPVXXAKPI

SEQ ID NO: 12954 - protein, 31 aa, Artificial Sequence
  GFR-binding peptide
  MOD_RES (31)..(31): Xaa is C or S
EVVMDNSLQEVVKENEDYYLMTLPELETPVX

SEQ ID NO: 12955 - protein, 38 aa, Artificial Sequence
  GFR-binding peptide
  MOD_RES (1)..(3)..(37)..(38): Xaa is C or S
  MOD_RES (15)..(16)..(17)..(18)..(19): Xaa is A or G
  MOD_RES (20)..(21)..(22)..(23): Xaa is A or G or is absent
XGXGEVVMDNSLQEXXXXXXXXXYYLMTLPELETPVXX

SEQ ID NO: 12956 - protein, 36 aa, Artificial Sequence
  GFR-binding peptide
  MOD_RES (1)..(3)..(35)..(36): Xaa is C or S
XGXSRVVMNNSLQEIVNSSDDYYLVTLPELKTPAXX

SEQ ID NO: 12957 - protein, 41 aa, Artificial Sequence
  GFR-binding peptide
  MOD_RES (1)..(3)..(37): Xaa is C or S
  MOD_RES (15)..(16)..(17)..(18)..(19): Xaa is A or G
  MOD_RES (20)..(21)..(22)..(23): Xaa is A or G or is absent
XGXSRVVMNNSLQEXXXXXXXXXYYLVTLPELKTPAXTPKT

SEQ ID NO: 12958 - protein, 34 aa, Artificial Sequence
  GFR-binding peptide
  MOD_RES (2)..(4): Xaa is C or S
SXKXSRVIMNSLQEVKPKRGVYYVIPLPELAQPV

SEQ ID NO: 12959 - protein, 40 aa, Artificial Sequence; identical to SEQ ID NO: 5544
  GFR-binding peptide
  MOD_RES (1)..(3)..(37)..(38): Xaa is C or S
  MOD_RES (15)..(16)..(17)..(18)..(19): Xaa is A or G
  MOD_RES (20)..(21)..(22)..(23): Xaa is A or G or is absent

SEQ ID NO: 12960 - protein, 31 aa, Artificial Sequence; identical to SEQ ID NO: 5546
  GFR-binding peptide

SEQ ID NO: 12961 - protein, 36 aa, Artificial Sequence; identical to SEQ ID NO: 5547
  GFR-binding peptide
  MOD_RES (1)..(3)..(36): Xaa is C or S
  MOD_RES (14)..(15)..(16)..(17)..(18): Xaa is A or G
  MOD_RES (19)..(20)..(21)..(22): Xaa is A or G or is absent

SEQ ID NO: 12962 - protein, 34 aa, Artificial Sequence; identical to SEQ ID NO: 5551
  GFR-binding peptide
  MOD_RES (2)..(4): Xaa is C or S

SEQ ID NO: 12963 - protein, 42 aa, Artificial Sequence
  GFR-binding peptide
  MOD_RES (1)..(3)..(37)..(38): Xaa is C or S
  MOD_RES (15)..(16)..(17)..(18)..(19): Xaa is A or G
  MOD_RES (20)..(21)..(22)..(23): Xaa is A or G or is absent
XGXSEVVMDEYQKYXXXXXXXXXIFLISIPSLRTPVXXTPPT

SEQ ID NO: 12964 - protein, 34 aa, Artificial Sequence
  GFR-binding peptide
  MOD_RES (1)..(32)..(33): Xaa is C or S
XSKVIMNSLQEIKPTKGIYYVIPLPELDQSVXXP

SEQ ID NO: 12965 - protein, 38 aa, Artificial Sequence
  GFR-binding peptide
  MOD_RES (2)..(35)..(36): Xaa is C or S
  MOD_RES (13)..(14)..(15)..(16)..(17): Xaa is A or G
  MOD_RES (18)..(19)..(20)..(21): Xaa is A or G or is absent
KXSKVIMEYQKYXXXXXXXXXIFLISIPSLDQSVXXPS

SEQ ID NO: 12966 - protein, 37 aa, Artificial Sequence
  GFR-binding peptide
  MOD_RES (31)..(32): Xaa is C or S
SKVIMEYQKYIKPTKGIIFLISIPSLDQSVXXPSASA

SEQ ID NO: 12967 - protein, 33 aa, Artificial Sequence
  GFR-binding peptide
  MOD_RES (33)..(33): Xaa is C or S
  MOD_RES (11)..(12)..(13)..(14)..(15): Xaa is A or G
  MOD_RES (16)..(17)..(18)..(19): Xaa is A or G or is absent
EVVMDNSLQEXXXXXXXXXYYVIPLPELRTPVX

SEQ ID NO: 12968 - protein, 39 aa, Artificial Sequence
  GFR-binding peptide
  MOD_RES (1)..(34)..(35): Xaa is C or S
  MOD_RES (12)..(13)..(14)..(15)..(16): Xaa is A or G
  MOD_RES (17)..(18)..(19)..(20): Xaa is A or G or is absent
XSKVVMNSLQEXXXXXXXXXYYVIPLPELDQPVXXPSAS

SEQ ID NO: 12969 - protein, 36 aa, Artificial Sequence
  GFR-binding peptide
  MOD_RES (2)..(36): Xaa is C or S
  MOD_RES (14)..(15)..(16)..(17)..(18): Xaa is A or G
  MOD_RES (19)..(20)..(21)..(22): Xaa is A or G or is absent
GXSRVVMNNSLQEXXXXXXXXXYYVVPLPELKTPAX

SEQ ID NO: 12970 - protein, 35 aa, Artificial Sequence
  GFR-binding peptide
  MOD_RES (33)..(34): Xaa is C or S
  MOD_RES (11)..(12)..(13)..(14)..(15): Xaa is A or G
  MOD_RES (16)..(17)..(18)..(19): Xaa is A or G or is absent
RVVMNEYQKYXXXXXXXXXIFLVSIPSLKTPAXXP

SEQ ID NO: 12971 - protein, 33 aa, Artificial Sequence
  GFR-binding peptide
  MOD_RES (31)..(32): Xaa is C or S
SRVIMNSLQEVKPKRGVYYVIPLPELAQPVXXP

SEQ ID NO: 12972 - protein, 37 aa, Artificial Sequence
  GFR-binding peptide
  MOD_RES (2)..(4)..(36)..(37): Xaa is C or S
RXGXGEVVMDNSLQEVVKENEDYYLMTLPELETPVXX

SEQ ID NO: 12973 - protein, 36 aa, Artificial Sequence; identical to SEQ ID NO: 5562
  GFR-binding peptide
  MOD_RES (31)..(32): Xaa is C or S

SEQ ID NO: 12974 - protein, 36 aa, Artificial Sequence; identical to SEQ ID NO: 5563
  GFR-binding peptide
  MOD_RES (2)..(36): Xaa is C or S
  MOD_RES (14)..(15)..(16)..(17)..(18): Xaa is A or G
  MOD_RES (19)..(20)..(21)..(22): Xaa is A or G or is absent

SEQ ID NO: 12975 - protein, 36 aa, Artificial Sequence
  GFR-binding peptide
  MOD_RES (1)..(3)..(35)..(36): Xaa is C or S
XGXSRVVMNEYQKYIVNSSDDIFLVSIPSLKTPAXX

SEQ ID NO: 12976 - protein, 37 aa, Artificial Sequence
  GFR-binding peptide
  MOD_RES (2)..(36)..(37): Xaa is C or S
  MOD_RES (14)..(15)..(16)..(17)..(18): Xaa is A or G
  MOD_RES (19)..(20)..(21)..(22): Xaa is A or G or is absent
GXARVVMNNSLQEXXXXXXXXXYYVVPLPELQTPAXX

SEQ ID NO: 12977 - protein, 38 aa, Artificial Sequence
  GFR-binding peptide
  MOD_RES (2)..(33)..(34): Xaa is C or S
KXSRVIMEYQKYVKPKRGVIFLISIPSLAQPVXXPAAS

SEQ ID NO: 12978 - protein, 38 aa, Artificial Sequence
  GFR-binding peptide
  MOD_RES (1)..(33)..(34): Xaa is C or S
XARVVMNNSLQEIVNSSDDYYLVTLPELQTPAXXPKPV

SEQ ID NO: 12979 - protein, 36 aa, Artificial Sequence; identical to SEQ ID NO: 5568
  GFR-binding peptide
  MOD_RES (34)..(35): Xaa is C or S
  MOD_RES (12)..(13)..(14)..(15)..(16): Xaa is A or G
  MOD_RES (17)..(18)..(19)..(20): Xaa is A or G or is absent

SEQ ID NO: 12980 - protein, 39 aa, Artificial Sequence
  GFR-binding peptide
  MOD_RES (2)..(4)..(37)..(38): Xaa is C or S
  MOD_RES (15)..(16)..(17)..(18)..(19): Xaa is A or G
  MOD_RES (20)..(21)..(22)..(23): Xaa is A or G or is absent
SXKXSKVVMNSLQEXXXXXXXXXYYVIPLPELDQPVXXP

SEQ ID NO: 12981 - protein, 34 aa, Artificial Sequence
  GFR-binding peptide
  MOD_RES (2)..(34): Xaa is C or S
GXGEVVMENSLQEVVKDYEDYYVMPLPELETPVX

SEQ ID NO: 12982 - protein, 37 aa, Artificial Sequence
  GFR-binding peptide
  MOD_RES (1)..(32)..(33): Xaa is C or S
XSRVIMEYQKYVKPKRGVIFLISIPSLAQPVXXPAAS

SEQ ID NO: 12983 - protein, 38 aa, Artificial Sequence; identical to SEQ ID NO: 5570
  GFR-binding peptide
  MOD_RES (33)..(33): Xaa is C or S
  MOD_RES (11)..(12)..(13)..(14)..(15): Xaa is A or G
  MOD_RES (16)..(17)..(18)..(19): Xaa is A or G or is absent

SEQ ID NO: 12984 - protein, 35 aa, Artificial Sequence; identical to SEQ ID NO: 5572
  GFR-binding peptide
  MOD_RES (2)..(33)..(34): Xaa is C or S

SEQ ID NO: 12985 - protein, 36 aa, Artificial Sequence
  GFR-binding peptide
  MOD_RES (34)..(35): Xaa is C or S
  MOD_RES (12)..(13)..(14)..(15)..(16): Xaa is A or G
  MOD_RES (17)..(18)..(19)..(20): Xaa is A or G or is absent
GEVVMEEYQKYXXXXXXXXXIFLMSIPSLETPVXXA

SEQ ID NO: 12986 - protein, 36 aa, Artificial Sequence; identical to SEQ ID NO: 5573
  GFR-binding peptide
  MOD_RES (34)..(35): Xaa is C or S
  MOD_RES (12)..(13)..(14)..(15)..(16): Xaa is A or G
  MOD_RES (17)..(18)..(19)..(20): Xaa is A or G or is absent

SEQ ID NO: 12987 - protein, 42 aa, Artificial Sequence; identical to SEQ ID NO: 5575
  GFR-binding peptide
  MOD_RES (1)..(3)..(37)..(38): Xaa is C or S
  MOD_RES (15)..(16)..(17)..(18)..(19): Xaa is A or G
  MOD_RES (20)..(21)..(22)..(23): Xaa is A or G or is absent

SEQ ID NO: 12988 - protein, 34 aa, Artificial Sequence
  GFR-binding peptide
  MOD_RES (33)..(34): Xaa is C or S
  MOD_RES (11)..(12)..(13)..(14)..(15): Xaa is A or G
  MOD_RES (16)..(17)..(18)..(19): Xaa is A or G or is absent
EVVMEEYQKYXXXXXXXXXIFLMSIPSLETPVXX

SEQ ID NO: 12989 - protein, 38 aa, Artificial Sequence; identical to SEQ ID NO: 5578
  GFR-binding peptide
  MOD_RES (1)..(3)..(37)..(38): Xaa is C or S
  MOD_RES (15)..(16)..(17)..(18)..(19): Xaa is A or G
  MOD_RES (20)..(21)..(22)..(23): Xaa is A or G or is absent

SEQ ID NO: 12990 - protein, 34 aa, Artificial Sequence
  GFR-binding peptide
  MOD_RES (31)..(32): Xaa is C or S
SKVIMEYQKYIKPTKGIIFLISIPSLDQSVXXPS

SEQ ID NO: 12991 - protein, 36 aa, Artificial Sequence
  GFR-binding peptide
  MOD_RES (34)..(35): Xaa is C or S
  MOD_RES (12)..(13)..(14)..(15)..(16): Xaa is A or G
  MOD_RES (17)..(18)..(19)..(20): Xaa is A or G or is absent
GEVVMENSLQEXXXXXXXXXYYVMPLPELETPVXXA

SEQ ID NO: 12992 - protein, 36 aa, Artificial Sequence
  GFR-binding peptide
  MOD_RES (1)..(3): Xaa is C or S
  MOD_RES (15)..(16)..(17)..(18)..(19): Xaa is A or G
  MOD_RES (20)..(21)..(22)..(23): Xaa is A or G or is absent
XGXGEVVMEEYQKYXXXXXXXXXIFLMSIPSLETPV

SEQ ID NO: 12993 - protein, 39 aa, Artificial Sequence
  GFR-binding peptide
  MOD_RES (2)..(36)..(37): Xaa is C or S
  MOD_RES (14)..(15)..(16)..(17)..(18): Xaa is A or G
  MOD_RES (19)..(20)..(21)..(22): Xaa is A or G or is absent
GXGEVVMDNSLQEXXXXXXXXXYYLMTLPELETPVXXAK

SEQ ID NO: 12994 - protein, 43 aa, Artificial Sequence
  GFR-binding peptide
  MOD_RES (2)..(4)..(38): Xaa is C or S
  MOD_RES (16)..(17)..(18)..(19)..(20): Xaa is A or G
  MOD_RES (21)..(22)..(23)..(24): Xaa is A or G or is absent
HXGXSRVVMNNSLQEXXXXXXXXXYYLVTLPELKTPAXTPKTV

SEQ ID NO: 12995 - protein, 31 aa, Artificial Sequence; identical to SEQ ID NO: 5582
  GFR-binding peptide

SEQ ID NO: 12996 - protein, 40 aa, Artificial Sequence
  GFR-binding peptide
  MOD_RES (1)..(35)..(36): Xaa is C or S
  MOD_RES (13)..(14)..(15)..(16)..(17): Xaa is A or G
  MOD_RES (18)..(19)..(20)..(21): Xaa is A or G or is absent
XSEVVMDNSLQEXXXXXXXXXYYLITLPELRTPVXXTPPT

SEQ ID NO: 12997 - protein, 35 aa, Artificial Sequence; identical to SEQ ID NO: 5584
  GFR-binding peptide
  MOD_RES (33)..(34): Xaa is C or S
  MOD_RES (11)..(12)..(13)..(14)..(15): Xaa is A or G
  MOD_RES (16)..(17)..(18)..(19): Xaa is A or G or is absent

SEQ ID NO: 12998 - protein, 37 aa, Artificial Sequence; identical to SEQ ID NO: 5586
  GFR-binding peptide
  MOD_RES (2)..(35)..(36): Xaa is C or S
  MOD_RES (13)..(14)..(15)..(16)..(17): Xaa is A or G
  MOD_RES (18)..(19)..(20)..(21): Xaa is A or G or is absent

SEQ ID NO: 12999 - protein, 40 aa, Artificial Sequence
  GFR-binding peptide
  MOD_RES (2)..(36)..(37): Xaa is C or S
  MOD_RES (14)..(15)..(16)..(17)..(18): Xaa is A or G
  MOD_RES (19)..(20)..(21)..(22): Xaa is A or G or is absent
GXSRVVMNEYQKYXXXXXXXXXIFLVSIPSLKTPAXXPKP

SEQ ID NO: 13000 - protein, 39 aa, Artificial Sequence
  GFR-binding peptide
  MOD_RES (2)..(34)..(35): Xaa is C or S
GXARVVMNNSLQEIVNSSDDYYLVTLPELQTPAXXPKPV

SEQ ID NO: 13001 - protein, 38 aa, Artificial Sequence
  GFR-binding peptide
  MOD_RES (34)..(35): Xaa is C or S
  MOD_RES (12)..(13)..(14)..(15)..(16): Xaa is A or G
  MOD_RES (17)..(18)..(19)..(20): Xaa is A or G or is absent
GEVVMDNSLQEXXXXXXXXXYYVMPLPELETPVXXAKP

SEQ ID NO: 13002 - protein, 37 aa, Artificial Sequence; identical to SEQ ID NO: 5589
  GFR-binding peptide
  MOD_RES (1)..(3)..(36)..(37): Xaa is C or S
  MOD_RES (14)..(15)..(16)..(17)..(18): Xaa is A or G
  MOD_RES (19)..(20)..(21)..(22): Xaa is A or G or is absent

SEQ ID NO: 13003 - protein, 38 aa, Artificial Sequence
  GFR-binding peptide
  MOD_RES (2)..(34)..(35): Xaa is C or S
GXSEVVMDNSLQEVVNNASDYYVIPLPELRTPVXXTPP

SEQ ID NO: 13004 - protein, 39 aa, Artificial Sequence; identical to SEQ ID NO: 5593
  GFR-binding peptide
  MOD_RES (1)..(3)..(37)..(38): Xaa is C or S
  MOD_RES (15)..(16)..(17)..(18)..(19): Xaa is A or G
  MOD_RES (20)..(21)..(22)..(23): Xaa is A or G or is absent

SEQ ID NO: 13005 - protein, 40 aa, Artificial Sequence
  GFR-binding peptide
  MOD_RES (1)..(35): Xaa is C or S
  MOD_RES (13)..(14)..(15)..(16)..(17): Xaa is A or G
  MOD_RES (18)..(19)..(20)..(21): Xaa is A or G or is absent
XSRVVMNEYQKYXXXXXXXXXIFLVSIPSLKTPAXTPKTV

SEQ ID NO: 13006 - protein, 38 aa, Artificial Sequence
  GFR-binding peptide
  MOD_RES (1)..(3)..(37)..(38): Xaa is C or S
  MOD_RES (15)..(16)..(17)..(18)..(19): Xaa is A or G
  MOD_RES (20)..(21)..(22)..(23): Xaa is A or G or is absent
XGXGEVVMENSLQEXXXXXXXXXYYLMTLPELETPVXX

SEQ ID NO: 13007 - protein, 34 aa, Artificial Sequence; identical to SEQ ID NO: 5595
  GFR-binding peptide
  MOD_RES (1)..(33)..(34): Xaa is C or S

SEQ ID NO: 13008 - protein, 37 aa, Artificial Sequence; identical to SEQ ID NO: 5596
  GFR-binding peptide
  MOD_RES (1)..(34)..(35): Xaa is C or S
  MOD_RES (12)..(13)..(14)..(15)..(16): Xaa is A or G
  MOD_RES (17)..(18)..(19)..(20): Xaa is A or G or is absent

SEQ ID NO: 13009 - protein, 34 aa, Artificial Sequence
  GFR-binding peptide
  MOD_RES (2)..(34): Xaa is C or S
GXSEVVMDRYKKLVVNNASDFYLISIANLRTPVX

SEQ ID NO: 13010 - protein, 37 aa, Artificial Sequence
  GFR-binding peptide
  MOD_RES (1)..(35)..(36): Xaa is C or S
  MOD_RES (13)..(14)..(15)..(16)..(17): Xaa is A or G
  MOD_RES (18)..(19)..(20)..(21): Xaa is A or G or is absent
XARVVMNEYQKYXXXXXXXXXIFLVSIPSLQTPAXXP

SEQ ID NO: 13011 - protein, 37 aa, Artificial Sequence
  GFR-binding peptide
  MOD_RES (1)..(3)..(37): Xaa is C or S
  MOD_RES (15)..(16)..(17)..(18)..(19): Xaa is A or G
  MOD_RES (20)..(21)..(22)..(23): Xaa is A or G or is absent
XGXSEVVMDNSLQEXXXXXXXXXYYLITLPELRTPVX

SEQ ID NO: 13012 - protein, 35 aa, Artificial Sequence
  GFR-binding peptide
  MOD_RES (2)..(35): Xaa is C or S
  MOD_RES (13)..(14)..(15)..(16)..(17): Xaa is A or G
  MOD_RES (18)..(19)..(20)..(21): Xaa is A or G or is absent
KXSKVVMNSLQEXXXXXXXXXYYLITLPELDQPVX

SEQ ID NO: 13013 - protein, 35 aa, Artificial Sequence
  GFR-binding peptide
  MOD_RES (32)..(33): Xaa is C or S
GEVVMEEYQKYVVKDYEDIFLMSIPSLETPVXXAK

SEQ ID NO: 13014 - protein, 39 aa, Artificial Sequence
  GFR-binding peptide
  MOD_RES (33)..(34): Xaa is C or S
  MOD_RES (11)..(12)..(13)..(14)..(15): Xaa is A or G
  MOD_RES (16)..(17)..(18)..(19): Xaa is A or G or is absent
EVVMENSLQEXXXXXXXXXYYLMTLPELETPVXXAKPIS

SEQ ID NO: 13015 - protein, 41 aa, Artificial Sequence
  GFR-binding peptide
  MOD_RES (1)..(3)..(37)..(38): Xaa is C or S
  MOD_RES (15)..(16)..(17)..(18)..(19): Xaa is A or G
  MOD_RES (20)..(21)..(22)..(23): Xaa is A or G or is absent
XGXGEVVMEEYQKYXXXXXXXXXIFLMSIPSLETPVXXAKP

SEQ ID NO: 13016 - protein, 39 aa, Artificial Sequence; identical to SEQ ID NO: 5604
  GFR-binding peptide
  MOD_RES (33)..(34): Xaa is C or S
  MOD_RES (11)..(12)..(13)..(14)..(15): Xaa is A or G
  MOD_RES (16)..(17)..(18)..(19): Xaa is A or G or is absent

SEQ ID NO: 13017 - protein, 35 aa, Artificial Sequence
  GFR-binding peptide
  MOD_RES (1)..(35): Xaa is C or S
  MOD_RES (13)..(14)..(15)..(16)..(17): Xaa is A or G
  MOD_RES (18)..(19)..(20)..(21): Xaa is A or G or is absent
XGEVVMENSLQEXXXXXXXXXYYVMPLPELETPVX

SEQ ID NO: 13018 - protein, 42 aa, Artificial Sequence
  GFR-binding peptide
  MOD_RES (2)..(36): Xaa is C or S
  MOD_RES (14)..(15)..(16)..(17)..(18): Xaa is A or G
  MOD_RES (19)..(20)..(21)..(22): Xaa is A or G or is absent
GXSRVVMNEYQKYXXXXXXXXXIFLVSIPSLKTPAXTPKTVH

SEQ ID NO: 13019 - protein, 36 aa, Artificial Sequence; identical to SEQ ID NO: 5605
  GFR-binding peptide
  MOD_RES (1)..(3)..(36): Xaa is C or S
  MOD_RES (14)..(15)..(16)..(17)..(18): Xaa is A or G
  MOD_RES (19)..(20)..(21)..(22): Xaa is A or G or is absent

SEQ ID NO: 13020 - protein, 34 aa, Artificial Sequence
  GFR-binding peptide
  MOD_RES (1)..(33)..(34): Xaa is C or S
XARVVMNNSLQEIVNSSDDYYVVPLPELQTPAXX

SEQ ID NO: 13021 - protein, 33 aa, Artificial Sequence
  GFR-binding peptide
  MOD_RES (31)..(32): Xaa is C or S
EVVMDEYQKYVVNNASDIFLISIPSLRTPVXXT

SEQ ID NO: 13022 - protein, 36 aa, Artificial Sequence; identical to SEQ ID NO: 5606
  GFR-binding peptide
  MOD_RES (34)..(35): Xaa is C or S
  MOD_RES (12)..(13)..(14)..(15)..(16): Xaa is A or G
  MOD_RES (17)..(18)..(19)..(20): Xaa is A or G or is absent

SEQ ID NO: 13023 - protein, 39 aa, Artificial Sequence
  GFR-binding peptide
  MOD_RES (1)..(3)..(37)..(38): Xaa is C or S
  MOD_RES (15)..(16)..(17)..(18)..(19): Xaa is A or G
  MOD_RES (20)..(21)..(22)..(23): Xaa is A or G or is absent
XGXSEVVMDQYNKLXXXXXXXXXLYLISIASLRTPVXXT

SEQ ID NO: 13024 - protein, 38 aa, Artificial Sequence; identical to SEQ ID NO: 5607
  GFR-binding peptide
  MOD_RES (2)..(33)..(34): Xaa is C or S

SEQ ID NO: 13025 - protein, 36 aa, Artificial Sequence; identical to SEQ ID NO: 5609
  GFR-binding peptide
  MOD_RES (2)..(4)..(36): Xaa is C or S

SEQ ID NO: 13026 - protein, 43 aa, Artificial Sequence
  GFR-binding peptide
  MOD_RES (1)..(3)..(37)..(38): Xaa is C or S
  MOD_RES (15)..(16)..(17)..(18)..(19): Xaa is A or G
  MOD_RES (20)..(21)..(22)..(23): Xaa is A or G or is absent
XGXARVVMNNSLQEXXXXXXXXXYYLVTLPELQTPAXXPKPVT

SEQ ID NO: 13027 - protein, 37 aa, Artificial Sequence; identical to SEQ ID NO: 5610
  GFR-binding peptide
  MOD_RES (2)..(33)..(34): Xaa is C or S

SEQ ID NO: 13028 - protein, 41 aa, Artificial Sequence
  GFR-binding peptide
  MOD_RES (1)..(3)..(37)..(38): Xaa is C or S
  MOD_RES (15)..(16)..(17)..(18)..(19): Xaa is A or G
  MOD_RES (20)..(21)..(22)..(23): Xaa is A or G or is absent
XGXGEVVMDEYQKYXXXXXXXXXIFLMSIPSLETPVXXAKP

SEQ ID NO: 13029 - protein, 34 aa, Artificial Sequence; identical to SEQ ID NO: 5613
  GFR-binding peptide
  MOD_RES (31)..(32): Xaa is C or S

SEQ ID NO: 13030 - protein, 41 aa, Artificial Sequence
  GFR-binding peptide
  MOD_RES (1)..(3)..(35)..(36): Xaa is C or S
XGXGEVVMDNSLQEVVKENEDYYLMTLPELETPVXXAKPIK

SEQ ID NO: 13031 - protein, 37 aa, Artificial Sequence; identical to SEQ ID NO: 5614
  GFR-binding peptide
  MOD_RES (31)..(32): Xaa is C or S

SEQ ID NO: 13032 - protein, 34 aa, Artificial Sequence; identical to SEQ ID NO: 5615
  GFR-binding peptide
  MOD_RES (1)..(1): Xaa is C or S
  MOD_RES (13)..(14)..(15)..(16)..(17): Xaa is A or G
  MOD_RES (18)..(19)..(20)..(21): Xaa is A or G or is absent

SEQ ID NO: 13033 - protein, 40 aa, Artificial Sequence; identical to SEQ ID NO: 5617
  GFR-binding peptide
  MOD_RES (2)..(4)..(36)..(37): Xaa is C or S

SEQ ID NO: 13034 - protein, 37 aa, Artificial Sequence; identical to SEQ ID NO: 5618
  GFR-binding peptide
  MOD_RES (33)..(34): Xaa is C or S
  MOD_RES (11)..(12)..(13)..(14)..(15): Xaa is A or G
  MOD_RES (16)..(17)..(18)..(19): Xaa is A or G or is absent

SEQ ID NO: 13035 - protein, 32 aa, Artificial Sequence
  GFR-binding peptide
  MOD_RES (31)..(32): Xaa is C or S
SRVIMNSLQEVKPKRGVYYLITLPELAQPVXX

SEQ ID NO: 13036 - protein, 38 aa, Artificial Sequence
  GFR-binding peptide
  MOD_RES (1)..(33): Xaa is C or S
XSRVVMNNSLQEIVNSSDDYYLVTLPELKTPAXTPKTV

SEQ ID NO: 13037 - protein, 35 aa, Artificial Sequence
  GFR-binding peptide
  MOD_RES (1)..(33)..(34): Xaa is C or S
XSEVVMDQYNKLVVNNASDLYLISIASLRTPVXXT

SEQ ID NO: 13038 - protein, 36 aa, Artificial Sequence
  GFR-binding peptide
  MOD_RES (31)..(32): Xaa is C or S
RVVMNEYQKYIVNSSDDIFLVSIPSLQTPAXXPKPV

SEQ ID NO: 13039 - protein, 40 aa, Artificial Sequence
  GFR-binding peptide
  MOD_RES (2)..(36)..(37): Xaa is C or S
  MOD_RES (14)..(15)..(16)..(17)..(18): Xaa is A or G
  MOD_RES (19)..(20)..(21)..(22): Xaa is A or G or is absent
GXSRVVMNNSLQEXXXXXXXXXYYLVTLPELKTPAXXPKP

SEQ ID NO: 13040 - protein, 38 aa, Artificial Sequence
  GFR-binding peptide
  MOD_RES (2)..(4)..(36)..(37): Xaa is C or S
RXGXSEVVMDNSLQEVVNNASDYYVIPLPELRTPVXXT

SEQ ID NO: 13041 - protein, 36 aa, Artificial Sequence; identical to SEQ ID NO: 5626
  GFR-binding peptide
  MOD_RES (34)..(35): Xaa is C or S
  MOD_RES (12)..(13)..(14)..(15)..(16): Xaa is A or G
  MOD_RES (17)..(18)..(19)..(20): Xaa is A or G or is absent

SEQ ID NO: 13042 - protein, 41 aa, Artificial Sequence; identical to SEQ ID NO: 5629
  GFR-binding peptide
  MOD_RES (2)..(4)..(35)..(36): Xaa is C or S

SEQ ID NO: 13043 - protein, 36 aa, Artificial Sequence
  GFR-binding peptide
  MOD_RES (1)..(33)..(34): Xaa is C or S
XGEVVMENSLQEVVKDYEDYYLMTLPELETPVXXAK

SEQ ID NO: 13044 - protein, 30 aa, Artificial Sequence
  GFR-binding peptide
RVVMNNSLQEIVNSSDDYYVVPLPELKTPA

SEQ ID NO: 13045 - protein, 33 aa, Artificial Sequence
  GFR-binding peptide
  MOD_RES (12)..(13)..(14)..(15)..(16): Xaa is A or G
  MOD_RES (17)..(18)..(19)..(20): Xaa is A or G or is absent
SRVVMNEYQKYXXXXXXXXXIFLVSIPSLKTPA

SEQ ID NO: 13046 - protein, 44 aa, Artificial Sequence
  GFR-binding peptide
  MOD_RES (2)..(4)..(38)..(39): Xaa is C or S
  MOD_RES (16)..(17)..(18)..(19)..(20): Xaa is A or G
  MOD_RES (21)..(22)..(23)..(24): Xaa is A or G or is absent
RXGXGEVVMDNSLQEXXXXXXXXXYYVMPLPELETPVXXAKPIK

SEQ ID NO: 13047 - protein, 36 aa, Artificial Sequence
  GFR-binding peptide
  MOD_RES (2)..(35)..(36): Xaa is C or S
  MOD_RES (13)..(14)..(15)..(16)..(17): Xaa is A or G
  MOD_RES (18)..(19)..(20)..(21): Xaa is A or G or is absent
KXSRVIMEYQKYXXXXXXXXXIFLISIPSLAQPVXX

SEQ ID NO: 13048 - protein, 39 aa, Artificial Sequence; identical to SEQ ID NO: 5632
  GFR-binding peptide
  MOD_RES (2)..(4)..(35)..(36): Xaa is C or S

SEQ ID NO: 13049 - protein, 37 aa, Artificial Sequence; identical to SEQ ID NO: 5633
  GFR-binding peptide
  MOD_RES (2)..(36)..(37): Xaa is C or S
  MOD_RES (14)..(15)..(16)..(17)..(18): Xaa is A or G
  MOD_RES (19)..(20)..(21)..(22): Xaa is A or G or is absent

SEQ ID NO: 13050 - protein, 42 aa, Artificial Sequence; identical to SEQ ID NO: 5634
  GFR-binding peptide
  MOD_RES (2)..(36)..(37): Xaa is C or S
  MOD_RES (14)..(15)..(16)..(17)..(18): Xaa is A or G
  MOD_RES (19)..(20)..(21)..(22): Xaa is A or G or is absent

SEQ ID NO: 13051 - protein, 40 aa, Artificial Sequence
  GFR-binding peptide
  MOD_RES (2)..(35)..(36): Xaa is C or S
  MOD_RES (13)..(14)..(15)..(16)..(17): Xaa is A or G
  MOD_RES (18)..(19)..(20)..(21): Xaa is A or G or is absent
KXSKVVMNSLQEXXXXXXXXXYYVIPLPELDQPVXXPSAS

SEQ ID NO: 13052 - protein, 37 aa, Artificial Sequence
  GFR-binding peptide
  MOD_RES (2)..(4)..(36)..(37): Xaa is C or S
HXGXSRVVMNEYQKYIVNSSDDIFLVSIPSLKTPAXX

SEQ ID NO: 13053 - protein, 33 aa, Artificial Sequence
  GFR-binding peptide
  MOD_RES (1)..(33): Xaa is C or S
XARVVMNNSLQEIVNSSDDYYVVPLPELQTPAX

SEQ ID NO: 13054 - protein, 36 aa, Artificial Sequence
  GFR-binding peptide
  MOD_RES (1)..(3)..(35)..(36): Xaa is C or S
XGXSEVVMDNSLQEVVNNASDYYVIPLPELRTPVXX

SEQ ID NO: 13055 - protein, 38 aa, Artificial Sequence
  GFR-binding peptide
  MOD_RES (1)..(32)..(33): Xaa is C or S
XSRVIMEYQKYVKPKRGVIFLISIPSLAQPVXXPAASA

SEQ ID NO: 13056 - protein, 33 aa, Artificial Sequence
  GFR-binding peptide
  MOD_RES (1)..(3): Xaa is C or S
XKXSKVIMNSLQEIKPTKGIYYVIPLPELDQSV

SEQ ID NO: 13057 - protein, 33 aa, Artificial Sequence; identical to SEQ ID NO: 5637
  GFR-binding peptide
  MOD_RES (2)..(2): Xaa is C or S

SEQ ID NO: 13058 - protein, 31 aa, Artificial Sequence
  GFR-binding peptide
GEVVMENSLQEVVKDYEDYYLMTLPELETPV

SEQ ID NO: 13059 - protein, 37 aa, Artificial Sequence; identical to SEQ ID NO: 5638
  GFR-binding peptide
  MOD_RES (33)..(34): Xaa is C or S
  MOD_RES (11)..(12)..(13)..(14)..(15): Xaa is A or G
  MOD_RES (16)..(17)..(18)..(19): Xaa is A or G or is absent

SEQ ID NO: 13060 - protein, 34 aa, Artificial Sequence
  GFR-binding peptide
  MOD_RES (1)..(1): Xaa is C or S
  MOD_RES (13)..(14)..(15)..(16)..(17): Xaa is A or G
  MOD_RES (18)..(19)..(20)..(21): Xaa is A or G or is absent
XGEVVMENSLQEXXXXXXXXXYYVMPLPELETPV

SEQ ID NO: 13061 - protein, 37 aa, Artificial Sequence
  GFR-binding peptide
  MOD_RES (2)..(4)..(35)..(36): Xaa is C or S
SXKXSKVVMNSLQEVKPTRGVYYVIPLPELDQPVXXP

SEQ ID NO: 13062 - protein, 41 aa, Artificial Sequence
  GFR-binding peptide
  MOD_RES (1)..(3)..(37): Xaa is C or S
  MOD_RES (15)..(16)..(17)..(18)..(19): Xaa is A or G
  MOD_RES (20)..(21)..(22)..(23): Xaa is A or G or is absent
XGXSRVVMNNSLQEXXXXXXXXXYYVVPLPELKTPAXTPKT

SEQ ID NO: 13063 - protein, 36 aa, Artificial Sequence
  GFR-binding peptide
  MOD_RES (1)..(34)..(35): Xaa is C or S
  MOD_RES (12)..(13)..(14)..(15)..(16): Xaa is A or G
  MOD_RES (17)..(18)..(19)..(20): Xaa is A or G or is absent
XSKVVMEYQKYXXXXXXXXXIFLISIPSLDQPVXXP

SEQ ID NO: 13064 - protein, 35 aa, Artificial Sequence
  GFR-binding peptide
  MOD_RES (31)..(32): Xaa is C or S
EVVMEEYQKYVVKDYEDIFLMSIPSLETPVXXAKP

SEQ ID NO: 13065 - protein, 40 aa, Artificial Sequence
  GFR-binding peptide
  MOD_RES (2)..(4)..(36)..(37): Xaa is C or S
RXGXSEVVMDNSLQEVVNNASDYYVIPLPELRTPVXXTPP

SEQ ID NO: 13066 - protein, 40 aa, Artificial Sequence; identical to SEQ ID NO: 5640
  GFR-binding peptide
  MOD_RES (1)..(3)..(35)..(36): Xaa is C or S

SEQ ID NO: 13067 - protein, 33 aa, Artificial Sequence
  GFR-binding peptide
  MOD_RES (1)..(1): Xaa is C or S
  MOD_RES (12)..(13)..(14)..(15)..(16): Xaa is A or G
  MOD_RES (17)..(18)..(19)..(20): Xaa is A or G or is absent
XSKVVMEYQKYXXXXXXXXXIFLISIPSLDQPV

SEQ ID NO: 13068 - protein, 35 aa, Artificial Sequence
  GFR-binding peptide
  MOD_RES (34)..(35): Xaa is C or S
  MOD_RES (12)..(13)..(14)..(15)..(16): Xaa is A or G
  MOD_RES (17)..(18)..(19)..(20): Xaa is A or G or is absent
SEVVMDEYQKYXXXXXXXXXIFLISIPSLRTPVXX

SEQ ID NO: 13069 - protein, 34 aa, Artificial Sequence
  GFR-binding peptide
  MOD_RES (1)..(1): Xaa is C or S
  MOD_RES (13)..(14)..(15)..(16)..(17): Xaa is A or G
  MOD_RES (18)..(19)..(20)..(21): Xaa is A or G or is absent
XSEVVMDRYKKLXXXXXXXXXFYLISIANLRTPV

SEQ ID NO: 13070 - protein, 34 aa, Artificial Sequence
  GFR-binding peptide
  MOD_RES (1)..(1): Xaa is C or S
  MOD_RES (13)..(14)..(15)..(16)..(17): Xaa is A or G
  MOD_RES (18)..(19)..(20)..(21): Xaa is A or G or is absent
XARVVMNNSLQEXXXXXXXXXYYVVPLPELQTPA

SEQ ID NO: 13071 - protein, 37 aa, Artificial Sequence
  GFR-binding peptide
  MOD_RES (2)..(33)..(34): Xaa is C or S
KXSKVIMNSLQEIKPTKGIYYVIPLPELDQSVXXPSA

SEQ ID NO: 13072 - protein, 31 aa, Artificial Sequence
  GFR-binding peptide
  MOD_RES (31)..(31): Xaa is C or S
SKVIMEYQKYIKPTKGIIFLISIPSLDQSVX

SEQ ID NO: 13073 - protein, 42 aa, Artificial Sequence; identical to SEQ ID NO: 5644
  GFR-binding peptide
  MOD_RES (2)..(4)..(38)..(39): Xaa is C or S
  MOD_RES (16)..(17)..(18)..(19)..(20): Xaa is A or G
  MOD_RES (21)..(22)..(23)..(24): Xaa is A or G or is absent

SEQ ID NO: 13074 - protein, 39 aa, Artificial Sequence; identical to SEQ ID NO: 5645
  GFR-binding peptide
  MOD_RES (33)..(34): Xaa is C or S
  MOD_RES (11)..(12)..(13)..(14)..(15): Xaa is A or G
  MOD_RES (16)..(17)..(18)..(19): Xaa is A or G or is absent

SEQ ID NO: 13075 - protein, 44 aa, Artificial Sequence; identical to SEQ ID NO: 5647
  GFR-binding peptide
  MOD_RES (2)..(4)..(38)..(39): Xaa is C or S
  MOD_RES (16)..(17)..(18)..(19)..(20): Xaa is A or G
  MOD_RES (21)..(22)..(23)..(24): Xaa is A or G or is absent

SEQ ID NO: 13076 - protein, 35 aa, Artificial Sequence
  GFR-binding peptide
  MOD_RES (2)..(4): Xaa is C or S
HXGXSRVVMNEYQKYIVNSSDDIFLVSIPSLKTPA

SEQ ID NO: 13077 - protein, 34 aa, Artificial Sequence
  GFR-binding peptide
  MOD_RES (32)..(33): Xaa is C or S
GEVVMEEYQKYVVKDYEDIFLMSIPSLETPVXXA

SEQ ID NO: 13078 - protein, 40 aa, Artificial Sequence
  GFR-binding peptide
  MOD_RES (1)..(3)..(35)..(36): Xaa is C or S
XGXGEVVMDEYQKYVVKENEDIFLMSIPSLETPVXXAKPI

SEQ ID NO: 13079 - protein, 38 aa, Artificial Sequence
  GFR-binding peptide
  MOD_RES (1)..(35)..(36): Xaa is C or S
  MOD_RES (13)..(14)..(15)..(16)..(17): Xaa is A or G
  MOD_RES (18)..(19)..(20)..(21): Xaa is A or G or is absent
XSRVVMNEYQKYXXXXXXXXXIFLVSIPSLKTPAXXPK

SEQ ID NO: 13080 - protein, 40 aa, Artificial Sequence
  GFR-binding peptide
  MOD_RES (1)..(3)..(35)..(36): Xaa is C or S
XGXGEVVMDNSLQEVVKENEDYYLMTLPELETPVXXAKPI

SEQ ID NO: 13081 - protein, 41 aa, Artificial Sequence; identical to SEQ ID NO: 5652
  GFR-binding peptide
  MOD_RES (1)..(3)..(37)..(38): Xaa is C or S
  MOD_RES (15)..(16)..(17)..(18)..(19): Xaa is A or G
  MOD_RES (20)..(21)..(22)..(23): Xaa is A or G or is absent

SEQ ID NO: 13082 - protein, 34 aa, Artificial Sequence
  GFR-binding peptide
  MOD_RES (2)..(33)..(34): Xaa is C or S
KXSKVVMEYQKYVKPTRGVIFLISIPSLDQPVXX

SEQ ID NO: 13083 - protein, 42 aa, Artificial Sequence; identical to SEQ ID NO: 5655
  GFR-binding peptide
  MOD_RES (1)..(3)..(36)..(37): Xaa is C or S
  MOD_RES (14)..(15)..(16)..(17)..(18): Xaa is A or G
  MOD_RES (19)..(20)..(21)..(22): Xaa is A or G or is absent

SEQ ID NO: 13084 - protein, 39 aa, Artificial Sequence
  GFR-binding peptide
  MOD_RES (33)..(33): Xaa is C or S
  MOD_RES (11)..(12)..(13)..(14)..(15): Xaa is A or G
  MOD_RES (16)..(17)..(18)..(19): Xaa is A or G or is absent
RVVMNEYQKYXXXXXXXXXIFLVSIPSLKTPAXTPKTVH

SEQ ID NO: 13085 - protein, 36 aa, Artificial Sequence
  GFR-binding peptide
  MOD_RES (1)..(35)..(36): Xaa is C or S
  MOD_RES (13)..(14)..(15)..(16)..(17): Xaa is A or G
  MOD_RES (18)..(19)..(20)..(21): Xaa is A or G or is absent
XSEVVMDNSLQEXXXXXXXXXYYVIPLPELRTPVXX

SEQ ID NO: 13086 - protein, 37 aa, Artificial Sequence
  GFR-binding peptide
  MOD_RES (1)..(34)..(35): Xaa is C or S
  MOD_RES (12)..(13)..(14)..(15)..(16): Xaa is A or G
  MOD_RES (17)..(18)..(19)..(20): Xaa is A or G or is absent
XSRVIMEYQKYXXXXXXXXXIFLISIPSLAQPVXXPA

SEQ ID NO: 13087 - protein, 43 aa, Artificial Sequence; identical to SEQ ID NO: 5656
  GFR-binding peptide
  MOD_RES (2)..(4)..(37)..(38): Xaa is C or S
  MOD_RES (15)..(16)..(17)..(18)..(19): Xaa is A or G
  MOD_RES (20)..(21)..(22)..(23): Xaa is A or G or is absent

SEQ ID NO: 13088 - protein, 33 aa, Artificial Sequence; identical to SEQ ID NO: 5657
  GFR-binding peptide
  MOD_RES (1)..(3): Xaa is C or S

SEQ ID NO: 13089 - protein, 37 aa, Artificial Sequence
  GFR-binding peptide
  MOD_RES (1)..(35): Xaa is C or S
  MOD_RES (13)..(14)..(15)..(16)..(17): Xaa is A or G
  MOD_RES (18)..(19)..(20)..(21): Xaa is A or G or is absent
XSRVVMNNSLQEXXXXXXXXXYYLVTLPELKTPAXTP

SEQ ID NO: 13090 - protein, 40 aa, Artificial Sequence; identical to SEQ ID NO: 5658
  GFR-binding peptide
  MOD_RES (1)..(35): Xaa is C or S
  MOD_RES (13)..(14)..(15)..(16)..(17): Xaa is A or G
  MOD_RES (18)..(19)..(20)..(21): Xaa is A or G or is absent

SEQ ID NO: 13091 - protein, 38 aa, Artificial Sequence
  GFR-binding peptide
  MOD_RES (33)..(34): Xaa is C or S
  MOD_RES (11)..(12)..(13)..(14)..(15): Xaa is A or G
  MOD_RES (16)..(17)..(18)..(19): Xaa is A or G or is absent
EVVMDNSLQEXXXXXXXXXYYLMTLPELETPVXXAKPI

SEQ ID NO: 13092 - protein, 37 aa, Artificial Sequence
  GFR-binding peptide
  MOD_RES (32)..(33): Xaa is C or S
SRVVMNEYQKYIVNSSDDIFLVSIPSLKTPAXXPKPV

SEQ ID NO: 13093 - protein, 34 aa, Artificial Sequence
  GFR-binding peptide
  MOD_RES (1)..(33)..(34): Xaa is C or S
XGEVVMDNSLQEVVKENEDYYVMPLPELETPVXX

SEQ ID NO: 13094 - protein, 41 aa, Artificial Sequence
  GFR-binding peptide
  MOD_RES (2)..(4)..(36): Xaa is C or S
HXGXSRVVMNEYQKYIVNSSDDIFLVSIPSLKTPAXTPKTV

SEQ ID NO: 13095 - protein, 39 aa, Artificial Sequence
  GFR-binding peptide
  MOD_RES (2)..(34)..(35): Xaa is C or S
GXARVVMNEYQKYIVNSSDDIFLVSIPSLQTPAXXPKPV

SEQ ID NO: 13096 - protein, 40 aa, Artificial Sequence; identical to SEQ ID NO: 5659
  GFR-binding peptide
  MOD_RES (2)..(4)..(36)..(37): Xaa is C or S

SEQ ID NO: 13097 - protein, 41 aa, Artificial Sequence
  GFR-binding peptide
  MOD_RES (1)..(35)..(36): Xaa is C or S
  MOD_RES (13)..(14)..(15)..(16)..(17): Xaa is A or G
  MOD_RES (18)..(19)..(20)..(21): Xaa is A or G or is absent
XARVVMNEYQKYXXXXXXXXXIFLVSIPSLQTPAXXPKPVT

SEQ ID NO: 13098 - protein, 39 aa, Artificial Sequence
  GFR-binding peptide
  MOD_RES (2)..(34)..(35): Xaa is C or S
GXSRVVMNNSLQEIVNSSDDYYVVPLPELKTPAXXPKPV

SEQ ID NO: 13099 - protein, 38 aa, Artificial Sequence
  GFR-binding peptide
  MOD_RES (2)..(4)..(36)..(37): Xaa is C or S
HXGXSRVVMNNSLQEIVNSSDDYYLVTLPELKTPAXXP

SEQ ID NO: 13100 - protein, 39 aa, Artificial Sequence; identical to SEQ ID NO: 5663
  GFR-binding peptide
  MOD_RES (1)..(3)..(35): Xaa is C or S

SEQ ID NO: 13101 - protein, 38 aa, Artificial Sequence
  GFR-binding peptide
  MOD_RES (1)..(3)..(37)..(38): Xaa is C or S
  MOD_RES (15)..(16)..(17)..(18)..(19): Xaa is A or G
  MOD_RES (20)..(21)..(22)..(23): Xaa is A or G or is absent
XGXSRVVMNEYQKYXXXXXXXXXIFLVSIPSLKTPAXX

SEQ ID NO: 13102 - protein, 38 aa, Artificial Sequence
  GFR-binding peptide
  MOD_RES (33)..(34): Xaa is C or S
  MOD_RES (11)..(12)..(13)..(14)..(15): Xaa is A or G
  MOD_RES (16)..(17)..(18)..(19): Xaa is A or G or is absent
EVVMDNSLQEXXXXXXXXXYYVMPLPELETPVXXAKPI

SEQ ID NO: 13103 - protein, 33 aa, Artificial Sequence; identical to SEQ ID NO: 5667
  GFR-binding peptide
  MOD_RES (2)..(2): Xaa is C or S

SEQ ID NO: 13104 - protein, 36 aa, Artificial Sequence
  GFR-binding peptide
  MOD_RES (31)..(32): Xaa is C or S
EVVMDNSLQEVVNNASDYYVIPLPELRTPVXXTPPT

SEQ ID NO: 13105 - protein, 34 aa, Artificial Sequence
  GFR-binding peptide
  MOD_RES (34)..(34): Xaa is C or S
  MOD_RES (12)..(13)..(14)..(15)..(16): Xaa is A or G
  MOD_RES (17)..(18)..(19)..(20): Xaa is A or G or is absent
SEVVMDEYQKYXXXXXXXXXIFLISIPSLRTPVX

SEQ ID NO: 13106 - protein, 34 aa, Artificial Sequence
  GFR-binding peptide
  MOD_RES (33)..(34): Xaa is C or S
  MOD_RES (11)..(12)..(13)..(14)..(15): Xaa is A or G
  MOD_RES (16)..(17)..(18)..(19): Xaa is A or G or is absent
SRVIMEYQKYXXXXXXXXXIFLISIPSLAQPVXX

SEQ ID NO: 13107 - protein, 40 aa, Artificial Sequence
  GFR-binding peptide
  MOD_RES (1)..(3)..(36)..(37): Xaa is C or S
  MOD_RES (14)..(15)..(16)..(17)..(18): Xaa is A or G
  MOD_RES (19)..(20)..(21)..(22): Xaa is A or G or is absent
XKXSKVVMNSLQEXXXXXXXXXYYLITLPELDQPVXXPSA

SEQ ID NO: 13108 - protein, 36 aa, Artificial Sequence; identical to SEQ ID NO: 5670
  GFR-binding peptide
  MOD_RES (33)..(34): Xaa is C or S
  MOD_RES (11)..(12)..(13)..(14)..(15): Xaa is A or G
  MOD_RES (16)..(17)..(18)..(19): Xaa is A or G or is absent

SEQ ID NO: 13109 - protein, 36 aa, Artificial Sequence
  GFR-binding peptide
  MOD_RES (1)..(3)..(35)..(36): Xaa is C or S
XGXSEVVMDQYNKLVVNNASDLYLISIASLRTPVXX

SEQ ID NO: 13110 - protein, 37 aa, Artificial Sequence
  GFR-binding peptide
  MOD_RES (2)..(4): Xaa is C or S
  MOD_RES (16)..(17)..(18)..(19)..(20): Xaa is A or G
  MOD_RES (21)..(22)..(23)..(24): Xaa is A or G or is absent
RXGXGEVVMDEYQKYXXXXXXXXXIFLMSIPSLETPV

SEQ ID NO: 13111 - protein, 37 aa, Artificial Sequence; identical to SEQ ID NO: 5671
  GFR-binding peptide
  MOD_RES (1)..(34)..(35): Xaa is C or S
  MOD_RES (12)..(13)..(14)..(15)..(16): Xaa is A or G
  MOD_RES (17)..(18)..(19)..(20): Xaa is A or G or is absent

SEQ ID NO: 13112 - protein, 39 aa, Artificial Sequence
  GFR-binding peptide
  MOD_RES (2)..(36): Xaa is C or S
  MOD_RES (14)..(15)..(16)..(17)..(18): Xaa is A or G
  MOD_RES (19)..(20)..(21)..(22): Xaa is A or G or is absent
GXSRVVMNNSLQEXXXXXXXXXYYVVPLPELKTPAXTPK

SEQ ID NO: 13113 - protein, 31 aa, Artificial Sequence; identical to SEQ ID NO: 5672
  GFR-binding peptide
  MOD_RES (31)..(31): Xaa is C or S

SEQ ID NO: 13114 - protein, 41 aa, Artificial Sequence
  GFR-binding peptide
  MOD_RES (1)..(3)..(37)..(38): Xaa is C or S
  MOD_RES (15)..(16)..(17)..(18)..(19): Xaa is A or G
  MOD_RES (20)..(21)..(22)..(23): Xaa is A or G or is absent
XGXSRVVMNNSLQEXXXXXXXXXYYLVTLPELKTPAXXPKP

SEQ ID NO: 13115 - protein, 33 aa, Artificial Sequence; identical to SEQ ID NO: 5677
  GFR-binding peptide
  MOD_RES (2)..(33): Xaa is C or S

SEQ ID NO: 13116 - protein, 40 aa, Artificial Sequence; identical to SEQ ID NO: 5678
  GFR-binding peptide
  MOD_RES (1)..(35)..(36): Xaa is C or S
  MOD_RES (13)..(14)..(15)..(16)..(17): Xaa is A or G
  MOD_RES (18)..(19)..(20)..(21): Xaa is A or G or is absent

SEQ ID NO: 13117 - protein, 35 aa, Artificial Sequence
  GFR-binding peptide
  MOD_RES (2)..(4): Xaa is C or S
RXGXGEVVMDEYQKYVVKENEDIFLMSIPSLETPV

SEQ ID NO: 13118 - protein, 41 aa, Artificial Sequence
  GFR-binding peptide
  MOD_RES (1)..(35): Xaa is C or S
  MOD_RES (13)..(14)..(15)..(16)..(17): Xaa is A or G
  MOD_RES (18)..(19)..(20)..(21): Xaa is A or G or is absent
XSRVVMNEYQKYXXXXXXXXXIFLVSIPSLKTPAXTPKTVH

SEQ ID NO: 13119 - protein, 35 aa, Artificial Sequence; identical to SEQ ID NO: 5679
  GFR-binding peptide
  MOD_RES (1)..(3)..(35): Xaa is C or S

SEQ ID NO: 13120 - protein, 37 aa, Artificial Sequence; identical to SEQ ID NO: 5682
  GFR-binding peptide
  MOD_RES (1)..(3)..(36)..(37): Xaa is C or S
  MOD_RES (14)..(15)..(16)..(17)..(18): Xaa is A or G
  MOD_RES (19)..(20)..(21)..(22): Xaa is A or G or is absent

SEQ ID NO: 13121 - protein, 35 aa, Artificial Sequence
  GFR-binding peptide
  MOD_RES (1)..(3): Xaa is C or S
  MOD_RES (14)..(15)..(16)..(17)..(18): Xaa is A or G
  MOD_RES (19)..(20)..(21)..(22): Xaa is A or G or is absent
XKXSKVVMNSLQEXXXXXXXXXYYLITLPELDQPV

SEQ ID NO: 13122 - protein, 37 aa, Artificial Sequence; identical to SEQ ID NO: 5683
  GFR-binding peptide
  MOD_RES (2)..(34)..(35): Xaa is C or S

SEQ ID NO: 13123 - protein, 35 aa, Artificial Sequence
  GFR-binding peptide
  MOD_RES (33)..(34): Xaa is C or S
  MOD_RES (11)..(12)..(13)..(14)..(15): Xaa is A or G
  MOD_RES (16)..(17)..(18)..(19): Xaa is A or G or is absent
RVVMNNSLQEXXXXXXXXXYYVVPLPELKTPAXXP

SEQ ID NO: 13124 - protein, 32 aa, Artificial Sequence
  GFR-binding peptide
  MOD_RES (1)..(1): Xaa is C or S
XSEVVMDNSLQEVVNNASDYYLITLPELRTPV

SEQ ID NO: 13125 - protein, 36 aa, Artificial Sequence; identical to SEQ ID NO: 5685
  GFR-binding peptide
  MOD_RES (1)..(3): Xaa is C or S
  MOD_RES (15)..(16)..(17)..(18)..(19): Xaa is A or G
  MOD_RES (20)..(21)..(22)..(23): Xaa is A or G or is absent

SEQ ID NO: 13126 - protein, 33 aa, Artificial Sequence; identical to SEQ ID NO: 5687
  GFR-binding peptide
  MOD_RES (12)..(13)..(14)..(15)..(16): Xaa is A or G
  MOD_RES (17)..(18)..(19)..(20): Xaa is A or G or is absent

SEQ ID NO: 13127 - protein, 35 aa, Artificial Sequence; identical to SEQ ID NO: 5688
  GFR-binding peptide
  MOD_RES (1)..(32)..(33): Xaa is C or S

SEQ ID NO: 13128 - protein, 38 aa, Artificial Sequence
  GFR-binding peptide
  MOD_RES (33)..(34): Xaa is C or S
  MOD_RES (11)..(12)..(13)..(14)..(15): Xaa is A or G
  MOD_RES (16)..(17)..(18)..(19): Xaa is A or G or is absent
EVVMDNSLQEXXXXXXXXXYYVIPLPELRTPVXXTPPT

SEQ ID NO: 13129 - protein, 39 aa, Artificial Sequence
  GFR-binding peptide
  MOD_RES (34)..(35): Xaa is C or S
  MOD_RES (12)..(13)..(14)..(15)..(16): Xaa is A or G
  MOD_RES (17)..(18)..(19)..(20): Xaa is A or G or is absent
SRVVMNEYQKYXXXXXXXXXIFLVSIPSLKTPAXXPKPV

SEQ ID NO: 13130 - protein, 43 aa, Artificial Sequence; identical to SEQ ID NO: 5690
  GFR-binding peptide
  MOD_RES (1)..(3)..(37)..(38): Xaa is C or S
  MOD_RES (15)..(16)..(17)..(18)..(19): Xaa is A or G
  MOD_RES (20)..(21)..(22)..(23): Xaa is A or G or is absent

SEQ ID NO: 13131 - protein, 35 aa, Artificial Sequence; identical to SEQ ID NO: 5691
  GFR-binding peptide
  MOD_RES (2)..(33)..(34): Xaa is C or S

SEQ ID NO: 13132 - protein, 37 aa, Artificial Sequence
  GFR-binding peptide
  MOD_RES (31)..(32): Xaa is C or S
EVVMDRYKKLVVNNASDFYLISIANLRTPVXXTPPTS

SEQ ID NO: 13133 - protein, 36 aa, Artificial Sequence; identical to SEQ ID NO: 5693
  GFR-binding peptide
  MOD_RES (34)..(35): Xaa is C or S
  MOD_RES (12)..(13)..(14)..(15)..(16): Xaa is A or G
  MOD_RES (17)..(18)..(19)..(20): Xaa is A or G or is absent

SEQ ID NO: 13134 - protein, 35 aa, Artificial Sequence
  GFR-binding peptide
  MOD_RES (1)..(35): Xaa is C or S
  MOD_RES (13)..(14)..(15)..(16)..(17): Xaa is A or G
  MOD_RES (18)..(19)..(20)..(21): Xaa is A or G or is absent
XGEVVMDEYQKYXXXXXXXXXIFLMSIPSLETPVX

SEQ ID NO: 13135 - protein, 33 aa, Artificial Sequence
  GFR-binding peptide
  MOD_RES (33)..(33): Xaa is C or S
  MOD_RES (11)..(12)..(13)..(14)..(15): Xaa is A or G
  MOD_RES (16)..(17)..(18)..(19): Xaa is A or G or is absent
RVVMNNSLQEXXXXXXXXXYYVVPLPELQTPAX

SEQ ID NO: 13136 - protein, 30 aa, Artificial Sequence; identical to SEQ ID NO: 5696
  GFR-binding peptide

SEQ ID NO: 13137 - protein, 33 aa, Artificial Sequence; identical to SEQ ID NO: 5699
  GFR-binding peptide
  MOD_RES (12)..(13)..(14)..(15)..(16): Xaa is A or G
  MOD_RES (17)..(18)..(19)..(20): Xaa is A or G or is absent

SEQ ID NO: 13138 - protein, 31 aa, Artificial Sequence; identical to SEQ ID NO: 5701
  GFR-binding peptide

SEQ ID NO: 13139 - protein, 38 aa, Artificial Sequence
  GFR-binding peptide
  MOD_RES (2)..(36)..(37): Xaa is C or S
  MOD_RES (14)..(15)..(16)..(17)..(18): Xaa is A or G
  MOD_RES (19)..(20)..(21)..(22): Xaa is A or G or is absent
GXARVVMNNSLQEXXXXXXXXXYYVVPLPELQTPAXXP

SEQ ID NO: 13140 - protein, 41 aa, Artificial Sequence
  GFR-binding peptide
  MOD_RES (1)..(3)..(35)..(36): Xaa is C or S
XGXARVVMNNSLQEIVNSSDDYYVVPLPELQTPAXXPKPVT

SEQ ID NO: 13141 - protein, 40 aa, Artificial Sequence
  GFR-binding peptide
  MOD_RES (1)..(35)..(36): Xaa is C or S
  MOD_RES (13)..(14)..(15)..(16)..(17): Xaa is A or G
  MOD_RES (18)..(19)..(20)..(21): Xaa is A or G or is absent
XARVVMNNSLQEXXXXXXXXXYYLVTLPELQTPAXXPKPV

SEQ ID NO: 13142 - protein, 40 aa, Artificial Sequence
  GFR-binding peptide
  MOD_RES (1)..(3)..(35)..(36): Xaa is C or S
XGXSRVVMNEYQKYIVNSSDDIFLVSIPSLKTPAXXPKPV

SEQ ID NO: 13143 - protein, 39 aa, Artificial Sequence
  GFR-binding peptide
  MOD_RES (2)..(4)..(36)..(37): Xaa is C or S
HXGXSRVVMNNSLQEIVNSSDDYYLVTLPELKTPAXXPK

SEQ ID NO: 13144 - protein, 37 aa, Artificial Sequence; identical to SEQ ID NO: 5705
  GFR-binding peptide
  MOD_RES (2)..(4): Xaa is C or S
  MOD_RES (16)..(17)..(18)..(19)..(20): Xaa is A or G
  MOD_RES (21)..(22)..(23)..(24): Xaa is A or G or is absent

SEQ ID NO: 13145 - protein, 35 aa, Artificial Sequence; identical to SEQ ID NO: 5708
  GFR-binding peptide
  MOD_RES (2)..(4): Xaa is C or S

SEQ ID NO: 13146 - protein, 35 aa, Artificial Sequence; identical to SEQ ID NO: 5709
  GFR-binding peptide
  MOD_RES (1)..(35): Xaa is C or S
  MOD_RES (13)..(14)..(15)..(16)..(17): Xaa is A or G
  MOD_RES (18)..(19)..(20)..(21): Xaa is A or G or is absent

SEQ ID NO: 13147 - protein, 33 aa, Artificial Sequence
  GFR-binding peptide
  MOD_RES (31)..(32): Xaa is C or S
RVVMNNSLQEIVNSSDDYYVVPLPELQTPAXXP

SEQ ID NO: 13148 - protein, 39 aa, Artificial Sequence; identical to SEQ ID NO: 5712
  GFR-binding peptide
  MOD_RES (2)..(34)..(35): Xaa is C or S

SEQ ID NO: 13149 - protein, 36 aa, Artificial Sequence; identical to SEQ ID NO: 5714
  GFR-binding peptide
  MOD_RES (33)..(34): Xaa is C or S
  MOD_RES (11)..(12)..(13)..(14)..(15): Xaa is A or G
  MOD_RES (16)..(17)..(18)..(19): Xaa is A or G or is absent

SEQ ID NO: 13150 - protein, 40 aa, Artificial Sequence
  GFR-binding peptide
  MOD_RES (1)..(3)..(35)..(36): Xaa is C or S
XGXARVVMNNSLQEIVNSSDDYYLVTLPELQTPAXXPKPV

SEQ ID NO: 13151 - protein, 39 aa, Artificial Sequence
  GFR-binding peptide
  MOD_RES (1)..(33)..(34): Xaa is C or S
XSRVVMNNSLQEIVNSSDDYYVVPLPELKTPAXXPKPVY

SEQ ID NO: 13152 - protein, 39 aa, Artificial Sequence
  GFR-binding peptide
  MOD_RES (2)..(34)..(35): Xaa is C or S
GXSRVVMNEYQKYIVNSSDDIFLVSIPSLKTPAXXPKPV

SEQ ID NO: 13153 - protein, 39 aa, Artificial Sequence
  GFR-binding peptide
  MOD_RES (1)..(3)..(35)..(36): Xaa is C or S
XGXSEVVMDEYQKYVVNNASDIFLISIPSLRTPVXXTPP

SEQ ID NO: 13154 - protein, 35 aa, Artificial Sequence; identical to SEQ ID NO: 5719
  GFR-binding peptide
  MOD_RES (31)..(32): Xaa is C or S

SEQ ID NO: 13155 - protein, 36 aa, Artificial Sequence
  GFR-binding peptide
  MOD_RES (2)..(4)..(35)..(36): Xaa is C or S
SXKXSRVIMNSLQEVKPKRGVYYLITLPELAQPVXX

SEQ ID NO: 13156 - protein, 38 aa, Artificial Sequence; identical to SEQ ID NO: 5721
  GFR-binding peptide
  MOD_RES (1)..(35)..(36): Xaa is C or S
  MOD_RES (13)..(14)..(15)..(16)..(17): Xaa is A or G
  MOD_RES (18)..(19)..(20)..(21): Xaa is A or G or is absent

SEQ ID NO: 13157 - protein, 36 aa, Artificial Sequence
  GFR-binding peptide
  MOD_RES (2)..(4)..(36): Xaa is C or S
RXGXGEVVMDNSLQEVVKENEDYYVMPLPELETPVX

SEQ ID NO: 13158 - protein, 38 aa, Artificial Sequence; identical to SEQ ID NO: 5724
  GFR-binding peptide
  MOD_RES (2)..(33)..(34): Xaa is C or S

SEQ ID NO: 13159 - protein, 42 aa, Artificial Sequence
  GFR-binding peptide
  MOD_RES (2)..(4)..(38)..(39): Xaa is C or S
  MOD_RES (16)..(17)..(18)..(19)..(20): Xaa is A or G
  MOD_RES (21)..(22)..(23)..(24): Xaa is A or G or is absent
HXGXARVVMNNSLQEXXXXXXXXXYYVVPLPELQTPAXXPKP

SEQ ID NO: 13160 - protein, 36 aa, Artificial Sequence
  GFR-binding peptide
  MOD_RES (2)..(4)..(35)..(36): Xaa is C or S
SXKXSKVIMEYQKYIKPTKGIIFLISIPSLDQSVXX

SEQ ID NO: 13161 - protein, 40 aa, Artificial Sequence; identical to SEQ ID NO: 5726
  GFR-binding peptide
  MOD_RES (2)..(4)..(38)..(39): Xaa is C or S
  MOD_RES (16)..(17)..(18)..(19)..(20): Xaa is A or G
  MOD_RES (21)..(22)..(23)..(24): Xaa is A or G or is absent

SEQ ID NO: 13162 - protein, 38 aa, Artificial Sequence
  GFR-binding peptide
  MOD_RES (1)..(3)..(35)..(36): Xaa is C or S
XGXSEVVMDNSLQEVVNNASDYYLITLPELRTPVXXTP

SEQ ID NO: 13163 - protein, 38 aa, Artificial Sequence
  GFR-binding peptide
  MOD_RES (33)..(34): Xaa is C or S
  MOD_RES (11)..(12)..(13)..(14)..(15): Xaa is A or G
  MOD_RES (16)..(17)..(18)..(19): Xaa is A or G or is absent
RVVMNNSLQEXXXXXXXXXYYLVTLPELQTPAXXPKPV

SEQ ID NO: 13164 - protein, 39 aa, Artificial Sequence
  GFR-binding peptide
  MOD_RES (1)..(3)..(35)..(36): Xaa is C or S
XGXSEVVMDNSLQEVVNNASDYYLITLPELRTPVXXTPP

SEQ ID NO: 13165 - protein, 40 aa, Artificial Sequence
  GFR-binding peptide
  MOD_RES (2)..(4)..(38)..(39): Xaa is C or S
  MOD_RES (16)..(17)..(18)..(19)..(20): Xaa is A or G
  MOD_RES (21)..(22)..(23)..(24): Xaa is A or G or is absent
HXGXARVVMNEYQKYXXXXXXXXXIFLVSIPSLQTPAXXP

SEQ ID NO: 13166 - protein, 44 aa, Artificial Sequence
  GFR-binding peptide
  MOD_RES (2)..(4)..(38): Xaa is C or S
  MOD_RES (16)..(17)..(18)..(19)..(20): Xaa is A or G
  MOD_RES (21)..(22)..(23)..(24): Xaa is A or G or is absent
HXGXSRVVMNEYQKYXXXXXXXXXIFLVSIPSLKTPAXTPKTVH

SEQ ID NO: 13167 - protein, 33 aa, Artificial Sequence
  GFR-binding peptide
  MOD_RES (2)..(2): Xaa is C or S
GXGEVVMDNSLQEVVKENEDYYLMTLPELETPV

SEQ ID NO: 13168 - protein, 39 aa, Artificial Sequence; identical to SEQ ID NO: 5733
  GFR-binding peptide
  MOD_RES (2)..(4)..(35)..(36): Xaa is C or S

SEQ ID NO: 13169 - protein, 41 aa, Artificial Sequence
  GFR-binding peptide
  MOD_RES (2)..(4)..(38)..(39): Xaa is C or S
  MOD_RES (16)..(17)..(18)..(19)..(20): Xaa is A or G
  MOD_RES (21)..(22)..(23)..(24): Xaa is A or G or is absent
HXGXSRVVMNEYQKYXXXXXXXXXIFLVSIPSLKTPAXXPK

SEQ ID NO: 13170 - protein, 38 aa, Artificial Sequence; identical to SEQ ID NO: 5734
  GFR-binding peptide
  MOD_RES (2)..(4)..(36)..(37): Xaa is C or S

SEQ ID NO: 13171 - protein, 42 aa, Artificial Sequence
  GFR-binding peptide
  MOD_RES (2)..(4)..(38)..(39): Xaa is C or S
  MOD_RES (16)..(17)..(18)..(19)..(20): Xaa is A or G
  MOD_RES (21)..(22)..(23)..(24): Xaa is A or G or is absent
RXGXGEVVMDNSLQEXXXXXXXXXYYLMTLPELETPVXXAKP

SEQ ID NO: 13172 - protein, 40 aa, Artificial Sequence
  GFR-binding peptide
  MOD_RES (1)..(35)..(36): Xaa is C or S
  MOD_RES (13)..(14)..(15)..(16)..(17): Xaa is A or G
  MOD_RES (18)..(19)..(20)..(21): Xaa is A or G or is absent
XGEVVMDEYQKYXXXXXXXXXIFLMSIPSLETPVXXAKPI

SEQ ID NO: 13173 - protein, 36 aa, Artificial Sequence
  GFR-binding peptide
  MOD_RES (2)..(4): Xaa is C or S
  MOD_RES (15)..(16)..(17)..(18)..(19): Xaa is A or G
  MOD_RES (20)..(21)..(22)..(23): Xaa is A or G or is absent
SXKXSKVVMNSLQEXXXXXXXXXYYLITLPELDQPV

SEQ ID NO: 13174 - protein, 33 aa, Artificial Sequence
  GFR-binding peptide
  MOD_RES (32)..(33): Xaa is C or S
GEVVMDEYQKYVVKENEDIFLMSIPSLETPVXX

SEQ ID NO: 13175 - protein, 33 aa, Artificial Sequence
  GFR-binding peptide
  MOD_RES (1)..(32)..(33): Xaa is C or S
XSKVVMNSLQEVKPTRGVYYVIPLPELDQPVXX

SEQ ID NO: 13176 - protein, 35 aa, Artificial Sequence
  GFR-binding peptide
  MOD_RES (1)..(32)..(33): Xaa is C or S
XSKVVMEYQKYVKPTRGVIFLISIPSLDQPVXXPS

SEQ ID NO: 13177 - protein, 41 aa, Artificial Sequence
  GFR-binding peptide
  MOD_RES (2)..(4)..(36)..(37): Xaa is C or S
RXGXGEVVMENSLQEVVKDYEDYYVMPLPELETPVXXAKPI

SEQ ID NO: 13178 - protein, 37 aa, Artificial Sequence; identical to SEQ ID NO: 5739
  GFR-binding peptide
  MOD_RES (2)..(4)..(37): Xaa is C or S
  MOD_RES (15)..(16)..(17)..(18)..(19): Xaa is A or G
  MOD_RES (20)..(21)..(22)..(23): Xaa is A or G or is absent

SEQ ID NO: 13179 - protein, 35 aa, Artificial Sequence; identical to SEQ ID NO: 5742
  GFR-binding peptide
  MOD_RES (2)..(4): Xaa is C or S

SEQ ID NO: 13180 - protein, 37 aa, Artificial Sequence; identical to SEQ ID NO: 5743
  GFR-binding peptide
  MOD_RES (1)..(34)..(35): Xaa is C or S
  MOD_RES (12)..(13)..(14)..(15)..(16): Xaa is A or G
  MOD_RES (17)..(18)..(19)..(20): Xaa is A or G or is absent

SEQ ID NO: 13181 - protein, 42 aa, Artificial Sequence; identical to SEQ ID NO: 5745
  GFR-binding peptide
  MOD_RES (2)..(4)..(37)..(38): Xaa is C or S
  MOD_RES (15)..(16)..(17)..(18)..(19): Xaa is A or G
  MOD_RES (20)..(21)..(22)..(23): Xaa is A or G or is absent

SEQ ID NO: 13182 - protein, 32 aa, Artificial Sequence
  GFR-binding peptide
  MOD_RES (11)..(12)..(13)..(14)..(15): Xaa is A or G
  MOD_RES (16)..(17)..(18)..(19): Xaa is A or G or is absent
EVVMDNSLQEXXXXXXXXXYYVIPLPELRTPV

SEQ ID NO: 13183 - protein, 38 aa, Artificial Sequence
  GFR-binding peptide
  MOD_RES (34)..(34): Xaa is C or S
  MOD_RES (12)..(13)..(14)..(15)..(16): Xaa is A or G
  MOD_RES (17)..(18)..(19)..(20): Xaa is A or G or is absent
SRVVMNEYQKYXXXXXXXXXIFLVSIPSLKTPAXTPKT

SEQ ID NO: 13184 - protein, 32 aa, Artificial Sequence; identical to SEQ ID NO: 5746
  GFR-binding peptide
  MOD_RES (11)..(12)..(13)..(14)..(15): Xaa is A or G
  MOD_RES (16)..(17)..(18)..(19): Xaa is A or G or is absent

SEQ ID NO: 13185 - protein, 32 aa, Artificial Sequence
  GFR-binding peptide
  MOD_RES (31)..(32): Xaa is C or S
EVVMDQYNKLVVNNASDLYLISIASLRTPVXX

SEQ ID NO: 13186 - protein, 40 aa, Artificial Sequence
  GFR-binding peptide
  MOD_RES (2)..(36): Xaa is C or S
  MOD_RES (14)..(15)..(16)..(17)..(18): Xaa is A or G
  MOD_RES (19)..(20)..(21)..(22): Xaa is A or G or is absent
GXSRVVMNNSLQEXXXXXXXXXYYVVPLPELKTPAXTPKT

SEQ ID NO: 13187 - protein, 39 aa, Artificial Sequence; identical to SEQ ID NO: 5750
  GFR-binding peptide
  MOD_RES (1)..(35)..(36): Xaa is C or S
  MOD_RES (13)..(14)..(15)..(16)..(17): Xaa is A or G
  MOD_RES (18)..(19)..(20)..(21): Xaa is A or G or is absent

SEQ ID NO: 13188 - protein, 38 aa, Artificial Sequence; identical to SEQ ID NO: 5753
  GFR-binding peptide
  MOD_RES (2)..(4)..(37)..(38): Xaa is C or S
  MOD_RES (15)..(16)..(17)..(18)..(19): Xaa is A or G
  MOD_RES (20)..(21)..(22)..(23): Xaa is A or G or is absent

SEQ ID NO: 13189 - protein, 40 aa, Artificial Sequence
  GFR-binding peptide
  MOD_RES (1)..(3)..(35)..(36): Xaa is C or S
XGXARVVMNEYQKYIVNSSDDIFLVSIPSLQTPAXXPKPV

SEQ ID NO: 13190 - protein, 35 aa, Artificial Sequence
  GFR-binding peptide
  MOD_RES (33)..(34): Xaa is C or S
  MOD_RES (11)..(12)..(13)..(14)..(15): Xaa is A or G
  MOD_RES (16)..(17)..(18)..(19): Xaa is A or G or is absent
SKVIMEYQKYXXXXXXXXXIFLISIPSLDQSVXXP

SEQ ID NO: 13191 - protein, 33 aa, Artificial Sequence
  GFR-binding peptide
  MOD_RES (31)..(32): Xaa is C or S
RVVMNNSLQEIVNSSDDYYLVTLPELKTPAXXP

SEQ ID NO: 13192 - protein, 39 aa, Artificial Sequence
  GFR-binding peptide
  MOD_RES (1)..(33)..(34): Xaa is C or S
XARVVMNEYQKYIVNSSDDIFLVSIPSLQTPAXXPKPVT

SEQ ID NO: 13193 - protein, 38 aa, Artificial Sequence; identical to SEQ ID NO: 5762
  GFR-binding peptide
  MOD_RES (33)..(34): Xaa is C or S
  MOD_RES (11)..(12)..(13)..(14)..(15): Xaa is A or G
  MOD_RES (16)..(17)..(18)..(19): Xaa is A or G or is absent

SEQ ID NO: 13194 - protein, 39 aa, Artificial Sequence
  GFR-binding peptide
  MOD_RES (33)..(34): Xaa is C or S
  MOD_RES (11)..(12)..(13)..(14)..(15): Xaa is A or G
  MOD_RES (16)..(17)..(18)..(19): Xaa is A or G or is absent
RVVMNNSLQEXXXXXXXXXYYLVTLPELQTPAXXPKPVT

SEQ ID NO: 13195 - protein, 34 aa, Artificial Sequence; identical to SEQ ID NO: 5763
  GFR-binding peptide
  MOD_RES (33)..(34): Xaa is C or S
  MOD_RES (11)..(12)..(13)..(14)..(15): Xaa is A or G
  MOD_RES (16)..(17)..(18)..(19): Xaa is A or G or is absent

SEQ ID NO: 13196 - protein, 33 aa, Artificial Sequence
  GFR-binding peptide
  MOD_RES (1)..(33): Xaa is C or S
XSRVVMNEYQKYIVNSSDDIFLVSIPSLKTPAX

SEQ ID NO: 13197 - protein, 39 aa, Artificial Sequence; identical to SEQ ID NO: 5765
  GFR-binding peptide
  MOD_RES (1)..(35)..(36): Xaa is C or S
  MOD_RES (13)..(14)..(15)..(16)..(17): Xaa is A or G
  MOD_RES (18)..(19)..(20)..(21): Xaa is A or G or is absent

SEQ ID NO: 13198 - protein, 37 aa, Artificial Sequence
  GFR-binding peptide
  MOD_RES (1)..(3)..(35)..(36): Xaa is C or S
XGXGEVVMDNSLQEVVKENEDYYLMTLPELETPVXXA

SEQ ID NO: 13199 - protein, 35 aa, Artificial Sequence
  GFR-binding peptide
  MOD_RES (2)..(2): Xaa is C or S
  MOD_RES (14)..(15)..(16)..(17)..(18): Xaa is A or G
  MOD_RES (19)..(20)..(21)..(22): Xaa is A or G or is absent
GXARVVMNEYQKYXXXXXXXXXIFLVSIPSLQTPA

SEQ ID NO: 13200 - protein, 38 aa, Artificial Sequence; identical to SEQ ID NO: 5766
  GFR-binding peptide
  MOD_RES (1)..(34)..(35): Xaa is C or S
  MOD_RES (12)..(13)..(14)..(15)..(16): Xaa is A or G
  MOD_RES (17)..(18)..(19)..(20): Xaa is A or G or is absent

SEQ ID NO: 13201 - protein, 39 aa, Artificial Sequence
  GFR-binding peptide
  MOD_RES (1)..(34)..(35): Xaa is C or S
  MOD_RES (12)..(13)..(14)..(15)..(16): Xaa is A or G
  MOD_RES (17)..(18)..(19)..(20): Xaa is A or G or is absent
XSRVIMNSLQEXXXXXXXXXYYLITLPELAQPVXXPAAS

SEQ ID NO: 13202 - protein, 40 aa, Artificial Sequence
  GFR-binding peptide
  MOD_RES (2)..(4)..(36)..(37): Xaa is C or S
HXGXARVVMNEYQKYIVNSSDDIFLVSIPSLQTPAXXPKP

SEQ ID NO: 13203 - protein, 38 aa, Artificial Sequence
  GFR-binding peptide
  MOD_RES (1)..(35)..(36): Xaa is C or S
  MOD_RES (13)..(14)..(15)..(16)..(17): Xaa is A or G
  MOD_RES (18)..(19)..(20)..(21): Xaa is A or G or is absent
XSEVVMDQYNKLXXXXXXXXXLYLISIASLRTPVXXTP

SEQ ID NO: 13204 - protein, 35 aa, Artificial Sequence
  GFR-binding peptide
  MOD_RES (32)..(33): Xaa is C or S
GEVVMENSLQEVVKDYEDYYVMPLPELETPVXXAK

SEQ ID NO: 13205 - protein, 34 aa, Artificial Sequence; identical to SEQ ID NO: 5769
  GFR-binding peptide
  MOD_RES (1)..(33)..(34): Xaa is C or S

SEQ ID NO: 13206 - protein, 33 aa, Artificial Sequence
  GFR-binding peptide
  MOD_RES (2)..(2): Xaa is C or S
GXSRVVMNNSLQEIVNSSDDYYLVTLPELKTPA

SEQ ID NO: 13207 - protein, 35 aa, Artificial Sequence
  GFR-binding peptide
  MOD_RES (33)..(34): Xaa is C or S
  MOD_RES (11)..(12)..(13)..(14)..(15): Xaa is A or G
  MOD_RES (16)..(17)..(18)..(19): Xaa is A or G or is absent
EVVMDEYQKYXXXXXXXXXIFLMSIPSLETPVXXA

SEQ ID NO: 13208 - protein, 41 aa, Artificial Sequence
  GFR-binding peptide
  MOD_RES (2)..(4)..(36)..(37): Xaa is C or S
RXGXSEVVMDQYNKLVVNNASDLYLISIASLRTPVXXTPPT

SEQ ID NO: 13209 - protein, 42 aa, Artificial Sequence
  GFR-binding peptide
  MOD_RES (2)..(4)..(36)..(37): Xaa is C or S
RXGXGEVVMEEYQKYVVKDYEDIFLMSIPSLETPVXXAKPIS

SEQ ID NO: 13210 - protein, 37 aa, Artificial Sequence; identical to SEQ ID NO: 5771
  GFR-binding peptide
  MOD_RES (2)..(33)..(34): Xaa is C or S

SEQ ID NO: 13211 - protein, 38 aa, Artificial Sequence
  GFR-binding peptide
  MOD_RES (33)..(34): Xaa is C or S
  MOD_RES (11)..(12)..(13)..(14)..(15): Xaa is A or G
  MOD_RES (16)..(17)..(18)..(19): Xaa is A or G or is absent
SKVIMNSLQEXXXXXXXXXYYVIPLPELDQSVXXPSAS

SEQ ID NO: 13212 - protein, 37 aa, Artificial Sequence
  GFR-binding peptide
  MOD_RES (1)..(35)..(36): Xaa is C or S
  MOD_RES (13)..(14)..(15)..(16)..(17): Xaa is A or G
  MOD_RES (18)..(19)..(20)..(21): Xaa is A or G or is absent
XSEVVMDNSLQEXXXXXXXXXYYLITLPELRTPVXXT

SEQ ID NO: 13213 - protein, 40 aa, Artificial Sequence
  GFR-binding peptide
  MOD_RES (2)..(34)..(35): Xaa is C or S
GXSEVVMDQYNKLVVNNASDLYLISIASLRTPVXXTPPTS

SEQ ID NO: 13214 - protein, 43 aa, Artificial Sequence
  GFR-binding peptide
  MOD_RES (1)..(3)..(37)..(38): Xaa is C or S
  MOD_RES (15)..(16)..(17)..(18)..(19): Xaa is A or G
  MOD_RES (20)..(21)..(22)..(23): Xaa is A or G or is absent
XGXGEVVMDEYQKYXXXXXXXXXIFLMSIPSLETPVXXAKPIK

SEQ ID NO: 13215 - protein, 36 aa, Artificial Sequence
  GFR-binding peptide
  MOD_RES (33)..(34): Xaa is C or S
  MOD_RES (11)..(12)..(13)..(14)..(15): Xaa is A or G
  MOD_RES (16)..(17)..(18)..(19): Xaa is A or G or is absent
EVVMDEYQKYXXXXXXXXXIFLMSIPSLETPVXXAK

SEQ ID NO: 13216 - protein, 32 aa, Artificial Sequence; identical to SEQ ID NO: 5783
  GFR-binding peptide
  MOD_RES (1)..(32): Xaa is C or S

SEQ ID NO: 13217 - protein, 38 aa, Artificial Sequence; identical to SEQ ID NO: 5784
  GFR-binding peptide
  MOD_RES (32)..(33): Xaa is C or S

SEQ ID NO: 13218 - protein, 40 aa, Artificial Sequence; identical to SEQ ID NO: 5787
  GFR-binding peptide
  MOD_RES (1)..(3)..(35): Xaa is C or S

SEQ ID NO: 13219 - protein, 33 aa, Artificial Sequence
  GFR-binding peptide
  MOD_RES (33)..(33): Xaa is C or S
  MOD_RES (11)..(12)..(13)..(14)..(15): Xaa is A or G
  MOD_RES (16)..(17)..(18)..(19): Xaa is A or G or is absent
EVVMDNSLQEXXXXXXXXXYYLITLPELRTPVX

SEQ ID NO: 13220 - protein, 36 aa, Artificial Sequence; identical to SEQ ID NO: 5788
  GFR-binding peptide
  MOD_RES (34)..(35): Xaa is C or S
  MOD_RES (12)..(13)..(14)..(15)..(16): Xaa is A or G
  MOD_RES (17)..(18)..(19)..(20): Xaa is A or G or is absent

SEQ ID NO: 13221 - protein, 32 aa, Artificial Sequence
  GFR-binding peptide
  MOD_RES (1)..(1): Xaa is C or S
XSRVVMNEYQKYIVNSSDDIFLVSIPSLKTPA

SEQ ID NO: 13222 - protein, 43 aa, Artificial Sequence
  GFR-binding peptide
  MOD_RES (2)..(4)..(38)..(39): Xaa is C or S
  MOD_RES (16)..(17)..(18)..(19)..(20): Xaa is A or G
  MOD_RES (21)..(22)..(23)..(24): Xaa is A or G or is absent
HXGXARVVMNNSLQEXXXXXXXXXYYLVTLPELQTPAXXPKPV

SEQ ID NO: 13223 - protein, 37 aa, Artificial Sequence
  GFR-binding peptide
  MOD_RES (1)..(3)..(35): Xaa is C or S
XGXSRVVMNNSLQEIVNSSDDYYVVPLPELKTPAXTP

SEQ ID NO: 13224 - protein, 34 aa, Artificial Sequence
  GFR-binding peptide
  MOD_RES (1)..(33)..(34): Xaa is C or S
XARVVMNNSLQEIVNSSDDYYLVTLPELQTPAXX

SEQ ID NO: 13225 - protein, 39 aa, Artificial Sequence
  GFR-binding peptide
  MOD_RES (1)..(34)..(35): Xaa is C or S
  MOD_RES (12)..(13)..(14)..(15)..(16): Xaa is A or G
  MOD_RES (17)..(18)..(19)..(20): Xaa is A or G or is absent
XSRVIMEYQKYXXXXXXXXXIFLISIPSLAQPVXXPAAS

SEQ ID NO: 13226 - protein, 41 aa, Artificial Sequence
  GFR-binding peptide
  MOD_RES (1)..(3)..(35): Xaa is C or S
XGXSRVVMNEYQKYIVNSSDDIFLVSIPSLKTPAXTPKTVH

SEQ ID NO: 13227 - protein, 37 aa, Artificial Sequence
  GFR-binding peptide
  MOD_RES (2)..(36)..(37): Xaa is C or S
  MOD_RES (14)..(15)..(16)..(17)..(18): Xaa is A or G
  MOD_RES (19)..(20)..(21)..(22): Xaa is A or G or is absent
GXSRVVMNNSLQEXXXXXXXXXYYLVTLPELKTPAXX

SEQ ID NO: 13228 - protein, 42 aa, Artificial Sequence; identical to SEQ ID NO: 5798
  GFR-binding peptide
  MOD_RES (2)..(4)..(36)..(37): Xaa is C or S

SEQ ID NO: 13229 - protein, 32 aa, Artificial Sequence; identical to SEQ ID NO: 5799
  GFR-binding peptide
  MOD_RES (1)..(32): Xaa is C or S

SEQ ID NO: 13230 - protein, 40 aa, Artificial Sequence
  GFR-binding peptide
  MOD_RES (1)..(34)..(35): Xaa is C or S
  MOD_RES (12)..(13)..(14)..(15)..(16): Xaa is A or G
  MOD_RES (17)..(18)..(19)..(20): Xaa is A or G or is absent
XSKVIMEYQKYXXXXXXXXXIFLISIPSLDQSVXXPSASA

SEQ ID NO: 13231 - protein, 38 aa, Artificial Sequence; identical to SEQ ID NO: 5801
  GFR-binding peptide
  MOD_RES (2)..(4)..(38): Xaa is C or S
  MOD_RES (16)..(17)..(18)..(19)..(20): Xaa is A or G
  MOD_RES (21)..(22)..(23)..(24): Xaa is A or G or is absent

SEQ ID NO: 13232 - protein, 31 aa, Artificial Sequence
  GFR-binding peptide
ARVVMNNSLQEIVNSSDDYYLVTLPELQTPA

SEQ ID NO: 13233 - protein, 38 aa, Artificial Sequence
  GFR-binding peptide
  MOD_RES (32)..(33): Xaa is C or S
SRVVMNNSLQEIVNSSDDYYLVTLPELKTPAXXPKPVY

SEQ ID NO: 13234 - protein, 39 aa, Artificial Sequence
  GFR-binding peptide
  MOD_RES (1)..(35)..(36): Xaa is C or S
  MOD_RES (13)..(14)..(15)..(16)..(17): Xaa is A or G
  MOD_RES (18)..(19)..(20)..(21): Xaa is A or G or is absent
XSRVVMNNSLQEXXXXXXXXXYYVVPLPELKTPAXXPKP

SEQ ID NO: 13235 - protein, 38 aa, Artificial Sequence; identical to SEQ ID NO: 5803
  GFR-binding peptide
  MOD_RES (2)..(4)..(37)..(38): Xaa is C or S
  MOD_RES (15)..(16)..(17)..(18)..(19): Xaa is A or G
  MOD_RES (20)..(21)..(22)..(23): Xaa is A or G or is absent

SEQ ID NO: 13236 - protein, 36 aa, Artificial Sequence; identical to SEQ ID NO: 5804
  GFR-binding peptide
  MOD_RES (1)..(35)..(36): Xaa is C or S
  MOD_RES (13)..(14)..(15)..(16)..(17): Xaa is A or G
  MOD_RES (18)..(19)..(20)..(21): Xaa is A or G or is absent

SEQ ID NO: 13237 - protein, 38 aa, Artificial Sequence
  GFR-binding peptide
  MOD_RES (2)..(35)..(36): Xaa is C or S
  MOD_RES (13)..(14)..(15)..(16)..(17): Xaa is A or G
  MOD_RES (18)..(19)..(20)..(21): Xaa is A or G or is absent
KXSKVVMNSLQEXXXXXXXXXYYVIPLPELDQPVXXPS

SEQ ID NO: 13238 - protein, 41 aa, Artificial Sequence
  GFR-binding peptide
  MOD_RES (1)..(3)..(35)..(36): Xaa is C or S
XGXSEVVMDRYKKLVVNNASDFYLISIANLRTPVXXTPPTS

SEQ ID NO: 13239 - protein, 43 aa, Artificial Sequence
  GFR-binding peptide
  MOD_RES (2)..(4)..(38)..(39): Xaa is C or S
  MOD_RES (16)..(17)..(18)..(19)..(20): Xaa is A or G
  MOD_RES (21)..(22)..(23)..(24): Xaa is A or G or is absent
RXGXSEVVMDEYQKYXXXXXXXXXIFLISIPSLRTPVXXTPPT

SEQ ID NO: 13240 - protein, 31 aa, Artificial Sequence; identical to SEQ ID NO: 5810
  GFR-binding peptide
  MOD_RES (1)..(1): Xaa is C or S

SEQ ID NO: 13241 - protein, 34 aa, Artificial Sequence; identical to SEQ ID NO: 5813
  GFR-binding peptide
  MOD_RES (2)..(4): Xaa is C or S

SEQ ID NO: 13242 - protein, 37 aa, Artificial Sequence
  GFR-binding peptide
  MOD_RES (2)..(4)..(36)..(37): Xaa is C or S
HXGXARVVMNEYQKYIVNSSDDIFLVSIPSLQTPAXX

SEQ ID NO: 13243 - protein, 30 aa, Artificial Sequence; identical to SEQ ID NO: 5814
  GFR-binding peptide

SEQ ID NO: 13244 - protein, 36 aa, Artificial Sequence
  GFR-binding peptide
  MOD_RES (2)..(33)..(34): Xaa is C or S
KXSKVVMNSLQEVKPTRGVYYLITLPELDQPVXXPS

SEQ ID NO: 13245 - protein, 35 aa, Artificial Sequence
  GFR-binding peptide
  MOD_RES (2)..(2): Xaa is C or S
  MOD_RES (14)..(15)..(16)..(17)..(18): Xaa is A or G
  MOD_RES (19)..(20)..(21)..(22): Xaa is A or G or is absent
GXSEVVMDNSLQEXXXXXXXXXYYVIPLPELRTPV

SEQ ID NO: 13246 - protein, 41 aa, Artificial Sequence; identical to SEQ ID NO: 5815
  GFR-binding peptide
  MOD_RES (2)..(4)..(38)..(39): Xaa is C or S
  MOD_RES (16)..(17)..(18)..(19)..(20): Xaa is A or G
  MOD_RES (21)..(22)..(23)..(24): Xaa is A or G or is absent

SEQ ID NO: 13247 - protein, 36 aa, Artificial Sequence
  GFR-binding peptide
  MOD_RES (2)..(34)..(35): Xaa is C or S
GXGEVVMEEYQKYVVKDYEDIFLMSIPSLETPVXXA

SEQ ID NO: 13248 - protein, 38 aa, Artificial Sequence; identical to SEQ ID NO: 5816
  GFR-binding peptide
  MOD_RES (2)..(33)..(34): Xaa is C or S

SEQ ID NO: 13249 - protein, 35 aa, Artificial Sequence
  GFR-binding peptide
  MOD_RES (2)..(4): Xaa is C or S
RXGXSEVVMDQYNKLVVNNASDLYLISIASLRTPV

SEQ ID NO: 13250 - protein, 38 aa, Artificial Sequence; identical to SEQ ID NO: 5818
  GFR-binding peptide
  MOD_RES (1)..(3)..(34)..(35): Xaa is C or S

SEQ ID NO: 13251 - protein, 39 aa, Artificial Sequence; identical to SEQ ID NO: 5820
  GFR-binding peptide
  MOD_RES (2)..(36)..(37): Xaa is C or S
  MOD_RES (14)..(15)..(16)..(17)..(18): Xaa is A or G
  MOD_RES (19)..(20)..(21)..(22): Xaa is A or G or is absent

SEQ ID NO: 13252 - protein, 37 aa, Artificial Sequence
  GFR-binding peptide
  MOD_RES (34)..(35): Xaa is C or S
  MOD_RES (12)..(13)..(14)..(15)..(16): Xaa is A or G
  MOD_RES (17)..(18)..(19)..(20): Xaa is A or G or is absent
ARVVMNEYQKYXXXXXXXXXIFLVSIPSLQTPAXXPK

SEQ ID NO: 13253 - protein, 35 aa, Artificial Sequence; identical to SEQ ID NO: 5822
  GFR-binding peptide
  MOD_RES (1)..(32)..(33): Xaa is C or S

SEQ ID NO: 13254 - protein, 39 aa, Artificial Sequence; identical to SEQ ID NO: 5823
  GFR-binding peptide
  MOD_RES (34)..(35): Xaa is C or S
  MOD_RES (12)..(13)..(14)..(15)..(16): Xaa is A or G
  MOD_RES (17)..(18)..(19)..(20): Xaa is A or G or is absent

SEQ ID NO: 13255 - protein, 31 aa, Artificial Sequence
  GFR-binding peptide
  MOD_RES (31)..(31): Xaa is C or S
EVVMENSLQEVVKDYEDYYLMTLPELETPVX

SEQ ID NO: 13256 - protein, 42 aa, Artificial Sequence
  GFR-binding peptide
  MOD_RES (1)..(3)..(37)..(38): Xaa is C or S
  MOD_RES (15)..(16)..(17)..(18)..(19): Xaa is A or G
  MOD_RES (20)..(21)..(22)..(23): Xaa is A or G or is absent
XGXSRVVMNNSLQEXXXXXXXXXYYVVPLPELKTPAXXPKPV

SEQ ID NO: 13257 - protein, 33 aa, Artificial Sequence
  GFR-binding peptide
  MOD_RES (2)..(2): Xaa is C or S
GXARVVMNEYQKYIVNSSDDIFLVSIPSLQTPA

SEQ ID NO: 13258 - protein, 38 aa, Artificial Sequence
  GFR-binding peptide
  MOD_RES (2)..(4)..(35)..(36): Xaa is C or S
SXKXSKVVMNSLQEVKPTRGVYYVIPLPELDQPVXXPS

SEQ ID NO: 13259 - protein, 34 aa, Artificial Sequence; identical to SEQ ID NO: 5826
  GFR-binding peptide
  MOD_RES (32)..(33): Xaa is C or S

SEQ ID NO: 13260 - protein, 34 aa, Artificial Sequence
  GFR-binding peptide
  MOD_RES (34)..(34): Xaa is C or S
  MOD_RES (12)..(13)..(14)..(15)..(16): Xaa is A or G
  MOD_RES (17)..(18)..(19)..(20): Xaa is A or G or is absent
SEVVMDQYNKLXXXXXXXXXLYLISIASLRTPVX

SEQ ID NO: 13261 - protein, 38 aa, Artificial Sequence
  GFR-binding peptide
  MOD_RES (2)..(33)..(34): Xaa is C or S
KXSKVVMEYQKYVKPTRGVIFLISIPSLDQPVXXPSAS

SEQ ID NO: 13262 - protein, 41 aa, Artificial Sequence
  GFR-binding peptide
  MOD_RES (2)..(4)..(36)..(37): Xaa is C or S
HXGXSRVVMNNSLQEIVNSSDDYYLVTLPELKTPAXXPKPV

SEQ ID NO: 13263 - protein, 36 aa, Artificial Sequence
  GFR-binding peptide
  MOD_RES (2)..(4)..(36): Xaa is C or S
RXGXSEVVMDNSLQEVVNNASDYYVIPLPELRTPVX

SEQ ID NO: 13264 - protein, 36 aa, Artificial Sequence
  GFR-binding peptide
  MOD_RES (33)..(34): Xaa is C or S
  MOD_RES (11)..(12)..(13)..(14)..(15): Xaa is A or G
  MOD_RES (16)..(17)..(18)..(19): Xaa is A or G or is absent
RVVMNEYQKYXXXXXXXXXIFLVSIPSLKTPAXXPK

SEQ ID NO: 13265 - protein, 39 aa, Artificial Sequence
  GFR-binding peptide
  MOD_RES (1)..(35)..(36): Xaa is C or S
  MOD_RES (13)..(14)..(15)..(16)..(17): Xaa is A or G
  MOD_RES (18)..(19)..(20)..(21): Xaa is A or G or is absent
XSEVVMDEYQKYXXXXXXXXXIFLISIPSLRTPVXXTPP

SEQ ID NO: 13266 - protein, 33 aa, Artificial Sequence; identical to SEQ ID NO: 5834
  GFR-binding peptide
  MOD_RES (2)..(2): Xaa is C or S

SEQ ID NO: 13267 - protein, 35 aa, Artificial Sequence
  GFR-binding peptide
  MOD_RES (1)..(34)..(35): Xaa is C or S
  MOD_RES (12)..(13)..(14)..(15)..(16): Xaa is A or G
  MOD_RES (17)..(18)..(19)..(20): Xaa is A or G or is absent
XSRVIMNSLQEXXXXXXXXXYYLITLPELAQPVXX

SEQ ID NO: 13268 - protein, 37 aa, Artificial Sequence; identical to SEQ ID NO: 5836
  GFR-binding peptide
  MOD_RES (2)..(35)..(36): Xaa is C or S
  MOD_RES (13)..(14)..(15)..(16)..(17): Xaa is A or G
  MOD_RES (18)..(19)..(20)..(21): Xaa is A or G or is absent

SEQ ID NO: 13269 - protein, 34 aa, Artificial Sequence
  GFR-binding peptide
  MOD_RES (31)..(32): Xaa is C or S
SKVIMNSLQEIKPTKGIYYVIPLPELDQSVXXPS

SEQ ID NO: 13270 - protein, 34 aa, Artificial Sequence
  GFR-binding peptide
  MOD_RES (34)..(34): Xaa is C or S
  MOD_RES (12)..(13)..(14)..(15)..(16): Xaa is A or G
  MOD_RES (17)..(18)..(19)..(20): Xaa is A or G or is absent
SEVVMDRYKKLXXXXXXXXXFYLISIANLRTPVX

SEQ ID NO: 13271 - protein, 33 aa, Artificial Sequence
  GFR-binding peptide
  MOD_RES (1)..(33): Xaa is C or S
XSEVVMDNSLQEVVNNASDYYLITLPELRTPVX

SEQ ID NO: 13272 - protein, 34 aa, Artificial Sequence; identical to SEQ ID NO: 5839
  GFR-binding peptide
  MOD_RES (31)..(32): Xaa is C or S

SEQ ID NO: 13273 - protein, 41 aa, Artificial Sequence; identical to SEQ ID NO: 5840
  GFR-binding peptide
  MOD_RES (1)..(3)..(36)..(37): Xaa is C or S
  MOD_RES (14)..(15)..(16)..(17)..(18): Xaa is A or G
  MOD_RES (19)..(20)..(21)..(22): Xaa is A or G or is absent

SEQ ID NO: 13274 - protein, 36 aa, Artificial Sequence; identical to SEQ ID NO: 5841
  GFR-binding peptide
  MOD_RES (2)..(33)..(34): Xaa is C or S

SEQ ID NO: 13275 - protein, 39 aa, Artificial Sequence
  GFR-binding peptide
  MOD_RES (1)..(33)..(34): Xaa is C or S
XSEVVMDRYKKLVVNNASDFYLISIANLRTPVXXTPPTS

SEQ ID NO: 13276 - protein, 35 aa, Artificial Sequence
  GFR-binding peptide
  MOD_RES (33)..(34): Xaa is C or S
  MOD_RES (11)..(12)..(13)..(14)..(15): Xaa is A or G
  MOD_RES (16)..(17)..(18)..(19): Xaa is A or G or is absent
EVVMDNSLQEXXXXXXXXXYYLMTLPELETPVXXA

SEQ ID NO: 13277 - protein, 40 aa, Artificial Sequence
  GFR-binding peptide
  MOD_RES (1)..(3)..(35): Xaa is C or S
XGXSRVVMNNSLQEIVNSSDDYYVVPLPELKTPAXTPKTV

SEQ ID NO: 13278 - protein, 39 aa, Artificial Sequence; identical to SEQ ID NO: 5847
  GFR-binding peptide
  MOD_RES (33)..(34): Xaa is C or S
  MOD_RES (11)..(12)..(13)..(14)..(15): Xaa is A or G
  MOD_RES (16)..(17)..(18)..(19): Xaa is A or G or is absent

SEQ ID NO: 13279 - protein, 35 aa, Artificial Sequence; identical to SEQ ID NO: 5848
  GFR-binding peptide
  MOD_RES (2)..(33)..(34): Xaa is C or S

SEQ ID NO: 13280 - protein, 39 aa, Artificial Sequence
  GFR-binding peptide
  MOD_RES (1)..(35)..(36): Xaa is C or S
  MOD_RES (13)..(14)..(15)..(16)..(17): Xaa is A or G
  MOD_RES (18)..(19)..(20)..(21): Xaa is A or G or is absent
XGEVVMEEYQKYXXXXXXXXXIFLMSIPSLETPVXXAKP

SEQ ID NO: 13281 - protein, 34 aa, Artificial Sequence
  GFR-binding peptide
  MOD_RES (2)..(34): Xaa is C or S
GXGEVVMENSLQEVVKDYEDYYLMTLPELETPVX

SEQ ID NO: 13282 - protein, 37 aa, Artificial Sequence
  GFR-binding peptide
  MOD_RES (1)..(34)..(35): Xaa is C or S
  MOD_RES (12)..(13)..(14)..(15)..(16): Xaa is A or G
  MOD_RES (17)..(18)..(19)..(20): Xaa is A or G or is absent
XSRVIMNSLQEXXXXXXXXXYYLITLPELAQPVXXPA

SEQ ID NO: 13283 - protein, 42 aa, Artificial Sequence
  GFR-binding peptide
  MOD_RES (1)..(3)..(37)..(38): Xaa is C or S
  MOD_RES (15)..(16)..(17)..(18)..(19): Xaa is A or G
  MOD_RES (20)..(21)..(22)..(23): Xaa is A or G or is absent
XGXSRVVMNNSLQEXXXXXXXXXYYLVTLPELKTPAXXPKPV

SEQ ID NO: 13284 - protein, 40 aa, Artificial Sequence
  GFR-binding peptide
  MOD_RES (2)..(4)..(36): Xaa is C or S
HXGXSRVVMNEYQKYIVNSSDDIFLVSIPSLKTPAXTPKT

SEQ ID NO: 13285 - protein, 38 aa, Artificial Sequence
  GFR-binding peptide
  MOD_RES (1)..(35)..(36): Xaa is C or S
  MOD_RES (13)..(14)..(15)..(16)..(17): Xaa is A or G
  MOD_RES (18)..(19)..(20)..(21): Xaa is A or G or is absent
XSEVVMDNSLQEXXXXXXXXXYYLITLPELRTPVXXTP

SEQ ID NO: 13286 - protein, 30 aa, Artificial Sequence
  GFR-binding peptide
RVVMNEYQKYIVNSSDDIFLVSIPSLKTPA

SEQ ID NO: 13287 - protein, 37 aa, Artificial Sequence
  GFR-binding peptide
  MOD_RES (33)..(34): Xaa is C or S
  MOD_RES (11)..(12)..(13)..(14)..(15): Xaa is A or G
  MOD_RES (16)..(17)..(18)..(19): Xaa is A or G or is absent
SKVVMNSLQEXXXXXXXXXYYLITLPELDQPVXXPSA

SEQ ID NO: 13288 - protein, 35 aa, Artificial Sequence
  GFR-binding peptide
  MOD_RES (2)..(4): Xaa is C or S
RXGXSEVVMDNSLQEVVNNASDYYLITLPELRTPV

SEQ ID NO: 13289 - protein, 41 aa, Artificial Sequence; identical to SEQ ID NO: 5860
  GFR-binding peptide
  MOD_RES (2)..(4)..(38)..(39): Xaa is C or S
  MOD_RES (16)..(17)..(18)..(19)..(20): Xaa is A or G
  MOD_RES (21)..(22)..(23)..(24): Xaa is A or G or is absent

SEQ ID NO: 13290 - protein, 36 aa, Artificial Sequence; identical to SEQ ID NO: 5863
  GFR-binding peptide
  MOD_RES (32)..(32): Xaa is C or S

SEQ ID NO: 13291 - protein, 34 aa, Artificial Sequence
  GFR-binding peptide
  MOD_RES (1)..(3): Xaa is C or S
XGXSEVVMDNSLQEVVNNASDYYLITLPELRTPV

SEQ ID NO: 13292 - protein, 36 aa, Artificial Sequence
  GFR-binding peptide
  MOD_RES (1)..(35)..(36): Xaa is C or S
  MOD_RES (13)..(14)..(15)..(16)..(17): Xaa is A or G
  MOD_RES (18)..(19)..(20)..(21): Xaa is A or G or is absent
XGEVVMDNSLQEXXXXXXXXXYYLMTLPELETPVXX

SEQ ID NO: 13293 - protein, 34 aa, Artificial Sequence; identical to SEQ ID NO: 5865
  GFR-binding peptide
  MOD_RES (32)..(33): Xaa is C or S

SEQ ID NO: 13294 - protein, 31 aa, Artificial Sequence; identical to SEQ ID NO: 5867
  GFR-binding peptide

SEQ ID NO: 13295 - protein, 40 aa, Artificial Sequence; identical to SEQ ID NO: 5868
  GFR-binding peptide
  MOD_RES (2)..(4)..(38)..(39): Xaa is C or S
  MOD_RES (16)..(17)..(18)..(19)..(20): Xaa is A or G
  MOD_RES (21)..(22)..(23)..(24): Xaa is A or G or is absent

SEQ ID NO: 13296 - protein, 39 aa, Artificial Sequence
  GFR-binding peptide
  MOD_RES (1)..(3)..(37): Xaa is C or S
  MOD_RES (15)..(16)..(17)..(18)..(19): Xaa is A or G
  MOD_RES (20)..(21)..(22)..(23): Xaa is A or G or is absent
XGXSRVVMNNSLQEXXXXXXXXXYYVVPLPELKTPAXTP

SEQ ID NO: 13297 - protein, 37 aa, Artificial Sequence
  GFR-binding peptide
  MOD_RES (34)..(35): Xaa is C or S
  MOD_RES (12)..(13)..(14)..(15)..(16): Xaa is A or G
  MOD_RES (17)..(18)..(19)..(20): Xaa is A or G or is absent
GEVVMDNSLQEXXXXXXXXXYYLMTLPELETPVXXAK

SEQ ID NO: 13298 - protein, 40 aa, Artificial Sequence; identical to SEQ ID NO: 5869
  GFR-binding peptide
  MOD_RES (1)..(3)..(37)..(38): Xaa is C or S
  MOD_RES (15)..(16)..(17)..(18)..(19): Xaa is A or G
  MOD_RES (20)..(21)..(22)..(23): Xaa is A or G or is absent

SEQ ID NO: 13299 - protein, 38 aa, Artificial Sequence
  GFR-binding peptide
  MOD_RES (2)..(34): Xaa is C or S
GXSRVVMNEYQKYIVNSSDDIFLVSIPSLKTPAXTPKT

SEQ ID NO: 13300 - protein, 37 aa, Artificial Sequence; identical to SEQ ID NO: 5871
  GFR-binding peptide
  MOD_RES (1)..(33)..(34): Xaa is C or S

SEQ ID NO: 13301 - protein, 34 aa, Artificial Sequence; identical to SEQ ID NO: 5874
  GFR-binding peptide
  MOD_RES (33)..(34): Xaa is C or S
  MOD_RES (11)..(12)..(13)..(14)..(15): Xaa is A or G
  MOD_RES (16)..(17)..(18)..(19): Xaa is A or G or is absent

SEQ ID NO: 13302 - protein, 34 aa, Artificial Sequence
  GFR-binding peptide
  MOD_RES (31)..(32): Xaa is C or S
SKVVMEYQKYVKPTRGVIFLISIPSLDQPVXXPS

SEQ ID NO: 13303 - protein, 36 aa, Artificial Sequence
  GFR-binding peptide
  MOD_RES (1)..(32)..(33): Xaa is C or S
XSKVVMNSLQEVKPTRGVYYLITLPELDQPVXXPSA

SEQ ID NO: 13304 - protein, 34 aa, Artificial Sequence; identical to SEQ ID NO: 5878
  GFR-binding peptide
  MOD_RES (1)..(1): Xaa is C or S
  MOD_RES (13)..(14)..(15)..(16)..(17): Xaa is A or G
  MOD_RES (18)..(19)..(20)..(21): Xaa is A or G or is absent

SEQ ID NO: 13305 - protein, 36 aa, Artificial Sequence; identical to SEQ ID NO: 5880
  GFR-binding peptide
  MOD_RES (33)..(34): Xaa is C or S
  MOD_RES (11)..(12)..(13)..(14)..(15): Xaa is A or G
  MOD_RES (16)..(17)..(18)..(19): Xaa is A or G or is absent

SEQ ID NO: 13306 - protein, 43 aa, Artificial Sequence; identical to SEQ ID NO: 5882
  GFR-binding peptide
  MOD_RES (2)..(4)..(37)..(38): Xaa is C or S
  MOD_RES (15)..(16)..(17)..(18)..(19): Xaa is A or G
  MOD_RES (20)..(21)..(22)..(23): Xaa is A or G or is absent

SEQ ID NO: 13307 - protein, 35 aa, Artificial Sequence
  GFR-binding peptide
  MOD_RES (33)..(34): Xaa is C or S
  MOD_RES (11)..(12)..(13)..(14)..(15): Xaa is A or G
  MOD_RES (16)..(17)..(18)..(19): Xaa is A or G or is absent
EVVMDNSLQEXXXXXXXXXYYVMPLPELETPVXXA

SEQ ID NO: 13308 - protein, 41 aa, Artificial Sequence; identical to SEQ ID NO: 5883
  GFR-binding peptide
  MOD_RES (2)..(4)..(35)..(36): Xaa is C or S

SEQ ID NO: 13309 - protein, 35 aa, Artificial Sequence; identical to SEQ ID NO: 5884
  GFR-binding peptide
  MOD_RES (31)..(32): Xaa is C or S

SEQ ID NO: 13310 - protein, 41 aa, Artificial Sequence
  GFR-binding peptide
  MOD_RES (1)..(3)..(35): Xaa is C or S
XGXSRVVMNNSLQEIVNSSDDYYLVTLPELKTPAXTPKTVH

SEQ ID NO: 13311 - protein, 37 aa, Artificial Sequence
  GFR-binding peptide
  MOD_RES (1)..(3)..(37): Xaa is C or S
  MOD_RES (15)..(16)..(17)..(18)..(19): Xaa is A or G
  MOD_RES (20)..(21)..(22)..(23): Xaa is A or G or is absent
XGXARVVMNNSLQEXXXXXXXXXYYVVPLPELQTPAX

SEQ ID NO: 13312 - protein, 38 aa, Artificial Sequence
  GFR-binding peptide
  MOD_RES (1)..(35)..(36): Xaa is C or S
  MOD_RES (13)..(14)..(15)..(16)..(17): Xaa is A or G
  MOD_RES (18)..(19)..(20)..(21): Xaa is A or G or is absent
XARVVMNNSLQEXXXXXXXXXYYVVPLPELQTPAXXPK

SEQ ID NO: 13313 - protein, 35 aa, Artificial Sequence; identical to SEQ ID NO: 5885
  GFR-binding peptide
  MOD_RES (2)..(34)..(35): Xaa is C or S

SEQ ID NO: 13314 - protein, 38 aa, Artificial Sequence
  GFR-binding peptide
  MOD_RES (1)..(3)..(35)..(36): Xaa is C or S
XGXSEVVMDEYQKYVVNNASDIFLISIPSLRTPVXXTP

SEQ ID NO: 13315 - protein, 34 aa, Artificial Sequence
  GFR-binding peptide
  MOD_RES (2)..(2): Xaa is C or S
  MOD_RES (13)..(14)..(15)..(16)..(17): Xaa is A or G
  MOD_RES (18)..(19)..(20)..(21): Xaa is A or G or is absent
KXSRVIMNSLQEXXXXXXXXXYYVIPLPELAQPV

SEQ ID NO: 13316 - protein, 39 aa, Artificial Sequence; identical to SEQ ID NO: 5888
  GFR-binding peptide
  MOD_RES (1)..(34)..(35): Xaa is C or S
  MOD_RES (12)..(13)..(14)..(15)..(16): Xaa is A or G
  MOD_RES (17)..(18)..(19)..(20): Xaa is A or G or is absent

SEQ ID NO: 13317 - protein, 41 aa, Artificial Sequence
  GFR-binding peptide
  MOD_RES (1)..(3)..(37)..(38): Xaa is C or S
  MOD_RES (15)..(16)..(17)..(18)..(19): Xaa is A or G
  MOD_RES (20)..(21)..(22)..(23): Xaa is A or G or is absent
XGXSEVVMDRYKKLXXXXXXXXXFYLISIANLRTPVXXTPP

SEQ ID NO: 13318 - protein, 32 aa, Artificial Sequence
  GFR-binding peptide
  MOD_RES (32)..(32): Xaa is C or S
SRVVMNEYQKYIVNSSDDIFLVSIPSLKTPAX

SEQ ID NO: 13319 - protein, 33 aa, Artificial Sequence; identical to SEQ ID NO: 5894
  GFR-binding peptide
  MOD_RES (1)..(1): Xaa is C or S
  MOD_RES (12)..(13)..(14)..(15)..(16): Xaa is A or G
  MOD_RES (17)..(18)..(19)..(20): Xaa is A or G or is absent

SEQ ID NO: 13320 - protein, 40 aa, Artificial Sequence
  GFR-binding peptide
  MOD_RES (1)..(3)..(35)..(36): Xaa is C or S
XGXSRVVMNNSLQEIVNSSDDYYLVTLPELKTPAXXPKPV

SEQ ID NO: 13321 - protein, 38 aa, Artificial Sequence
  GFR-binding peptide
  MOD_RES (2)..(36)..(37): Xaa is C or S
  MOD_RES (14)..(15)..(16)..(17)..(18): Xaa is A or G
  MOD_RES (19)..(20)..(21)..(22): Xaa is A or G or is absent
GXSEVVMDQYNKLXXXXXXXXXLYLISIASLRTPVXXT

SEQ ID NO: 13322 - protein, 38 aa, Artificial Sequence
  GFR-binding peptide
  MOD_RES (34)..(35): Xaa is C or S
  MOD_RES (12)..(13)..(14)..(15)..(16): Xaa is A or G
  MOD_RES (17)..(18)..(19)..(20): Xaa is A or G or is absent
ARVVMNNSLQEXXXXXXXXXYYLVTLPELQTPAXXPKP

SEQ ID NO: 13323 - protein, 35 aa, Artificial Sequence
  GFR-binding peptide
  MOD_RES (2)..(4): Xaa is C or S
HXGXSRVVMNNSLQEIVNSSDDYYLVTLPELKTPA

SEQ ID NO: 13324 - protein, 36 aa, Artificial Sequence; identical to SEQ ID NO: 5899
  GFR-binding peptide
  MOD_RES (1)..(3): Xaa is C or S
  MOD_RES (15)..(16)..(17)..(18)..(19): Xaa is A or G
  MOD_RES (20)..(21)..(22)..(23): Xaa is A or G or is absent

SEQ ID NO: 13325 - protein, 42 aa, Artificial Sequence; identical to SEQ ID NO: 5901
  GFR-binding peptide
  MOD_RES (2)..(4)..(38)..(39): Xaa is C or S
  MOD_RES (16)..(17)..(18)..(19)..(20): Xaa is A or G
  MOD_RES (21)..(22)..(23)..(24): Xaa is A or G or is absent

SEQ ID NO: 13326 - protein, 33 aa, Artificial Sequence
  GFR-binding peptide
  MOD_RES (1)..(33): Xaa is C or S
XGEVVMDNSLQEVVKENEDYYLMTLPELETPVX

SEQ ID NO: 13327 - protein, 32 aa, Artificial Sequence; identical to SEQ ID NO: 5902
  GFR-binding peptide
  MOD_RES (2)..(2): Xaa is C or S

SEQ ID NO: 13328 - protein, 34 aa, Artificial Sequence
  GFR-binding peptide
  MOD_RES (32)..(33): Xaa is C or S
ARVVMNNSLQEIVNSSDDYYLVTLPELQTPAXXP

SEQ ID NO: 13329 - protein, 36 aa, Artificial Sequence
  GFR-binding peptide
  MOD_RES (1)..(3): Xaa is C or S
  MOD_RES (15)..(16)..(17)..(18)..(19): Xaa is A or G
  MOD_RES (20)..(21)..(22)..(23): Xaa is A or G or is absent
XGXGEVVMDNSLQEXXXXXXXXXYYLMTLPELETPV

SEQ ID NO: 13330 - protein, 39 aa, Artificial Sequence; identical to SEQ ID NO: 5904
  GFR-binding peptide
  MOD_RES (2)..(4)..(37)..(38): Xaa is C or S
  MOD_RES (15)..(16)..(17)..(18)..(19): Xaa is A or G
  MOD_RES (20)..(21)..(22)..(23): Xaa is A or G or is absent

SEQ ID NO: 13331 - protein, 38 aa, Artificial Sequence; identical to SEQ ID NO: 5905
  GFR-binding peptide
  MOD_RES (1)..(35)..(36): Xaa is C or S
  MOD_RES (13)..(14)..(15)..(16)..(17): Xaa is A or G
  MOD_RES (18)..(19)..(20)..(21): Xaa is A or G or is absent

SEQ ID NO: 13332 - protein, 33 aa, Artificial Sequence
  GFR-binding peptide
  MOD_RES (12)..(13)..(14)..(15)..(16): Xaa is A or G
  MOD_RES (17)..(18)..(19)..(20): Xaa is A or G or is absent
SEVVMDEYQKYXXXXXXXXXIFLISIPSLRTPV

SEQ ID NO: 13333 - protein, 39 aa, Artificial Sequence; identical to SEQ ID NO: 5907
  GFR-binding peptide
  MOD_RES (2)..(4)..(36)..(37): Xaa is C or S

SEQ ID NO: 13334 - protein, 38 aa, Artificial Sequence; identical to SEQ ID NO: 5909
  GFR-binding peptide
  MOD_RES (2)..(36): Xaa is C or S
  MOD_RES (14)..(15)..(16)..(17)..(18): Xaa is A or G
  MOD_RES (19)..(20)..(21)..(22): Xaa is A or G or is absent

SEQ ID NO: 13335 - protein, 35 aa, Artificial Sequence
  GFR-binding peptide
  MOD_RES (32)..(33): Xaa is C or S
ARVVMNNSLQEIVNSSDDYYVVPLPELQTPAXXPK

SEQ ID NO: 13336 - protein, 39 aa, Artificial Sequence
  GFR-binding peptide
  MOD_RES (33)..(34): Xaa is C or S
  MOD_RES (11)..(12)..(13)..(14)..(15): Xaa is A or G
  MOD_RES (16)..(17)..(18)..(19): Xaa is A or G or is absent
SKVIMEYQKYXXXXXXXXXIFLISIPSLDQSVXXPSASA

SEQ ID NO: 13337 - protein, 40 aa, Artificial Sequence; identical to SEQ ID NO: 5912
  GFR-binding peptide
  MOD_RES (2)..(4)..(38)..(39): Xaa is C or S
  MOD_RES (16)..(17)..(18)..(19)..(20): Xaa is A or G
  MOD_RES (21)..(22)..(23)..(24): Xaa is A or G or is absent

SEQ ID NO: 13338 - protein, 36 aa, Artificial Sequence
  GFR-binding peptide
  MOD_RES (31)..(32): Xaa is C or S
EVVMDEYQKYVVNNASDIFLISIPSLRTPVXXTPPT

SEQ ID NO: 13339 - protein, 38 aa, Artificial Sequence; identical to SEQ ID NO: 5916
  GFR-binding peptide
  MOD_RES (32)..(33): Xaa is C or S

SEQ ID NO: 13340 - protein, 39 aa, Artificial Sequence; identical to SEQ ID NO: 5917
  GFR-binding peptide
  MOD_RES (34)..(35): Xaa is C or S
  MOD_RES (12)..(13)..(14)..(15)..(16): Xaa is A or G
  MOD_RES (17)..(18)..(19)..(20): Xaa is A or G or is absent

SEQ ID NO: 13341 - protein, 34 aa, Artificial Sequence
  GFR-binding peptide
  MOD_RES (1)..(3): Xaa is C or S
XGXSEVVMDEYQKYVVNNASDIFLISIPSLRTPV

SEQ ID NO: 13342 - protein, 37 aa, Artificial Sequence
  GFR-binding peptide
  MOD_RES (2)..(4)..(35)..(36): Xaa is C or S
SXKXSRVIMEYQKYVKPKRGVIFLISIPSLAQPVXXP

SEQ ID NO: 13343 - protein, 38 aa, Artificial Sequence
  GFR-binding peptide
  MOD_RES (33)..(34): Xaa is C or S
  MOD_RES (11)..(12)..(13)..(14)..(15): Xaa is A or G
  MOD_RES (16)..(17)..(18)..(19): Xaa is A or G or is absent
SKVIMEYQKYXXXXXXXXXIFLISIPSLDQSVXXPSAS

SEQ ID NO: 13344 - protein, 33 aa, Artificial Sequence
  GFR-binding peptide
  MOD_RES (32)..(33): Xaa is C or S
GEVVMDNSLQEVVKENEDYYVMPLPELETPVXX

SEQ ID NO: 13345 - protein, 40 aa, Artificial Sequence; identical to SEQ ID NO: 5918
  GFR-binding peptide
  MOD_RES (2)..(4)..(35)..(36): Xaa is C or S

SEQ ID NO: 13346 - protein, 37 aa, Artificial Sequence; identical to SEQ ID NO: 5919
  GFR-binding peptide
  MOD_RES (2)..(34): Xaa is C or S

SEQ ID NO: 13347 - protein, 40 aa, Artificial Sequence; identical to SEQ ID NO: 5921
  GFR-binding peptide
  MOD_RES (2)..(36)..(37): Xaa is C or S
  MOD_RES (14)..(15)..(16)..(17)..(18): Xaa is A or G
  MOD_RES (19)..(20)..(21)..(22): Xaa is A or G or is absent

SEQ ID NO: 13348 - protein, 38 aa, Artificial Sequence
  GFR-binding peptide
  MOD_RES (32)..(33): Xaa is C or S
GEVVMEEYQKYVVKDYEDIFLMSIPSLETPVXXAKPIS

SEQ ID NO: 13349 - protein, 37 aa, Artificial Sequence
  GFR-binding peptide
  MOD_RES (31)..(32): Xaa is C or S
RVVMNEYQKYIVNSSDDIFLVSIPSLKTPAXXPKPVY

SEQ ID NO: 13350 - protein, 41 aa, Artificial Sequence
  GFR-binding peptide
  MOD_RES (2)..(4)..(38)..(39): Xaa is C or S
  MOD_RES (16)..(17)..(18)..(19)..(20): Xaa is A or G
  MOD_RES (21)..(22)..(23)..(24): Xaa is A or G or is absent
RXGXGEVVMDNSLQEXXXXXXXXXYYVMPLPELETPVXXAK

SEQ ID NO: 13351 - protein, 39 aa, Artificial Sequence; identical to SEQ ID NO: 5926
  GFR-binding peptide
  MOD_RES (2)..(33)..(34): Xaa is C or S

SEQ ID NO: 13352 - protein, 36 aa, Artificial Sequence
  GFR-binding peptide
  MOD_RES (33)..(33): Xaa is C or S
  MOD_RES (11)..(12)..(13)..(14)..(15): Xaa is A or G
  MOD_RES (16)..(17)..(18)..(19): Xaa is A or G or is absent
RVVMNNSLQEXXXXXXXXXYYLVTLPELKTPAXTPK

SEQ ID NO: 13353 - protein, 37 aa, Artificial Sequence
  GFR-binding peptide
  MOD_RES (1)..(33): Xaa is C or S
XSRVVMNEYQKYIVNSSDDIFLVSIPSLKTPAXTPKT

SEQ ID NO: 13354 - protein, 41 aa, Artificial Sequence; identical to SEQ ID NO: 5929
  GFR-binding peptide
  MOD_RES (2)..(4)..(37)..(38): Xaa is C or S
  MOD_RES (15)..(16)..(17)..(18)..(19): Xaa is A or G
  MOD_RES (20)..(21)..(22)..(23): Xaa is A or G or is absent

SEQ ID NO: 13355 - protein, 35 aa, Artificial Sequence
  GFR-binding peptide
  MOD_RES (31)..(31): Xaa is C or S
RVVMNNSLQEIVNSSDDYYLVTLPELKTPAXTPKT

SEQ ID NO: 13356 - protein, 36 aa, Artificial Sequence
  GFR-binding peptide
  MOD_RES (1)..(33)..(34): Xaa is C or S
XSEVVMDRYKKLVVNNASDFYLISIANLRTPVXXTP

SEQ ID NO: 13357 - protein, 41 aa, Artificial Sequence; identical to SEQ ID NO: 5932
  GFR-binding peptide
  MOD_RES (2)..(4)..(36)..(37): Xaa is C or S

SEQ ID NO: 13358 - protein, 38 aa, Artificial Sequence
  GFR-binding peptide
  MOD_RES (2)..(4)..(38): Xaa is C or S
  MOD_RES (16)..(17)..(18)..(19)..(20): Xaa is A or G
  MOD_RES (21)..(22)..(23)..(24): Xaa is A or G or is absent
HXGXARVVMNNSLQEXXXXXXXXXYYLVTLPELQTPAX

SEQ ID NO: 13359 - protein, 42 aa, Artificial Sequence
  GFR-binding peptide
  MOD_RES (1)..(3)..(37): Xaa is C or S
  MOD_RES (15)..(16)..(17)..(18)..(19): Xaa is A or G
  MOD_RES (20)..(21)..(22)..(23): Xaa is A or G or is absent
XGXSRVVMNEYQKYXXXXXXXXXIFLVSIPSLKTPAXTPKTV

SEQ ID NO: 13360 - protein, 40 aa, Artificial Sequence
  GFR-binding peptide
  MOD_RES (2)..(36)..(37): Xaa is C or S
  MOD_RES (14)..(15)..(16)..(17)..(18): Xaa is A or G
  MOD_RES (19)..(20)..(21)..(22): Xaa is A or G or is absent
GXSEVVMDNSLQEXXXXXXXXXYYVIPLPELRTPVXXTPP

SEQ ID NO: 13361 - protein, 39 aa, Artificial Sequence
  GFR-binding peptide
  MOD_RES (2)..(34)..(35): Xaa is C or S
GXSEVVMDNSLQEVVNNASDYYVIPLPELRTPVXXTPPT

SEQ ID NO: 13362 - protein, 35 aa, Artificial Sequence
  GFR-binding peptide
  MOD_RES (2)..(34)..(35): Xaa is C or S
GXSRVVMNEYQKYIVNSSDDIFLVSIPSLKTPAXX

SEQ ID NO: 13363 - protein, 34 aa, Artificial Sequence
  GFR-binding peptide
  MOD_RES (1)..(1): Xaa is C or S
  MOD_RES (13)..(14)..(15)..(16)..(17): Xaa is A or G
  MOD_RES (18)..(19)..(20)..(21): Xaa is A or G or is absent
XARVVMNNSLQEXXXXXXXXXYYLVTLPELQTPA

SEQ ID NO: 13364 - protein, 34 aa, Artificial Sequence; identical to SEQ ID NO: 5940
  GFR-binding peptide
  MOD_RES (1)..(3)..(34): Xaa is C or S

SEQ ID NO: 13365 - protein, 33 aa, Artificial Sequence; identical to SEQ ID NO: 5941
  GFR-binding peptide
  MOD_RES (12)..(13)..(14)..(15)..(16): Xaa is A or G
  MOD_RES (17)..(18)..(19)..(20): Xaa is A or G or is absent

SEQ ID NO: 13366 - protein, 36 aa, Artificial Sequence
  GFR-binding peptide
  MOD_RES (1)..(3): Xaa is C or S
  MOD_RES (15)..(16)..(17)..(18)..(19): Xaa is A or G
  MOD_RES (20)..(21)..(22)..(23): Xaa is A or G or is absent
XGXGEVVMDNSLQEXXXXXXXXXYYVMPLPELETPV

SEQ ID NO: 13367 - protein, 37 aa, Artificial Sequence
  GFR-binding peptide
  MOD_RES (32)..(33): Xaa is C or S
SEVVMDQYNKLVVNNASDLYLISIASLRTPVXXTPPT

SEQ ID NO: 13368 - protein, 37 aa, Artificial Sequence
  GFR-binding peptide
  MOD_RES (31)..(32): Xaa is C or S
EVVMDNSLQEVVKENEDYYLMTLPELETPVXXAKPIK

SEQ ID NO: 13369 - protein, 40 aa, Artificial Sequence; identical to SEQ ID NO: 5943
  GFR-binding peptide
  MOD_RES (2)..(35)..(36): Xaa is C or S
  MOD_RES (13)..(14)..(15)..(16)..(17): Xaa is A or G
  MOD_RES (18)..(19)..(20)..(21): Xaa is A or G or is absent

SEQ ID NO: 13370 - protein, 33 aa, Artificial Sequence
  GFR-binding peptide
  MOD_RES (1)..(33): Xaa is C or S
XSEVVMDNSLQEVVNNASDYYVIPLPELRTPVX

SEQ ID NO: 13371 - protein, 33 aa, Artificial Sequence
  GFR-binding peptide
  MOD_RES (1)..(32)..(33): Xaa is C or S
XSKVIMNSLQEIKPTKGIYYVIPLPELDQSVXX

SEQ ID NO: 13372 - protein, 43 aa, Artificial Sequence
  GFR-binding peptide
  MOD_RES (2)..(4)..(38)..(39): Xaa is C or S
  MOD_RES (16)..(17)..(18)..(19)..(20): Xaa is A or G
  MOD_RES (21)..(22)..(23)..(24): Xaa is A or G or is absent
RXGXSEVVMDRYKKLXXXXXXXXXFYLISIANLRTPVXXTPPT

SEQ ID NO: 13373 - protein, 41 aa, Artificial Sequence
  GFR-binding peptide
  MOD_RES (1)..(3)..(35)..(36): Xaa is C or S
XGXGEVVMENSLQEVVKDYEDYYVMPLPELETPVXXAKPIS

SEQ ID NO: 13374 - protein, 40 aa, Artificial Sequence
  GFR-binding peptide
  MOD_RES (2)..(4)..(37)..(38): Xaa is C or S
  MOD_RES (15)..(16)..(17)..(18)..(19): Xaa is A or G
  MOD_RES (20)..(21)..(22)..(23): Xaa is A or G or is absent
SXKXSKVVMNSLQEXXXXXXXXXYYVIPLPELDQPVXXPS

SEQ ID NO: 13375 - protein, 34 aa, Artificial Sequence
  GFR-binding peptide
  MOD_RES (1)..(3)..(34): Xaa is C or S
XKXSKVVMNSLQEVKPTRGVYYLITLPELDQPVX

SEQ ID NO: 13376 - protein, 36 aa, Artificial Sequence
  GFR-binding peptide
  MOD_RES (1)..(3)..(35)..(36): Xaa is C or S
XGXGEVVMDNSLQEVVKENEDYYLMTLPELETPVXX

SEQ ID NO: 13377 - protein, 36 aa, Artificial Sequence; identical to SEQ ID NO: 5956
  GFR-binding peptide
  MOD_RES (2)..(4): Xaa is C or S
  MOD_RES (15)..(16)..(17)..(18)..(19): Xaa is A or G
  MOD_RES (20)..(21)..(22)..(23): Xaa is A or G or is absent

SEQ ID NO: 13378 - protein, 31 aa, Artificial Sequence
  GFR-binding peptide
  MOD_RES (31)..(31): Xaa is C or S
EVVMDQYNKLVVNNASDLYLISIASLRTPVX

SEQ ID NO: 13379 - protein, 35 aa, Artificial Sequence
  GFR-binding peptide
  MOD_RES (1)..(34)..(35): Xaa is C or S
  MOD_RES (12)..(13)..(14)..(15)..(16): Xaa is A or G
  MOD_RES (17)..(18)..(19)..(20): Xaa is A or G or is absent
XSKVIMEYQKYXXXXXXXXXIFLISIPSLDQSVXX

SEQ ID NO: 13380 - protein, 35 aa, Artificial Sequence
  GFR-binding peptide
  MOD_RES (1)..(34)..(35): Xaa is C or S
  MOD_RES (12)..(13)..(14)..(15)..(16): Xaa is A or G
  MOD_RES (17)..(18)..(19)..(20): Xaa is A or G or is absent
XSKVVMNSLQEXXXXXXXXXYYLITLPELDQPVXX

SEQ ID NO: 13381 - protein, 33 aa, Artificial Sequence; identical to SEQ ID NO: 5957
  GFR-binding peptide
  MOD_RES (33)..(33): Xaa is C or S
  MOD_RES (11)..(12)..(13)..(14)..(15): Xaa is A or G
  MOD_RES (16)..(17)..(18)..(19): Xaa is A or G or is absent

SEQ ID NO: 13382 - protein, 38 aa, Artificial Sequence
  GFR-binding peptide
  MOD_RES (1)..(33)..(34): Xaa is C or S
XSEVVMDRYKKLVVNNASDFYLISIANLRTPVXXTPPT

SEQ ID NO: 13383 - protein, 38 aa, Artificial Sequence
  GFR-binding peptide
  MOD_RES (1)..(3)..(35)..(36): Xaa is C or S
XGXARVVMNEYQKYIVNSSDDIFLVSIPSLQTPAXXPK

SEQ ID NO: 13384 - protein, 38 aa, Artificial Sequence
  GFR-binding peptide
  MOD_RES (1)..(33): Xaa is C or S
XSRVVMNNSLQEIVNSSDDYYVVPLPELKTPAXTPKTV

SEQ ID NO: 13385 - protein, 34 aa, Artificial Sequence
  GFR-binding peptide
  MOD_RES (1)..(1): Xaa is C or S
  MOD_RES (13)..(14)..(15)..(16)..(17): Xaa is A or G
  MOD_RES (18)..(19)..(20)..(21): Xaa is A or G or is absent
XGEVVMENSLQEXXXXXXXXXYYLMTLPELETPV

SEQ ID NO: 13386 - protein, 36 aa, Artificial Sequence
  GFR-binding peptide
  MOD_RES (33)..(34): Xaa is C or S
  MOD_RES (11)..(12)..(13)..(14)..(15): Xaa is A or G
  MOD_RES (16)..(17)..(18)..(19): Xaa is A or G or is absent
SRVIMNSLQEXXXXXXXXXYYVIPLPELAQPVXXPA

SEQ ID NO: 13387 - protein, 40 aa, Artificial Sequence
  GFR-binding peptide
  MOD_RES (1)..(3)..(37)..(38): Xaa is C or S
  MOD_RES (15)..(16)..(17)..(18)..(19): Xaa is A or G
  MOD_RES (20)..(21)..(22)..(23): Xaa is A or G or is absent
XGXSRVVMNNSLQEXXXXXXXXXYYLVTLPELKTPAXXPK

SEQ ID NO: 13388 - protein, 41 aa, Artificial Sequence; identical to SEQ ID NO: 5962
  GFR-binding peptide
  MOD_RES (2)..(4)..(38)..(39): Xaa is C or S
  MOD_RES (16)..(17)..(18)..(19)..(20): Xaa is A or G
  MOD_RES (21)..(22)..(23)..(24): Xaa is A or G or is absent

SEQ ID NO: 13389 - protein, 38 aa, Artificial Sequence; identical to SEQ ID NO: 5964
  GFR-binding peptide
  MOD_RES (2)..(34)..(35): Xaa is C or S

SEQ ID NO: 13390 - protein, 37 aa, Artificial Sequence
  GFR-binding peptide
  MOD_RES (32)..(33): Xaa is C or S
SRVVMNNSLQEIVNSSDDYYVVPLPELKTPAXXPKPV

SEQ ID NO: 13391 - protein, 41 aa, Artificial Sequence; identical to SEQ ID NO: 5967
  GFR-binding peptide
  MOD_RES (1)..(35)..(36): Xaa is C or S
  MOD_RES (13)..(14)..(15)..(16)..(17): Xaa is A or G
  MOD_RES (18)..(19)..(20)..(21): Xaa is A or G or is absent

SEQ ID NO: 13392 - protein, 37 aa, Artificial Sequence; identical to SEQ ID NO: 5968
  GFR-binding peptide
  MOD_RES (33)..(34): Xaa is C or S
  MOD_RES (11)..(12)..(13)..(14)..(15): Xaa is A or G
  MOD_RES (16)..(17)..(18)..(19): Xaa is A or G or is absent

SEQ ID NO: 13393 - protein, 32 aa, Artificial Sequence
  GFR-binding peptide
  MOD_RES (11)..(12)..(13)..(14)..(15): Xaa is A or G
  MOD_RES (16)..(17)..(18)..(19): Xaa is A or G or is absent
RVVMNNSLQEXXXXXXXXXYYVVPLPELQTPA

SEQ ID NO: 13394 - protein, 34 aa, Artificial Sequence; identical to SEQ ID NO: 5969
  GFR-binding peptide
  MOD_RES (2)..(34): Xaa is C or S

SEQ ID NO: 13395 - protein, 35 aa, Artificial Sequence; identical to SEQ ID NO: 5974
  GFR-binding peptide
  MOD_RES (2)..(34)..(35): Xaa is C or S

SEQ ID NO: 13396 - protein, 43 aa, Artificial Sequence
  GFR-binding peptide
  MOD_RES (1)..(3)..(37)..(38): Xaa is C or S
  MOD_RES (15)..(16)..(17)..(18)..(19): Xaa is A or G
  MOD_RES (20)..(21)..(22)..(23): Xaa is A or G or is absent
XGXSRVVMNNSLQEXXXXXXXXXYYLVTLPELKTPAXXPKPVY

SEQ ID NO: 13397 - protein, 36 aa, Artificial Sequence; identical to SEQ ID NO: 5979
  GFR-binding peptide
  MOD_RES (1)..(3)..(36): Xaa is C or S
  MOD_RES (14)..(15)..(16)..(17)..(18): Xaa is A or G
  MOD_RES (19)..(20)..(21)..(22): Xaa is A or G or is absent

SEQ ID NO: 13398 - protein, 32 aa, Artificial Sequence; identical to SEQ ID NO: 5983
  GFR-binding peptide
  MOD_RES (11)..(12)..(13)..(14)..(15): Xaa is A or G
  MOD_RES (16)..(17)..(18)..(19): Xaa is A or G or is absent

SEQ ID NO: 13399 - protein, 39 aa, Artificial Sequence
  GFR-binding peptide
  MOD_RES (1)..(35)..(36): Xaa is C or S
  MOD_RES (13)..(14)..(15)..(16)..(17): Xaa is A or G
  MOD_RES (18)..(19)..(20)..(21): Xaa is A or G or is absent
XGEVVMDNSLQEXXXXXXXXXYYVMPLPELETPVXXAKP

SEQ ID NO: 13400 - protein, 38 aa, Artificial Sequence
  GFR-binding peptide
  MOD_RES (2)..(4)..(35)..(36): Xaa is C or S
SXKXSRVIMNSLQEVKPKRGVYYLITLPELAQPVXXPA

SEQ ID NO: 13401 - protein, 36 aa, Artificial Sequence; identical to SEQ ID NO: 5984
  GFR-binding peptide
  MOD_RES (31)..(31): Xaa is C or S

SEQ ID NO: 13402 - protein, 42 aa, Artificial Sequence; identical to SEQ ID NO: 5986
  GFR-binding peptide
  MOD_RES (1)..(3)..(36)..(37): Xaa is C or S
  MOD_RES (14)..(15)..(16)..(17)..(18): Xaa is A or G
  MOD_RES (19)..(20)..(21)..(22): Xaa is A or G or is absent

SEQ ID NO: 13403 - protein, 40 aa, Artificial Sequence; identical to SEQ ID NO: 5989
  GFR-binding peptide
  MOD_RES (1)..(34)..(35): Xaa is C or S
  MOD_RES (12)..(13)..(14)..(15)..(16): Xaa is A or G
  MOD_RES (17)..(18)..(19)..(20): Xaa is A or G or is absent

SEQ ID NO: 13404 - protein, 38 aa, Artificial Sequence
  GFR-binding peptide
  MOD_RES (1)..(3)..(36)..(37): Xaa is C or S
  MOD_RES (14)..(15)..(16)..(17)..(18): Xaa is A or G
  MOD_RES (19)..(20)..(21)..(22): Xaa is A or G or is absent
XKXSRVIMEYQKYXXXXXXXXXIFLISIPSLAQPVXXP

SEQ ID NO: 13405 - protein, 35 aa, Artificial Sequence; identical to SEQ ID NO: 5992
  GFR-binding peptide
  MOD_RES (31)..(32): Xaa is C or S

SEQ ID NO: 13406 - protein, 33 aa, Artificial Sequence
  GFR-binding peptide
  MOD_RES (33)..(33): Xaa is C or S
  MOD_RES (11)..(12)..(13)..(14)..(15): Xaa is A or G
  MOD_RES (16)..(17)..(18)..(19): Xaa is A or G or is absent
RVVMNNSLQEXXXXXXXXXYYLVTLPELQTPAX

SEQ ID NO: 13407 - protein, 37 aa, Artificial Sequence
  GFR-binding peptide
  MOD_RES (1)..(3)..(35)..(36): Xaa is C or S
XGXGEVVMEEYQKYVVKDYEDIFLMSIPSLETPVXXA

SEQ ID NO: 13408 - protein, 41 aa, Artificial Sequence
  GFR-binding peptide
  MOD_RES (2)..(36)..(37): Xaa is C or S
  MOD_RES (14)..(15)..(16)..(17)..(18): Xaa is A or G
  MOD_RES (19)..(20)..(21)..(22): Xaa is A or G or is absent
GXSEVVMDEYQKYXXXXXXXXXIFLISIPSLRTPVXXTPPT

SEQ ID NO: 13409 - protein, 37 aa, Artificial Sequence
  GFR-binding peptide
  MOD_RES (1)..(3)..(35)..(36): Xaa is C or S
XGXGEVVMENSLQEVVKDYEDYYLMTLPELETPVXXA

SEQ ID NO: 13410 - protein, 33 aa, Artificial Sequence
  GFR-binding peptide
  MOD_RES (2)..(2): Xaa is C or S
GXGEVVMENSLQEVVKDYEDYYVMPLPELETPV

SEQ ID NO: 13411 - protein, 41 aa, Artificial Sequence
  GFR-binding peptide
  MOD_RES (2)..(4)..(36)..(37): Xaa is C or S
RXGXSEVVMDEYQKYVVNNASDIFLISIPSLRTPVXXTPPT

SEQ ID NO: 13412 - protein, 32 aa, Artificial Sequence
  GFR-binding peptide
  MOD_RES (11)..(12)..(13)..(14)..(15): Xaa is A or G
  MOD_RES (16)..(17)..(18)..(19): Xaa is A or G or is absent
SKVVMNSLQEXXXXXXXXXYYLITLPELDQPV

SEQ ID NO: 13413 - protein, 37 aa, Artificial Sequence
  GFR-binding peptide
  MOD_RES (2)..(36)..(37): Xaa is C or S
  MOD_RES (14)..(15)..(16)..(17)..(18): Xaa is A or G
  MOD_RES (19)..(20)..(21)..(22): Xaa is A or G or is absent
GXSEVVMDQYNKLXXXXXXXXXLYLISIASLRTPVXX

SEQ ID NO: 13414 - protein, 42 aa, Artificial Sequence; identical to SEQ ID NO: 6005
  GFR-binding peptide
  MOD_RES (2)..(36)..(37): Xaa is C or S
  MOD_RES (14)..(15)..(16)..(17)..(18): Xaa is A or G
  MOD_RES (19)..(20)..(21)..(22): Xaa is A or G or is absent

SEQ ID NO: 13415 - protein, 37 aa, Artificial Sequence
  GFR-binding peptide
  MOD_RES (2)..(34): Xaa is C or S
GXSRVVMNNSLQEIVNSSDDYYLVTLPELKTPAXTPK

SEQ ID NO: 13416 - protein, 36 aa, Artificial Sequence
  GFR-binding peptide
  MOD_RES (34)..(35): Xaa is C or S
  MOD_RES (12)..(13)..(14)..(15)..(16): Xaa is A or G
  MOD_RES (17)..(18)..(19)..(20): Xaa is A or G or is absent
SRVVMNEYQKYXXXXXXXXXIFLVSIPSLKTPAXXP

SEQ ID NO: 13417 - protein, 35 aa, Artificial Sequence
  GFR-binding peptide
  MOD_RES (34)..(35): Xaa is C or S
  MOD_RES (12)..(13)..(14)..(15)..(16): Xaa is A or G
  MOD_RES (17)..(18)..(19)..(20): Xaa is A or G or is absent
SEVVMDRYKKLXXXXXXXXXFYLISIANLRTPVXX

SEQ ID NO: 13418 - protein, 35 aa, Artificial Sequence; identical to SEQ ID NO: 6008
  GFR-binding peptide
  MOD_RES (1)..(3)..(35): Xaa is C or S

SEQ ID NO: 13419 - protein, 38 aa, Artificial Sequence
  GFR-binding peptide
  MOD_RES (1)..(33)..(34): Xaa is C or S
XSRVVMNEYQKYIVNSSDDIFLVSIPSLKTPAXXPKPV

SEQ ID NO: 13420 - protein, 40 aa, Artificial Sequence; identical to SEQ ID NO: 6014
  GFR-binding peptide
  MOD_RES (1)..(3)..(36)..(37): Xaa is C or S
  MOD_RES (14)..(15)..(16)..(17)..(18): Xaa is A or G
  MOD_RES (19)..(20)..(21)..(22): Xaa is A or G or is absent

SEQ ID NO: 13421 - protein, 42 aa, Artificial Sequence
  GFR-binding peptide
  MOD_RES (2)..(4)..(36): Xaa is C or S
HXGXSRVVMNNSLQEIVNSSDDYYVVPLPELKTPAXTPKTVH

SEQ ID NO: 13422 - protein, 39 aa, Artificial Sequence
  GFR-binding peptide
  MOD_RES (2)..(4)..(38)..(39): Xaa is C or S
  MOD_RES (16)..(17)..(18)..(19)..(20): Xaa is A or G
  MOD_RES (21)..(22)..(23)..(24): Xaa is A or G or is absent
HXGXSRVVMNNSLQEXXXXXXXXXYYVVPLPELKTPAXX

SEQ ID NO: 13423 - protein, 41 aa, Artificial Sequence
  GFR-binding peptide
  MOD_RES (1)..(35)..(36): Xaa is C or S
  MOD_RES (13)..(14)..(15)..(16)..(17): Xaa is A or G
  MOD_RES (18)..(19)..(20)..(21): Xaa is A or G or is absent
XGEVVMENSLQEXXXXXXXXXYYLMTLPELETPVXXAKPIS

SEQ ID NO: 13424 - protein, 37 aa, Artificial Sequence; identical to SEQ ID NO: 6016
  GFR-binding peptide
  MOD_RES (1)..(35)..(36): Xaa is C or S
  MOD_RES (13)..(14)..(15)..(16)..(17): Xaa is A or G
  MOD_RES (18)..(19)..(20)..(21): Xaa is A or G or is absent

SEQ ID NO: 13425 - protein, 38 aa, Artificial Sequence
  GFR-binding peptide
  MOD_RES (33)..(34): Xaa is C or S
  MOD_RES (11)..(12)..(13)..(14)..(15): Xaa is A or G
  MOD_RES (16)..(17)..(18)..(19): Xaa is A or G or is absent
EVVMDNSLQEXXXXXXXXXYYLITLPELRTPVXXTPPT

SEQ ID NO: 13426 - protein, 39 aa, Artificial Sequence
  GFR-binding peptide
  MOD_RES (1)..(35)..(36): Xaa is C or S
  MOD_RES (13)..(14)..(15)..(16)..(17): Xaa is A or G
  MOD_RES (18)..(19)..(20)..(21): Xaa is A or G or is absent
XSEVVMDRYKKLXXXXXXXXXFYLISIANLRTPVXXTPP

SEQ ID NO: 13427 - protein, 39 aa, Artificial Sequence
  GFR-binding peptide
  MOD_RES (1)..(3)..(35)..(36): Xaa is C or S
XGXSRVVMNEYQKYIVNSSDDIFLVSIPSLKTPAXXPKP

SEQ ID NO: 13428 - protein, 37 aa, Artificial Sequence
  GFR-binding peptide
  MOD_RES (31)..(32): Xaa is C or S
EVVMDQYNKLVVNNASDLYLISIASLRTPVXXTPPTS

SEQ ID NO: 13429 - protein, 38 aa, Artificial Sequence
  GFR-binding peptide
  MOD_RES (1)..(3)..(35)..(36): Xaa is C or S
XGXARVVMNNSLQEIVNSSDDYYLVTLPELQTPAXXPK

SEQ ID NO: 13430 - protein, 42 aa, Artificial Sequence
  GFR-binding peptide
  MOD_RES (2)..(4)..(38)..(39): Xaa is C or S
  MOD_RES (16)..(17)..(18)..(19)..(20): Xaa is A or G
  MOD_RES (21)..(22)..(23)..(24): Xaa is A or G or is absent
RXGXSEVVMDQYNKLXXXXXXXXXLYLISIASLRTPVXXTPP

SEQ ID NO: 13431 - protein, 33 aa, Artificial Sequence
  GFR-binding peptide
  MOD_RES (33)..(33): Xaa is C or S
  MOD_RES (11)..(12)..(13)..(14)..(15): Xaa is A or G
  MOD_RES (16)..(17)..(18)..(19): Xaa is A or G or is absent
SKVVMNSLQEXXXXXXXXXYYVIPLPELDQPVX

SEQ ID NO: 13432 - protein, 37 aa, Artificial Sequence
  GFR-binding peptide
  MOD_RES (1)..(3)..(35)..(36): Xaa is C or S
XGXGEVVMDEYQKYVVKENEDIFLMSIPSLETPVXXA

SEQ ID NO: 13433 - protein, 41 aa, Artificial Sequence
  GFR-binding peptide
  MOD_RES (2)..(4)..(38): Xaa is C or S
  MOD_RES (16)..(17)..(18)..(19)..(20): Xaa is A or G
  MOD_RES (21)..(22)..(23)..(24): Xaa is A or G or is absent
HXGXSRVVMNNSLQEXXXXXXXXXYYVVPLPELKTPAXTPK

SEQ ID NO: 13434 - protein, 32 aa, Artificial Sequence; identical to SEQ ID NO: 6028
  GFR-binding peptide
  MOD_RES (1)..(32): Xaa is C or S

SEQ ID NO: 13435 - protein, 36 aa, Artificial Sequence
  GFR-binding peptide
  MOD_RES (1)..(3)..(35)..(36): Xaa is C or S
XGXGEVVMDEYQKYVVKENEDIFLMSIPSLETPVXX

SEQ ID NO: 13436 - protein, 34 aa, Artificial Sequence; identical to SEQ ID NO: 6031
  GFR-binding peptide
  MOD_RES (34)..(34): Xaa is C or S
  MOD_RES (12)..(13)..(14)..(15)..(16): Xaa is A or G
  MOD_RES (17)..(18)..(19)..(20): Xaa is A or G or is absent

SEQ ID NO: 13437 - protein, 36 aa, Artificial Sequence
  GFR-binding peptide
  MOD_RES (1)..(33): Xaa is C or S
XSRVVMNNSLQEIVNSSDDYYLVTLPELKTPAXTPK

SEQ ID NO: 13438 - protein, 36 aa, Artificial Sequence; identical to SEQ ID NO: 6034
  GFR-binding peptide
  MOD_RES (32)..(33): Xaa is C or S

SEQ ID NO: 13439 - protein, 34 aa, Artificial Sequence; identical to SEQ ID NO: 6035
  GFR-binding peptide
  MOD_RES (32)..(33): Xaa is C or S

SEQ ID NO: 13440 - protein, 39 aa, Artificial Sequence
  GFR-binding peptide
  MOD_RES (2)..(36)..(37): Xaa is C or S
  MOD_RES (14)..(15)..(16)..(17)..(18): Xaa is A or G
  MOD_RES (19)..(20)..(21)..(22): Xaa is A or G or is absent
GXSEVVMDNSLQEXXXXXXXXXYYVIPLPELRTPVXXTP

SEQ ID NO: 13441 - protein, 36 aa, Artificial Sequence
  GFR-binding peptide
  MOD_RES (2)..(36): Xaa is C or S
  MOD_RES (14)..(15)..(16)..(17)..(18): Xaa is A or G
  MOD_RES (19)..(20)..(21)..(22): Xaa is A or G or is absent
GXGEVVMENSLQEXXXXXXXXXYYLMTLPELETPVX

SEQ ID NO: 13442 - protein, 37 aa, Artificial Sequence
  GFR-binding peptide
  MOD_RES (31)..(32): Xaa is C or S
SRVIMNSLQEVKPKRGVYYLITLPELAQPVXXPAASA

SEQ ID NO: 13443 - protein, 39 aa, Artificial Sequence; identical to SEQ ID NO: 6040
  GFR-binding peptide
  MOD_RES (1)..(3)..(37)..(38): Xaa is C or S
  MOD_RES (15)..(16)..(17)..(18)..(19): Xaa is A or G
  MOD_RES (20)..(21)..(22)..(23): Xaa is A or G or is absent

SEQ ID NO: 13444 - protein, 36 aa, Artificial Sequence
  GFR-binding peptide
  MOD_RES (31)..(32): Xaa is C or S
SKVVMNSLQEVKPTRGVYYLITLPELDQPVXXPSAS

SEQ ID NO: 13445 - protein, 41 aa, Artificial Sequence; identical to SEQ ID NO: 6043
  GFR-binding peptide
  MOD_RES (2)..(4)..(36)..(37): Xaa is C or S

SEQ ID NO: 13446 - protein, 32 aa, Artificial Sequence; identical to SEQ ID NO: 6044
  GFR-binding peptide
  MOD_RES (2)..(2): Xaa is C or S

SEQ ID NO: 13447 - protein, 42 aa, Artificial Sequence; identical to SEQ ID NO: 6046
  GFR-binding peptide
  MOD_RES (1)..(3)..(36)..(37): Xaa is C or S
  MOD_RES (14)..(15)..(16)..(17)..(18): Xaa is A or G
  MOD_RES (19)..(20)..(21)..(22): Xaa is A or G or is absent

SEQ ID NO: 13448 - protein, 37 aa, Artificial Sequence
  GFR-binding peptide
  MOD_RES (1)..(33)..(34): Xaa is C or S
XSEVVMDRYKKLVVNNASDFYLISIANLRTPVXXTPP

SEQ ID NO: 13449 - protein, 41 aa, Artificial Sequence
  GFR-binding peptide
  MOD_RES (2)..(4)..(37)..(38): Xaa is C or S
  MOD_RES (15)..(16)..(17)..(18)..(19): Xaa is A or G
  MOD_RES (20)..(21)..(22)..(23): Xaa is A or G or is absent
SXKXSRVIMNSLQEXXXXXXXXXYYLITLPELAQPVXXPAA

SEQ ID NO: 13450 - protein, 37 aa, Artificial Sequence
  GFR-binding peptide
  MOD_RES (1)..(3)..(34)..(35): Xaa is C or S
XKXSKVVMNSLQEVKPTRGVYYVIPLPELDQPVXXPS

SEQ ID NO: 13451 - protein, 34 aa, Artificial Sequence
  GFR-binding peptide
  MOD_RES (2)..(4): Xaa is C or S
SXKXSKVIMNSLQEIKPTKGIYYVIPLPELDQSV

SEQ ID NO: 13452 - protein, 41 aa, Artificial Sequence; identical to SEQ ID NO: 6049
  GFR-binding peptide
  MOD_RES (1)..(35)..(36): Xaa is C or S
  MOD_RES (13)..(14)..(15)..(16)..(17): Xaa is A or G
  MOD_RES (18)..(19)..(20)..(21): Xaa is A or G or is absent

SEQ ID NO: 13453 - protein, 37 aa, Artificial Sequence; identical to SEQ ID NO: 6050
  GFR-binding peptide
  MOD_RES (2)..(4)..(36)..(37): Xaa is C or S

SEQ ID NO: 13454 - protein, 42 aa, Artificial Sequence
  GFR-binding peptide
  MOD_RES (1)..(3)..(37)..(38): Xaa is C or S
  MOD_RES (15)..(16)..(17)..(18)..(19): Xaa is A or G
  MOD_RES (20)..(21)..(22)..(23): Xaa is A or G or is absent
XGXGEVVMDEYQKYXXXXXXXXXIFLMSIPSLETPVXXAKPI

SEQ ID NO: 13455 - protein, 37 aa, Artificial Sequence
  GFR-binding peptide
  MOD_RES (1)..(3)..(37): Xaa is C or S
  MOD_RES (15)..(16)..(17)..(18)..(19): Xaa is A or G
  MOD_RES (20)..(21)..(22)..(23): Xaa is A or G or is absent
XGXARVVMNNSLQEXXXXXXXXXYYLVTLPELQTPAX

SEQ ID NO: 13456 - protein, 33 aa, Artificial Sequence
  GFR-binding peptide
  MOD_RES (1)..(1): Xaa is C or S
  MOD_RES (12)..(13)..(14)..(15)..(16): Xaa is A or G
  MOD_RES (17)..(18)..(19)..(20): Xaa is A or G or is absent
XSRVIMNSLQEXXXXXXXXXYYLITLPELAQPV

SEQ ID NO: 13457 - protein, 40 aa, Artificial Sequence
  GFR-binding peptide
  MOD_RES (1)..(3)..(37)..(38): Xaa is C or S
  MOD_RES (15)..(16)..(17)..(18)..(19): Xaa is A or G
  MOD_RES (20)..(21)..(22)..(23): Xaa is A or G or is absent
XGXGEVVMDEYQKYXXXXXXXXXIFLMSIPSLETPVXXAK

SEQ ID NO: 13458 - protein, 41 aa, Artificial Sequence
  GFR-binding peptide
  MOD_RES (2)..(4)..(38)..(39): Xaa is C or S
  MOD_RES (16)..(17)..(18)..(19)..(20): Xaa is A or G
  MOD_RES (21)..(22)..(23)..(24): Xaa is A or G or is absent
RXGXGEVVMDEYQKYXXXXXXXXXIFLMSIPSLETPVXXAK

SEQ ID NO: 13459 - protein, 35 aa, Artificial Sequence
  GFR-binding peptide
  MOD_RES (1)..(35): Xaa is C or S
  MOD_RES (13)..(14)..(15)..(16)..(17): Xaa is A or G
  MOD_RES (18)..(19)..(20)..(21): Xaa is A or G or is absent
XGEVVMENSLQEXXXXXXXXXYYLMTLPELETPVX

SEQ ID NO: 13460 - protein, 36 aa, Artificial Sequence; identical to SEQ ID NO: 6055
  GFR-binding peptide
  MOD_RES (1)..(33)..(34): Xaa is C or S

SEQ ID NO: 13461 - protein, 35 aa, Artificial Sequence
  GFR-binding peptide
  MOD_RES (2)..(34)..(35): Xaa is C or S
GXGEVVMDNSLQEVVKENEDYYVMPLPELETPVXX

SEQ ID NO: 13462 - protein, 35 aa, Artificial Sequence
  GFR-binding peptide
  MOD_RES (2)..(35): Xaa is C or S
  MOD_RES (13)..(14)..(15)..(16)..(17): Xaa is A or G
  MOD_RES (18)..(19)..(20)..(21): Xaa is A or G or is absent
KXSRVIMNSLQEXXXXXXXXXYYLITLPELAQPVX

SEQ ID NO: 13463 - protein, 35 aa, Artificial Sequence
  GFR-binding peptide
  MOD_RES (1)..(35): Xaa is C or S
  MOD_RES (13)..(14)..(15)..(16)..(17): Xaa is A or G
  MOD_RES (18)..(19)..(20)..(21): Xaa is A or G or is absent
XARVVMNNSLQEXXXXXXXXXYYLVTLPELQTPAX

SEQ ID NO: 13464 - protein, 43 aa, Artificial Sequence; identical to SEQ ID NO: 6061
  GFR-binding peptide
  MOD_RES (1)..(3)..(37)..(38): Xaa is C or S
  MOD_RES (15)..(16)..(17)..(18)..(19): Xaa is A or G
  MOD_RES (20)..(21)..(22)..(23): Xaa is A or G or is absent

SEQ ID NO: 13465 - protein, 43 aa, Artificial Sequence; identical to SEQ ID NO: 6063
  GFR-binding peptide
  MOD_RES (2)..(4)..(38)..(39): Xaa is C or S
  MOD_RES (16)..(17)..(18)..(19)..(20): Xaa is A or G
  MOD_RES (21)..(22)..(23)..(24): Xaa is A or G or is absent

SEQ ID NO: 13466 - protein, 34 aa, Artificial Sequence
  GFR-binding peptide
  MOD_RES (32)..(33): Xaa is C or S
GEVVMENSLQEVVKDYEDYYLMTLPELETPVXXA

SEQ ID NO: 13467 - protein, 42 aa, Artificial Sequence
  GFR-binding peptide
  MOD_RES (1)..(3)..(37)..(38): Xaa is C or S
  MOD_RES (15)..(16)..(17)..(18)..(19): Xaa is A or G
  MOD_RES (20)..(21)..(22)..(23): Xaa is A or G or is absent
XGXARVVMNEYQKYXXXXXXXXXIFLVSIPSLQTPAXXPKPV

SEQ ID NO: 13468 - protein, 31 aa, Artificial Sequence
  GFR-binding peptide
GEVVMEEYQKYVVKDYEDIFLMSIPSLETPV

SEQ ID NO: 13469 - protein, 37 aa, Artificial Sequence; identical to SEQ ID NO: 6068
  GFR-binding peptide
  MOD_RES (2)..(4): Xaa is C or S
  MOD_RES (16)..(17)..(18)..(19)..(20): Xaa is A or G
  MOD_RES (21)..(22)..(23)..(24): Xaa is A or G or is absent

SEQ ID NO: 13470 - protein, 39 aa, Artificial Sequence; identical to SEQ ID NO: 6071
  GFR-binding peptide
  MOD_RES (2)..(4)..(37)..(38): Xaa is C or S
  MOD_RES (15)..(16)..(17)..(18)..(19): Xaa is A or G
  MOD_RES (20)..(21)..(22)..(23): Xaa is A or G or is absent

SEQ ID NO: 13471 - protein, 43 aa, Artificial Sequence
  GFR-binding peptide
  MOD_RES (1)..(3)..(37): Xaa is C or S
  MOD_RES (15)..(16)..(17)..(18)..(19): Xaa is A or G
  MOD_RES (20)..(21)..(22)..(23): Xaa is A or G or is absent
XGXSRVVMNEYQKYXXXXXXXXXIFLVSIPSLKTPAXTPKTVH

SEQ ID NO: 13472 - protein, 38 aa, Artificial Sequence
  GFR-binding peptide
  MOD_RES (1)..(3)..(36)..(37): Xaa is C or S
  MOD_RES (14)..(15)..(16)..(17)..(18): Xaa is A or G
  MOD_RES (19)..(20)..(21)..(22): Xaa is A or G or is absent
XKXSKVVMNSLQEXXXXXXXXXYYLITLPELDQPVXXP

SEQ ID NO: 13473 - protein, 35 aa, Artificial Sequence; identical to SEQ ID NO: 6074
  GFR-binding peptide
  MOD_RES (33)..(34): Xaa is C or S
  MOD_RES (11)..(12)..(13)..(14)..(15): Xaa is A or G
  MOD_RES (16)..(17)..(18)..(19): Xaa is A or G or is absent

SEQ ID NO: 13474 - protein, 37 aa, Artificial Sequence
  GFR-binding peptide
  MOD_RES (33)..(34): Xaa is C or S
  MOD_RES (11)..(12)..(13)..(14)..(15): Xaa is A or G
  MOD_RES (16)..(17)..(18)..(19): Xaa is A or G or is absent
EVVMDNSLQEXXXXXXXXXYYLITLPELRTPVXXTPP

SEQ ID NO: 13475 - protein, 36 aa, Artificial Sequence; identical to SEQ ID NO: 6075
  GFR-binding peptide
  MOD_RES (34)..(34): Xaa is C or S
  MOD_RES (12)..(13)..(14)..(15)..(16): Xaa is A or G
  MOD_RES (17)..(18)..(19)..(20): Xaa is A or G or is absent

SEQ ID NO: 13476 - protein, 40 aa, Artificial Sequence
  GFR-binding peptide
  MOD_RES (1)..(3)..(37)..(38): Xaa is C or S
  MOD_RES (15)..(16)..(17)..(18)..(19): Xaa is A or G
  MOD_RES (20)..(21)..(22)..(23): Xaa is A or G or is absent
XGXSEVVMDNSLQEXXXXXXXXXYYLITLPELRTPVXXTP

SEQ ID NO: 13477 - protein, 33 aa, Artificial Sequence
  GFR-binding peptide
  MOD_RES (1)..(3): Xaa is C or S
XKXSKVVMNSLQEVKPTRGVYYLITLPELDQPV

SEQ ID NO: 13478 - protein, 33 aa, Artificial Sequence
  GFR-binding peptide
  MOD_RES (12)..(13)..(14)..(15)..(16): Xaa is A or G
  MOD_RES (17)..(18)..(19)..(20): Xaa is A or G or is absent
SEVVMDNSLQEXXXXXXXXXYYVIPLPELRTPV

SEQ ID NO: 13479 - protein, 38 aa, Artificial Sequence
  GFR-binding peptide
  MOD_RES (32)..(32): Xaa is C or S
SRVVMNNSLQEIVNSSDDYYLVTLPELKTPAXTPKTVH

SEQ ID NO: 13480 - protein, 35 aa, Artificial Sequence
  GFR-binding peptide
  MOD_RES (2)..(34)..(35): Xaa is C or S
GXARVVMNNSLQEIVNSSDDYYLVTLPELQTPAXX

SEQ ID NO: 13481 - protein, 32 aa, Artificial Sequence
  GFR-binding peptide
  MOD_RES (32)..(32): Xaa is C or S
SRVVMNNSLQEIVNSSDDYYVVPLPELKTPAX

SEQ ID NO: 13482 - protein, 36 aa, Artificial Sequence
  GFR-binding peptide
  MOD_RES (1)..(3)..(36): Xaa is C or S
  MOD_RES (14)..(15)..(16)..(17)..(18): Xaa is A or G
  MOD_RES (19)..(20)..(21)..(22): Xaa is A or G or is absent
XKXSRVIMNSLQEXXXXXXXXXYYVIPLPELAQPVX

SEQ ID NO: 13483 - protein, 39 aa, Artificial Sequence
  GFR-binding peptide
  MOD_RES (2)..(35)..(36): Xaa is C or S
  MOD_RES (13)..(14)..(15)..(16)..(17): Xaa is A or G
  MOD_RES (18)..(19)..(20)..(21): Xaa is A or G or is absent
KXSKVVMNSLQEXXXXXXXXXYYVIPLPELDQPVXXPSA

SEQ ID NO: 13484 - protein, 36 aa, Artificial Sequence; identical to SEQ ID NO: 6078
  GFR-binding peptide
  MOD_RES (31)..(32): Xaa is C or S

SEQ ID NO: 13485 - protein, 39 aa, Artificial Sequence
  GFR-binding peptide
  MOD_RES (33)..(34): Xaa is C or S
  MOD_RES (11)..(12)..(13)..(14)..(15): Xaa is A or G
  MOD_RES (16)..(17)..(18)..(19): Xaa is A or G or is absent
RVVMNNSLQEXXXXXXXXXYYVVPLPELQTPAXXPKPVT

SEQ ID NO: 13486 - protein, 38 aa, Artificial Sequence; identical to SEQ ID NO: 6079
  GFR-binding peptide
  MOD_RES (2)..(34)..(35): Xaa is C or S

SEQ ID NO: 13487 - protein, 38 aa, Artificial Sequence
  GFR-binding peptide
  MOD_RES (1)..(3)..(37)..(38): Xaa is C or S
  MOD_RES (15)..(16)..(17)..(18)..(19): Xaa is A or G
  MOD_RES (20)..(21)..(22)..(23): Xaa is A or G or is absent
XGXSEVVMDRYKKLXXXXXXXXXFYLISIANLRTPVXX

SEQ ID NO: 13488 - protein, 34 aa, Artificial Sequence; identical to SEQ ID NO: 6080
  GFR-binding peptide
  MOD_RES (2)..(33)..(34): Xaa is C or S

SEQ ID NO: 13489 - protein, 39 aa, Artificial Sequence
  GFR-binding peptide
  MOD_RES (1)..(33)..(34): Xaa is C or S
XSRVVMNNSLQEIVNSSDDYYLVTLPELKTPAXXPKPVY

SEQ ID NO: 13490 - protein, 40 aa, Artificial Sequence; identical to SEQ ID NO: 6082
  GFR-binding peptide
  MOD_RES (2)..(4)..(36): Xaa is C or S

SEQ ID NO: 13491 - protein, 34 aa, Artificial Sequence
  GFR-binding peptide
  MOD_RES (1)..(1): Xaa is C or S
  MOD_RES (13)..(14)..(15)..(16)..(17): Xaa is A or G
  MOD_RES (18)..(19)..(20)..(21): Xaa is A or G or is absent
XSEVVMDEYQKYXXXXXXXXXIFLISIPSLRTPV

SEQ ID NO: 13492 - protein, 42 aa, Artificial Sequence
  GFR-binding peptide
  MOD_RES (2)..(36)..(37): Xaa is C or S
  MOD_RES (14)..(15)..(16)..(17)..(18): Xaa is A or G
  MOD_RES (19)..(20)..(21)..(22): Xaa is A or G or is absent
GXGEVVMDNSLQEXXXXXXXXXYYVMPLPELETPVXXAKPIK

SEQ ID NO: 13493 - protein, 40 aa, Artificial Sequence
  GFR-binding peptide
  MOD_RES (1)..(34)..(35): Xaa is C or S
  MOD_RES (12)..(13)..(14)..(15)..(16): Xaa is A or G
  MOD_RES (17)..(18)..(19)..(20): Xaa is A or G or is absent
XSKVVMNSLQEXXXXXXXXXYYLITLPELDQPVXXPSASA

SEQ ID NO: 13494 - protein, 41 aa, Artificial Sequence; identical to SEQ ID NO: 6085
  GFR-binding peptide
  MOD_RES (2)..(35)..(36): Xaa is C or S
  MOD_RES (13)..(14)..(15)..(16)..(17): Xaa is A or G
  MOD_RES (18)..(19)..(20)..(21): Xaa is A or G or is absent

SEQ ID NO: 13495 - protein, 34 aa, Artificial Sequence
  GFR-binding peptide
  MOD_RES (1)..(33)..(34): Xaa is C or S
XSEVVMDNSLQEVVNNASDYYVIPLPELRTPVXX

SEQ ID NO: 13496 - protein, 37 aa, Artificial Sequence; identical to SEQ ID NO: 6086
  GFR-binding peptide
  MOD_RES (33)..(34): Xaa is C or S
  MOD_RES (11)..(12)..(13)..(14)..(15): Xaa is A or G
  MOD_RES (16)..(17)..(18)..(19): Xaa is A or G or is absent

SEQ ID NO: 13497 - protein, 35 aa, Artificial Sequence; identical to SEQ ID NO: 6087
  GFR-binding peptide
  MOD_RES (1)..(34)..(35): Xaa is C or S
  MOD_RES (12)..(13)..(14)..(15)..(16): Xaa is A or G
  MOD_RES (17)..(18)..(19)..(20): Xaa is A or G or is absent

SEQ ID NO: 13498 - protein, 38 aa, Artificial Sequence
  GFR-binding peptide
  MOD_RES (2)..(4)..(35)..(36): Xaa is C or S
SXKXSRVIMEYQKYVKPKRGVIFLISIPSLAQPVXXPA

SEQ ID NO: 13499 - protein, 40 aa, Artificial Sequence
  GFR-binding peptide
  MOD_RES (1)..(35)..(36): Xaa is C or S
  MOD_RES (13)..(14)..(15)..(16)..(17): Xaa is A or G
  MOD_RES (18)..(19)..(20)..(21): Xaa is A or G or is absent
XSEVVMDNSLQEXXXXXXXXXYYVIPLPELRTPVXXTPPT

SEQ ID NO: 13500 - protein, 37 aa, Artificial Sequence
  GFR-binding peptide
  MOD_RES (1)..(3)..(36)..(37): Xaa is C or S
  MOD_RES (14)..(15)..(16)..(17)..(18): Xaa is A or G
  MOD_RES (19)..(20)..(21)..(22): Xaa is A or G or is absent
XKXSKVIMNSLQEXXXXXXXXXYYVIPLPELDQSVXX

SEQ ID NO: 13501 - protein, 39 aa, Artificial Sequence
  GFR-binding peptide
  MOD_RES (1)..(33)..(34): Xaa is C or S
XGEVVMEEYQKYVVKDYEDIFLMSIPSLETPVXXAKPIS

SEQ ID NO: 13502 - protein, 36 aa, Artificial Sequence
  GFR-binding peptide
  MOD_RES (1)..(3)..(35)..(36): Xaa is C or S
XGXGEVVMENSLQEVVKDYEDYYLMTLPELETPVXX

SEQ ID NO: 13503 - protein, 36 aa, Artificial Sequence
  GFR-binding peptide
  MOD_RES (33)..(34): Xaa is C or S
  MOD_RES (11)..(12)..(13)..(14)..(15): Xaa is A or G
  MOD_RES (16)..(17)..(18)..(19): Xaa is A or G or is absent
EVVMENSLQEXXXXXXXXXYYVMPLPELETPVXXAK

SEQ ID NO: 13504 - protein, 35 aa, Artificial Sequence
  GFR-binding peptide
  MOD_RES (1)..(33)..(34): Xaa is C or S
XSEVVMDEYQKYVVNNASDIFLISIPSLRTPVXXT

SEQ ID NO: 13505 - protein, 42 aa, Artificial Sequence
  GFR-binding peptide
  MOD_RES (2)..(4)..(37)..(38): Xaa is C or S
  MOD_RES (15)..(16)..(17)..(18)..(19): Xaa is A or G
  MOD_RES (20)..(21)..(22)..(23): Xaa is A or G or is absent
SXKXSRVIMEYQKYXXXXXXXXXIFLISIPSLAQPVXXPAAS

SEQ ID NO: 13506 - protein, 30 aa, Artificial Sequence; identical to SEQ ID NO: 6091
  GFR-binding peptide

SEQ ID NO: 13507 - protein, 31 aa, Artificial Sequence; identical to SEQ ID NO: 6093
  GFR-binding peptide
  MOD_RES (31)..(31): Xaa is C or S

SEQ ID NO: 13508 - protein, 39 aa, Artificial Sequence
  GFR-binding peptide
  MOD_RES (2)..(35)..(36): Xaa is C or S
  MOD_RES (13)..(14)..(15)..(16)..(17): Xaa is A or G
  MOD_RES (18)..(19)..(20)..(21): Xaa is A or G or is absent
KXSKVIMEYQKYXXXXXXXXXIFLISIPSLDQSVXXPSA

SEQ ID NO: 13509 - protein, 37 aa, Artificial Sequence
  GFR-binding peptide
  MOD_RES (32)..(33): Xaa is C or S
SEVVMDRYKKLVVNNASDFYLISIANLRTPVXXTPPT

SEQ ID NO: 13510 - protein, 34 aa, Artificial Sequence
  GFR-binding peptide
  MOD_RES (1)..(3): Xaa is C or S
XGXARVVMNNSLQEIVNSSDDYYVVPLPELQTPA

SEQ ID NO: 13511 - protein, 42 aa, Artificial Sequence
  GFR-binding peptide
  MOD_RES (2)..(4)..(38)..(39): Xaa is C or S
  MOD_RES (16)..(17)..(18)..(19)..(20): Xaa is A or G
  MOD_RES (21)..(22)..(23)..(24): Xaa is A or G or is absent
HXGXARVVMNEYQKYXXXXXXXXXIFLVSIPSLQTPAXXPKP

SEQ ID NO: 13512 - protein, 37 aa, Artificial Sequence
  GFR-binding peptide
  MOD_RES (2)..(4)..(36): Xaa is C or S
HXGXSRVVMNNSLQEIVNSSDDYYVVPLPELKTPAXT

SEQ ID NO: 13513 - protein, 40 aa, Artificial Sequence
  GFR-binding peptide
  MOD_RES (1)..(3)..(37)..(38): Xaa is C or S
  MOD_RES (15)..(16)..(17)..(18)..(19): Xaa is A or G
  MOD_RES (20)..(21)..(22)..(23): Xaa is A or G or is absent
XGXSEVVMDNSLQEXXXXXXXXXYYVIPLPELRTPVXXTP

SEQ ID NO: 13514 - protein, 33 aa, Artificial Sequence
  GFR-binding peptide
  MOD_RES (1)..(32)..(33): Xaa is C or S
XSKVVMNSLQEVKPTRGVYYLITLPELDQPVXX

SEQ ID NO: 13515 - protein, 37 aa, Artificial Sequence
  GFR-binding peptide
  MOD_RES (2)..(34): Xaa is C or S
GXSRVVMNEYQKYIVNSSDDIFLVSIPSLKTPAXTPK

SEQ ID NO: 13516 - protein, 33 aa, Artificial Sequence; identical to SEQ ID NO: 6105
  GFR-binding peptide
  MOD_RES (1)..(3): Xaa is C or S

SEQ ID NO: 13517 - protein, 39 aa, Artificial Sequence
  GFR-binding peptide
  MOD_RES (2)..(33)..(34): Xaa is C or S
KXSRVIMEYQKYVKPKRGVIFLISIPSLAQPVXXPAASA

SEQ ID NO: 13518 - protein, 39 aa, Artificial Sequence; identical to SEQ ID NO: 6107
  GFR-binding peptide
  MOD_RES (33)..(34): Xaa is C or S
  MOD_RES (11)..(12)..(13)..(14)..(15): Xaa is A or G
  MOD_RES (16)..(17)..(18)..(19): Xaa is A or G or is absent

SEQ ID NO: 13519 - protein, 35 aa, Artificial Sequence; identical to SEQ ID NO: 6108
  GFR-binding peptide
  MOD_RES (1)..(3)..(35): Xaa is C or S

SEQ ID NO: 13520 - protein, 40 aa, Artificial Sequence; identical to SEQ ID NO: 6109
  GFR-binding peptide
  MOD_RES (2)..(35)..(36): Xaa is C or S
  MOD_RES (13)..(14)..(15)..(16)..(17): Xaa is A or G
  MOD_RES (18)..(19)..(20)..(21): Xaa is A or G or is absent

SEQ ID NO: 13521 - protein, 43 aa, Artificial Sequence
  GFR-binding peptide
  MOD_RES (2)..(4)..(37)..(38): Xaa is C or S
  MOD_RES (15)..(16)..(17)..(18)..(19): Xaa is A or G
  MOD_RES (20)..(21)..(22)..(23): Xaa is A or G or is absent
SXKXSKVIMEYQKYXXXXXXXXXIFLISIPSLDQSVXXPSASA

SEQ ID NO: 13522 - protein, 35 aa, Artificial Sequence
  GFR-binding peptide
  MOD_RES (2)..(2): Xaa is C or S
  MOD_RES (14)..(15)..(16)..(17)..(18): Xaa is A or G
  MOD_RES (19)..(20)..(21)..(22): Xaa is A or G or is absent
GXGEVVMEEYQKYXXXXXXXXXIFLMSIPSLETPV

SEQ ID NO: 13523 - protein, 37 aa, Artificial Sequence
  GFR-binding peptide
  MOD_RES (1)..(3)..(37): Xaa is C or S
  MOD_RES (15)..(16)..(17)..(18)..(19): Xaa is A or G
  MOD_RES (20)..(21)..(22)..(23): Xaa is A or G or is absent
XGXSEVVMDQYNKLXXXXXXXXXLYLISIASLRTPVX

SEQ ID NO: 13524 - protein, 35 aa, Artificial Sequence
  GFR-binding peptide
  MOD_RES (31)..(32): Xaa is C or S
SRVIMNSLQEVKPKRGVYYVIPLPELAQPVXXPAA

SEQ ID NO: 13525 - protein, 35 aa, Artificial Sequence; identical to SEQ ID NO: 6113
  GFR-binding peptide
  MOD_RES (31)..(32): Xaa is C or S

SEQ ID NO: 13526 - protein, 37 aa, Artificial Sequence
  GFR-binding peptide
  MOD_RES (2)..(4)..(36)..(37): Xaa is C or S
HXGXARVVMNNSLQEIVNSSDDYYLVTLPELQTPAXX

SEQ ID NO: 13527 - protein, 34 aa, Artificial Sequence
  GFR-binding peptide
  MOD_RES (33)..(34): Xaa is C or S
  MOD_RES (11)..(12)..(13)..(14)..(15): Xaa is A or G
  MOD_RES (16)..(17)..(18)..(19): Xaa is A or G or is absent
RVVMNEYQKYXXXXXXXXXIFLVSIPSLKTPAXX

SEQ ID NO: 13528 - protein, 34 aa, Artificial Sequence; identical to SEQ ID NO: 6120
  GFR-binding peptide
  MOD_RES (32)..(33): Xaa is C or S

SEQ ID NO: 13529 - protein, 35 aa, Artificial Sequence
  GFR-binding peptide
  MOD_RES (2)..(34)..(35): Xaa is C or S
GXSRVVMNNSLQEIVNSSDDYYLVTLPELKTPAXX

SEQ ID NO: 13530 - protein, 38 aa, Artificial Sequence
  GFR-binding peptide
  MOD_RES (1)..(3)..(35)..(36): Xaa is C or S
XGXSRVVMNEYQKYIVNSSDDIFLVSIPSLKTPAXXPK

SEQ ID NO: 13531 - protein, 35 aa, Artificial Sequence; identical to SEQ ID NO: 6122
  GFR-binding peptide
  MOD_RES (2)..(35): Xaa is C or S
  MOD_RES (13)..(14)..(15)..(16)..(17): Xaa is A or G
  MOD_RES (18)..(19)..(20)..(21): Xaa is A or G or is absent

SEQ ID NO: 13532 - protein, 36 aa, Artificial Sequence
  GFR-binding peptide
  MOD_RES (33)..(33): Xaa is C or S
  MOD_RES (11)..(12)..(13)..(14)..(15): Xaa is A or G
  MOD_RES (16)..(17)..(18)..(19): Xaa is A or G or is absent
RVVMNNSLQEXXXXXXXXXYYVVPLPELKTPAXTPK

SEQ ID NO: 13533 - protein, 37 aa, Artificial Sequence; identical to SEQ ID NO: 6123
  GFR-binding peptide
  MOD_RES (1)..(33)..(34): Xaa is C or S

SEQ ID NO: 13534 - protein, 42 aa, Artificial Sequence
  GFR-binding peptide
  MOD_RES (2)..(36)..(37): Xaa is C or S
  MOD_RES (14)..(15)..(16)..(17)..(18): Xaa is A or G
  MOD_RES (19)..(20)..(21)..(22): Xaa is A or G or is absent
GXARVVMNEYQKYXXXXXXXXXIFLVSIPSLQTPAXXPKPVT

SEQ ID NO: 13535 - protein, 34 aa, Artificial Sequence; identical to SEQ ID NO: 6127
  GFR-binding peptide
  MOD_RES (33)..(34): Xaa is C or S
  MOD_RES (11)..(12)..(13)..(14)..(15): Xaa is A or G
  MOD_RES (16)..(17)..(18)..(19): Xaa is A or G or is absent

SEQ ID NO: 13536 - protein, 30 aa, Artificial Sequence; identical to SEQ ID NO: 6132
  GFR-binding peptide

SEQ ID NO: 13537 - protein, 40 aa, Artificial Sequence; identical to SEQ ID NO: 6134
  GFR-binding peptide
  MOD_RES (2)..(34)..(35): Xaa is C or S

SEQ ID NO: 13538 - protein, 36 aa, Artificial Sequence
  GFR-binding peptide
  MOD_RES (34)..(35): Xaa is C or S
  MOD_RES (12)..(13)..(14)..(15)..(16): Xaa is A or G
  MOD_RES (17)..(18)..(19)..(20): Xaa is A or G or is absent
SRVVMNNSLQEXXXXXXXXXYYVVPLPELKTPAXXP

SEQ ID NO: 13539 - protein, 43 aa, Artificial Sequence
  GFR-binding peptide
  MOD_RES (2)..(4)..(38)..(39): Xaa is C or S
  MOD_RES (16)..(17)..(18)..(19)..(20): Xaa is A or G
  MOD_RES (21)..(22)..(23)..(24): Xaa is A or G or is absent
RXGXGEVVMDEYQKYXXXXXXXXXIFLMSIPSLETPVXXAKPI

SEQ ID NO: 13540 - protein, 37 aa, Artificial Sequence; identical to SEQ ID NO: 6136
  GFR-binding peptide
  MOD_RES (1)..(3)..(34)..(35): Xaa is C or S

SEQ ID NO: 13541 - protein, 37 aa, Artificial Sequence
  GFR-binding peptide
  MOD_RES (1)..(35): Xaa is C or S
  MOD_RES (13)..(14)..(15)..(16)..(17): Xaa is A or G
  MOD_RES (18)..(19)..(20)..(21): Xaa is A or G or is absent
XSRVVMNNSLQEXXXXXXXXXYYVVPLPELKTPAXTP

SEQ ID NO: 13542 - protein, 41 aa, Artificial Sequence
  GFR-binding peptide
  MOD_RES (2)..(4)..(37)..(38): Xaa is C or S
  MOD_RES (15)..(16)..(17)..(18)..(19): Xaa is A or G
  MOD_RES (20)..(21)..(22)..(23): Xaa is A or G or is absent
SXKXSRVIMNSLQEXXXXXXXXXYYVIPLPELAQPVXXPAA

SEQ ID NO: 13543 - protein, 40 aa, Artificial Sequence; identical to SEQ ID NO: 6138
  GFR-binding peptide
  MOD_RES (1)..(35)..(36): Xaa is C or S
  MOD_RES (13)..(14)..(15)..(16)..(17): Xaa is A or G
  MOD_RES (18)..(19)..(20)..(21): Xaa is A or G or is absent

SEQ ID NO: 13544 - protein, 36 aa, Artificial Sequence
  GFR-binding peptide
  MOD_RES (1)..(35)..(36): Xaa is C or S
  MOD_RES (13)..(14)..(15)..(16)..(17): Xaa is A or G
  MOD_RES (18)..(19)..(20)..(21): Xaa is A or G or is absent
XSEVVMDNSLQEXXXXXXXXXYYLITLPELRTPVXX

SEQ ID NO: 13545 - protein, 37 aa, Artificial Sequence
  GFR-binding peptide
  MOD_RES (33)..(34): Xaa is C or S
  MOD_RES (11)..(12)..(13)..(14)..(15): Xaa is A or G
  MOD_RES (16)..(17)..(18)..(19): Xaa is A or G or is absent
EVVMDNSLQEXXXXXXXXXYYVIPLPELRTPVXXTPP

SEQ ID NO: 13546 - protein, 36 aa, Artificial Sequence
  GFR-binding peptide
  MOD_RES (33)..(34): Xaa is C or S
  MOD_RES (11)..(12)..(13)..(14)..(15): Xaa is A or G
  MOD_RES (16)..(17)..(18)..(19): Xaa is A or G or is absent
EVVMENSLQEXXXXXXXXXYYLMTLPELETPVXXAK

SEQ ID NO: 13547 - protein, 40 aa, Artificial Sequence; identical to SEQ ID NO: 6144
  GFR-binding peptide
  MOD_RES (1)..(3)..(36)..(37): Xaa is C or S
  MOD_RES (14)..(15)..(16)..(17)..(18): Xaa is A or G
  MOD_RES (19)..(20)..(21)..(22): Xaa is A or G or is absent

SEQ ID NO: 13548 - protein, 39 aa, Artificial Sequence
  GFR-binding peptide
  MOD_RES (2)..(35)..(36): Xaa is C or S
  MOD_RES (13)..(14)..(15)..(16)..(17): Xaa is A or G
  MOD_RES (18)..(19)..(20)..(21): Xaa is A or G or is absent
KXSRVIMEYQKYXXXXXXXXXIFLISIPSLAQPVXXPAA

SEQ ID NO: 13549 - protein, 37 aa, Artificial Sequence; identical to SEQ ID NO: 6148
  GFR-binding peptide
  MOD_RES (2)..(4): Xaa is C or S
  MOD_RES (16)..(17)..(18)..(19)..(20): Xaa is A or G
  MOD_RES (21)..(22)..(23)..(24): Xaa is A or G or is absent

SEQ ID NO: 13550 - protein, 39 aa, Artificial Sequence
  GFR-binding peptide
  MOD_RES (1)..(33)..(34): Xaa is C or S
XGEVVMDNSLQEVVKENEDYYVMPLPELETPVXXAKPIK

SEQ ID NO: 13551 - protein, 34 aa, Artificial Sequence; identical to SEQ ID NO: 6149
  GFR-binding peptide
  MOD_RES (34)..(34): Xaa is C or S
  MOD_RES (12)..(13)..(14)..(15)..(16): Xaa is A or G
  MOD_RES (17)..(18)..(19)..(20): Xaa is A or G or is absent

SEQ ID NO: 13552 - protein, 36 aa, Artificial Sequence
  GFR-binding peptide
  MOD_RES (2)..(4)..(35)..(36): Xaa is C or S
SXKXSRVIMEYQKYVKPKRGVIFLISIPSLAQPVXX

SEQ ID NO: 13553 - protein, 40 aa, Artificial Sequence; identical to SEQ ID NO: 6151
  GFR-binding peptide
  MOD_RES (2)..(36)..(37): Xaa is C or S
  MOD_RES (14)..(15)..(16)..(17)..(18): Xaa is A or G
  MOD_RES (19)..(20)..(21)..(22): Xaa is A or G or is absent

SEQ ID NO: 13554 - protein, 35 aa, Artificial Sequence; identical to SEQ ID NO: 6157
  GFR-binding peptide
  MOD_RES (2)..(34)..(35): Xaa is C or S

SEQ ID NO: 13555 - protein, 38 aa, Artificial Sequence
  GFR-binding peptide
  MOD_RES (2)..(36)..(37): Xaa is C or S
  MOD_RES (14)..(15)..(16)..(17)..(18): Xaa is A or G
  MOD_RES (19)..(20)..(21)..(22): Xaa is A or G or is absent
GXSRVVMNNSLQEXXXXXXXXXYYLVTLPELKTPAXXP

SEQ ID NO: 13556 - protein, 39 aa, Artificial Sequence; identical to SEQ ID NO: 6158
  GFR-binding peptide
  MOD_RES (2)..(4)..(36)..(37): Xaa is C or S

SEQ ID NO: 13557 - protein, 38 aa, Artificial Sequence; identical to SEQ ID NO: 6159
  GFR-binding peptide
  MOD_RES (2)..(4)..(38): Xaa is C or S
  MOD_RES (16)..(17)..(18)..(19)..(20): Xaa is A or G
  MOD_RES (21)..(22)..(23)..(24): Xaa is A or G or is absent

SEQ ID NO: 13558 - protein, 32 aa, Artificial Sequence
  GFR-binding peptide
  MOD_RES (32)..(32): Xaa is C or S
GEVVMDNSLQEVVKENEDYYVMPLPELETPVX

SEQ ID NO: 13559 - protein, 41 aa, Artificial Sequence
  GFR-binding peptide
  MOD_RES (2)..(4)..(38): Xaa is C or S
  MOD_RES (16)..(17)..(18)..(19)..(20): Xaa is A or G
  MOD_RES (21)..(22)..(23)..(24): Xaa is A or G or is absent
HXGXSRVVMNEYQKYXXXXXXXXXIFLVSIPSLKTPAXTPK

SEQ ID NO: 13560 - protein, 41 aa, Artificial Sequence
  GFR-binding peptide
  MOD_RES (2)..(36)..(37): Xaa is C or S
  MOD_RES (14)..(15)..(16)..(17)..(18): Xaa is A or G
  MOD_RES (19)..(20)..(21)..(22): Xaa is A or G or is absent
GXSEVVMDRYKKLXXXXXXXXXFYLISIANLRTPVXXTPPT

SEQ ID NO: 13561 - protein, 33 aa, Artificial Sequence
  GFR-binding peptide
  MOD_RES (32)..(33): Xaa is C or S
SRVVMNEYQKYIVNSSDDIFLVSIPSLKTPAXX

SEQ ID NO: 13562 - protein, 34 aa, Artificial Sequence
  GFR-binding peptide
  MOD_RES (31)..(32): Xaa is C or S
SKVVMNSLQEVKPTRGVYYVIPLPELDQPVXXPS

SEQ ID NO: 13563 - protein, 37 aa, Artificial Sequence
  GFR-binding peptide
  MOD_RES (2)..(4)..(36)..(37): Xaa is C or S
RXGXGEVVMENSLQEVVKDYEDYYVMPLPELETPVXX

SEQ ID NO: 13564 - protein, 38 aa, Artificial Sequence; identical to SEQ ID NO: 6167
  GFR-binding peptide
  MOD_RES (2)..(34)..(35): Xaa is C or S

SEQ ID NO: 13565 - protein, 37 aa, Artificial Sequence; identical to SEQ ID NO: 6168
  GFR-binding peptide
  MOD_RES (1)..(3)..(34)..(35): Xaa is C or S

SEQ ID NO: 13566 - protein, 35 aa, Artificial Sequence; identical to SEQ ID NO: 6171
  GFR-binding peptide
  MOD_RES (34)..(35): Xaa is C or S
  MOD_RES (12)..(13)..(14)..(15)..(16): Xaa is A or G
  MOD_RES (17)..(18)..(19)..(20): Xaa is A or G or is absent

SEQ ID NO: 13567 - protein, 39 aa, Artificial Sequence
  GFR-binding peptide
  MOD_RES (2)..(4)..(38)..(39): Xaa is C or S
  MOD_RES (16)..(17)..(18)..(19)..(20): Xaa is A or G
  MOD_RES (21)..(22)..(23)..(24): Xaa is A or G or is absent
HXGXSRVVMNEYQKYXXXXXXXXXIFLVSIPSLKTPAXX

SEQ ID NO: 13568 - protein, 35 aa, Artificial Sequence; identical to SEQ ID NO: 6174
  GFR-binding peptide
  MOD_RES (2)..(4)..(35): Xaa is C or S

SEQ ID NO: 13569 - protein, 38 aa, Artificial Sequence
  GFR-binding peptide
  MOD_RES (34)..(34): Xaa is C or S
  MOD_RES (12)..(13)..(14)..(15)..(16): Xaa is A or G
  MOD_RES (17)..(18)..(19)..(20): Xaa is A or G or is absent
SRVVMNNSLQEXXXXXXXXXYYVVPLPELKTPAXTPKT

SEQ ID NO: 13570 - protein, 38 aa, Artificial Sequence
  GFR-binding peptide
  MOD_RES (1)..(3)..(35)..(36): Xaa is C or S
XGXSRVVMNNSLQEIVNSSDDYYLVTLPELKTPAXXPK

SEQ ID NO: 13571 - protein, 33 aa, Artificial Sequence; identical to SEQ ID NO: 6179
  GFR-binding peptide
  MOD_RES (31)..(32): Xaa is C or S

SEQ ID NO: 13572 - protein, 33 aa, Artificial Sequence; identical to SEQ ID NO: 6180
  GFR-binding peptide
  MOD_RES (2)..(33): Xaa is C or S

SEQ ID NO: 13573 - protein, 38 aa, Artificial Sequence; identical to SEQ ID NO: 6181
  GFR-binding peptide
  MOD_RES (6)..(7): Xaa is C or S

SEQ ID NO: 13574 - protein, 43 aa, Artificial Sequence; identical to SEQ ID NO: 6182
  GFR-binding peptide
  MOD_RES (5)..(6)..(40)..(42): Xaa is C or S
  MOD_RES (20)..(21)..(22)..(23)..(24): Xaa is A or G
  MOD_RES (25)..(26)..(27)..(28): Xaa is A or G or is absent

SEQ ID NO: 13575 - protein, 35 aa, Artificial Sequence; identical to SEQ ID NO: 6183
  GFR-binding peptide
  MOD_RES (32)..(34): Xaa is C or S

SEQ ID NO: 13576 - protein, 36 aa, Artificial Sequence
  GFR-binding peptide
  MOD_RES (1)..(33)..(35): Xaa is C or S
XAPTKLEPLPVVYYDDSSNVIEQLSNNMVVRSXGXH

SEQ ID NO: 13577 - protein, 40 aa, Artificial Sequence; identical to SEQ ID NO: 6187
  GFR-binding peptide
  MOD_RES (4)..(5)..(38)..(40): Xaa is C or S
  MOD_RES (19)..(20)..(21)..(22)..(23): Xaa is A or G
  MOD_RES (24)..(25)..(26)..(27): Xaa is A or G or is absent

SEQ ID NO: 13578 - protein, 33 aa, Artificial Sequence; identical to SEQ ID NO: 6189
  GFR-binding peptide
  MOD_RES (32)..(32): Xaa is C or S

SEQ ID NO: 13579 - protein, 38 aa, Artificial Sequence; identical to SEQ ID NO: 6191
  GFR-binding peptide
  MOD_RES (1)..(2)..(36)..(38): Xaa is C or S
  MOD_RES (16)..(17)..(18)..(19)..(20): Xaa is A or G
  MOD_RES (21)..(22)..(23)..(24): Xaa is A or G or is absent

SEQ ID NO: 13580 - protein, 35 aa, Artificial Sequence
  GFR-binding peptide
  MOD_RES (2)..(3)..(35): Xaa is C or S
AXXVPTELEPLPMVYYDEYDKVVEQLSNEMVVEGX

SEQ ID NO: 13581 - protein, 34 aa, Artificial Sequence
  GFR-binding peptide
  MOD_RES (1)..(33): Xaa is C or S
XAPTQLEPLTVLYYDDSSNVIEQLSNNMVVRAXG

SEQ ID NO: 13582 - protein, 40 aa, Artificial Sequence
  GFR-binding peptide
  MOD_RES (6)..(7)..(39): Xaa is C or S
KIPKAXXVPTELEPLPMVYYDENEKVVEQLSNDMVVEGXG

SEQ ID NO: 13583 - protein, 38 aa, Artificial Sequence; identical to SEQ ID NO: 6195
  GFR-binding peptide
  MOD_RES (4)..(5)..(36)..(38): Xaa is C or S

SEQ ID NO: 13584 - protein, 39 aa, Artificial Sequence
  GFR-binding peptide
  MOD_RES (2)..(3)..(37)..(39): Xaa is C or S
  MOD_RES (17)..(18)..(19)..(20)..(21): Xaa is A or G
  MOD_RES (22)..(23)..(24)..(25): Xaa is A or G or is absent
TXXVPTRLSPISILFIXXXXXXXXXYKQYEDMVVESXGX

SEQ ID NO: 13585 - protein, 35 aa, Artificial Sequence
  GFR-binding peptide
  MOD_RES (2)..(3)..(35): Xaa is C or S
PXXAPTKLSPISVLFIDDSSNVIYKQYENMVVRSX

SEQ ID NO: 13586 - protein, 36 aa, Artificial Sequence
  GFR-binding peptide
  MOD_RES (1)..(2)..(36): Xaa is C or S
  MOD_RES (16)..(17)..(18)..(19)..(20): Xaa is A or G
  MOD_RES (21)..(22)..(23)..(24): Xaa is A or G or is absent
XXVPTELEPLPMVYYXXXXXXXXXEQLSNDMVVEGX

SEQ ID NO: 13587 - protein, 41 aa, Artificial Sequence
  GFR-binding peptide
  MOD_RES (4)..(5)..(39)..(41): Xaa is C or S
  MOD_RES (19)..(20)..(21)..(22)..(23): Xaa is A or G
  MOD_RES (24)..(25)..(26)..(27): Xaa is A or G or is absent
PKAXXVPTELEPLPMVYYXXXXXXXXXEQLSNEMVVEGXGX

SEQ ID NO: 13588 - protein, 35 aa, Artificial Sequence; identical to SEQ ID NO: 6199
  GFR-binding peptide
  MOD_RES (4)..(5): Xaa is C or S

SEQ ID NO: 13589 - protein, 42 aa, Artificial Sequence
  GFR-binding peptide
  MOD_RES (6)..(7)..(40)..(42): Xaa is C or S
  MOD_RES (21)..(22)..(23)..(24)..(25): Xaa is A or G
  MOD_RES (26)..(27)..(28)..(29): Xaa is A or G or is absent
ASASPXXVPQDLEPLTILYYXXXXXXXXXEQLSNMVVKSXKX

SEQ ID NO: 13590 - protein, 35 aa, Artificial Sequence
  GFR-binding peptide
  MOD_RES (2)..(3)..(35): Xaa is C or S
TXXVPTRLEPLPIVYYDSANNVVEQLSNDMVVESX

SEQ ID NO: 13591 - protein, 35 aa, Artificial Sequence
  GFR-binding peptide
  MOD_RES (1)..(2)..(34): Xaa is C or S
XXVPTELEPLPMVYYDEYDKVVEQLSNEMVVEGXG

SEQ ID NO: 13592 - protein, 32 aa, Artificial Sequence; identical to SEQ ID NO: 6206
  GFR-binding peptide
  MOD_RES (14)..(15)..(16)..(17)..(18): Xaa is A or G
  MOD_RES (19)..(20)..(21)..(22): Xaa is A or G or is absent

SEQ ID NO: 13593 - protein, 38 aa, Artificial Sequence; identical to SEQ ID NO: 6207
  GFR-binding peptide
  MOD_RES (3)..(4)..(38): Xaa is C or S
  MOD_RES (18)..(19)..(20)..(21)..(22): Xaa is A or G
  MOD_RES (23)..(24)..(25)..(26): Xaa is A or G or is absent

SEQ ID NO: 13594 - protein, 33 aa, Artificial Sequence
  GFR-binding peptide
  MOD_RES (14)..(15)..(16)..(17)..(18): Xaa is A or G
  MOD_RES (19)..(20)..(21)..(22): Xaa is A or G or is absent
VPTELEPLPMVYYXXXXXXXXXEQLSNDMVVEG

SEQ ID NO: 13595 - protein, 39 aa, Artificial Sequence; identical to SEQ ID NO: 6208
  GFR-binding peptide
  MOD_RES (4)..(5)..(37)..(39): Xaa is C or S

SEQ ID NO: 13596 - protein, 35 aa, Artificial Sequence; identical to SEQ ID NO: 6209
  GFR-binding peptide
  MOD_RES (3)..(4)..(35): Xaa is C or S

SEQ ID NO: 13597 - protein, 40 aa, Artificial Sequence; identical to SEQ ID NO: 6211
  GFR-binding peptide
  MOD_RES (4)..(5)..(38)..(40): Xaa is C or S
  MOD_RES (19)..(20)..(21)..(22)..(23): Xaa is A or G
  MOD_RES (24)..(25)..(26)..(27): Xaa is A or G or is absent

SEQ ID NO: 13598 - protein, 39 aa, Artificial Sequence
  GFR-binding peptide
  MOD_RES (3)..(37)..(39): Xaa is C or S
  MOD_RES (17)..(18)..(19)..(20)..(21): Xaa is A or G
  MOD_RES (22)..(23)..(24)..(25): Xaa is A or G or is absent
PTXAPTKLEPLTVLYYXXXXXXXXXEQLSNNMVVRSXGX

SEQ ID NO: 13599 - protein, 34 aa, Artificial Sequence; identical to SEQ ID NO: 6213
  GFR-binding peptide
  MOD_RES (33)..(33): Xaa is C or S
  MOD_RES (14)..(15)..(16)..(17)..(18): Xaa is A or G
  MOD_RES (19)..(20)..(21)..(22): Xaa is A or G or is absent

SEQ ID NO: 13600 - protein, 37 aa, Artificial Sequence
  GFR-binding peptide
  MOD_RES (3)..(4)..(37): Xaa is C or S
  MOD_RES (18)..(19)..(20)..(21)..(22): Xaa is A or G
  MOD_RES (23)..(24)..(25)..(26): Xaa is A or G or is absent
SPXXVSQDLSPISILFIXXXXXXXXXYKQYEMIVKSX

SEQ ID NO: 13601 - protein, 36 aa, Artificial Sequence
  GFR-binding peptide
  MOD_RES (1)..(35): Xaa is C or S
  MOD_RES (15)..(16)..(17)..(18)..(19): Xaa is A or G
  MOD_RES (20)..(21)..(22)..(23): Xaa is A or G or is absent
XVPTRLNAISILYFXXXXXXXXXLKKYRDMVVESXG

SEQ ID NO: 13602 - protein, 37 aa, Artificial Sequence
  GFR-binding peptide
  MOD_RES (5)..(6): Xaa is C or S
IPKAXXVPTELEPLTMLYYDEYDKVVEQLSNEMVVEG

SEQ ID NO: 13603 - protein, 37 aa, Artificial Sequence; identical to SEQ ID NO: 6218
  GFR-binding peptide
  MOD_RES (6)..(7): Xaa is C or S

SEQ ID NO: 13604 - protein, 44 aa, Artificial Sequence; identical to SEQ ID NO: 6219
  GFR-binding peptide
  MOD_RES (6)..(7)..(41)..(43): Xaa is C or S
  MOD_RES (21)..(22)..(23)..(24)..(25): Xaa is A or G
  MOD_RES (26)..(27)..(28)..(29): Xaa is A or G or is absent

SEQ ID NO: 13605 - protein, 36 aa, Artificial Sequence
  GFR-binding peptide
  MOD_RES (3)..(4): Xaa is C or S
  MOD_RES (18)..(19)..(20)..(21)..(22): Xaa is A or G
  MOD_RES (23)..(24)..(25)..(26): Xaa is A or G or is absent
APXXVPQALEPLTILYYXXXXXXXXXEQLSNMIVRS

SEQ ID NO: 13606 - protein, 35 aa, Artificial Sequence
  GFR-binding peptide
  MOD_RES (4)..(5): Xaa is C or S
PPTXXVPTRLEPLTILYYDSANNVVEQLSNDMVVE

SEQ ID NO: 13607 - protein, 41 aa, Artificial Sequence
  GFR-binding peptide
  MOD_RES (5)..(6)..(39)..(41): Xaa is C or S
  MOD_RES (20)..(21)..(22)..(23)..(24): Xaa is A or G
  MOD_RES (25)..(26)..(27)..(28): Xaa is A or G or is absent
SASPXXVPQDLEPLPIVYYXXXXXXXXXEQLSNMVVKSXKX

SEQ ID NO: 13608 - protein, 38 aa, Artificial Sequence; identical to SEQ ID NO: 6224
  GFR-binding peptide
  MOD_RES (7)..(7): Xaa is C or S

SEQ ID NO: 13609 - protein, 39 aa, Artificial Sequence
  GFR-binding peptide
  MOD_RES (3)..(4)..(37)..(39): Xaa is C or S
  MOD_RES (18)..(19)..(20)..(21)..(22): Xaa is A or G
  MOD_RES (23)..(24)..(25)..(26): Xaa is A or G or is absent
SPXXVSQDLEPLPIVYYXXXXXXXXXEQLSNMIVKSXKX

SEQ ID NO: 13610 - protein, 33 aa, Artificial Sequence
  GFR-binding peptide
  MOD_RES (32)..(32): Xaa is C or S
APTKLSPISVLFIDDSSNVIYKQYENMVVRSXG

SEQ ID NO: 13611 - protein, 37 aa, Artificial Sequence
  GFR-binding peptide
  MOD_RES (4)..(5)..(37): Xaa is C or S
PPTXXVPTRLEPLPIVYYDSANNVVEQLSNDMVVESX

SEQ ID NO: 13612 - protein, 41 aa, Artificial Sequence
  GFR-binding peptide
  MOD_RES (6)..(7)..(39)..(41): Xaa is C or S
STPPTXXVPTRLSAISILYLDSANNVVLKNYQDMVVESXGX

SEQ ID NO: 13613 - protein, 35 aa, Artificial Sequence; identical to SEQ ID NO: 6238
  GFR-binding peptide
  MOD_RES (1)..(32)..(34): Xaa is C or S

SEQ ID NO: 13614 - protein, 36 aa, Artificial Sequence
  GFR-binding peptide
  MOD_RES (34)..(36): Xaa is C or S
  MOD_RES (14)..(15)..(16)..(17)..(18): Xaa is A or G
  MOD_RES (19)..(20)..(21)..(22): Xaa is A or G or is absent
VPTELEPLPMVYYXXXXXXXXXEQLSNEMVVEGXGX

SEQ ID NO: 13615 - protein, 38 aa, Artificial Sequence
  GFR-binding peptide
  MOD_RES (1)..(35)..(37): Xaa is C or S
  MOD_RES (15)..(16)..(17)..(18)..(19): Xaa is A or G
  MOD_RES (20)..(21)..(22)..(23): Xaa is A or G or is absent
XAPTKLEPLTVLYYXXXXXXXXXEQLSNNMVVRSXGXH

SEQ ID NO: 13616 - protein, 40 aa, Artificial Sequence
  GFR-binding peptide
  MOD_RES (6)..(7)..(38)..(40): Xaa is C or S
ASASPXXVPQDLSPISILFIVGRTPKVYKQYEMVVKSXKX

SEQ ID NO: 13617 - protein, 39 aa, Artificial Sequence; identical to SEQ ID NO: 6241
  GFR-binding peptide
  MOD_RES (4)..(5)..(38): Xaa is C or S
  MOD_RES (19)..(20)..(21)..(22)..(23): Xaa is A or G
  MOD_RES (24)..(25)..(26)..(27): Xaa is A or G or is absent

SEQ ID NO: 13618 - protein, 35 aa, Artificial Sequence
  GFR-binding peptide
  MOD_RES (32)..(34): Xaa is C or S
APTKLEPLPVVYYDDSSNVIEQLSNNMVVRSXGXH

SEQ ID NO: 13619 - protein, 39 aa, Artificial Sequence; identical to SEQ ID NO: 6243
  GFR-binding peptide
  MOD_RES (3)..(4)..(38): Xaa is C or S
  MOD_RES (18)..(19)..(20)..(21)..(22): Xaa is A or G
  MOD_RES (23)..(24)..(25)..(26): Xaa is A or G or is absent

SEQ ID NO: 13620 - protein, 34 aa, Artificial Sequence
  GFR-binding peptide
  MOD_RES (34)..(34): Xaa is C or S
  MOD_RES (14)..(15)..(16)..(17)..(18): Xaa is A or G
  MOD_RES (19)..(20)..(21)..(22): Xaa is A or G or is absent
APTQLSPISVLFIXXXXXXXXXYKQYENMVVRAX

SEQ ID NO: 13621 - protein, 38 aa, Artificial Sequence
  GFR-binding peptide
  MOD_RES (5)..(6): Xaa is C or S
  MOD_RES (20)..(21)..(22)..(23)..(24): Xaa is A or G
  MOD_RES (25)..(26)..(27)..(28): Xaa is A or G or is absent
IPKAXXVPTELEPLTMLYYXXXXXXXXXEQLSNEMVVE

SEQ ID NO: 13622 - protein, 31 aa, Artificial Sequence
  GFR-binding peptide
APTKLEPLPVVYYDDSSNVIEQLSNNMVVRS

SEQ ID NO: 13623 - protein, 40 aa, Artificial Sequence
  GFR-binding peptide
  MOD_RES (4)..(5)..(39): Xaa is C or S
  MOD_RES (19)..(20)..(21)..(22)..(23): Xaa is A or G
  MOD_RES (24)..(25)..(26)..(27): Xaa is A or G or is absent
PKAXXVPTELSPISMLFIXXXXXXXXXYKQYEDMVVEGXG

SEQ ID NO: 13624 - protein, 37 aa, Artificial Sequence; identical to SEQ ID NO: 6245
  GFR-binding peptide
  MOD_RES (4)..(5)..(37): Xaa is C or S

SEQ ID NO: 13625 - protein, 32 aa, Artificial Sequence
  GFR-binding peptide
  MOD_RES (32)..(32): Xaa is C or S
APTQLEPLTVLYYDDSSNVIEQLSNNMVVRAX

SEQ ID NO: 13626 - protein, 41 aa, Artificial Sequence
  GFR-binding peptide
  MOD_RES (3)..(4)..(38)..(40): Xaa is C or S
  MOD_RES (18)..(19)..(20)..(21)..(22): Xaa is A or G
  MOD_RES (23)..(24)..(25)..(26): Xaa is A or G or is absent
KPXXAPTQLEPLPVVYYXXXXXXXXXEQLSNNMVVRAXGXH

SEQ ID NO: 13627 - protein, 35 aa, Artificial Sequence
  GFR-binding peptide
  MOD_RES (4)..(5): Xaa is C or S
PKAXXVPTELEPLTMLYYDENEKVVEQLSNDMVVE

SEQ ID NO: 13628 - protein, 41 aa, Artificial Sequence; identical to SEQ ID NO: 6248
  GFR-binding peptide
  MOD_RES (5)..(39)..(41): Xaa is C or S
  MOD_RES (19)..(20)..(21)..(22)..(23): Xaa is A or G
  MOD_RES (24)..(25)..(26)..(27): Xaa is A or G or is absent

SEQ ID NO: 13629 - protein, 42 aa, Artificial Sequence
  GFR-binding peptide
  MOD_RES (5)..(6)..(39)..(41): Xaa is C or S
  MOD_RES (20)..(21)..(22)..(23)..(24): Xaa is A or G
  MOD_RES (25)..(26)..(27)..(28): Xaa is A or G or is absent
SASPXXVSQDLEPLPIVYYXXXXXXXXXEQLSNMIVKSXKXS

SEQ ID NO: 13630 - protein, 36 aa, Artificial Sequence
  GFR-binding peptide
  MOD_RES (1)..(34)..(36): Xaa is C or S
  MOD_RES (15)..(16)..(17)..(18)..(19): Xaa is A or G
  MOD_RES (20)..(21)..(22)..(23): Xaa is A or G or is absent
XVPQALSPISILFIXXXXXXXXXYKQYEMIVRSXKX

SEQ ID NO: 13631 - protein, 34 aa, Artificial Sequence; identical to SEQ ID NO: 6249
  GFR-binding peptide
  MOD_RES (3)..(4): Xaa is C or S

SEQ ID NO: 13632 - protein, 37 aa, Artificial Sequence
  GFR-binding peptide
  MOD_RES (1)..(35)..(37): Xaa is C or S
  MOD_RES (15)..(16)..(17)..(18)..(19): Xaa is A or G
  MOD_RES (20)..(21)..(22)..(23): Xaa is A or G or is absent
XVPTRLEPLPIVYYXXXXXXXXXEQLSNDMVVESXGX

SEQ ID NO: 13633 - protein, 36 aa, Artificial Sequence
  GFR-binding peptide
  MOD_RES (3)..(4)..(36): Xaa is C or S
PTXXVPTRLEPLTILYYDSANNVVEQLSNDMVVESX

SEQ ID NO: 13634 - protein, 37 aa, Artificial Sequence
  GFR-binding peptide
  MOD_RES (1)..(2)..(36): Xaa is C or S
  MOD_RES (16)..(17)..(18)..(19)..(20): Xaa is A or G
  MOD_RES (21)..(22)..(23)..(24): Xaa is A or G or is absent
XXAPTKLEPLPVVYYXXXXXXXXXEQLSNNMVVRSXG

SEQ ID NO: 13635 - protein, 38 aa, Artificial Sequence; identical to SEQ ID NO: 6254
  GFR-binding peptide
  MOD_RES (4)..(5): Xaa is C or S
  MOD_RES (19)..(20)..(21)..(22)..(23): Xaa is A or G
  MOD_RES (24)..(25)..(26)..(27): Xaa is A or G or is absent

SEQ ID NO: 13636 - protein, 39 aa, Artificial Sequence
  GFR-binding peptide
  MOD_RES (2)..(36)..(38): Xaa is C or S
  MOD_RES (16)..(17)..(18)..(19)..(20): Xaa is A or G
  MOD_RES (21)..(22)..(23)..(24): Xaa is A or G or is absent
TXAPTKLEPLTVLYYXXXXXXXXXEQLSNNMVVRSXGXH

SEQ ID NO: 13637 - protein, 34 aa, Artificial Sequence; identical to SEQ ID NO: 6259
  GFR-binding peptide
  MOD_RES (1)..(34): Xaa is C or S
  MOD_RES (15)..(16)..(17)..(18)..(19): Xaa is A or G
  MOD_RES (20)..(21)..(22)..(23): Xaa is A or G or is absent

SEQ ID NO: 13638 - protein, 43 aa, Artificial Sequence; identical to SEQ ID NO: 6260
  GFR-binding peptide
  MOD_RES (5)..(6)..(40)..(42): Xaa is C or S
  MOD_RES (20)..(21)..(22)..(23)..(24): Xaa is A or G
  MOD_RES (25)..(26)..(27)..(28): Xaa is A or G or is absent

SEQ ID NO: 13639 - protein, 37 aa, Artificial Sequence
  GFR-binding peptide
  MOD_RES (34)..(36): Xaa is C or S
  MOD_RES (14)..(15)..(16)..(17)..(18): Xaa is A or G
  MOD_RES (19)..(20)..(21)..(22): Xaa is A or G or is absent
APTKLEPLTVLYYXXXXXXXXXEQLSNNMVVRSXGXH

SEQ ID NO: 13640 - protein, 33 aa, Artificial Sequence; identical to SEQ ID NO: 6261
  GFR-binding peptide
  MOD_RES (1)..(1): Xaa is C or S
  MOD_RES (15)..(16)..(17)..(18)..(19): Xaa is A or G
  MOD_RES (20)..(21)..(22)..(23): Xaa is A or G or is absent

SEQ ID NO: 13641 - protein, 38 aa, Artificial Sequence; identical to SEQ ID NO: 6262
  GFR-binding peptide
  MOD_RES (4)..(5)..(38): Xaa is C or S
  MOD_RES (19)..(20)..(21)..(22)..(23): Xaa is A or G
  MOD_RES (24)..(25)..(26)..(27): Xaa is A or G or is absent

SEQ ID NO: 13642 - protein, 41 aa, Artificial Sequence
  GFR-binding peptide
  MOD_RES (5)..(6)..(38)..(40): Xaa is C or S
IPKAXXVPTELSPISMLFIDENEKVVYKQYEDMVVEGXGXR

SEQ ID NO: 13643 - protein, 37 aa, Artificial Sequence; identical to SEQ ID NO: 6263
  GFR-binding peptide
  MOD_RES (1)..(35)..(37): Xaa is C or S
  MOD_RES (15)..(16)..(17)..(18)..(19): Xaa is A or G
  MOD_RES (20)..(21)..(22)..(23): Xaa is A or G or is absent

SEQ ID NO: 13644 - protein, 34 aa, Artificial Sequence; identical to SEQ ID NO: 6265
  GFR-binding peptide
  MOD_RES (1)..(2)..(34): Xaa is C or S

SEQ ID NO: 13645 - protein, 39 aa, Artificial Sequence; identical to SEQ ID NO: 6266
  GFR-binding peptide
  MOD_RES (6)..(7): Xaa is C or S
  MOD_RES (21)..(22)..(23)..(24)..(25): Xaa is A or G
  MOD_RES (26)..(27)..(28)..(29): Xaa is A or G or is absent

SEQ ID NO: 13646 - protein, 40 aa, Artificial Sequence
  GFR-binding peptide
  MOD_RES (5)..(6)..(40): Xaa is C or S
  MOD_RES (20)..(21)..(22)..(23)..(24): Xaa is A or G
  MOD_RES (25)..(26)..(27)..(28): Xaa is A or G or is absent
IPKAXXVPTELSPISMLFIXXXXXXXXXYKQYEEMVVEGX

SEQ ID NO: 13647 - protein, 41 aa, Artificial Sequence; identical to SEQ ID NO: 6267
  GFR-binding peptide
  MOD_RES (4)..(5)..(38)..(40): Xaa is C or S
  MOD_RES (19)..(20)..(21)..(22)..(23): Xaa is A or G
  MOD_RES (24)..(25)..(26)..(27): Xaa is A or G or is absent

SEQ ID NO: 13648 - protein, 32 aa, Artificial Sequence
  GFR-binding peptide
  MOD_RES (1)..(2): Xaa is C or S
XXAPTKLSPISVLFIDDSSNVIYKQYENMVVR

SEQ ID NO: 13649 - protein, 35 aa, Artificial Sequence; identical to SEQ ID NO: 6270
  GFR-binding peptide
  MOD_RES (1)..(2): Xaa is C or S
  MOD_RES (16)..(17)..(18)..(19)..(20): Xaa is A or G
  MOD_RES (21)..(22)..(23)..(24): Xaa is A or G or is absent

SEQ ID NO: 13650 - protein, 40 aa, Artificial Sequence
  GFR-binding peptide
  MOD_RES (5)..(6)..(37)..(39): Xaa is C or S
SAAPXXVPQALSPISILFIVGRKPKVYKQYEMIVRSXKXS

SEQ ID NO: 13651 - protein, 42 aa, Artificial Sequence
  GFR-binding peptide
  MOD_RES (5)..(39)..(41): Xaa is C or S
  MOD_RES (19)..(20)..(21)..(22)..(23): Xaa is A or G
  MOD_RES (24)..(25)..(26)..(27): Xaa is A or G or is absent
TKPTXAPTKLSPISVLFIXXXXXXXXXYKQYENMVVRSXGXH

SEQ ID NO: 13652 - protein, 36 aa, Artificial Sequence
  GFR-binding peptide
  MOD_RES (2)..(3)..(36): Xaa is C or S
  MOD_RES (17)..(18)..(19)..(20)..(21): Xaa is A or G
  MOD_RES (22)..(23)..(24)..(25): Xaa is A or G or is absent
PXXVPQALSPISILFIXXXXXXXXXYKQYEMIVRSX

SEQ ID NO: 13653 - protein, 32 aa, Artificial Sequence
  GFR-binding peptide
  MOD_RES (1)..(1): Xaa is C or S
XVPTELEPLTMLYYDEYDKVVEQLSNEMVVEG

SEQ ID NO: 13654 - protein, 39 aa, Artificial Sequence
  GFR-binding peptide
  MOD_RES (4)..(5)..(37)..(39): Xaa is C or S
PKPXXAPTKLEPLTVLYYDDSSNVIEQLSNNMVVRSXGX

SEQ ID NO: 13655 - protein, 42 aa, Artificial Sequence; identical to SEQ ID NO: 6280
  GFR-binding peptide
  MOD_RES (4)..(5)..(39)..(41): Xaa is C or S
  MOD_RES (19)..(20)..(21)..(22)..(23): Xaa is A or G
  MOD_RES (24)..(25)..(26)..(27): Xaa is A or G or is absent

SEQ ID NO: 13656 - protein, 38 aa, Artificial Sequence; identical to SEQ ID NO: 6283
  GFR-binding peptide
  MOD_RES (1)..(2)..(36)..(38): Xaa is C or S
  MOD_RES (16)..(17)..(18)..(19)..(20): Xaa is A or G
  MOD_RES (21)..(22)..(23)..(24): Xaa is A or G or is absent

SEQ ID NO: 13657 - protein, 38 aa, Artificial Sequence
  GFR-binding peptide
  MOD_RES (4)..(38): Xaa is C or S
  MOD_RES (18)..(19)..(20)..(21)..(22): Xaa is A or G
  MOD_RES (23)..(24)..(25)..(26): Xaa is A or G or is absent
KPTXAPTKLEPLTVLYYXXXXXXXXXEQLSNNMVVRSX

SEQ ID NO: 13658 - protein, 43 aa, Artificial Sequence
  GFR-binding peptide
  MOD_RES (6)..(7)..(40)..(42): Xaa is C or S
  MOD_RES (21)..(22)..(23)..(24)..(25): Xaa is A or G
  MOD_RES (26)..(27)..(28)..(29): Xaa is A or G or is absent
ASAAPXXVPQALSPISILFIXXXXXXXXXYKQYEMIVRSXKXS

SEQ ID NO: 13659 - protein, 34 aa, Artificial Sequence; identical to SEQ ID NO: 6287
  GFR-binding peptide
  MOD_RES (1)..(2): Xaa is C or S
  MOD_RES (16)..(17)..(18)..(19)..(20): Xaa is A or G
  MOD_RES (21)..(22)..(23)..(24): Xaa is A or G or is absent

SEQ ID NO: 13660 - protein, 31 aa, Artificial Sequence
  GFR-binding peptide
  MOD_RES (1)..(1): Xaa is C or S
XAPTQLSPISVLFIDDSSNVIYKQYENMVVR

SEQ ID NO: 13661 - protein, 41 aa, Artificial Sequence
  GFR-binding peptide
  MOD_RES (4)..(5)..(39)..(41): Xaa is C or S
  MOD_RES (19)..(20)..(21)..(22)..(23): Xaa is A or G
  MOD_RES (24)..(25)..(26)..(27): Xaa is A or G or is absent
PPTXXVPTRLEPLPIVYYXXXXXXXXXEQLSNDMVVESXGX

SEQ ID NO: 13662 - protein, 39 aa, Artificial Sequence; identical to SEQ ID NO: 6289
  GFR-binding peptide
  MOD_RES (2)..(3)..(37)..(39): Xaa is C or S
  MOD_RES (17)..(18)..(19)..(20)..(21): Xaa is A or G
  MOD_RES (22)..(23)..(24)..(25): Xaa is A or G or is absent

SEQ ID NO: 13663 - protein, 35 aa, Artificial Sequence; identical to SEQ ID NO: 6290
  GFR-binding peptide
  MOD_RES (3)..(4)..(35): Xaa is C or S

SEQ ID NO: 13664 - protein, 32 aa, Artificial Sequence
  GFR-binding peptide
  MOD_RES (1)..(2): Xaa is C or S
XXVPQALSPISILFIVGRKPKVYKQYEMIVRS

SEQ ID NO: 13665 - protein, 41 aa, Artificial Sequence; identical to SEQ ID NO: 6294
  GFR-binding peptide
  MOD_RES (5)..(6)..(40): Xaa is C or S
  MOD_RES (20)..(21)..(22)..(23)..(24): Xaa is A or G
  MOD_RES (25)..(26)..(27)..(28): Xaa is A or G or is absent

SEQ ID NO: 13666 - protein, 38 aa, Artificial Sequence
  GFR-binding peptide
  MOD_RES (1)..(2)..(35)..(37): Xaa is C or S
  MOD_RES (16)..(17)..(18)..(19)..(20): Xaa is A or G
  MOD_RES (21)..(22)..(23)..(24): Xaa is A or G or is absent
XXVPQDLEPLPIVYYXXXXXXXXXEQLSNMVVKSXKXS

SEQ ID NO: 13667 - protein, 39 aa, Artificial Sequence
  GFR-binding peptide
  MOD_RES (7)..(7): Xaa is C or S
  MOD_RES (21)..(22)..(23)..(24)..(25): Xaa is A or G
  MOD_RES (26)..(27)..(28)..(29): Xaa is A or G or is absent
HVTKPTXAPTKLEPLPVVYYXXXXXXXXXEQLSNNMVVR

SEQ ID NO: 13668 - protein, 39 aa, Artificial Sequence
  GFR-binding peptide
  MOD_RES (3)..(4)..(37)..(39): Xaa is C or S
  MOD_RES (18)..(19)..(20)..(21)..(22): Xaa is A or G
  MOD_RES (23)..(24)..(25)..(26): Xaa is A or G or is absent
APXXVPQALEPLPIVYYXXXXXXXXXEQLSNMIVRSXKX

SEQ ID NO: 13669 - protein, 35 aa, Artificial Sequence
  GFR-binding peptide
  MOD_RES (2)..(3): Xaa is C or S
  MOD_RES (17)..(18)..(19)..(20)..(21): Xaa is A or G
  MOD_RES (22)..(23)..(24)..(25): Xaa is A or G or is absent
PXXAPTQLEPLPVVYYXXXXXXXXXEQLSNNMVVR

SEQ ID NO: 13670 - protein, 37 aa, Artificial Sequence
  GFR-binding peptide
  MOD_RES (3)..(4): Xaa is C or S
  MOD_RES (18)..(19)..(20)..(21)..(22): Xaa is A or G
  MOD_RES (23)..(24)..(25)..(26): Xaa is A or G or is absent
KPXXAPTQLEPLTVLYYXXXXXXXXXEQLSNNMVVRA

SEQ ID NO: 13671 - protein, 34 aa, Artificial Sequence
  GFR-binding peptide
  MOD_RES (4)..(4): Xaa is C or S
KPTXAPTKLEPLTVLYYDDSSNVIEQLSNNMVVR

SEQ ID NO: 13672 - protein, 44 aa, Artificial Sequence
  GFR-binding peptide
  MOD_RES (6)..(7)..(41)..(43): Xaa is C or S
  MOD_RES (21)..(22)..(23)..(24)..(25): Xaa is A or G
  MOD_RES (26)..(27)..(28)..(29): Xaa is A or G or is absent
TVPKPXXAPTQLSPISVLFIXXXXXXXXXYKQYENMVVRAXGXH

SEQ ID NO: 13673 - protein, 36 aa, Artificial Sequence; identical to SEQ ID NO: 6298
  GFR-binding peptide
  MOD_RES (2)..(3)..(36): Xaa is C or S
  MOD_RES (17)..(18)..(19)..(20)..(21): Xaa is A or G
  MOD_RES (22)..(23)..(24)..(25): Xaa is A or G or is absent

SEQ ID NO: 13674 - protein, 37 aa, Artificial Sequence; identical to SEQ ID NO: 6299
  GFR-binding peptide
  MOD_RES (1)..(35)..(37): Xaa is C or S
  MOD_RES (15)..(16)..(17)..(18)..(19): Xaa is A or G
  MOD_RES (20)..(21)..(22)..(23): Xaa is A or G or is absent

SEQ ID NO: 13675 - protein, 39 aa, Artificial Sequence
  GFR-binding peptide
  MOD_RES (5)..(6): Xaa is C or S
  MOD_RES (20)..(21)..(22)..(23)..(24): Xaa is A or G
  MOD_RES (25)..(26)..(27)..(28): Xaa is A or G or is absent
TPPTXXVPTRLEPLTILYYXXXXXXXXXEQLSNDMVVES

SEQ ID NO: 13676 - protein, 42 aa, Artificial Sequence
  GFR-binding peptide
  MOD_RES (6)..(40)..(42): Xaa is C or S
  MOD_RES (20)..(21)..(22)..(23)..(24): Xaa is A or G
  MOD_RES (25)..(26)..(27)..(28): Xaa is A or G or is absent
VTKPTXAPTKLEPLPVVYYXXXXXXXXXEQLSNNMVVRSXGX

SEQ ID NO: 13677 - protein, 39 aa, Artificial Sequence
  GFR-binding peptide
  MOD_RES (2)..(3)..(36)..(38): Xaa is C or S
  MOD_RES (17)..(18)..(19)..(20)..(21): Xaa is A or G
  MOD_RES (22)..(23)..(24)..(25): Xaa is A or G or is absent
PXXVSQDLEPLPIVYYXXXXXXXXXEQLSNMIVKSXKXS

SEQ ID NO: 13678 - protein, 41 aa, Artificial Sequence
  GFR-binding peptide
  MOD_RES (4)..(5)..(39)..(41): Xaa is C or S
  MOD_RES (19)..(20)..(21)..(22)..(23): Xaa is A or G
  MOD_RES (24)..(25)..(26)..(27): Xaa is A or G or is absent
PKPXXAPTQLSPISVLFIXXXXXXXXXYKQYENMVVRAXGX

SEQ ID NO: 13679 - protein, 37 aa, Artificial Sequence
  GFR-binding peptide
  MOD_RES (1)..(34)..(36): Xaa is C or S
  MOD_RES (15)..(16)..(17)..(18)..(19): Xaa is A or G
  MOD_RES (20)..(21)..(22)..(23): Xaa is A or G or is absent
XVSQDLEPLPIVYYXXXXXXXXXEQLSNMIVKSXKXS

SEQ ID NO: 13680 - protein, 38 aa, Artificial Sequence
  GFR-binding peptide
  MOD_RES (5)..(6)..(38): Xaa is C or S
TPPTXXVPTRLSAISILYLDSANNVVLKNYQDMVVESX

SEQ ID NO: 13681 - protein, 39 aa, Artificial Sequence
  GFR-binding peptide
  MOD_RES (4)..(5)..(39): Xaa is C or S
  MOD_RES (19)..(20)..(21)..(22)..(23): Xaa is A or G
  MOD_RES (24)..(25)..(26)..(27): Xaa is A or G or is absent
PKAXXVPTELEPLTMLYYXXXXXXXXXEQLSNDMVVEGX

SEQ ID NO: 13682 - protein, 36 aa, Artificial Sequence
  GFR-binding peptide
  MOD_RES (3)..(4): Xaa is C or S
  MOD_RES (18)..(19)..(20)..(21)..(22): Xaa is A or G
  MOD_RES (23)..(24)..(25)..(26): Xaa is A or G or is absent
KPXXAPTQLEPLTVLYYXXXXXXXXXEQLSNNMVVR

SEQ ID NO: 13683 - protein, 38 aa, Artificial Sequence
  GFR-binding peptide
  MOD_RES (1)..(2)..(36)..(38): Xaa is C or S
  MOD_RES (16)..(17)..(18)..(19)..(20): Xaa is A or G
  MOD_RES (21)..(22)..(23)..(24): Xaa is A or G or is absent
XXVPTELEPLPMVYYXXXXXXXXXEQLSNDMVVEGXGX

SEQ ID NO: 13684 - protein, 39 aa, Artificial Sequence
  GFR-binding peptide
  MOD_RES (6)..(38): Xaa is C or S
VTKPTXAPTKLSPISVLFIDDSSNVIYKQYENMVVRSXG

SEQ ID NO: 13685 - protein, 39 aa, Artificial Sequence; identical to SEQ ID NO: 6306
  GFR-binding peptide
  MOD_RES (1)..(2)..(36)..(38): Xaa is C or S
  MOD_RES (16)..(17)..(18)..(19)..(20): Xaa is A or G
  MOD_RES (21)..(22)..(23)..(24): Xaa is A or G or is absent

SEQ ID NO: 13686 - protein, 37 aa, Artificial Sequence
  GFR-binding peptide
  MOD_RES (4)..(5): Xaa is C or S
  MOD_RES (19)..(20)..(21)..(22)..(23): Xaa is A or G
  MOD_RES (24)..(25)..(26)..(27): Xaa is A or G or is absent
ASPXXVPQDLEPLPIVYYXXXXXXXXXEQLSNMVVKS

SEQ ID NO: 13687 - protein, 38 aa, Artificial Sequence; identical to SEQ ID NO: 6307
  GFR-binding peptide
  MOD_RES (5)..(6): Xaa is C or S
  MOD_RES (20)..(21)..(22)..(23)..(24): Xaa is A or G
  MOD_RES (25)..(26)..(27)..(28): Xaa is A or G or is absent

SEQ ID NO: 13688 - protein, 34 aa, Artificial Sequence; identical to SEQ ID NO: 6308
  GFR-binding peptide
  MOD_RES (1)..(2): Xaa is C or S
  MOD_RES (16)..(17)..(18)..(19)..(20): Xaa is A or G
  MOD_RES (21)..(22)..(23)..(24): Xaa is A or G or is absent

SEQ ID NO: 13689 - protein, 41 aa, Artificial Sequence
  GFR-binding peptide
  MOD_RES (6)..(7)..(40): Xaa is C or S
  MOD_RES (21)..(22)..(23)..(24)..(25): Xaa is A or G
  MOD_RES (26)..(27)..(28)..(29): Xaa is A or G or is absent
ASASPXXVSQDLEPLPIVYYXXXXXXXXXEQLSNMIVKSXK

SEQ ID NO: 13690 - protein, 32 aa, Artificial Sequence; identical to SEQ ID NO: 6309
  GFR-binding peptide
  MOD_RES (2)..(2): Xaa is C or S

SEQ ID NO: 13691 - protein, 35 aa, Artificial Sequence
  GFR-binding peptide
  MOD_RES (1)..(2)..(33)..(35): Xaa is C or S
XXVSQDLEPLPIVYYIGKTPKIEQLSNMIVKSXKX

SEQ ID NO: 13692 - protein, 38 aa, Artificial Sequence
  GFR-binding peptide
  MOD_RES (2)..(3)..(35)..(37): Xaa is C or S
AXXVPTELEPLPMVYYDEYDKVVEQLSNEMVVEGXGXR

SEQ ID NO: 13693 - protein, 35 aa, Artificial Sequence
  GFR-binding peptide
  MOD_RES (33)..(35): Xaa is C or S
  MOD_RES (14)..(15)..(16)..(17)..(18): Xaa is A or G
  MOD_RES (19)..(20)..(21)..(22): Xaa is A or G or is absent
VPQALSPISILFIXXXXXXXXXYKQYEMIVRSXKX

SEQ ID NO: 13694 - protein, 34 aa, Artificial Sequence
  GFR-binding peptide
  MOD_RES (2)..(3): Xaa is C or S
PXXAPTQLEPLPVVYYDDSSNVIEQLSNNMVVRA

SEQ ID NO: 13695 - protein, 40 aa, Artificial Sequence
  GFR-binding peptide
  MOD_RES (6)..(7)..(39): Xaa is C or S
STPPTXXVPTRLNAISILYFDSANNVVLKKYRDMVVESXG

SEQ ID NO: 13696 - protein, 38 aa, Artificial Sequence
  GFR-binding peptide
  MOD_RES (1)..(2)..(35)..(37): Xaa is C or S
  MOD_RES (16)..(17)..(18)..(19)..(20): Xaa is A or G
  MOD_RES (21)..(22)..(23)..(24): Xaa is A or G or is absent
XXVSQDLSPISILFIXXXXXXXXXYKQYEMIVKSXKXS

SEQ ID NO: 13697 - protein, 36 aa, Artificial Sequence; identical to SEQ ID NO: 6317
  GFR-binding peptide
  MOD_RES (4)..(5)..(36): Xaa is C or S

SEQ ID NO: 13698 - protein, 34 aa, Artificial Sequence
  GFR-binding peptide
  MOD_RES (32)..(34): Xaa is C or S
APTQLSPISVLFIDDSSNVIYKQYENMVVRAXGX

SEQ ID NO: 13699 - protein, 37 aa, Artificial Sequence; identical to SEQ ID NO: 6322
  GFR-binding peptide
  MOD_RES (2)..(3)..(37): Xaa is C or S
  MOD_RES (17)..(18)..(19)..(20)..(21): Xaa is A or G
  MOD_RES (22)..(23)..(24)..(25): Xaa is A or G or is absent

SEQ ID NO: 13700 - protein, 41 aa, Artificial Sequence
  GFR-binding peptide
  MOD_RES (7)..(41): Xaa is C or S
  MOD_RES (21)..(22)..(23)..(24)..(25): Xaa is A or G
  MOD_RES (26)..(27)..(28)..(29): Xaa is A or G or is absent
HVTKPTXAPTKLEPLTVLYYXXXXXXXXXEQLSNNMVVRSX

SEQ ID NO: 13701 - protein, 35 aa, Artificial Sequence; identical to SEQ ID NO: 6323
  GFR-binding peptide
  MOD_RES (1)..(34): Xaa is C or S
  MOD_RES (15)..(16)..(17)..(18)..(19): Xaa is A or G
  MOD_RES (20)..(21)..(22)..(23): Xaa is A or G or is absent

SEQ ID NO: 13702 - protein, 35 aa, Artificial Sequence; identical to SEQ ID NO: 6325
  GFR-binding peptide
  MOD_RES (34)..(34): Xaa is C or S
  MOD_RES (14)..(15)..(16)..(17)..(18): Xaa is A or G
  MOD_RES (19)..(20)..(21)..(22): Xaa is A or G or is absent

SEQ ID NO: 13703 - protein, 30 aa, Artificial Sequence
  GFR-binding peptide
VPTELEPLTMLYYDENEKVVEQLSNDMVVE

SEQ ID NO: 13704 - protein, 40 aa, Artificial Sequence
  GFR-binding peptide
  MOD_RES (6)..(7): Xaa is C or S
  MOD_RES (21)..(22)..(23)..(24)..(25): Xaa is A or G
  MOD_RES (26)..(27)..(28)..(29): Xaa is A or G or is absent
SIPKAXXVPTELEPLPMVYYXXXXXXXXXEQLSNEMVVEG

SEQ ID NO: 13705 - protein, 37 aa, Artificial Sequence
  GFR-binding peptide
  MOD_RES (3)..(4)..(35)..(37): Xaa is C or S
APXXVPQALSPISILFIVGRKPKVYKQYEMIVRSXKX

SEQ ID NO: 13706 - protein, 32 aa, Artificial Sequence
  GFR-binding peptide
  MOD_RES (14)..(15)..(16)..(17)..(18): Xaa is A or G
  MOD_RES (19)..(20)..(21)..(22): Xaa is A or G or is absent
VPTELEPLTMLYYXXXXXXXXXEQLSNEMVVE

SEQ ID NO: 13707 - protein, 38 aa, Artificial Sequence
  GFR-binding peptide
  MOD_RES (3)..(4)..(38): Xaa is C or S
  MOD_RES (18)..(19)..(20)..(21)..(22): Xaa is A or G
  MOD_RES (23)..(24)..(25)..(26): Xaa is A or G or is absent
KAXXVPTELSPISMLFIXXXXXXXXXYKQYEEMVVEGX

SEQ ID NO: 13708 - protein, 38 aa, Artificial Sequence
  GFR-binding peptide
  MOD_RES (2)..(3)..(35)..(37): Xaa is C or S
PXXAPTQLEPLPVVYYDDSSNVIEQLSNNMVVRAXGXH

SEQ ID NO: 13709 - protein, 37 aa, Artificial Sequence
  GFR-binding peptide
  MOD_RES (1)..(35)..(37): Xaa is C or S
  MOD_RES (15)..(16)..(17)..(18)..(19): Xaa is A or G
  MOD_RES (20)..(21)..(22)..(23): Xaa is A or G or is absent
XVPTELEPLTMLYYXXXXXXXXXEQLSNDMVVEGXGX

SEQ ID NO: 13710 - protein, 38 aa, Artificial Sequence
  GFR-binding peptide
  MOD_RES (5)..(6): Xaa is C or S
  MOD_RES (20)..(21)..(22)..(23)..(24): Xaa is A or G
  MOD_RES (25)..(26)..(27)..(28): Xaa is A or G or is absent
IPKAXXVPTELSPISMLFIXXXXXXXXXYKQYEDMVVE

SEQ ID NO: 13711 - protein, 31 aa, Artificial Sequence
  GFR-binding peptide
  MOD_RES (1)..(1): Xaa is C or S
XAPTKLEPLPVVYYDDSSNVIEQLSNNMVVR

SEQ ID NO: 13712 - protein, 36 aa, Artificial Sequence
  GFR-binding peptide
  MOD_RES (1)..(35): Xaa is C or S
  MOD_RES (15)..(16)..(17)..(18)..(19): Xaa is A or G
  MOD_RES (20)..(21)..(22)..(23): Xaa is A or G or is absent
XAPTQLSPISVLFIXXXXXXXXXYKQYENMVVRAXG

SEQ ID NO: 13713 - protein, 39 aa, Artificial Sequence
  GFR-binding peptide
  MOD_RES (6)..(7): Xaa is C or S
  MOD_RES (21)..(22)..(23)..(24)..(25): Xaa is A or G
  MOD_RES (26)..(27)..(28)..(29): Xaa is A or G or is absent
YVPKPXXAPTKLSPISVLFIXXXXXXXXXYKQYENMVVR

SEQ ID NO: 13714 - protein, 42 aa, Artificial Sequence; identical to SEQ ID NO: 6334
  GFR-binding peptide
  MOD_RES (5)..(6)..(40)..(42): Xaa is C or S
  MOD_RES (20)..(21)..(22)..(23)..(24): Xaa is A or G
  MOD_RES (25)..(26)..(27)..(28): Xaa is A or G or is absent

SEQ ID NO: 13715 - protein, 36 aa, Artificial Sequence
  GFR-binding peptide
  MOD_RES (1)..(35): Xaa is C or S
  MOD_RES (15)..(16)..(17)..(18)..(19): Xaa is A or G
  MOD_RES (20)..(21)..(22)..(23): Xaa is A or G or is absent
XAPTQLEPLTVLYYXXXXXXXXXEQLSNNMVVRAXG

SEQ ID NO: 13716 - protein, 34 aa, Artificial Sequence; identical to SEQ ID NO: 6337
  GFR-binding peptide
  MOD_RES (1)..(32)..(34): Xaa is C or S

SEQ ID NO: 13717 - protein, 33 aa, Artificial Sequence; identical to SEQ ID NO: 6338
  GFR-binding peptide
  MOD_RES (2)..(3): Xaa is C or S

SEQ ID NO: 13718 - protein, 37 aa, Artificial Sequence
  GFR-binding peptide
  MOD_RES (6)..(7): Xaa is C or S
ASASPXXVPQDLSPISILFIVGRTPKVYKQYEMVVKS

SEQ ID NO: 13719 - protein, 36 aa, Artificial Sequence
  GFR-binding peptide
  MOD_RES (4)..(5): Xaa is C or S
PKPXXAPTQLEPLTVLYYDDSSNVIEQLSNNMVVRA

SEQ ID NO: 13720 - protein, 37 aa, Artificial Sequence
  GFR-binding peptide
  MOD_RES (1)..(35)..(37): Xaa is C or S
  MOD_RES (15)..(16)..(17)..(18)..(19): Xaa is A or G
  MOD_RES (20)..(21)..(22)..(23): Xaa is A or G or is absent
XVPTELEPLTMLYYXXXXXXXXXEQLSNEMVVEGXGX

SEQ ID NO: 13721 - protein, 38 aa, Artificial Sequence
  GFR-binding peptide
  MOD_RES (5)..(6): Xaa is C or S
  MOD_RES (20)..(21)..(22)..(23)..(24): Xaa is A or G
  MOD_RES (25)..(26)..(27)..(28): Xaa is A or G or is absent
TPPTXXVPTRLNAISILYFXXXXXXXXXLKKYRDMVVE

SEQ ID NO: 13722 - protein, 31 aa, Artificial Sequence
  GFR-binding peptide
  MOD_RES (31)..(31): Xaa is C or S
VPQDLEPLPIVYYVGRTPKVEQLSNMVVKSX

SEQ ID NO: 13723 - protein, 32 aa, Artificial Sequence
  GFR-binding peptide
  MOD_RES (14)..(15)..(16)..(17)..(18): Xaa is A or G
  MOD_RES (19)..(20)..(21)..(22): Xaa is A or G or is absent
VPTELEPLPMVYYXXXXXXXXXEQLSNEMVVE

SEQ ID NO: 13724 - protein, 34 aa, Artificial Sequence
  GFR-binding peptide
  MOD_RES (32)..(34): Xaa is C or S
VPTELEPLTMLYYDENEKVVEQLSNDMVVEGXGX

SEQ ID NO: 13725 - protein, 41 aa, Artificial Sequence
  GFR-binding peptide
  MOD_RES (5)..(6)..(40): Xaa is C or S
  MOD_RES (20)..(21)..(22)..(23)..(24): Xaa is A or G
  MOD_RES (25)..(26)..(27)..(28): Xaa is A or G or is absent
TPPTXXVPTRLEPLTILYYXXXXXXXXXEQLSNDMVVESXG

SEQ ID NO: 13726 - protein, 40 aa, Artificial Sequence
  GFR-binding peptide
  MOD_RES (6)..(7): Xaa is C or S
  MOD_RES (21)..(22)..(23)..(24)..(25): Xaa is A or G
  MOD_RES (26)..(27)..(28)..(29): Xaa is A or G or is absent
TVPKPXXAPTQLEPLTVLYYXXXXXXXXXEQLSNNMVVRA

SEQ ID NO: 13727 - protein, 34 aa, Artificial Sequence
  GFR-binding peptide
  MOD_RES (33)..(33): Xaa is C or S
  MOD_RES (14)..(15)..(16)..(17)..(18): Xaa is A or G
  MOD_RES (19)..(20)..(21)..(22): Xaa is A or G or is absent
VPQALSPISILFIXXXXXXXXXYKQYEMIVRSXK

SEQ ID NO: 13728 - protein, 34 aa, Artificial Sequence
  GFR-binding peptide
  MOD_RES (1)..(1): Xaa is C or S
  MOD_RES (15)..(16)..(17)..(18)..(19): Xaa is A or G
  MOD_RES (20)..(21)..(22)..(23): Xaa is A or G or is absent
XAPTQLEPLPVVYYXXXXXXXXXEQLSNNMVVRA

SEQ ID NO: 13729 - protein, 39 aa, Artificial Sequence
  GFR-binding peptide
  MOD_RES (2)..(3)..(37)..(39): Xaa is C or S
  MOD_RES (17)..(18)..(19)..(20)..(21): Xaa is A or G
  MOD_RES (22)..(23)..(24)..(25): Xaa is A or G or is absent
AXXVPTELSPISMLFIXXXXXXXXXYKQYEEMVVEGXGX

SEQ ID NO: 13730 - protein, 34 aa, Artificial Sequence
  GFR-binding peptide
  MOD_RES (34)..(34): Xaa is C or S
  MOD_RES (14)..(15)..(16)..(17)..(18): Xaa is A or G
  MOD_RES (19)..(20)..(21)..(22): Xaa is A or G or is absent
VPTRLEPLPIVYYXXXXXXXXXEQLSNDMVVESX

SEQ ID NO: 13731 - protein, 31 aa, Artificial Sequence; identical to SEQ ID NO: 6347
  GFR-binding peptide
  MOD_RES (1)..(1): Xaa is C or S

SEQ ID NO: 13732 - protein, 34 aa, Artificial Sequence
  GFR-binding peptide
  MOD_RES (2)..(3): Xaa is C or S
TXXVPTRLNAISILYFDSANNVVLKKYRDMVVES

SEQ ID NO: 13733 - protein, 39 aa, Artificial Sequence
  GFR-binding peptide
  MOD_RES (5)..(6): Xaa is C or S
  MOD_RES (20)..(21)..(22)..(23)..(24): Xaa is A or G
  MOD_RES (25)..(26)..(27)..(28): Xaa is A or G or is absent
IPKAXXVPTELEPLTMLYYXXXXXXXXXEQLSNDMVVEG

SEQ ID NO: 13734 - protein, 41 aa, Artificial Sequence
  GFR-binding peptide
  MOD_RES (5)..(6)..(38)..(40): Xaa is C or S
TPPTXXVPTRLEPLTILYYDSANNVVEQLSNDMVVESXGXR

SEQ ID NO: 13735 - protein, 38 aa, Artificial Sequence; identical to SEQ ID NO: 6351
  GFR-binding peptide
  MOD_RES (5)..(6): Xaa is C or S
  MOD_RES (20)..(21)..(22)..(23)..(24): Xaa is A or G
  MOD_RES (25)..(26)..(27)..(28): Xaa is A or G or is absent

SEQ ID NO: 13736 - protein, 40 aa, Artificial Sequence; identical to SEQ ID NO: 6352
  GFR-binding peptide
  MOD_RES (4)..(5)..(37)..(39): Xaa is C or S

SEQ ID NO: 13737 - protein, 42 aa, Artificial Sequence
  GFR-binding peptide
  MOD_RES (5)..(6)..(39)..(41): Xaa is C or S
  MOD_RES (20)..(21)..(22)..(23)..(24): Xaa is A or G
  MOD_RES (25)..(26)..(27)..(28): Xaa is A or G or is absent
SASPXXVPQDLEPLTILYYXXXXXXXXXEQLSNMVVKSXKXS

SEQ ID NO: 13738 - protein, 32 aa, Artificial Sequence; identical to SEQ ID NO: 6354
  GFR-binding peptide
  MOD_RES (1)..(2): Xaa is C or S

SEQ ID NO: 13739 - protein, 33 aa, Artificial Sequence
  GFR-binding peptide
  MOD_RES (1)..(33): Xaa is C or S
XVPTELEPLTMLYYDEYDKVVEQLSNEMVVEGX

SEQ ID NO: 13740 - protein, 40 aa, Artificial Sequence
  GFR-binding peptide
  MOD_RES (5)..(6)..(40): Xaa is C or S
  MOD_RES (20)..(21)..(22)..(23)..(24): Xaa is A or G
  MOD_RES (25)..(26)..(27)..(28): Xaa is A or G or is absent
TPPTXXVPTRLSPISILFIXXXXXXXXXYKQYEDMVVESX

SEQ ID NO: 13741 - protein, 35 aa, Artificial Sequence
  GFR-binding peptide
  MOD_RES (2)..(3)..(35): Xaa is C or S
AXXVPTELSPISMLFIDEYDKVVYKQYEEMVVEGX

SEQ ID NO: 13742 - protein, 37 aa, Artificial Sequence
  GFR-binding peptide
  MOD_RES (5)..(6): Xaa is C or S
IPKAXXVPTELEPLPMVYYDENEKVVEQLSNDMVVEG

SEQ ID NO: 13743 - protein, 33 aa, Artificial Sequence; identical to SEQ ID NO: 6355
  GFR-binding peptide
  MOD_RES (1)..(1): Xaa is C or S
  MOD_RES (15)..(16)..(17)..(18)..(19): Xaa is A or G
  MOD_RES (20)..(21)..(22)..(23): Xaa is A or G or is absent

SEQ ID NO: 13744 - protein, 38 aa, Artificial Sequence
  GFR-binding peptide
  MOD_RES (1)..(2)..(35)..(37): Xaa is C or S
  MOD_RES (16)..(17)..(18)..(19)..(20): Xaa is A or G
  MOD_RES (21)..(22)..(23)..(24): Xaa is A or G or is absent
XXVPQALEPLPIVYYXXXXXXXXXEQLSNMIVRSXKXS

SEQ ID NO: 13745 - protein, 38 aa, Artificial Sequence
  GFR-binding peptide
  MOD_RES (5)..(6)..(38): Xaa is C or S
IPKAXXVPTELSPISMLFIDEYDKVVYKQYEEMVVEGX

SEQ ID NO: 13746 - protein, 38 aa, Artificial Sequence; identical to SEQ ID NO: 6359
  GFR-binding peptide
  MOD_RES (6)..(7)..(38): Xaa is C or S

SEQ ID NO: 13747 - protein, 37 aa, Artificial Sequence
  GFR-binding peptide
  MOD_RES (3)..(4)..(35)..(37): Xaa is C or S
APXXVPQALEPLTILYYVGRKPKVEQLSNMIVRSXKX

SEQ ID NO: 13748 - protein, 35 aa, Artificial Sequence
  GFR-binding peptide
  MOD_RES (3)..(4)..(35): Xaa is C or S
SPXXVSQDLEPLPIVYYIGKTPKIEQLSNMIVKSX

SEQ ID NO: 13749 - protein, 40 aa, Artificial Sequence
  GFR-binding peptide
  MOD_RES (2)..(3)..(37)..(39): Xaa is C or S
  MOD_RES (17)..(18)..(19)..(20)..(21): Xaa is A or G
  MOD_RES (22)..(23)..(24)..(25): Xaa is A or G or is absent
TXXVPTRLSPISILFIXXXXXXXXXYKQYEDMVVESXGXR

SEQ ID NO: 13750 - protein, 33 aa, Artificial Sequence; identical to SEQ ID NO: 6361
  GFR-binding peptide
  MOD_RES (1)..(1): Xaa is C or S
  MOD_RES (15)..(16)..(17)..(18)..(19): Xaa is A or G
  MOD_RES (20)..(21)..(22)..(23): Xaa is A or G or is absent

SEQ ID NO: 13751 - protein, 40 aa, Artificial Sequence
  GFR-binding peptide
  MOD_RES (2)..(3)..(37)..(39): Xaa is C or S
  MOD_RES (17)..(18)..(19)..(20)..(21): Xaa is A or G
  MOD_RES (22)..(23)..(24)..(25): Xaa is A or G or is absent
AXXVPTELEPLPMVYYXXXXXXXXXEQLSNEMVVEGXGXR

SEQ ID NO: 13752 - protein, 34 aa, Artificial Sequence
  GFR-binding peptide
  MOD_RES (3)..(4): Xaa is C or S
KAXXVPTELSPISMLFIDENEKVVYKQYEDMVVE

SEQ ID NO: 13753 - protein, 32 aa, Artificial Sequence; identical to SEQ ID NO: 6363
  GFR-binding peptide
  MOD_RES (1)..(32): Xaa is C or S

SEQ ID NO: 13754 - protein, 32 aa, Artificial Sequence; identical to SEQ ID NO: 6367
  GFR-binding peptide
  MOD_RES (14)..(15)..(16)..(17)..(18): Xaa is A or G
  MOD_RES (19)..(20)..(21)..(22): Xaa is A or G or is absent

SEQ ID NO: 13755 - protein, 40 aa, Artificial Sequence
  GFR-binding peptide
  MOD_RES (5)..(6)..(40): Xaa is C or S
  MOD_RES (20)..(21)..(22)..(23)..(24): Xaa is A or G
  MOD_RES (25)..(26)..(27)..(28): Xaa is A or G or is absent
VPKPXXAPTKLSPISVLFIXXXXXXXXXYKQYENMVVRSX

SEQ ID NO: 13756 - protein, 31 aa, Artificial Sequence; identical to SEQ ID NO: 6371
  GFR-binding peptide
  MOD_RES (31)..(31): Xaa is C or S

SEQ ID NO: 13757 - protein, 39 aa, Artificial Sequence; identical to SEQ ID NO: 6373
  GFR-binding peptide
  MOD_RES (3)..(4)..(38): Xaa is C or S
  MOD_RES (18)..(19)..(20)..(21)..(22): Xaa is A or G
  MOD_RES (23)..(24)..(25)..(26): Xaa is A or G or is absent

SEQ ID NO: 13758 - protein, 35 aa, Artificial Sequence
  GFR-binding peptide
  MOD_RES (2)..(3): Xaa is C or S
  MOD_RES (17)..(18)..(19)..(20)..(21): Xaa is A or G
  MOD_RES (22)..(23)..(24)..(25): Xaa is A or G or is absent
PXXAPTKLEPLTVLYYXXXXXXXXXEQLSNNMVVR

SEQ ID NO: 13759 - protein, 34 aa, Artificial Sequence
  GFR-binding peptide
  MOD_RES (1)..(2)..(34): Xaa is C or S
XXVPTELEPLTMLYYDENEKVVEQLSNDMVVEGX

SEQ ID NO: 13760 - protein, 34 aa, Artificial Sequence
  GFR-binding peptide
  MOD_RES (1)..(34): Xaa is C or S
  MOD_RES (15)..(16)..(17)..(18)..(19): Xaa is A or G
  MOD_RES (20)..(21)..(22)..(23): Xaa is A or G or is absent
XVPQALEPLPIVYYXXXXXXXXXEQLSNMIVRSX

SEQ ID NO: 13761 - protein, 34 aa, Artificial Sequence
  GFR-binding peptide
  MOD_RES (32)..(34): Xaa is C or S
VPTELSPISMLFIDEYDKVVYKQYEEMVVEGXGX

SEQ ID NO: 13762 - protein, 40 aa, Artificial Sequence; identical to SEQ ID NO: 6379
  GFR-binding peptide
  MOD_RES (3)..(4)..(37)..(39): Xaa is C or S
  MOD_RES (18)..(19)..(20)..(21)..(22): Xaa is A or G
  MOD_RES (23)..(24)..(25)..(26): Xaa is A or G or is absent

SEQ ID NO: 13763 - protein, 38 aa, Artificial Sequence; identical to SEQ ID NO: 6380
  GFR-binding peptide
  MOD_RES (6)..(7): Xaa is C or S

SEQ ID NO: 13764 - protein, 34 aa, Artificial Sequence
  GFR-binding peptide
  MOD_RES (3)..(3): Xaa is C or S
PTXAPTKLEPLTVLYYDDSSNVIEQLSNNMVVRS

SEQ ID NO: 13765 - protein, 39 aa, Artificial Sequence; identical to SEQ ID NO: 6381
  GFR-binding peptide
  MOD_RES (4)..(5)..(36)..(38): Xaa is C or S

SEQ ID NO: 13766 - protein, 37 aa, Artificial Sequence
  GFR-binding peptide
  MOD_RES (3)..(4)..(37): Xaa is C or S
  MOD_RES (18)..(19)..(20)..(21)..(22): Xaa is A or G
  MOD_RES (23)..(24)..(25)..(26): Xaa is A or G or is absent
SPXXVPQDLEPLPIVYYXXXXXXXXXEQLSNMVVKSX

SEQ ID NO: 13767 - protein, 39 aa, Artificial Sequence; identical to SEQ ID NO: 6383
  GFR-binding peptide
  MOD_RES (5)..(6): Xaa is C or S
  MOD_RES (20)..(21)..(22)..(23)..(24): Xaa is A or G
  MOD_RES (25)..(26)..(27)..(28): Xaa is A or G or is absent

SEQ ID NO: 13768 - protein, 35 aa, Artificial Sequence; identical to SEQ ID NO: 6384
  GFR-binding peptide
  MOD_RES (33)..(35): Xaa is C or S
  MOD_RES (14)..(15)..(16)..(17)..(18): Xaa is A or G
  MOD_RES (19)..(20)..(21)..(22): Xaa is A or G or is absent

SEQ ID NO: 13769 - protein, 34 aa, Artificial Sequence
  GFR-binding peptide
  MOD_RES (1)..(2)..(33): Xaa is C or S
XXVPQALSPISILFIVGRKPKVYKQYEMIVRSXK

SEQ ID NO: 13770 - protein, 40 aa, Artificial Sequence
  GFR-binding peptide
  MOD_RES (7)..(7): Xaa is C or S
  MOD_RES (21)..(22)..(23)..(24)..(25): Xaa is A or G
  MOD_RES (26)..(27)..(28)..(29): Xaa is A or G or is absent
HVTKPTXAPTKLSPISVLFIXXXXXXXXXYKQYENMVVRS

SEQ ID NO: 13771 - protein, 40 aa, Artificial Sequence; identical to SEQ ID NO: 6387
  GFR-binding peptide
  MOD_RES (7)..(39): Xaa is C or S

SEQ ID NO: 13772 - protein, 39 aa, Artificial Sequence
  GFR-binding peptide
  MOD_RES (5)..(6): Xaa is C or S
  MOD_RES (20)..(21)..(22)..(23)..(24): Xaa is A or G
  MOD_RES (25)..(26)..(27)..(28): Xaa is A or G or is absent
VPKPXXAPTQLEPLTVLYYXXXXXXXXXEQLSNNMVVRA

SEQ ID NO: 13773 - protein, 35 aa, Artificial Sequence
  GFR-binding peptide
  MOD_RES (1)..(35): Xaa is C or S
  MOD_RES (15)..(16)..(17)..(18)..(19): Xaa is A or G
  MOD_RES (20)..(21)..(22)..(23): Xaa is A or G or is absent
XVPTRLEPLTILYYXXXXXXXXXEQLSNDMVVESX

SEQ ID NO: 13774 - protein, 36 aa, Artificial Sequence
  GFR-binding peptide
  MOD_RES (6)..(6): Xaa is C or S
VTKPTXAPTKLSPISVLFIDDSSNVIYKQYENMVVR

SEQ ID NO: 13775 - protein, 39 aa, Artificial Sequence
  GFR-binding peptide
  MOD_RES (6)..(7): Xaa is C or S
  MOD_RES (21)..(22)..(23)..(24)..(25): Xaa is A or G
  MOD_RES (26)..(27)..(28)..(29): Xaa is A or G or is absent
STPPTXXVPTRLSAISILYLXXXXXXXXXLKNYQDMVVE

SEQ ID NO: 13776 - protein, 34 aa, Artificial Sequence; identical to SEQ ID NO: 6392
  GFR-binding peptide
  MOD_RES (32)..(34): Xaa is C or S

SEQ ID NO: 13777 - protein, 41 aa, Artificial Sequence
  GFR-binding peptide
  MOD_RES (5)..(6)..(38)..(40): Xaa is C or S
TPPTXXVPTRLNAISILYFDSANNVVLKKYRDMVVESXGXR

SEQ ID NO: 13778 - protein, 38 aa, Artificial Sequence; identical to SEQ ID NO: 6394
  GFR-binding peptide
  MOD_RES (3)..(4)..(35)..(37): Xaa is C or S

SEQ ID NO: 13779 - protein, 39 aa, Artificial Sequence
  GFR-binding peptide
  MOD_RES (1)..(2)..(36)..(38): Xaa is C or S
  MOD_RES (16)..(17)..(18)..(19)..(20): Xaa is A or G
  MOD_RES (21)..(22)..(23)..(24): Xaa is A or G or is absent
XXVPTELEPLPMVYYXXXXXXXXXEQLSNDMVVEGXGXR

SEQ ID NO: 13780 - protein, 37 aa, Artificial Sequence
  GFR-binding peptide
  MOD_RES (2)..(3)..(36): Xaa is C or S
  MOD_RES (17)..(18)..(19)..(20)..(21): Xaa is A or G
  MOD_RES (22)..(23)..(24)..(25): Xaa is A or G or is absent
PXXVSQDLSPISILFIXXXXXXXXXYKQYEMIVKSXK

SEQ ID NO: 13781 - protein, 34 aa, Artificial Sequence
  GFR-binding peptide
  MOD_RES (1)..(2)..(34): Xaa is C or S
XXVPTELEPLTMLYYDEYDKVVEQLSNEMVVEGX

SEQ ID NO: 13782 - protein, 33 aa, Artificial Sequence
  GFR-binding peptide
  MOD_RES (2)..(3): Xaa is C or S
TXXVPTRLSAISILYLDSANNVVLKNYQDMVVE

SEQ ID NO: 13783 - protein, 30 aa, Artificial Sequence
  GFR-binding peptide
VPTELEPLPMVYYDENEKVVEQLSNDMVVE

SEQ ID NO: 13784 - protein, 37 aa, Artificial Sequence
  GFR-binding peptide
  MOD_RES (1)..(2)..(35)..(37): Xaa is C or S
  MOD_RES (16)..(17)..(18)..(19)..(20): Xaa is A or G
  MOD_RES (21)..(22)..(23)..(24): Xaa is A or G or is absent
XXVPQALSPISILFIXXXXXXXXXYKQYEMIVRSXKX

SEQ ID NO: 13785 - protein, 42 aa, Artificial Sequence
  GFR-binding peptide
  MOD_RES (5)..(6)..(40)..(42): Xaa is C or S
  MOD_RES (20)..(21)..(22)..(23)..(24): Xaa is A or G
  MOD_RES (25)..(26)..(27)..(28): Xaa is A or G or is absent
TPPTXXVPTRLSAISILYLXXXXXXXXXLKNYQDMVVESXGX

SEQ ID NO: 13786 - protein, 33 aa, Artificial Sequence; identical to SEQ ID NO: 6409
  GFR-binding peptide
  MOD_RES (2)..(2): Xaa is C or S

SEQ ID NO: 13787 - protein, 36 aa, Artificial Sequence
  GFR-binding peptide
  MOD_RES (3)..(3): Xaa is C or S
  MOD_RES (17)..(18)..(19)..(20)..(21): Xaa is A or G
  MOD_RES (22)..(23)..(24)..(25): Xaa is A or G or is absent
PTXAPTKLSPISVLFIXXXXXXXXXYKQYENMVVRS

SEQ ID NO: 13788 - protein, 39 aa, Artificial Sequence
  GFR-binding peptide
  MOD_RES (5)..(6)..(38): Xaa is C or S
IPKAXXVPTELEPLTMLYYDENEKVVEQLSNDMVVEGXG

SEQ ID NO: 13789 - protein, 37 aa, Artificial Sequence; identical to SEQ ID NO: 6411
  GFR-binding peptide
  MOD_RES (4)..(5): Xaa is C or S
  MOD_RES (19)..(20)..(21)..(22)..(23): Xaa is A or G
  MOD_RES (24)..(25)..(26)..(27): Xaa is A or G or is absent

SEQ ID NO: 13790 - protein, 35 aa, Artificial Sequence
  GFR-binding peptide
  MOD_RES (1)..(2): Xaa is C or S
  MOD_RES (16)..(17)..(18)..(19)..(20): Xaa is A or G
  MOD_RES (21)..(22)..(23)..(24): Xaa is A or G or is absent
XXAPTQLEPLPVVYYXXXXXXXXXEQLSNNMVVRA

SEQ ID NO: 13791 - protein, 35 aa, Artificial Sequence
  GFR-binding peptide
  MOD_RES (4)..(5): Xaa is C or S
PKPXXAPTKLEPLPVVYYDDSSNVIEQLSNNMVVR

SEQ ID NO: 13792 - protein, 35 aa, Artificial Sequence
  GFR-binding peptide
  MOD_RES (2)..(3)..(35): Xaa is C or S
PXXAPTKLEPLPVVYYDDSSNVIEQLSNNMVVRSX

SEQ ID NO: 13793 - protein, 36 aa, Artificial Sequence
  GFR-binding peptide
  MOD_RES (2)..(3)..(35): Xaa is C or S
AXXVPTELEPLPMVYYDEYDKVVEQLSNEMVVEGXG

SEQ ID NO: 13794 - protein, 36 aa, Artificial Sequence
  GFR-binding peptide
  MOD_RES (2)..(3)..(35): Xaa is C or S
PXXAPTKLEPLPVVYYDDSSNVIEQLSNNMVVRSXG

SEQ ID NO: 13795 - protein, 34 aa, Artificial Sequence
  GFR-binding peptide
  MOD_RES (32)..(34): Xaa is C or S
VPTRLNAISILYFDSANNVVLKKYRDMVVESXGX

SEQ ID NO: 13796 - protein, 32 aa, Artificial Sequence
  GFR-binding peptide
  MOD_RES (14)..(15)..(16)..(17)..(18): Xaa is A or G
  MOD_RES (19)..(20)..(21)..(22): Xaa is A or G or is absent
VPTELSPISMLFIXXXXXXXXXYKQYEDMVVE

SEQ ID NO: 13797 - protein, 39 aa, Artificial Sequence; identical to SEQ ID NO: 6418
  GFR-binding peptide
  MOD_RES (5)..(6)..(37)..(39): Xaa is C or S

SEQ ID NO: 13798 - protein, 37 aa, Artificial Sequence; identical to SEQ ID NO: 6419
  GFR-binding peptide
  MOD_RES (2)..(36): Xaa is C or S
  MOD_RES (16)..(17)..(18)..(19)..(20): Xaa is A or G
  MOD_RES (21)..(22)..(23)..(24): Xaa is A or G or is absent

SEQ ID NO: 13799 - protein, 39 aa, Artificial Sequence
  GFR-binding peptide
  MOD_RES (4)..(5)..(37)..(39): Xaa is C or S
PKAXXVPTELEPLTMLYYDENEKVVEQLSNDMVVEGXGX

SEQ ID NO: 13800 - protein, 35 aa, Artificial Sequence
  GFR-binding peptide
  MOD_RES (2)..(3)..(35): Xaa is C or S
TXXVPTRLNAISILYFDSANNVVLKKYRDMVVESX

SEQ ID NO: 13801 - protein, 35 aa, Artificial Sequence
  GFR-binding peptide
  MOD_RES (2)..(3)..(35): Xaa is C or S
PXXAPTQLSPISVLFIDDSSNVIYKQYENMVVRAX

SEQ ID NO: 13802 - protein, 39 aa, Artificial Sequence; identical to SEQ ID NO: 6424
  GFR-binding peptide
  MOD_RES (2)..(36)..(38): Xaa is C or S
  MOD_RES (16)..(17)..(18)..(19)..(20): Xaa is A or G
  MOD_RES (21)..(22)..(23)..(24): Xaa is A or G or is absent

SEQ ID NO: 13803 - protein, 34 aa, Artificial Sequence
  GFR-binding peptide
  MOD_RES (1)..(33): Xaa is C or S
XVPTELSPISMLFIDEYDKVVYKQYEEMVVEGXG

SEQ ID NO: 13804 - protein, 32 aa, Artificial Sequence
  GFR-binding peptide
  MOD_RES (32)..(32): Xaa is C or S
VPTELEPLTMLYYDENEKVVEQLSNDMVVEGX

SEQ ID NO: 13805 - protein, 33 aa, Artificial Sequence
  GFR-binding peptide
  MOD_RES (33)..(33): Xaa is C or S
  MOD_RES (14)..(15)..(16)..(17)..(18): Xaa is A or G
  MOD_RES (19)..(20)..(21)..(22): Xaa is A or G or is absent
VPQALSPISILFIXXXXXXXXXYKQYEMIVRSX

SEQ ID NO: 13806 - protein, 38 aa, Artificial Sequence; identical to SEQ ID NO: 6428
  GFR-binding peptide
  MOD_RES (4)..(5)..(38): Xaa is C or S
  MOD_RES (19)..(20)..(21)..(22)..(23): Xaa is A or G
  MOD_RES (24)..(25)..(26)..(27): Xaa is A or G or is absent

SEQ ID NO: 13807 - protein, 32 aa, Artificial Sequence
  GFR-binding peptide
  MOD_RES (31)..(31): Xaa is C or S
VPQALSPISILFIVGRKPKVYKQYEMIVRSXK

SEQ ID NO: 13808 - protein, 36 aa, Artificial Sequence
  GFR-binding peptide
  MOD_RES (1)..(33)..(35): Xaa is C or S
XAPTQLSPISVLFIDDSSNVIYKQYENMVVRAXGXH

SEQ ID NO: 13809 - protein, 42 aa, Artificial Sequence
  GFR-binding peptide
  MOD_RES (6)..(7)..(41): Xaa is C or S
  MOD_RES (21)..(22)..(23)..(24)..(25): Xaa is A or G
  MOD_RES (26)..(27)..(28)..(29): Xaa is A or G or is absent
SIPKAXXVPTELEPLTMLYYXXXXXXXXXEQLSNEMVVEGXG

SEQ ID NO: 13810 - protein, 40 aa, Artificial Sequence
  GFR-binding peptide
  MOD_RES (4)..(38)..(40): Xaa is C or S
  MOD_RES (18)..(19)..(20)..(21)..(22): Xaa is A or G
  MOD_RES (23)..(24)..(25)..(26): Xaa is A or G or is absent
KPTXAPTKLEPLPVVYYXXXXXXXXXEQLSNNMVVRSXGX

SEQ ID NO: 13811 - protein, 43 aa, Artificial Sequence
  GFR-binding peptide
  MOD_RES (6)..(7)..(40)..(42): Xaa is C or S
  MOD_RES (21)..(22)..(23)..(24)..(25): Xaa is A or G
  MOD_RES (26)..(27)..(28)..(29): Xaa is A or G or is absent
ASASPXXVSQDLEPLPIVYYXXXXXXXXXEQLSNMIVKSXKXS

SEQ ID NO: 13812 - protein, 37 aa, Artificial Sequence; identical to SEQ ID NO: 6432
  GFR-binding peptide
  MOD_RES (4)..(5)..(36): Xaa is C or S

SEQ ID NO: 13813 - protein, 32 aa, Artificial Sequence
  GFR-binding peptide
  MOD_RES (1)..(2): Xaa is C or S
XXVPTRLNAISILYFDSANNVVLKKYRDMVVE

SEQ ID NO: 13814 - protein, 40 aa, Artificial Sequence; identical to SEQ ID NO: 6434
  GFR-binding peptide
  MOD_RES (6)..(7): Xaa is C or S
  MOD_RES (21)..(22)..(23)..(24)..(25): Xaa is A or G
  MOD_RES (26)..(27)..(28)..(29): Xaa is A or G or is absent

SEQ ID NO: 13815 - protein, 41 aa, Artificial Sequence; identical to SEQ ID NO: 6436
  GFR-binding peptide
  MOD_RES (5)..(6)..(38)..(40): Xaa is C or S

SEQ ID NO: 13816 - protein, 36 aa, Artificial Sequence
  GFR-binding peptide
  MOD_RES (33)..(35): Xaa is C or S
  MOD_RES (14)..(15)..(16)..(17)..(18): Xaa is A or G
  MOD_RES (19)..(20)..(21)..(22): Xaa is A or G or is absent
VPQDLEPLPIVYYXXXXXXXXXEQLSNMVVKSXKXS

SEQ ID NO: 13817 - protein, 38 aa, Artificial Sequence; identical to SEQ ID NO: 6441
  GFR-binding peptide
  MOD_RES (3)..(4)..(37): Xaa is C or S
  MOD_RES (18)..(19)..(20)..(21)..(22): Xaa is A or G
  MOD_RES (23)..(24)..(25)..(26): Xaa is A or G or is absent

SEQ ID NO: 13818 - protein, 31 aa, Artificial Sequence
  GFR-binding peptide
  MOD_RES (1)..(1): Xaa is C or S
XVPTELEPLPMVYYDEYDKVVEQLSNEMVVE

SEQ ID NO: 13819 - protein, 34 aa, Artificial Sequence; identical to SEQ ID NO: 6442
  GFR-binding peptide
  MOD_RES (2)..(34): Xaa is C or S

SEQ ID NO: 13820 - protein, 38 aa, Artificial Sequence
  GFR-binding peptide
  MOD_RES (1)..(2)..(36)..(38): Xaa is C or S
  MOD_RES (16)..(17)..(18)..(19)..(20): Xaa is A or G
  MOD_RES (21)..(22)..(23)..(24): Xaa is A or G or is absent
XXVPTRLSPISILFIXXXXXXXXXYKQYEDMVVESXGX

SEQ ID NO: 13821 - protein, 35 aa, Artificial Sequence
  GFR-binding peptide
  MOD_RES (2)..(3)..(35): Xaa is C or S
AXXVPTELSPISMLFIDENEKVVYKQYEDMVVEGX

SEQ ID NO: 13822 - protein, 39 aa, Artificial Sequence
  GFR-binding peptide
  MOD_RES (5)..(37)..(39): Xaa is C or S
TKPTXAPTKLSPISVLFIDDSSNVIYKQYENMVVRSXGX

SEQ ID NO: 13823 - protein, 41 aa, Artificial Sequence
  GFR-binding peptide
  MOD_RES (6)..(38)..(40): Xaa is C or S
VTKPTXAPTKLEPLTVLYYDDSSNVIEQLSNNMVVRSXGXH

SEQ ID NO: 13824 - protein, 36 aa, Artificial Sequence
  GFR-binding peptide
  MOD_RES (2)..(3)..(35): Xaa is C or S
PXXAPTKLSPISVLFIDDSSNVIYKQYENMVVRSXG

SEQ ID NO: 13825 - protein, 41 aa, Artificial Sequence; identical to SEQ ID NO: 6443
  GFR-binding peptide
  MOD_RES (3)..(4)..(38)..(40): Xaa is C or S
  MOD_RES (18)..(19)..(20)..(21)..(22): Xaa is A or G
  MOD_RES (23)..(24)..(25)..(26): Xaa is A or G or is absent

SEQ ID NO: 13826 - protein, 36 aa, Artificial Sequence
  GFR-binding peptide
  MOD_RES (5)..(6): Xaa is C or S
IPKAXXVPTELSPISMLFIDEYDKVVYKQYEEMVVE

SEQ ID NO: 13827 - protein, 37 aa, Artificial Sequence
  GFR-binding peptide
  MOD_RES (1)..(35)..(37): Xaa is C or S
  MOD_RES (15)..(16)..(17)..(18)..(19): Xaa is A or G
  MOD_RES (20)..(21)..(22)..(23): Xaa is A or G or is absent
XAPTKLEPLTVLYYXXXXXXXXXEQLSNNMVVRSXGX

SEQ ID NO: 13828 - protein, 36 aa, Artificial Sequence; identical to SEQ ID NO: 6445
  GFR-binding peptide
  MOD_RES (4)..(5): Xaa is C or S

SEQ ID NO: 13829 - protein, 37 aa, Artificial Sequence; identical to SEQ ID NO: 6448
  GFR-binding peptide
  MOD_RES (34)..(36): Xaa is C or S
  MOD_RES (14)..(15)..(16)..(17)..(18): Xaa is A or G
  MOD_RES (19)..(20)..(21)..(22): Xaa is A or G or is absent

SEQ ID NO: 13830 - protein, 34 aa, Artificial Sequence; identical to SEQ ID NO: 6449
  GFR-binding peptide
  MOD_RES (31)..(33): Xaa is C or S

SEQ ID NO: 13831 - protein, 37 aa, Artificial Sequence
  GFR-binding peptide
  MOD_RES (3)..(4): Xaa is C or S
  MOD_RES (18)..(19)..(20)..(21)..(22): Xaa is A or G
  MOD_RES (23)..(24)..(25)..(26): Xaa is A or G or is absent
KPXXAPTKLEPLTVLYYXXXXXXXXXEQLSNNMVVRS

SEQ ID NO: 13832 - protein, 36 aa, Artificial Sequence
  GFR-binding peptide
  MOD_RES (34)..(36): Xaa is C or S
  MOD_RES (14)..(15)..(16)..(17)..(18): Xaa is A or G
  MOD_RES (19)..(20)..(21)..(22): Xaa is A or G or is absent
APTQLEPLTVLYYXXXXXXXXXEQLSNNMVVRAXGX

SEQ ID NO: 13833 - protein, 35 aa, Artificial Sequence; identical to SEQ ID NO: 6458
  GFR-binding peptide
  MOD_RES (2)..(3)..(35): Xaa is C or S

SEQ ID NO: 13834 - protein, 39 aa, Artificial Sequence
  GFR-binding peptide
  MOD_RES (1)..(2)..(36)..(38): Xaa is C or S
  MOD_RES (16)..(17)..(18)..(19)..(20): Xaa is A or G
  MOD_RES (21)..(22)..(23)..(24): Xaa is A or G or is absent
XXVPTRLSPISILFIXXXXXXXXXYKQYEDMVVESXGXR

SEQ ID NO: 13835 - protein, 39 aa, Artificial Sequence; identical to SEQ ID NO: 6461
  GFR-binding peptide
  MOD_RES (5)..(6)..(37)..(39): Xaa is C or S

SEQ ID NO: 13836 - protein, 40 aa, Artificial Sequence
  GFR-binding peptide
  MOD_RES (6)..(38)..(40): Xaa is C or S
VTKPTXAPTKLEPLTVLYYDDSSNVIEQLSNNMVVRSXGX

SEQ ID NO: 13837 - protein, 31 aa, Artificial Sequence
  GFR-binding peptide
  MOD_RES (31)..(31): Xaa is C or S
VPQALSPISILFIVGRKPKVYKQYEMIVRSX

SEQ ID NO: 13838 - protein, 42 aa, Artificial Sequence
  GFR-binding peptide
  MOD_RES (6)..(7)..(39)..(41): Xaa is C or S
KIPKAXXVPTELEPLPMVYYDENEKVVEQLSNDMVVEGXGXR

SEQ ID NO: 13839 - protein, 37 aa, Artificial Sequence
  GFR-binding peptide
  MOD_RES (1)..(2)..(36): Xaa is C or S
  MOD_RES (16)..(17)..(18)..(19)..(20): Xaa is A or G
  MOD_RES (21)..(22)..(23)..(24): Xaa is A or G or is absent
XXVPTELEPLPMVYYXXXXXXXXXEQLSNDMVVEGXG

SEQ ID NO: 13840 - protein, 42 aa, Artificial Sequence
  GFR-binding peptide
  MOD_RES (6)..(7)..(40)..(42): Xaa is C or S
  MOD_RES (21)..(22)..(23)..(24)..(25): Xaa is A or G
  MOD_RES (26)..(27)..(28)..(29): Xaa is A or G or is absent
ASASPXXVSQDLSPISILFIXXXXXXXXXYKQYEMIVKSXKX

SEQ ID NO: 13841 - protein, 36 aa, Artificial Sequence
  GFR-binding peptide
  MOD_RES (1)..(2)..(33)..(35): Xaa is C or S
XXVSQDLEPLPIVYYIGKTPKIEQLSNMIVKSXKXS

SEQ ID NO: 13842 - protein, 38 aa, Artificial Sequence; identical to SEQ ID NO: 6467
  GFR-binding peptide
  MOD_RES (2)..(3)..(36)..(38): Xaa is C or S
  MOD_RES (17)..(18)..(19)..(20)..(21): Xaa is A or G
  MOD_RES (22)..(23)..(24)..(25): Xaa is A or G or is absent

SEQ ID NO: 13843 - protein, 33 aa, Artificial Sequence
  GFR-binding peptide
  MOD_RES (31)..(33): Xaa is C or S
VPQALEPLTILYYVGRKPKVEQLSNMIVRSXKX

SEQ ID NO: 13844 - protein, 38 aa, Artificial Sequence
  GFR-binding peptide
  MOD_RES (4)..(5): Xaa is C or S
  MOD_RES (19)..(20)..(21)..(22)..(23): Xaa is A or G
  MOD_RES (24)..(25)..(26)..(27): Xaa is A or G or is absent
PKAXXVPTELEPLPMVYYXXXXXXXXXEQLSNEMVVEG

SEQ ID NO: 13845 - protein, 39 aa, Artificial Sequence
  GFR-binding peptide
  MOD_RES (1)..(2)..(36)..(38): Xaa is C or S
  MOD_RES (16)..(17)..(18)..(19)..(20): Xaa is A or G
  MOD_RES (21)..(22)..(23)..(24): Xaa is A or G or is absent
XXVPTELEPLTMLYYXXXXXXXXXEQLSNDMVVEGXGXR

SEQ ID NO: 13846 - protein, 36 aa, Artificial Sequence
  GFR-binding peptide
  MOD_RES (5)..(6): Xaa is C or S
IPKAXXVPTELSPISMLFIDENEKVVYKQYEDMVVE

SEQ ID NO: 13847 - protein, 36 aa, Artificial Sequence; identical to SEQ ID NO: 6473
  GFR-binding peptide
  MOD_RES (4)..(5)..(36): Xaa is C or S

SEQ ID NO: 13848 - protein, 35 aa, Artificial Sequence
  GFR-binding peptide
  MOD_RES (3)..(4): Xaa is C or S
PTXXVPTRLEPLTILYYDSANNVVEQLSNDMVVES

SEQ ID NO: 13849 - protein, 37 aa, Artificial Sequence; identical to SEQ ID NO: 6477
  GFR-binding peptide
  MOD_RES (1)..(2)..(35)..(37): Xaa is C or S
  MOD_RES (16)..(17)..(18)..(19)..(20): Xaa is A or G
  MOD_RES (21)..(22)..(23)..(24): Xaa is A or G or is absent

SEQ ID NO: 13850 - protein, 33 aa, Artificial Sequence; identical to SEQ ID NO: 6478
  GFR-binding peptide
  MOD_RES (2)..(3): Xaa is C or S

SEQ ID NO: 13851 - protein, 33 aa, Artificial Sequence
  GFR-binding peptide
  MOD_RES (2)..(3): Xaa is C or S
TXXVPTRLEPLTILYYDSANNVVEQLSNDMVVE

SEQ ID NO: 13852 - protein, 36 aa, Artificial Sequence
  GFR-binding peptide
  MOD_RES (3)..(4): Xaa is C or S
  MOD_RES (18)..(19)..(20)..(21)..(22): Xaa is A or G
  MOD_RES (23)..(24)..(25)..(26): Xaa is A or G or is absent
PTXXVPTRLSAISILYLXXXXXXXXXLKNYQDMVVE

SEQ ID NO: 13853 - protein, 42 aa, Artificial Sequence; identical to SEQ ID NO: 6480
  GFR-binding peptide
  MOD_RES (7)..(39)..(41): Xaa is C or S

SEQ ID NO: 13854 - protein, 34 aa, Artificial Sequence
  GFR-binding peptide
  MOD_RES (3)..(4): Xaa is C or S
KPXXAPTKLSPISVLFIDDSSNVIYKQYENMVVR

SEQ ID NO: 13855 - protein, 38 aa, Artificial Sequence
  GFR-binding peptide
  MOD_RES (6)..(7)..(38): Xaa is C or S
ASASPXXVPQDLSPISILFIVGRTPKVYKQYEMVVKSX

SEQ ID NO: 13856 - protein, 41 aa, Artificial Sequence; identical to SEQ ID NO: 6481
  GFR-binding peptide
  MOD_RES (6)..(40): Xaa is C or S
  MOD_RES (20)..(21)..(22)..(23)..(24): Xaa is A or G
  MOD_RES (25)..(26)..(27)..(28): Xaa is A or G or is absent

SEQ ID NO: 13857 - protein, 41 aa, Artificial Sequence; identical to SEQ ID NO: 6485
  GFR-binding peptide
  MOD_RES (5)..(6)..(40): Xaa is C or S
  MOD_RES (20)..(21)..(22)..(23)..(24): Xaa is A or G
  MOD_RES (25)..(26)..(27)..(28): Xaa is A or G or is absent

SEQ ID NO: 13858 - protein, 37 aa, Artificial Sequence
  GFR-binding peptide
  MOD_RES (6)..(7): Xaa is C or S
YVPKPXXAPTKLEPLTVLYYDDSSNVIEQLSNNMVVR

SEQ ID NO: 13859 - protein, 34 aa, Artificial Sequence; identical to SEQ ID NO: 6487
  GFR-binding peptide
  MOD_RES (1)..(2)..(34): Xaa is C or S

SEQ ID NO: 13860 - protein, 44 aa, Artificial Sequence; identical to SEQ ID NO: 6490
  GFR-binding peptide
  MOD_RES (6)..(7)..(41)..(43): Xaa is C or S
  MOD_RES (21)..(22)..(23)..(24)..(25): Xaa is A or G
  MOD_RES (26)..(27)..(28)..(29): Xaa is A or G or is absent

SEQ ID NO: 13861 - protein, 37 aa, Artificial Sequence
  GFR-binding peptide
  MOD_RES (1)..(2)..(34)..(36): Xaa is C or S
XXAPTKLEPLTVLYYDDSSNVIEQLSNNMVVRSXGXH

SEQ ID NO: 13862 - protein, 38 aa, Artificial Sequence
  GFR-binding peptide
  MOD_RES (3)..(4)..(37): Xaa is C or S
  MOD_RES (18)..(19)..(20)..(21)..(22): Xaa is A or G
  MOD_RES (23)..(24)..(25)..(26): Xaa is A or G or is absent
APXXVPQALSPISILFIXXXXXXXXXYKQYEMIVRSXK

SEQ ID NO: 13863 - protein, 38 aa, Artificial Sequence
  GFR-binding peptide
  MOD_RES (5)..(6)..(38): Xaa is C or S
IPKAXXVPTELEPLPMVYYDEYDKVVEQLSNEMVVEGX

SEQ ID NO: 13864 - protein, 32 aa, Artificial Sequence; identical to SEQ ID NO: 6491
  GFR-binding peptide
  MOD_RES (14)..(15)..(16)..(17)..(18): Xaa is A or G
  MOD_RES (19)..(20)..(21)..(22): Xaa is A or G or is absent

SEQ ID NO: 13865 - protein, 33 aa, Artificial Sequence
  GFR-binding peptide
  MOD_RES (2)..(3): Xaa is C or S
AXXVPTELEPLPMVYYDEYDKVVEQLSNEMVVE

SEQ ID NO: 13866 - protein, 38 aa, Artificial Sequence
  GFR-binding peptide
  MOD_RES (4)..(5)..(38): Xaa is C or S
  MOD_RES (19)..(20)..(21)..(22)..(23): Xaa is A or G
  MOD_RES (24)..(25)..(26)..(27): Xaa is A or G or is absent
ASPXXVPQDLEPLTILYYXXXXXXXXXEQLSNMVVKSX

SEQ ID NO: 13867 - protein, 38 aa, Artificial Sequence
  GFR-binding peptide
  MOD_RES (4)..(5)..(36)..(38): Xaa is C or S
AAPXXVPQALEPLTILYYVGRKPKVEQLSNMIVRSXKX

SEQ ID NO: 13868 - protein, 36 aa, Artificial Sequence
  GFR-binding peptide
  MOD_RES (3)..(4): Xaa is C or S
  MOD_RES (18)..(19)..(20)..(21)..(22): Xaa is A or G
  MOD_RES (23)..(24)..(25)..(26): Xaa is A or G or is absent
KPXXAPTQLEPLPVVYYXXXXXXXXXEQLSNNMVVR

SEQ ID NO: 13869 - protein, 33 aa, Artificial Sequence; identical to SEQ ID NO: 6498
  GFR-binding peptide
  MOD_RES (33)..(33): Xaa is C or S
  MOD_RES (14)..(15)..(16)..(17)..(18): Xaa is A or G
  MOD_RES (19)..(20)..(21)..(22): Xaa is A or G or is absent

SEQ ID NO: 13870 - protein, 35 aa, Artificial Sequence; identical to SEQ ID NO: 6500
  GFR-binding peptide
  MOD_RES (2)..(3): Xaa is C or S
  MOD_RES (17)..(18)..(19)..(20)..(21): Xaa is A or G
  MOD_RES (22)..(23)..(24)..(25): Xaa is A or G or is absent

SEQ ID NO: 13871 - protein, 34 aa, Artificial Sequence
  GFR-binding peptide
  MOD_RES (32)..(34): Xaa is C or S
VPTELEPLPMVYYDEYDKVVEQLSNEMVVEGXGX

SEQ ID NO: 13872 - protein, 40 aa, Artificial Sequence; identical to SEQ ID NO: 6504
  GFR-binding peptide
  MOD_RES (5)..(6)..(37)..(39): Xaa is C or S

SEQ ID NO: 13873 - protein, 35 aa, Artificial Sequence
  GFR-binding peptide
  MOD_RES (1)..(32)..(34): Xaa is C or S
XVPQDLSPISILFIVGRTPKVYKQYEMVVKSXKXS

SEQ ID NO: 13874 - protein, 39 aa, Artificial Sequence
  GFR-binding peptide
  MOD_RES (2)..(3)..(36)..(38): Xaa is C or S
  MOD_RES (17)..(18)..(19)..(20)..(21): Xaa is A or G
  MOD_RES (22)..(23)..(24)..(25): Xaa is A or G or is absent
PXXVPQDLEPLTILYYXXXXXXXXXEQLSNMVVKSXKXS

SEQ ID NO: 13875 - protein, 40 aa, Artificial Sequence
  GFR-binding peptide
  MOD_RES (4)..(5)..(38)..(40): Xaa is C or S
  MOD_RES (19)..(20)..(21)..(22)..(23): Xaa is A or G
  MOD_RES (24)..(25)..(26)..(27): Xaa is A or G or is absent
ASPXXVSQDLEPLPIVYYXXXXXXXXXEQLSNMIVKSXKX

SEQ ID NO: 13876 - protein, 36 aa, Artificial Sequence
  GFR-binding peptide
  MOD_RES (4)..(5)..(36): Xaa is C or S
ASPXXVSQDLEPLPIVYYIGKTPKIEQLSNMIVKSX

SEQ ID NO: 13877 - protein, 36 aa, Artificial Sequence; identical to SEQ ID NO: 6506
  GFR-binding peptide
  MOD_RES (2)..(3)..(36): Xaa is C or S
  MOD_RES (17)..(18)..(19)..(20)..(21): Xaa is A or G
  MOD_RES (22)..(23)..(24)..(25): Xaa is A or G or is absent

SEQ ID NO: 13878 - protein, 40 aa, Artificial Sequence
  GFR-binding peptide
  MOD_RES (5)..(6)..(38)..(40): Xaa is C or S
VPKPXXAPTKLEPLPVVYYDDSSNVIEQLSNNMVVRSXGX

SEQ ID NO: 13879 - protein, 41 aa, Artificial Sequence; identical to SEQ ID NO: 6507
  GFR-binding peptide
  MOD_RES (6)..(7)..(39)..(41): Xaa is C or S

SEQ ID NO: 13880 - protein, 33 aa, Artificial Sequence; identical to SEQ ID NO: 6508
  GFR-binding peptide
  MOD_RES (1)..(33): Xaa is C or S

SEQ ID NO: 13881 - protein, 40 aa, Artificial Sequence
  GFR-binding peptide
  MOD_RES (4)..(5)..(37)..(39): Xaa is C or S
PKAXXVPTELEPLTMLYYDENEKVVEQLSNDMVVEGXGXR

SEQ ID NO: 13882 - protein, 36 aa, Artificial Sequence
  GFR-binding peptide
  MOD_RES (2)..(3): Xaa is C or S
  MOD_RES (17)..(18)..(19)..(20)..(21): Xaa is A or G
  MOD_RES (22)..(23)..(24)..(25): Xaa is A or G or is absent
AXXVPTELEPLTMLYYXXXXXXXXXEQLSNDMVVEG

SEQ ID NO: 13883 - protein, 31 aa, Artificial Sequence; identical to SEQ ID NO: 6513
  GFR-binding peptide
  MOD_RES (1)..(1): Xaa is C or S

SEQ ID NO: 13884 - protein, 37 aa, Artificial Sequence; identical to SEQ ID NO: 6514
  GFR-binding peptide
  MOD_RES (6)..(6): Xaa is C or S

SEQ ID NO: 13885 - protein, 35 aa, Artificial Sequence; identical to SEQ ID NO: 6515
  GFR-binding peptide
  MOD_RES (2)..(2): Xaa is C or S
  MOD_RES (16)..(17)..(18)..(19)..(20): Xaa is A or G
  MOD_RES (21)..(22)..(23)..(24): Xaa is A or G or is absent

SEQ ID NO: 13886 - protein, 35 aa, Artificial Sequence
  GFR-binding peptide
  MOD_RES (2)..(3): Xaa is C or S
  MOD_RES (17)..(18)..(19)..(20)..(21): Xaa is A or G
  MOD_RES (22)..(23)..(24)..(25): Xaa is A or G or is absent
PXXAPTQLEPLTVLYYXXXXXXXXXEQLSNNMVVR

SEQ ID NO: 13887 - protein, 41 aa, Artificial Sequence; identical to SEQ ID NO: 6518
  GFR-binding peptide
  MOD_RES (6)..(7)..(40): Xaa is C or S
  MOD_RES (21)..(22)..(23)..(24)..(25): Xaa is A or G
  MOD_RES (26)..(27)..(28)..(29): Xaa is A or G or is absent

SEQ ID NO: 13888 - protein, 39 aa, Artificial Sequence; identical to SEQ ID NO: 6521
  GFR-binding peptide
  MOD_RES (2)..(3)..(36)..(38): Xaa is C or S
  MOD_RES (17)..(18)..(19)..(20)..(21): Xaa is A or G
  MOD_RES (22)..(23)..(24)..(25): Xaa is A or G or is absent

SEQ ID NO: 13889 - protein, 37 aa, Artificial Sequence; identical to SEQ ID NO: 6522
  GFR-binding peptide
  MOD_RES (4)..(5)..(37): Xaa is C or S

SEQ ID NO: 13890 - protein, 38 aa, Artificial Sequence; identical to SEQ ID NO: 6523
  GFR-binding peptide
  MOD_RES (5)..(5): Xaa is C or S
  MOD_RES (19)..(20)..(21)..(22)..(23): Xaa is A or G
  MOD_RES (24)..(25)..(26)..(27): Xaa is A or G or is absent

SEQ ID NO: 13891 - protein, 35 aa, Artificial Sequence
  GFR-binding peptide
  MOD_RES (1)..(33)..(35): Xaa is C or S
XVPTELEPLPMVYYDEYDKVVEQLSNEMVVEGXGX

SEQ ID NO: 13892 - protein, 38 aa, Artificial Sequence
  GFR-binding peptide
  MOD_RES (1)..(35)..(37): Xaa is C or S
  MOD_RES (15)..(16)..(17)..(18)..(19): Xaa is A or G
  MOD_RES (20)..(21)..(22)..(23): Xaa is A or G or is absent
XAPTKLEPLPVVYYXXXXXXXXXEQLSNNMVVRSXGXH

SEQ ID NO: 13893 - protein, 37 aa, Artificial Sequence
  GFR-binding peptide
  MOD_RES (34)..(36): Xaa is C or S
  MOD_RES (14)..(15)..(16)..(17)..(18): Xaa is A or G
  MOD_RES (19)..(20)..(21)..(22): Xaa is A or G or is absent
VPTELEPLPMVYYXXXXXXXXXEQLSNDMVVEGXGXR

SEQ ID NO: 13894 - protein, 37 aa, Artificial Sequence; identical to SEQ ID NO: 6526
  GFR-binding peptide
  MOD_RES (6)..(7): Xaa is C or S

SEQ ID NO: 13895 - protein, 36 aa, Artificial Sequence
  GFR-binding peptide
  MOD_RES (2)..(34)..(36): Xaa is C or S
TXAPTKLEPLTVLYYDDSSNVIEQLSNNMVVRSXGX

SEQ ID NO: 13896 - protein, 37 aa, Artificial Sequence; identical to SEQ ID NO: 6529
  GFR-binding peptide
  MOD_RES (5)..(37): Xaa is C or S

SEQ ID NO: 13897 - protein, 32 aa, Artificial Sequence; identical to SEQ ID NO: 6530
  GFR-binding peptide
  MOD_RES (32)..(32): Xaa is C or S

SEQ ID NO: 13898 - protein, 39 aa, Artificial Sequence
  GFR-binding peptide
  MOD_RES (6)..(7): Xaa is C or S
  MOD_RES (21)..(22)..(23)..(24)..(25): Xaa is A or G
  MOD_RES (26)..(27)..(28)..(29): Xaa is A or G or is absent
ASASPXXVSQDLEPLPIVYYXXXXXXXXXEQLSNMIVKS

SEQ ID NO: 13899 - protein, 39 aa, Artificial Sequence; identical to SEQ ID NO: 6535
  GFR-binding peptide
  MOD_RES (4)..(5)..(36)..(38): Xaa is C or S

SEQ ID NO: 13900 - protein, 38 aa, Artificial Sequence
  GFR-binding peptide
  MOD_RES (5)..(6): Xaa is C or S
  MOD_RES (20)..(21)..(22)..(23)..(24): Xaa is A or G
  MOD_RES (25)..(26)..(27)..(28): Xaa is A or G or is absent
SASPXXVPQDLEPLTILYYXXXXXXXXXEQLSNMVVKS

SEQ ID NO: 13901 - protein, 33 aa, Artificial Sequence
  GFR-binding peptide
  MOD_RES (1)..(1): Xaa is C or S
  MOD_RES (15)..(16)..(17)..(18)..(19): Xaa is A or G
  MOD_RES (20)..(21)..(22)..(23): Xaa is A or G or is absent
XVPQDLSPISILFIXXXXXXXXXYKQYEMVVKS

SEQ ID NO: 13902 - protein, 36 aa, Artificial Sequence
  GFR-binding peptide
  MOD_RES (2)..(3)..(35): Xaa is C or S
TXXVPTRLNAISILYFDSANNVVLKKYRDMVVESXG

SEQ ID NO: 13903 - protein, 37 aa, Artificial Sequence
  GFR-binding peptide
  MOD_RES (34)..(36): Xaa is C or S
  MOD_RES (14)..(15)..(16)..(17)..(18): Xaa is A or G
  MOD_RES (19)..(20)..(21)..(22): Xaa is A or G or is absent
APTKLEPLPVVYYXXXXXXXXXEQLSNNMVVRSXGXH

SEQ ID NO: 13904 - protein, 36 aa, Artificial Sequence; identical to SEQ ID NO: 6540
  GFR-binding peptide
  MOD_RES (34)..(36): Xaa is C or S
  MOD_RES (14)..(15)..(16)..(17)..(18): Xaa is A or G
  MOD_RES (19)..(20)..(21)..(22): Xaa is A or G or is absent

SEQ ID NO: 13905 - protein, 38 aa, Artificial Sequence; identical to SEQ ID NO: 6541
  GFR-binding peptide
  MOD_RES (1)..(2)..(36)..(38): Xaa is C or S
  MOD_RES (16)..(17)..(18)..(19)..(20): Xaa is A or G
  MOD_RES (21)..(22)..(23)..(24): Xaa is A or G or is absent

SEQ ID NO: 13906 - protein, 38 aa, Artificial Sequence
  GFR-binding peptide
  MOD_RES (2)..(3)..(37): Xaa is C or S
  MOD_RES (17)..(18)..(19)..(20)..(21): Xaa is A or G
  MOD_RES (22)..(23)..(24)..(25): Xaa is A or G or is absent
AXXVPTELSPISMLFIXXXXXXXXXYKQYEEMVVEGXG

SEQ ID NO: 13907 - protein, 40 aa, Artificial Sequence
  GFR-binding peptide
  MOD_RES (4)..(5)..(38)..(40): Xaa is C or S
  MOD_RES (19)..(20)..(21)..(22)..(23): Xaa is A or G
  MOD_RES (24)..(25)..(26)..(27): Xaa is A or G or is absent
AAPXXVPQALEPLPIVYYXXXXXXXXXEQLSNMIVRSXKX

SEQ ID NO: 13908 - protein, 35 aa, Artificial Sequence; identical to SEQ ID NO: 6542
  GFR-binding peptide
  MOD_RES (1)..(32)..(34): Xaa is C or S

SEQ ID NO: 13909 - protein, 37 aa, Artificial Sequence; identical to SEQ ID NO: 6543
  GFR-binding peptide
  MOD_RES (4)..(5)..(36): Xaa is C or S

SEQ ID NO: 13910 - protein, 35 aa, Artificial Sequence; identical to SEQ ID NO: 6544
  GFR-binding peptide
  MOD_RES (1)..(2)..(33)..(35): Xaa is C or S

SEQ ID NO: 13911 - protein, 37 aa, Artificial Sequence; identical to SEQ ID NO: 6546
  GFR-binding peptide
  MOD_RES (4)..(5): Xaa is C or S
  MOD_RES (19)..(20)..(21)..(22)..(23): Xaa is A or G
  MOD_RES (24)..(25)..(26)..(27): Xaa is A or G or is absent

SEQ ID NO: 13912 - protein, 37 aa, Artificial Sequence
  GFR-binding peptide
  MOD_RES (6)..(7): Xaa is C or S
SIPKAXXVPTELSPISMLFIDEYDKVVYKQYEEMVVE

SEQ ID NO: 13913 - protein, 36 aa, Artificial Sequence; identical to SEQ ID NO: 6547
  GFR-binding peptide
  MOD_RES (1)..(35): Xaa is C or S
  MOD_RES (15)..(16)..(17)..(18)..(19): Xaa is A or G
  MOD_RES (20)..(21)..(22)..(23): Xaa is A or G or is absent

SEQ ID NO: 13914 - protein, 35 aa, Artificial Sequence
  GFR-binding peptide
  MOD_RES (1)..(32)..(34): Xaa is C or S
XVPQALEPLTILYYVGRKPKVEQLSNMIVRSXKXS

SEQ ID NO: 13915 - protein, 35 aa, Artificial Sequence
  GFR-binding peptide
  MOD_RES (4)..(5): Xaa is C or S
PKPXXAPTQLSPISVLFIDDSSNVIYKQYENMVVR

SEQ ID NO: 13916 - protein, 40 aa, Artificial Sequence
  GFR-binding peptide
  MOD_RES (4)..(5)..(39): Xaa is C or S
  MOD_RES (19)..(20)..(21)..(22)..(23): Xaa is A or G
  MOD_RES (24)..(25)..(26)..(27): Xaa is A or G or is absent
PKAXXVPTELEPLTMLYYXXXXXXXXXEQLSNDMVVEGXG

SEQ ID NO: 13917 - protein, 35 aa, Artificial Sequence
  GFR-binding peptide
  MOD_RES (1)..(35): Xaa is C or S
  MOD_RES (15)..(16)..(17)..(18)..(19): Xaa is A or G
  MOD_RES (20)..(21)..(22)..(23): Xaa is A or G or is absent
XVPTRLNAISILYFXXXXXXXXXLKKYRDMVVESX

SEQ ID NO: 13918 - protein, 33 aa, Artificial Sequence; identical to SEQ ID NO: 6550
  GFR-binding peptide
  MOD_RES (33)..(33): Xaa is C or S
  MOD_RES (14)..(15)..(16)..(17)..(18): Xaa is A or G
  MOD_RES (19)..(20)..(21)..(22): Xaa is A or G or is absent

SEQ ID NO: 13919 - protein, 42 aa, Artificial Sequence
  GFR-binding peptide
  MOD_RES (4)..(5)..(39)..(41): Xaa is C or S
  MOD_RES (19)..(20)..(21)..(22)..(23): Xaa is A or G
  MOD_RES (24)..(25)..(26)..(27): Xaa is A or G or is absent
PKPXXAPTKLEPLTVLYYXXXXXXXXXEQLSNNMVVRSXGXH

SEQ ID NO: 13920 - protein, 41 aa, Artificial Sequence
  GFR-binding peptide
  MOD_RES (6)..(7)..(41): Xaa is C or S
  MOD_RES (21)..(22)..(23)..(24)..(25): Xaa is A or G
  MOD_RES (26)..(27)..(28)..(29): Xaa is A or G or is absent
KIPKAXXVPTELSPISMLFIXXXXXXXXXYKQYEDMVVEGX

SEQ ID NO: 13921 - protein, 35 aa, Artificial Sequence
  GFR-binding peptide
  MOD_RES (1)..(35): Xaa is C or S
  MOD_RES (15)..(16)..(17)..(18)..(19): Xaa is A or G
  MOD_RES (20)..(21)..(22)..(23): Xaa is A or G or is absent
XAPTQLSPISVLFIXXXXXXXXXYKQYENMVVRAX

SEQ ID NO: 13922 - protein, 34 aa, Artificial Sequence; identical to SEQ ID NO: 6551
  GFR-binding peptide
  MOD_RES (4)..(4): Xaa is C or S

SEQ ID NO: 13923 - protein, 36 aa, Artificial Sequence
  GFR-binding peptide
  MOD_RES (4)..(4): Xaa is C or S
  MOD_RES (18)..(19)..(20)..(21)..(22): Xaa is A or G
  MOD_RES (23)..(24)..(25)..(26): Xaa is A or G or is absent
KPTXAPTKLSPISVLFIXXXXXXXXXYKQYENMVVR

SEQ ID NO: 13924 - protein, 38 aa, Artificial Sequence
  GFR-binding peptide
  MOD_RES (4)..(5)..(36)..(38): Xaa is C or S
ASPXXVSQDLEPLPIVYYIGKTPKIEQLSNMIVKSXKX

SEQ ID NO: 13925 - protein, 38 aa, Artificial Sequence
  GFR-binding peptide
  MOD_RES (4)..(5): Xaa is C or S
  MOD_RES (19)..(20)..(21)..(22)..(23): Xaa is A or G
  MOD_RES (24)..(25)..(26)..(27): Xaa is A or G or is absent
PPTXXVPTRLSAISILYLXXXXXXXXXLKNYQDMVVES

SEQ ID NO: 13926 - protein, 33 aa, Artificial Sequence
  GFR-binding peptide
  MOD_RES (2)..(3): Xaa is C or S
PXXAPTQLEPLTVLYYDDSSNVIEQLSNNMVVR

SEQ ID NO: 13927 - protein, 38 aa, Artificial Sequence
  GFR-binding peptide
  MOD_RES (4)..(5): Xaa is C or S
  MOD_RES (19)..(20)..(21)..(22)..(23): Xaa is A or G
  MOD_RES (24)..(25)..(26)..(27): Xaa is A or G or is absent
PKPXXAPTQLEPLPVVYYXXXXXXXXXEQLSNNMVVRA

SEQ ID NO: 13928 - protein, 36 aa, Artificial Sequence; identical to SEQ ID NO: 6558
  GFR-binding peptide
  MOD_RES (1)..(34)..(36): Xaa is C or S
  MOD_RES (15)..(16)..(17)..(18)..(19): Xaa is A or G
  MOD_RES (20)..(21)..(22)..(23): Xaa is A or G or is absent

SEQ ID NO: 13929 - protein, 34 aa, Artificial Sequence
  GFR-binding peptide
  MOD_RES (1)..(32)..(34): Xaa is C or S
XVPQALEPLTILYYVGRKPKVEQLSNMIVRSXKX

SEQ ID NO: 13930 - protein, 39 aa, Artificial Sequence
  GFR-binding peptide
  MOD_RES (3)..(4)..(36)..(38): Xaa is C or S
PTXXVPTRLEPLPIVYYDSANNVVEQLSNDMVVESXGXR

SEQ ID NO: 13931 - protein, 39 aa, Artificial Sequence
  GFR-binding peptide
  MOD_RES (3)..(4)..(38): Xaa is C or S
  MOD_RES (18)..(19)..(20)..(21)..(22): Xaa is A or G
  MOD_RES (23)..(24)..(25)..(26): Xaa is A or G or is absent
KPXXAPTKLEPLPVVYYXXXXXXXXXEQLSNNMVVRSXG

SEQ ID NO: 13932 - protein, 38 aa, Artificial Sequence
  GFR-binding peptide
  MOD_RES (6)..(7): Xaa is C or S
TVPKPXXAPTQLSPISVLFIDDSSNVIYKQYENMVVRA

SEQ ID NO: 13933 - protein, 31 aa, Artificial Sequence
  GFR-binding peptide
VPTRLEPLPIVYYDSANNVVEQLSNDMVVES

SEQ ID NO: 13934 - protein, 41 aa, Artificial Sequence
  GFR-binding peptide
  MOD_RES (5)..(6)..(38)..(40): Xaa is C or S
IPKAXXVPTELEPLTMLYYDENEKVVEQLSNDMVVEGXGXR

SEQ ID NO: 13935 - protein, 35 aa, Artificial Sequence
  GFR-binding peptide
  MOD_RES (3)..(4): Xaa is C or S
PTXXVPTRLEPLPIVYYDSANNVVEQLSNDMVVES

SEQ ID NO: 13936 - protein, 35 aa, Artificial Sequence; identical to SEQ ID NO: 6562
  GFR-binding peptide
  MOD_RES (4)..(4): Xaa is C or S

SEQ ID NO: 13937 - protein, 31 aa, Artificial Sequence
  GFR-binding peptide
  MOD_RES (1)..(1): Xaa is C or S
XVPQALEPLTILYYVGRKPKVEQLSNMIVRS

SEQ ID NO: 13938 - protein, 38 aa, Artificial Sequence
  GFR-binding peptide
  MOD_RES (5)..(6): Xaa is C or S
  MOD_RES (20)..(21)..(22)..(23)..(24): Xaa is A or G
  MOD_RES (25)..(26)..(27)..(28): Xaa is A or G or is absent
IPKAXXVPTELEPLPMVYYXXXXXXXXXEQLSNEMVVE

SEQ ID NO: 13939 - protein, 39 aa, Artificial Sequence
  GFR-binding peptide
  MOD_RES (6)..(7): Xaa is C or S
  MOD_RES (21)..(22)..(23)..(24)..(25): Xaa is A or G
  MOD_RES (26)..(27)..(28)..(29): Xaa is A or G or is absent
STPPTXXVPTRLSPISILFIXXXXXXXXXYKQYEDMVVE

SEQ ID NO: 13940 - protein, 42 aa, Artificial Sequence
  GFR-binding peptide
  MOD_RES (5)..(6)..(40)..(42): Xaa is C or S
  MOD_RES (20)..(21)..(22)..(23)..(24): Xaa is A or G
  MOD_RES (25)..(26)..(27)..(28): Xaa is A or G or is absent
IPKAXXVPTELEPLPMVYYXXXXXXXXXEQLSNDMVVEGXGX

SEQ ID NO: 13941 - protein, 34 aa, Artificial Sequence
  GFR-binding peptide
  MOD_RES (1)..(32)..(34): Xaa is C or S
XVSQDLEPLPIVYYIGKTPKIEQLSNMIVKSXKX

SEQ ID NO: 13942 - protein, 36 aa, Artificial Sequence
  GFR-binding peptide
  MOD_RES (3)..(4): Xaa is C or S
  MOD_RES (18)..(19)..(20)..(21)..(22): Xaa is A or G
  MOD_RES (23)..(24)..(25)..(26): Xaa is A or G or is absent
SPXXVPQDLEPLPIVYYXXXXXXXXXEQLSNMVVKS

SEQ ID NO: 13943 - protein, 38 aa, Artificial Sequence
  GFR-binding peptide
  MOD_RES (4)..(5): Xaa is C or S
  MOD_RES (19)..(20)..(21)..(22)..(23): Xaa is A or G
  MOD_RES (24)..(25)..(26)..(27): Xaa is A or G or is absent
PKAXXVPTELSPISMLFIXXXXXXXXXYKQYEDMVVEG

SEQ ID NO: 13944 - protein, 40 aa, Artificial Sequence
  GFR-binding peptide
  MOD_RES (2)..(3)..(37)..(39): Xaa is C or S
  MOD_RES (17)..(18)..(19)..(20)..(21): Xaa is A or G
  MOD_RES (22)..(23)..(24)..(25): Xaa is A or G or is absent
AXXVPTELEPLTMLYYXXXXXXXXXEQLSNDMVVEGXGXR

SEQ ID NO: 13945 - protein, 41 aa, Artificial Sequence; identical to SEQ ID NO: 6574
  GFR-binding peptide
  MOD_RES (6)..(7)..(41): Xaa is C or S
  MOD_RES (21)..(22)..(23)..(24)..(25): Xaa is A or G
  MOD_RES (26)..(27)..(28)..(29): Xaa is A or G or is absent

SEQ ID NO: 13946 - protein, 34 aa, Artificial Sequence; identical to SEQ ID NO: 6575
  GFR-binding peptide
  MOD_RES (31)..(33): Xaa is C or S

SEQ ID NO: 13947 - protein, 39 aa, Artificial Sequence
  GFR-binding peptide
  MOD_RES (4)..(5)..(39): Xaa is C or S
  MOD_RES (19)..(20)..(21)..(22)..(23): Xaa is A or G
  MOD_RES (24)..(25)..(26)..(27): Xaa is A or G or is absent
PKAXXVPTELEPLPMVYYXXXXXXXXXEQLSNEMVVEGX

SEQ ID NO: 13948 - protein, 41 aa, Artificial Sequence
  GFR-binding peptide
  MOD_RES (5)..(6)..(38)..(40): Xaa is C or S
VPKPXXAPTKLSPISVLFIDDSSNVIYKQYENMVVRSXGXH

SEQ ID NO: 13949 - protein, 35 aa, Artificial Sequence
  GFR-binding peptide
  MOD_RES (3)..(4)..(35): Xaa is C or S
APXXVPQALSPISILFIVGRKPKVYKQYEMIVRSX

SEQ ID NO: 13950 - protein, 30 aa, Artificial Sequence; identical to SEQ ID NO: 6580
  GFR-binding peptide

SEQ ID NO: 13951 - protein, 39 aa, Artificial Sequence
  GFR-binding peptide
  MOD_RES (5)..(6): Xaa is C or S
  MOD_RES (20)..(21)..(22)..(23)..(24): Xaa is A or G
  MOD_RES (25)..(26)..(27)..(28): Xaa is A or G or is absent
VPKPXXAPTKLEPLTVLYYXXXXXXXXXEQLSNNMVVRS

SEQ ID NO: 13952 - protein, 41 aa, Artificial Sequence
  GFR-binding peptide
  MOD_RES (6)..(7)..(41): Xaa is C or S
  MOD_RES (21)..(22)..(23)..(24)..(25): Xaa is A or G
  MOD_RES (26)..(27)..(28)..(29): Xaa is A or G or is absent
YVPKPXXAPTKLSPISVLFIXXXXXXXXXYKQYENMVVRSX

SEQ ID NO: 13953 - protein, 33 aa, Artificial Sequence
  GFR-binding peptide
  MOD_RES (1)..(2): Xaa is C or S
XXVPTRLSAISILYLDSANNVVLKNYQDMVVES

SEQ ID NO: 13954 - protein, 37 aa, Artificial Sequence
  GFR-binding peptide
  MOD_RES (3)..(4): Xaa is C or S
  MOD_RES (18)..(19)..(20)..(21)..(22): Xaa is A or G
  MOD_RES (23)..(24)..(25)..(26): Xaa is A or G or is absent
KPXXAPTKLSPISVLFIXXXXXXXXXYKQYENMVVRS

SEQ ID NO: 13955 - protein, 34 aa, Artificial Sequence; identical to SEQ ID NO: 6585
  GFR-binding peptide
  MOD_RES (34)..(34): Xaa is C or S
  MOD_RES (14)..(15)..(16)..(17)..(18): Xaa is A or G
  MOD_RES (19)..(20)..(21)..(22): Xaa is A or G or is absent

SEQ ID NO: 13956 - protein, 34 aa, Artificial Sequence; identical to SEQ ID NO: 6589
  GFR-binding peptide
  MOD_RES (1)..(1): Xaa is C or S
  MOD_RES (15)..(16)..(17)..(18)..(19): Xaa is A or G
  MOD_RES (20)..(21)..(22)..(23): Xaa is A or G or is absent

SEQ ID NO: 13957 - protein, 34 aa, Artificial Sequence
  GFR-binding peptide
  MOD_RES (4)..(4): Xaa is C or S
KPTXAPTKLEPLPVVYYDDSSNVIEQLSNNMVVR

SEQ ID NO: 13958 - protein, 35 aa, Artificial Sequence
  GFR-binding peptide
  MOD_RES (1)..(2): Xaa is C or S
  MOD_RES (16)..(17)..(18)..(19)..(20): Xaa is A or G
  MOD_RES (21)..(22)..(23)..(24): Xaa is A or G or is absent
XXAPTKLEPLPVVYYXXXXXXXXXEQLSNNMVVRS

SEQ ID NO: 13959 - protein, 37 aa, Artificial Sequence
  GFR-binding peptide
  MOD_RES (4)..(4): Xaa is C or S
  MOD_RES (18)..(19)..(20)..(21)..(22): Xaa is A or G
  MOD_RES (23)..(24)..(25)..(26): Xaa is A or G or is absent
KPTXAPTKLSPISVLFIXXXXXXXXXYKQYENMVVRS

SEQ ID NO: 13960 - protein, 37 aa, Artificial Sequence
  GFR-binding peptide
  MOD_RES (7)..(7): Xaa is C or S
HVTKPTXAPTKLEPLPVVYYDDSSNVIEQLSNNMVVR

SEQ ID NO: 13961 - protein, 35 aa, Artificial Sequence; identical to SEQ ID NO: 6594
  GFR-binding peptide
  MOD_RES (1)..(2): Xaa is C or S
  MOD_RES (16)..(17)..(18)..(19)..(20): Xaa is A or G
  MOD_RES (21)..(22)..(23)..(24): Xaa is A or G or is absent

SEQ ID NO: 13962 - protein, 32 aa, Artificial Sequence
  GFR-binding peptide
  MOD_RES (1)..(1): Xaa is C or S
XVPTRLNAISILYFDSANNVVLKKYRDMVVES

SEQ ID NO: 13963 - protein, 41 aa, Artificial Sequence
  GFR-binding peptide
  MOD_RES (6)..(7)..(40): Xaa is C or S
  MOD_RES (21)..(22)..(23)..(24)..(25): Xaa is A or G
  MOD_RES (26)..(27)..(28)..(29): Xaa is A or G or is absent
ASASPXXVPQDLEPLPIVYYXXXXXXXXXEQLSNMVVKSXK

SEQ ID NO: 13964 - protein, 34 aa, Artificial Sequence
  GFR-binding peptide
  MOD_RES (1)..(2): Xaa is C or S
  MOD_RES (16)..(17)..(18)..(19)..(20): Xaa is A or G
  MOD_RES (21)..(22)..(23)..(24): Xaa is A or G or is absent
XXVPTELSPISMLFIXXXXXXXXXYKQYEDMVVE

SEQ ID NO: 13965 - protein, 36 aa, Artificial Sequence; identical to SEQ ID NO: 6602
  GFR-binding peptide
  MOD_RES (1)..(2)..(35): Xaa is C or S
  MOD_RES (16)..(17)..(18)..(19)..(20): Xaa is A or G
  MOD_RES (21)..(22)..(23)..(24): Xaa is A or G or is absent

SEQ ID NO: 13966 - protein, 34 aa, Artificial Sequence
  GFR-binding peptide
  MOD_RES (2)..(34): Xaa is C or S
TXAPTKLEPLTVLYYDDSSNVIEQLSNNMVVRSX

SEQ ID NO: 13967 - protein, 42 aa, Artificial Sequence
  GFR-binding peptide
  MOD_RES (6)..(7)..(41): Xaa is C or S
  MOD_RES (21)..(22)..(23)..(24)..(25): Xaa is A or G
  MOD_RES (26)..(27)..(28)..(29): Xaa is A or G or is absent
STPPTXXVPTRLEPLPIVYYXXXXXXXXXEQLSNDMVVESXG

SEQ ID NO: 13968 - protein, 42 aa, Artificial Sequence
  GFR-binding peptide
  MOD_RES (6)..(7)..(41): Xaa is C or S
  MOD_RES (21)..(22)..(23)..(24)..(25): Xaa is A or G
  MOD_RES (26)..(27)..(28)..(29): Xaa is A or G or is absent
SIPKAXXVPTELSPISMLFIXXXXXXXXXYKQYEEMVVEGXG

SEQ ID NO: 13969 - protein, 36 aa, Artificial Sequence
  GFR-binding peptide
  MOD_RES (3)..(4)..(36): Xaa is C or S
KAXXVPTELEPLTMLYYDENEKVVEQLSNDMVVEGX

SEQ ID NO: 13970 - protein, 33 aa, Artificial Sequence
  GFR-binding peptide
  MOD_RES (2)..(3): Xaa is C or S
PXXVSQDLSPISILFIIGKTPKIYKQYEMIVKS

SEQ ID NO: 13971 - protein, 37 aa, Artificial Sequence
  GFR-binding peptide
  MOD_RES (5)..(6)..(37): Xaa is C or S
SASPXXVSQDLSPISILFIIGKTPKIYKQYEMIVKSX

SEQ ID NO: 13972 - protein, 37 aa, Artificial Sequence; identical to SEQ ID NO: 6607
  GFR-binding peptide
  MOD_RES (4)..(5): Xaa is C or S
  MOD_RES (19)..(20)..(21)..(22)..(23): Xaa is A or G
  MOD_RES (24)..(25)..(26)..(27): Xaa is A or G or is absent

SEQ ID NO: 13973 - protein, 41 aa, Artificial Sequence
  GFR-binding peptide
  MOD_RES (6)..(7)..(41): Xaa is C or S
  MOD_RES (21)..(22)..(23)..(24)..(25): Xaa is A or G
  MOD_RES (26)..(27)..(28)..(29): Xaa is A or G or is absent
STPPTXXVPTRLSAISILYLXXXXXXXXXLKNYQDMVVESX

SEQ ID NO: 13974 - protein, 36 aa, Artificial Sequence; identical to SEQ ID NO: 6608
  GFR-binding peptide
  MOD_RES (2)..(3)..(35): Xaa is C or S

SEQ ID NO: 13975 - protein, 30 aa, Artificial Sequence; identical to SEQ ID NO: 6610
  GFR-binding peptide

SEQ ID NO: 13976 - protein, 38 aa, Artificial Sequence
  GFR-binding peptide
  MOD_RES (1)..(2)..(36)..(38): Xaa is C or S
  MOD_RES (16)..(17)..(18)..(19)..(20): Xaa is A or G
  MOD_RES (21)..(22)..(23)..(24): Xaa is A or G or is absent
XXAPTQLEPLTVLYYXXXXXXXXXEQLSNNMVVRAXGX

SEQ ID NO: 13977 - protein, 33 aa, Artificial Sequence; identical to SEQ ID NO: 6611
  GFR-binding peptide
  MOD_RES (1)..(2): Xaa is C or S

SEQ ID NO: 13978 - protein, 32 aa, Artificial Sequence
  GFR-binding peptide
  MOD_RES (14)..(15)..(16)..(17)..(18): Xaa is A or G
  MOD_RES (19)..(20)..(21)..(22): Xaa is A or G or is absent
VPTRLNAISILYFXXXXXXXXXLKKYRDMVVE

SEQ ID NO: 13979 - protein, 34 aa, Artificial Sequence
  GFR-binding peptide
  MOD_RES (1)..(1): Xaa is C or S
  MOD_RES (15)..(16)..(17)..(18)..(19): Xaa is A or G
  MOD_RES (20)..(21)..(22)..(23): Xaa is A or G or is absent
XAPTKLEPLPVVYYXXXXXXXXXEQLSNNMVVRS

SEQ ID NO: 13980 - protein, 31 aa, Artificial Sequence; identical to SEQ ID NO: 6616
  GFR-binding peptide
  MOD_RES (31)..(31): Xaa is C or S

SEQ ID NO: 13981 - protein, 40 aa, Artificial Sequence
  GFR-binding peptide
  MOD_RES (7)..(39): Xaa is C or S
HVTKPTXAPTKLEPLPVVYYDDSSNVIEQLSNNMVVRSXG

SEQ ID NO: 13982 - protein, 39 aa, Artificial Sequence; identical to SEQ ID NO: 6617
  GFR-binding peptide
  MOD_RES (5)..(6)..(39): Xaa is C or S
  MOD_RES (20)..(21)..(22)..(23)..(24): Xaa is A or G
  MOD_RES (25)..(26)..(27)..(28): Xaa is A or G or is absent

SEQ ID NO: 13983 - protein, 40 aa, Artificial Sequence
  GFR-binding peptide
  MOD_RES (5)..(6)..(40): Xaa is C or S
  MOD_RES (20)..(21)..(22)..(23)..(24): Xaa is A or G
  MOD_RES (25)..(26)..(27)..(28): Xaa is A or G or is absent
VPKPXXAPTQLEPLPVVYYXXXXXXXXXEQLSNNMVVRAX

SEQ ID NO: 13984 - protein, 31 aa, Artificial Sequence
  GFR-binding peptide
APTKLEPLTVLYYDDSSNVIEQLSNNMVVRS

SEQ ID NO: 13985 - protein, 35 aa, Artificial Sequence
  GFR-binding peptide
  MOD_RES (34)..(34): Xaa is C or S
  MOD_RES (14)..(15)..(16)..(17)..(18): Xaa is A or G
  MOD_RES (19)..(20)..(21)..(22): Xaa is A or G or is absent
VPTELSPISMLFIXXXXXXXXXYKQYEDMVVEGXG

SEQ ID NO: 13986 - protein, 37 aa, Artificial Sequence
  GFR-binding peptide
  MOD_RES (3)..(4): Xaa is C or S
  MOD_RES (18)..(19)..(20)..(21)..(22): Xaa is A or G
  MOD_RES (23)..(24)..(25)..(26): Xaa is A or G or is absent
PTXXVPTRLSPISILFIXXXXXXXXXYKQYEDMVVES

SEQ ID NO: 13987 - protein, 37 aa, Artificial Sequence
  GFR-binding peptide
  MOD_RES (3)..(4): Xaa is C or S
  MOD_RES (18)..(19)..(20)..(21)..(22): Xaa is A or G
  MOD_RES (23)..(24)..(25)..(26): Xaa is A or G or is absent
KAXXVPTELEPLPMVYYXXXXXXXXXEQLSNDMVVEG

SEQ ID NO: 13988 - protein, 38 aa, Artificial Sequence
  GFR-binding peptide
  MOD_RES (1)..(35)..(37): Xaa is C or S
  MOD_RES (15)..(16)..(17)..(18)..(19): Xaa is A or G
  MOD_RES (20)..(21)..(22)..(23): Xaa is A or G or is absent
XVPTELEPLPMVYYXXXXXXXXXEQLSNDMVVEGXGXR

SEQ ID NO: 13989 - protein, 41 aa, Artificial Sequence; identical to SEQ ID NO: 6621
  GFR-binding peptide
  MOD_RES (4)..(5)..(38)..(40): Xaa is C or S
  MOD_RES (19)..(20)..(21)..(22)..(23): Xaa is A or G
  MOD_RES (24)..(25)..(26)..(27): Xaa is A or G or is absent

SEQ ID NO: 13990 - protein, 39 aa, Artificial Sequence; identical to SEQ ID NO: 6623
  GFR-binding peptide
  MOD_RES (6)..(7): Xaa is C or S
  MOD_RES (21)..(22)..(23)..(24)..(25): Xaa is A or G
  MOD_RES (26)..(27)..(28)..(29): Xaa is A or G or is absent

SEQ ID NO: 13991 - protein, 36 aa, Artificial Sequence
  GFR-binding peptide
  MOD_RES (1)..(2)..(34)..(36): Xaa is C or S
XXAPTQLEPLTVLYYDDSSNVIEQLSNNMVVRAXGX

SEQ ID NO: 13992 - protein, 39 aa, Artificial Sequence
  GFR-binding peptide
  MOD_RES (5)..(6): Xaa is C or S
  MOD_RES (20)..(21)..(22)..(23)..(24): Xaa is A or G
  MOD_RES (25)..(26)..(27)..(28): Xaa is A or G or is absent
IPKAXXVPTELSPISMLFIXXXXXXXXXYKQYEEMVVEG

SEQ ID NO: 13993 - protein, 34 aa, Artificial Sequence
  GFR-binding peptide
  MOD_RES (1)..(2): Xaa is C or S
  MOD_RES (16)..(17)..(18)..(19)..(20): Xaa is A or G
  MOD_RES (21)..(22)..(23)..(24): Xaa is A or G or is absent
XXVSQDLSPISILFIXXXXXXXXXYKQYEMIVKS

SEQ ID NO: 13994 - protein, 38 aa, Artificial Sequence
  GFR-binding peptide
  MOD_RES (4)..(5)..(38): Xaa is C or S
  MOD_RES (19)..(20)..(21)..(22)..(23): Xaa is A or G
  MOD_RES (24)..(25)..(26)..(27): Xaa is A or G or is absent
AAPXXVPQALSPISILFIXXXXXXXXXYKQYEMIVRSX

SEQ ID NO: 13995 - protein, 42 aa, Artificial Sequence
  GFR-binding peptide
  MOD_RES (5)..(6)..(40)..(42): Xaa is C or S
  MOD_RES (20)..(21)..(22)..(23)..(24): Xaa is A or G
  MOD_RES (25)..(26)..(27)..(28): Xaa is A or G or is absent
IPKAXXVPTELEPLPMVYYXXXXXXXXXEQLSNEMVVEGXGX

SEQ ID NO: 13996 - protein, 30 aa, Artificial Sequence
  GFR-binding peptide
VPTELEPLTMLYYDEYDKVVEQLSNEMVVE

SEQ ID NO: 13997 - protein, 37 aa, Artificial Sequence
  GFR-binding peptide
  MOD_RES (6)..(7): Xaa is C or S
YVPKPXXAPTKLEPLPVVYYDDSSNVIEQLSNNMVVR

SEQ ID NO: 13998 - protein, 36 aa, Artificial Sequence
  GFR-binding peptide
  MOD_RES (1)..(33)..(35): Xaa is C or S
XAPTKLEPLTVLYYDDSSNVIEQLSNNMVVRSXGXH

SEQ ID NO: 13999 - protein, 40 aa, Artificial Sequence
  GFR-binding peptide
  MOD_RES (6)..(7)..(39): Xaa is C or S
STPPTXXVPTRLEPLTILYYDSANNVVEQLSNDMVVESXG

SEQ ID NO: 14000 - protein, 43 aa, Artificial Sequence
  GFR-binding peptide
  MOD_RES (6)..(7)..(40)..(42): Xaa is C or S
  MOD_RES (21)..(22)..(23)..(24)..(25): Xaa is A or G
  MOD_RES (26)..(27)..(28)..(29): Xaa is A or G or is absent
ASASPXXVPQDLEPLTILYYXXXXXXXXXEQLSNMVVKSXKXS

SEQ ID NO: 14001 - protein, 40 aa, Artificial Sequence
  GFR-binding peptide
  MOD_RES (4)..(5)..(39): Xaa is C or S
  MOD_RES (19)..(20)..(21)..(22)..(23): Xaa is A or G
  MOD_RES (24)..(25)..(26)..(27): Xaa is A or G or is absent
PPTXXVPTRLSAISILYLXXXXXXXXXLKNYQDMVVESXG

SEQ ID NO: 14002 - protein, 35 aa, Artificial Sequence
  GFR-binding peptide
  MOD_RES (1)..(2)..(33)..(35): Xaa is C or S
XXVPQALSPISILFIVGRKPKVYKQYEMIVRSXKX

SEQ ID NO: 14003 - protein, 37 aa, Artificial Sequence; identical to SEQ ID NO: 6632
  GFR-binding peptide
  MOD_RES (2)..(3)..(37): Xaa is C or S
  MOD_RES (17)..(18)..(19)..(20)..(21): Xaa is A or G
  MOD_RES (22)..(23)..(24)..(25): Xaa is A or G or is absent

SEQ ID NO: 14004 - protein, 41 aa, Artificial Sequence
  GFR-binding peptide
  MOD_RES (5)..(6)..(39)..(41): Xaa is C or S
  MOD_RES (20)..(21)..(22)..(23)..(24): Xaa is A or G
  MOD_RES (25)..(26)..(27)..(28): Xaa is A or G or is absent
SAAPXXVPQALSPISILFIXXXXXXXXXYKQYEMIVRSXKX

SEQ ID NO: 14005 - protein, 36 aa, Artificial Sequence
  GFR-binding peptide
  MOD_RES (5)..(5): Xaa is C or S
TKPTXAPTKLEPLPVVYYDDSSNVIEQLSNNMVVRS

SEQ ID NO: 14006 - protein, 40 aa, Artificial Sequence; identical to SEQ ID NO: 6635
  GFR-binding peptide
  MOD_RES (6)..(7)..(40): Xaa is C or S
  MOD_RES (21)..(22)..(23)..(24)..(25): Xaa is A or G
  MOD_RES (26)..(27)..(28)..(29): Xaa is A or G or is absent

SEQ ID NO: 14007 - protein, 35 aa, Artificial Sequence
  GFR-binding peptide
  MOD_RES (1)..(2)..(33)..(35): Xaa is C or S
XXVSQDLSPISILFIIGKTPKIYKQYEMIVKSXKX

SEQ ID NO: 14008 - protein, 36 aa, Artificial Sequence
  GFR-binding peptide
  MOD_RES (3)..(4): Xaa is C or S
  MOD_RES (18)..(19)..(20)..(21)..(22): Xaa is A or G
  MOD_RES (23)..(24)..(25)..(26): Xaa is A or G or is absent
SPXXVPQDLSPISILFIXXXXXXXXXYKQYEMVVKS

SEQ ID NO: 14009 - protein, 32 aa, Artificial Sequence; identical to SEQ ID NO: 6637
  GFR-binding peptide
  MOD_RES (14)..(15)..(16)..(17)..(18): Xaa is A or G
  MOD_RES (19)..(20)..(21)..(22): Xaa is A or G or is absent

SEQ ID NO: 14010 - protein, 37 aa, Artificial Sequence; identical to SEQ ID NO: 6645
  GFR-binding peptide
  MOD_RES (3)..(4)..(37): Xaa is C or S
  MOD_RES (18)..(19)..(20)..(21)..(22): Xaa is A or G
  MOD_RES (23)..(24)..(25)..(26): Xaa is A or G or is absent

SEQ ID NO: 14011 - protein, 39 aa, Artificial Sequence
  GFR-binding peptide
  MOD_RES (1)..(2)..(36)..(38): Xaa is C or S
  MOD_RES (16)..(17)..(18)..(19)..(20): Xaa is A or G
  MOD_RES (21)..(22)..(23)..(24): Xaa is A or G or is absent
XXAPTKLEPLTVLYYXXXXXXXXXEQLSNNMVVRSXGXH

SEQ ID NO: 14012 - protein, 41 aa, Artificial Sequence
  GFR-binding peptide
  MOD_RES (5)..(6)..(39)..(41): Xaa is C or S
  MOD_RES (20)..(21)..(22)..(23)..(24): Xaa is A or G
  MOD_RES (25)..(26)..(27)..(28): Xaa is A or G or is absent
SASPXXVSQDLSPISILFIXXXXXXXXXYKQYEMIVKSXKX

SEQ ID NO: 14013 - protein, 40 aa, Artificial Sequence
  GFR-binding peptide
  MOD_RES (4)..(5)..(39): Xaa is C or S
  MOD_RES (19)..(20)..(21)..(22)..(23): Xaa is A or G
  MOD_RES (24)..(25)..(26)..(27): Xaa is A or G or is absent
PPTXXVPTRLSPISILFIXXXXXXXXXYKQYEDMVVESXG

SEQ ID NO: 14014 - protein, 41 aa, Artificial Sequence; identical to SEQ ID NO: 6649
  GFR-binding peptide
  MOD_RES (4)..(5)..(39)..(41): Xaa is C or S
  MOD_RES (19)..(20)..(21)..(22)..(23): Xaa is A or G
  MOD_RES (24)..(25)..(26)..(27): Xaa is A or G or is absent

SEQ ID NO: 14015 - protein, 35 aa, Artificial Sequence; identical to SEQ ID NO: 6652
  GFR-binding peptide
  MOD_RES (2)..(3): Xaa is C or S
  MOD_RES (17)..(18)..(19)..(20)..(21): Xaa is A or G
  MOD_RES (22)..(23)..(24)..(25): Xaa is A or G or is absent

SEQ ID NO: 14016 - protein, 37 aa, Artificial Sequence; identical to SEQ ID NO: 6654
  GFR-binding peptide
  MOD_RES (3)..(4)..(35)..(37): Xaa is C or S

SEQ ID NO: 14017 - protein, 36 aa, Artificial Sequence; identical to SEQ ID NO: 6655
  GFR-binding peptide
  MOD_RES (4)..(5): Xaa is C or S

SEQ ID NO: 14018 - protein, 32 aa, Artificial Sequence; identical to SEQ ID NO: 6657
  GFR-binding peptide
  MOD_RES (1)..(2): Xaa is C or S

SEQ ID NO: 14019 - protein, 41 aa, Artificial Sequence
  GFR-binding peptide
  MOD_RES (4)..(38)..(40): Xaa is C or S
  MOD_RES (18)..(19)..(20)..(21)..(22): Xaa is A or G
  MOD_RES (23)..(24)..(25)..(26): Xaa is A or G or is absent
KPTXAPTKLEPLTVLYYXXXXXXXXXEQLSNNMVVRSXGXH

SEQ ID NO: 14020 - protein, 35 aa, Artificial Sequence
  GFR-binding peptide
  MOD_RES (1)..(2)..(33)..(35): Xaa is C or S
XXVPQDLEPLPIVYYVGRTPKVEQLSNMVVKSXKX

SEQ ID NO: 14021 - protein, 37 aa, Artificial Sequence
  GFR-binding peptide
  MOD_RES (2)..(3)..(35)..(37): Xaa is C or S
TXXVPTRLEPLPIVYYDSANNVVEQLSNDMVVESXGX

SEQ ID NO: 14022 - protein, 36 aa, Artificial Sequence
  GFR-binding peptide
  MOD_RES (2)..(3): Xaa is C or S
  MOD_RES (17)..(18)..(19)..(20)..(21): Xaa is A or G
  MOD_RES (22)..(23)..(24)..(25): Xaa is A or G or is absent
AXXVPTELSPISMLFIXXXXXXXXXYKQYEDMVVEG

SEQ ID NO: 14023 - protein, 38 aa, Artificial Sequence
  GFR-binding peptide
  MOD_RES (1)..(2)..(36)..(38): Xaa is C or S
  MOD_RES (16)..(17)..(18)..(19)..(20): Xaa is A or G
  MOD_RES (21)..(22)..(23)..(24): Xaa is A or G or is absent
XXAPTKLEPLPVVYYXXXXXXXXXEQLSNNMVVRSXGX

SEQ ID NO: 14024 - protein, 38 aa, Artificial Sequence
  GFR-binding peptide
  MOD_RES (4)..(5): Xaa is C or S
  MOD_RES (19)..(20)..(21)..(22)..(23): Xaa is A or G
  MOD_RES (24)..(25)..(26)..(27): Xaa is A or G or is absent
PPTXXVPTRLEPLPIVYYXXXXXXXXXEQLSNDMVVES

SEQ ID NO: 14025 - protein, 38 aa, Artificial Sequence
  GFR-binding peptide
  MOD_RES (3)..(37): Xaa is C or S
  MOD_RES (17)..(18)..(19)..(20)..(21): Xaa is A or G
  MOD_RES (22)..(23)..(24)..(25): Xaa is A or G or is absent
PTXAPTKLEPLPVVYYXXXXXXXXXEQLSNNMVVRSXG

SEQ ID NO: 14026 - protein, 31 aa, Artificial Sequence
  GFR-binding peptide
VPTELEPLTMLYYDENEKVVEQLSNDMVVEG

SEQ ID NO: 14027 - protein, 39 aa, Artificial Sequence
  GFR-binding peptide
  MOD_RES (5)..(37)..(39): Xaa is C or S
TKPTXAPTKLEPLPVVYYDDSSNVIEQLSNNMVVRSXGX

SEQ ID NO: 14028 - protein, 37 aa, Artificial Sequence
  GFR-binding peptide
  MOD_RES (5)..(37): Xaa is C or S
TKPTXAPTKLEPLTVLYYDDSSNVIEQLSNNMVVRSX

SEQ ID NO: 14029 - protein, 40 aa, Artificial Sequence; identical to SEQ ID NO: 6669
  GFR-binding peptide
  MOD_RES (5)..(6)..(40): Xaa is C or S
  MOD_RES (20)..(21)..(22)..(23)..(24): Xaa is A or G
  MOD_RES (25)..(26)..(27)..(28): Xaa is A or G or is absent

SEQ ID NO: 14030 - protein, 33 aa, Artificial Sequence
  GFR-binding peptide
  MOD_RES (2)..(3): Xaa is C or S
PXXVPQDLSPISILFIVGRTPKVYKQYEMVVKS

SEQ ID NO: 14031 - protein, 35 aa, Artificial Sequence; identical to SEQ ID NO: 6670
  GFR-binding peptide
  MOD_RES (3)..(4): Xaa is C or S

SEQ ID NO: 14032 - protein, 38 aa, Artificial Sequence
  GFR-binding peptide
  MOD_RES (6)..(7): Xaa is C or S
STPPTXXVPTRLSAISILYLDSANNVVLKNYQDMVVES

SEQ ID NO: 14033 - protein, 36 aa, Artificial Sequence; identical to SEQ ID NO: 6671
  GFR-binding peptide
  MOD_RES (1)..(35): Xaa is C or S
  MOD_RES (15)..(16)..(17)..(18)..(19): Xaa is A or G
  MOD_RES (20)..(21)..(22)..(23): Xaa is A or G or is absent

SEQ ID NO: 14034 - protein, 33 aa, Artificial Sequence; identical to SEQ ID NO: 6672
  GFR-binding peptide
  MOD_RES (33)..(33): Xaa is C or S
  MOD_RES (14)..(15)..(16)..(17)..(18): Xaa is A or G
  MOD_RES (19)..(20)..(21)..(22): Xaa is A or G or is absent

SEQ ID NO: 14035 - protein, 34 aa, Artificial Sequence; identical to SEQ ID NO: 6674
  GFR-binding peptide
  MOD_RES (1)..(1): Xaa is C or S
  MOD_RES (15)..(16)..(17)..(18)..(19): Xaa is A or G
  MOD_RES (20)..(21)..(22)..(23): Xaa is A or G or is absent

SEQ ID NO: 14036 - protein, 32 aa, Artificial Sequence
  GFR-binding peptide
  MOD_RES (1)..(32): Xaa is C or S
XVPQALEPLTILYYVGRKPKVEQLSNMIVRSX

SEQ ID NO: 14037 - protein, 34 aa, Artificial Sequence
  GFR-binding peptide
  MOD_RES (1)..(32)..(34): Xaa is C or S
XVSQDLSPISILFIIGKTPKIYKQYEMIVKSXKX

SEQ ID NO: 14038 - protein, 32 aa, Artificial Sequence
  GFR-binding peptide
  MOD_RES (2)..(2): Xaa is C or S
TXAPTKLEPLTVLYYDDSSNVIEQLSNNMVVR

SEQ ID NO: 14039 - protein, 37 aa, Artificial Sequence
  GFR-binding peptide
  MOD_RES (1)..(2)..(36): Xaa is C or S
  MOD_RES (16)..(17)..(18)..(19)..(20): Xaa is A or G
  MOD_RES (21)..(22)..(23)..(24): Xaa is A or G or is absent
XXVPTRLEPLPIVYYXXXXXXXXXEQLSNDMVVESXG

SEQ ID NO: 14040 - protein, 34 aa, Artificial Sequence
  GFR-binding peptide
  MOD_RES (1)..(32)..(34): Xaa is C or S
XVPQALSPISILFIVGRKPKVYKQYEMIVRSXKX

SEQ ID NO: 14041 - protein, 38 aa, Artificial Sequence; identical to SEQ ID NO: 6677
  GFR-binding peptide
  MOD_RES (2)..(3)..(37): Xaa is C or S
  MOD_RES (17)..(18)..(19)..(20)..(21): Xaa is A or G
  MOD_RES (22)..(23)..(24)..(25): Xaa is A or G or is absent

SEQ ID NO: 14042 - protein, 35 aa, Artificial Sequence
  GFR-binding peptide
  MOD_RES (1)..(2)..(35): Xaa is C or S
  MOD_RES (16)..(17)..(18)..(19)..(20): Xaa is A or G
  MOD_RES (21)..(22)..(23)..(24): Xaa is A or G or is absent
XXVPQALEPLPIVYYXXXXXXXXXEQLSNMIVRSX

SEQ ID NO: 14043 - protein, 33 aa, Artificial Sequence; identical to SEQ ID NO: 6679
  GFR-binding peptide
  MOD_RES (1)..(2): Xaa is C or S

SEQ ID NO: 14044 - protein, 38 aa, Artificial Sequence
  GFR-binding peptide
  MOD_RES (3)..(4)..(38): Xaa is C or S
  MOD_RES (18)..(19)..(20)..(21)..(22): Xaa is A or G
  MOD_RES (23)..(24)..(25)..(26): Xaa is A or G or is absent
KAXXVPTELSPISMLFIXXXXXXXXXYKQYEDMVVEGX

SEQ ID NO: 14045 - protein, 35 aa, Artificial Sequence
  GFR-binding peptide
  MOD_RES (34)..(34): Xaa is C or S
  MOD_RES (14)..(15)..(16)..(17)..(18): Xaa is A or G
  MOD_RES (19)..(20)..(21)..(22): Xaa is A or G or is absent
APTQLEPLTVLYYXXXXXXXXXEQLSNNMVVRAXG

SEQ ID NO: 14046 - protein, 34 aa, Artificial Sequence
  GFR-binding peptide
  MOD_RES (1)..(2): Xaa is C or S
  MOD_RES (16)..(17)..(18)..(19)..(20): Xaa is A or G
  MOD_RES (21)..(22)..(23)..(24): Xaa is A or G or is absent
XXVPTELEPLPMVYYXXXXXXXXXEQLSNEMVVE

SEQ ID NO: 14047 - protein, 39 aa, Artificial Sequence; identical to SEQ ID NO: 6689
  GFR-binding peptide
  MOD_RES (2)..(3)..(36)..(38): Xaa is C or S
  MOD_RES (17)..(18)..(19)..(20)..(21): Xaa is A or G
  MOD_RES (22)..(23)..(24)..(25): Xaa is A or G or is absent

SEQ ID NO: 14048 - protein, 44 aa, Artificial Sequence
  GFR-binding peptide
  MOD_RES (6)..(7)..(41)..(43): Xaa is C or S
  MOD_RES (21)..(22)..(23)..(24)..(25): Xaa is A or G
  MOD_RES (26)..(27)..(28)..(29): Xaa is A or G or is absent
SIPKAXXVPTELEPLPMVYYXXXXXXXXXEQLSNEMVVEGXGXR

SEQ ID NO: 14049 - protein, 38 aa, Artificial Sequence
  GFR-binding peptide
  MOD_RES (6)..(7): Xaa is C or S
TVPKPXXAPTQLEPLTVLYYDDSSNVIEQLSNNMVVRA

SEQ ID NO: 14050 - protein, 37 aa, Artificial Sequence
  GFR-binding peptide
  MOD_RES (4)..(5)..(37): Xaa is C or S
PKAXXVPTELEPLPMVYYDENEKVVEQLSNDMVVEGX

SEQ ID NO: 14051 - protein, 37 aa, Artificial Sequence
  GFR-binding peptide
  MOD_RES (2)..(3)..(35)..(37): Xaa is C or S
PXXAPTQLEPLTVLYYDDSSNVIEQLSNNMVVRAXGX

SEQ ID NO: 14052 - protein, 35 aa, Artificial Sequence
  GFR-binding peptide
  MOD_RES (1)..(33)..(35): Xaa is C or S
XAPTQLEPLPVVYYDDSSNVIEQLSNNMVVRAXGX

SEQ ID NO: 14053 - protein, 36 aa, Artificial Sequence
  GFR-binding peptide
  MOD_RES (2)..(3)..(35): Xaa is C or S
TXXVPTRLSAISILYLDSANNVVLKNYQDMVVESXG

SEQ ID NO: 14054 - protein, 37 aa, Artificial Sequence
  GFR-binding peptide
  MOD_RES (2)..(3)..(35)..(37): Xaa is C or S
PXXAPTKLEPLTVLYYDDSSNVIEQLSNNMVVRSXGX

SEQ ID NO: 14055 - protein, 34 aa, Artificial Sequence
  GFR-binding peptide
  MOD_RES (3)..(3): Xaa is C or S
PTXAPTKLEPLPVVYYDDSSNVIEQLSNNMVVRS

SEQ ID NO: 14056 - protein, 33 aa, Artificial Sequence
  GFR-binding peptide
  MOD_RES (2)..(3): Xaa is C or S
AXXVPTELEPLTMLYYDEYDKVVEQLSNEMVVE

SEQ ID NO: 14057 - protein, 33 aa, Artificial Sequence; identical to SEQ ID NO: 6706
  GFR-binding peptide
  MOD_RES (31)..(33): Xaa is C or S

SEQ ID NO: 14058 - protein, 33 aa, Artificial Sequence
  GFR-binding peptide
  MOD_RES (32)..(32): Xaa is C or S
VPTELEPLPMVYYDENEKVVEQLSNDMVVEGXG

SEQ ID NO: 14059 - protein, 40 aa, Artificial Sequence; identical to SEQ ID NO: 6708
  GFR-binding peptide
  MOD_RES (3)..(4)..(38)..(40): Xaa is C or S
  MOD_RES (18)..(19)..(20)..(21)..(22): Xaa is A or G
  MOD_RES (23)..(24)..(25)..(26): Xaa is A or G or is absent

SEQ ID NO: 14060 - protein, 38 aa, Artificial Sequence
  GFR-binding peptide
  MOD_RES (6)..(6): Xaa is C or S
  MOD_RES (20)..(21)..(22)..(23)..(24): Xaa is A or G
  MOD_RES (25)..(26)..(27)..(28): Xaa is A or G or is absent
VTKPTXAPTKLSPISVLFIXXXXXXXXXYKQYENMVVR

SEQ ID NO: 14061 - protein, 35 aa, Artificial Sequence
  GFR-binding peptide
  MOD_RES (4)..(5): Xaa is C or S
PKAXXVPTELEPLPMVYYDENEKVVEQLSNDMVVE

SEQ ID NO: 14062 - protein, 36 aa, Artificial Sequence
  GFR-binding peptide
  MOD_RES (33)..(35): Xaa is C or S
  MOD_RES (14)..(15)..(16)..(17)..(18): Xaa is A or G
  MOD_RES (19)..(20)..(21)..(22): Xaa is A or G or is absent
VPQALEPLPIVYYXXXXXXXXXEQLSNMIVRSXKXS

SEQ ID NO: 14063 - protein, 43 aa, Artificial Sequence; identical to SEQ ID NO: 6711
  GFR-binding peptide
  MOD_RES (6)..(7)..(41)..(43): Xaa is C or S
  MOD_RES (21)..(22)..(23)..(24)..(25): Xaa is A or G
  MOD_RES (26)..(27)..(28)..(29): Xaa is A or G or is absent

SEQ ID NO: 14064 - protein, 34 aa, Artificial Sequence
  GFR-binding peptide
  MOD_RES (1)..(2): Xaa is C or S
  MOD_RES (16)..(17)..(18)..(19)..(20): Xaa is A or G
  MOD_RES (21)..(22)..(23)..(24): Xaa is A or G or is absent
XXVPQALEPLPIVYYXXXXXXXXXEQLSNMIVRS

SEQ ID NO: 14065 - protein, 36 aa, Artificial Sequence
  GFR-binding peptide
  MOD_RES (2)..(36): Xaa is C or S
  MOD_RES (16)..(17)..(18)..(19)..(20): Xaa is A or G
  MOD_RES (21)..(22)..(23)..(24): Xaa is A or G or is absent
TXAPTKLEPLPVVYYXXXXXXXXXEQLSNNMVVRSX

SEQ ID NO: 14066 - protein, 38 aa, Artificial Sequence
  GFR-binding peptide
  MOD_RES (1)..(35)..(37): Xaa is C or S
  MOD_RES (15)..(16)..(17)..(18)..(19): Xaa is A or G
  MOD_RES (20)..(21)..(22)..(23): Xaa is A or G or is absent
XVPTRLNAISILYFXXXXXXXXXLKKYRDMVVESXGXR

SEQ ID NO: 14067 - protein, 38 aa, Artificial Sequence; identical to SEQ ID NO: 6713
  GFR-binding peptide
  MOD_RES (2)..(3)..(35)..(37): Xaa is C or S

SEQ ID NO: 14068 - protein, 38 aa, Artificial Sequence
  GFR-binding peptide
  MOD_RES (5)..(6)..(38): Xaa is C or S
VPKPXXAPTKLEPLTVLYYDDSSNVIEQLSNNMVVRSX

SEQ ID NO: 14069 - protein, 40 aa, Artificial Sequence; identical to SEQ ID NO: 6718
  GFR-binding peptide
  MOD_RES (3)..(4)..(38)..(40): Xaa is C or S
  MOD_RES (18)..(19)..(20)..(21)..(22): Xaa is A or G
  MOD_RES (23)..(24)..(25)..(26): Xaa is A or G or is absent

SEQ ID NO: 14070 - protein, 35 aa, Artificial Sequence
  GFR-binding peptide
  MOD_RES (4)..(5): Xaa is C or S
PPTXXVPTRLEPLPIVYYDSANNVVEQLSNDMVVE

SEQ ID NO: 14071 - protein, 35 aa, Artificial Sequence; identical to SEQ ID NO: 6719
  GFR-binding peptide
  MOD_RES (1)..(32)..(34): Xaa is C or S

SEQ ID NO: 14072 - protein, 44 aa, Artificial Sequence; identical to SEQ ID NO: 6720
  GFR-binding peptide
  MOD_RES (7)..(41)..(43): Xaa is C or S
  MOD_RES (21)..(22)..(23)..(24)..(25): Xaa is A or G
  MOD_RES (26)..(27)..(28)..(29): Xaa is A or G or is absent

SEQ ID NO: 14073 - protein, 39 aa, Artificial Sequence
  GFR-binding peptide
  MOD_RES (3)..(4)..(38): Xaa is C or S
  MOD_RES (18)..(19)..(20)..(21)..(22): Xaa is A or G
  MOD_RES (23)..(24)..(25)..(26): Xaa is A or G or is absent
PTXXVPTRLSAISILYLXXXXXXXXXLKNYQDMVVESXG

SEQ ID NO: 14074 - protein, 39 aa, Artificial Sequence; identical to SEQ ID NO: 6726
  GFR-binding peptide
  MOD_RES (5)..(6)..(39): Xaa is C or S
  MOD_RES (20)..(21)..(22)..(23)..(24): Xaa is A or G
  MOD_RES (25)..(26)..(27)..(28): Xaa is A or G or is absent

SEQ ID NO: 14075 - protein, 35 aa, Artificial Sequence; identical to SEQ ID NO: 6727
  GFR-binding peptide
  MOD_RES (1)..(2)..(35): Xaa is C or S
  MOD_RES (16)..(17)..(18)..(19)..(20): Xaa is A or G
  MOD_RES (21)..(22)..(23)..(24): Xaa is A or G or is absent

SEQ ID NO: 14076 - protein, 40 aa, Artificial Sequence
  GFR-binding peptide
  MOD_RES (3)..(4)..(38)..(40): Xaa is C or S
  MOD_RES (18)..(19)..(20)..(21)..(22): Xaa is A or G
  MOD_RES (23)..(24)..(25)..(26): Xaa is A or G or is absent
PTXXVPTRLSPISILFIXXXXXXXXXYKQYEDMVVESXGX

SEQ ID NO: 14077 - protein, 36 aa, Artificial Sequence
  GFR-binding peptide
  MOD_RES (33)..(35): Xaa is C or S
  MOD_RES (14)..(15)..(16)..(17)..(18): Xaa is A or G
  MOD_RES (19)..(20)..(21)..(22): Xaa is A or G or is absent
VPQDLSPISILFIXXXXXXXXXYKQYEMVVKSXKXS

SEQ ID NO: 14078 - protein, 34 aa, Artificial Sequence
  GFR-binding peptide
  MOD_RES (1)..(32)..(34): Xaa is C or S
XVPQDLEPLPIVYYVGRTPKVEQLSNMVVKSXKX

SEQ ID NO: 14079 - protein, 38 aa, Artificial Sequence
  GFR-binding peptide
  MOD_RES (2)..(3)..(35)..(37): Xaa is C or S
PXXAPTQLEPLTVLYYDDSSNVIEQLSNNMVVRAXGXH

SEQ ID NO: 14080 - protein, 40 aa, Artificial Sequence
  GFR-binding peptide
  MOD_RES (2)..(3)..(37)..(39): Xaa is C or S
  MOD_RES (17)..(18)..(19)..(20)..(21): Xaa is A or G
  MOD_RES (22)..(23)..(24)..(25): Xaa is A or G or is absent
AXXVPTELEPLPMVYYXXXXXXXXXEQLSNDMVVEGXGXR

SEQ ID NO: 14081 - protein, 38 aa, Artificial Sequence
  GFR-binding peptide
  MOD_RES (4)..(38): Xaa is C or S
  MOD_RES (18)..(19)..(20)..(21)..(22): Xaa is A or G
  MOD_RES (23)..(24)..(25)..(26): Xaa is A or G or is absent
KPTXAPTKLEPLPVVYYXXXXXXXXXEQLSNNMVVRSX

SEQ ID NO: 14082 - protein, 33 aa, Artificial Sequence; identical to SEQ ID NO: 6733
  GFR-binding peptide
  MOD_RES (1)..(2): Xaa is C or S

SEQ ID NO: 14083 - protein, 37 aa, Artificial Sequence; identical to SEQ ID NO: 6735
  GFR-binding peptide
  MOD_RES (1)..(2)..(36): Xaa is C or S
  MOD_RES (16)..(17)..(18)..(19)..(20): Xaa is A or G
  MOD_RES (21)..(22)..(23)..(24): Xaa is A or G or is absent

SEQ ID NO: 14084 - protein, 33 aa, Artificial Sequence; identical to SEQ ID NO: 6736
  GFR-binding peptide
  MOD_RES (1)..(33): Xaa is C or S

SEQ ID NO: 14085 - protein, 33 aa, Artificial Sequence
  GFR-binding peptide
  MOD_RES (14)..(15)..(16)..(17)..(18): Xaa is A or G
  MOD_RES (19)..(20)..(21)..(22): Xaa is A or G or is absent
VPTELEPLTMLYYXXXXXXXXXEQLSNEMVVEG

SEQ ID NO: 14086 - protein, 41 aa, Artificial Sequence
  GFR-binding peptide
  MOD_RES (5)..(6)..(38)..(40): Xaa is C or S
TPPTXXVPTRLEPLPIVYYDSANNVVEQLSNDMVVESXGXR

SEQ ID NO: 14087 - protein, 40 aa, Artificial Sequence; identical to SEQ ID NO: 6739
  GFR-binding peptide
  MOD_RES (2)..(3)..(37)..(39): Xaa is C or S
  MOD_RES (17)..(18)..(19)..(20)..(21): Xaa is A or G
  MOD_RES (22)..(23)..(24)..(25): Xaa is A or G or is absent

SEQ ID NO: 14088 - protein, 36 aa, Artificial Sequence
  GFR-binding peptide
  MOD_RES (3)..(4)..(36): Xaa is C or S
PTXXVPTRLSAISILYLDSANNVVLKNYQDMVVESX

SEQ ID NO: 14089 - protein, 37 aa, Artificial Sequence
  GFR-binding peptide
  MOD_RES (2)..(3)..(34)..(36): Xaa is C or S
PXXVSQDLEPLPIVYYIGKTPKIEQLSNMIVKSXKXS

SEQ ID NO: 14090 - protein, 38 aa, Artificial Sequence
  GFR-binding peptide
  MOD_RES (5)..(6): Xaa is C or S
  MOD_RES (20)..(21)..(22)..(23)..(24): Xaa is A or G
  MOD_RES (25)..(26)..(27)..(28): Xaa is A or G or is absent
TPPTXXVPTRLSAISILYLXXXXXXXXXLKNYQDMVVE

SEQ ID NO: 14091 - protein, 37 aa, Artificial Sequence
  GFR-binding peptide
  MOD_RES (5)..(6): Xaa is C or S
IPKAXXVPTELSPISMLFIDEYDKVVYKQYEEMVVEG

SEQ ID NO: 14092 - protein, 41 aa, Artificial Sequence
  GFR-binding peptide
  MOD_RES (3)..(4)..(38)..(40): Xaa is C or S
  MOD_RES (18)..(19)..(20)..(21)..(22): Xaa is A or G
  MOD_RES (23)..(24)..(25)..(26): Xaa is A or G or is absent
KPXXAPTQLEPLTVLYYXXXXXXXXXEQLSNNMVVRAXGXH

SEQ ID NO: 14093 - protein, 39 aa, Artificial Sequence
  GFR-binding peptide
  MOD_RES (4)..(5)..(37)..(39): Xaa is C or S
PKAXXVPTELSPISMLFIDEYDKVVYKQYEEMVVEGXGX

SEQ ID NO: 14094 - protein, 39 aa, Artificial Sequence; identical to SEQ ID NO: 6746
  GFR-binding peptide
  MOD_RES (5)..(6)..(39): Xaa is C or S
  MOD_RES (20)..(21)..(22)..(23)..(24): Xaa is A or G
  MOD_RES (25)..(26)..(27)..(28): Xaa is A or G or is absent

SEQ ID NO: 14095 - protein, 32 aa, Artificial Sequence
  GFR-binding peptide
  MOD_RES (1)..(2): Xaa is C or S
XXVPTELEPLTMLYYDENEKVVEQLSNDMVVE

SEQ ID NO: 14096 - protein, 35 aa, Artificial Sequence
  GFR-binding peptide
  MOD_RES (33)..(35): Xaa is C or S
  MOD_RES (14)..(15)..(16)..(17)..(18): Xaa is A or G
  MOD_RES (19)..(20)..(21)..(22): Xaa is A or G or is absent
VPQDLSPISILFIXXXXXXXXXYKQYEMVVKSXKX

SEQ ID NO: 14097 - protein, 37 aa, Artificial Sequence; identical to SEQ ID NO: 6748
  GFR-binding peptide
  MOD_RES (2)..(3)..(36): Xaa is C or S
  MOD_RES (17)..(18)..(19)..(20)..(21): Xaa is A or G
  MOD_RES (22)..(23)..(24)..(25): Xaa is A or G or is absent

SEQ ID NO: 14098 - protein, 39 aa, Artificial Sequence
  GFR-binding peptide
  MOD_RES (4)..(5)..(39): Xaa is C or S
  MOD_RES (19)..(20)..(21)..(22)..(23): Xaa is A or G
  MOD_RES (24)..(25)..(26)..(27): Xaa is A or G or is absent
PPTXXVPTRLEPLTILYYXXXXXXXXXEQLSNDMVVESX

SEQ ID NO: 14099 - protein, 37 aa, Artificial Sequence
  GFR-binding peptide
  MOD_RES (2)..(3)..(37): Xaa is C or S
  MOD_RES (17)..(18)..(19)..(20)..(21): Xaa is A or G
  MOD_RES (22)..(23)..(24)..(25): Xaa is A or G or is absent
PXXAPTQLEPLPVVYYXXXXXXXXXEQLSNNMVVRAX

SEQ ID NO: 14100 - protein, 34 aa, Artificial Sequence
  GFR-binding peptide
  MOD_RES (2)..(2): Xaa is C or S
  MOD_RES (16)..(17)..(18)..(19)..(20): Xaa is A or G
  MOD_RES (21)..(22)..(23)..(24): Xaa is A or G or is absent
TXAPTKLEPLPVVYYXXXXXXXXXEQLSNNMVVR

SEQ ID NO: 14101 - protein, 37 aa, Artificial Sequence; identical to SEQ ID NO: 6750
  GFR-binding peptide
  MOD_RES (2)..(3)..(34)..(36): Xaa is C or S

SEQ ID NO: 14102 - protein, 38 aa, Artificial Sequence
  GFR-binding peptide
  MOD_RES (6)..(7): Xaa is C or S
STPPTXXVPTRLNAISILYFDSANNVVLKKYRDMVVES

SEQ ID NO: 14103 - protein, 36 aa, Artificial Sequence
  GFR-binding peptide
  MOD_RES (2)..(3)..(35): Xaa is C or S
TXXVPTRLEPLTILYYDSANNVVEQLSNDMVVESXG

SEQ ID NO: 14104 - protein, 42 aa, Artificial Sequence; identical to SEQ ID NO: 6753
  GFR-binding peptide
  MOD_RES (6)..(7)..(41): Xaa is C or S
  MOD_RES (21)..(22)..(23)..(24)..(25): Xaa is A or G
  MOD_RES (26)..(27)..(28)..(29): Xaa is A or G or is absent

SEQ ID NO: 14105 - protein, 34 aa, Artificial Sequence
  GFR-binding peptide
  MOD_RES (1)..(33): Xaa is C or S
XVPTRLEPLTILYYDSANNVVEQLSNDMVVESXG

SEQ ID NO: 14106 - protein, 36 aa, Artificial Sequence
  GFR-binding peptide
  MOD_RES (1)..(2)..(36): Xaa is C or S
  MOD_RES (16)..(17)..(18)..(19)..(20): Xaa is A or G
  MOD_RES (21)..(22)..(23)..(24): Xaa is A or G or is absent
XXVPTELEPLPMVYYXXXXXXXXXEQLSNEMVVEGX

SEQ ID NO: 14107 - protein, 44 aa, Artificial Sequence
  GFR-binding peptide
  MOD_RES (6)..(7)..(41)..(43): Xaa is C or S
  MOD_RES (21)..(22)..(23)..(24)..(25): Xaa is A or G
  MOD_RES (26)..(27)..(28)..(29): Xaa is A or G or is absent
KIPKAXXVPTELEPLTMLYYXXXXXXXXXEQLSNDMVVEGXGXR

SEQ ID NO: 14108 - protein, 34 aa, Artificial Sequence; identical to SEQ ID NO: 6756
  GFR-binding peptide
  MOD_RES (1)..(2): Xaa is C or S
  MOD_RES (16)..(17)..(18)..(19)..(20): Xaa is A or G
  MOD_RES (21)..(22)..(23)..(24): Xaa is A or G or is absent

SEQ ID NO: 14109 - protein, 41 aa, Artificial Sequence
  GFR-binding peptide
  MOD_RES (5)..(6)..(40): Xaa is C or S
  MOD_RES (20)..(21)..(22)..(23)..(24): Xaa is A or G
  MOD_RES (25)..(26)..(27)..(28): Xaa is A or G or is absent
IPKAXXVPTELEPLPMVYYXXXXXXXXXEQLSNEMVVEGXG

SEQ ID NO: 14110 - protein, 33 aa, Artificial Sequence
  GFR-binding peptide
  MOD_RES (1)..(2)..(33): Xaa is C or S
XXVPQALSPISILFIVGRKPKVYKQYEMIVRSX

SEQ ID NO: 14111 - protein, 32 aa, Artificial Sequence; identical to SEQ ID NO: 6757
  GFR-binding peptide
  MOD_RES (1)..(1): Xaa is C or S

SEQ ID NO: 14112 - protein, 38 aa, Artificial Sequence
  GFR-binding peptide
  MOD_RES (4)..(5)..(36)..(38): Xaa is C or S
AAPXXVPQALSPISILFIVGRKPKVYKQYEMIVRSXKX

SEQ ID NO: 14113 - protein, 37 aa, Artificial Sequence
  GFR-binding peptide
  MOD_RES (4)..(5)..(37): Xaa is C or S
PKAXXVPTELSPISMLFIDENEKVVYKQYEDMVVEGX

SEQ ID NO: 14114 - protein, 35 aa, Artificial Sequence; identical to SEQ ID NO: 6763
  GFR-binding peptide
  MOD_RES (4)..(5): Xaa is C or S

SEQ ID NO: 14115 - protein, 39 aa, Artificial Sequence; identical to SEQ ID NO: 6764
  GFR-binding peptide
  MOD_RES (6)..(7): Xaa is C or S
  MOD_RES (21)..(22)..(23)..(24)..(25): Xaa is A or G
  MOD_RES (26)..(27)..(28)..(29): Xaa is A or G or is absent

SEQ ID NO: 14116 - protein, 36 aa, Artificial Sequence
  GFR-binding peptide
  MOD_RES (5)..(6): Xaa is C or S
TPPTXXVPTRLNAISILYFDSANNVVLKKYRDMVVE

SEQ ID NO: 14117 - protein, 38 aa, Artificial Sequence
  GFR-binding peptide
  MOD_RES (4)..(36)..(38): Xaa is C or S
KPTXAPTKLEPLPVVYYDDSSNVIEQLSNNMVVRSXGX

SEQ ID NO: 14118 - protein, 39 aa, Artificial Sequence
  GFR-binding peptide
  MOD_RES (3)..(4)..(36)..(38): Xaa is C or S
PTXXVPTRLEPLTILYYDSANNVVEQLSNDMVVESXGXR

SEQ ID NO: 14119 - protein, 42 aa, Artificial Sequence; identical to SEQ ID NO: 6765
  GFR-binding peptide
  MOD_RES (5)..(6)..(39)..(41): Xaa is C or S
  MOD_RES (20)..(21)..(22)..(23)..(24): Xaa is A or G
  MOD_RES (25)..(26)..(27)..(28): Xaa is A or G or is absent

SEQ ID NO: 14120 - protein, 42 aa, Artificial Sequence
  GFR-binding peptide
  MOD_RES (6)..(7)..(39)..(41): Xaa is C or S
YVPKPXXAPTKLSPISVLFIDDSSNVIYKQYENMVVRSXGXH

SEQ ID NO: 14121 - protein, 38 aa, Artificial Sequence
  GFR-binding peptide
  MOD_RES (3)..(4)..(36)..(38): Xaa is C or S
KAXXVPTELEPLTMLYYDEYDKVVEQLSNEMVVEGXGX

SEQ ID NO: 14122 - protein, 38 aa, Artificial Sequence; identical to SEQ ID NO: 6766
  GFR-binding peptide
  MOD_RES (1)..(2)..(36)..(38): Xaa is C or S
  MOD_RES (16)..(17)..(18)..(19)..(20): Xaa is A or G
  MOD_RES (21)..(22)..(23)..(24): Xaa is A or G or is absent

SEQ ID NO: 14123 - protein, 35 aa, Artificial Sequence
  GFR-binding peptide
  MOD_RES (34)..(34): Xaa is C or S
  MOD_RES (14)..(15)..(16)..(17)..(18): Xaa is A or G
  MOD_RES (19)..(20)..(21)..(22): Xaa is A or G or is absent
VPTRLNAISILYFXXXXXXXXXLKKYRDMVVESXG

SEQ ID NO: 14124 - protein, 35 aa, Artificial Sequence; identical to SEQ ID NO: 6770
  GFR-binding peptide
  MOD_RES (2)..(3): Xaa is C or S
  MOD_RES (17)..(18)..(19)..(20)..(21): Xaa is A or G
  MOD_RES (22)..(23)..(24)..(25): Xaa is A or G or is absent

SEQ ID NO: 14125 - protein, 40 aa, Artificial Sequence; identical to SEQ ID NO: 6771
  GFR-binding peptide
  MOD_RES (5)..(6)..(40): Xaa is C or S
  MOD_RES (20)..(21)..(22)..(23)..(24): Xaa is A or G
  MOD_RES (25)..(26)..(27)..(28): Xaa is A or G or is absent

SEQ ID NO: 14126 - protein, 42 aa, Artificial Sequence
  GFR-binding peptide
  MOD_RES (7)..(39)..(41): Xaa is C or S
HVTKPTXAPTKLSPISVLFIDDSSNVIYKQYENMVVRSXGXH

SEQ ID NO: 14127 - protein, 40 aa, Artificial Sequence
  GFR-binding peptide
  MOD_RES (6)..(7)..(39): Xaa is C or S
SIPKAXXVPTELSPISMLFIDEYDKVVYKQYEEMVVEGXG

SEQ ID NO: 14128 - protein, 40 aa, Artificial Sequence; identical to SEQ ID NO: 6775
  GFR-binding peptide
  MOD_RES (3)..(4)..(37)..(39): Xaa is C or S
  MOD_RES (18)..(19)..(20)..(21)..(22): Xaa is A or G
  MOD_RES (23)..(24)..(25)..(26): Xaa is A or G or is absent

SEQ ID NO: 14129 - protein, 40 aa, Artificial Sequence; identical to SEQ ID NO: 6780
  GFR-binding peptide
  MOD_RES (6)..(7)..(38)..(40): Xaa is C or S

SEQ ID NO: 14130 - protein, 41 aa, Artificial Sequence
  GFR-binding peptide
  MOD_RES (4)..(5)..(39)..(41): Xaa is C or S
  MOD_RES (19)..(20)..(21)..(22)..(23): Xaa is A or G
  MOD_RES (24)..(25)..(26)..(27): Xaa is A or G or is absent
PPTXXVPTRLSAISILYLXXXXXXXXXLKNYQDMVVESXGX

SEQ ID NO: 14131 - protein, 33 aa, Artificial Sequence
  GFR-binding peptide
  MOD_RES (32)..(32): Xaa is C or S
APTKLEPLPVVYYDDSSNVIEQLSNNMVVRSXG

SEQ ID NO: 14132 - protein, 37 aa, Artificial Sequence; identical to SEQ ID NO: 6782
  GFR-binding peptide
  MOD_RES (34)..(36): Xaa is C or S
  MOD_RES (14)..(15)..(16)..(17)..(18): Xaa is A or G
  MOD_RES (19)..(20)..(21)..(22): Xaa is A or G or is absent

SEQ ID NO: 14133 - protein, 39 aa, Artificial Sequence
  GFR-binding peptide
  MOD_RES (2)..(36)..(38): Xaa is C or S
  MOD_RES (16)..(17)..(18)..(19)..(20): Xaa is A or G
  MOD_RES (21)..(22)..(23)..(24): Xaa is A or G or is absent
TXAPTKLEPLPVVYYXXXXXXXXXEQLSNNMVVRSXGXH

SEQ ID NO: 14134 - protein, 38 aa, Artificial Sequence
  GFR-binding peptide
  MOD_RES (1)..(2)..(36)..(38): Xaa is C or S
  MOD_RES (16)..(17)..(18)..(19)..(20): Xaa is A or G
  MOD_RES (21)..(22)..(23)..(24): Xaa is A or G or is absent
XXVPTELEPLPMVYYXXXXXXXXXEQLSNEMVVEGXGX

SEQ ID NO: 14135 - protein, 39 aa, Artificial Sequence
  GFR-binding peptide
  MOD_RES (5)..(6)..(37)..(39): Xaa is C or S
SASPXXVPQDLSPISILFIVGRTPKVYKQYEMVVKSXKX

SEQ ID NO: 14136 - protein, 38 aa, Artificial Sequence
  GFR-binding peptide
  MOD_RES (3)..(4)..(36)..(38): Xaa is C or S
KAXXVPTELEPLPMVYYDENEKVVEQLSNDMVVEGXGX

SEQ ID NO: 14137 - protein, 37 aa, Artificial Sequence; identical to SEQ ID NO: 6786
  GFR-binding peptide
  MOD_RES (1)..(34)..(36): Xaa is C or S
  MOD_RES (15)..(16)..(17)..(18)..(19): Xaa is A or G
  MOD_RES (20)..(21)..(22)..(23): Xaa is A or G or is absent

SEQ ID NO: 14138 - protein, 35 aa, Artificial Sequence
  GFR-binding peptide
  MOD_RES (4)..(5): Xaa is C or S
PKAXXVPTELEPLTMLYYDEYDKVVEQLSNEMVVE

SEQ ID NO: 14139 - protein, 34 aa, Artificial Sequence
  GFR-binding peptide
  MOD_RES (1)..(33): Xaa is C or S
XAPTKLEPLTVLYYDDSSNVIEQLSNNMVVRSXG

SEQ ID NO: 14140 - protein, 35 aa, Artificial Sequence; identical to SEQ ID NO: 6794
  GFR-binding peptide
  MOD_RES (3)..(4): Xaa is C or S

SEQ ID NO: 14141 - protein, 38 aa, Artificial Sequence
  GFR-binding peptide
  MOD_RES (2)..(36)..(38): Xaa is C or S
  MOD_RES (16)..(17)..(18)..(19)..(20): Xaa is A or G
  MOD_RES (21)..(22)..(23)..(24): Xaa is A or G or is absent
TXAPTKLSPISVLFIXXXXXXXXXYKQYENMVVRSXGX

SEQ ID NO: 14142 - protein, 38 aa, Artificial Sequence
  GFR-binding peptide
  MOD_RES (5)..(6)..(38): Xaa is C or S
TPPTXXVPTRLEPLTILYYDSANNVVEQLSNDMVVESX

SEQ ID NO: 14143 - protein, 38 aa, Artificial Sequence
  GFR-binding peptide
  MOD_RES (3)..(4)..(38): Xaa is C or S
  MOD_RES (18)..(19)..(20)..(21)..(22): Xaa is A or G
  MOD_RES (23)..(24)..(25)..(26): Xaa is A or G or is absent
KAXXVPTELEPLTMLYYXXXXXXXXXEQLSNEMVVEGX

SEQ ID NO: 14144 - protein, 32 aa, Artificial Sequence
  GFR-binding peptide
  MOD_RES (14)..(15)..(16)..(17)..(18): Xaa is A or G
  MOD_RES (19)..(20)..(21)..(22): Xaa is A or G or is absent
VPTRLSAISILYLXXXXXXXXXLKNYQDMVVE

SEQ ID NO: 14145 - protein, 34 aa, Artificial Sequence; identical to SEQ ID NO: 6797
  GFR-binding peptide
  MOD_RES (34)..(34): Xaa is C or S
  MOD_RES (14)..(15)..(16)..(17)..(18): Xaa is A or G
  MOD_RES (19)..(20)..(21)..(22): Xaa is A or G or is absent

SEQ ID NO: 14146 - protein, 38 aa, Artificial Sequence
  GFR-binding peptide
  MOD_RES (3)..(4)..(36)..(38): Xaa is C or S
KAXXVPTELSPISMLFIDENEKVVYKQYEDMVVEGXGX

SEQ ID NO: 14147 - protein, 38 aa, Artificial Sequence; identical to SEQ ID NO: 6801
  GFR-binding peptide
  MOD_RES (4)..(5)..(38): Xaa is C or S
  MOD_RES (19)..(20)..(21)..(22)..(23): Xaa is A or G
  MOD_RES (24)..(25)..(26)..(27): Xaa is A or G or is absent

SEQ ID NO: 14148 - protein, 31 aa, Artificial Sequence; identical to SEQ ID NO: 6805
  GFR-binding peptide
  MOD_RES (1)..(1): Xaa is C or S

SEQ ID NO: 14149 - protein, 33 aa, Artificial Sequence
  GFR-binding peptide
  MOD_RES (1)..(1): Xaa is C or S
  MOD_RES (15)..(16)..(17)..(18)..(19): Xaa is A or G
  MOD_RES (20)..(21)..(22)..(23): Xaa is A or G or is absent
XVPQALSPISILFIXXXXXXXXXYKQYEMIVRS

SEQ ID NO: 14150 - protein, 36 aa, Artificial Sequence
  GFR-binding peptide
  MOD_RES (1)..(2)..(36): Xaa is C or S
  MOD_RES (16)..(17)..(18)..(19)..(20): Xaa is A or G
  MOD_RES (21)..(22)..(23)..(24): Xaa is A or G or is absent
XXAPTQLSPISVLFIXXXXXXXXXYKQYENMVVRAX

SEQ ID NO: 14151 - protein, 31 aa, Artificial Sequence; identical to SEQ ID NO: 6808
  GFR-binding peptide
  MOD_RES (1)..(1): Xaa is C or S

SEQ ID NO: 14152 - protein, 32 aa, Artificial Sequence
  GFR-binding peptide
  MOD_RES (14)..(15)..(16)..(17)..(18): Xaa is A or G
  MOD_RES (19)..(20)..(21)..(22): Xaa is A or G or is absent
APTKLSPISVLFIXXXXXXXXXYKQYENMVVR

SEQ ID NO: 14153 - protein, 36 aa, Artificial Sequence; identical to SEQ ID NO: 6816
  GFR-binding peptide
  MOD_RES (3)..(4): Xaa is C or S
  MOD_RES (18)..(19)..(20)..(21)..(22): Xaa is A or G
  MOD_RES (23)..(24)..(25)..(26): Xaa is A or G or is absent

SEQ ID NO: 14154 - protein, 33 aa, Artificial Sequence
  GFR-binding peptide
  MOD_RES (1)..(33): Xaa is C or S
XAPTKLEPLPVVYYDDSSNVIEQLSNNMVVRSX

SEQ ID NO: 14155 - protein, 41 aa, Artificial Sequence; identical to SEQ ID NO: 6817
  GFR-binding peptide
  MOD_RES (5)..(6)..(38)..(40): Xaa is C or S

SEQ ID NO: 14156 - protein, 40 aa, Artificial Sequence
  GFR-binding peptide
  MOD_RES (3)..(4)..(37)..(39): Xaa is C or S
  MOD_RES (18)..(19)..(20)..(21)..(22): Xaa is A or G
  MOD_RES (23)..(24)..(25)..(26): Xaa is A or G or is absent
APXXVPQALEPLPIVYYXXXXXXXXXEQLSNMIVRSXKXS

SEQ ID NO: 14157 - protein, 38 aa, Artificial Sequence
  GFR-binding peptide
  MOD_RES (6)..(6): Xaa is C or S
  MOD_RES (20)..(21)..(22)..(23)..(24): Xaa is A or G
  MOD_RES (25)..(26)..(27)..(28): Xaa is A or G or is absent
VTKPTXAPTKLEPLTVLYYXXXXXXXXXEQLSNNMVVR

SEQ ID NO: 14158 - protein, 39 aa, Artificial Sequence
  GFR-binding peptide
  MOD_RES (6)..(7)..(39): Xaa is C or S
SIPKAXXVPTELEPLTMLYYDEYDKVVEQLSNEMVVEGX

SEQ ID NO: 14159 - protein, 36 aa, Artificial Sequence
  GFR-binding peptide
  MOD_RES (4)..(5): Xaa is C or S
PKPXXAPTQLEPLPVVYYDDSSNVIEQLSNNMVVRA

SEQ ID NO: 14160 - protein, 42 aa, Artificial Sequence
  GFR-binding peptide
  MOD_RES (4)..(5)..(39)..(41): Xaa is C or S
  MOD_RES (19)..(20)..(21)..(22)..(23): Xaa is A or G
  MOD_RES (24)..(25)..(26)..(27): Xaa is A or G or is absent
PKAXXVPTELEPLPMVYYXXXXXXXXXEQLSNEMVVEGXGXR

SEQ ID NO: 14161 - protein, 32 aa, Artificial Sequence
  GFR-binding peptide
  MOD_RES (14)..(15)..(16)..(17)..(18): Xaa is A or G
  MOD_RES (19)..(20)..(21)..(22): Xaa is A or G or is absent
VSQDLSPISILFIXXXXXXXXXYKQYEMIVKS

SEQ ID NO: 14162 - protein, 40 aa, Artificial Sequence
  GFR-binding peptide
  MOD_RES (4)..(5)..(37)..(39): Xaa is C or S
PKAXXVPTELEPLPMVYYDENEKVVEQLSNDMVVEGXGXR

SEQ ID NO: 14163 - protein, 39 aa, Artificial Sequence
  GFR-binding peptide
  MOD_RES (2)..(3)..(36)..(38): Xaa is C or S
  MOD_RES (17)..(18)..(19)..(20)..(21): Xaa is A or G
  MOD_RES (22)..(23)..(24)..(25): Xaa is A or G or is absent
PXXVPQALEPLTILYYXXXXXXXXXEQLSNMIVRSXKXS

SEQ ID NO: 14164 - protein, 35 aa, Artificial Sequence
  GFR-binding peptide
  MOD_RES (1)..(32)..(34): Xaa is C or S
XVPQDLEPLPIVYYVGRTPKVEQLSNMVVKSXKXS

SEQ ID NO: 14165 - protein, 38 aa, Artificial Sequence
  GFR-binding peptide
  MOD_RES (5)..(6): Xaa is C or S
  MOD_RES (20)..(21)..(22)..(23)..(24): Xaa is A or G
  MOD_RES (25)..(26)..(27)..(28): Xaa is A or G or is absent
TPPTXXVPTRLSPISILFIXXXXXXXXXYKQYEDMVVE

SEQ ID NO: 14166 - protein, 38 aa, Artificial Sequence; identical to SEQ ID NO: 6825
  GFR-binding peptide
  MOD_RES (1)..(2)..(35)..(37): Xaa is C or S
  MOD_RES (16)..(17)..(18)..(19)..(20): Xaa is A or G
  MOD_RES (21)..(22)..(23)..(24): Xaa is A or G or is absent

SEQ ID NO: 14167 - protein, 36 aa, Artificial Sequence
  GFR-binding peptide
  MOD_RES (4)..(5): Xaa is C or S
PPTXXVPTRLNAISILYFDSANNVVLKKYRDMVVES

SEQ ID NO: 14168 - protein, 34 aa, Artificial Sequence
  GFR-binding peptide
  MOD_RES (31)..(33): Xaa is C or S
VPQALEPLTILYYVGRKPKVEQLSNMIVRSXKXS

SEQ ID NO: 14169 - protein, 40 aa, Artificial Sequence; identical to SEQ ID NO: 6831
  GFR-binding peptide
  MOD_RES (6)..(7)..(38)..(40): Xaa is C or S

SEQ ID NO: 14170 - protein, 37 aa, Artificial Sequence
  GFR-binding peptide
  MOD_RES (1)..(34)..(36): Xaa is C or S
  MOD_RES (15)..(16)..(17)..(18)..(19): Xaa is A or G
  MOD_RES (20)..(21)..(22)..(23): Xaa is A or G or is absent
XVPQALEPLTILYYXXXXXXXXXEQLSNMIVRSXKXS

SEQ ID NO: 14171 - protein, 37 aa, Artificial Sequence
  GFR-binding peptide
  MOD_RES (34)..(36): Xaa is C or S
  MOD_RES (14)..(15)..(16)..(17)..(18): Xaa is A or G
  MOD_RES (19)..(20)..(21)..(22): Xaa is A or G or is absent
VPTELEPLPMVYYXXXXXXXXXEQLSNEMVVEGXGXR

SEQ ID NO: 14172 - protein, 39 aa, Artificial Sequence; identical to SEQ ID NO: 6832
  GFR-binding peptide
  MOD_RES (6)..(6): Xaa is C or S
  MOD_RES (20)..(21)..(22)..(23)..(24): Xaa is A or G
  MOD_RES (25)..(26)..(27)..(28): Xaa is A or G or is absent

SEQ ID NO: 14173 - protein, 40 aa, Artificial Sequence; identical to SEQ ID NO: 6834
  GFR-binding peptide
  MOD_RES (5)..(6)..(40): Xaa is C or S
  MOD_RES (20)..(21)..(22)..(23)..(24): Xaa is A or G
  MOD_RES (25)..(26)..(27)..(28): Xaa is A or G or is absent

SEQ ID NO: 14174 - protein, 33 aa, Artificial Sequence
  GFR-binding peptide
  MOD_RES (32)..(32): Xaa is C or S
VPTRLEPLPIVYYDSANNVVEQLSNDMVVESXG

SEQ ID NO: 14175 - protein, 35 aa, Artificial Sequence
  GFR-binding peptide
  MOD_RES (2)..(3)..(35): Xaa is C or S
AXXVPTELEPLPMVYYDENEKVVEQLSNDMVVEGX

SEQ ID NO: 14176 - protein, 40 aa, Artificial Sequence
  GFR-binding peptide
  MOD_RES (4)..(5)..(37)..(39): Xaa is C or S
PKPXXAPTKLSPISVLFIDDSSNVIYKQYENMVVRSXGXH

SEQ ID NO: 14177 - protein, 32 aa, Artificial Sequence
  GFR-binding peptide
  MOD_RES (31)..(31): Xaa is C or S
VPQDLSPISILFIVGRTPKVYKQYEMVVKSXK

SEQ ID NO: 14178 - protein, 36 aa, Artificial Sequence
  GFR-binding peptide
  MOD_RES (1)..(2)..(35): Xaa is C or S
  MOD_RES (16)..(17)..(18)..(19)..(20): Xaa is A or G
  MOD_RES (21)..(22)..(23)..(24): Xaa is A or G or is absent
XXVPQDLEPLPIVYYXXXXXXXXXEQLSNMVVKSXK

SEQ ID NO: 14179 - protein, 36 aa, Artificial Sequence
  GFR-binding peptide
  MOD_RES (1)..(2)..(36): Xaa is C or S
  MOD_RES (16)..(17)..(18)..(19)..(20): Xaa is A or G
  MOD_RES (21)..(22)..(23)..(24): Xaa is A or G or is absent
XXVPTRLNAISILYFXXXXXXXXXLKKYRDMVVESX

SEQ ID NO: 14180 - protein, 34 aa, Artificial Sequence
  GFR-binding peptide
  MOD_RES (1)..(2): Xaa is C or S
  MOD_RES (16)..(17)..(18)..(19)..(20): Xaa is A or G
  MOD_RES (21)..(22)..(23)..(24): Xaa is A or G or is absent
XXVPTRLNAISILYFXXXXXXXXXLKKYRDMVVE

SEQ ID NO: 14181 - protein, 33 aa, Artificial Sequence; identical to SEQ ID NO: 6840
  GFR-binding peptide
  MOD_RES (1)..(2)..(33): Xaa is C or S

SEQ ID NO: 14182 - protein, 39 aa, Artificial Sequence
  GFR-binding peptide
  MOD_RES (5)..(6)..(39): Xaa is C or S
  MOD_RES (20)..(21)..(22)..(23)..(24): Xaa is A or G
  MOD_RES (25)..(26)..(27)..(28): Xaa is A or G or is absent
SAAPXXVPQALEPLPIVYYXXXXXXXXXEQLSNMIVRSX

SEQ ID NO: 14183 - protein, 38 aa, Artificial Sequence; identical to SEQ ID NO: 6844
  GFR-binding peptide
  MOD_RES (1)..(35)..(37): Xaa is C or S
  MOD_RES (15)..(16)..(17)..(18)..(19): Xaa is A or G
  MOD_RES (20)..(21)..(22)..(23): Xaa is A or G or is absent

SEQ ID NO: 14184 - protein, 38 aa, Artificial Sequence; identical to SEQ ID NO: 6845
  GFR-binding peptide
  MOD_RES (3)..(4)..(38): Xaa is C or S
  MOD_RES (18)..(19)..(20)..(21)..(22): Xaa is A or G
  MOD_RES (23)..(24)..(25)..(26): Xaa is A or G or is absent

SEQ ID NO: 14185 - protein, 35 aa, Artificial Sequence; identical to SEQ ID NO: 6849
  GFR-binding peptide
  MOD_RES (1)..(2)..(35): Xaa is C or S
  MOD_RES (16)..(17)..(18)..(19)..(20): Xaa is A or G
  MOD_RES (21)..(22)..(23)..(24): Xaa is A or G or is absent

SEQ ID NO: 14186 - protein, 36 aa, Artificial Sequence
  GFR-binding peptide
  MOD_RES (2)..(3): Xaa is C or S
  MOD_RES (17)..(18)..(19)..(20)..(21): Xaa is A or G
  MOD_RES (22)..(23)..(24)..(25): Xaa is A or G or is absent
TXXVPTRLEPLPIVYYXXXXXXXXXEQLSNDMVVES

SEQ ID NO: 14187 - protein, 36 aa, Artificial Sequence; identical to SEQ ID NO: 6850
  GFR-binding peptide
  MOD_RES (4)..(4): Xaa is C or S
  MOD_RES (18)..(19)..(20)..(21)..(22): Xaa is A or G
  MOD_RES (23)..(24)..(25)..(26): Xaa is A or G or is absent

SEQ ID NO: 14188 - protein, 37 aa, Artificial Sequence; identical to SEQ ID NO: 6853
  GFR-binding peptide
  MOD_RES (2)..(3)..(37): Xaa is C or S
  MOD_RES (17)..(18)..(19)..(20)..(21): Xaa is A or G
  MOD_RES (22)..(23)..(24)..(25): Xaa is A or G or is absent

SEQ ID NO: 14189 - protein, 33 aa, Artificial Sequence
  GFR-binding peptide
  MOD_RES (1)..(32): Xaa is C or S
XVPQALSPISILFIVGRKPKVYKQYEMIVRSXK

SEQ ID NO: 14190 - protein, 36 aa, Artificial Sequence
  GFR-binding peptide
  MOD_RES (4)..(5): Xaa is C or S
PKPXXAPTKLSPISVLFIDDSSNVIYKQYENMVVRS

SEQ ID NO: 14191 - protein, 36 aa, Artificial Sequence
  GFR-binding peptide
  MOD_RES (2)..(3)..(35): Xaa is C or S
PXXAPTQLSPISVLFIDDSSNVIYKQYENMVVRAXG

SEQ ID NO: 14192 - protein, 35 aa, Artificial Sequence
  GFR-binding peptide
  MOD_RES (2)..(3): Xaa is C or S
  MOD_RES (17)..(18)..(19)..(20)..(21): Xaa is A or G
  MOD_RES (22)..(23)..(24)..(25): Xaa is A or G or is absent
PXXVSQDLEPLPIVYYXXXXXXXXXEQLSNMIVKS

SEQ ID NO: 14193 - protein, 33 aa, Artificial Sequence; identical to SEQ ID NO: 6857
  GFR-binding peptide
  MOD_RES (32)..(32): Xaa is C or S

SEQ ID NO: 14194 - protein, 42 aa, Artificial Sequence
  GFR-binding peptide
  MOD_RES (6)..(7)..(39)..(41): Xaa is C or S
YVPKPXXAPTKLEPLPVVYYDDSSNVIEQLSNNMVVRSXGXH

SEQ ID NO: 14195 - protein, 37 aa, Artificial Sequence; identical to SEQ ID NO: 6858
  GFR-binding peptide
  MOD_RES (1)..(35)..(37): Xaa is C or S
  MOD_RES (15)..(16)..(17)..(18)..(19): Xaa is A or G
  MOD_RES (20)..(21)..(22)..(23): Xaa is A or G or is absent

SEQ ID NO: 14196 - protein, 34 aa, Artificial Sequence
  GFR-binding peptide
  MOD_RES (3)..(3): Xaa is C or S
PTXAPTKLSPISVLFIDDSSNVIYKQYENMVVRS

SEQ ID NO: 14197 - protein, 39 aa, Artificial Sequence
  GFR-binding peptide
  MOD_RES (6)..(38): Xaa is C or S
VTKPTXAPTKLEPLPVVYYDDSSNVIEQLSNNMVVRSXG

SEQ ID NO: 14198 - protein, 34 aa, Artificial Sequence
  GFR-binding peptide
  MOD_RES (1)..(2): Xaa is C or S
  MOD_RES (16)..(17)..(18)..(19)..(20): Xaa is A or G
  MOD_RES (21)..(22)..(23)..(24): Xaa is A or G or is absent
XXVPQALEPLTILYYXXXXXXXXXEQLSNMIVRS

SEQ ID NO: 14199 - protein, 38 aa, Artificial Sequence; identical to SEQ ID NO: 6862
  GFR-binding peptide
  MOD_RES (4)..(5): Xaa is C or S
  MOD_RES (19)..(20)..(21)..(22)..(23): Xaa is A or G
  MOD_RES (24)..(25)..(26)..(27): Xaa is A or G or is absent

SEQ ID NO: 14200 - protein, 35 aa, Artificial Sequence
  GFR-binding peptide
  MOD_RES (32)..(34): Xaa is C or S
VPTELEPLPMVYYDEYDKVVEQLSNEMVVEGXGXR

SEQ ID NO: 14201 - protein, 36 aa, Artificial Sequence
  GFR-binding peptide
  MOD_RES (3)..(4): Xaa is C or S
  MOD_RES (18)..(19)..(20)..(21)..(22): Xaa is A or G
  MOD_RES (23)..(24)..(25)..(26): Xaa is A or G or is absent
PTXXVPTRLSPISILFIXXXXXXXXXYKQYEDMVVE

SEQ ID NO: 14202 - protein, 36 aa, Artificial Sequence
  GFR-binding peptide
  MOD_RES (1)..(33)..(35): Xaa is C or S
XAPTQLEPLTVLYYDDSSNVIEQLSNNMVVRAXGXH

SEQ ID NO: 14203 - protein, 43 aa, Artificial Sequence; identical to SEQ ID NO: 6864
  GFR-binding peptide
  MOD_RES (6)..(7)..(40)..(42): Xaa is C or S
  MOD_RES (21)..(22)..(23)..(24)..(25): Xaa is A or G
  MOD_RES (26)..(27)..(28)..(29): Xaa is A or G or is absent

SEQ ID NO: 14204 - protein, 36 aa, Artificial Sequence
  GFR-binding peptide
  MOD_RES (2)..(3): Xaa is C or S
  MOD_RES (17)..(18)..(19)..(20)..(21): Xaa is A or G
  MOD_RES (22)..(23)..(24)..(25): Xaa is A or G or is absent
PXXAPTQLEPLPVVYYXXXXXXXXXEQLSNNMVVRA

SEQ ID NO: 14205 - protein, 37 aa, Artificial Sequence
  GFR-binding peptide
  MOD_RES (6)..(7): Xaa is C or S
TVPKPXXAPTQLEPLPVVYYDDSSNVIEQLSNNMVVR

SEQ ID NO: 14206 - protein, 36 aa, Artificial Sequence
  GFR-binding peptide
  MOD_RES (4)..(5): Xaa is C or S
PKPXXAPTQLSPISVLFIDDSSNVIYKQYENMVVRA

SEQ ID NO: 14207 - protein, 40 aa, Artificial Sequence; identical to SEQ ID NO: 6869
  GFR-binding peptide
  MOD_RES (3)..(4)..(37)..(39): Xaa is C or S
  MOD_RES (18)..(19)..(20)..(21)..(22): Xaa is A or G
  MOD_RES (23)..(24)..(25)..(26): Xaa is A or G or is absent

SEQ ID NO: 14208 - protein, 35 aa, Artificial Sequence; identical to SEQ ID NO: 6870
  GFR-binding peptide
  MOD_RES (1)..(33)..(35): Xaa is C or S

SEQ ID NO: 14209 - protein, 36 aa, Artificial Sequence
  GFR-binding peptide
  MOD_RES (5)..(6): Xaa is C or S
VPKPXXAPTKLSPISVLFIDDSSNVIYKQYENMVVR

SEQ ID NO: 14210 - protein, 35 aa, Artificial Sequence; identical to SEQ ID NO: 6872
  GFR-binding peptide
  MOD_RES (3)..(4): Xaa is C or S

SEQ ID NO: 14211 - protein, 33 aa, Artificial Sequence
  GFR-binding peptide
  MOD_RES (32)..(32): Xaa is C or S
VPTELEPLTMLYYDEYDKVVEQLSNEMVVEGXG

SEQ ID NO: 14212 - protein, 35 aa, Artificial Sequence; identical to SEQ ID NO: 6875
  GFR-binding peptide
  MOD_RES (1)..(2)..(35): Xaa is C or S
  MOD_RES (16)..(17)..(18)..(19)..(20): Xaa is A or G
  MOD_RES (21)..(22)..(23)..(24): Xaa is A or G or is absent

SEQ ID NO: 14213 - protein, 34 aa, Artificial Sequence
  GFR-binding peptide
  MOD_RES (1)..(2)..(34): Xaa is C or S
XXAPTKLEPLTVLYYDDSSNVIEQLSNNMVVRSX

SEQ ID NO: 14214 - protein, 35 aa, Artificial Sequence; identical to SEQ ID NO: 6877
  GFR-binding peptide
  MOD_RES (2)..(3)..(34): Xaa is C or S

SEQ ID NO: 14215 - protein, 32 aa, Artificial Sequence
  GFR-binding peptide
  MOD_RES (14)..(15)..(16)..(17)..(18): Xaa is A or G
  MOD_RES (19)..(20)..(21)..(22): Xaa is A or G or is absent
VPTRLSPISILFIXXXXXXXXXYKQYEDMVVE

SEQ ID NO: 14216 - protein, 37 aa, Artificial Sequence
  GFR-binding peptide
  MOD_RES (4)..(36): Xaa is C or S
KPTXAPTKLEPLPVVYYDDSSNVIEQLSNNMVVRSXG

SEQ ID NO: 14217 - protein, 37 aa, Artificial Sequence
  GFR-binding peptide
  MOD_RES (1)..(35)..(37): Xaa is C or S
  MOD_RES (15)..(16)..(17)..(18)..(19): Xaa is A or G
  MOD_RES (20)..(21)..(22)..(23): Xaa is A or G or is absent
XAPTQLSPISVLFIXXXXXXXXXYKQYENMVVRAXGX

SEQ ID NO: 14218 - protein, 37 aa, Artificial Sequence
  GFR-binding peptide
  MOD_RES (5)..(6): Xaa is C or S
IPKAXXVPTELEPLTMLYYDENEKVVEQLSNDMVVEG

SEQ ID NO: 14219 - protein, 36 aa, Artificial Sequence
  GFR-binding peptide
  MOD_RES (1)..(34)..(36): Xaa is C or S
  MOD_RES (15)..(16)..(17)..(18)..(19): Xaa is A or G
  MOD_RES (20)..(21)..(22)..(23): Xaa is A or G or is absent
XVSQDLEPLPIVYYXXXXXXXXXEQLSNMIVKSXKX

SEQ ID NO: 14220 - protein, 38 aa, Artificial Sequence
  GFR-binding peptide
  MOD_RES (6)..(6): Xaa is C or S
  MOD_RES (20)..(21)..(22)..(23)..(24): Xaa is A or G
  MOD_RES (25)..(26)..(27)..(28): Xaa is A or G or is absent
VTKPTXAPTKLEPLPVVYYXXXXXXXXXEQLSNNMVVR

SEQ ID NO: 14221 - protein, 36 aa, Artificial Sequence
  GFR-binding peptide
  MOD_RES (1)..(2)..(36): Xaa is C or S
  MOD_RES (16)..(17)..(18)..(19)..(20): Xaa is A or G
  MOD_RES (21)..(22)..(23)..(24): Xaa is A or G or is absent
XXAPTKLEPLPVVYYXXXXXXXXXEQLSNNMVVRSX

SEQ ID NO: 14222 - protein, 39 aa, Artificial Sequence; identical to SEQ ID NO: 6883
  GFR-binding peptide
  MOD_RES (4)..(5)..(38): Xaa is C or S
  MOD_RES (19)..(20)..(21)..(22)..(23): Xaa is A or G
  MOD_RES (24)..(25)..(26)..(27): Xaa is A or G or is absent

SEQ ID NO: 14223 - protein, 38 aa, Artificial Sequence; identical to SEQ ID NO: 6885
  GFR-binding peptide
  MOD_RES (4)..(36)..(38): Xaa is C or S

SEQ ID NO: 14224 - protein, 35 aa, Artificial Sequence; identical to SEQ ID NO: 6886
  GFR-binding peptide
  MOD_RES (3)..(4): Xaa is C or S

SEQ ID NO: 14225 - protein, 44 aa, Artificial Sequence
  GFR-binding peptide
  MOD_RES (6)..(7)..(41)..(43): Xaa is C or S
  MOD_RES (21)..(22)..(23)..(24)..(25): Xaa is A or G
  MOD_RES (26)..(27)..(28)..(29): Xaa is A or G or is absent
STPPTXXVPTRLSPISILFIXXXXXXXXXYKQYEDMVVESXGXR

SEQ ID NO: 14226 - protein, 35 aa, Artificial Sequence
  GFR-binding peptide
  MOD_RES (1)..(33)..(35): Xaa is C or S
XAPTQLSPISVLFIDDSSNVIYKQYENMVVRAXGX

SEQ ID NO: 14227 - protein, 39 aa, Artificial Sequence
  GFR-binding peptide
  MOD_RES (3)..(4)..(37)..(39): Xaa is C or S
  MOD_RES (18)..(19)..(20)..(21)..(22): Xaa is A or G
  MOD_RES (23)..(24)..(25)..(26): Xaa is A or G or is absent
APXXVPQALEPLTILYYXXXXXXXXXEQLSNMIVRSXKX

SEQ ID NO: 14228 - protein, 35 aa, Artificial Sequence
  GFR-binding peptide
  MOD_RES (32)..(34): Xaa is C or S
APTQLSPISVLFIDDSSNVIYKQYENMVVRAXGXH

SEQ ID NO: 14229 - protein, 37 aa, Artificial Sequence; identical to SEQ ID NO: 6890
  GFR-binding peptide
  MOD_RES (4)..(5)..(36): Xaa is C or S

SEQ ID NO: 14230 - protein, 37 aa, Artificial Sequence
  GFR-binding peptide
  MOD_RES (4)..(5): Xaa is C or S
  MOD_RES (19)..(20)..(21)..(22)..(23): Xaa is A or G
  MOD_RES (24)..(25)..(26)..(27): Xaa is A or G or is absent
ASPXXVPQDLSPISILFIXXXXXXXXXYKQYEMVVKS

SEQ ID NO: 14231 - protein, 39 aa, Artificial Sequence
  GFR-binding peptide
  MOD_RES (3)..(4)..(37)..(39): Xaa is C or S
  MOD_RES (18)..(19)..(20)..(21)..(22): Xaa is A or G
  MOD_RES (23)..(24)..(25)..(26): Xaa is A or G or is absent
SPXXVPQDLSPISILFIXXXXXXXXXYKQYEMVVKSXKX

SEQ ID NO: 14232 - protein, 39 aa, Artificial Sequence
  GFR-binding peptide
  MOD_RES (2)..(3)..(37)..(39): Xaa is C or S
  MOD_RES (17)..(18)..(19)..(20)..(21): Xaa is A or G
  MOD_RES (22)..(23)..(24)..(25): Xaa is A or G or is absent
PXXAPTKLEPLTVLYYXXXXXXXXXEQLSNNMVVRSXGX

SEQ ID NO: 14233 - protein, 41 aa, Artificial Sequence; identical to SEQ ID NO: 6893
  GFR-binding peptide
  MOD_RES (6)..(7)..(38)..(40): Xaa is C or S

SEQ ID NO: 14234 - protein, 33 aa, Artificial Sequence
  GFR-binding peptide
  MOD_RES (1)..(1): Xaa is C or S
  MOD_RES (15)..(16)..(17)..(18)..(19): Xaa is A or G
  MOD_RES (20)..(21)..(22)..(23): Xaa is A or G or is absent
XVPTELSPISMLFIXXXXXXXXXYKQYEEMVVE

SEQ ID NO: 14235 - protein, 38 aa, Artificial Sequence
  GFR-binding peptide
  MOD_RES (2)..(3)..(37): Xaa is C or S
  MOD_RES (17)..(18)..(19)..(20)..(21): Xaa is A or G
  MOD_RES (22)..(23)..(24)..(25): Xaa is A or G or is absent
AXXVPTELEPLTMLYYXXXXXXXXXEQLSNDMVVEGXG

SEQ ID NO: 14236 - protein, 39 aa, Artificial Sequence; identical to SEQ ID NO: 6896
  GFR-binding peptide
  MOD_RES (4)..(5)..(39): Xaa is C or S
  MOD_RES (19)..(20)..(21)..(22)..(23): Xaa is A or G
  MOD_RES (24)..(25)..(26)..(27): Xaa is A or G or is absent

SEQ ID NO: 14237 - protein, 39 aa, Artificial Sequence
  GFR-binding peptide
  MOD_RES (3)..(4)..(38): Xaa is C or S
  MOD_RES (18)..(19)..(20)..(21)..(22): Xaa is A or G
  MOD_RES (23)..(24)..(25)..(26): Xaa is A or G or is absent
KAXXVPTELEPLTMLYYXXXXXXXXXEQLSNEMVVEGXG

SEQ ID NO: 14238 - protein, 43 aa, Artificial Sequence; identical to SEQ ID NO: 6897
  GFR-binding peptide
  MOD_RES (5)..(6)..(40)..(42): Xaa is C or S
  MOD_RES (20)..(21)..(22)..(23)..(24): Xaa is A or G
  MOD_RES (25)..(26)..(27)..(28): Xaa is A or G or is absent

SEQ ID NO: 14239 - protein, 39 aa, Artificial Sequence
  GFR-binding peptide
  MOD_RES (5)..(6)..(37)..(39): Xaa is C or S
SASPXXVPQDLEPLPIVYYVGRTPKVEQLSNMVVKSXKX

SEQ ID NO: 14240 - protein, 38 aa, Artificial Sequence; identical to SEQ ID NO: 6898
  GFR-binding peptide
  MOD_RES (2)..(3)..(36)..(38): Xaa is C or S
  MOD_RES (17)..(18)..(19)..(20)..(21): Xaa is A or G
  MOD_RES (22)..(23)..(24)..(25): Xaa is A or G or is absent

SEQ ID NO: 14241 - protein, 34 aa, Artificial Sequence
  GFR-binding peptide
  MOD_RES (1)..(2): Xaa is C or S
  MOD_RES (16)..(17)..(18)..(19)..(20): Xaa is A or G
  MOD_RES (21)..(22)..(23)..(24): Xaa is A or G or is absent
XXVPTELEPLTMLYYXXXXXXXXXEQLSNEMVVE

SEQ ID NO: 14242 - protein, 37 aa, Artificial Sequence; identical to SEQ ID NO: 6901
  GFR-binding peptide
  MOD_RES (3)..(4): Xaa is C or S
  MOD_RES (18)..(19)..(20)..(21)..(22): Xaa is A or G
  MOD_RES (23)..(24)..(25)..(26): Xaa is A or G or is absent

SEQ ID NO: 14243 - protein, 33 aa, Artificial Sequence
  GFR-binding peptide
  MOD_RES (2)..(3): Xaa is C or S
AXXVPTELEPLPMVYYDENEKVVEQLSNDMVVE

SEQ ID NO: 14244 - protein, 40 aa, Artificial Sequence
  GFR-binding peptide
  MOD_RES (6)..(7)..(40): Xaa is C or S
  MOD_RES (21)..(22)..(23)..(24)..(25): Xaa is A or G
  MOD_RES (26)..(27)..(28)..(29): Xaa is A or G or is absent
ASASPXXVPQDLSPISILFIXXXXXXXXXYKQYEMVVKSX

SEQ ID NO: 14245 - protein, 44 aa, Artificial Sequence
  GFR-binding peptide
  MOD_RES (6)..(7)..(41)..(43): Xaa is C or S
  MOD_RES (21)..(22)..(23)..(24)..(25): Xaa is A or G
  MOD_RES (26)..(27)..(28)..(29): Xaa is A or G or is absent
YVPKPXXAPTKLSPISVLFIXXXXXXXXXYKQYENMVVRSXGXH

SEQ ID NO: 14246 - protein, 40 aa, Artificial Sequence
  GFR-binding peptide
  MOD_RES (5)..(39): Xaa is C or S
  MOD_RES (19)..(20)..(21)..(22)..(23): Xaa is A or G
  MOD_RES (24)..(25)..(26)..(27): Xaa is A or G or is absent
TKPTXAPTKLSPISVLFIXXXXXXXXXYKQYENMVVRSXG

SEQ ID NO: 14247 - protein, 40 aa, Artificial Sequence; identical to SEQ ID NO: 6903
  GFR-binding peptide
  MOD_RES (4)..(38)..(40): Xaa is C or S
  MOD_RES (18)..(19)..(20)..(21)..(22): Xaa is A or G
  MOD_RES (23)..(24)..(25)..(26): Xaa is A or G or is absent

SEQ ID NO: 14248 - protein, 32 aa, Artificial Sequence; identical to SEQ ID NO: 6905
  GFR-binding peptide
  MOD_RES (14)..(15)..(16)..(17)..(18): Xaa is A or G
  MOD_RES (19)..(20)..(21)..(22): Xaa is A or G or is absent

SEQ ID NO: 14249 - protein, 34 aa, Artificial Sequence
  GFR-binding peptide
  MOD_RES (1)..(1): Xaa is C or S
  MOD_RES (15)..(16)..(17)..(18)..(19): Xaa is A or G
  MOD_RES (20)..(21)..(22)..(23): Xaa is A or G or is absent
XVPTELEPLPMVYYXXXXXXXXXEQLSNEMVVEG

SEQ ID NO: 14250 - protein, 38 aa, Artificial Sequence
  GFR-binding peptide
  MOD_RES (2)..(3)..(37): Xaa is C or S
  MOD_RES (17)..(18)..(19)..(20)..(21): Xaa is A or G
  MOD_RES (22)..(23)..(24)..(25): Xaa is A or G or is absent
TXXVPTRLEPLTILYYXXXXXXXXXEQLSNDMVVESXG

SEQ ID NO: 14251 - protein, 38 aa, Artificial Sequence
  GFR-binding peptide
  MOD_RES (1)..(2)..(36)..(38): Xaa is C or S
  MOD_RES (16)..(17)..(18)..(19)..(20): Xaa is A or G
  MOD_RES (21)..(22)..(23)..(24): Xaa is A or G or is absent
XXAPTKLEPLTVLYYXXXXXXXXXEQLSNNMVVRSXGX

SEQ ID NO: 14252 - protein, 40 aa, Artificial Sequence
  GFR-binding peptide
  MOD_RES (3)..(4)..(37)..(39): Xaa is C or S
  MOD_RES (18)..(19)..(20)..(21)..(22): Xaa is A or G
  MOD_RES (23)..(24)..(25)..(26): Xaa is A or G or is absent
APXXVPQALEPLTILYYXXXXXXXXXEQLSNMIVRSXKXS

SEQ ID NO: 14253 - protein, 32 aa, Artificial Sequence
  GFR-binding peptide
  MOD_RES (1)..(2): Xaa is C or S
XXVPQDLEPLPIVYYVGRTPKVEQLSNMVVKS

SEQ ID NO: 14254 - protein, 37 aa, Artificial Sequence
  GFR-binding peptide
  MOD_RES (1)..(35)..(37): Xaa is C or S
  MOD_RES (15)..(16)..(17)..(18)..(19): Xaa is A or G
  MOD_RES (20)..(21)..(22)..(23): Xaa is A or G or is absent
XVPTRLSPISILFIXXXXXXXXXYKQYEDMVVESXGX

SEQ ID NO: 14255 - protein, 35 aa, Artificial Sequence
  GFR-binding peptide
  MOD_RES (1)..(2)..(35): Xaa is C or S
  MOD_RES (16)..(17)..(18)..(19)..(20): Xaa is A or G
  MOD_RES (21)..(22)..(23)..(24): Xaa is A or G or is absent
XXVPQDLSPISILFIXXXXXXXXXYKQYEMVVKSX

SEQ ID NO: 14256 - protein, 31 aa, Artificial Sequence; identical to SEQ ID NO: 6916
  GFR-binding peptide
  MOD_RES (1)..(1): Xaa is C or S

SEQ ID NO: 14257 - protein, 39 aa, Artificial Sequence
  GFR-binding peptide
  MOD_RES (2)..(3)..(37)..(39): Xaa is C or S
  MOD_RES (17)..(18)..(19)..(20)..(21): Xaa is A or G
  MOD_RES (22)..(23)..(24)..(25): Xaa is A or G or is absent
AXXVPTELSPISMLFIXXXXXXXXXYKQYEDMVVEGXGX

SEQ ID NO: 14258 - protein, 37 aa, Artificial Sequence
  GFR-binding peptide
  MOD_RES (3)..(4): Xaa is C or S
  MOD_RES (18)..(19)..(20)..(21)..(22): Xaa is A or G
  MOD_RES (23)..(24)..(25)..(26): Xaa is A or G or is absent
PTXXVPTRLNAISILYFXXXXXXXXXLKKYRDMVVES

SEQ ID NO: 14259 - protein, 34 aa, Artificial Sequence
  GFR-binding peptide
  MOD_RES (3)..(4): Xaa is C or S
KAXXVPTELSPISMLFIDEYDKVVYKQYEEMVVE

SEQ ID NO: 14260 - protein, 41 aa, Artificial Sequence
  GFR-binding peptide
  MOD_RES (6)..(7)..(41): Xaa is C or S
  MOD_RES (21)..(22)..(23)..(24)..(25): Xaa is A or G
  MOD_RES (26)..(27)..(28)..(29): Xaa is A or G or is absent
TVPKPXXAPTQLEPLTVLYYXXXXXXXXXEQLSNNMVVRAX

SEQ ID NO: 14261 - protein, 36 aa, Artificial Sequence
  GFR-binding peptide
  MOD_RES (5)..(6): Xaa is C or S
SASPXXVPQDLSPISILFIVGRTPKVYKQYEMVVKS

SEQ ID NO: 14262 - protein, 38 aa, Artificial Sequence
  GFR-binding peptide
  MOD_RES (1)..(35)..(37): Xaa is C or S
  MOD_RES (15)..(16)..(17)..(18)..(19): Xaa is A or G
  MOD_RES (20)..(21)..(22)..(23): Xaa is A or G or is absent
XVPTRLSPISILFIXXXXXXXXXYKQYEDMVVESXGXR

SEQ ID NO: 14263 - protein, 34 aa, Artificial Sequence; identical to SEQ ID NO: 6920
  GFR-binding peptide
  MOD_RES (1)..(2): Xaa is C or S
  MOD_RES (16)..(17)..(18)..(19)..(20): Xaa is A or G
  MOD_RES (21)..(22)..(23)..(24): Xaa is A or G or is absent

SEQ ID NO: 14264 - protein, 32 aa, Artificial Sequence
  GFR-binding peptide
  MOD_RES (1)..(32): Xaa is C or S
XVSQDLEPLPIVYYIGKTPKIEQLSNMIVKSX

SEQ ID NO: 14265 - protein, 42 aa, Artificial Sequence
  GFR-binding peptide
  MOD_RES (4)..(5)..(39)..(41): Xaa is C or S
  MOD_RES (19)..(20)..(21)..(22)..(23): Xaa is A or G
  MOD_RES (24)..(25)..(26)..(27): Xaa is A or G or is absent
PKPXXAPTKLEPLPVVYYXXXXXXXXXEQLSNNMVVRSXGXH

SEQ ID NO: 14266 - protein, 35 aa, Artificial Sequence; identical to SEQ ID NO: 6924
  GFR-binding peptide
  MOD_RES (2)..(3)..(35): Xaa is C or S

SEQ ID NO: 14267 - protein, 37 aa, Artificial Sequence
  GFR-binding peptide
  MOD_RES (6)..(7): Xaa is C or S
ASAAPXXVPQALSPISILFIVGRKPKVYKQYEMIVRS

SEQ ID NO: 14268 - protein, 33 aa, Artificial Sequence
  GFR-binding peptide
  MOD_RES (2)..(2): Xaa is C or S
TXAPTKLSPISVLFIDDSSNVIYKQYENMVVRS

SEQ ID NO: 14269 - protein, 32 aa, Artificial Sequence
  GFR-binding peptide
  MOD_RES (32)..(32): Xaa is C or S
APTKLEPLTVLYYDDSSNVIEQLSNNMVVRSX

SEQ ID NO: 14270 - protein, 34 aa, Artificial Sequence; identical to SEQ ID NO: 6929
  GFR-binding peptide
  MOD_RES (2)..(3)..(34): Xaa is C or S

SEQ ID NO: 14271 - protein, 35 aa, Artificial Sequence
  GFR-binding peptide
  MOD_RES (2)..(34): Xaa is C or S
TXAPTKLEPLPVVYYDDSSNVIEQLSNNMVVRSXG

SEQ ID NO: 14272 - protein, 38 aa, Artificial Sequence; identical to SEQ ID NO: 6930
  GFR-binding peptide
  MOD_RES (6)..(7)..(38): Xaa is C or S

SEQ ID NO: 14273 - protein, 40 aa, Artificial Sequence
  GFR-binding peptide
  MOD_RES (6)..(7): Xaa is C or S
  MOD_RES (21)..(22)..(23)..(24)..(25): Xaa is A or G
  MOD_RES (26)..(27)..(28)..(29): Xaa is A or G or is absent
TVPKPXXAPTQLSPISVLFIXXXXXXXXXYKQYENMVVRA

SEQ ID NO: 14274 - protein, 35 aa, Artificial Sequence
  GFR-binding peptide
  MOD_RES (32)..(34): Xaa is C or S
APTQLEPLTVLYYDDSSNVIEQLSNNMVVRAXGXH

SEQ ID NO: 14275 - protein, 37 aa, Artificial Sequence
  GFR-binding peptide
  MOD_RES (3)..(4): Xaa is C or S
  MOD_RES (18)..(19)..(20)..(21)..(22): Xaa is A or G
  MOD_RES (23)..(24)..(25)..(26): Xaa is A or G or is absent
KAXXVPTELEPLTMLYYXXXXXXXXXEQLSNEMVVEG

SEQ ID NO: 14276 - protein, 41 aa, Artificial Sequence
  GFR-binding peptide
  MOD_RES (5)..(6)..(40): Xaa is C or S
  MOD_RES (20)..(21)..(22)..(23)..(24): Xaa is A or G
  MOD_RES (25)..(26)..(27)..(28): Xaa is A or G or is absent
VPKPXXAPTQLEPLTVLYYXXXXXXXXXEQLSNNMVVRAXG

SEQ ID NO: 14277 - protein, 40 aa, Artificial Sequence
  GFR-binding peptide
  MOD_RES (4)..(5)..(39): Xaa is C or S
  MOD_RES (19)..(20)..(21)..(22)..(23): Xaa is A or G
  MOD_RES (24)..(25)..(26)..(27): Xaa is A or G or is absent
PKPXXAPTQLEPLPVVYYXXXXXXXXXEQLSNNMVVRAXG

SEQ ID NO: 14278 - protein, 33 aa, Artificial Sequence; identical to SEQ ID NO: 6934
  GFR-binding peptide
  MOD_RES (14)..(15)..(16)..(17)..(18): Xaa is A or G
  MOD_RES (19)..(20)..(21)..(22): Xaa is A or G or is absent

SEQ ID NO: 14279 - protein, 39 aa, Artificial Sequence; identical to SEQ ID NO: 6935
  GFR-binding peptide
  MOD_RES (1)..(2)..(36)..(38): Xaa is C or S
  MOD_RES (16)..(17)..(18)..(19)..(20): Xaa is A or G
  MOD_RES (21)..(22)..(23)..(24): Xaa is A or G or is absent

SEQ ID NO: 14280 - protein, 37 aa, Artificial Sequence
  GFR-binding peptide
  MOD_RES (3)..(4)..(37): Xaa is C or S
  MOD_RES (18)..(19)..(20)..(21)..(22): Xaa is A or G
  MOD_RES (23)..(24)..(25)..(26): Xaa is A or G or is absent
APXXVPQALEPLPIVYYXXXXXXXXXEQLSNMIVRSX

SEQ ID NO: 14281 - protein, 40 aa, Artificial Sequence
  GFR-binding peptide
  MOD_RES (4)..(5)..(38)..(40): Xaa is C or S
  MOD_RES (19)..(20)..(21)..(22)..(23): Xaa is A or G
  MOD_RES (24)..(25)..(26)..(27): Xaa is A or G or is absent
AAPXXVPQALEPLTILYYXXXXXXXXXEQLSNMIVRSXKX

SEQ ID NO: 14282 - protein, 35 aa, Artificial Sequence
  GFR-binding peptide
  MOD_RES (33)..(35): Xaa is C or S
  MOD_RES (14)..(15)..(16)..(17)..(18): Xaa is A or G
  MOD_RES (19)..(20)..(21)..(22): Xaa is A or G or is absent
VSQDLEPLPIVYYXXXXXXXXXEQLSNMIVKSXKX

SEQ ID NO: 14283 - protein, 37 aa, Artificial Sequence
  GFR-binding peptide
  MOD_RES (5)..(6)..(37): Xaa is C or S
SASPXXVPQDLEPLPIVYYVGRTPKVEQLSNMVVKSX

SEQ ID NO: 14284 - protein, 35 aa, Artificial Sequence
  GFR-binding peptide
  MOD_RES (1)..(2)..(33)..(35): Xaa is C or S
XXVPQALEPLTILYYVGRKPKVEQLSNMIVRSXKX

SEQ ID NO: 14285 - protein, 35 aa, Artificial Sequence
  GFR-binding peptide
  MOD_RES (1)..(2): Xaa is C or S
  MOD_RES (16)..(17)..(18)..(19)..(20): Xaa is A or G
  MOD_RES (21)..(22)..(23)..(24): Xaa is A or G or is absent
XXVPTELEPLPMVYYXXXXXXXXXEQLSNEMVVEG

SEQ ID NO: 14286 - protein, 36 aa, Artificial Sequence
  GFR-binding peptide
  MOD_RES (1)..(33)..(35): Xaa is C or S
XVPTELEPLPMVYYDEYDKVVEQLSNEMVVEGXGXR

SEQ ID NO: 14287 - protein, 42 aa, Artificial Sequence
  GFR-binding peptide
  MOD_RES (6)..(7)..(41): Xaa is C or S
  MOD_RES (21)..(22)..(23)..(24)..(25): Xaa is A or G
  MOD_RES (26)..(27)..(28)..(29): Xaa is A or G or is absent
TVPKPXXAPTQLEPLPVVYYXXXXXXXXXEQLSNNMVVRAXG

SEQ ID NO: 14288 - protein, 37 aa, Artificial Sequence; identical to SEQ ID NO: 6941
  GFR-binding peptide
  MOD_RES (2)..(3)..(35)..(37): Xaa is C or S

SEQ ID NO: 14289 - protein, 40 aa, Artificial Sequence; identical to SEQ ID NO: 6942
  GFR-binding peptide
  MOD_RES (6)..(7): Xaa is C or S
  MOD_RES (21)..(22)..(23)..(24)..(25): Xaa is A or G
  MOD_RES (26)..(27)..(28)..(29): Xaa is A or G or is absent

SEQ ID NO: 14290 - protein, 34 aa, Artificial Sequence
  GFR-binding peptide
  MOD_RES (1)..(2): Xaa is C or S
  MOD_RES (16)..(17)..(18)..(19)..(20): Xaa is A or G
  MOD_RES (21)..(22)..(23)..(24): Xaa is A or G or is absent
XXVSQDLEPLPIVYYXXXXXXXXXEQLSNMIVKS

SEQ ID NO: 14291 - protein, 35 aa, Artificial Sequence
  GFR-binding peptide
  MOD_RES (1)..(2)..(34): Xaa is C or S
XXVPTELSPISMLFIDENEKVVYKQYEDMVVEGXG

SEQ ID NO: 14292 - protein, 39 aa, Artificial Sequence
  GFR-binding peptide
  MOD_RES (5)..(39): Xaa is C or S
  MOD_RES (19)..(20)..(21)..(22)..(23): Xaa is A or G
  MOD_RES (24)..(25)..(26)..(27): Xaa is A or G or is absent
TKPTXAPTKLSPISVLFIXXXXXXXXXYKQYENMVVRSX

SEQ ID NO: 14293 - protein, 39 aa, Artificial Sequence
  GFR-binding peptide
  MOD_RES (5)..(6)..(37)..(39): Xaa is C or S
SASPXXVSQDLSPISILFIIGKTPKIYKQYEMIVKSXKX

SEQ ID NO: 14294 - protein, 40 aa, Artificial Sequence; identical to SEQ ID NO: 6946
  GFR-binding peptide
  MOD_RES (6)..(7)..(38)..(40): Xaa is C or S

SEQ ID NO: 14295 - protein, 37 aa, Artificial Sequence; identical to SEQ ID NO: 6947
  GFR-binding peptide
  MOD_RES (3)..(4): Xaa is C or S
  MOD_RES (18)..(19)..(20)..(21)..(22): Xaa is A or G
  MOD_RES (23)..(24)..(25)..(26): Xaa is A or G or is absent

SEQ ID NO: 14296 - protein, 40 aa, Artificial Sequence; identical to SEQ ID NO: 6954
  GFR-binding peptide
  MOD_RES (4)..(5)..(39): Xaa is C or S
  MOD_RES (19)..(20)..(21)..(22)..(23): Xaa is A or G
  MOD_RES (24)..(25)..(26)..(27): Xaa is A or G or is absent

SEQ ID NO: 14297 - protein, 37 aa, Artificial Sequence; identical to SEQ ID NO: 6955
  GFR-binding peptide
  MOD_RES (4)..(5): Xaa is C or S
  MOD_RES (19)..(20)..(21)..(22)..(23): Xaa is A or G
  MOD_RES (24)..(25)..(26)..(27): Xaa is A or G or is absent

SEQ ID NO: 14298 - protein, 39 aa, Artificial Sequence; identical to SEQ ID NO: 6958
  GFR-binding peptide
  MOD_RES (4)..(5)..(38): Xaa is C or S
  MOD_RES (19)..(20)..(21)..(22)..(23): Xaa is A or G
  MOD_RES (24)..(25)..(26)..(27): Xaa is A or G or is absent

SEQ ID NO: 14299 - protein, 36 aa, Artificial Sequence
  GFR-binding peptide
  MOD_RES (3)..(3): Xaa is C or S
  MOD_RES (17)..(18)..(19)..(20)..(21): Xaa is A or G
  MOD_RES (22)..(23)..(24)..(25): Xaa is A or G or is absent
PTXAPTKLEPLTVLYYXXXXXXXXXEQLSNNMVVRS

SEQ ID NO: 14300 - protein, 37 aa, Artificial Sequence; identical to SEQ ID NO: 6961
  GFR-binding peptide
  MOD_RES (1)..(34)..(36): Xaa is C or S
  MOD_RES (15)..(16)..(17)..(18)..(19): Xaa is A or G
  MOD_RES (20)..(21)..(22)..(23): Xaa is A or G or is absent

SEQ ID NO: 14301 - protein, 40 aa, Artificial Sequence; identical to SEQ ID NO: 6962
  GFR-binding peptide
  MOD_RES (6)..(7)..(40): Xaa is C or S
  MOD_RES (21)..(22)..(23)..(24)..(25): Xaa is A or G
  MOD_RES (26)..(27)..(28)..(29): Xaa is A or G or is absent

SEQ ID NO: 14302 - protein, 39 aa, Artificial Sequence
  GFR-binding peptide
  MOD_RES (7)..(7): Xaa is C or S
  MOD_RES (21)..(22)..(23)..(24)..(25): Xaa is A or G
  MOD_RES (26)..(27)..(28)..(29): Xaa is A or G or is absent
HVTKPTXAPTKLEPLTVLYYXXXXXXXXXEQLSNNMVVR

SEQ ID NO: 14303 - protein, 32 aa, Artificial Sequence
  GFR-binding peptide
  MOD_RES (1)..(1): Xaa is C or S
XVPTELEPLTMLYYDENEKVVEQLSNDMVVEG

SEQ ID NO: 14304 - protein, 43 aa, Artificial Sequence
  GFR-binding peptide
  MOD_RES (6)..(7)..(41)..(43): Xaa is C or S
  MOD_RES (21)..(22)..(23)..(24)..(25): Xaa is A or G
  MOD_RES (26)..(27)..(28)..(29): Xaa is A or G or is absent
YVPKPXXAPTKLSPISVLFIXXXXXXXXXYKQYENMVVRSXGX

SEQ ID NO: 14305 - protein, 37 aa, Artificial Sequence; identical to SEQ ID NO: 6965
  GFR-binding peptide
  MOD_RES (1)..(2)..(36): Xaa is C or S
  MOD_RES (16)..(17)..(18)..(19)..(20): Xaa is A or G
  MOD_RES (21)..(22)..(23)..(24): Xaa is A or G or is absent

SEQ ID NO: 14306 - protein, 41 aa, Artificial Sequence
  GFR-binding peptide
  MOD_RES (5)..(6)..(38)..(40): Xaa is C or S
IPKAXXVPTELEPLPMVYYDENEKVVEQLSNDMVVEGXGXR

SEQ ID NO: 14307 - protein, 39 aa, Artificial Sequence
  GFR-binding peptide
  MOD_RES (1)..(2)..(36)..(38): Xaa is C or S
  MOD_RES (16)..(17)..(18)..(19)..(20): Xaa is A or G
  MOD_RES (21)..(22)..(23)..(24): Xaa is A or G or is absent
XXVPTELEPLPMVYYXXXXXXXXXEQLSNEMVVEGXGXR

SEQ ID NO: 14308 - protein, 42 aa, Artificial Sequence
  GFR-binding peptide
  MOD_RES (4)..(5)..(39)..(41): Xaa is C or S
  MOD_RES (19)..(20)..(21)..(22)..(23): Xaa is A or G
  MOD_RES (24)..(25)..(26)..(27): Xaa is A or G or is absent
PKAXXVPTELEPLPMVYYXXXXXXXXXEQLSNDMVVEGXGXR

SEQ ID NO: 14309 - protein, 35 aa, Artificial Sequence; identical to SEQ ID NO: 6970
  GFR-binding peptide
  MOD_RES (1)..(2): Xaa is C or S
  MOD_RES (16)..(17)..(18)..(19)..(20): Xaa is A or G
  MOD_RES (21)..(22)..(23)..(24): Xaa is A or G or is absent

SEQ ID NO: 14310 - protein, 33 aa, Artificial Sequence
  GFR-binding peptide
  MOD_RES (1)..(33): Xaa is C or S
XAPTQLSPISVLFIDDSSNVIYKQYENMVVRAX

SEQ ID NO: 14311 - protein, 43 aa, Artificial Sequence
  GFR-binding peptide
  MOD_RES (5)..(6)..(40)..(42): Xaa is C or S
  MOD_RES (20)..(21)..(22)..(23)..(24): Xaa is A or G
  MOD_RES (25)..(26)..(27)..(28): Xaa is A or G or is absent
IPKAXXVPTELEPLTMLYYXXXXXXXXXEQLSNEMVVEGXGXR

SEQ ID NO: 14312 - protein, 37 aa, Artificial Sequence; identical to SEQ ID NO: 6974
  GFR-binding peptide
  MOD_RES (2)..(3)..(35)..(37): Xaa is C or S

SEQ ID NO: 14313 - protein, 39 aa, Artificial Sequence
  GFR-binding peptide
  MOD_RES (2)..(3)..(37)..(39): Xaa is C or S
  MOD_RES (17)..(18)..(19)..(20)..(21): Xaa is A or G
  MOD_RES (22)..(23)..(24)..(25): Xaa is A or G or is absent
TXXVPTRLEPLPIVYYXXXXXXXXXEQLSNDMVVESXGX

SEQ ID NO: 14314 - protein, 38 aa, Artificial Sequence; identical to SEQ ID NO: 6975
  GFR-binding peptide
  MOD_RES (4)..(5): Xaa is C or S
  MOD_RES (19)..(20)..(21)..(22)..(23): Xaa is A or G
  MOD_RES (24)..(25)..(26)..(27): Xaa is A or G or is absent

SEQ ID NO: 14315 - protein, 32 aa, Artificial Sequence; identical to SEQ ID NO: 6976
  GFR-binding peptide
  MOD_RES (14)..(15)..(16)..(17)..(18): Xaa is A or G
  MOD_RES (19)..(20)..(21)..(22): Xaa is A or G or is absent

SEQ ID NO: 14316 - protein, 39 aa, Artificial Sequence
  GFR-binding peptide
  MOD_RES (3)..(4)..(36)..(38): Xaa is C or S
KAXXVPTELSPISMLFIDENEKVVYKQYEDMVVEGXGXR

SEQ ID NO: 14317 - protein, 41 aa, Artificial Sequence
  GFR-binding peptide
  MOD_RES (4)..(5)..(39)..(41): Xaa is C or S
  MOD_RES (19)..(20)..(21)..(22)..(23): Xaa is A or G
  MOD_RES (24)..(25)..(26)..(27): Xaa is A or G or is absent
PKAXXVPTELEPLPMVYYXXXXXXXXXEQLSNDMVVEGXGX

SEQ ID NO: 14318 - protein, 37 aa, Artificial Sequence
  GFR-binding peptide
  MOD_RES (34)..(36): Xaa is C or S
  MOD_RES (14)..(15)..(16)..(17)..(18): Xaa is A or G
  MOD_RES (19)..(20)..(21)..(22): Xaa is A or G or is absent
VPTELSPISMLFIXXXXXXXXXYKQYEEMVVEGXGXR

SEQ ID NO: 14319 - protein, 33 aa, Artificial Sequence; identical to SEQ ID NO: 6981
  GFR-binding peptide
  MOD_RES (1)..(1): Xaa is C or S
  MOD_RES (15)..(16)..(17)..(18)..(19): Xaa is A or G
  MOD_RES (20)..(21)..(22)..(23): Xaa is A or G or is absent

SEQ ID NO: 14320 - protein, 35 aa, Artificial Sequence
  GFR-binding peptide
  MOD_RES (5)..(5): Xaa is C or S
TKPTXAPTKLEPLPVVYYDDSSNVIEQLSNNMVVR

SEQ ID NO: 14321 - protein, 34 aa, Artificial Sequence; identical to SEQ ID NO: 6984
  GFR-binding peptide
  MOD_RES (3)..(4): Xaa is C or S

SEQ ID NO: 14322 - protein, 42 aa, Artificial Sequence
  GFR-binding peptide
  MOD_RES (6)..(7)..(39)..(41): Xaa is C or S
YVPKPXXAPTKLEPLTVLYYDDSSNVIEQLSNNMVVRSXGXH

SEQ ID NO: 14323 - protein, 40 aa, Artificial Sequence
  GFR-binding peptide
  MOD_RES (5)..(6)..(39): Xaa is C or S
  MOD_RES (20)..(21)..(22)..(23)..(24): Xaa is A or G
  MOD_RES (25)..(26)..(27)..(28): Xaa is A or G or is absent
SASPXXVPQDLEPLTILYYXXXXXXXXXEQLSNMVVKSXK

SEQ ID NO: 14324 - protein, 31 aa, Artificial Sequence; identical to SEQ ID NO: 6986
  GFR-binding peptide
  MOD_RES (1)..(1): Xaa is C or S

SEQ ID NO: 14325 - protein, 36 aa, Artificial Sequence
  GFR-binding peptide
  MOD_RES (34)..(36): Xaa is C or S
  MOD_RES (14)..(15)..(16)..(17)..(18): Xaa is A or G
  MOD_RES (19)..(20)..(21)..(22): Xaa is A or G or is absent
APTKLEPLPVVYYXXXXXXXXXEQLSNNMVVRSXGX

SEQ ID NO: 14326 - protein, 35 aa, Artificial Sequence
  GFR-binding peptide
  MOD_RES (34)..(34): Xaa is C or S
  MOD_RES (14)..(15)..(16)..(17)..(18): Xaa is A or G
  MOD_RES (19)..(20)..(21)..(22): Xaa is A or G or is absent
VPTRLSPISILFIXXXXXXXXXYKQYEDMVVESXG

SEQ ID NO: 14327 - protein, 40 aa, Artificial Sequence
  GFR-binding peptide
  MOD_RES (3)..(37)..(39): Xaa is C or S
  MOD_RES (17)..(18)..(19)..(20)..(21): Xaa is A or G
  MOD_RES (22)..(23)..(24)..(25): Xaa is A or G or is absent
PTXAPTKLEPLPVVYYXXXXXXXXXEQLSNNMVVRSXGXH

SEQ ID NO: 14328 - protein, 38 aa, Artificial Sequence
  GFR-binding peptide
  MOD_RES (4)..(5)..(37): Xaa is C or S
PKAXXVPTELSPISMLFIDEYDKVVYKQYEEMVVEGXG

SEQ ID NO: 14329 - protein, 38 aa, Artificial Sequence; identical to SEQ ID NO: 6993
  GFR-binding peptide
  MOD_RES (6)..(7): Xaa is C or S

SEQ ID NO: 14330 - protein, 35 aa, Artificial Sequence
  GFR-binding peptide
  MOD_RES (1)..(33)..(35): Xaa is C or S
XAPTKLEPLPVVYYDDSSNVIEQLSNNMVVRSXGX

SEQ ID NO: 14331 - protein, 35 aa, Artificial Sequence
  GFR-binding peptide
  MOD_RES (2)..(3)..(35): Xaa is C or S
PXXAPTQLEPLPVVYYDDSSNVIEQLSNNMVVRAX

SEQ ID NO: 14332 - protein, 38 aa, Artificial Sequence
  GFR-binding peptide
  MOD_RES (4)..(36)..(38): Xaa is C or S
KPTXAPTKLSPISVLFIDDSSNVIYKQYENMVVRSXGX

SEQ ID NO: 14333 - protein, 40 aa, Artificial Sequence
  GFR-binding peptide
  MOD_RES (6)..(7)..(39): Xaa is C or S
YVPKPXXAPTKLEPLTVLYYDDSSNVIEQLSNNMVVRSXG

SEQ ID NO: 14334 - protein, 33 aa, Artificial Sequence; identical to SEQ ID NO: 6998
  GFR-binding peptide
  MOD_RES (14)..(15)..(16)..(17)..(18): Xaa is A or G
  MOD_RES (19)..(20)..(21)..(22): Xaa is A or G or is absent

SEQ ID NO: 14335 - protein, 40 aa, Artificial Sequence
  GFR-binding peptide
  MOD_RES (3)..(4)..(38)..(40): Xaa is C or S
  MOD_RES (18)..(19)..(20)..(21)..(22): Xaa is A or G
  MOD_RES (23)..(24)..(25)..(26): Xaa is A or G or is absent
KAXXVPTELSPISMLFIXXXXXXXXXYKQYEEMVVEGXGX

SEQ ID NO: 14336 - protein, 36 aa, Artificial Sequence
  GFR-binding peptide
  MOD_RES (2)..(3)..(36): Xaa is C or S
  MOD_RES (17)..(18)..(19)..(20)..(21): Xaa is A or G
  MOD_RES (22)..(23)..(24)..(25): Xaa is A or G or is absent
PXXVPQALEPLTILYYXXXXXXXXXEQLSNMIVRSX

SEQ ID NO: 14337 - protein, 37 aa, Artificial Sequence
  GFR-binding peptide
  MOD_RES (4)..(5)..(37): Xaa is C or S
PKAXXVPTELEPLPMVYYDEYDKVVEQLSNEMVVEGX

SEQ ID NO: 14338 - protein, 40 aa, Artificial Sequence
  GFR-binding peptide
  MOD_RES (6)..(7)..(38)..(40): Xaa is C or S
ASASPXXVPQDLEPLPIVYYVGRTPKVEQLSNMVVKSXKX

SEQ ID NO: 14339 - protein, 35 aa, Artificial Sequence
  GFR-binding peptide
  MOD_RES (1)..(33)..(35): Xaa is C or S
XAPTKLSPISVLFIDDSSNVIYKQYENMVVRSXGX

SEQ ID NO: 14340 - protein, 32 aa, Artificial Sequence
  GFR-binding peptide
  MOD_RES (1)..(2): Xaa is C or S
XXVPTELSPISMLFIDEYDKVVYKQYEEMVVE

SEQ ID NO: 14341 - protein, 35 aa, Artificial Sequence; identical to SEQ ID NO: 7006
  GFR-binding peptide
  MOD_RES (33)..(35): Xaa is C or S
  MOD_RES (14)..(15)..(16)..(17)..(18): Xaa is A or G
  MOD_RES (19)..(20)..(21)..(22): Xaa is A or G or is absent

SEQ ID NO: 14342 - protein, 36 aa, Artificial Sequence; identical to SEQ ID NO: 7007
  GFR-binding peptide
  MOD_RES (1)..(2)..(33)..(35): Xaa is C or S

SEQ ID NO: 14343 - protein, 34 aa, Artificial Sequence; identical to SEQ ID NO: 7010
  GFR-binding peptide
  MOD_RES (2)..(3)..(34): Xaa is C or S

SEQ ID NO: 14344 - protein, 39 aa, Artificial Sequence
  GFR-binding peptide
  MOD_RES (2)..(3)..(36)..(38): Xaa is C or S
  MOD_RES (17)..(18)..(19)..(20)..(21): Xaa is A or G
  MOD_RES (22)..(23)..(24)..(25): Xaa is A or G or is absent
PXXVSQDLSPISILFIXXXXXXXXXYKQYEMIVKSXKXS

SEQ ID NO: 14345 - protein, 38 aa, Artificial Sequence
  GFR-binding peptide
  MOD_RES (5)..(6)..(37): Xaa is C or S
SAAPXXVPQALEPLTILYYVGRKPKVEQLSNMIVRSXK

SEQ ID NO: 14346 - protein, 33 aa, Artificial Sequence; identical to SEQ ID NO: 7011
  GFR-binding peptide
  MOD_RES (1)..(1): Xaa is C or S
  MOD_RES (15)..(16)..(17)..(18)..(19): Xaa is A or G
  MOD_RES (20)..(21)..(22)..(23): Xaa is A or G or is absent

SEQ ID NO: 14347 - protein, 37 aa, Artificial Sequence
  GFR-binding peptide
  MOD_RES (34)..(36): Xaa is C or S
  MOD_RES (14)..(15)..(16)..(17)..(18): Xaa is A or G
  MOD_RES (19)..(20)..(21)..(22): Xaa is A or G or is absent
APTQLEPLTVLYYXXXXXXXXXEQLSNNMVVRAXGXH

SEQ ID NO: 14348 - protein, 35 aa, Artificial Sequence
  GFR-binding peptide
  MOD_RES (1)..(33)..(35): Xaa is C or S
XVPTRLSAISILYLDSANNVVLKNYQDMVVESXGX

SEQ ID NO: 14349 - protein, 39 aa, Artificial Sequence; identical to SEQ ID NO: 7015
  GFR-binding peptide
  MOD_RES (3)..(4)..(37)..(39): Xaa is C or S
  MOD_RES (18)..(19)..(20)..(21)..(22): Xaa is A or G
  MOD_RES (23)..(24)..(25)..(26): Xaa is A or G or is absent

SEQ ID NO: 14350 - protein, 37 aa, Artificial Sequence
  GFR-binding peptide
  MOD_RES (4)..(5): Xaa is C or S
  MOD_RES (19)..(20)..(21)..(22)..(23): Xaa is A or G
  MOD_RES (24)..(25)..(26)..(27): Xaa is A or G or is absent
PKAXXVPTELSPISMLFIXXXXXXXXXYKQYEDMVVE

SEQ ID NO: 14351 - protein, 39 aa, Artificial Sequence
  GFR-binding peptide
  MOD_RES (6)..(7): Xaa is C or S
  MOD_RES (21)..(22)..(23)..(24)..(25): Xaa is A or G
  MOD_RES (26)..(27)..(28)..(29): Xaa is A or G or is absent
STPPTXXVPTRLEPLPIVYYXXXXXXXXXEQLSNDMVVE

SEQ ID NO: 14352 - protein, 41 aa, Artificial Sequence; identical to SEQ ID NO: 7021
  GFR-binding peptide
  MOD_RES (4)..(38)..(40): Xaa is C or S
  MOD_RES (18)..(19)..(20)..(21)..(22): Xaa is A or G
  MOD_RES (23)..(24)..(25)..(26): Xaa is A or G or is absent

SEQ ID NO: 14353 - protein, 40 aa, Artificial Sequence
  GFR-binding peptide
  MOD_RES (4)..(5)..(38)..(40): Xaa is C or S
  MOD_RES (19)..(20)..(21)..(22)..(23): Xaa is A or G
  MOD_RES (24)..(25)..(26)..(27): Xaa is A or G or is absent
ASPXXVPQDLSPISILFIXXXXXXXXXYKQYEMVVKSXKX

SEQ ID NO: 14354 - protein, 36 aa, Artificial Sequence; identical to SEQ ID NO: 7023
  GFR-binding peptide
  MOD_RES (1)..(35): Xaa is C or S
  MOD_RES (15)..(16)..(17)..(18)..(19): Xaa is A or G
  MOD_RES (20)..(21)..(22)..(23): Xaa is A or G or is absent

SEQ ID NO: 14355 - protein, 36 aa, Artificial Sequence; identical to SEQ ID NO: 7025
  GFR-binding peptide
  MOD_RES (1)..(2)..(34)..(36): Xaa is C or S

SEQ ID NO: 14356 - protein, 42 aa, Artificial Sequence
  GFR-binding peptide
  MOD_RES (6)..(7)..(41): Xaa is C or S
  MOD_RES (21)..(22)..(23)..(24)..(25): Xaa is A or G
  MOD_RES (26)..(27)..(28)..(29): Xaa is A or G or is absent
KIPKAXXVPTELSPISMLFIXXXXXXXXXYKQYEDMVVEGXG

SEQ ID NO: 14357 - protein, 31 aa, Artificial Sequence
  GFR-binding peptide
  MOD_RES (31)..(31): Xaa is C or S
VSQDLSPISILFIIGKTPKIYKQYEMIVKSX

SEQ ID NO: 14358 - protein, 34 aa, Artificial Sequence; identical to SEQ ID NO: 7028
  GFR-binding peptide
  MOD_RES (1)..(34): Xaa is C or S
  MOD_RES (15)..(16)..(17)..(18)..(19): Xaa is A or G
  MOD_RES (20)..(21)..(22)..(23): Xaa is A or G or is absent

SEQ ID NO: 14359 - protein, 41 aa, Artificial Sequence; identical to SEQ ID NO: 7031
  GFR-binding peptide
  MOD_RES (5)..(6)..(39)..(41): Xaa is C or S
  MOD_RES (20)..(21)..(22)..(23)..(24): Xaa is A or G
  MOD_RES (25)..(26)..(27)..(28): Xaa is A or G or is absent

SEQ ID NO: 14360 - protein, 36 aa, Artificial Sequence
  GFR-binding peptide
  MOD_RES (2)..(36): Xaa is C or S
  MOD_RES (16)..(17)..(18)..(19)..(20): Xaa is A or G
  MOD_RES (21)..(22)..(23)..(24): Xaa is A or G or is absent
TXAPTKLEPLTVLYYXXXXXXXXXEQLSNNMVVRSX

SEQ ID NO: 14361 - protein, 42 aa, Artificial Sequence; identical to SEQ ID NO: 7037
  GFR-binding peptide
  MOD_RES (6)..(40)..(42): Xaa is C or S
  MOD_RES (20)..(21)..(22)..(23)..(24): Xaa is A or G
  MOD_RES (25)..(26)..(27)..(28): Xaa is A or G or is absent

SEQ ID NO: 14362 - protein, 37 aa, Artificial Sequence
  GFR-binding peptide
  MOD_RES (5)..(6): Xaa is C or S
VPKPXXAPTKLEPLTVLYYDDSSNVIEQLSNNMVVRS

SEQ ID NO: 14363 - protein, 37 aa, Artificial Sequence
  GFR-binding peptide
  MOD_RES (34)..(36): Xaa is C or S
  MOD_RES (14)..(15)..(16)..(17)..(18): Xaa is A or G
  MOD_RES (19)..(20)..(21)..(22): Xaa is A or G or is absent
VPTELEPLTMLYYXXXXXXXXXEQLSNDMVVEGXGXR

SEQ ID NO: 14364 - protein, 36 aa, Artificial Sequence
  GFR-binding peptide
  MOD_RES (2)..(3)..(35): Xaa is C or S
AXXVPTELSPISMLFIDENEKVVYKQYEDMVVEGXG

SEQ ID NO: 14365 - protein, 37 aa, Artificial Sequence
  GFR-binding peptide
  MOD_RES (4)..(5)..(36): Xaa is C or S
ASPXXVPQDLEPLPIVYYVGRTPKVEQLSNMVVKSXK

SEQ ID NO: 14366 - protein, 39 aa, Artificial Sequence; identical to SEQ ID NO: 7043
  GFR-binding peptide
  MOD_RES (5)..(6): Xaa is C or S
  MOD_RES (20)..(21)..(22)..(23)..(24): Xaa is A or G
  MOD_RES (25)..(26)..(27)..(28): Xaa is A or G or is absent

SEQ ID NO: 14367 - protein, 34 aa, Artificial Sequence; identical to SEQ ID NO: 7044
  GFR-binding peptide
  MOD_RES (1)..(2): Xaa is C or S
  MOD_RES (16)..(17)..(18)..(19)..(20): Xaa is A or G
  MOD_RES (21)..(22)..(23)..(24): Xaa is A or G or is absent

SEQ ID NO: 14368 - protein, 40 aa, Artificial Sequence; identical to SEQ ID NO: 7045
  GFR-binding peptide
  MOD_RES (4)..(5)..(37)..(39): Xaa is C or S

SEQ ID NO: 14369 - protein, 35 aa, Artificial Sequence
  GFR-binding peptide
  MOD_RES (1)..(35): Xaa is C or S
  MOD_RES (15)..(16)..(17)..(18)..(19): Xaa is A or G
  MOD_RES (20)..(21)..(22)..(23): Xaa is A or G or is absent
XAPTKLEPLPVVYYXXXXXXXXXEQLSNNMVVRSX

SEQ ID NO: 14370 - protein, 34 aa, Artificial Sequence
  GFR-binding peptide
  MOD_RES (1)..(34): Xaa is C or S
  MOD_RES (15)..(16)..(17)..(18)..(19): Xaa is A or G
  MOD_RES (20)..(21)..(22)..(23): Xaa is A or G or is absent
XVSQDLEPLPIVYYXXXXXXXXXEQLSNMIVKSX

SEQ ID NO: 14371 - protein, 37 aa, Artificial Sequence; identical to SEQ ID NO: 7046
  GFR-binding peptide
  MOD_RES (3)..(37): Xaa is C or S
  MOD_RES (17)..(18)..(19)..(20)..(21): Xaa is A or G
  MOD_RES (22)..(23)..(24)..(25): Xaa is A or G or is absent

SEQ ID NO: 14372 - protein, 34 aa, Artificial Sequence
  GFR-binding peptide
  MOD_RES (3)..(4): Xaa is C or S
APXXVPQALEPLTILYYVGRKPKVEQLSNMIVRS

SEQ ID NO: 14373 - protein, 41 aa, Artificial Sequence
  GFR-binding peptide
  MOD_RES (6)..(40): Xaa is C or S
  MOD_RES (20)..(21)..(22)..(23)..(24): Xaa is A or G
  MOD_RES (25)..(26)..(27)..(28): Xaa is A or G or is absent
VTKPTXAPTKLEPLPVVYYXXXXXXXXXEQLSNNMVVRSXG

SEQ ID NO: 14374 - protein, 37 aa, Artificial Sequence
  GFR-binding peptide
  MOD_RES (4)..(5)..(37): Xaa is C or S
PPTXXVPTRLSAISILYLDSANNVVLKNYQDMVVESX

SEQ ID NO: 14375 - protein, 39 aa, Artificial Sequence
  GFR-binding peptide
  MOD_RES (6)..(7): Xaa is C or S
  MOD_RES (21)..(22)..(23)..(24)..(25): Xaa is A or G
  MOD_RES (26)..(27)..(28)..(29): Xaa is A or G or is absent
STPPTXXVPTRLNAISILYFXXXXXXXXXLKKYRDMVVE

SEQ ID NO: 14376 - protein, 40 aa, Artificial Sequence
  GFR-binding peptide
  MOD_RES (6)..(7)..(40): Xaa is C or S
  MOD_RES (21)..(22)..(23)..(24)..(25): Xaa is A or G
  MOD_RES (26)..(27)..(28)..(29): Xaa is A or G or is absent
ASAAPXXVPQALSPISILFIXXXXXXXXXYKQYEMIVRSX

SEQ ID NO: 14377 - protein, 36 aa, Artificial Sequence
  GFR-binding peptide
  MOD_RES (3)..(4)..(36): Xaa is C or S
KPXXAPTKLEPLTVLYYDDSSNVIEQLSNNMVVRSX

SEQ ID NO: 14378 - protein, 37 aa, Artificial Sequence; identical to SEQ ID NO: 7055
  GFR-binding peptide
  MOD_RES (1)..(2)..(36): Xaa is C or S
  MOD_RES (16)..(17)..(18)..(19)..(20): Xaa is A or G
  MOD_RES (21)..(22)..(23)..(24): Xaa is A or G or is absent

SEQ ID NO: 14379 - protein, 39 aa, Artificial Sequence
  GFR-binding peptide
  MOD_RES (6)..(7)..(39): Xaa is C or S
TVPKPXXAPTQLEPLTVLYYDDSSNVIEQLSNNMVVRAX

SEQ ID NO: 14380 - protein, 35 aa, Artificial Sequence
  GFR-binding peptide
  MOD_RES (1)..(34): Xaa is C or S
  MOD_RES (15)..(16)..(17)..(18)..(19): Xaa is A or G
  MOD_RES (20)..(21)..(22)..(23): Xaa is A or G or is absent
XVPQDLEPLPIVYYXXXXXXXXXEQLSNMVVKSXK

SEQ ID NO: 14381 - protein, 36 aa, Artificial Sequence
  GFR-binding peptide
  MOD_RES (3)..(4): Xaa is C or S
  MOD_RES (18)..(19)..(20)..(21)..(22): Xaa is A or G
  MOD_RES (23)..(24)..(25)..(26): Xaa is A or G or is absent
KPXXAPTKLEPLPVVYYXXXXXXXXXEQLSNNMVVR

SEQ ID NO: 14382 - protein, 43 aa, Artificial Sequence; identical to SEQ ID NO: 7061
  GFR-binding peptide
  MOD_RES (6)..(7)..(40)..(42): Xaa is C or S
  MOD_RES (21)..(22)..(23)..(24)..(25): Xaa is A or G
  MOD_RES (26)..(27)..(28)..(29): Xaa is A or G or is absent

SEQ ID NO: 14383 - protein, 39 aa, Artificial Sequence
  GFR-binding peptide
  MOD_RES (5)..(6)..(38): Xaa is C or S
IPKAXXVPTELEPLTMLYYDEYDKVVEQLSNEMVVEGXG

SEQ ID NO: 14384 - protein, 42 aa, Artificial Sequence; identical to SEQ ID NO: 7063
  GFR-binding peptide
  MOD_RES (6)..(7)..(39)..(41): Xaa is C or S

SEQ ID NO: 14385 - protein, 34 aa, Artificial Sequence; identical to SEQ ID NO: 7066
  GFR-binding peptide
  MOD_RES (34)..(34): Xaa is C or S
  MOD_RES (14)..(15)..(16)..(17)..(18): Xaa is A or G
  MOD_RES (19)..(20)..(21)..(22): Xaa is A or G or is absent

SEQ ID NO: 14386 - protein, 35 aa, Artificial Sequence
  GFR-binding peptide
  MOD_RES (34)..(34): Xaa is C or S
  MOD_RES (14)..(15)..(16)..(17)..(18): Xaa is A or G
  MOD_RES (19)..(20)..(21)..(22): Xaa is A or G or is absent
APTKLEPLTVLYYXXXXXXXXXEQLSNNMVVRSXG

SEQ ID NO: 14387 - protein, 37 aa, Artificial Sequence
  GFR-binding peptide
  MOD_RES (2)..(36): Xaa is C or S
  MOD_RES (16)..(17)..(18)..(19)..(20): Xaa is A or G
  MOD_RES (21)..(22)..(23)..(24): Xaa is A or G or is absent
TXAPTKLEPLTVLYYXXXXXXXXXEQLSNNMVVRSXG

SEQ ID NO: 14388 - protein, 42 aa, Artificial Sequence; identical to SEQ ID NO: 7070
  GFR-binding peptide
  MOD_RES (4)..(5)..(39)..(41): Xaa is C or S
  MOD_RES (19)..(20)..(21)..(22)..(23): Xaa is A or G
  MOD_RES (24)..(25)..(26)..(27): Xaa is A or G or is absent

SEQ ID NO: 14389 - protein, 33 aa, Artificial Sequence; identical to SEQ ID NO: 7073
  GFR-binding peptide
  MOD_RES (1)..(2)..(33): Xaa is C or S

SEQ ID NO: 14390 - protein, 37 aa, Artificial Sequence
  GFR-binding peptide
  MOD_RES (1)..(2)..(34)..(36): Xaa is C or S
XXAPTKLEPLPVVYYDDSSNVIEQLSNNMVVRSXGXH

SEQ ID NO: 14391 - protein, 40 aa, Artificial Sequence
  GFR-binding peptide
  MOD_RES (5)..(6)..(38)..(40): Xaa is C or S
TPPTXXVPTRLEPLPIVYYDSANNVVEQLSNDMVVESXGX

SEQ ID NO: 14392 - protein, 36 aa, Artificial Sequence
  GFR-binding peptide
  MOD_RES (3)..(4): Xaa is C or S
  MOD_RES (18)..(19)..(20)..(21)..(22): Xaa is A or G
  MOD_RES (23)..(24)..(25)..(26): Xaa is A or G or is absent
KAXXVPTELEPLTMLYYXXXXXXXXXEQLSNDMVVE

SEQ ID NO: 14393 - protein, 33 aa, Artificial Sequence; identical to SEQ ID NO: 7080
  GFR-binding peptide
  MOD_RES (2)..(3): Xaa is C or S

SEQ ID NO: 14394 - protein, 33 aa, Artificial Sequence; identical to SEQ ID NO: 7082
  GFR-binding peptide
  MOD_RES (2)..(3): Xaa is C or S

SEQ ID NO: 14395 - protein, 35 aa, Artificial Sequence
  GFR-binding peptide
  MOD_RES (1)..(33)..(35): Xaa is C or S
XVPTRLEPLTILYYDSANNVVEQLSNDMVVESXGX

SEQ ID NO: 14396 - protein, 35 aa, Artificial Sequence
  GFR-binding peptide
  MOD_RES (2)..(2): Xaa is C or S
  MOD_RES (16)..(17)..(18)..(19)..(20): Xaa is A or G
  MOD_RES (21)..(22)..(23)..(24): Xaa is A or G or is absent
TXAPTKLEPLPVVYYXXXXXXXXXEQLSNNMVVRS

SEQ ID NO: 14397 - protein, 40 aa, Artificial Sequence
  GFR-binding peptide
  MOD_RES (4)..(5)..(39): Xaa is C or S
  MOD_RES (19)..(20)..(21)..(22)..(23): Xaa is A or G
  MOD_RES (24)..(25)..(26)..(27): Xaa is A or G or is absent
PKAXXVPTELEPLTMLYYXXXXXXXXXEQLSNEMVVEGXG

SEQ ID NO: 14398 - protein, 36 aa, Artificial Sequence
  GFR-binding peptide
  MOD_RES (5)..(6): Xaa is C or S
SAAPXXVPQALSPISILFIVGRKPKVYKQYEMIVRS

SEQ ID NO: 14399 - protein, 32 aa, Artificial Sequence; identical to SEQ ID NO: 7087
  GFR-binding peptide
  MOD_RES (31)..(31): Xaa is C or S

SEQ ID NO: 14400 - protein, 41 aa, Artificial Sequence
  GFR-binding peptide
  MOD_RES (5)..(6)..(38)..(40): Xaa is C or S
VPKPXXAPTQLSPISVLFIDDSSNVIYKQYENMVVRAXGXH

SEQ ID NO: 14401 - protein, 40 aa, Artificial Sequence
  GFR-binding peptide
  MOD_RES (6)..(7)..(38)..(40): Xaa is C or S
ASASPXXVSQDLSPISILFIIGKTPKIYKQYEMIVKSXKX

SEQ ID NO: 14402 - protein, 42 aa, Artificial Sequence
  GFR-binding peptide
  MOD_RES (6)..(7)..(40)..(42): Xaa is C or S
  MOD_RES (21)..(22)..(23)..(24)..(25): Xaa is A or G
  MOD_RES (26)..(27)..(28)..(29): Xaa is A or G or is absent
ASASPXXVPQDLEPLPIVYYXXXXXXXXXEQLSNMVVKSXKX

SEQ ID NO: 14403 - protein, 41 aa, Artificial Sequence
  GFR-binding peptide
  MOD_RES (3)..(4)..(38)..(40): Xaa is C or S
  MOD_RES (18)..(19)..(20)..(21)..(22): Xaa is A or G
  MOD_RES (23)..(24)..(25)..(26): Xaa is A or G or is absent
PTXXVPTRLSAISILYLXXXXXXXXXLKNYQDMVVESXGXR

SEQ ID NO: 14404 - protein, 37 aa, Artificial Sequence
  GFR-binding peptide
  MOD_RES (3)..(4): Xaa is C or S
  MOD_RES (18)..(19)..(20)..(21)..(22): Xaa is A or G
  MOD_RES (23)..(24)..(25)..(26): Xaa is A or G or is absent
KAXXVPTELSPISMLFIXXXXXXXXXYKQYEEMVVEG

SEQ ID NO: 14405 - protein, 40 aa, Artificial Sequence
  GFR-binding peptide
  MOD_RES (6)..(7)..(38)..(40): Xaa is C or S
ASASPXXVSQDLEPLPIVYYIGKTPKIEQLSNMIVKSXKX

SEQ ID NO: 14406 - protein, 34 aa, Artificial Sequence
  GFR-binding peptide
  MOD_RES (1)..(34): Xaa is C or S
  MOD_RES (15)..(16)..(17)..(18)..(19): Xaa is A or G
  MOD_RES (20)..(21)..(22)..(23): Xaa is A or G or is absent
XVPQDLEPLTILYYXXXXXXXXXEQLSNMVVKSX

SEQ ID NO: 14407 - protein, 36 aa, Artificial Sequence
  GFR-binding peptide
  MOD_RES (3)..(4): Xaa is C or S
  MOD_RES (18)..(19)..(20)..(21)..(22): Xaa is A or G
  MOD_RES (23)..(24)..(25)..(26): Xaa is A or G or is absent
KAXXVPTELEPLPMVYYXXXXXXXXXEQLSNDMVVE

SEQ ID NO: 14408 - protein, 39 aa, Artificial Sequence; identical to SEQ ID NO: 7090
  GFR-binding peptide
  MOD_RES (3)..(4)..(37)..(39): Xaa is C or S
  MOD_RES (18)..(19)..(20)..(21)..(22): Xaa is A or G
  MOD_RES (23)..(24)..(25)..(26): Xaa is A or G or is absent

SEQ ID NO: 14409 - protein, 42 aa, Artificial Sequence
  GFR-binding peptide
  MOD_RES (4)..(5)..(39)..(41): Xaa is C or S
  MOD_RES (19)..(20)..(21)..(22)..(23): Xaa is A or G
  MOD_RES (24)..(25)..(26)..(27): Xaa is A or G or is absent
PPTXXVPTRLSPISILFIXXXXXXXXXYKQYEDMVVESXGXR

SEQ ID NO: 14410 - protein, 38 aa, Artificial Sequence
  GFR-binding peptide
  MOD_RES (5)..(6): Xaa is C or S
  MOD_RES (20)..(21)..(22)..(23)..(24): Xaa is A or G
  MOD_RES (25)..(26)..(27)..(28): Xaa is A or G or is absent
SAAPXXVPQALEPLTILYYXXXXXXXXXEQLSNMIVRS

SEQ ID NO: 14411 - protein, 35 aa, Artificial Sequence
  GFR-binding peptide
  MOD_RES (3)..(4): Xaa is C or S
KAXXVPTELEPLTMLYYDEYDKVVEQLSNEMVVEG

SEQ ID NO: 14412 - protein, 36 aa, Artificial Sequence; identical to SEQ ID NO: 7091
  GFR-binding peptide
  MOD_RES (1)..(33)..(35): Xaa is C or S

SEQ ID NO: 14413 - protein, 36 aa, Artificial Sequence
  GFR-binding peptide
  MOD_RES (3)..(4): Xaa is C or S
  MOD_RES (18)..(19)..(20)..(21)..(22): Xaa is A or G
  MOD_RES (23)..(24)..(25)..(26): Xaa is A or G or is absent
KPXXAPTKLEPLTVLYYXXXXXXXXXEQLSNNMVVR

SEQ ID NO: 14414 - protein, 41 aa, Artificial Sequence
  GFR-binding peptide
  MOD_RES (6)..(7)..(40): Xaa is C or S
  MOD_RES (21)..(22)..(23)..(24)..(25): Xaa is A or G
  MOD_RES (26)..(27)..(28)..(29): Xaa is A or G or is absent
ASASPXXVPQDLEPLTILYYXXXXXXXXXEQLSNMVVKSXK

SEQ ID NO: 14415 - protein, 35 aa, Artificial Sequence
  GFR-binding peptide
  MOD_RES (1)..(32)..(34): Xaa is C or S
XVSQDLSPISILFIIGKTPKIYKQYEMIVKSXKXS

SEQ ID NO: 14416 - protein, 32 aa, Artificial Sequence; identical to SEQ ID NO: 7094
  GFR-binding peptide
  MOD_RES (14)..(15)..(16)..(17)..(18): Xaa is A or G
  MOD_RES (19)..(20)..(21)..(22): Xaa is A or G or is absent

SEQ ID NO: 14417 - protein, 37 aa, Artificial Sequence
  GFR-binding peptide
  MOD_RES (2)..(3)..(36): Xaa is C or S
  MOD_RES (17)..(18)..(19)..(20)..(21): Xaa is A or G
  MOD_RES (22)..(23)..(24)..(25): Xaa is A or G or is absent
PXXVPQDLSPISILFIXXXXXXXXXYKQYEMVVKSXK

SEQ ID NO: 14418 - protein, 33 aa, Artificial Sequence
  GFR-binding peptide
  MOD_RES (31)..(33): Xaa is C or S
VPQALSPISILFIVGRKPKVYKQYEMIVRSXKX

SEQ ID NO: 14419 - protein, 35 aa, Artificial Sequence
  GFR-binding peptide
  MOD_RES (4)..(5): Xaa is C or S
PPTXXVPTRLSAISILYLDSANNVVLKNYQDMVVE

SEQ ID NO: 14420 - protein, 42 aa, Artificial Sequence; identical to SEQ ID NO: 7099
  GFR-binding peptide
  MOD_RES (6)..(7)..(39)..(41): Xaa is C or S

SEQ ID NO: 14421 - protein, 42 aa, Artificial Sequence; identical to SEQ ID NO: 7101
  GFR-binding peptide
  MOD_RES (5)..(6)..(40)..(42): Xaa is C or S
  MOD_RES (20)..(21)..(22)..(23)..(24): Xaa is A or G
  MOD_RES (25)..(26)..(27)..(28): Xaa is A or G or is absent

SEQ ID NO: 14422 - protein, 38 aa, Artificial Sequence
  GFR-binding peptide
  MOD_RES (2)..(3)..(36)..(38): Xaa is C or S
  MOD_RES (17)..(18)..(19)..(20)..(21): Xaa is A or G
  MOD_RES (22)..(23)..(24)..(25): Xaa is A or G or is absent
PXXVSQDLSPISILFIXXXXXXXXXYKQYEMIVKSXKX

SEQ ID NO: 14423 - protein, 42 aa, Artificial Sequence; identical to SEQ ID NO: 7102
  GFR-binding peptide
  MOD_RES (6)..(7)..(39)..(41): Xaa is C or S

SEQ ID NO: 14424 - protein, 36 aa, Artificial Sequence
  GFR-binding peptide
  MOD_RES (33)..(35): Xaa is C or S
  MOD_RES (14)..(15)..(16)..(17)..(18): Xaa is A or G
  MOD_RES (19)..(20)..(21)..(22): Xaa is A or G or is absent
VSQDLSPISILFIXXXXXXXXXYKQYEMIVKSXKXS

SEQ ID NO: 14425 - protein, 37 aa, Artificial Sequence
  GFR-binding peptide
  MOD_RES (2)..(3)..(37): Xaa is C or S
  MOD_RES (17)..(18)..(19)..(20)..(21): Xaa is A or G
  MOD_RES (22)..(23)..(24)..(25): Xaa is A or G or is absent
PXXAPTKLSPISVLFIXXXXXXXXXYKQYENMVVRSX

SEQ ID NO: 14426 - protein, 35 aa, Artificial Sequence
  GFR-binding peptide
  MOD_RES (32)..(34): Xaa is C or S
APTQLEPLPVVYYDDSSNVIEQLSNNMVVRAXGXH

SEQ ID NO: 14427 - protein, 38 aa, Artificial Sequence; identical to SEQ ID NO: 7104
  GFR-binding peptide
  MOD_RES (1)..(2)..(36)..(38): Xaa is C or S
  MOD_RES (16)..(17)..(18)..(19)..(20): Xaa is A or G
  MOD_RES (21)..(22)..(23)..(24): Xaa is A or G or is absent

SEQ ID NO: 14428 - protein, 35 aa, Artificial Sequence; identical to SEQ ID NO: 7106
  GFR-binding peptide
  MOD_RES (2)..(3): Xaa is C or S
  MOD_RES (17)..(18)..(19)..(20)..(21): Xaa is A or G
  MOD_RES (22)..(23)..(24)..(25): Xaa is A or G or is absent

SEQ ID NO: 14429 - protein, 32 aa, Artificial Sequence
  GFR-binding peptide
  MOD_RES (14)..(15)..(16)..(17)..(18): Xaa is A or G
  MOD_RES (19)..(20)..(21)..(22): Xaa is A or G or is absent
VPTELSPISMLFIXXXXXXXXXYKQYEEMVVE

SEQ ID NO: 14430 - protein, 33 aa, Artificial Sequence; identical to SEQ ID NO: 7110
  GFR-binding peptide
  MOD_RES (1)..(32): Xaa is C or S

SEQ ID NO: 14431 - protein, 36 aa, Artificial Sequence
  GFR-binding peptide
  MOD_RES (4)..(5)..(36): Xaa is C or S
ASPXXVSQDLSPISILFIIGKTPKIYKQYEMIVKSX

SEQ ID NO: 14432 - protein, 36 aa, Artificial Sequence
  GFR-binding peptide
  MOD_RES (34)..(36): Xaa is C or S
  MOD_RES (14)..(15)..(16)..(17)..(18): Xaa is A or G
  MOD_RES (19)..(20)..(21)..(22): Xaa is A or G or is absent
APTQLEPLPVVYYXXXXXXXXXEQLSNNMVVRAXGX

SEQ ID NO: 14433 - protein, 35 aa, Artificial Sequence; identical to SEQ ID NO: 7112
  GFR-binding peptide
  MOD_RES (1)..(35): Xaa is C or S
  MOD_RES (15)..(16)..(17)..(18)..(19): Xaa is A or G
  MOD_RES (20)..(21)..(22)..(23): Xaa is A or G or is absent

SEQ ID NO: 14434 - protein, 36 aa, Artificial Sequence; identical to SEQ ID NO: 7117
  GFR-binding peptide
  MOD_RES (1)..(33)..(35): Xaa is C or S

SEQ ID NO: 14435 - protein, 36 aa, Artificial Sequence
  GFR-binding peptide
  MOD_RES (3)..(4): Xaa is C or S
  MOD_RES (18)..(19)..(20)..(21)..(22): Xaa is A or G
  MOD_RES (23)..(24)..(25)..(26): Xaa is A or G or is absent
KPXXAPTQLSPISVLFIXXXXXXXXXYKQYENMVVR

SEQ ID NO: 14436 - protein, 36 aa, Artificial Sequence
  GFR-binding peptide
  MOD_RES (2)..(3): Xaa is C or S
  MOD_RES (17)..(18)..(19)..(20)..(21): Xaa is A or G
  MOD_RES (22)..(23)..(24)..(25): Xaa is A or G or is absent
PXXAPTQLSPISVLFIXXXXXXXXXYKQYENMVVRA

SEQ ID NO: 14437 - protein, 38 aa, Artificial Sequence
  GFR-binding peptide
  MOD_RES (4)..(5)..(37): Xaa is C or S
PKPXXAPTKLSPISVLFIDDSSNVIYKQYENMVVRSXG

SEQ ID NO: 14438 - protein, 32 aa, Artificial Sequence
  GFR-binding peptide
  MOD_RES (14)..(15)..(16)..(17)..(18): Xaa is A or G
  MOD_RES (19)..(20)..(21)..(22): Xaa is A or G or is absent
VPQALSPISILFIXXXXXXXXXYKQYEMIVRS

SEQ ID NO: 14439 - protein, 41 aa, Artificial Sequence
  GFR-binding peptide
  MOD_RES (5)..(6)..(40): Xaa is C or S
  MOD_RES (20)..(21)..(22)..(23)..(24): Xaa is A or G
  MOD_RES (25)..(26)..(27)..(28): Xaa is A or G or is absent
IPKAXXVPTELEPLPMVYYXXXXXXXXXEQLSNDMVVEGXG

SEQ ID NO: 14440 - protein, 41 aa, Artificial Sequence; identical to SEQ ID NO: 7121
  GFR-binding peptide
  MOD_RES (5)..(6)..(39)..(41): Xaa is C or S
  MOD_RES (20)..(21)..(22)..(23)..(24): Xaa is A or G
  MOD_RES (25)..(26)..(27)..(28): Xaa is A or G or is absent

SEQ ID NO: 14441 - protein, 38 aa, Artificial Sequence
  GFR-binding peptide
  MOD_RES (1)..(2)..(36)..(38): Xaa is C or S
  MOD_RES (16)..(17)..(18)..(19)..(20): Xaa is A or G
  MOD_RES (21)..(22)..(23)..(24): Xaa is A or G or is absent
XXVPTELSPISMLFIXXXXXXXXXYKQYEDMVVEGXGX

SEQ ID NO: 14442 - protein, 39 aa, Artificial Sequence
  GFR-binding peptide
  MOD_RES (7)..(39): Xaa is C or S
HVTKPTXAPTKLSPISVLFIDDSSNVIYKQYENMVVRSX

SEQ ID NO: 14443 - protein, 42 aa, Artificial Sequence
  GFR-binding peptide
  MOD_RES (5)..(6)..(40)..(42): Xaa is C or S
  MOD_RES (20)..(21)..(22)..(23)..(24): Xaa is A or G
  MOD_RES (25)..(26)..(27)..(28): Xaa is A or G or is absent
TPPTXXVPTRLEPLTILYYXXXXXXXXXEQLSNDMVVESXGX

SEQ ID NO: 14444 - protein, 37 aa, Artificial Sequence; identical to SEQ ID NO: 7126
  GFR-binding peptide
  MOD_RES (34)..(36): Xaa is C or S
  MOD_RES (14)..(15)..(16)..(17)..(18): Xaa is A or G
  MOD_RES (19)..(20)..(21)..(22): Xaa is A or G or is absent

SEQ ID NO: 14445 - protein, 36 aa, Artificial Sequence
  GFR-binding peptide
  MOD_RES (1)..(33)..(35): Xaa is C or S
XVPTELEPLTMLYYDEYDKVVEQLSNEMVVEGXGXR

SEQ ID NO: 14446 - protein, 35 aa, Artificial Sequence; identical to SEQ ID NO: 7128
  GFR-binding peptide
  MOD_RES (34)..(34): Xaa is C or S
  MOD_RES (14)..(15)..(16)..(17)..(18): Xaa is A or G
  MOD_RES (19)..(20)..(21)..(22): Xaa is A or G or is absent

SEQ ID NO: 14447 - protein, 39 aa, Artificial Sequence
  GFR-binding peptide
  MOD_RES (4)..(5)..(36)..(38): Xaa is C or S
AAPXXVPQALSPISILFIVGRKPKVYKQYEMIVRSXKXS

SEQ ID NO: 14448 - protein, 42 aa, Artificial Sequence
  GFR-binding peptide
  MOD_RES (6)..(7)..(39)..(41): Xaa is C or S
KIPKAXXVPTELSPISMLFIDENEKVVYKQYEDMVVEGXGXR

SEQ ID NO: 14449 - protein, 38 aa, Artificial Sequence
  GFR-binding peptide
  MOD_RES (1)..(2)..(35)..(37): Xaa is C or S
  MOD_RES (16)..(17)..(18)..(19)..(20): Xaa is A or G
  MOD_RES (21)..(22)..(23)..(24): Xaa is A or G or is absent
XXVSQDLEPLPIVYYXXXXXXXXXEQLSNMIVKSXKXS

SEQ ID NO: 14450 - protein, 33 aa, Artificial Sequence
  GFR-binding peptide
  MOD_RES (33)..(33): Xaa is C or S
  MOD_RES (14)..(15)..(16)..(17)..(18): Xaa is A or G
  MOD_RES (19)..(20)..(21)..(22): Xaa is A or G or is absent
VSQDLEPLPIVYYXXXXXXXXXEQLSNMIVKSX

SEQ ID NO: 14451 - protein, 38 aa, Artificial Sequence
  GFR-binding peptide
  MOD_RES (5)..(6)..(38): Xaa is C or S
TPPTXXVPTRLEPLPIVYYDSANNVVEQLSNDMVVESX

SEQ ID NO: 14452 - protein, 38 aa, Artificial Sequence
  GFR-binding peptide
  MOD_RES (1)..(2)..(35)..(37): Xaa is C or S
  MOD_RES (16)..(17)..(18)..(19)..(20): Xaa is A or G
  MOD_RES (21)..(22)..(23)..(24): Xaa is A or G or is absent
XXVPQDLSPISILFIXXXXXXXXXYKQYEMVVKSXKXS

SEQ ID NO: 14453 - protein, 37 aa, Artificial Sequence
  GFR-binding peptide
  MOD_RES (3)..(4)..(37): Xaa is C or S
  MOD_RES (18)..(19)..(20)..(21)..(22): Xaa is A or G
  MOD_RES (23)..(24)..(25)..(26): Xaa is A or G or is absent
SPXXVPQDLEPLTILYYXXXXXXXXXEQLSNMVVKSX

SEQ ID NO: 14454 - protein, 36 aa, Artificial Sequence; identical to SEQ ID NO: 7130
  GFR-binding peptide
  MOD_RES (2)..(3)..(35): Xaa is C or S

SEQ ID NO: 14455 - protein, 37 aa, Artificial Sequence; identical to SEQ ID NO: 7131
  GFR-binding peptide
  MOD_RES (7)..(7): Xaa is C or S

SEQ ID NO: 14456 - protein, 33 aa, Artificial Sequence
  GFR-binding peptide
  MOD_RES (1)..(2): Xaa is C or S
XXAPTQLEPLTVLYYDDSSNVIEQLSNNMVVRA

SEQ ID NO: 14457 - protein, 37 aa, Artificial Sequence
  GFR-binding peptide
  MOD_RES (2)..(3)..(35)..(37): Xaa is C or S
AXXVPTELEPLPMVYYDEYDKVVEQLSNEMVVEGXGX

SEQ ID NO: 14458 - protein, 32 aa, Artificial Sequence
  GFR-binding peptide
  MOD_RES (1)..(1): Xaa is C or S
XVPTRLSAISILYLDSANNVVLKNYQDMVVES

SEQ ID NO: 14459 - protein, 37 aa, Artificial Sequence
  GFR-binding peptide
  MOD_RES (5)..(6): Xaa is C or S
VPKPXXAPTQLEPLTVLYYDDSSNVIEQLSNNMVVRA

SEQ ID NO: 14460 - protein, 37 aa, Artificial Sequence
  GFR-binding peptide
  MOD_RES (34)..(36): Xaa is C or S
  MOD_RES (14)..(15)..(16)..(17)..(18): Xaa is A or G
  MOD_RES (19)..(20)..(21)..(22): Xaa is A or G or is absent
VPTELEPLTMLYYXXXXXXXXXEQLSNEMVVEGXGXR

SEQ ID NO: 14461 - protein, 42 aa, Artificial Sequence
  GFR-binding peptide
  MOD_RES (5)..(6)..(40)..(42): Xaa is C or S
  MOD_RES (20)..(21)..(22)..(23)..(24): Xaa is A or G
  MOD_RES (25)..(26)..(27)..(28): Xaa is A or G or is absent
IPKAXXVPTELSPISMLFIXXXXXXXXXYKQYEEMVVEGXGX

SEQ ID NO: 14462 - protein, 35 aa, Artificial Sequence
  GFR-binding peptide
  MOD_RES (1)..(2)..(34): Xaa is C or S
XXVPTELEPLTMLYYDEYDKVVEQLSNEMVVEGXG

SEQ ID NO: 14463 - protein, 37 aa, Artificial Sequence
  GFR-binding peptide
  MOD_RES (4)..(5)..(37): Xaa is C or S
PKPXXAPTQLEPLPVVYYDDSSNVIEQLSNNMVVRAX

SEQ ID NO: 14464 - protein, 39 aa, Artificial Sequence
  GFR-binding peptide
  MOD_RES (6)..(7)..(39): Xaa is C or S
STPPTXXVPTRLEPLTILYYDSANNVVEQLSNDMVVESX

SEQ ID NO: 14465 - protein, 36 aa, Artificial Sequence
  GFR-binding peptide
  MOD_RES (2)..(3)..(34)..(36): Xaa is C or S
PXXVPQALSPISILFIVGRKPKVYKQYEMIVRSXKX

SEQ ID NO: 14466 - protein, 39 aa, Artificial Sequence
  GFR-binding peptide
  MOD_RES (6)..(7): Xaa is C or S
  MOD_RES (21)..(22)..(23)..(24)..(25): Xaa is A or G
  MOD_RES (26)..(27)..(28)..(29): Xaa is A or G or is absent
STPPTXXVPTRLEPLTILYYXXXXXXXXXEQLSNDMVVE

SEQ ID NO: 14467 - protein, 37 aa, Artificial Sequence
  GFR-binding peptide
  MOD_RES (4)..(5): Xaa is C or S
  MOD_RES (19)..(20)..(21)..(22)..(23): Xaa is A or G
  MOD_RES (24)..(25)..(26)..(27): Xaa is A or G or is absent
PKAXXVPTELEPLTMLYYXXXXXXXXXEQLSNEMVVE

SEQ ID NO: 14468 - protein, 30 aa, Artificial Sequence
  GFR-binding peptide
VPTELSPISMLFIDEYDKVVYKQYEEMVVE

SEQ ID NO: 14469 - protein, 38 aa, Artificial Sequence
  GFR-binding peptide
  MOD_RES (4)..(5)..(37): Xaa is C or S
PKAXXVPTELEPLPMVYYDEYDKVVEQLSNEMVVEGXG

SEQ ID NO: 14470 - protein, 40 aa, Artificial Sequence; identical to SEQ ID NO: 7150
  GFR-binding peptide
  MOD_RES (3)..(4)..(38)..(40): Xaa is C or S
  MOD_RES (18)..(19)..(20)..(21)..(22): Xaa is A or G
  MOD_RES (23)..(24)..(25)..(26): Xaa is A or G or is absent

SEQ ID NO: 14471 - protein, 37 aa, Artificial Sequence; identical to SEQ ID NO: 7151
  GFR-binding peptide
  MOD_RES (1)..(35)..(37): Xaa is C or S
  MOD_RES (15)..(16)..(17)..(18)..(19): Xaa is A or G
  MOD_RES (20)..(21)..(22)..(23): Xaa is A or G or is absent

SEQ ID NO: 14472 - protein, 36 aa, Artificial Sequence
  GFR-binding peptide
  MOD_RES (1)..(2)..(35): Xaa is C or S
  MOD_RES (16)..(17)..(18)..(19)..(20): Xaa is A or G
  MOD_RES (21)..(22)..(23)..(24): Xaa is A or G or is absent
XXVSQDLEPLPIVYYXXXXXXXXXEQLSNMIVKSXK

SEQ ID NO: 14473 - protein, 39 aa, Artificial Sequence; identical to SEQ ID NO: 7159
  GFR-binding peptide
  MOD_RES (6)..(7)..(39): Xaa is C or S

SEQ ID NO: 14474 - protein, 37 aa, Artificial Sequence
  GFR-binding peptide
  MOD_RES (3)..(4)..(36): Xaa is C or S
PTXXVPTRLSAISILYLDSANNVVLKNYQDMVVESXG

SEQ ID NO: 14475 - protein, 33 aa, Artificial Sequence
  GFR-binding peptide
  MOD_RES (3)..(3): Xaa is C or S
PTXAPTKLSPISVLFIDDSSNVIYKQYENMVVR

SEQ ID NO: 14476 - protein, 38 aa, Artificial Sequence; identical to SEQ ID NO: 7161
  GFR-binding peptide
  MOD_RES (2)..(3)..(36)..(38): Xaa is C or S
  MOD_RES (17)..(18)..(19)..(20)..(21): Xaa is A or G
  MOD_RES (22)..(23)..(24)..(25): Xaa is A or G or is absent

SEQ ID NO: 14477 - protein, 41 aa, Artificial Sequence
  GFR-binding peptide
  MOD_RES (6)..(7)..(39)..(41): Xaa is C or S
SIPKAXXVPTELSPISMLFIDEYDKVVYKQYEEMVVEGXGX

SEQ ID NO: 14478 - protein, 43 aa, Artificial Sequence
  GFR-binding peptide
  MOD_RES (5)..(6)..(40)..(42): Xaa is C or S
  MOD_RES (20)..(21)..(22)..(23)..(24): Xaa is A or G
  MOD_RES (25)..(26)..(27)..(28): Xaa is A or G or is absent
VPKPXXAPTKLEPLPVVYYXXXXXXXXXEQLSNNMVVRSXGXH

SEQ ID NO: 14479 - protein, 43 aa, Artificial Sequence
  GFR-binding peptide
  MOD_RES (6)..(7)..(41)..(43): Xaa is C or S
  MOD_RES (21)..(22)..(23)..(24)..(25): Xaa is A or G
  MOD_RES (26)..(27)..(28)..(29): Xaa is A or G or is absent
STPPTXXVPTRLEPLTILYYXXXXXXXXXEQLSNDMVVESXGX

SEQ ID NO: 14480 - protein, 37 aa, Artificial Sequence; identical to SEQ ID NO: 7168
  GFR-binding peptide
  MOD_RES (5)..(6)..(37): Xaa is C or S

SEQ ID NO: 14481 - protein, 37 aa, Artificial Sequence; identical to SEQ ID NO: 7170
  GFR-binding peptide
  MOD_RES (2)..(3)..(36): Xaa is C or S
  MOD_RES (17)..(18)..(19)..(20)..(21): Xaa is A or G
  MOD_RES (22)..(23)..(24)..(25): Xaa is A or G or is absent

SEQ ID NO: 14482 - protein, 33 aa, Artificial Sequence
  GFR-binding peptide
  MOD_RES (33)..(33): Xaa is C or S
  MOD_RES (14)..(15)..(16)..(17)..(18): Xaa is A or G
  MOD_RES (19)..(20)..(21)..(22): Xaa is A or G or is absent
VPQDLEPLPIVYYXXXXXXXXXEQLSNMVVKSX

SEQ ID NO: 14483 - protein, 37 aa, Artificial Sequence; identical to SEQ ID NO: 7171
  GFR-binding peptide
  MOD_RES (5)..(6)..(37): Xaa is C or S

SEQ ID NO: 14484 - protein, 41 aa, Artificial Sequence; identical to SEQ ID NO: 7173
  GFR-binding peptide
  MOD_RES (6)..(7)..(41): Xaa is C or S
  MOD_RES (21)..(22)..(23)..(24)..(25): Xaa is A or G
  MOD_RES (26)..(27)..(28)..(29): Xaa is A or G or is absent

SEQ ID NO: 14485 - protein, 36 aa, Artificial Sequence; identical to SEQ ID NO: 7176
  GFR-binding peptide
  MOD_RES (33)..(35): Xaa is C or S
  MOD_RES (14)..(15)..(16)..(17)..(18): Xaa is A or G
  MOD_RES (19)..(20)..(21)..(22): Xaa is A or G or is absent

SEQ ID NO: 14486 - protein, 42 aa, Artificial Sequence; identical to SEQ ID NO: 7177
  GFR-binding peptide
  MOD_RES (4)..(5)..(39)..(41): Xaa is C or S
  MOD_RES (19)..(20)..(21)..(22)..(23): Xaa is A or G
  MOD_RES (24)..(25)..(26)..(27): Xaa is A or G or is absent

SEQ ID NO: 14487 - protein, 37 aa, Artificial Sequence; identical to SEQ ID NO: 7179
  GFR-binding peptide
  MOD_RES (2)..(3)..(36): Xaa is C or S
  MOD_RES (17)..(18)..(19)..(20)..(21): Xaa is A or G
  MOD_RES (22)..(23)..(24)..(25): Xaa is A or G or is absent

SEQ ID NO: 14488 - protein, 40 aa, Artificial Sequence
  GFR-binding peptide
  MOD_RES (6)..(7)..(39): Xaa is C or S
TVPKPXXAPTQLSPISVLFIDDSSNVIYKQYENMVVRAXG

SEQ ID NO: 14489 - protein, 43 aa, Artificial Sequence; identical to SEQ ID NO: 7185
  GFR-binding peptide
  MOD_RES (6)..(7)..(41)..(43): Xaa is C or S
  MOD_RES (21)..(22)..(23)..(24)..(25): Xaa is A or G
  MOD_RES (26)..(27)..(28)..(29): Xaa is A or G or is absent

SEQ ID NO: 14490 - protein, 32 aa, Artificial Sequence
  GFR-binding peptide
  MOD_RES (31)..(31): Xaa is C or S
VSQDLEPLPIVYYIGKTPKIEQLSNMIVKSXK

SEQ ID NO: 14491 - protein, 36 aa, Artificial Sequence; identical to SEQ ID NO: 7187
  GFR-binding peptide
  MOD_RES (1)..(2)..(36): Xaa is C or S
  MOD_RES (16)..(17)..(18)..(19)..(20): Xaa is A or G
  MOD_RES (21)..(22)..(23)..(24): Xaa is A or G or is absent

SEQ ID NO: 14492 - protein, 38 aa, Artificial Sequence
  GFR-binding peptide
  MOD_RES (6)..(7): Xaa is C or S
TVPKPXXAPTQLEPLPVVYYDDSSNVIEQLSNNMVVRA

SEQ ID NO: 14493 - protein, 34 aa, Artificial Sequence
  GFR-binding peptide
  MOD_RES (1)..(32)..(34): Xaa is C or S
XVPQDLSPISILFIVGRTPKVYKQYEMVVKSXKX

SEQ ID NO: 14494 - protein, 35 aa, Artificial Sequence
  GFR-binding peptide
  MOD_RES (4)..(4): Xaa is C or S
KPTXAPTKLSPISVLFIDDSSNVIYKQYENMVVRS

SEQ ID NO: 14495 - protein, 35 aa, Artificial Sequence
  GFR-binding peptide
  MOD_RES (4)..(5): Xaa is C or S
ASPXXVPQDLSPISILFIVGRTPKVYKQYEMVVKS

SEQ ID NO: 14496 - protein, 37 aa, Artificial Sequence; identical to SEQ ID NO: 7195
  GFR-binding peptide
  MOD_RES (1)..(2)..(34)..(36): Xaa is C or S

SEQ ID NO: 14497 - protein, 36 aa, Artificial Sequence; identical to SEQ ID NO: 7197
  GFR-binding peptide
  MOD_RES (1)..(2)..(36): Xaa is C or S
  MOD_RES (16)..(17)..(18)..(19)..(20): Xaa is A or G
  MOD_RES (21)..(22)..(23)..(24): Xaa is A or G or is absent

SEQ ID NO: 14498 - protein, 39 aa, Artificial Sequence
  GFR-binding peptide
  MOD_RES (3)..(4)..(38): Xaa is C or S
  MOD_RES (18)..(19)..(20)..(21)..(22): Xaa is A or G
  MOD_RES (23)..(24)..(25)..(26): Xaa is A or G or is absent
KPXXAPTQLSPISVLFIXXXXXXXXXYKQYENMVVRAXG

SEQ ID NO: 14499 - protein, 37 aa, Artificial Sequence; identical to SEQ ID NO: 7199
  GFR-binding peptide
  MOD_RES (1)..(35)..(37): Xaa is C or S
  MOD_RES (15)..(16)..(17)..(18)..(19): Xaa is A or G
  MOD_RES (20)..(21)..(22)..(23): Xaa is A or G or is absent

SEQ ID NO: 14500 - protein, 33 aa, Artificial Sequence
  GFR-binding peptide
  MOD_RES (1)..(1): Xaa is C or S
  MOD_RES (15)..(16)..(17)..(18)..(19): Xaa is A or G
  MOD_RES (20)..(21)..(22)..(23): Xaa is A or G or is absent
XVPTELEPLTMLYYXXXXXXXXXEQLSNDMVVE

SEQ ID NO: 14501 - protein, 31 aa, Artificial Sequence
  GFR-binding peptide
VPTELEPLPMVYYDENEKVVEQLSNDMVVEG

SEQ ID NO: 14502 - protein, 37 aa, Artificial Sequence; identical to SEQ ID NO: 7200
  GFR-binding peptide
  MOD_RES (3)..(4)..(35)..(37): Xaa is C or S

SEQ ID NO: 14503 - protein, 39 aa, Artificial Sequence
  GFR-binding peptide
  MOD_RES (5)..(6): Xaa is C or S
  MOD_RES (20)..(21)..(22)..(23)..(24): Xaa is A or G
  MOD_RES (25)..(26)..(27)..(28): Xaa is A or G or is absent
IPKAXXVPTELEPLTMLYYXXXXXXXXXEQLSNEMVVEG

SEQ ID NO: 14504 - protein, 40 aa, Artificial Sequence
  GFR-binding peptide
  MOD_RES (6)..(7)..(39): Xaa is C or S
KIPKAXXVPTELEPLTMLYYDENEKVVEQLSNDMVVEGXG

SEQ ID NO: 14505 - protein, 36 aa, Artificial Sequence; identical to SEQ ID NO: 7203
  GFR-binding peptide
  MOD_RES (3)..(4)..(35): Xaa is C or S

SEQ ID NO: 14506 - protein, 36 aa, Artificial Sequence
  GFR-binding peptide
  MOD_RES (1)..(35): Xaa is C or S
  MOD_RES (15)..(16)..(17)..(18)..(19): Xaa is A or G
  MOD_RES (20)..(21)..(22)..(23): Xaa is A or G or is absent
XVPTRLEPLPIVYYXXXXXXXXXEQLSNDMVVESXG

SEQ ID NO: 14507 - protein, 42 aa, Artificial Sequence; identical to SEQ ID NO: 7204
  GFR-binding peptide
  MOD_RES (5)..(6)..(40)..(42): Xaa is C or S
  MOD_RES (20)..(21)..(22)..(23)..(24): Xaa is A or G
  MOD_RES (25)..(26)..(27)..(28): Xaa is A or G or is absent

SEQ ID NO: 14508 - protein, 40 aa, Artificial Sequence
  GFR-binding peptide
  MOD_RES (3)..(4)..(37)..(39): Xaa is C or S
  MOD_RES (18)..(19)..(20)..(21)..(22): Xaa is A or G
  MOD_RES (23)..(24)..(25)..(26): Xaa is A or G or is absent
SPXXVPQDLSPISILFIXXXXXXXXXYKQYEMVVKSXKXS

SEQ ID NO: 14509 - protein, 32 aa, Artificial Sequence
  GFR-binding peptide
  MOD_RES (14)..(15)..(16)..(17)..(18): Xaa is A or G
  MOD_RES (19)..(20)..(21)..(22): Xaa is A or G or is absent
VPTELEPLPMVYYXXXXXXXXXEQLSNDMVVE

SEQ ID NO: 14510 - protein, 39 aa, Artificial Sequence
  GFR-binding peptide
  MOD_RES (5)..(6)..(38): Xaa is C or S
IPKAXXVPTELEPLPMVYYDENEKVVEQLSNDMVVEGXG

SEQ ID NO: 14511 - protein, 41 aa, Artificial Sequence
  GFR-binding peptide
  MOD_RES (6)..(7)..(41): Xaa is C or S
  MOD_RES (21)..(22)..(23)..(24)..(25): Xaa is A or G
  MOD_RES (26)..(27)..(28)..(29): Xaa is A or G or is absent
STPPTXXVPTRLSPISILFIXXXXXXXXXYKQYEDMVVESX

SEQ ID NO: 14512 - protein, 36 aa, Artificial Sequence; identical to SEQ ID NO: 7207
  GFR-binding peptide
  MOD_RES (2)..(3)..(34)..(36): Xaa is C or S

SEQ ID NO: 14513 - protein, 35 aa, Artificial Sequence
  GFR-binding peptide
  MOD_RES (1)..(2): Xaa is C or S
  MOD_RES (16)..(17)..(18)..(19)..(20): Xaa is A or G
  MOD_RES (21)..(22)..(23)..(24): Xaa is A or G or is absent
XXVPTELEPLTMLYYXXXXXXXXXEQLSNEMVVEG

SEQ ID NO: 14514 - protein, 38 aa, Artificial Sequence
  GFR-binding peptide
  MOD_RES (4)..(5)..(37): Xaa is C or S
PKPXXAPTQLEPLTVLYYDDSSNVIEQLSNNMVVRAXG

SEQ ID NO: 14515 - protein, 39 aa, Artificial Sequence; identical to SEQ ID NO: 7210
  GFR-binding peptide
  MOD_RES (5)..(6): Xaa is C or S
  MOD_RES (20)..(21)..(22)..(23)..(24): Xaa is A or G
  MOD_RES (25)..(26)..(27)..(28): Xaa is A or G or is absent

SEQ ID NO: 14516 - protein, 40 aa, Artificial Sequence
  GFR-binding peptide
  MOD_RES (5)..(6)..(38)..(40): Xaa is C or S
TPPTXXVPTRLNAISILYFDSANNVVLKKYRDMVVESXGX

SEQ ID NO: 14517 - protein, 36 aa, Artificial Sequence; identical to SEQ ID NO: 7214
  GFR-binding peptide
  MOD_RES (1)..(33)..(35): Xaa is C or S

SEQ ID NO: 14518 - protein, 39 aa, Artificial Sequence
  GFR-binding peptide
  MOD_RES (1)..(2)..(36)..(38): Xaa is C or S
  MOD_RES (16)..(17)..(18)..(19)..(20): Xaa is A or G
  MOD_RES (21)..(22)..(23)..(24): Xaa is A or G or is absent
XXVPTRLNAISILYFXXXXXXXXXLKKYRDMVVESXGXR

SEQ ID NO: 14519 - protein, 32 aa, Artificial Sequence; identical to SEQ ID NO: 7215
  GFR-binding peptide
  MOD_RES (14)..(15)..(16)..(17)..(18): Xaa is A or G
  MOD_RES (19)..(20)..(21)..(22): Xaa is A or G or is absent

SEQ ID NO: 14520 - protein, 38 aa, Artificial Sequence
  GFR-binding peptide
  MOD_RES (3)..(4)..(38): Xaa is C or S
  MOD_RES (18)..(19)..(20)..(21)..(22): Xaa is A or G
  MOD_RES (23)..(24)..(25)..(26): Xaa is A or G or is absent
KPXXAPTKLEPLPVVYYXXXXXXXXXEQLSNNMVVRSX

SEQ ID NO: 14521 - protein, 34 aa, Artificial Sequence
  GFR-binding peptide
  MOD_RES (1)..(34): Xaa is C or S
  MOD_RES (15)..(16)..(17)..(18)..(19): Xaa is A or G
  MOD_RES (20)..(21)..(22)..(23): Xaa is A or G or is absent
XVSQDLSPISILFIXXXXXXXXXYKQYEMIVKSX

SEQ ID NO: 14522 - protein, 36 aa, Artificial Sequence
  GFR-binding peptide
  MOD_RES (1)..(2)..(36): Xaa is C or S
  MOD_RES (16)..(17)..(18)..(19)..(20): Xaa is A or G
  MOD_RES (21)..(22)..(23)..(24): Xaa is A or G or is absent
XXVPTRLSPISILFIXXXXXXXXXYKQYEDMVVESX

SEQ ID NO: 14523 - protein, 35 aa, Artificial Sequence
  GFR-binding peptide
  MOD_RES (1)..(32)..(34): Xaa is C or S
XVSQDLEPLPIVYYIGKTPKIEQLSNMIVKSXKXS

SEQ ID NO: 14524 - protein, 39 aa, Artificial Sequence
  GFR-binding peptide
  MOD_RES (2)..(3)..(37)..(39): Xaa is C or S
  MOD_RES (17)..(18)..(19)..(20)..(21): Xaa is A or G
  MOD_RES (22)..(23)..(24)..(25): Xaa is A or G or is absent
PXXAPTQLEPLTVLYYXXXXXXXXXEQLSNNMVVRAXGX

SEQ ID NO: 14525 - protein, 39 aa, Artificial Sequence
  GFR-binding peptide
  MOD_RES (1)..(2)..(36)..(38): Xaa is C or S
  MOD_RES (16)..(17)..(18)..(19)..(20): Xaa is A or G
  MOD_RES (21)..(22)..(23)..(24): Xaa is A or G or is absent
XXAPTQLSPISVLFIXXXXXXXXXYKQYENMVVRAXGXH

SEQ ID NO: 14526 - protein, 38 aa, Artificial Sequence
  GFR-binding peptide
  MOD_RES (3)..(35)..(37): Xaa is C or S
PTXAPTKLSPISVLFIDDSSNVIYKQYENMVVRSXGXH

SEQ ID NO: 14527 - protein, 39 aa, Artificial Sequence
  GFR-binding peptide
  MOD_RES (4)..(38): Xaa is C or S
  MOD_RES (18)..(19)..(20)..(21)..(22): Xaa is A or G
  MOD_RES (23)..(24)..(25)..(26): Xaa is A or G or is absent
KPTXAPTKLEPLTVLYYXXXXXXXXXEQLSNNMVVRSXG

SEQ ID NO: 14528 - protein, 39 aa, Artificial Sequence
  GFR-binding peptide
  MOD_RES (5)..(6)..(39): Xaa is C or S
  MOD_RES (20)..(21)..(22)..(23)..(24): Xaa is A or G
  MOD_RES (25)..(26)..(27)..(28): Xaa is A or G or is absent
SASPXXVPQDLSPISILFIXXXXXXXXXYKQYEMVVKSX

SEQ ID NO: 14529 - protein, 40 aa, Artificial Sequence
  GFR-binding peptide
  MOD_RES (4)..(5)..(37)..(39): Xaa is C or S
PPTXXVPTRLEPLTILYYDSANNVVEQLSNDMVVESXGXR

SEQ ID NO: 14530 - protein, 36 aa, Artificial Sequence
  GFR-binding peptide
  MOD_RES (4)..(36): Xaa is C or S
KPTXAPTKLSPISVLFIDDSSNVIYKQYENMVVRSX

SEQ ID NO: 14531 - protein, 40 aa, Artificial Sequence
  GFR-binding peptide
  MOD_RES (6)..(7): Xaa is C or S
  MOD_RES (21)..(22)..(23)..(24)..(25): Xaa is A or G
  MOD_RES (26)..(27)..(28)..(29): Xaa is A or G or is absent
STPPTXXVPTRLSPISILFIXXXXXXXXXYKQYEDMVVES

SEQ ID NO: 14532 - protein, 37 aa, Artificial Sequence
  GFR-binding peptide
  MOD_RES (4)..(5)..(37): Xaa is C or S
PKAXXVPTELEPLTMLYYDENEKVVEQLSNDMVVEGX

SEQ ID NO: 14533 - protein, 36 aa, Artificial Sequence
  GFR-binding peptide
  MOD_RES (1)..(35): Xaa is C or S
  MOD_RES (15)..(16)..(17)..(18)..(19): Xaa is A or G
  MOD_RES (20)..(21)..(22)..(23): Xaa is A or G or is absent
XVPTELEPLPMVYYXXXXXXXXXEQLSNDMVVEGXG

SEQ ID NO: 14534 - protein, 33 aa, Artificial Sequence
  GFR-binding peptide
  MOD_RES (1)..(2): Xaa is C or S
XXVPTELEPLTMLYYDEYDKVVEQLSNEMVVEG

SEQ ID NO: 14535 - protein, 40 aa, Artificial Sequence
  GFR-binding peptide
  MOD_RES (5)..(39): Xaa is C or S
  MOD_RES (19)..(20)..(21)..(22)..(23): Xaa is A or G
  MOD_RES (24)..(25)..(26)..(27): Xaa is A or G or is absent
TKPTXAPTKLEPLTVLYYXXXXXXXXXEQLSNNMVVRSXG

SEQ ID NO: 14536 - protein, 34 aa, Artificial Sequence
  GFR-binding peptide
  MOD_RES (1)..(1): Xaa is C or S
  MOD_RES (15)..(16)..(17)..(18)..(19): Xaa is A or G
  MOD_RES (20)..(21)..(22)..(23): Xaa is A or G or is absent
XVPTELEPLPMVYYXXXXXXXXXEQLSNDMVVEG

SEQ ID NO: 14537 - protein, 40 aa, Artificial Sequence; identical to SEQ ID NO: 7234
  GFR-binding peptide
  MOD_RES (6)..(7)..(40): Xaa is C or S
  MOD_RES (21)..(22)..(23)..(24)..(25): Xaa is A or G
  MOD_RES (26)..(27)..(28)..(29): Xaa is A or G or is absent

SEQ ID NO: 14538 - protein, 37 aa, Artificial Sequence
  GFR-binding peptide
  MOD_RES (2)..(3)..(36): Xaa is C or S
  MOD_RES (17)..(18)..(19)..(20)..(21): Xaa is A or G
  MOD_RES (22)..(23)..(24)..(25): Xaa is A or G or is absent
PXXVPQDLEPLTILYYXXXXXXXXXEQLSNMVVKSXK

SEQ ID NO: 14539 - protein, 37 aa, Artificial Sequence
  GFR-binding peptide
  MOD_RES (5)..(37): Xaa is C or S
TKPTXAPTKLEPLPVVYYDDSSNVIEQLSNNMVVRSX

SEQ ID NO: 14540 - protein, 39 aa, Artificial Sequence; identical to SEQ ID NO: 7236
  GFR-binding peptide
  MOD_RES (6)..(7): Xaa is C or S
  MOD_RES (21)..(22)..(23)..(24)..(25): Xaa is A or G
  MOD_RES (26)..(27)..(28)..(29): Xaa is A or G or is absent

SEQ ID NO: 14541 - protein, 36 aa, Artificial Sequence; identical to SEQ ID NO: 7237
  GFR-binding peptide
  MOD_RES (3)..(4)..(35): Xaa is C or S

SEQ ID NO: 14542 - protein, 36 aa, Artificial Sequence
  GFR-binding peptide
  MOD_RES (5)..(6): Xaa is C or S
SASPXXVSQDLSPISILFIIGKTPKIYKQYEMIVKS

SEQ ID NO: 14543 - protein, 42 aa, Artificial Sequence
  GFR-binding peptide
  MOD_RES (5)..(6)..(39)..(41): Xaa is C or S
  MOD_RES (20)..(21)..(22)..(23)..(24): Xaa is A or G
  MOD_RES (25)..(26)..(27)..(28): Xaa is A or G or is absent
SASPXXVPQDLEPLPIVYYXXXXXXXXXEQLSNMVVKSXKXS

SEQ ID NO: 14544 - protein, 36 aa, Artificial Sequence; identical to SEQ ID NO: 7239
  GFR-binding peptide
  MOD_RES (3)..(4): Xaa is C or S
  MOD_RES (18)..(19)..(20)..(21)..(22): Xaa is A or G
  MOD_RES (23)..(24)..(25)..(26): Xaa is A or G or is absent

SEQ ID NO: 14545 - protein, 35 aa, Artificial Sequence
  GFR-binding peptide
  MOD_RES (4)..(5): Xaa is C or S
ASPXXVPQDLEPLPIVYYVGRTPKVEQLSNMVVKS

SEQ ID NO: 14546 - protein, 41 aa, Artificial Sequence
  GFR-binding peptide
  MOD_RES (6)..(7)..(41): Xaa is C or S
  MOD_RES (21)..(22)..(23)..(24)..(25): Xaa is A or G
  MOD_RES (26)..(27)..(28)..(29): Xaa is A or G or is absent
KIPKAXXVPTELEPLTMLYYXXXXXXXXXEQLSNDMVVEGX

SEQ ID NO: 14547 - protein, 43 aa, Artificial Sequence; identical to SEQ ID NO: 7248
  GFR-binding peptide
  MOD_RES (5)..(6)..(40)..(42): Xaa is C or S
  MOD_RES (20)..(21)..(22)..(23)..(24): Xaa is A or G
  MOD_RES (25)..(26)..(27)..(28): Xaa is A or G or is absent

SEQ ID NO: 14548 - protein, 38 aa, Artificial Sequence
  GFR-binding peptide
  MOD_RES (3)..(4)..(37): Xaa is C or S
  MOD_RES (18)..(19)..(20)..(21)..(22): Xaa is A or G
  MOD_RES (23)..(24)..(25)..(26): Xaa is A or G or is absent
SPXXVPQDLSPISILFIXXXXXXXXXYKQYEMVVKSXK

SEQ ID NO: 14549 - protein, 40 aa, Artificial Sequence
  GFR-binding peptide
  MOD_RES (7)..(7): Xaa is C or S
  MOD_RES (21)..(22)..(23)..(24)..(25): Xaa is A or G
  MOD_RES (26)..(27)..(28)..(29): Xaa is A or G or is absent
HVTKPTXAPTKLEPLTVLYYXXXXXXXXXEQLSNNMVVRS

SEQ ID NO: 14550 - protein, 37 aa, Artificial Sequence
  GFR-binding peptide
  MOD_RES (1)..(2)..(34)..(36): Xaa is C or S
XXVPTELEPLTMLYYDEYDKVVEQLSNEMVVEGXGXR

SEQ ID NO: 14551 - protein, 39 aa, Artificial Sequence
  GFR-binding peptide
  MOD_RES (1)..(2)..(36)..(38): Xaa is C or S
  MOD_RES (16)..(17)..(18)..(19)..(20): Xaa is A or G
  MOD_RES (21)..(22)..(23)..(24): Xaa is A or G or is absent
XXVPTRLEPLPIVYYXXXXXXXXXEQLSNDMVVESXGXR

SEQ ID NO: 14552 - protein, 38 aa, Artificial Sequence; identical to SEQ ID NO: 7254
  GFR-binding peptide
  MOD_RES (3)..(4)..(38): Xaa is C or S
  MOD_RES (18)..(19)..(20)..(21)..(22): Xaa is A or G
  MOD_RES (23)..(24)..(25)..(26): Xaa is A or G or is absent

SEQ ID NO: 14553 - protein, 37 aa, Artificial Sequence; identical to SEQ ID NO: 7255
  GFR-binding peptide
  MOD_RES (4)..(5): Xaa is C or S
  MOD_RES (19)..(20)..(21)..(22)..(23): Xaa is A or G
  MOD_RES (24)..(25)..(26)..(27): Xaa is A or G or is absent

SEQ ID NO: 14554 - protein, 40 aa, Artificial Sequence; identical to SEQ ID NO: 7256
  GFR-binding peptide
  MOD_RES (5)..(6)..(37)..(39): Xaa is C or S

SEQ ID NO: 14555 - protein, 44 aa, Artificial Sequence
  GFR-binding peptide
  MOD_RES (6)..(7)..(41)..(43): Xaa is C or S
  MOD_RES (21)..(22)..(23)..(24)..(25): Xaa is A or G
  MOD_RES (26)..(27)..(28)..(29): Xaa is A or G or is absent
STPPTXXVPTRLNAISILYFXXXXXXXXXLKKYRDMVVESXGXR

SEQ ID NO: 14556 - protein, 41 aa, Artificial Sequence
  GFR-binding peptide
  MOD_RES (6)..(7)..(39)..(41): Xaa is C or S
TVPKPXXAPTQLEPLTVLYYDDSSNVIEQLSNNMVVRAXGX

SEQ ID NO: 14557 - protein, 40 aa, Artificial Sequence; identical to SEQ ID NO: 7257
  GFR-binding peptide
  MOD_RES (4)..(5)..(39): Xaa is C or S
  MOD_RES (19)..(20)..(21)..(22)..(23): Xaa is A or G
  MOD_RES (24)..(25)..(26)..(27): Xaa is A or G or is absent

SEQ ID NO: 14558 - protein, 38 aa, Artificial Sequence
  GFR-binding peptide
  MOD_RES (3)..(4)..(35)..(37): Xaa is C or S
SPXXVPQDLSPISILFIVGRTPKVYKQYEMVVKSXKXS

SEQ ID NO: 14559 - protein, 35 aa, Artificial Sequence; identical to SEQ ID NO: 7258
  GFR-binding peptide
  MOD_RES (1)..(2): Xaa is C or S
  MOD_RES (16)..(17)..(18)..(19)..(20): Xaa is A or G
  MOD_RES (21)..(22)..(23)..(24): Xaa is A or G or is absent

SEQ ID NO: 14560 - protein, 30 aa, Artificial Sequence; identical to SEQ ID NO: 7259
  GFR-binding peptide

SEQ ID NO: 14561 - protein, 43 aa, Artificial Sequence
  GFR-binding peptide
  MOD_RES (6)..(7)..(40)..(42): Xaa is C or S
  MOD_RES (21)..(22)..(23)..(24)..(25): Xaa is A or G
  MOD_RES (26)..(27)..(28)..(29): Xaa is A or G or is absent
ASAAPXXVPQALEPLPIVYYXXXXXXXXXEQLSNMIVRSXKXS

SEQ ID NO: 14562 - protein, 32 aa, Artificial Sequence
  GFR-binding peptide
  MOD_RES (1)..(2): Xaa is C or S
XXVPTELSPISMLFIDENEKVVYKQYEDMVVE

SEQ ID NO: 14563 - protein, 37 aa, Artificial Sequence
  GFR-binding peptide
  MOD_RES (6)..(7): Xaa is C or S
STPPTXXVPTRLEPLPIVYYDSANNVVEQLSNDMVVE

SEQ ID NO: 14564 - protein, 37 aa, Artificial Sequence
  GFR-binding peptide
  MOD_RES (1)..(35)..(37): Xaa is C or S
  MOD_RES (15)..(16)..(17)..(18)..(19): Xaa is A or G
  MOD_RES (20)..(21)..(22)..(23): Xaa is A or G or is absent
XVPTELEPLPMVYYXXXXXXXXXEQLSNDMVVEGXGX

SEQ ID NO: 14565 - protein, 34 aa, Artificial Sequence
  GFR-binding peptide
  MOD_RES (1)..(2)..(34): Xaa is C or S
XXAPTKLEPLPVVYYDDSSNVIEQLSNNMVVRSX

SEQ ID NO: 14566 - protein, 38 aa, Artificial Sequence
  GFR-binding peptide
  MOD_RES (2)..(3)..(35)..(37): Xaa is C or S
PXXAPTKLEPLPVVYYDDSSNVIEQLSNNMVVRSXGXH

SEQ ID NO: 14567 - protein, 33 aa, Artificial Sequence
  GFR-binding peptide
  MOD_RES (3)..(3): Xaa is C or S
PTXAPTKLEPLPVVYYDDSSNVIEQLSNNMVVR

SEQ ID NO: 14568 - protein, 38 aa, Artificial Sequence
  GFR-binding peptide
  MOD_RES (2)..(3)..(35)..(37): Xaa is C or S
PXXAPTQLSPISVLFIDDSSNVIYKQYENMVVRAXGXH

SEQ ID NO: 14569 - protein, 37 aa, Artificial Sequence; identical to SEQ ID NO: 7266
  GFR-binding peptide
  MOD_RES (3)..(4): Xaa is C or S
  MOD_RES (18)..(19)..(20)..(21)..(22): Xaa is A or G
  MOD_RES (23)..(24)..(25)..(26): Xaa is A or G or is absent

SEQ ID NO: 14570 - protein, 40 aa, Artificial Sequence
  GFR-binding peptide
  MOD_RES (6)..(7): Xaa is C or S
  MOD_RES (21)..(22)..(23)..(24)..(25): Xaa is A or G
  MOD_RES (26)..(27)..(28)..(29): Xaa is A or G or is absent
STPPTXXVPTRLEPLPIVYYXXXXXXXXXEQLSNDMVVES

SEQ ID NO: 14571 - protein, 36 aa, Artificial Sequence
  GFR-binding peptide
  MOD_RES (3)..(4)..(35): Xaa is C or S
APXXVPQALSPISILFIVGRKPKVYKQYEMIVRSXK

SEQ ID NO: 14572 - protein, 39 aa, Artificial Sequence
  GFR-binding peptide
  MOD_RES (4)..(5)..(39): Xaa is C or S
  MOD_RES (19)..(20)..(21)..(22)..(23): Xaa is A or G
  MOD_RES (24)..(25)..(26)..(27): Xaa is A or G or is absent
PPTXXVPTRLEPLPIVYYXXXXXXXXXEQLSNDMVVESX

SEQ ID NO: 14573 - protein, 38 aa, Artificial Sequence; identical to SEQ ID NO: 7274
  GFR-binding peptide
  MOD_RES (6)..(7)..(38): Xaa is C or S

SEQ ID NO: 14574 - protein, 41 aa, Artificial Sequence
  GFR-binding peptide
  MOD_RES (6)..(7)..(39)..(41): Xaa is C or S
SIPKAXXVPTELEPLTMLYYDEYDKVVEQLSNEMVVEGXGX

SEQ ID NO: 14575 - protein, 41 aa, Artificial Sequence
  GFR-binding peptide
  MOD_RES (4)..(5)..(39)..(41): Xaa is C or S
  MOD_RES (19)..(20)..(21)..(22)..(23): Xaa is A or G
  MOD_RES (24)..(25)..(26)..(27): Xaa is A or G or is absent
PKPXXAPTQLEPLPVVYYXXXXXXXXXEQLSNNMVVRAXGX

SEQ ID NO: 14576 - protein, 34 aa, Artificial Sequence; identical to SEQ ID NO: 7279
  GFR-binding peptide
  MOD_RES (3)..(4): Xaa is C or S

SEQ ID NO: 14577 - protein, 39 aa, Artificial Sequence
  GFR-binding peptide
  MOD_RES (4)..(5)..(36)..(38): Xaa is C or S
ASPXXVSQDLEPLPIVYYIGKTPKIEQLSNMIVKSXKXS

SEQ ID NO: 14578 - protein, 34 aa, Artificial Sequence
  GFR-binding peptide
  MOD_RES (3)..(4): Xaa is C or S
KPXXAPTQLEPLTVLYYDDSSNVIEQLSNNMVVR

SEQ ID NO: 14579 - protein, 39 aa, Artificial Sequence; identical to SEQ ID NO: 7281
  GFR-binding peptide
  MOD_RES (5)..(6)..(38): Xaa is C or S

SEQ ID NO: 14580 - protein, 37 aa, Artificial Sequence; identical to SEQ ID NO: 7283
  GFR-binding peptide
  MOD_RES (1)..(35)..(37): Xaa is C or S
  MOD_RES (15)..(16)..(17)..(18)..(19): Xaa is A or G
  MOD_RES (20)..(21)..(22)..(23): Xaa is A or G or is absent

SEQ ID NO: 14581 - protein, 34 aa, Artificial Sequence
  GFR-binding peptide
  MOD_RES (3)..(4): Xaa is C or S
KPXXAPTQLEPLPVVYYDDSSNVIEQLSNNMVVR

SEQ ID NO: 14582 - protein, 43 aa, Artificial Sequence
  GFR-binding peptide
  MOD_RES (6)..(40)..(42): Xaa is C or S
  MOD_RES (20)..(21)..(22)..(23)..(24): Xaa is A or G
  MOD_RES (25)..(26)..(27)..(28): Xaa is A or G or is absent
VTKPTXAPTKLEPLPVVYYXXXXXXXXXEQLSNNMVVRSXGXH

SEQ ID NO: 14583 - protein, 40 aa, Artificial Sequence
  GFR-binding peptide
  MOD_RES (3)..(37)..(39): Xaa is C or S
  MOD_RES (17)..(18)..(19)..(20)..(21): Xaa is A or G
  MOD_RES (22)..(23)..(24)..(25): Xaa is A or G or is absent
PTXAPTKLEPLTVLYYXXXXXXXXXEQLSNNMVVRSXGXH

SEQ ID NO: 14584 - protein, 42 aa, Artificial Sequence
  GFR-binding peptide
  MOD_RES (5)..(6)..(40)..(42): Xaa is C or S
  MOD_RES (20)..(21)..(22)..(23)..(24): Xaa is A or G
  MOD_RES (25)..(26)..(27)..(28): Xaa is A or G or is absent
TPPTXXVPTRLNAISILYFXXXXXXXXXLKKYRDMVVESXGX

SEQ ID NO: 14585 - protein, 39 aa, Artificial Sequence
  GFR-binding peptide
  MOD_RES (2)..(3)..(37)..(39): Xaa is C or S
  MOD_RES (17)..(18)..(19)..(20)..(21): Xaa is A or G
  MOD_RES (22)..(23)..(24)..(25): Xaa is A or G or is absent
AXXVPTELEPLPMVYYXXXXXXXXXEQLSNDMVVEGXGX

SEQ ID NO: 14586 - protein, 38 aa, Artificial Sequence
  GFR-binding peptide
  MOD_RES (2)..(3)..(35)..(37): Xaa is C or S
AXXVPTELSPISMLFIDEYDKVVYKQYEEMVVEGXGXR

SEQ ID NO: 14587 - protein, 37 aa, Artificial Sequence; identical to SEQ ID NO: 7287
  GFR-binding peptide
  MOD_RES (3)..(4): Xaa is C or S
  MOD_RES (18)..(19)..(20)..(21)..(22): Xaa is A or G
  MOD_RES (23)..(24)..(25)..(26): Xaa is A or G or is absent

SEQ ID NO: 14588 - protein, 38 aa, Artificial Sequence
  GFR-binding peptide
  MOD_RES (4)..(5)..(38): Xaa is C or S
  MOD_RES (19)..(20)..(21)..(22)..(23): Xaa is A or G
  MOD_RES (24)..(25)..(26)..(27): Xaa is A or G or is absent
ASPXXVSQDLSPISILFIXXXXXXXXXYKQYEMIVKSX

SEQ ID NO: 14589 - protein, 40 aa, Artificial Sequence
  GFR-binding peptide
  MOD_RES (6)..(7): Xaa is C or S
  MOD_RES (21)..(22)..(23)..(24)..(25): Xaa is A or G
  MOD_RES (26)..(27)..(28)..(29): Xaa is A or G or is absent
YVPKPXXAPTKLSPISVLFIXXXXXXXXXYKQYENMVVRS

SEQ ID NO: 14590 - protein, 34 aa, Artificial Sequence; identical to SEQ ID NO: 7289
  GFR-binding peptide
  MOD_RES (31)..(33): Xaa is C or S

SEQ ID NO: 14591 - protein, 42 aa, Artificial Sequence
  GFR-binding peptide
  MOD_RES (6)..(7)..(41): Xaa is C or S
  MOD_RES (21)..(22)..(23)..(24)..(25): Xaa is A or G
  MOD_RES (26)..(27)..(28)..(29): Xaa is A or G or is absent
STPPTXXVPTRLNAISILYFXXXXXXXXXLKKYRDMVVESXG

SEQ ID NO: 14592 - protein, 35 aa, Artificial Sequence; identical to SEQ ID NO: 7293
  GFR-binding peptide
  MOD_RES (4)..(5): Xaa is C or S

SEQ ID NO: 14593 - protein, 36 aa, Artificial Sequence
  GFR-binding peptide
  MOD_RES (3)..(4)..(36): Xaa is C or S
KPXXAPTQLEPLTVLYYDDSSNVIEQLSNNMVVRAX

SEQ ID NO: 14594 - protein, 38 aa, Artificial Sequence
  GFR-binding peptide
  MOD_RES (5)..(6): Xaa is C or S
  MOD_RES (20)..(21)..(22)..(23)..(24): Xaa is A or G
  MOD_RES (25)..(26)..(27)..(28): Xaa is A or G or is absent
IPKAXXVPTELSPISMLFIXXXXXXXXXYKQYEEMVVE

SEQ ID NO: 14595 - protein, 35 aa, Artificial Sequence; identical to SEQ ID NO: 7297
  GFR-binding peptide
  MOD_RES (1)..(2): Xaa is C or S
  MOD_RES (16)..(17)..(18)..(19)..(20): Xaa is A or G
  MOD_RES (21)..(22)..(23)..(24): Xaa is A or G or is absent

SEQ ID NO: 14596 - protein, 36 aa, Artificial Sequence
  GFR-binding peptide
  MOD_RES (2)..(3)..(35): Xaa is C or S
PXXAPTQLEPLPVVYYDDSSNVIEQLSNNMVVRAXG

SEQ ID NO: 14597 - protein, 32 aa, Artificial Sequence
  GFR-binding peptide
  MOD_RES (32)..(32): Xaa is C or S
VPTRLNAISILYFDSANNVVLKKYRDMVVESX

SEQ ID NO: 14598 - protein, 33 aa, Artificial Sequence
  GFR-binding peptide
  MOD_RES (32)..(32): Xaa is C or S
APTQLEPLPVVYYDDSSNVIEQLSNNMVVRAXG

SEQ ID NO: 14599 - protein, 32 aa, Artificial Sequence
  GFR-binding peptide
  MOD_RES (1)..(1): Xaa is C or S
XVPTRLEPLPIVYYDSANNVVEQLSNDMVVES

SEQ ID NO: 14600 - protein, 40 aa, Artificial Sequence
  GFR-binding peptide
  MOD_RES (5)..(6)..(39): Xaa is C or S
  MOD_RES (20)..(21)..(22)..(23)..(24): Xaa is A or G
  MOD_RES (25)..(26)..(27)..(28): Xaa is A or G or is absent
SAAPXXVPQALEPLTILYYXXXXXXXXXEQLSNMIVRSXK

SEQ ID NO: 14601 - protein, 40 aa, Artificial Sequence
  GFR-binding peptide
  MOD_RES (6)..(7)..(39): Xaa is C or S
SIPKAXXVPTELEPLPMVYYDEYDKVVEQLSNEMVVEGXG

SEQ ID NO: 14602 - protein, 41 aa, Artificial Sequence; identical to SEQ ID NO: 7302
  GFR-binding peptide
  MOD_RES (5)..(6)..(39)..(41): Xaa is C or S
  MOD_RES (20)..(21)..(22)..(23)..(24): Xaa is A or G
  MOD_RES (25)..(26)..(27)..(28): Xaa is A or G or is absent

SEQ ID NO: 14603 - protein, 37 aa, Artificial Sequence; identical to SEQ ID NO: 7303
  GFR-binding peptide
  MOD_RES (4)..(5): Xaa is C or S
  MOD_RES (19)..(20)..(21)..(22)..(23): Xaa is A or G
  MOD_RES (24)..(25)..(26)..(27): Xaa is A or G or is absent

SEQ ID NO: 14604 - protein, 37 aa, Artificial Sequence
  GFR-binding peptide
  MOD_RES (6)..(6): Xaa is C or S
VTKPTXAPTKLSPISVLFIDDSSNVIYKQYENMVVRS

SEQ ID NO: 14605 - protein, 34 aa, Artificial Sequence; identical to SEQ ID NO: 7305
  GFR-binding peptide
  MOD_RES (1)..(2): Xaa is C or S
  MOD_RES (16)..(17)..(18)..(19)..(20): Xaa is A or G
  MOD_RES (21)..(22)..(23)..(24): Xaa is A or G or is absent

SEQ ID NO: 14606 - protein, 39 aa, Artificial Sequence; identical to SEQ ID NO: 7308
  GFR-binding peptide
  MOD_RES (3)..(4)..(38): Xaa is C or S
  MOD_RES (18)..(19)..(20)..(21)..(22): Xaa is A or G
  MOD_RES (23)..(24)..(25)..(26): Xaa is A or G or is absent

SEQ ID NO: 14607 - protein, 39 aa, Artificial Sequence
  GFR-binding peptide
  MOD_RES (4)..(5)..(39): Xaa is C or S
  MOD_RES (19)..(20)..(21)..(22)..(23): Xaa is A or G
  MOD_RES (24)..(25)..(26)..(27): Xaa is A or G or is absent
PKAXXVPTELSPISMLFIXXXXXXXXXYKQYEDMVVEGX

SEQ ID NO: 14608 - protein, 32 aa, Artificial Sequence
  GFR-binding peptide
  MOD_RES (2)..(2): Xaa is C or S
TXAPTKLEPLPVVYYDDSSNVIEQLSNNMVVR

SEQ ID NO: 14609 - protein, 35 aa, Artificial Sequence
  GFR-binding peptide
  MOD_RES (2)..(2): Xaa is C or S
  MOD_RES (16)..(17)..(18)..(19)..(20): Xaa is A or G
  MOD_RES (21)..(22)..(23)..(24): Xaa is A or G or is absent
TXAPTKLEPLTVLYYXXXXXXXXXEQLSNNMVVRS

SEQ ID NO: 14610 - protein, 35 aa, Artificial Sequence
  GFR-binding peptide
  MOD_RES (4)..(5): Xaa is C or S
PPTXXVPTRLNAISILYFDSANNVVLKKYRDMVVE

SEQ ID NO: 14611 - protein, 33 aa, Artificial Sequence
  GFR-binding peptide
  MOD_RES (2)..(3): Xaa is C or S
AXXVPTELEPLTMLYYDENEKVVEQLSNDMVVE

SEQ ID NO: 14612 - protein, 36 aa, Artificial Sequence
  GFR-binding peptide
  MOD_RES (1)..(35): Xaa is C or S
  MOD_RES (15)..(16)..(17)..(18)..(19): Xaa is A or G
  MOD_RES (20)..(21)..(22)..(23): Xaa is A or G or is absent
XAPTKLEPLTVLYYXXXXXXXXXEQLSNNMVVRSXG

SEQ ID NO: 14613 - protein, 33 aa, Artificial Sequence
  GFR-binding peptide
  MOD_RES (14)..(15)..(16)..(17)..(18): Xaa is A or G
  MOD_RES (19)..(20)..(21)..(22): Xaa is A or G or is absent
APTQLEPLTVLYYXXXXXXXXXEQLSNNMVVRA

SEQ ID NO: 14614 - protein, 34 aa, Artificial Sequence
  GFR-binding peptide
  MOD_RES (2)..(2): Xaa is C or S
  MOD_RES (16)..(17)..(18)..(19)..(20): Xaa is A or G
  MOD_RES (21)..(22)..(23)..(24): Xaa is A or G or is absent
TXAPTKLEPLTVLYYXXXXXXXXXEQLSNNMVVR

SEQ ID NO: 14615 - protein, 34 aa, Artificial Sequence; identical to SEQ ID NO: 7319
  GFR-binding peptide
  MOD_RES (3)..(3): Xaa is C or S

SEQ ID NO: 14616 - protein, 34 aa, Artificial Sequence; identical to SEQ ID NO: 7321
  GFR-binding peptide
  MOD_RES (1)..(1): Xaa is C or S
  MOD_RES (15)..(16)..(17)..(18)..(19): Xaa is A or G
  MOD_RES (20)..(21)..(22)..(23): Xaa is A or G or is absent

SEQ ID NO: 14617 - protein, 37 aa, Artificial Sequence; identical to SEQ ID NO: 7322
  GFR-binding peptide
  MOD_RES (2)..(3)..(34)..(36): Xaa is C or S

SEQ ID NO: 14618 - protein, 37 aa, Artificial Sequence; identical to SEQ ID NO: 7323
  GFR-binding peptide
  MOD_RES (1)..(2)..(35)..(37): Xaa is C or S
  MOD_RES (16)..(17)..(18)..(19)..(20): Xaa is A or G
  MOD_RES (21)..(22)..(23)..(24): Xaa is A or G or is absent

SEQ ID NO: 14619 - protein, 34 aa, Artificial Sequence; identical to SEQ ID NO: 7324
  GFR-binding peptide
  MOD_RES (1)..(33): Xaa is C or S

SEQ ID NO: 14620 - protein, 32 aa, Artificial Sequence
  GFR-binding peptide
  MOD_RES (31)..(31): Xaa is C or S
VSQDLSPISILFIIGKTPKIYKQYEMIVKSXK

SEQ ID NO: 14621 - protein, 42 aa, Artificial Sequence
  GFR-binding peptide
  MOD_RES (5)..(6)..(39)..(41): Xaa is C or S
  MOD_RES (20)..(21)..(22)..(23)..(24): Xaa is A or G
  MOD_RES (25)..(26)..(27)..(28): Xaa is A or G or is absent
SASPXXVSQDLSPISILFIXXXXXXXXXYKQYEMIVKSXKXS

SEQ ID NO: 14622 - protein, 41 aa, Artificial Sequence
  GFR-binding peptide
  MOD_RES (6)..(7)..(39)..(41): Xaa is C or S
STPPTXXVPTRLEPLPIVYYDSANNVVEQLSNDMVVESXGX

SEQ ID NO: 14623 - protein, 37 aa, Artificial Sequence
  GFR-binding peptide
  MOD_RES (3)..(4)..(36): Xaa is C or S
KAXXVPTELEPLTMLYYDENEKVVEQLSNDMVVEGXG

SEQ ID NO: 14624 - protein, 41 aa, Artificial Sequence; identical to SEQ ID NO: 7327
  GFR-binding peptide
  MOD_RES (4)..(5)..(38)..(40): Xaa is C or S
  MOD_RES (19)..(20)..(21)..(22)..(23): Xaa is A or G
  MOD_RES (24)..(25)..(26)..(27): Xaa is A or G or is absent

SEQ ID NO: 14625 - protein, 39 aa, Artificial Sequence
  GFR-binding peptide
  MOD_RES (3)..(4)..(36)..(38): Xaa is C or S
KAXXVPTELEPLTMLYYDENEKVVEQLSNDMVVEGXGXR

SEQ ID NO: 14626 - protein, 34 aa, Artificial Sequence; identical to SEQ ID NO: 7329
  GFR-binding peptide
  MOD_RES (2)..(3)..(34): Xaa is C or S

SEQ ID NO: 14627 - protein, 36 aa, Artificial Sequence; identical to SEQ ID NO: 7332
  GFR-binding peptide
  MOD_RES (2)..(3)..(34)..(36): Xaa is C or S

SEQ ID NO: 14628 - protein, 38 aa, Artificial Sequence; identical to SEQ ID NO: 7333
  GFR-binding peptide
  MOD_RES (3)..(4)..(35)..(37): Xaa is C or S

SEQ ID NO: 14629 - protein, 41 aa, Artificial Sequence
  GFR-binding peptide
  MOD_RES (6)..(7)..(39)..(41): Xaa is C or S
TVPKPXXAPTQLSPISVLFIDDSSNVIYKQYENMVVRAXGX

SEQ ID NO: 14630 - protein, 39 aa, Artificial Sequence
  GFR-binding peptide
  MOD_RES (2)..(3)..(37)..(39): Xaa is C or S
  MOD_RES (17)..(18)..(19)..(20)..(21): Xaa is A or G
  MOD_RES (22)..(23)..(24)..(25): Xaa is A or G or is absent
PXXAPTQLSPISVLFIXXXXXXXXXYKQYENMVVRAXGX

SEQ ID NO: 14631 - protein, 36 aa, Artificial Sequence
  GFR-binding peptide
  MOD_RES (1)..(33)..(35): Xaa is C or S
XVPTELSPISMLFIDENEKVVYKQYEDMVVEGXGXR

SEQ ID NO: 14632 - protein, 36 aa, Artificial Sequence; identical to SEQ ID NO: 7341
  GFR-binding peptide
  MOD_RES (4)..(5): Xaa is C or S

SEQ ID NO: 14633 - protein, 35 aa, Artificial Sequence
  GFR-binding peptide
  MOD_RES (1)..(33)..(35): Xaa is C or S
XVPTELSPISMLFIDENEKVVYKQYEDMVVEGXGX

SEQ ID NO: 14634 - protein, 40 aa, Artificial Sequence
  GFR-binding peptide
  MOD_RES (5)..(6)..(40): Xaa is C or S
  MOD_RES (20)..(21)..(22)..(23)..(24): Xaa is A or G
  MOD_RES (25)..(26)..(27)..(28): Xaa is A or G or is absent
VPKPXXAPTQLSPISVLFIXXXXXXXXXYKQYENMVVRAX

SEQ ID NO: 14635 - protein, 38 aa, Artificial Sequence
  GFR-binding peptide
  MOD_RES (4)..(5)..(36)..(38): Xaa is C or S
ASPXXVSQDLSPISILFIIGKTPKIYKQYEMIVKSXKX

SEQ ID NO: 14636 - protein, 37 aa, Artificial Sequence
  GFR-binding peptide
  MOD_RES (4)..(4): Xaa is C or S
  MOD_RES (18)..(19)..(20)..(21)..(22): Xaa is A or G
  MOD_RES (23)..(24)..(25)..(26): Xaa is A or G or is absent
KPTXAPTKLEPLTVLYYXXXXXXXXXEQLSNNMVVRS

SEQ ID NO: 14637 - protein, 43 aa, Artificial Sequence
  GFR-binding peptide
  MOD_RES (6)..(7)..(41)..(43): Xaa is C or S
  MOD_RES (21)..(22)..(23)..(24)..(25): Xaa is A or G
  MOD_RES (26)..(27)..(28)..(29): Xaa is A or G or is absent
STPPTXXVPTRLNAISILYFXXXXXXXXXLKKYRDMVVESXGX

SEQ ID NO: 14638 - protein, 35 aa, Artificial Sequence
  GFR-binding peptide
  MOD_RES (1)..(35): Xaa is C or S
  MOD_RES (15)..(16)..(17)..(18)..(19): Xaa is A or G
  MOD_RES (20)..(21)..(22)..(23): Xaa is A or G or is absent
XVPTELEPLTMLYYXXXXXXXXXEQLSNDMVVEGX

SEQ ID NO: 14639 - protein, 36 aa, Artificial Sequence
  GFR-binding peptide
  MOD_RES (1)..(33)..(35): Xaa is C or S
XVPTELEPLTMLYYDENEKVVEQLSNDMVVEGXGXR

SEQ ID NO: 14640 - protein, 41 aa, Artificial Sequence
  GFR-binding peptide
  MOD_RES (5)..(6)..(40): Xaa is C or S
  MOD_RES (20)..(21)..(22)..(23)..(24): Xaa is A or G
  MOD_RES (25)..(26)..(27)..(28): Xaa is A or G or is absent
TPPTXXVPTRLSAISILYLXXXXXXXXXLKNYQDMVVESXG

SEQ ID NO: 14641 - protein, 35 aa, Artificial Sequence
  GFR-binding peptide
  MOD_RES (1)..(2)..(34): Xaa is C or S
XXVPTRLEPLTILYYDSANNVVEQLSNDMVVESXG

SEQ ID NO: 14642 - protein, 42 aa, Artificial Sequence
  GFR-binding peptide
  MOD_RES (5)..(6)..(40)..(42): Xaa is C or S
  MOD_RES (20)..(21)..(22)..(23)..(24): Xaa is A or G
  MOD_RES (25)..(26)..(27)..(28): Xaa is A or G or is absent
VPKPXXAPTQLEPLTVLYYXXXXXXXXXEQLSNNMVVRAXGX

SEQ ID NO: 14643 - protein, 40 aa, Artificial Sequence
  GFR-binding peptide
  MOD_RES (3)..(4)..(38)..(40): Xaa is C or S
  MOD_RES (18)..(19)..(20)..(21)..(22): Xaa is A or G
  MOD_RES (23)..(24)..(25)..(26): Xaa is A or G or is absent
KAXXVPTELEPLTMLYYXXXXXXXXXEQLSNDMVVEGXGX

SEQ ID NO: 14644 - protein, 37 aa, Artificial Sequence
  GFR-binding peptide
  MOD_RES (1)..(2)..(36): Xaa is C or S
  MOD_RES (16)..(17)..(18)..(19)..(20): Xaa is A or G
  MOD_RES (21)..(22)..(23)..(24): Xaa is A or G or is absent
XXVPTELEPLTMLYYXXXXXXXXXEQLSNEMVVEGXG

SEQ ID NO: 14645 - protein, 34 aa, Artificial Sequence; identical to SEQ ID NO: 7350
  GFR-binding peptide
  MOD_RES (1)..(2)..(33): Xaa is C or S

SEQ ID NO: 14646 - protein, 38 aa, Artificial Sequence
  GFR-binding peptide
  MOD_RES (5)..(6): Xaa is C or S
  MOD_RES (20)..(21)..(22)..(23)..(24): Xaa is A or G
  MOD_RES (25)..(26)..(27)..(28): Xaa is A or G or is absent
VPKPXXAPTKLEPLPVVYYXXXXXXXXXEQLSNNMVVR

SEQ ID NO: 14647 - protein, 34 aa, Artificial Sequence
  GFR-binding peptide
  MOD_RES (32)..(34): Xaa is C or S
APTKLEPLTVLYYDDSSNVIEQLSNNMVVRSXGX

SEQ ID NO: 14648 - protein, 39 aa, Artificial Sequence; identical to SEQ ID NO: 7351
  GFR-binding peptide
  MOD_RES (4)..(5)..(39): Xaa is C or S
  MOD_RES (19)..(20)..(21)..(22)..(23): Xaa is A or G
  MOD_RES (24)..(25)..(26)..(27): Xaa is A or G or is absent

SEQ ID NO: 14649 - protein, 34 aa, Artificial Sequence; identical to SEQ ID NO: 7352
  GFR-binding peptide
  MOD_RES (33)..(33): Xaa is C or S
  MOD_RES (14)..(15)..(16)..(17)..(18): Xaa is A or G
  MOD_RES (19)..(20)..(21)..(22): Xaa is A or G or is absent

SEQ ID NO: 14650 - protein, 43 aa, Artificial Sequence
  GFR-binding peptide
  MOD_RES (6)..(7)..(41)..(43): Xaa is C or S
  MOD_RES (21)..(22)..(23)..(24)..(25): Xaa is A or G
  MOD_RES (26)..(27)..(28)..(29): Xaa is A or G or is absent
KIPKAXXVPTELEPLTMLYYXXXXXXXXXEQLSNDMVVEGXGX

SEQ ID NO: 14651 - protein, 32 aa, Artificial Sequence
  GFR-binding peptide
  MOD_RES (32)..(32): Xaa is C or S
APTKLEPLPVVYYDDSSNVIEQLSNNMVVRSX

SEQ ID NO: 14652 - protein, 37 aa, Artificial Sequence
  GFR-binding peptide
  MOD_RES (2)..(3)..(35)..(37): Xaa is C or S
TXXVPTRLEPLTILYYDSANNVVEQLSNDMVVESXGX

SEQ ID NO: 14653 - protein, 36 aa, Artificial Sequence
  GFR-binding peptide
  MOD_RES (1)..(33)..(35): Xaa is C or S
XAPTKLSPISVLFIDDSSNVIYKQYENMVVRSXGXH

SEQ ID NO: 14654 - protein, 40 aa, Artificial Sequence; identical to SEQ ID NO: 7353
  GFR-binding peptide
  MOD_RES (2)..(3)..(37)..(39): Xaa is C or S
  MOD_RES (17)..(18)..(19)..(20)..(21): Xaa is A or G
  MOD_RES (22)..(23)..(24)..(25): Xaa is A or G or is absent

SEQ ID NO: 14655 - protein, 38 aa, Artificial Sequence
  GFR-binding peptide
  MOD_RES (6)..(7): Xaa is C or S
KIPKAXXVPTELEPLPMVYYDENEKVVEQLSNDMVVEG

SEQ ID NO: 14656 - protein, 36 aa, Artificial Sequence
  GFR-binding peptide
  MOD_RES (2)..(3)..(36): Xaa is C or S
  MOD_RES (17)..(18)..(19)..(20)..(21): Xaa is A or G
  MOD_RES (22)..(23)..(24)..(25): Xaa is A or G or is absent
PXXVSQDLSPISILFIXXXXXXXXXYKQYEMIVKSX

SEQ ID NO: 14657 - protein, 37 aa, Artificial Sequence
  GFR-binding peptide
  MOD_RES (2)..(34)..(36): Xaa is C or S
TXAPTKLSPISVLFIDDSSNVIYKQYENMVVRSXGXH

SEQ ID NO: 14658 - protein, 39 aa, Artificial Sequence
  GFR-binding peptide
  MOD_RES (5)..(6): Xaa is C or S
  MOD_RES (20)..(21)..(22)..(23)..(24): Xaa is A or G
  MOD_RES (25)..(26)..(27)..(28): Xaa is A or G or is absent
VPKPXXAPTQLSPISVLFIXXXXXXXXXYKQYENMVVRA

SEQ ID NO: 14659 - protein, 43 aa, Artificial Sequence
  GFR-binding peptide
  MOD_RES (7)..(41)..(43): Xaa is C or S
  MOD_RES (21)..(22)..(23)..(24)..(25): Xaa is A or G
  MOD_RES (26)..(27)..(28)..(29): Xaa is A or G or is absent
HVTKPTXAPTKLEPLTVLYYXXXXXXXXXEQLSNNMVVRSXGX

SEQ ID NO: 14660 - protein, 34 aa, Artificial Sequence; identical to SEQ ID NO: 7354
  GFR-binding peptide
  MOD_RES (2)..(3): Xaa is C or S

SEQ ID NO: 14661 - protein, 31 aa, Artificial Sequence
  GFR-binding peptide
  MOD_RES (1)..(1): Xaa is C or S
XVPTELEPLPMVYYDENEKVVEQLSNDMVVE

SEQ ID NO: 14662 - protein, 38 aa, Artificial Sequence
  GFR-binding peptide
  MOD_RES (4)..(5): Xaa is C or S
  MOD_RES (19)..(20)..(21)..(22)..(23): Xaa is A or G
  MOD_RES (24)..(25)..(26)..(27): Xaa is A or G or is absent
PKPXXAPTKLEPLTVLYYXXXXXXXXXEQLSNNMVVRS

SEQ ID NO: 14663 - protein, 34 aa, Artificial Sequence
  GFR-binding peptide
  MOD_RES (32)..(34): Xaa is C or S
APTKLSPISVLFIDDSSNVIYKQYENMVVRSXGX

SEQ ID NO: 14664 - protein, 39 aa, Artificial Sequence; identical to SEQ ID NO: 7359
  GFR-binding peptide
  MOD_RES (6)..(7)..(38): Xaa is C or S

SEQ ID NO: 14665 - protein, 41 aa, Artificial Sequence
  GFR-binding peptide
  MOD_RES (6)..(7)..(39)..(41): Xaa is C or S
KIPKAXXVPTELEPLPMVYYDENEKVVEQLSNDMVVEGXGX

SEQ ID NO: 14666 - protein, 30 aa, Artificial Sequence
  GFR-binding peptide
VPTELEPLPMVYYDEYDKVVEQLSNEMVVE

SEQ ID NO: 14667 - protein, 39 aa, Artificial Sequence; identical to SEQ ID NO: 7363
  GFR-binding peptide
  MOD_RES (2)..(3)..(37)..(39): Xaa is C or S
  MOD_RES (17)..(18)..(19)..(20)..(21): Xaa is A or G
  MOD_RES (22)..(23)..(24)..(25): Xaa is A or G or is absent

SEQ ID NO: 14668 - protein, 35 aa, Artificial Sequence; identical to SEQ ID NO: 7365
  GFR-binding peptide
  MOD_RES (32)..(34): Xaa is C or S

SEQ ID NO: 14669 - protein, 36 aa, Artificial Sequence; identical to SEQ ID NO: 7366
  GFR-binding peptide
  MOD_RES (5)..(6): Xaa is C or S

SEQ ID NO: 14670 - protein, 33 aa, Artificial Sequence
  GFR-binding peptide
  MOD_RES (1)..(2): Xaa is C or S
XXVPTRLNAISILYFDSANNVVLKKYRDMVVES

SEQ ID NO: 14671 - protein, 36 aa, Artificial Sequence
  GFR-binding peptide
  MOD_RES (3)..(35): Xaa is C or S
PTXAPTKLEPLTVLYYDDSSNVIEQLSNNMVVRSXG

SEQ ID NO: 14672 - protein, 36 aa, Artificial Sequence
  GFR-binding peptide
  MOD_RES (1)..(2)..(36): Xaa is C or S
  MOD_RES (16)..(17)..(18)..(19)..(20): Xaa is A or G
  MOD_RES (21)..(22)..(23)..(24): Xaa is A or G or is absent
XXVPTELEPLTMLYYXXXXXXXXXEQLSNEMVVEGX

SEQ ID NO: 14673 - protein, 35 aa, Artificial Sequence
  GFR-binding peptide
  MOD_RES (1)..(33)..(35): Xaa is C or S
XVPTELEPLTMLYYDENEKVVEQLSNDMVVEGXGX

SEQ ID NO: 14674 - protein, 43 aa, Artificial Sequence
  GFR-binding peptide
  MOD_RES (5)..(6)..(40)..(42): Xaa is C or S
  MOD_RES (20)..(21)..(22)..(23)..(24): Xaa is A or G
  MOD_RES (25)..(26)..(27)..(28): Xaa is A or G or is absent
TPPTXXVPTRLEPLTILYYXXXXXXXXXEQLSNDMVVESXGXR

SEQ ID NO: 14675 - protein, 30 aa, Artificial Sequence; identical to SEQ ID NO: 7373
  GFR-binding peptide

SEQ ID NO: 14676 - protein, 36 aa, Artificial Sequence
  GFR-binding peptide
  MOD_RES (2)..(3)..(35): Xaa is C or S
PXXAPTKLEPLTVLYYDDSSNVIEQLSNNMVVRSXG

SEQ ID NO: 14677 - protein, 40 aa, Artificial Sequence
  GFR-binding peptide
  MOD_RES (6)..(7)..(39): Xaa is C or S
TVPKPXXAPTQLEPLPVVYYDDSSNVIEQLSNNMVVRAXG

SEQ ID NO: 14678 - protein, 39 aa, Artificial Sequence
  GFR-binding peptide
  MOD_RES (1)..(2)..(36)..(38): Xaa is C or S
  MOD_RES (16)..(17)..(18)..(19)..(20): Xaa is A or G
  MOD_RES (21)..(22)..(23)..(24): Xaa is A or G or is absent
XXAPTQLEPLTVLYYXXXXXXXXXEQLSNNMVVRAXGXH

SEQ ID NO: 14679 - protein, 38 aa, Artificial Sequence; identical to SEQ ID NO: 7375
  GFR-binding peptide
  MOD_RES (3)..(4)..(35)..(37): Xaa is C or S

SEQ ID NO: 14680 - protein, 32 aa, Artificial Sequence
  GFR-binding peptide
  MOD_RES (31)..(31): Xaa is C or S
VPQDLEPLPIVYYVGRTPKVEQLSNMVVKSXK

SEQ ID NO: 14681 - protein, 36 aa, Artificial Sequence; identical to SEQ ID NO: 7377
  GFR-binding peptide
  MOD_RES (1)..(2)..(35): Xaa is C or S
  MOD_RES (16)..(17)..(18)..(19)..(20): Xaa is A or G
  MOD_RES (21)..(22)..(23)..(24): Xaa is A or G or is absent

SEQ ID NO: 14682 - protein, 40 aa, Artificial Sequence; identical to SEQ ID NO: 7378
  GFR-binding peptide
  MOD_RES (4)..(5)..(39): Xaa is C or S
  MOD_RES (19)..(20)..(21)..(22)..(23): Xaa is A or G
  MOD_RES (24)..(25)..(26)..(27): Xaa is A or G or is absent

SEQ ID NO: 14683 - protein, 37 aa, Artificial Sequence
  GFR-binding peptide
  MOD_RES (7)..(7): Xaa is C or S
HVTKPTXAPTKLEPLTVLYYDDSSNVIEQLSNNMVVR

SEQ ID NO: 14684 - protein, 37 aa, Artificial Sequence
  GFR-binding peptide
  MOD_RES (3)..(4)..(36): Xaa is C or S
KAXXVPTELSPISMLFIDEYDKVVYKQYEEMVVEGXG

SEQ ID NO: 14685 - protein, 36 aa, Artificial Sequence; identical to SEQ ID NO: 7390
  GFR-binding peptide
  MOD_RES (1)..(34)..(36): Xaa is C or S
  MOD_RES (15)..(16)..(17)..(18)..(19): Xaa is A or G
  MOD_RES (20)..(21)..(22)..(23): Xaa is A or G or is absent

SEQ ID NO: 14686 - protein, 41 aa, Artificial Sequence
  GFR-binding peptide
  MOD_RES (6)..(7)..(40): Xaa is C or S
  MOD_RES (21)..(22)..(23)..(24)..(25): Xaa is A or G
  MOD_RES (26)..(27)..(28)..(29): Xaa is A or G or is absent
ASASPXXVPQDLSPISILFIXXXXXXXXXYKQYEMVVKSXK

SEQ ID NO: 14687 - protein, 37 aa, Artificial Sequence
  GFR-binding peptide
  MOD_RES (3)..(4)..(36): Xaa is C or S
KPXXAPTKLSPISVLFIDDSSNVIYKQYENMVVRSXG

SEQ ID NO: 14688 - protein, 40 aa, Artificial Sequence
  GFR-binding peptide
  MOD_RES (4)..(5)..(38)..(40): Xaa is C or S
  MOD_RES (19)..(20)..(21)..(22)..(23): Xaa is A or G
  MOD_RES (24)..(25)..(26)..(27): Xaa is A or G or is absent
AAPXXVPQALSPISILFIXXXXXXXXXYKQYEMIVRSXKX

SEQ ID NO: 14689 - protein, 37 aa, Artificial Sequence
  GFR-binding peptide
  MOD_RES (2)..(3)..(34)..(36): Xaa is C or S
PXXVPQDLSPISILFIVGRTPKVYKQYEMVVKSXKXS

SEQ ID NO: 14690 - protein, 38 aa, Artificial Sequence; identical to SEQ ID NO: 7397
  GFR-binding peptide
  MOD_RES (3)..(35)..(37): Xaa is C or S

SEQ ID NO: 14691 - protein, 34 aa, Artificial Sequence
  GFR-binding peptide
  MOD_RES (1)..(1): Xaa is C or S
  MOD_RES (15)..(16)..(17)..(18)..(19): Xaa is A or G
  MOD_RES (20)..(21)..(22)..(23): Xaa is A or G or is absent
XVPTELEPLTMLYYXXXXXXXXXEQLSNEMVVEG

SEQ ID NO: 14692 - protein, 42 aa, Artificial Sequence; identical to SEQ ID NO: 7401
  GFR-binding peptide
  MOD_RES (6)..(7)..(40)..(42): Xaa is C or S
  MOD_RES (21)..(22)..(23)..(24)..(25): Xaa is A or G
  MOD_RES (26)..(27)..(28)..(29): Xaa is A or G or is absent

SEQ ID NO: 14693 - protein, 35 aa, Artificial Sequence
  GFR-binding peptide
  MOD_RES (4)..(5): Xaa is C or S
PKPXXAPTQLEPLTVLYYDDSSNVIEQLSNNMVVR

SEQ ID NO: 14694 - protein, 37 aa, Artificial Sequence
  GFR-binding peptide
  MOD_RES (2)..(34)..(36): Xaa is C or S
TXAPTKLEPLTVLYYDDSSNVIEQLSNNMVVRSXGXH

SEQ ID NO: 14695 - protein, 41 aa, Artificial Sequence
  GFR-binding peptide
  MOD_RES (4)..(5)..(38)..(40): Xaa is C or S
  MOD_RES (19)..(20)..(21)..(22)..(23): Xaa is A or G
  MOD_RES (24)..(25)..(26)..(27): Xaa is A or G or is absent
ASPXXVSQDLEPLPIVYYXXXXXXXXXEQLSNMIVKSXKXS

SEQ ID NO: 14696 - protein, 38 aa, Artificial Sequence
  GFR-binding peptide
  MOD_RES (4)..(5)..(38): Xaa is C or S
  MOD_RES (19)..(20)..(21)..(22)..(23): Xaa is A or G
  MOD_RES (24)..(25)..(26)..(27): Xaa is A or G or is absent
ASPXXVPQDLSPISILFIXXXXXXXXXYKQYEMVVKSX

SEQ ID NO: 14697 - protein, 37 aa, Artificial Sequence
  GFR-binding peptide
  MOD_RES (2)..(3)..(37): Xaa is C or S
  MOD_RES (17)..(18)..(19)..(20)..(21): Xaa is A or G
  MOD_RES (22)..(23)..(24)..(25): Xaa is A or G or is absent
AXXVPTELSPISMLFIXXXXXXXXXYKQYEEMVVEGX

SEQ ID NO: 14698 - protein, 40 aa, Artificial Sequence
  GFR-binding peptide
  MOD_RES (6)..(7): Xaa is C or S
  MOD_RES (21)..(22)..(23)..(24)..(25): Xaa is A or G
  MOD_RES (26)..(27)..(28)..(29): Xaa is A or G or is absent
KIPKAXXVPTELEPLPMVYYXXXXXXXXXEQLSNDMVVEG

SEQ ID NO: 14699 - protein, 39 aa, Artificial Sequence; identical to SEQ ID NO: 7408
  GFR-binding peptide
  MOD_RES (5)..(6)..(37)..(39): Xaa is C or S

SEQ ID NO: 14700 - protein, 34 aa, Artificial Sequence
  GFR-binding peptide
  MOD_RES (1)..(33): Xaa is C or S
XVPTELEPLPMVYYDENEKVVEQLSNDMVVEGXG

SEQ ID NO: 14701 - protein, 36 aa, Artificial Sequence
  GFR-binding peptide
  MOD_RES (1)..(2)..(36): Xaa is C or S
  MOD_RES (16)..(17)..(18)..(19)..(20): Xaa is A or G
  MOD_RES (21)..(22)..(23)..(24): Xaa is A or G or is absent
XXAPTQLEPLTVLYYXXXXXXXXXEQLSNNMVVRAX

SEQ ID NO: 14702 - protein, 40 aa, Artificial Sequence
  GFR-binding peptide
  MOD_RES (6)..(7): Xaa is C or S
  MOD_RES (21)..(22)..(23)..(24)..(25): Xaa is A or G
  MOD_RES (26)..(27)..(28)..(29): Xaa is A or G or is absent
KIPKAXXVPTELEPLTMLYYXXXXXXXXXEQLSNDMVVEG

SEQ ID NO: 14703 - protein, 40 aa, Artificial Sequence
  GFR-binding peptide
  MOD_RES (7)..(39): Xaa is C or S
HVTKPTXAPTKLEPLTVLYYDDSSNVIEQLSNNMVVRSXG

SEQ ID NO: 14704 - protein, 37 aa, Artificial Sequence
  GFR-binding peptide
  MOD_RES (34)..(36): Xaa is C or S
  MOD_RES (14)..(15)..(16)..(17)..(18): Xaa is A or G
  MOD_RES (19)..(20)..(21)..(22): Xaa is A or G or is absent
APTQLEPLPVVYYXXXXXXXXXEQLSNNMVVRAXGXH

SEQ ID NO: 14705 - protein, 39 aa, Artificial Sequence
  GFR-binding peptide
  MOD_RES (6)..(7)..(39): Xaa is C or S
KIPKAXXVPTELSPISMLFIDENEKVVYKQYEDMVVEGX

SEQ ID NO: 14706 - protein, 37 aa, Artificial Sequence
  GFR-binding peptide
  MOD_RES (1)..(2)..(36): Xaa is C or S
  MOD_RES (16)..(17)..(18)..(19)..(20): Xaa is A or G
  MOD_RES (21)..(22)..(23)..(24): Xaa is A or G or is absent
XXVPTELSPISMLFIXXXXXXXXXYKQYEEMVVEGXG

SEQ ID NO: 14707 - protein, 38 aa, Artificial Sequence
  GFR-binding peptide
  MOD_RES (4)..(5)..(37): Xaa is C or S
PPTXXVPTRLSAISILYLDSANNVVLKNYQDMVVESXG

SEQ ID NO: 14708 - protein, 37 aa, Artificial Sequence
  GFR-binding peptide
  MOD_RES (3)..(4)..(36): Xaa is C or S
KAXXVPTELEPLPMVYYDEYDKVVEQLSNEMVVEGXG

SEQ ID NO: 14709 - protein, 34 aa, Artificial Sequence; identical to SEQ ID NO: 7413
  GFR-binding peptide
  MOD_RES (3)..(4): Xaa is C or S

SEQ ID NO: 14710 - protein, 39 aa, Artificial Sequence
  GFR-binding peptide
  MOD_RES (3)..(4)..(38): Xaa is C or S
  MOD_RES (18)..(19)..(20)..(21)..(22): Xaa is A or G
  MOD_RES (23)..(24)..(25)..(26): Xaa is A or G or is absent
KAXXVPTELEPLPMVYYXXXXXXXXXEQLSNDMVVEGXG

SEQ ID NO: 14711 - protein, 36 aa, Artificial Sequence
  GFR-binding peptide
  MOD_RES (5)..(6): Xaa is C or S
IPKAXXVPTELEPLTMLYYDENEKVVEQLSNDMVVE

SEQ ID NO: 14712 - protein, 37 aa, Artificial Sequence
  GFR-binding peptide
  MOD_RES (1)..(2)..(34)..(36): Xaa is C or S
XXAPTQLEPLPVVYYDDSSNVIEQLSNNMVVRAXGXH

SEQ ID NO: 14713 - protein, 35 aa, Artificial Sequence
  GFR-binding peptide
  MOD_RES (2)..(3): Xaa is C or S
  MOD_RES (17)..(18)..(19)..(20)..(21): Xaa is A or G
  MOD_RES (22)..(23)..(24)..(25): Xaa is A or G or is absent
TXXVPTRLSPISILFIXXXXXXXXXYKQYEDMVVE

SEQ ID NO: 14714 - protein, 38 aa, Artificial Sequence; identical to SEQ ID NO: 7416
  GFR-binding peptide
  MOD_RES (5)..(6): Xaa is C or S
  MOD_RES (20)..(21)..(22)..(23)..(24): Xaa is A or G
  MOD_RES (25)..(26)..(27)..(28): Xaa is A or G or is absent

SEQ ID NO: 14715 - protein, 37 aa, Artificial Sequence
  GFR-binding peptide
  MOD_RES (2)..(3)..(37): Xaa is C or S
  MOD_RES (17)..(18)..(19)..(20)..(21): Xaa is A or G
  MOD_RES (22)..(23)..(24)..(25): Xaa is A or G or is absent
TXXVPTRLNAISILYFXXXXXXXXXLKKYRDMVVESX

SEQ ID NO: 14716 - protein, 40 aa, Artificial Sequence; identical to SEQ ID NO: 7419
  GFR-binding peptide
  MOD_RES (3)..(4)..(37)..(39): Xaa is C or S
  MOD_RES (18)..(19)..(20)..(21)..(22): Xaa is A or G
  MOD_RES (23)..(24)..(25)..(26): Xaa is A or G or is absent

SEQ ID NO: 14717 - protein, 30 aa, Artificial Sequence
  GFR-binding peptide
APTKLEPLTVLYYDDSSNVIEQLSNNMVVR

SEQ ID NO: 14718 - protein, 38 aa, Artificial Sequence
  GFR-binding peptide
  MOD_RES (1)..(2)..(36)..(38): Xaa is C or S
  MOD_RES (16)..(17)..(18)..(19)..(20): Xaa is A or G
  MOD_RES (21)..(22)..(23)..(24): Xaa is A or G or is absent
XXAPTQLEPLPVVYYXXXXXXXXXEQLSNNMVVRAXGX

SEQ ID NO: 14719 - protein, 39 aa, Artificial Sequence
  GFR-binding peptide
  MOD_RES (3)..(4)..(36)..(38): Xaa is C or S
KPXXAPTQLEPLPVVYYDDSSNVIEQLSNNMVVRAXGXH

SEQ ID NO: 14720 - protein, 39 aa, Artificial Sequence
  GFR-binding peptide
  MOD_RES (6)..(7): Xaa is C or S
  MOD_RES (21)..(22)..(23)..(24)..(25): Xaa is A or G
  MOD_RES (26)..(27)..(28)..(29): Xaa is A or G or is absent
KIPKAXXVPTELSPISMLFIXXXXXXXXXYKQYEDMVVE

SEQ ID NO: 14721 - protein, 41 aa, Artificial Sequence
  GFR-binding peptide
  MOD_RES (6)..(7)..(40): Xaa is C or S
  MOD_RES (21)..(22)..(23)..(24)..(25): Xaa is A or G
  MOD_RES (26)..(27)..(28)..(29): Xaa is A or G or is absent
ASAAPXXVPQALEPLPIVYYXXXXXXXXXEQLSNMIVRSXK

SEQ ID NO: 14722 - protein, 33 aa, Artificial Sequence; identical to SEQ ID NO: 7423
  GFR-binding peptide
  MOD_RES (1)..(33): Xaa is C or S

SEQ ID NO: 14723 - protein, 43 aa, Artificial Sequence
  GFR-binding peptide
  MOD_RES (5)..(6)..(40)..(42): Xaa is C or S
  MOD_RES (20)..(21)..(22)..(23)..(24): Xaa is A or G
  MOD_RES (25)..(26)..(27)..(28): Xaa is A or G or is absent
IPKAXXVPTELEPLTMLYYXXXXXXXXXEQLSNDMVVEGXGXR

SEQ ID NO: 14724 - protein, 43 aa, Artificial Sequence; identical to SEQ ID NO: 7425
  GFR-binding peptide
  MOD_RES (6)..(7)..(41)..(43): Xaa is C or S
  MOD_RES (21)..(22)..(23)..(24)..(25): Xaa is A or G
  MOD_RES (26)..(27)..(28)..(29): Xaa is A or G or is absent

SEQ ID NO: 14725 - protein, 42 aa, Artificial Sequence
  GFR-binding peptide
  MOD_RES (6)..(7)..(39)..(41): Xaa is C or S
SIPKAXXVPTELEPLPMVYYDEYDKVVEQLSNEMVVEGXGXR

SEQ ID NO: 14726 - protein, 38 aa, Artificial Sequence; identical to SEQ ID NO: 7427
  GFR-binding peptide
  MOD_RES (5)..(6): Xaa is C or S
  MOD_RES (20)..(21)..(22)..(23)..(24): Xaa is A or G
  MOD_RES (25)..(26)..(27)..(28): Xaa is A or G or is absent

SEQ ID NO: 14727 - protein, 34 aa, Artificial Sequence; identical to SEQ ID NO: 7428
  GFR-binding peptide
  MOD_RES (1)..(2)..(34): Xaa is C or S

SEQ ID NO: 14728 - protein, 37 aa, Artificial Sequence
  GFR-binding peptide
  MOD_RES (3)..(4)..(36): Xaa is C or S
KPXXAPTKLEPLTVLYYDDSSNVIEQLSNNMVVRSXG

SEQ ID NO: 14729 - protein, 34 aa, Artificial Sequence
  GFR-binding peptide
  MOD_RES (1)..(2)..(33): Xaa is C or S
XXVSQDLEPLPIVYYIGKTPKIEQLSNMIVKSXK

SEQ ID NO: 14730 - protein, 38 aa, Artificial Sequence
  GFR-binding peptide
  MOD_RES (5)..(6)..(37): Xaa is C or S
SASPXXVSQDLEPLPIVYYIGKTPKIEQLSNMIVKSXK

SEQ ID NO: 14731 - protein, 37 aa, Artificial Sequence
  GFR-binding peptide
  MOD_RES (5)..(5): Xaa is C or S
  MOD_RES (19)..(20)..(21)..(22)..(23): Xaa is A or G
  MOD_RES (24)..(25)..(26)..(27): Xaa is A or G or is absent
TKPTXAPTKLEPLTVLYYXXXXXXXXXEQLSNNMVVR

SEQ ID NO: 14732 - protein, 34 aa, Artificial Sequence
  GFR-binding peptide
  MOD_RES (2)..(3): Xaa is C or S
PXXAPTKLEPLTVLYYDDSSNVIEQLSNNMVVRS

SEQ ID NO: 14733 - protein, 35 aa, Artificial Sequence; identical to SEQ ID NO: 7434
  GFR-binding peptide
  MOD_RES (1)..(34): Xaa is C or S
  MOD_RES (15)..(16)..(17)..(18)..(19): Xaa is A or G
  MOD_RES (20)..(21)..(22)..(23): Xaa is A or G or is absent

SEQ ID NO: 14734 - protein, 37 aa, Artificial Sequence
  GFR-binding peptide
  MOD_RES (4)..(5)..(37): Xaa is C or S
PKPXXAPTQLEPLTVLYYDDSSNVIEQLSNNMVVRAX

SEQ ID NO: 14735 - protein, 36 aa, Artificial Sequence; identical to SEQ ID NO: 7436
  GFR-binding peptide
  MOD_RES (1)..(2)..(33)..(35): Xaa is C or S

SEQ ID NO: 14736 - protein, 36 aa, Artificial Sequence; identical to SEQ ID NO: 7437
  GFR-binding peptide
  MOD_RES (1)..(2)..(36): Xaa is C or S
  MOD_RES (16)..(17)..(18)..(19)..(20): Xaa is A or G
  MOD_RES (21)..(22)..(23)..(24): Xaa is A or G or is absent

SEQ ID NO: 14737 - protein, 42 aa, Artificial Sequence
  GFR-binding peptide
  MOD_RES (7)..(39)..(41): Xaa is C or S
HVTKPTXAPTKLEPLTVLYYDDSSNVIEQLSNNMVVRSXGXH

SEQ ID NO: 14738 - protein, 32 aa, Artificial Sequence; identical to SEQ ID NO: 7440
  GFR-binding peptide
  MOD_RES (32)..(32): Xaa is C or S

SEQ ID NO: 14739 - protein, 33 aa, Artificial Sequence
  GFR-binding peptide
  MOD_RES (1)..(2): Xaa is C or S
XXAPTQLEPLPVVYYDDSSNVIEQLSNNMVVRA

SEQ ID NO: 14740 - protein, 38 aa, Artificial Sequence; identical to SEQ ID NO: 7441
  GFR-binding peptide
  MOD_RES (5)..(6)..(38): Xaa is C or S

SEQ ID NO: 14741 - protein, 37 aa, Artificial Sequence; identical to SEQ ID NO: 7442
  GFR-binding peptide
  MOD_RES (6)..(7): Xaa is C or S

SEQ ID NO: 14742 - protein, 40 aa, Artificial Sequence
  GFR-binding peptide
  MOD_RES (5)..(6)..(38)..(40): Xaa is C or S
IPKAXXVPTELEPLPMVYYDENEKVVEQLSNDMVVEGXGX

SEQ ID NO: 14743 - protein, 38 aa, Artificial Sequence; identical to SEQ ID NO: 7445
  GFR-binding peptide
  MOD_RES (2)..(3)..(37): Xaa is C or S
  MOD_RES (17)..(18)..(19)..(20)..(21): Xaa is A or G
  MOD_RES (22)..(23)..(24)..(25): Xaa is A or G or is absent

SEQ ID NO: 14744 - protein, 37 aa, Artificial Sequence; identical to SEQ ID NO: 7446
  GFR-binding peptide
  MOD_RES (3)..(4)..(37): Xaa is C or S
  MOD_RES (18)..(19)..(20)..(21)..(22): Xaa is A or G
  MOD_RES (23)..(24)..(25)..(26): Xaa is A or G or is absent

SEQ ID NO: 14745 - protein, 31 aa, Artificial Sequence
  GFR-binding peptide
  MOD_RES (1)..(1): Xaa is C or S
XAPTQLEPLTVLYYDDSSNVIEQLSNNMVVR

SEQ ID NO: 14746 - protein, 35 aa, Artificial Sequence
  GFR-binding peptide
  MOD_RES (2)..(3): Xaa is C or S
  MOD_RES (17)..(18)..(19)..(20)..(21): Xaa is A or G
  MOD_RES (22)..(23)..(24)..(25): Xaa is A or G or is absent
AXXVPTELSPISMLFIXXXXXXXXXYKQYEEMVVE

SEQ ID NO: 14747 - protein, 42 aa, Artificial Sequence
  GFR-binding peptide
  MOD_RES (6)..(40)..(42): Xaa is C or S
  MOD_RES (20)..(21)..(22)..(23)..(24): Xaa is A or G
  MOD_RES (25)..(26)..(27)..(28): Xaa is A or G or is absent
VTKPTXAPTKLEPLTVLYYXXXXXXXXXEQLSNNMVVRSXGX

SEQ ID NO: 14748 - protein, 36 aa, Artificial Sequence
  GFR-binding peptide
  MOD_RES (3)..(4): Xaa is C or S
  MOD_RES (18)..(19)..(20)..(21)..(22): Xaa is A or G
  MOD_RES (23)..(24)..(25)..(26): Xaa is A or G or is absent
SPXXVPQDLEPLTILYYXXXXXXXXXEQLSNMVVKS

SEQ ID NO: 14749 - protein, 36 aa, Artificial Sequence
  GFR-binding peptide
  MOD_RES (3)..(4): Xaa is C or S
  MOD_RES (18)..(19)..(20)..(21)..(22): Xaa is A or G
  MOD_RES (23)..(24)..(25)..(26): Xaa is A or G or is absent
PTXXVPTRLEPLTILYYXXXXXXXXXEQLSNDMVVE

SEQ ID NO: 14750 - protein, 37 aa, Artificial Sequence
  GFR-binding peptide
  MOD_RES (1)..(2)..(34)..(36): Xaa is C or S
XXVPTELSPISMLFIDEYDKVVYKQYEEMVVEGXGXR

SEQ ID NO: 14751 - protein, 33 aa, Artificial Sequence
  GFR-binding peptide
  MOD_RES (1)..(1): Xaa is C or S
  MOD_RES (15)..(16)..(17)..(18)..(19): Xaa is A or G
  MOD_RES (20)..(21)..(22)..(23): Xaa is A or G or is absent
XAPTKLEPLPVVYYXXXXXXXXXEQLSNNMVVR

SEQ ID NO: 14752 - protein, 40 aa, Artificial Sequence
  GFR-binding peptide
  MOD_RES (5)..(6)..(39): Xaa is C or S
  MOD_RES (20)..(21)..(22)..(23)..(24): Xaa is A or G
  MOD_RES (25)..(26)..(27)..(28): Xaa is A or G or is absent
SASPXXVPQDLSPISILFIXXXXXXXXXYKQYEMVVKSXK

SEQ ID NO: 14753 - protein, 37 aa, Artificial Sequence
  GFR-binding peptide
  MOD_RES (4)..(5): Xaa is C or S
  MOD_RES (19)..(20)..(21)..(22)..(23): Xaa is A or G
  MOD_RES (24)..(25)..(26)..(27): Xaa is A or G or is absent
PKAXXVPTELEPLPMVYYXXXXXXXXXEQLSNEMVVE

SEQ ID NO: 14754 - protein, 33 aa, Artificial Sequence
  GFR-binding peptide
  MOD_RES (1)..(1): Xaa is C or S
  MOD_RES (15)..(16)..(17)..(18)..(19): Xaa is A or G
  MOD_RES (20)..(21)..(22)..(23): Xaa is A or G or is absent
XAPTKLEPLTVLYYXXXXXXXXXEQLSNNMVVR

SEQ ID NO: 14755 - protein, 40 aa, Artificial Sequence
  GFR-binding peptide
  MOD_RES (5)..(6)..(37)..(39): Xaa is C or S
SASPXXVPQDLEPLPIVYYVGRTPKVEQLSNMVVKSXKXS

SEQ ID NO: 14756 - protein, 36 aa, Artificial Sequence; identical to SEQ ID NO: 7455
  GFR-binding peptide
  MOD_RES (1)..(2)..(34)..(36): Xaa is C or S

SEQ ID NO: 14757 - protein, 36 aa, Artificial Sequence
  GFR-binding peptide
  MOD_RES (33)..(35): Xaa is C or S
  MOD_RES (14)..(15)..(16)..(17)..(18): Xaa is A or G
  MOD_RES (19)..(20)..(21)..(22): Xaa is A or G or is absent
VSQDLEPLPIVYYXXXXXXXXXEQLSNMIVKSXKXS

SEQ ID NO: 14758 - protein, 37 aa, Artificial Sequence; identical to SEQ ID NO: 7457
  GFR-binding peptide
  MOD_RES (1)..(34)..(36): Xaa is C or S
  MOD_RES (15)..(16)..(17)..(18)..(19): Xaa is A or G
  MOD_RES (20)..(21)..(22)..(23): Xaa is A or G or is absent

SEQ ID NO: 14759 - protein, 41 aa, Artificial Sequence; identical to SEQ ID NO: 7462
  GFR-binding peptide
  MOD_RES (6)..(7)..(39)..(41): Xaa is C or S

SEQ ID NO: 14760 - protein, 34 aa, Artificial Sequence; identical to SEQ ID NO: 7463
  GFR-binding peptide
  MOD_RES (1)..(2): Xaa is C or S
  MOD_RES (16)..(17)..(18)..(19)..(20): Xaa is A or G
  MOD_RES (21)..(22)..(23)..(24): Xaa is A or G or is absent

SEQ ID NO: 14761 - protein, 38 aa, Artificial Sequence
  GFR-binding peptide
  MOD_RES (3)..(4)..(38): Xaa is C or S
  MOD_RES (18)..(19)..(20)..(21)..(22): Xaa is A or G
  MOD_RES (23)..(24)..(25)..(26): Xaa is A or G or is absent
PTXXVPTRLSPISILFIXXXXXXXXXYKQYEDMVVESX

SEQ ID NO: 14762 - protein, 42 aa, Artificial Sequence
  GFR-binding peptide
  MOD_RES (5)..(6)..(40)..(42): Xaa is C or S
  MOD_RES (20)..(21)..(22)..(23)..(24): Xaa is A or G
  MOD_RES (25)..(26)..(27)..(28): Xaa is A or G or is absent
IPKAXXVPTELEPLTMLYYXXXXXXXXXEQLSNEMVVEGXGX

SEQ ID NO: 14763 - protein, 32 aa, Artificial Sequence
  GFR-binding peptide
  MOD_RES (32)..(32): Xaa is C or S
VPTELEPLTMLYYDEYDKVVEQLSNEMVVEGX

SEQ ID NO: 14764 - protein, 32 aa, Artificial Sequence
  GFR-binding peptide
  MOD_RES (14)..(15)..(16)..(17)..(18): Xaa is A or G
  MOD_RES (19)..(20)..(21)..(22): Xaa is A or G or is absent
APTKLEPLPVVYYXXXXXXXXXEQLSNNMVVR

SEQ ID NO: 14765 - protein, 36 aa, Artificial Sequence
  GFR-binding peptide
  MOD_RES (1)..(34)..(36): Xaa is C or S
  MOD_RES (15)..(16)..(17)..(18)..(19): Xaa is A or G
  MOD_RES (20)..(21)..(22)..(23): Xaa is A or G or is absent
XVPQDLSPISILFIXXXXXXXXXYKQYEMVVKSXKX

SEQ ID NO: 14766 - protein, 40 aa, Artificial Sequence; identical to SEQ ID NO: 7468
  GFR-binding peptide
  MOD_RES (5)..(6)..(40): Xaa is C or S
  MOD_RES (20)..(21)..(22)..(23)..(24): Xaa is A or G
  MOD_RES (25)..(26)..(27)..(28): Xaa is A or G or is absent

SEQ ID NO: 14767 - protein, 36 aa, Artificial Sequence
  GFR-binding peptide
  MOD_RES (5)..(6): Xaa is C or S
TPPTXXVPTRLEPLTILYYDSANNVVEQLSNDMVVE

SEQ ID NO: 14768 - protein, 32 aa, Artificial Sequence
  GFR-binding peptide
  MOD_RES (1)..(2): Xaa is C or S
XXVPTELEPLPMVYYDENEKVVEQLSNDMVVE

SEQ ID NO: 14769 - protein, 38 aa, Artificial Sequence
  GFR-binding peptide
  MOD_RES (4)..(5)..(36)..(38): Xaa is C or S
ASPXXVPQDLSPISILFIVGRTPKVYKQYEMVVKSXKX

SEQ ID NO: 14770 - protein, 34 aa, Artificial Sequence; identical to SEQ ID NO: 7475
  GFR-binding peptide
  MOD_RES (2)..(3)..(34): Xaa is C or S

SEQ ID NO: 14771 - protein, 35 aa, Artificial Sequence; identical to SEQ ID NO: 7478
  GFR-binding peptide
  MOD_RES (2)..(3): Xaa is C or S
  MOD_RES (17)..(18)..(19)..(20)..(21): Xaa is A or G
  MOD_RES (22)..(23)..(24)..(25): Xaa is A or G or is absent

SEQ ID NO: 14772 - protein, 40 aa, Artificial Sequence
  GFR-binding peptide
  MOD_RES (4)..(5)..(39): Xaa is C or S
  MOD_RES (19)..(20)..(21)..(22)..(23): Xaa is A or G
  MOD_RES (24)..(25)..(26)..(27): Xaa is A or G or is absent
PKPXXAPTKLEPLPVVYYXXXXXXXXXEQLSNNMVVRSXG

SEQ ID NO: 14773 - protein, 33 aa, Artificial Sequence
  GFR-binding peptide
  MOD_RES (31)..(33): Xaa is C or S
VPQDLSPISILFIVGRTPKVYKQYEMVVKSXKX

SEQ ID NO: 14774 - protein, 36 aa, Artificial Sequence
  GFR-binding peptide
  MOD_RES (34)..(36): Xaa is C or S
  MOD_RES (14)..(15)..(16)..(17)..(18): Xaa is A or G
  MOD_RES (19)..(20)..(21)..(22): Xaa is A or G or is absent
VPTELSPISMLFIXXXXXXXXXYKQYEDMVVEGXGX

SEQ ID NO: 14775 - protein, 38 aa, Artificial Sequence
  GFR-binding peptide
  MOD_RES (5)..(6): Xaa is C or S
  MOD_RES (20)..(21)..(22)..(23)..(24): Xaa is A or G
  MOD_RES (25)..(26)..(27)..(28): Xaa is A or G or is absent
VPKPXXAPTKLEPLTVLYYXXXXXXXXXEQLSNNMVVR

SEQ ID NO: 14776 - protein, 38 aa, Artificial Sequence; identical to SEQ ID NO: 7480
  GFR-binding peptide
  MOD_RES (1)..(2)..(36)..(38): Xaa is C or S
  MOD_RES (16)..(17)..(18)..(19)..(20): Xaa is A or G
  MOD_RES (21)..(22)..(23)..(24): Xaa is A or G or is absent

SEQ ID NO: 14777 - protein, 40 aa, Artificial Sequence
  GFR-binding peptide
  MOD_RES (5)..(6)..(40): Xaa is C or S
  MOD_RES (20)..(21)..(22)..(23)..(24): Xaa is A or G
  MOD_RES (25)..(26)..(27)..(28): Xaa is A or G or is absent
VPKPXXAPTKLEPLTVLYYXXXXXXXXXEQLSNNMVVRSX

SEQ ID NO: 14778 - protein, 34 aa, Artificial Sequence
  GFR-binding peptide
  MOD_RES (2)..(3): Xaa is C or S
AXXVPTELSPISMLFIDENEKVVYKQYEDMVVEG

SEQ ID NO: 14779 - protein, 32 aa, Artificial Sequence
  GFR-binding peptide
  MOD_RES (1)..(32): Xaa is C or S
XVPQALSPISILFIVGRKPKVYKQYEMIVRSX

SEQ ID NO: 14780 - protein, 42 aa, Artificial Sequence
  GFR-binding peptide
  MOD_RES (5)..(6)..(40)..(42): Xaa is C or S
  MOD_RES (20)..(21)..(22)..(23)..(24): Xaa is A or G
  MOD_RES (25)..(26)..(27)..(28): Xaa is A or G or is absent
IPKAXXVPTELEPLTMLYYXXXXXXXXXEQLSNDMVVEGXGX

SEQ ID NO: 14781 - protein, 38 aa, Artificial Sequence; identical to SEQ ID NO: 7481
  GFR-binding peptide
  MOD_RES (3)..(4)..(37): Xaa is C or S
  MOD_RES (18)..(19)..(20)..(21)..(22): Xaa is A or G
  MOD_RES (23)..(24)..(25)..(26): Xaa is A or G or is absent

SEQ ID NO: 14782 - protein, 41 aa, Artificial Sequence; identical to SEQ ID NO: 7482
  GFR-binding peptide
  MOD_RES (6)..(7)..(38)..(40): Xaa is C or S

SEQ ID NO: 14783 - protein, 37 aa, Artificial Sequence
  GFR-binding peptide
  MOD_RES (3)..(4)..(36): Xaa is C or S
KPXXAPTQLEPLTVLYYDDSSNVIEQLSNNMVVRAXG

SEQ ID NO: 14784 - protein, 40 aa, Artificial Sequence; identical to SEQ ID NO: 7484
  GFR-binding peptide
  MOD_RES (6)..(7)..(38)..(40): Xaa is C or S

SEQ ID NO: 14785 - protein, 34 aa, Artificial Sequence; identical to SEQ ID NO: 7485
  GFR-binding peptide
  MOD_RES (1)..(33): Xaa is C or S

SEQ ID NO: 14786 - protein, 41 aa, Artificial Sequence
  GFR-binding peptide
  MOD_RES (4)..(5)..(38)..(40): Xaa is C or S
  MOD_RES (19)..(20)..(21)..(22)..(23): Xaa is A or G
  MOD_RES (24)..(25)..(26)..(27): Xaa is A or G or is absent
AAPXXVPQALSPISILFIXXXXXXXXXYKQYEMIVRSXKXS

SEQ ID NO: 14787 - protein, 39 aa, Artificial Sequence
  GFR-binding peptide
  MOD_RES (5)..(39): Xaa is C or S
  MOD_RES (19)..(20)..(21)..(22)..(23): Xaa is A or G
  MOD_RES (24)..(25)..(26)..(27): Xaa is A or G or is absent
TKPTXAPTKLEPLTVLYYXXXXXXXXXEQLSNNMVVRSX

SEQ ID NO: 14788 - protein, 38 aa, Artificial Sequence
  GFR-binding peptide
  MOD_RES (1)..(35)..(37): Xaa is C or S
  MOD_RES (15)..(16)..(17)..(18)..(19): Xaa is A or G
  MOD_RES (20)..(21)..(22)..(23): Xaa is A or G or is absent
XAPTQLEPLPVVYYXXXXXXXXXEQLSNNMVVRAXGXH

SEQ ID NO: 14789 - protein, 41 aa, Artificial Sequence; identical to SEQ ID NO: 7488
  GFR-binding peptide
  MOD_RES (6)..(7)..(40): Xaa is C or S
  MOD_RES (21)..(22)..(23)..(24)..(25): Xaa is A or G
  MOD_RES (26)..(27)..(28)..(29): Xaa is A or G or is absent

SEQ ID NO: 14790 - protein, 38 aa, Artificial Sequence
  GFR-binding peptide
  MOD_RES (5)..(6): Xaa is C or S
  MOD_RES (20)..(21)..(22)..(23)..(24): Xaa is A or G
  MOD_RES (25)..(26)..(27)..(28): Xaa is A or G or is absent
SASPXXVPQDLEPLPIVYYXXXXXXXXXEQLSNMVVKS

SEQ ID NO: 14791 - protein, 37 aa, Artificial Sequence; identical to SEQ ID NO: 7489
  GFR-binding peptide
  MOD_RES (6)..(7): Xaa is C or S

SEQ ID NO: 14792 - protein, 40 aa, Artificial Sequence
  GFR-binding peptide
  MOD_RES (6)..(7): Xaa is C or S
  MOD_RES (21)..(22)..(23)..(24)..(25): Xaa is A or G
  MOD_RES (26)..(27)..(28)..(29): Xaa is A or G or is absent
SIPKAXXVPTELEPLTMLYYXXXXXXXXXEQLSNEMVVEG

SEQ ID NO: 14793 - protein, 41 aa, Artificial Sequence
  GFR-binding peptide
  MOD_RES (3)..(4)..(38)..(40): Xaa is C or S
  MOD_RES (18)..(19)..(20)..(21)..(22): Xaa is A or G
  MOD_RES (23)..(24)..(25)..(26): Xaa is A or G or is absent
KPXXAPTKLEPLTVLYYXXXXXXXXXEQLSNNMVVRSXGXH

SEQ ID NO: 14794 - protein, 32 aa, Artificial Sequence
  GFR-binding peptide
  MOD_RES (2)..(2): Xaa is C or S
TXAPTKLSPISVLFIDDSSNVIYKQYENMVVR

SEQ ID NO: 14795 - protein, 42 aa, Artificial Sequence; identical to SEQ ID NO: 7492
  GFR-binding peptide
  MOD_RES (6)..(7)..(41): Xaa is C or S
  MOD_RES (21)..(22)..(23)..(24)..(25): Xaa is A or G
  MOD_RES (26)..(27)..(28)..(29): Xaa is A or G or is absent

SEQ ID NO: 14796 - protein, 36 aa, Artificial Sequence; identical to SEQ ID NO: 7494
  GFR-binding peptide
  MOD_RES (1)..(2)..(33)..(35): Xaa is C or S

SEQ ID NO: 14797 - protein, 37 aa, Artificial Sequence
  GFR-binding peptide
  MOD_RES (1)..(34)..(36): Xaa is C or S
  MOD_RES (15)..(16)..(17)..(18)..(19): Xaa is A or G
  MOD_RES (20)..(21)..(22)..(23): Xaa is A or G or is absent
XVSQDLSPISILFIXXXXXXXXXYKQYEMIVKSXKXS

SEQ ID NO: 14798 - protein, 36 aa, Artificial Sequence; identical to SEQ ID NO: 7496
  GFR-binding peptide
  MOD_RES (5)..(6): Xaa is C or S

SEQ ID NO: 14799 - protein, 37 aa, Artificial Sequence
  GFR-binding peptide
  MOD_RES (3)..(35)..(37): Xaa is C or S
PTXAPTKLSPISVLFIDDSSNVIYKQYENMVVRSXGX

SEQ ID NO: 14800 - protein, 37 aa, Artificial Sequence
  GFR-binding peptide
  MOD_RES (4)..(5): Xaa is C or S
  MOD_RES (19)..(20)..(21)..(22)..(23): Xaa is A or G
  MOD_RES (24)..(25)..(26)..(27): Xaa is A or G or is absent
AAPXXVPQALSPISILFIXXXXXXXXXYKQYEMIVRS

SEQ ID NO: 14801 - protein, 37 aa, Artificial Sequence
  GFR-binding peptide
  MOD_RES (5)..(5): Xaa is C or S
  MOD_RES (19)..(20)..(21)..(22)..(23): Xaa is A or G
  MOD_RES (24)..(25)..(26)..(27): Xaa is A or G or is absent
TKPTXAPTKLEPLPVVYYXXXXXXXXXEQLSNNMVVR

SEQ ID NO: 14802 - protein, 40 aa, Artificial Sequence
  GFR-binding peptide
  MOD_RES (2)..(3)..(37)..(39): Xaa is C or S
  MOD_RES (17)..(18)..(19)..(20)..(21): Xaa is A or G
  MOD_RES (22)..(23)..(24)..(25): Xaa is A or G or is absent
TXXVPTRLNAISILYFXXXXXXXXXLKKYRDMVVESXGXR

SEQ ID NO: 14803 - protein, 33 aa, Artificial Sequence; identical to SEQ ID NO: 7497
  GFR-binding peptide
  MOD_RES (1)..(2): Xaa is C or S

SEQ ID NO: 14804 - protein, 36 aa, Artificial Sequence; identical to SEQ ID NO: 7498
  GFR-binding peptide
  MOD_RES (3)..(4): Xaa is C or S
  MOD_RES (18)..(19)..(20)..(21)..(22): Xaa is A or G
  MOD_RES (23)..(24)..(25)..(26): Xaa is A or G or is absent

SEQ ID NO: 14805 - protein, 37 aa, Artificial Sequence
  GFR-binding peptide
  MOD_RES (4)..(5)..(36): Xaa is C or S
ASPXXVPQDLSPISILFIVGRTPKVYKQYEMVVKSXK

SEQ ID NO: 14806 - protein, 36 aa, Artificial Sequence
  GFR-binding peptide
  MOD_RES (3)..(4): Xaa is C or S
  MOD_RES (18)..(19)..(20)..(21)..(22): Xaa is A or G
  MOD_RES (23)..(24)..(25)..(26): Xaa is A or G or is absent
PTXXVPTRLEPLPIVYYXXXXXXXXXEQLSNDMVVE

SEQ ID NO: 14807 - protein, 40 aa, Artificial Sequence
  GFR-binding peptide
  MOD_RES (6)..(7): Xaa is C or S
  MOD_RES (21)..(22)..(23)..(24)..(25): Xaa is A or G
  MOD_RES (26)..(27)..(28)..(29): Xaa is A or G or is absent
YVPKPXXAPTKLEPLPVVYYXXXXXXXXXEQLSNNMVVRS

SEQ ID NO: 14808 - protein, 37 aa, Artificial Sequence
  GFR-binding peptide
  MOD_RES (1)..(2)..(36): Xaa is C or S
  MOD_RES (16)..(17)..(18)..(19)..(20): Xaa is A or G
  MOD_RES (21)..(22)..(23)..(24): Xaa is A or G or is absent
XXVPTRLNAISILYFXXXXXXXXXLKKYRDMVVESXG

SEQ ID NO: 14809 - protein, 37 aa, Artificial Sequence; identical to SEQ ID NO: 7501
  GFR-binding peptide
  MOD_RES (1)..(2)..(34)..(36): Xaa is C or S

SEQ ID NO: 14810 - protein, 38 aa, Artificial Sequence; identical to SEQ ID NO: 7502
  GFR-binding peptide
  MOD_RES (2)..(3)..(36)..(38): Xaa is C or S
  MOD_RES (17)..(18)..(19)..(20)..(21): Xaa is A or G
  MOD_RES (22)..(23)..(24)..(25): Xaa is A or G or is absent

SEQ ID NO: 14811 - protein, 41 aa, Artificial Sequence
  GFR-binding peptide
  MOD_RES (6)..(7)..(41): Xaa is C or S
  MOD_RES (21)..(22)..(23)..(24)..(25): Xaa is A or G
  MOD_RES (26)..(27)..(28)..(29): Xaa is A or G or is absent
SIPKAXXVPTELSPISMLFIXXXXXXXXXYKQYEEMVVEGX

SEQ ID NO: 14812 - protein, 36 aa, Artificial Sequence; identical to SEQ ID NO: 7507
  GFR-binding peptide
  MOD_RES (5)..(6): Xaa is C or S

SEQ ID NO: 14813 - protein, 39 aa, Artificial Sequence
  GFR-binding peptide
  MOD_RES (3)..(4)..(38): Xaa is C or S
  MOD_RES (18)..(19)..(20)..(21)..(22): Xaa is A or G
  MOD_RES (23)..(24)..(25)..(26): Xaa is A or G or is absent
KAXXVPTELSPISMLFIXXXXXXXXXYKQYEDMVVEGXG

SEQ ID NO: 14814 - protein, 39 aa, Artificial Sequence
  GFR-binding peptide
  MOD_RES (4)..(5)..(36)..(38): Xaa is C or S
AAPXXVPQALEPLTILYYVGRKPKVEQLSNMIVRSXKXS

SEQ ID NO: 14815 - protein, 40 aa, Artificial Sequence
  GFR-binding peptide
  MOD_RES (5)..(6)..(38)..(40): Xaa is C or S
VPKPXXAPTQLEPLPVVYYDDSSNVIEQLSNNMVVRAXGX

SEQ ID NO: 14816 - protein, 43 aa, Artificial Sequence
  GFR-binding peptide
  MOD_RES (6)..(7)..(41)..(43): Xaa is C or S
  MOD_RES (21)..(22)..(23)..(24)..(25): Xaa is A or G
  MOD_RES (26)..(27)..(28)..(29): Xaa is A or G or is absent
KIPKAXXVPTELEPLPMVYYXXXXXXXXXEQLSNDMVVEGXGX

SEQ ID NO: 14817 - protein, 33 aa, Artificial Sequence
  GFR-binding peptide
  MOD_RES (14)..(15)..(16)..(17)..(18): Xaa is A or G
  MOD_RES (19)..(20)..(21)..(22): Xaa is A or G or is absent
APTQLEPLPVVYYXXXXXXXXXEQLSNNMVVRA

SEQ ID NO: 14818 - protein, 32 aa, Artificial Sequence
  GFR-binding peptide
  MOD_RES (1)..(2): Xaa is C or S
XXAPTQLEPLTVLYYDDSSNVIEQLSNNMVVR

SEQ ID NO: 14819 - protein, 42 aa, Artificial Sequence
  GFR-binding peptide
  MOD_RES (4)..(5)..(39)..(41): Xaa is C or S
  MOD_RES (19)..(20)..(21)..(22)..(23): Xaa is A or G
  MOD_RES (24)..(25)..(26)..(27): Xaa is A or G or is absent
PKPXXAPTQLEPLTVLYYXXXXXXXXXEQLSNNMVVRAXGXH

SEQ ID NO: 14820 - protein, 34 aa, Artificial Sequence
  GFR-binding peptide
  MOD_RES (2)..(3): Xaa is C or S
PXXAPTKLEPLPVVYYDDSSNVIEQLSNNMVVRS

SEQ ID NO: 14821 - protein, 40 aa, Artificial Sequence
  GFR-binding peptide
  MOD_RES (7)..(39): Xaa is C or S
HVTKPTXAPTKLSPISVLFIDDSSNVIYKQYENMVVRSXG

SEQ ID NO: 14822 - protein, 38 aa, Artificial Sequence
  GFR-binding peptide
  MOD_RES (6)..(7)..(38): Xaa is C or S
ASASPXXVSQDLSPISILFIIGKTPKIYKQYEMIVKSX

SEQ ID NO: 14823 - protein, 41 aa, Artificial Sequence
  GFR-binding peptide
  MOD_RES (6)..(7)..(39)..(41): Xaa is C or S
YVPKPXXAPTKLEPLPVVYYDDSSNVIEQLSNNMVVRSXGX

SEQ ID NO: 14824 - protein, 35 aa, Artificial Sequence
  GFR-binding peptide
  MOD_RES (1)..(33)..(35): Xaa is C or S
XVPTELSPISMLFIDEYDKVVYKQYEEMVVEGXGX

SEQ ID NO: 14825 - protein, 38 aa, Artificial Sequence; identical to SEQ ID NO: 7514
  GFR-binding peptide
  MOD_RES (3)..(4)..(37): Xaa is C or S
  MOD_RES (18)..(19)..(20)..(21)..(22): Xaa is A or G
  MOD_RES (23)..(24)..(25)..(26): Xaa is A or G or is absent

SEQ ID NO: 14826 - protein, 34 aa, Artificial Sequence
  GFR-binding peptide
  MOD_RES (31)..(33): Xaa is C or S
VPQDLEPLPIVYYVGRTPKVEQLSNMVVKSXKXS

SEQ ID NO: 14827 - protein, 40 aa, Artificial Sequence
  GFR-binding peptide
  MOD_RES (4)..(5)..(38)..(40): Xaa is C or S
  MOD_RES (19)..(20)..(21)..(22)..(23): Xaa is A or G
  MOD_RES (24)..(25)..(26)..(27): Xaa is A or G or is absent
ASPXXVSQDLSPISILFIXXXXXXXXXYKQYEMIVKSXKX

SEQ ID NO: 14828 - protein, 38 aa, Artificial Sequence
  GFR-binding peptide
  MOD_RES (2)..(36)..(38): Xaa is C or S
  MOD_RES (16)..(17)..(18)..(19)..(20): Xaa is A or G
  MOD_RES (21)..(22)..(23)..(24): Xaa is A or G or is absent
TXAPTKLEPLTVLYYXXXXXXXXXEQLSNNMVVRSXGX

SEQ ID NO: 14829 - protein, 40 aa, Artificial Sequence
  GFR-binding peptide
  MOD_RES (3)..(4)..(38)..(40): Xaa is C or S
  MOD_RES (18)..(19)..(20)..(21)..(22): Xaa is A or G
  MOD_RES (23)..(24)..(25)..(26): Xaa is A or G or is absent
KAXXVPTELEPLPMVYYXXXXXXXXXEQLSNEMVVEGXGX

SEQ ID NO: 14830 - protein, 39 aa, Artificial Sequence
  GFR-binding peptide
  MOD_RES (5)..(6): Xaa is C or S
  MOD_RES (20)..(21)..(22)..(23)..(24): Xaa is A or G
  MOD_RES (25)..(26)..(27)..(28): Xaa is A or G or is absent
TPPTXXVPTRLSPISILFIXXXXXXXXXYKQYEDMVVES

SEQ ID NO: 14831 - protein, 36 aa, Artificial Sequence
  GFR-binding peptide
  MOD_RES (1)..(2)..(34)..(36): Xaa is C or S
XXAPTKLEPLPVVYYDDSSNVIEQLSNNMVVRSXGX

SEQ ID NO: 14832 - protein, 36 aa, Artificial Sequence
  GFR-binding peptide
  MOD_RES (3)..(35): Xaa is C or S
PTXAPTKLSPISVLFIDDSSNVIYKQYENMVVRSXG

SEQ ID NO: 14833 - protein, 39 aa, Artificial Sequence
  GFR-binding peptide
  MOD_RES (6)..(7)..(39): Xaa is C or S
SIPKAXXVPTELEPLPMVYYDEYDKVVEQLSNEMVVEGX

SEQ ID NO: 14834 - protein, 38 aa, Artificial Sequence; identical to SEQ ID NO: 7521
  GFR-binding peptide
  MOD_RES (3)..(4)..(38): Xaa is C or S
  MOD_RES (18)..(19)..(20)..(21)..(22): Xaa is A or G
  MOD_RES (23)..(24)..(25)..(26): Xaa is A or G or is absent

SEQ ID NO: 14835 - protein, 35 aa, Artificial Sequence
  GFR-binding peptide
  MOD_RES (34)..(34): Xaa is C or S
  MOD_RES (14)..(15)..(16)..(17)..(18): Xaa is A or G
  MOD_RES (19)..(20)..(21)..(22): Xaa is A or G or is absent
VPTELEPLTMLYYXXXXXXXXXEQLSNDMVVEGXG

SEQ ID NO: 14836 - protein, 39 aa, Artificial Sequence; identical to SEQ ID NO: 7522
  GFR-binding peptide
  MOD_RES (6)..(7): Xaa is C or S
  MOD_RES (21)..(22)..(23)..(24)..(25): Xaa is A or G
  MOD_RES (26)..(27)..(28)..(29): Xaa is A or G or is absent

SEQ ID NO: 14837 - protein, 39 aa, Artificial Sequence
  GFR-binding peptide
  MOD_RES (4)..(5)..(37)..(39): Xaa is C or S
PKAXXVPTELEPLPMVYYDEYDKVVEQLSNEMVVEGXGX

SEQ ID NO: 14838 - protein, 39 aa, Artificial Sequence; identical to SEQ ID NO: 7527
  GFR-binding peptide
  MOD_RES (5)..(6): Xaa is C or S
  MOD_RES (20)..(21)..(22)..(23)..(24): Xaa is A or G
  MOD_RES (25)..(26)..(27)..(28): Xaa is A or G or is absent

SEQ ID NO: 14839 - protein, 37 aa, Artificial Sequence
  GFR-binding peptide
  MOD_RES (34)..(36): Xaa is C or S
  MOD_RES (14)..(15)..(16)..(17)..(18): Xaa is A or G
  MOD_RES (19)..(20)..(21)..(22): Xaa is A or G or is absent
APTQLSPISVLFIXXXXXXXXXYKQYENMVVRAXGXH

SEQ ID NO: 14840 - protein, 38 aa, Artificial Sequence
  GFR-binding peptide
  MOD_RES (4)..(5): Xaa is C or S
  MOD_RES (19)..(20)..(21)..(22)..(23): Xaa is A or G
  MOD_RES (24)..(25)..(26)..(27): Xaa is A or G or is absent
PPTXXVPTRLEPLTILYYXXXXXXXXXEQLSNDMVVES

SEQ ID NO: 14841 - protein, 42 aa, Artificial Sequence
  GFR-binding peptide
  MOD_RES (5)..(6)..(40)..(42): Xaa is C or S
  MOD_RES (20)..(21)..(22)..(23)..(24): Xaa is A or G
  MOD_RES (25)..(26)..(27)..(28): Xaa is A or G or is absent
VPKPXXAPTQLEPLPVVYYXXXXXXXXXEQLSNNMVVRAXGX

SEQ ID NO: 14842 - protein, 33 aa, Artificial Sequence
  GFR-binding peptide
  MOD_RES (31)..(33): Xaa is C or S
VSQDLSPISILFIIGKTPKIYKQYEMIVKSXKX

SEQ ID NO: 14843 - protein, 35 aa, Artificial Sequence
  GFR-binding peptide
  MOD_RES (1)..(33)..(35): Xaa is C or S
XVPTELEPLTMLYYDEYDKVVEQLSNEMVVEGXGX

SEQ ID NO: 14844 - protein, 37 aa, Artificial Sequence
  GFR-binding peptide
  MOD_RES (3)..(35)..(37): Xaa is C or S
PTXAPTKLEPLTVLYYDDSSNVIEQLSNNMVVRSXGX

SEQ ID NO: 14845 - protein, 42 aa, Artificial Sequence
  GFR-binding peptide
  MOD_RES (5)..(6)..(39)..(41): Xaa is C or S
  MOD_RES (20)..(21)..(22)..(23)..(24): Xaa is A or G
  MOD_RES (25)..(26)..(27)..(28): Xaa is A or G or is absent
SAAPXXVPQALEPLPIVYYXXXXXXXXXEQLSNMIVRSXKXS

SEQ ID NO: 14846 - protein, 34 aa, Artificial Sequence
  GFR-binding peptide
  MOD_RES (34)..(34): Xaa is C or S
  MOD_RES (14)..(15)..(16)..(17)..(18): Xaa is A or G
  MOD_RES (19)..(20)..(21)..(22): Xaa is A or G or is absent
VPTELEPLTMLYYXXXXXXXXXEQLSNDMVVEGX

SEQ ID NO: 14847 - protein, 43 aa, Artificial Sequence
  GFR-binding peptide
  MOD_RES (5)..(6)..(40)..(42): Xaa is C or S
  MOD_RES (20)..(21)..(22)..(23)..(24): Xaa is A or G
  MOD_RES (25)..(26)..(27)..(28): Xaa is A or G or is absent
VPKPXXAPTKLEPLTVLYYXXXXXXXXXEQLSNNMVVRSXGXH

SEQ ID NO: 14848 - protein, 36 aa, Artificial Sequence; identical to SEQ ID NO: 7535
  GFR-binding peptide
  MOD_RES (34)..(36): Xaa is C or S
  MOD_RES (14)..(15)..(16)..(17)..(18): Xaa is A or G
  MOD_RES (19)..(20)..(21)..(22): Xaa is A or G or is absent

SEQ ID NO: 14849 - protein, 37 aa, Artificial Sequence
  GFR-binding peptide
  MOD_RES (2)..(3)..(36): Xaa is C or S
  MOD_RES (17)..(18)..(19)..(20)..(21): Xaa is A or G
  MOD_RES (22)..(23)..(24)..(25): Xaa is A or G or is absent
PXXVPQALEPLPIVYYXXXXXXXXXEQLSNMIVRSXK

SEQ ID NO: 14850 - protein, 42 aa, Artificial Sequence
  GFR-binding peptide
  MOD_RES (5)..(6)..(40)..(42): Xaa is C or S
  MOD_RES (20)..(21)..(22)..(23)..(24): Xaa is A or G
  MOD_RES (25)..(26)..(27)..(28): Xaa is A or G or is absent
VPKPXXAPTKLSPISVLFIXXXXXXXXXYKQYENMVVRSXGX

SEQ ID NO: 14851 - protein, 37 aa, Artificial Sequence; identical to SEQ ID NO: 7537
  GFR-binding peptide
  MOD_RES (1)..(34)..(36): Xaa is C or S
  MOD_RES (15)..(16)..(17)..(18)..(19): Xaa is A or G
  MOD_RES (20)..(21)..(22)..(23): Xaa is A or G or is absent

SEQ ID NO: 14852 - protein, 39 aa, Artificial Sequence; identical to SEQ ID NO: 7538
  GFR-binding peptide
  MOD_RES (5)..(6)..(37)..(39): Xaa is C or S

SEQ ID NO: 14853 - protein, 40 aa, Artificial Sequence
  GFR-binding peptide
  MOD_RES (3)..(4)..(38)..(40): Xaa is C or S
  MOD_RES (18)..(19)..(20)..(21)..(22): Xaa is A or G
  MOD_RES (23)..(24)..(25)..(26): Xaa is A or G or is absent
KAXXVPTELEPLPMVYYXXXXXXXXXEQLSNDMVVEGXGX

SEQ ID NO: 14854 - protein, 36 aa, Artificial Sequence
  GFR-binding peptide
  MOD_RES (1)..(33)..(35): Xaa is C or S
XVPTELSPISMLFIDEYDKVVYKQYEEMVVEGXGXR

SEQ ID NO: 14855 - protein, 37 aa, Artificial Sequence; identical to SEQ ID NO: 7540
  GFR-binding peptide
  MOD_RES (2)..(3)..(37): Xaa is C or S
  MOD_RES (17)..(18)..(19)..(20)..(21): Xaa is A or G
  MOD_RES (22)..(23)..(24)..(25): Xaa is A or G or is absent

SEQ ID NO: 14856 - protein, 40 aa, Artificial Sequence
  GFR-binding peptide
  MOD_RES (3)..(4)..(38)..(40): Xaa is C or S
  MOD_RES (18)..(19)..(20)..(21)..(22): Xaa is A or G
  MOD_RES (23)..(24)..(25)..(26): Xaa is A or G or is absent
KAXXVPTELEPLTMLYYXXXXXXXXXEQLSNEMVVEGXGX

SEQ ID NO: 14857 - protein, 38 aa, Artificial Sequence; identical to SEQ ID NO: 7543
  GFR-binding peptide
  MOD_RES (2)..(3)..(37): Xaa is C or S
  MOD_RES (17)..(18)..(19)..(20)..(21): Xaa is A or G
  MOD_RES (22)..(23)..(24)..(25): Xaa is A or G or is absent

SEQ ID NO: 14858 - protein, 37 aa, Artificial Sequence; identical to SEQ ID NO: 7544
  GFR-binding peptide
  MOD_RES (3)..(4): Xaa is C or S
  MOD_RES (18)..(19)..(20)..(21)..(22): Xaa is A or G
  MOD_RES (23)..(24)..(25)..(26): Xaa is A or G or is absent

SEQ ID NO: 14859 - protein, 38 aa, Artificial Sequence
  GFR-binding peptide
  MOD_RES (3)..(4)..(36)..(38): Xaa is C or S
KPXXAPTQLEPLPVVYYDDSSNVIEQLSNNMVVRAXGX

SEQ ID NO: 14860 - protein, 38 aa, Artificial Sequence; identical to SEQ ID NO: 7546
  GFR-binding peptide
  MOD_RES (1)..(35)..(37): Xaa is C or S
  MOD_RES (15)..(16)..(17)..(18)..(19): Xaa is A or G
  MOD_RES (20)..(21)..(22)..(23): Xaa is A or G or is absent

SEQ ID NO: 14861 - protein, 36 aa, Artificial Sequence; identical to SEQ ID NO: 7548
  GFR-binding peptide
  MOD_RES (1)..(2)..(35): Xaa is C or S
  MOD_RES (16)..(17)..(18)..(19)..(20): Xaa is A or G
  MOD_RES (21)..(22)..(23)..(24): Xaa is A or G or is absent

SEQ ID NO: 14862 - protein, 37 aa, Artificial Sequence; identical to SEQ ID NO: 7549
  GFR-binding peptide
  MOD_RES (6)..(7): Xaa is C or S

SEQ ID NO: 14863 - protein, 37 aa, Artificial Sequence; identical to SEQ ID NO: 7550
  GFR-binding peptide
  MOD_RES (3)..(4): Xaa is C or S
  MOD_RES (18)..(19)..(20)..(21)..(22): Xaa is A or G
  MOD_RES (23)..(24)..(25)..(26): Xaa is A or G or is absent

SEQ ID NO: 14864 - protein, 37 aa, Artificial Sequence
  GFR-binding peptide
  MOD_RES (1)..(2)..(35)..(37): Xaa is C or S
  MOD_RES (16)..(17)..(18)..(19)..(20): Xaa is A or G
  MOD_RES (21)..(22)..(23)..(24): Xaa is A or G or is absent
XXVPQDLSPISILFIXXXXXXXXXYKQYEMVVKSXKX

SEQ ID NO: 14865 - protein, 41 aa, Artificial Sequence; identical to SEQ ID NO: 7553
  GFR-binding peptide
  MOD_RES (5)..(6)..(40): Xaa is C or S
  MOD_RES (20)..(21)..(22)..(23)..(24): Xaa is A or G
  MOD_RES (25)..(26)..(27)..(28): Xaa is A or G or is absent

SEQ ID NO: 14866 - protein, 37 aa, Artificial Sequence; identical to SEQ ID NO: 7556
  GFR-binding peptide
  MOD_RES (4)..(5): Xaa is C or S
  MOD_RES (19)..(20)..(21)..(22)..(23): Xaa is A or G
  MOD_RES (24)..(25)..(26)..(27): Xaa is A or G or is absent

SEQ ID NO: 14867 - protein, 38 aa, Artificial Sequence; identical to SEQ ID NO: 7558
  GFR-binding peptide
  MOD_RES (4)..(5)..(37): Xaa is C or S

SEQ ID NO: 14868 - protein, 34 aa, Artificial Sequence; identical to SEQ ID NO: 7559
  GFR-binding peptide
  MOD_RES (1)..(2): Xaa is C or S
  MOD_RES (16)..(17)..(18)..(19)..(20): Xaa is A or G
  MOD_RES (21)..(22)..(23)..(24): Xaa is A or G or is absent

SEQ ID NO: 14869 - protein, 41 aa, Artificial Sequence
  GFR-binding peptide
  MOD_RES (6)..(7)..(41): Xaa is C or S
  MOD_RES (21)..(22)..(23)..(24)..(25): Xaa is A or G
  MOD_RES (26)..(27)..(28)..(29): Xaa is A or G or is absent
TVPKPXXAPTQLEPLPVVYYXXXXXXXXXEQLSNNMVVRAX

SEQ ID NO: 14870 - protein, 33 aa, Artificial Sequence
  GFR-binding peptide
  MOD_RES (1)..(1): Xaa is C or S
  MOD_RES (15)..(16)..(17)..(18)..(19): Xaa is A or G
  MOD_RES (20)..(21)..(22)..(23): Xaa is A or G or is absent
XVPQALEPLPIVYYXXXXXXXXXEQLSNMIVRS

SEQ ID NO: 14871 - protein, 38 aa, Artificial Sequence
  GFR-binding peptide
  MOD_RES (5)..(6): Xaa is C or S
  MOD_RES (20)..(21)..(22)..(23)..(24): Xaa is A or G
  MOD_RES (25)..(26)..(27)..(28): Xaa is A or G or is absent
SASPXXVPQDLSPISILFIXXXXXXXXXYKQYEMVVKS

SEQ ID NO: 14872 - protein, 32 aa, Artificial Sequence
  GFR-binding peptide
  MOD_RES (1)..(2): Xaa is C or S
XXAPTKLEPLTVLYYDDSSNVIEQLSNNMVVR

SEQ ID NO: 14873 - protein, 42 aa, Artificial Sequence
  GFR-binding peptide
  MOD_RES (5)..(39)..(41): Xaa is C or S
  MOD_RES (19)..(20)..(21)..(22)..(23): Xaa is A or G
  MOD_RES (24)..(25)..(26)..(27): Xaa is A or G or is absent
TKPTXAPTKLEPLPVVYYXXXXXXXXXEQLSNNMVVRSXGXH

SEQ ID NO: 14874 - protein, 35 aa, Artificial Sequence
  GFR-binding peptide
  MOD_RES (1)..(34): Xaa is C or S
  MOD_RES (15)..(16)..(17)..(18)..(19): Xaa is A or G
  MOD_RES (20)..(21)..(22)..(23): Xaa is A or G or is absent
XVPQALSPISILFIXXXXXXXXXYKQYEMIVRSXK

SEQ ID NO: 14875 - protein, 37 aa, Artificial Sequence
  GFR-binding peptide
  MOD_RES (1)..(2)..(36): Xaa is C or S
  MOD_RES (16)..(17)..(18)..(19)..(20): Xaa is A or G
  MOD_RES (21)..(22)..(23)..(24): Xaa is A or G or is absent
XXAPTQLSPISVLFIXXXXXXXXXYKQYENMVVRAXG

SEQ ID NO: 14876 - protein, 36 aa, Artificial Sequence; identical to SEQ ID NO: 7564
  GFR-binding peptide
  MOD_RES (1)..(2)..(36): Xaa is C or S
  MOD_RES (16)..(17)..(18)..(19)..(20): Xaa is A or G
  MOD_RES (21)..(22)..(23)..(24): Xaa is A or G or is absent

SEQ ID NO: 14877 - protein, 31 aa, Artificial Sequence; identical to SEQ ID NO: 7565
  GFR-binding peptide
  MOD_RES (31)..(31): Xaa is C or S

SEQ ID NO: 14878 - protein, 39 aa, Artificial Sequence; identical to SEQ ID NO: 7567
  GFR-binding peptide
  MOD_RES (3)..(4)..(37)..(39): Xaa is C or S
  MOD_RES (18)..(19)..(20)..(21)..(22): Xaa is A or G
  MOD_RES (23)..(24)..(25)..(26): Xaa is A or G or is absent

SEQ ID NO: 14879 - protein, 36 aa, Artificial Sequence
  GFR-binding peptide
  MOD_RES (2)..(3)..(35): Xaa is C or S
AXXVPTELEPLPMVYYDENEKVVEQLSNDMVVEGXG

SEQ ID NO: 14880 - protein, 38 aa, Artificial Sequence
  GFR-binding peptide
  MOD_RES (6)..(7)..(38): Xaa is C or S
ASAAPXXVPQALEPLTILYYVGRKPKVEQLSNMIVRSX

SEQ ID NO: 14881 - protein, 35 aa, Artificial Sequence
  GFR-binding peptide
  MOD_RES (32)..(34): Xaa is C or S
VPTELEPLPMVYYDENEKVVEQLSNDMVVEGXGXR

SEQ ID NO: 14882 - protein, 40 aa, Artificial Sequence
  GFR-binding peptide
  MOD_RES (5)..(6)..(38)..(40): Xaa is C or S
IPKAXXVPTELEPLPMVYYDEYDKVVEQLSNEMVVEGXGX

SEQ ID NO: 14883 - protein, 36 aa, Artificial Sequence; identical to SEQ ID NO: 7572
  GFR-binding peptide
  MOD_RES (34)..(36): Xaa is C or S
  MOD_RES (14)..(15)..(16)..(17)..(18): Xaa is A or G
  MOD_RES (19)..(20)..(21)..(22): Xaa is A or G or is absent

SEQ ID NO: 14884 - protein, 40 aa, Artificial Sequence
  GFR-binding peptide
  MOD_RES (5)..(6)..(40): Xaa is C or S
  MOD_RES (20)..(21)..(22)..(23)..(24): Xaa is A or G
  MOD_RES (25)..(26)..(27)..(28): Xaa is A or G or is absent
TPPTXXVPTRLNAISILYFXXXXXXXXXLKKYRDMVVESX

SEQ ID NO: 14885 - protein, 35 aa, Artificial Sequence; identical to SEQ ID NO: 7574
  GFR-binding peptide
  MOD_RES (34)..(34): Xaa is C or S
  MOD_RES (14)..(15)..(16)..(17)..(18): Xaa is A or G
  MOD_RES (19)..(20)..(21)..(22): Xaa is A or G or is absent

SEQ ID NO: 14886 - protein, 33 aa, Artificial Sequence
  GFR-binding peptide
  MOD_RES (1)..(2)..(33): Xaa is C or S
XXVSQDLSPISILFIIGKTPKIYKQYEMIVKSX

SEQ ID NO: 14887 - protein, 40 aa, Artificial Sequence; identical to SEQ ID NO: 7580
  GFR-binding peptide
  MOD_RES (4)..(5)..(39): Xaa is C or S
  MOD_RES (19)..(20)..(21)..(22)..(23): Xaa is A or G
  MOD_RES (24)..(25)..(26)..(27): Xaa is A or G or is absent

SEQ ID NO: 14888 - protein, 37 aa, Artificial Sequence
  GFR-binding peptide
  MOD_RES (4)..(5): Xaa is C or S
  MOD_RES (19)..(20)..(21)..(22)..(23): Xaa is A or G
  MOD_RES (24)..(25)..(26)..(27): Xaa is A or G or is absent
PPTXXVPTRLNAISILYFXXXXXXXXXLKKYRDMVVE

SEQ ID NO: 14889 - protein, 37 aa, Artificial Sequence
  GFR-binding peptide
  MOD_RES (1)..(2)..(36): Xaa is C or S
  MOD_RES (16)..(17)..(18)..(19)..(20): Xaa is A or G
  MOD_RES (21)..(22)..(23)..(24): Xaa is A or G or is absent
XXVPTELSPISMLFIXXXXXXXXXYKQYEDMVVEGXG

SEQ ID NO: 14890 - protein, 39 aa, Artificial Sequence
  GFR-binding peptide
  MOD_RES (4)..(5)..(38): Xaa is C or S
  MOD_RES (19)..(20)..(21)..(22)..(23): Xaa is A or G
  MOD_RES (24)..(25)..(26)..(27): Xaa is A or G or is absent
AAPXXVPQALEPLTILYYXXXXXXXXXEQLSNMIVRSXK

SEQ ID NO: 14891 - protein, 39 aa, Artificial Sequence; identical to SEQ ID NO: 7585
  GFR-binding peptide
  MOD_RES (6)..(7): Xaa is C or S
  MOD_RES (21)..(22)..(23)..(24)..(25): Xaa is A or G
  MOD_RES (26)..(27)..(28)..(29): Xaa is A or G or is absent

SEQ ID NO: 14892 - protein, 39 aa, Artificial Sequence
  GFR-binding peptide
  MOD_RES (1)..(2)..(36)..(38): Xaa is C or S
  MOD_RES (16)..(17)..(18)..(19)..(20): Xaa is A or G
  MOD_RES (21)..(22)..(23)..(24): Xaa is A or G or is absent
XXVPTELEPLTMLYYXXXXXXXXXEQLSNEMVVEGXGXR

SEQ ID NO: 14893 - protein, 34 aa, Artificial Sequence
  GFR-binding peptide
  MOD_RES (34)..(34): Xaa is C or S
  MOD_RES (14)..(15)..(16)..(17)..(18): Xaa is A or G
  MOD_RES (19)..(20)..(21)..(22): Xaa is A or G or is absent
VPTELSPISMLFIXXXXXXXXXYKQYEEMVVEGX

SEQ ID NO: 14894 - protein, 35 aa, Artificial Sequence
  GFR-binding peptide
  MOD_RES (1)..(2): Xaa is C or S
  MOD_RES (16)..(17)..(18)..(19)..(20): Xaa is A or G
  MOD_RES (21)..(22)..(23)..(24): Xaa is A or G or is absent
XXVPTELEPLPMVYYXXXXXXXXXEQLSNDMVVEG

SEQ ID NO: 14895 - protein, 39 aa, Artificial Sequence; identical to SEQ ID NO: 7588
  GFR-binding peptide
  MOD_RES (2)..(3)..(36)..(38): Xaa is C or S
  MOD_RES (17)..(18)..(19)..(20)..(21): Xaa is A or G
  MOD_RES (22)..(23)..(24)..(25): Xaa is A or G or is absent

SEQ ID NO: 14896 - protein, 39 aa, Artificial Sequence
  GFR-binding peptide
  MOD_RES (5)..(6): Xaa is C or S
  MOD_RES (20)..(21)..(22)..(23)..(24): Xaa is A or G
  MOD_RES (25)..(26)..(27)..(28): Xaa is A or G or is absent
IPKAXXVPTELEPLPMVYYXXXXXXXXXEQLSNEMVVEG

SEQ ID NO: 14897 - protein, 35 aa, Artificial Sequence; identical to SEQ ID NO: 7592
  GFR-binding peptide
  MOD_RES (1)..(2)..(35): Xaa is C or S
  MOD_RES (16)..(17)..(18)..(19)..(20): Xaa is A or G
  MOD_RES (21)..(22)..(23)..(24): Xaa is A or G or is absent

SEQ ID NO: 14898 - protein, 36 aa, Artificial Sequence
  GFR-binding peptide
  MOD_RES (5)..(6): Xaa is C or S
IPKAXXVPTELEPLPMVYYDENEKVVEQLSNDMVVE

SEQ ID NO: 14899 - protein, 34 aa, Artificial Sequence
  GFR-binding peptide
  MOD_RES (32)..(34): Xaa is C or S
VPTRLSAISILYLDSANNVVLKNYQDMVVESXGX

SEQ ID NO: 14900 - protein, 42 aa, Artificial Sequence
  GFR-binding peptide
  MOD_RES (4)..(5)..(39)..(41): Xaa is C or S
  MOD_RES (19)..(20)..(21)..(22)..(23): Xaa is A or G
  MOD_RES (24)..(25)..(26)..(27): Xaa is A or G or is absent
PPTXXVPTRLEPLTILYYXXXXXXXXXEQLSNDMVVESXGXR

SEQ ID NO: 14901 - protein, 40 aa, Artificial Sequence
  GFR-binding peptide
  MOD_RES (6)..(7): Xaa is C or S
  MOD_RES (21)..(22)..(23)..(24)..(25): Xaa is A or G
  MOD_RES (26)..(27)..(28)..(29): Xaa is A or G or is absent
YVPKPXXAPTKLEPLTVLYYXXXXXXXXXEQLSNNMVVRS

SEQ ID NO: 14902 - protein, 43 aa, Artificial Sequence
  GFR-binding peptide
  MOD_RES (6)..(40)..(42): Xaa is C or S
  MOD_RES (20)..(21)..(22)..(23)..(24): Xaa is A or G
  MOD_RES (25)..(26)..(27)..(28): Xaa is A or G or is absent
VTKPTXAPTKLSPISVLFIXXXXXXXXXYKQYENMVVRSXGXH

SEQ ID NO: 14903 - protein, 32 aa, Artificial Sequence
  GFR-binding peptide
  MOD_RES (1)..(2): Xaa is C or S
XXAPTQLEPLPVVYYDDSSNVIEQLSNNMVVR

SEQ ID NO: 14904 - protein, 38 aa, Artificial Sequence; identical to SEQ ID NO: 7600
  GFR-binding peptide
  MOD_RES (2)..(3)..(36)..(38): Xaa is C or S
  MOD_RES (17)..(18)..(19)..(20)..(21): Xaa is A or G
  MOD_RES (22)..(23)..(24)..(25): Xaa is A or G or is absent

SEQ ID NO: 14905 - protein, 39 aa, Artificial Sequence; identical to SEQ ID NO: 7601
  GFR-binding peptide
  MOD_RES (6)..(7)..(39): Xaa is C or S

SEQ ID NO: 14906 - protein, 35 aa, Artificial Sequence; identical to SEQ ID NO: 7603
  GFR-binding peptide
  MOD_RES (2)..(3)..(34): Xaa is C or S

SEQ ID NO: 14907 - protein, 40 aa, Artificial Sequence
  GFR-binding peptide
  MOD_RES (4)..(5)..(39): Xaa is C or S
  MOD_RES (19)..(20)..(21)..(22)..(23): Xaa is A or G
  MOD_RES (24)..(25)..(26)..(27): Xaa is A or G or is absent
PPTXXVPTRLEPLTILYYXXXXXXXXXEQLSNDMVVESXG

SEQ ID NO: 14908 - protein, 35 aa, Artificial Sequence; identical to SEQ ID NO: 7607
  GFR-binding peptide
  MOD_RES (4)..(5): Xaa is C or S

SEQ ID NO: 14909 - protein, 37 aa, Artificial Sequence
  GFR-binding peptide
  MOD_RES (3)..(4)..(36): Xaa is C or S
KAXXVPTELSPISMLFIDENEKVVYKQYEDMVVEGXG

SEQ ID NO: 14910 - protein, 40 aa, Artificial Sequence
  GFR-binding peptide
  MOD_RES (6)..(7)..(39): Xaa is C or S
YVPKPXXAPTKLEPLPVVYYDDSSNVIEQLSNNMVVRSXG

SEQ ID NO: 14911 - protein, 36 aa, Artificial Sequence
  GFR-binding peptide
  MOD_RES (4)..(5)..(36): Xaa is C or S
AAPXXVPQALSPISILFIVGRKPKVYKQYEMIVRSX

SEQ ID NO: 14912 - protein, 32 aa, Artificial Sequence; identical to SEQ ID NO: 7611
  GFR-binding peptide
  MOD_RES (32)..(32): Xaa is C or S

SEQ ID NO: 14913 - protein, 42 aa, Artificial Sequence
  GFR-binding peptide
  MOD_RES (6)..(7)..(41): Xaa is C or S
  MOD_RES (21)..(22)..(23)..(24)..(25): Xaa is A or G
  MOD_RES (26)..(27)..(28)..(29): Xaa is A or G or is absent
KIPKAXXVPTELEPLTMLYYXXXXXXXXXEQLSNDMVVEGXG

SEQ ID NO: 14914 - protein, 38 aa, Artificial Sequence
  GFR-binding peptide
  MOD_RES (2)..(3)..(37): Xaa is C or S
  MOD_RES (17)..(18)..(19)..(20)..(21): Xaa is A or G
  MOD_RES (22)..(23)..(24)..(25): Xaa is A or G or is absent
AXXVPTELEPLTMLYYXXXXXXXXXEQLSNEMVVEGXG

SEQ ID NO: 14915 - protein, 33 aa, Artificial Sequence
  GFR-binding peptide
  MOD_RES (1)..(2): Xaa is C or S
XXAPTQLSPISVLFIDDSSNVIYKQYENMVVRA

SEQ ID NO: 14916 - protein, 33 aa, Artificial Sequence
  GFR-binding peptide
  MOD_RES (1)..(2): Xaa is C or S
XXVPTRLEPLTILYYDSANNVVEQLSNDMVVES

SEQ ID NO: 14917 - protein, 43 aa, Artificial Sequence; identical to SEQ ID NO: 7614
  GFR-binding peptide
  MOD_RES (6)..(7)..(41)..(43): Xaa is C or S
  MOD_RES (21)..(22)..(23)..(24)..(25): Xaa is A or G
  MOD_RES (26)..(27)..(28)..(29): Xaa is A or G or is absent

SEQ ID NO: 14918 - protein, 33 aa, Artificial Sequence
  GFR-binding peptide
  MOD_RES (1)..(1): Xaa is C or S
  MOD_RES (15)..(16)..(17)..(18)..(19): Xaa is A or G
  MOD_RES (20)..(21)..(22)..(23): Xaa is A or G or is absent
XVPTELEPLPMVYYXXXXXXXXXEQLSNEMVVE

SEQ ID NO: 14919 - protein, 40 aa, Artificial Sequence
  GFR-binding peptide
  MOD_RES (3)..(4)..(37)..(39): Xaa is C or S
  MOD_RES (18)..(19)..(20)..(21)..(22): Xaa is A or G
  MOD_RES (23)..(24)..(25)..(26): Xaa is A or G or is absent
APXXVPQALSPISILFIXXXXXXXXXYKQYEMIVRSXKXS

SEQ ID NO: 14920 - protein, 37 aa, Artificial Sequence
  GFR-binding peptide
  MOD_RES (5)..(6): Xaa is C or S
VPKPXXAPTQLSPISVLFIDDSSNVIYKQYENMVVRA

SEQ ID NO: 14921 - protein, 33 aa, Artificial Sequence
  GFR-binding peptide
  MOD_RES (14)..(15)..(16)..(17)..(18): Xaa is A or G
  MOD_RES (19)..(20)..(21)..(22): Xaa is A or G or is absent
APTQLSPISVLFIXXXXXXXXXYKQYENMVVRA

SEQ ID NO: 14922 - protein, 39 aa, Artificial Sequence
  GFR-binding peptide
  MOD_RES (4)..(5)..(37)..(39): Xaa is C or S
PKPXXAPTQLEPLPVVYYDDSSNVIEQLSNNMVVRAXGX

SEQ ID NO: 14923 - protein, 34 aa, Artificial Sequence
  GFR-binding peptide
  MOD_RES (1)..(2): Xaa is C or S
  MOD_RES (16)..(17)..(18)..(19)..(20): Xaa is A or G
  MOD_RES (21)..(22)..(23)..(24): Xaa is A or G or is absent
XXVPTELEPLPMVYYXXXXXXXXXEQLSNDMVVE

SEQ ID NO: 14924 - protein, 33 aa, Artificial Sequence
  GFR-binding peptide
  MOD_RES (32)..(32): Xaa is C or S
VPTRLEPLTILYYDSANNVVEQLSNDMVVESXG

SEQ ID NO: 14925 - protein, 36 aa, Artificial Sequence
  GFR-binding peptide
  MOD_RES (1)..(2)..(36): Xaa is C or S
  MOD_RES (16)..(17)..(18)..(19)..(20): Xaa is A or G
  MOD_RES (21)..(22)..(23)..(24): Xaa is A or G or is absent
XXVPTELSPISMLFIXXXXXXXXXYKQYEDMVVEGX

SEQ ID NO: 14926 - protein, 39 aa, Artificial Sequence; identical to SEQ ID NO: 7620
  GFR-binding peptide
  MOD_RES (6)..(38): Xaa is C or S

SEQ ID NO: 14927 - protein, 41 aa, Artificial Sequence
  GFR-binding peptide
  MOD_RES (7)..(41): Xaa is C or S
  MOD_RES (21)..(22)..(23)..(24)..(25): Xaa is A or G
  MOD_RES (26)..(27)..(28)..(29): Xaa is A or G or is absent
HVTKPTXAPTKLEPLPVVYYXXXXXXXXXEQLSNNMVVRSX

SEQ ID NO: 14928 - protein, 40 aa, Artificial Sequence; identical to SEQ ID NO: 7625
  GFR-binding peptide
  MOD_RES (6)..(7)..(39): Xaa is C or S

SEQ ID NO: 14929 - protein, 34 aa, Artificial Sequence
  GFR-binding peptide
  MOD_RES (3)..(4): Xaa is C or S
APXXVPQALSPISILFIVGRKPKVYKQYEMIVRS

SEQ ID NO: 14930 - protein, 42 aa, Artificial Sequence
  GFR-binding peptide
  MOD_RES (6)..(7)..(39)..(41): Xaa is C or S
KIPKAXXVPTELEPLTMLYYDENEKVVEQLSNDMVVEGXGXR

SEQ ID NO: 14931 - protein, 38 aa, Artificial Sequence
  GFR-binding peptide
  MOD_RES (1)..(35)..(37): Xaa is C or S
  MOD_RES (15)..(16)..(17)..(18)..(19): Xaa is A or G
  MOD_RES (20)..(21)..(22)..(23): Xaa is A or G or is absent
XAPTQLSPISVLFIXXXXXXXXXYKQYENMVVRAXGXH

SEQ ID NO: 14932 - protein, 39 aa, Artificial Sequence
  GFR-binding peptide
  MOD_RES (3)..(4)..(36)..(38): Xaa is C or S
KAXXVPTELEPLTMLYYDEYDKVVEQLSNEMVVEGXGXR

SEQ ID NO: 14933 - protein, 34 aa, Artificial Sequence; identical to SEQ ID NO: 7626
  GFR-binding peptide
  MOD_RES (1)..(2)..(33): Xaa is C or S

SEQ ID NO: 14934 - protein, 38 aa, Artificial Sequence
  GFR-binding peptide
  MOD_RES (5)..(6)..(37): Xaa is C or S
SASPXXVPQDLEPLPIVYYVGRTPKVEQLSNMVVKSXK

SEQ ID NO: 14935 - protein, 36 aa, Artificial Sequence; identical to SEQ ID NO: 7629
  GFR-binding peptide
  MOD_RES (3)..(4): Xaa is C or S
  MOD_RES (18)..(19)..(20)..(21)..(22): Xaa is A or G
  MOD_RES (23)..(24)..(25)..(26): Xaa is A or G or is absent

SEQ ID NO: 14936 - protein, 38 aa, Artificial Sequence
  GFR-binding peptide
  MOD_RES (3)..(4)..(36)..(38): Xaa is C or S
KPXXAPTKLEPLPVVYYDDSSNVIEQLSNNMVVRSXGX

SEQ ID NO: 14937 - protein, 37 aa, Artificial Sequence
  GFR-binding peptide
  MOD_RES (3)..(37): Xaa is C or S
  MOD_RES (17)..(18)..(19)..(20)..(21): Xaa is A or G
  MOD_RES (22)..(23)..(24)..(25): Xaa is A or G or is absent
PTXAPTKLSPISVLFIXXXXXXXXXYKQYENMVVRSX

SEQ ID NO: 14938 - protein, 35 aa, Artificial Sequence
  GFR-binding peptide
  MOD_RES (3)..(4): Xaa is C or S
KPXXAPTKLEPLPVVYYDDSSNVIEQLSNNMVVRS

SEQ ID NO: 14939 - protein, 34 aa, Artificial Sequence
  GFR-binding peptide
  MOD_RES (1)..(2): Xaa is C or S
  MOD_RES (16)..(17)..(18)..(19)..(20): Xaa is A or G
  MOD_RES (21)..(22)..(23)..(24): Xaa is A or G or is absent
XXAPTQLSPISVLFIXXXXXXXXXYKQYENMVVR

SEQ ID NO: 14940 - protein, 38 aa, Artificial Sequence
  GFR-binding peptide
  MOD_RES (2)..(3)..(37): Xaa is C or S
  MOD_RES (17)..(18)..(19)..(20)..(21): Xaa is A or G
  MOD_RES (22)..(23)..(24)..(25): Xaa is A or G or is absent
TXXVPTRLNAISILYFXXXXXXXXXLKKYRDMVVESXG

SEQ ID NO: 14941 - protein, 40 aa, Artificial Sequence
  GFR-binding peptide
  MOD_RES (6)..(7)..(40): Xaa is C or S
  MOD_RES (21)..(22)..(23)..(24)..(25): Xaa is A or G
  MOD_RES (26)..(27)..(28)..(29): Xaa is A or G or is absent
ASASPXXVSQDLEPLPIVYYXXXXXXXXXEQLSNMIVKSX

SEQ ID NO: 14942 - protein, 34 aa, Artificial Sequence
  GFR-binding peptide
  MOD_RES (1)..(1): Xaa is C or S
  MOD_RES (15)..(16)..(17)..(18)..(19): Xaa is A or G
  MOD_RES (20)..(21)..(22)..(23): Xaa is A or G or is absent
XAPTQLSPISVLFIXXXXXXXXXYKQYENMVVRA

SEQ ID NO: 14943 - protein, 35 aa, Artificial Sequence
  GFR-binding peptide
  MOD_RES (1)..(2)..(34): Xaa is C or S
XXVPTELSPISMLFIDEYDKVVYKQYEEMVVEGXG

SEQ ID NO: 14944 - protein, 35 aa, Artificial Sequence
  GFR-binding peptide
  MOD_RES (4)..(5): Xaa is C or S
ASPXXVSQDLEPLPIVYYIGKTPKIEQLSNMIVKS

SEQ ID NO: 14945 - protein, 37 aa, Artificial Sequence
  GFR-binding peptide
  MOD_RES (3)..(4): Xaa is C or S
  MOD_RES (18)..(19)..(20)..(21)..(22): Xaa is A or G
  MOD_RES (23)..(24)..(25)..(26): Xaa is A or G or is absent
PTXXVPTRLEPLTILYYXXXXXXXXXEQLSNDMVVES

SEQ ID NO: 14946 - protein, 37 aa, Artificial Sequence
  GFR-binding peptide
  MOD_RES (3)..(4)..(35)..(37): Xaa is C or S
SPXXVPQDLSPISILFIVGRTPKVYKQYEMVVKSXKX

SEQ ID NO: 14947 - protein, 37 aa, Artificial Sequence
  GFR-binding peptide
  MOD_RES (4)..(5): Xaa is C or S
  MOD_RES (19)..(20)..(21)..(22)..(23): Xaa is A or G
  MOD_RES (24)..(25)..(26)..(27): Xaa is A or G or is absent
AAPXXVPQALEPLPIVYYXXXXXXXXXEQLSNMIVRS

SEQ ID NO: 14948 - protein, 36 aa, Artificial Sequence; identical to SEQ ID NO: 7635
  GFR-binding peptide
  MOD_RES (2)..(3)..(34)..(36): Xaa is C or S

SEQ ID NO: 14949 - protein, 34 aa, Artificial Sequence
  GFR-binding peptide
  MOD_RES (32)..(34): Xaa is C or S
VPTRLEPLPIVYYDSANNVVEQLSNDMVVESXGX

SEQ ID NO: 14950 - protein, 34 aa, Artificial Sequence
  GFR-binding peptide
  MOD_RES (34)..(34): Xaa is C or S
  MOD_RES (14)..(15)..(16)..(17)..(18): Xaa is A or G
  MOD_RES (19)..(20)..(21)..(22): Xaa is A or G or is absent
VPTRLEPLTILYYXXXXXXXXXEQLSNDMVVESX

SEQ ID NO: 14951 - protein, 38 aa, Artificial Sequence; identical to SEQ ID NO: 7639
  GFR-binding peptide
  MOD_RES (4)..(5): Xaa is C or S
  MOD_RES (19)..(20)..(21)..(22)..(23): Xaa is A or G
  MOD_RES (24)..(25)..(26)..(27): Xaa is A or G or is absent

SEQ ID NO: 14952 - protein, 40 aa, Artificial Sequence; identical to SEQ ID NO: 7641
  GFR-binding peptide
  MOD_RES (6)..(7): Xaa is C or S
  MOD_RES (21)..(22)..(23)..(24)..(25): Xaa is A or G
  MOD_RES (26)..(27)..(28)..(29): Xaa is A or G or is absent

SEQ ID NO: 14953 - protein, 39 aa, Artificial Sequence
  GFR-binding peptide
  MOD_RES (4)..(5)..(38): Xaa is C or S
  MOD_RES (19)..(20)..(21)..(22)..(23): Xaa is A or G
  MOD_RES (24)..(25)..(26)..(27): Xaa is A or G or is absent
ASPXXVPQDLSPISILFIXXXXXXXXXYKQYEMVVKSXK

SEQ ID NO: 14954 - protein, 39 aa, Artificial Sequence
  GFR-binding peptide
  MOD_RES (4)..(5)..(37)..(39): Xaa is C or S
PPTXXVPTRLSAISILYLDSANNVVLKNYQDMVVESXGX

SEQ ID NO: 14955 - protein, 38 aa, Artificial Sequence; identical to SEQ ID NO: 7647
  GFR-binding peptide
  MOD_RES (3)..(4)..(36)..(38): Xaa is C or S

SEQ ID NO: 14956 - protein, 37 aa, Artificial Sequence
  GFR-binding peptide
  MOD_RES (34)..(36): Xaa is C or S
  MOD_RES (14)..(15)..(16)..(17)..(18): Xaa is A or G
  MOD_RES (19)..(20)..(21)..(22): Xaa is A or G or is absent
VPTRLEPLPIVYYXXXXXXXXXEQLSNDMVVESXGXR

SEQ ID NO: 14957 - protein, 34 aa, Artificial Sequence
  GFR-binding peptide
  MOD_RES (1)..(2): Xaa is C or S
  MOD_RES (16)..(17)..(18)..(19)..(20): Xaa is A or G
  MOD_RES (21)..(22)..(23)..(24): Xaa is A or G or is absent
XXVPTRLSPISILFIXXXXXXXXXYKQYEDMVVE

SEQ ID NO: 14958 - protein, 40 aa, Artificial Sequence
  GFR-binding peptide
  MOD_RES (5)..(37)..(39): Xaa is C or S
TKPTXAPTKLEPLPVVYYDDSSNVIEQLSNNMVVRSXGXH

SEQ ID NO: 14959 - protein, 42 aa, Artificial Sequence; identical to SEQ ID NO: 7654
  GFR-binding peptide
  MOD_RES (5)..(6)..(39)..(41): Xaa is C or S
  MOD_RES (20)..(21)..(22)..(23)..(24): Xaa is A or G
  MOD_RES (25)..(26)..(27)..(28): Xaa is A or G or is absent

SEQ ID NO: 14960 - protein, 38 aa, Artificial Sequence
  GFR-binding peptide
  MOD_RES (1)..(35)..(37): Xaa is C or S
  MOD_RES (15)..(16)..(17)..(18)..(19): Xaa is A or G
  MOD_RES (20)..(21)..(22)..(23): Xaa is A or G or is absent
XVPTRLSAISILYLXXXXXXXXXLKNYQDMVVESXGXR

SEQ ID NO: 14961 - protein, 35 aa, Artificial Sequence
  GFR-binding peptide
  MOD_RES (3)..(4): Xaa is C or S
PTXXVPTRLSAISILYLDSANNVVLKNYQDMVVES

SEQ ID NO: 14962 - protein, 39 aa, Artificial Sequence
  GFR-binding peptide
  MOD_RES (4)..(5)..(37)..(39): Xaa is C or S
PKPXXAPTKLEPLPVVYYDDSSNVIEQLSNNMVVRSXGX

SEQ ID NO: 14963 - protein, 39 aa, Artificial Sequence; identical to SEQ ID NO: 7659
  GFR-binding peptide
  MOD_RES (4)..(5)..(37)..(39): Xaa is C or S

SEQ ID NO: 14964 - protein, 39 aa, Artificial Sequence
  GFR-binding peptide
  MOD_RES (5)..(6)..(38): Xaa is C or S
IPKAXXVPTELSPISMLFIDENEKVVYKQYEDMVVEGXG

SEQ ID NO: 14965 - protein, 38 aa, Artificial Sequence; identical to SEQ ID NO: 7663
  GFR-binding peptide
  MOD_RES (4)..(5)..(36)..(38): Xaa is C or S

SEQ ID NO: 14966 - protein, 41 aa, Artificial Sequence
  GFR-binding peptide
  MOD_RES (6)..(7)..(41): Xaa is C or S
  MOD_RES (21)..(22)..(23)..(24)..(25): Xaa is A or G
  MOD_RES (26)..(27)..(28)..(29): Xaa is A or G or is absent
KIPKAXXVPTELEPLPMVYYXXXXXXXXXEQLSNDMVVEGX

SEQ ID NO: 14967 - protein, 37 aa, Artificial Sequence
  GFR-binding peptide
  MOD_RES (1)..(2)..(35)..(37): Xaa is C or S
  MOD_RES (16)..(17)..(18)..(19)..(20): Xaa is A or G
  MOD_RES (21)..(22)..(23)..(24): Xaa is A or G or is absent
XXVSQDLSPISILFIXXXXXXXXXYKQYEMIVKSXKX

SEQ ID NO: 14968 - protein, 37 aa, Artificial Sequence
  GFR-binding peptide
  MOD_RES (5)..(6)..(37): Xaa is C or S
SAAPXXVPQALEPLTILYYVGRKPKVEQLSNMIVRSX

SEQ ID NO: 14969 - protein, 42 aa, Artificial Sequence
  GFR-binding peptide
  MOD_RES (7)..(41): Xaa is C or S
  MOD_RES (21)..(22)..(23)..(24)..(25): Xaa is A or G
  MOD_RES (26)..(27)..(28)..(29): Xaa is A or G or is absent
HVTKPTXAPTKLEPLPVVYYXXXXXXXXXEQLSNNMVVRSXG

SEQ ID NO: 14970 - protein, 41 aa, Artificial Sequence
  GFR-binding peptide
  MOD_RES (7)..(39)..(41): Xaa is C or S
HVTKPTXAPTKLEPLPVVYYDDSSNVIEQLSNNMVVRSXGX

SEQ ID NO: 14971 - protein, 40 aa, Artificial Sequence; identical to SEQ ID NO: 7670
  GFR-binding peptide
  MOD_RES (5)..(6)..(38)..(40): Xaa is C or S

SEQ ID NO: 14972 - protein, 35 aa, Artificial Sequence
  GFR-binding peptide
  MOD_RES (4)..(5): Xaa is C or S
PKPXXAPTQLEPLPVVYYDDSSNVIEQLSNNMVVR

SEQ ID NO: 14973 - protein, 34 aa, Artificial Sequence; identical to SEQ ID NO: 7671
  GFR-binding peptide
  MOD_RES (32)..(34): Xaa is C or S

SEQ ID NO: 14974 - protein, 36 aa, Artificial Sequence; identical to SEQ ID NO: 7673
  GFR-binding peptide
  MOD_RES (2)..(3)..(35): Xaa is C or S

SEQ ID NO: 14975 - protein, 33 aa, Artificial Sequence
  GFR-binding peptide
  MOD_RES (14)..(15)..(16)..(17)..(18): Xaa is A or G
  MOD_RES (19)..(20)..(21)..(22): Xaa is A or G or is absent
VPTELEPLTMLYYXXXXXXXXXEQLSNDMVVEG

SEQ ID NO: 14976 - protein, 37 aa, Artificial Sequence; identical to SEQ ID NO: 7675
  GFR-binding peptide
  MOD_RES (2)..(3)..(34)..(36): Xaa is C or S

SEQ ID NO: 14977 - protein, 38 aa, Artificial Sequence
  GFR-binding peptide
  MOD_RES (4)..(5)..(37): Xaa is C or S
PKPXXAPTKLEPLTVLYYDDSSNVIEQLSNNMVVRSXG

SEQ ID NO: 14978 - protein, 30 aa, Artificial Sequence
  GFR-binding peptide
APTQLEPLTVLYYDDSSNVIEQLSNNMVVR

SEQ ID NO: 14979 - protein, 38 aa, Artificial Sequence
  GFR-binding peptide
  MOD_RES (2)..(3)..(36)..(38): Xaa is C or S
  MOD_RES (17)..(18)..(19)..(20)..(21): Xaa is A or G
  MOD_RES (22)..(23)..(24)..(25): Xaa is A or G or is absent
PXXVPQDLEPLPIVYYXXXXXXXXXEQLSNMVVKSXKX

SEQ ID NO: 14980 - protein, 43 aa, Artificial Sequence
  GFR-binding peptide
  MOD_RES (5)..(6)..(40)..(42): Xaa is C or S
  MOD_RES (20)..(21)..(22)..(23)..(24): Xaa is A or G
  MOD_RES (25)..(26)..(27)..(28): Xaa is A or G or is absent
IPKAXXVPTELEPLPMVYYXXXXXXXXXEQLSNEMVVEGXGXR

SEQ ID NO: 14981 - protein, 37 aa, Artificial Sequence; identical to SEQ ID NO: 7680
  GFR-binding peptide
  MOD_RES (1)..(35)..(37): Xaa is C or S
  MOD_RES (15)..(16)..(17)..(18)..(19): Xaa is A or G
  MOD_RES (20)..(21)..(22)..(23): Xaa is A or G or is absent

SEQ ID NO: 14982 - protein, 35 aa, Artificial Sequence
  GFR-binding peptide
  MOD_RES (1)..(2)..(34): Xaa is C or S
XXVPTRLEPLPIVYYDSANNVVEQLSNDMVVESXG

SEQ ID NO: 14983 - protein, 35 aa, Artificial Sequence; identical to SEQ ID NO: 7682
  GFR-binding peptide
  MOD_RES (4)..(5): Xaa is C or S

SEQ ID NO: 14984 - protein, 41 aa, Artificial Sequence; identical to SEQ ID NO: 7683
  GFR-binding peptide
  MOD_RES (6)..(7)..(40): Xaa is C or S
  MOD_RES (21)..(22)..(23)..(24)..(25): Xaa is A or G
  MOD_RES (26)..(27)..(28)..(29): Xaa is A or G or is absent

SEQ ID NO: 14985 - protein, 35 aa, Artificial Sequence
  GFR-binding peptide
  MOD_RES (33)..(35): Xaa is C or S
  MOD_RES (14)..(15)..(16)..(17)..(18): Xaa is A or G
  MOD_RES (19)..(20)..(21)..(22): Xaa is A or G or is absent
VPQALEPLPIVYYXXXXXXXXXEQLSNMIVRSXKX

SEQ ID NO: 14986 - protein, 41 aa, Artificial Sequence
  GFR-binding peptide
  MOD_RES (3)..(4)..(38)..(40): Xaa is C or S
  MOD_RES (18)..(19)..(20)..(21)..(22): Xaa is A or G
  MOD_RES (23)..(24)..(25)..(26): Xaa is A or G or is absent
PTXXVPTRLNAISILYFXXXXXXXXXLKKYRDMVVESXGXR

SEQ ID NO: 14987 - protein, 41 aa, Artificial Sequence
  GFR-binding peptide
  MOD_RES (3)..(4)..(38)..(40): Xaa is C or S
  MOD_RES (18)..(19)..(20)..(21)..(22): Xaa is A or G
  MOD_RES (23)..(24)..(25)..(26): Xaa is A or G or is absent
PTXXVPTRLEPLPIVYYXXXXXXXXXEQLSNDMVVESXGXR

SEQ ID NO: 14988 - protein, 37 aa, Artificial Sequence
  GFR-binding peptide
  MOD_RES (5)..(6): Xaa is C or S
IPKAXXVPTELEPLPMVYYDEYDKVVEQLSNEMVVEG

SEQ ID NO: 14989 - protein, 37 aa, Artificial Sequence
  GFR-binding peptide
  MOD_RES (1)..(35)..(37): Xaa is C or S
  MOD_RES (15)..(16)..(17)..(18)..(19): Xaa is A or G
  MOD_RES (20)..(21)..(22)..(23): Xaa is A or G or is absent
XVPTELEPLPMVYYXXXXXXXXXEQLSNEMVVEGXGX

SEQ ID NO: 14990 - protein, 39 aa, Artificial Sequence; identical to SEQ ID NO: 7690
  GFR-binding peptide
  MOD_RES (6)..(7): Xaa is C or S
  MOD_RES (21)..(22)..(23)..(24)..(25): Xaa is A or G
  MOD_RES (26)..(27)..(28)..(29): Xaa is A or G or is absent

SEQ ID NO: 14991 - protein, 31 aa, Artificial Sequence
  GFR-binding peptide
  MOD_RES (1)..(1): Xaa is C or S
XVPTELSPISMLFIDENEKVVYKQYEDMVVE

SEQ ID NO: 14992 - protein, 38 aa, Artificial Sequence
  GFR-binding peptide
  MOD_RES (4)..(5): Xaa is C or S
  MOD_RES (19)..(20)..(21)..(22)..(23): Xaa is A or G
  MOD_RES (24)..(25)..(26)..(27): Xaa is A or G or is absent
PKPXXAPTKLEPLPVVYYXXXXXXXXXEQLSNNMVVRS

SEQ ID NO: 14993 - protein, 37 aa, Artificial Sequence; identical to SEQ ID NO: 7694
  GFR-binding peptide
  MOD_RES (2)..(34)..(36): Xaa is C or S

SEQ ID NO: 14994 - protein, 39 aa, Artificial Sequence
  GFR-binding peptide
  MOD_RES (2)..(3)..(37)..(39): Xaa is C or S
  MOD_RES (17)..(18)..(19)..(20)..(21): Xaa is A or G
  MOD_RES (22)..(23)..(24)..(25): Xaa is A or G or is absent
AXXVPTELEPLTMLYYXXXXXXXXXEQLSNDMVVEGXGX

SEQ ID NO: 14995 - protein, 38 aa, Artificial Sequence; identical to SEQ ID NO: 7698
  GFR-binding peptide
  MOD_RES (5)..(6): Xaa is C or S
  MOD_RES (20)..(21)..(22)..(23)..(24): Xaa is A or G
  MOD_RES (25)..(26)..(27)..(28): Xaa is A or G or is absent

SEQ ID NO: 14996 - protein, 37 aa, Artificial Sequence
  GFR-binding peptide
  MOD_RES (1)..(2)..(36): Xaa is C or S
  MOD_RES (16)..(17)..(18)..(19)..(20): Xaa is A or G
  MOD_RES (21)..(22)..(23)..(24): Xaa is A or G or is absent
XXVPTRLSPISILFIXXXXXXXXXYKQYEDMVVESXG

SEQ ID NO: 14997 - protein, 34 aa, Artificial Sequence
  GFR-binding peptide
  MOD_RES (2)..(3)..(34): Xaa is C or S
PXXVPQDLSPISILFIVGRTPKVYKQYEMVVKSX

SEQ ID NO: 14998 - protein, 35 aa, Artificial Sequence; identical to SEQ ID NO: 7701
  GFR-binding peptide
  MOD_RES (2)..(3)..(35): Xaa is C or S

SEQ ID NO: 14999 - protein, 41 aa, Artificial Sequence
  GFR-binding peptide
  MOD_RES (5)..(6)..(40): Xaa is C or S
  MOD_RES (20)..(21)..(22)..(23)..(24): Xaa is A or G
  MOD_RES (25)..(26)..(27)..(28): Xaa is A or G or is absent
VPKPXXAPTKLEPLPVVYYXXXXXXXXXEQLSNNMVVRSXG

SEQ ID NO: 15000 - protein, 35 aa, Artificial Sequence; identical to SEQ ID NO: 7702
  GFR-binding peptide
  MOD_RES (2)..(3): Xaa is C or S
  MOD_RES (17)..(18)..(19)..(20)..(21): Xaa is A or G
  MOD_RES (22)..(23)..(24)..(25): Xaa is A or G or is absent

SEQ ID NO: 15001 - protein, 32 aa, Artificial Sequence
  GFR-binding peptide
  MOD_RES (1)..(1): Xaa is C or S
XVPTELSPISMLFIDEYDKVVYKQYEEMVVEG

SEQ ID NO: 15002 - protein, 35 aa, Artificial Sequence; identical to SEQ ID NO: 7704
  GFR-binding peptide
  MOD_RES (1)..(2)..(33)..(35): Xaa is C or S

SEQ ID NO: 15003 - protein, 35 aa, Artificial Sequence
  GFR-binding peptide
  MOD_RES (3)..(4): Xaa is C or S
PTXXVPTRLNAISILYFDSANNVVLKKYRDMVVES

SEQ ID NO: 15004 - protein, 39 aa, Artificial Sequence
  GFR-binding peptide
  MOD_RES (4)..(36)..(38): Xaa is C or S
KPTXAPTKLSPISVLFIDDSSNVIYKQYENMVVRSXGXH

SEQ ID NO: 15005 - protein, 35 aa, Artificial Sequence
  GFR-binding peptide
  MOD_RES (2)..(3): Xaa is C or S
  MOD_RES (17)..(18)..(19)..(20)..(21): Xaa is A or G
  MOD_RES (22)..(23)..(24)..(25): Xaa is A or G or is absent
PXXVPQDLSPISILFIXXXXXXXXXYKQYEMVVKS

SEQ ID NO: 15006 - protein, 34 aa, Artificial Sequence
  GFR-binding peptide
  MOD_RES (31)..(33): Xaa is C or S
VSQDLSPISILFIIGKTPKIYKQYEMIVKSXKXS

SEQ ID NO: 15007 - protein, 38 aa, Artificial Sequence; identical to SEQ ID NO: 7712
  GFR-binding peptide
  MOD_RES (6)..(38): Xaa is C or S

SEQ ID NO: 15008 - protein, 38 aa, Artificial Sequence; identical to SEQ ID NO: 7713
  GFR-binding peptide
  MOD_RES (1)..(2)..(35)..(37): Xaa is C or S
  MOD_RES (16)..(17)..(18)..(19)..(20): Xaa is A or G
  MOD_RES (21)..(22)..(23)..(24): Xaa is A or G or is absent

SEQ ID NO: 15009 - protein, 35 aa, Artificial Sequence; identical to SEQ ID NO: 7714
  GFR-binding peptide
  MOD_RES (1)..(2)..(33)..(35): Xaa is C or S

SEQ ID NO: 15010 - protein, 35 aa, Artificial Sequence
  GFR-binding peptide
  MOD_RES (1)..(2)..(35): Xaa is C or S
  MOD_RES (16)..(17)..(18)..(19)..(20): Xaa is A or G
  MOD_RES (21)..(22)..(23)..(24): Xaa is A or G or is absent
XXVSQDLEPLPIVYYXXXXXXXXXEQLSNMIVKSX

SEQ ID NO: 15011 - protein, 41 aa, Artificial Sequence; identical to SEQ ID NO: 7718
  GFR-binding peptide
  MOD_RES (7)..(39)..(41): Xaa is C or S

SEQ ID NO: 15012 - protein, 39 aa, Artificial Sequence; identical to SEQ ID NO: 7719
  GFR-binding peptide
  MOD_RES (2)..(3)..(37)..(39): Xaa is C or S
  MOD_RES (17)..(18)..(19)..(20)..(21): Xaa is A or G
  MOD_RES (22)..(23)..(24)..(25): Xaa is A or G or is absent

SEQ ID NO: 15013 - protein, 39 aa, Artificial Sequence; identical to SEQ ID NO: 7720
  GFR-binding peptide
  MOD_RES (3)..(4)..(38): Xaa is C or S
  MOD_RES (18)..(19)..(20)..(21)..(22): Xaa is A or G
  MOD_RES (23)..(24)..(25)..(26): Xaa is A or G or is absent

SEQ ID NO: 15014 - protein, 34 aa, Artificial Sequence; identical to SEQ ID NO: 7721
  GFR-binding peptide
  MOD_RES (32)..(34): Xaa is C or S

SEQ ID NO: 15015 - protein, 38 aa, Artificial Sequence
  GFR-binding peptide
  MOD_RES (5)..(6)..(38): Xaa is C or S
IPKAXXVPTELSPISMLFIDENEKVVYKQYEDMVVEGX

SEQ ID NO: 15016 - protein, 40 aa, Artificial Sequence
  GFR-binding peptide
  MOD_RES (4)..(5)..(37)..(39): Xaa is C or S
PKAXXVPTELEPLPMVYYDEYDKVVEQLSNEMVVEGXGXR

SEQ ID NO: 15017 - protein, 40 aa, Artificial Sequence; identical to SEQ ID NO: 7723
  GFR-binding peptide
  MOD_RES (6)..(7): Xaa is C or S
  MOD_RES (21)..(22)..(23)..(24)..(25): Xaa is A or G
  MOD_RES (26)..(27)..(28)..(29): Xaa is A or G or is absent

SEQ ID NO: 15018 - protein, 33 aa, Artificial Sequence
  GFR-binding peptide
  MOD_RES (1)..(2): Xaa is C or S
XXVPTELEPLPMVYYDEYDKVVEQLSNEMVVEG

SEQ ID NO: 15019 - protein, 40 aa, Artificial Sequence
  GFR-binding peptide
  MOD_RES (5)..(6)..(39): Xaa is C or S
  MOD_RES (20)..(21)..(22)..(23)..(24): Xaa is A or G
  MOD_RES (25)..(26)..(27)..(28): Xaa is A or G or is absent
SAAPXXVPQALEPLPIVYYXXXXXXXXXEQLSNMIVRSXK

SEQ ID NO: 15020 - protein, 38 aa, Artificial Sequence
  GFR-binding peptide
  MOD_RES (6)..(38): Xaa is C or S
VTKPTXAPTKLSPISVLFIDDSSNVIYKQYENMVVRSX

SEQ ID NO: 15021 - protein, 38 aa, Artificial Sequence
  GFR-binding peptide
  MOD_RES (3)..(4)..(36)..(38): Xaa is C or S
PTXXVPTRLSAISILYLDSANNVVLKNYQDMVVESXGX

SEQ ID NO: 15022 - protein, 36 aa, Artificial Sequence
  GFR-binding peptide
  MOD_RES (1)..(35): Xaa is C or S
  MOD_RES (15)..(16)..(17)..(18)..(19): Xaa is A or G
  MOD_RES (20)..(21)..(22)..(23): Xaa is A or G or is absent
XVPTELEPLPMVYYXXXXXXXXXEQLSNEMVVEGXG

SEQ ID NO: 15023 - protein, 37 aa, Artificial Sequence
  GFR-binding peptide
  MOD_RES (2)..(3)..(37): Xaa is C or S
  MOD_RES (17)..(18)..(19)..(20)..(21): Xaa is A or G
  MOD_RES (22)..(23)..(24)..(25): Xaa is A or G or is absent
PXXAPTQLEPLTVLYYXXXXXXXXXEQLSNNMVVRAX

SEQ ID NO: 15024 - protein, 39 aa, Artificial Sequence; identical to SEQ ID NO: 7726
  GFR-binding peptide
  MOD_RES (3)..(4)..(36)..(38): Xaa is C or S

SEQ ID NO: 15025 - protein, 43 aa, Artificial Sequence; identical to SEQ ID NO: 7727
  GFR-binding peptide
  MOD_RES (6)..(7)..(40)..(42): Xaa is C or S
  MOD_RES (21)..(22)..(23)..(24)..(25): Xaa is A or G
  MOD_RES (26)..(27)..(28)..(29): Xaa is A or G or is absent

SEQ ID NO: 15026 - protein, 41 aa, Artificial Sequence
  GFR-binding peptide
  MOD_RES (4)..(5)..(39)..(41): Xaa is C or S
  MOD_RES (19)..(20)..(21)..(22)..(23): Xaa is A or G
  MOD_RES (24)..(25)..(26)..(27): Xaa is A or G or is absent
PKAXXVPTELEPLTMLYYXXXXXXXXXEQLSNEMVVEGXGX

SEQ ID NO: 15027 - protein, 37 aa, Artificial Sequence
  GFR-binding peptide
  MOD_RES (34)..(36): Xaa is C or S
  MOD_RES (14)..(15)..(16)..(17)..(18): Xaa is A or G
  MOD_RES (19)..(20)..(21)..(22): Xaa is A or G or is absent
VPTRLNAISILYFXXXXXXXXXLKKYRDMVVESXGXR

SEQ ID NO: 15028 - protein, 35 aa, Artificial Sequence
  GFR-binding peptide
  MOD_RES (1)..(35): Xaa is C or S
  MOD_RES (15)..(16)..(17)..(18)..(19): Xaa is A or G
  MOD_RES (20)..(21)..(22)..(23): Xaa is A or G or is absent
XVPTRLEPLPIVYYXXXXXXXXXEQLSNDMVVESX

SEQ ID NO: 15029 - protein, 36 aa, Artificial Sequence
  GFR-binding peptide
  MOD_RES (34)..(36): Xaa is C or S
  MOD_RES (14)..(15)..(16)..(17)..(18): Xaa is A or G
  MOD_RES (19)..(20)..(21)..(22): Xaa is A or G or is absent
VPTRLSPISILFIXXXXXXXXXYKQYEDMVVESXGX

SEQ ID NO: 15030 - protein, 38 aa, Artificial Sequence; identical to SEQ ID NO: 7730
  GFR-binding peptide
  MOD_RES (5)..(6): Xaa is C or S
  MOD_RES (20)..(21)..(22)..(23)..(24): Xaa is A or G
  MOD_RES (25)..(26)..(27)..(28): Xaa is A or G or is absent

SEQ ID NO: 15031 - protein, 39 aa, Artificial Sequence
  GFR-binding peptide
  MOD_RES (6)..(38): Xaa is C or S
VTKPTXAPTKLEPLTVLYYDDSSNVIEQLSNNMVVRSXG

SEQ ID NO: 15032 - protein, 33 aa, Artificial Sequence
  GFR-binding peptide
  MOD_RES (3)..(3): Xaa is C or S
PTXAPTKLEPLTVLYYDDSSNVIEQLSNNMVVR

SEQ ID NO: 15033 - protein, 36 aa, Artificial Sequence
  GFR-binding peptide
  MOD_RES (3)..(4)..(36): Xaa is C or S
KPXXAPTKLSPISVLFIDDSSNVIYKQYENMVVRSX

SEQ ID NO: 15034 - protein, 34 aa, Artificial Sequence; identical to SEQ ID NO: 7737
  GFR-binding peptide
  MOD_RES (1)..(34): Xaa is C or S
  MOD_RES (15)..(16)..(17)..(18)..(19): Xaa is A or G
  MOD_RES (20)..(21)..(22)..(23): Xaa is A or G or is absent

SEQ ID NO: 15035 - protein, 44 aa, Artificial Sequence
  GFR-binding peptide
  MOD_RES (6)..(7)..(41)..(43): Xaa is C or S
  MOD_RES (21)..(22)..(23)..(24)..(25): Xaa is A or G
  MOD_RES (26)..(27)..(28)..(29): Xaa is A or G or is absent
YVPKPXXAPTKLEPLTVLYYXXXXXXXXXEQLSNNMVVRSXGXH

SEQ ID NO: 15036 - protein, 41 aa, Artificial Sequence
  GFR-binding peptide
  MOD_RES (5)..(6)..(39)..(41): Xaa is C or S
  MOD_RES (20)..(21)..(22)..(23)..(24): Xaa is A or G
  MOD_RES (25)..(26)..(27)..(28): Xaa is A or G or is absent
SASPXXVPQDLEPLTILYYXXXXXXXXXEQLSNMVVKSXKX

SEQ ID NO: 15037 - protein, 37 aa, Artificial Sequence
  GFR-binding peptide
  MOD_RES (2)..(3)..(37): Xaa is C or S
  MOD_RES (17)..(18)..(19)..(20)..(21): Xaa is A or G
  MOD_RES (22)..(23)..(24)..(25): Xaa is A or G or is absent
TXXVPTRLSPISILFIXXXXXXXXXYKQYEDMVVESX

SEQ ID NO: 15038 - protein, 41 aa, Artificial Sequence
  GFR-binding peptide
  MOD_RES (6)..(7)..(41): Xaa is C or S
  MOD_RES (21)..(22)..(23)..(24)..(25): Xaa is A or G
  MOD_RES (26)..(27)..(28)..(29): Xaa is A or G or is absent
STPPTXXVPTRLNAISILYFXXXXXXXXXLKKYRDMVVESX

SEQ ID NO: 15039 - protein, 41 aa, Artificial Sequence
  GFR-binding peptide
  MOD_RES (3)..(4)..(38)..(40): Xaa is C or S
  MOD_RES (18)..(19)..(20)..(21)..(22): Xaa is A or G
  MOD_RES (23)..(24)..(25)..(26): Xaa is A or G or is absent
KAXXVPTELSPISMLFIXXXXXXXXXYKQYEEMVVEGXGXR

SEQ ID NO: 15040 - protein, 39 aa, Artificial Sequence; identical to SEQ ID NO: 7740
  GFR-binding peptide
  MOD_RES (6)..(7): Xaa is C or S
  MOD_RES (21)..(22)..(23)..(24)..(25): Xaa is A or G
  MOD_RES (26)..(27)..(28)..(29): Xaa is A or G or is absent

SEQ ID NO: 15041 - protein, 39 aa, Artificial Sequence
  GFR-binding peptide
  MOD_RES (5)..(6)..(37)..(39): Xaa is C or S
SAAPXXVPQALEPLTILYYVGRKPKVEQLSNMIVRSXKX

SEQ ID NO: 15042 - protein, 34 aa, Artificial Sequence
  GFR-binding peptide
  MOD_RES (1)..(2)..(34): Xaa is C or S
XXVPTRLSAISILYLDSANNVVLKNYQDMVVESX

SEQ ID NO: 15043 - protein, 34 aa, Artificial Sequence
  GFR-binding peptide
  MOD_RES (1)..(1): Xaa is C or S
  MOD_RES (15)..(16)..(17)..(18)..(19): Xaa is A or G
  MOD_RES (20)..(21)..(22)..(23): Xaa is A or G or is absent
XAPTQLEPLTVLYYXXXXXXXXXEQLSNNMVVRA

SEQ ID NO: 15044 - protein, 34 aa, Artificial Sequence; identical to SEQ ID NO: 7743
  GFR-binding peptide
  MOD_RES (3)..(4): Xaa is C or S

SEQ ID NO: 15045 - protein, 36 aa, Artificial Sequence; identical to SEQ ID NO: 7745
  GFR-binding peptide
  MOD_RES (2)..(3)..(34)..(36): Xaa is C or S

SEQ ID NO: 15046 - protein, 41 aa, Artificial Sequence; identical to SEQ ID NO: 7748
  GFR-binding peptide
  MOD_RES (4)..(5)..(39)..(41): Xaa is C or S
  MOD_RES (19)..(20)..(21)..(22)..(23): Xaa is A or G
  MOD_RES (24)..(25)..(26)..(27): Xaa is A or G or is absent

SEQ ID NO: 15047 - protein, 42 aa, Artificial Sequence
  GFR-binding peptide
  MOD_RES (6)..(7)..(40)..(42): Xaa is C or S
  MOD_RES (21)..(22)..(23)..(24)..(25): Xaa is A or G
  MOD_RES (26)..(27)..(28)..(29): Xaa is A or G or is absent
ASAAPXXVPQALSPISILFIXXXXXXXXXYKQYEMIVRSXKX

SEQ ID NO: 15048 - protein, 39 aa, Artificial Sequence; identical to SEQ ID NO: 7749
  GFR-binding peptide
  MOD_RES (4)..(5)..(38): Xaa is C or S
  MOD_RES (19)..(20)..(21)..(22)..(23): Xaa is A or G
  MOD_RES (24)..(25)..(26)..(27): Xaa is A or G or is absent

SEQ ID NO: 15049 - protein, 40 aa, Artificial Sequence
  GFR-binding peptide
  MOD_RES (6)..(7)..(40): Xaa is C or S
  MOD_RES (21)..(22)..(23)..(24)..(25): Xaa is A or G
  MOD_RES (26)..(27)..(28)..(29): Xaa is A or G or is absent
ASAAPXXVPQALEPLTILYYXXXXXXXXXEQLSNMIVRSX

SEQ ID NO: 15050 - protein, 38 aa, Artificial Sequence; identical to SEQ ID NO: 7750
  GFR-binding peptide
  MOD_RES (4)..(38): Xaa is C or S
  MOD_RES (18)..(19)..(20)..(21)..(22): Xaa is A or G
  MOD_RES (23)..(24)..(25)..(26): Xaa is A or G or is absent

SEQ ID NO: 15051 - protein, 38 aa, Artificial Sequence
  GFR-binding peptide
  MOD_RES (1)..(35)..(37): Xaa is C or S
  MOD_RES (15)..(16)..(17)..(18)..(19): Xaa is A or G
  MOD_RES (20)..(21)..(22)..(23): Xaa is A or G or is absent
XVPTELEPLPMVYYXXXXXXXXXEQLSNEMVVEGXGXR

SEQ ID NO: 15052 - protein, 42 aa, Artificial Sequence
  GFR-binding peptide
  MOD_RES (4)..(5)..(39)..(41): Xaa is C or S
  MOD_RES (19)..(20)..(21)..(22)..(23): Xaa is A or G
  MOD_RES (24)..(25)..(26)..(27): Xaa is A or G or is absent
PKAXXVPTELEPLTMLYYXXXXXXXXXEQLSNEMVVEGXGXR

SEQ ID NO: 15053 - protein, 37 aa, Artificial Sequence
  GFR-binding peptide
  MOD_RES (2)..(36): Xaa is C or S
  MOD_RES (16)..(17)..(18)..(19)..(20): Xaa is A or G
  MOD_RES (21)..(22)..(23)..(24): Xaa is A or G or is absent
TXAPTKLSPISVLFIXXXXXXXXXYKQYENMVVRSXG

SEQ ID NO: 15054 - protein, 36 aa, Artificial Sequence; identical to SEQ ID NO: 7752
  GFR-binding peptide
  MOD_RES (2)..(3)..(36): Xaa is C or S
  MOD_RES (17)..(18)..(19)..(20)..(21): Xaa is A or G
  MOD_RES (22)..(23)..(24)..(25): Xaa is A or G or is absent

SEQ ID NO: 15055 - protein, 35 aa, Artificial Sequence
  GFR-binding peptide
  MOD_RES (34)..(34): Xaa is C or S
  MOD_RES (14)..(15)..(16)..(17)..(18): Xaa is A or G
  MOD_RES (19)..(20)..(21)..(22): Xaa is A or G or is absent
APTKLSPISVLFIXXXXXXXXXYKQYENMVVRSXG

SEQ ID NO: 15056 - protein, 41 aa, Artificial Sequence
  GFR-binding peptide
  MOD_RES (5)..(6)..(40): Xaa is C or S
  MOD_RES (20)..(21)..(22)..(23)..(24): Xaa is A or G
  MOD_RES (25)..(26)..(27)..(28): Xaa is A or G or is absent
VPKPXXAPTQLSPISVLFIXXXXXXXXXYKQYENMVVRAXG

SEQ ID NO: 15057 - protein, 39 aa, Artificial Sequence
  GFR-binding peptide
  MOD_RES (4)..(5)..(37)..(39): Xaa is C or S
PPTXXVPTRLEPLPIVYYDSANNVVEQLSNDMVVESXGX

SEQ ID NO: 15058 - protein, 41 aa, Artificial Sequence
  GFR-binding peptide
  MOD_RES (4)..(5)..(39)..(41): Xaa is C or S
  MOD_RES (19)..(20)..(21)..(22)..(23): Xaa is A or G
  MOD_RES (24)..(25)..(26)..(27): Xaa is A or G or is absent
PPTXXVPTRLSPISILFIXXXXXXXXXYKQYEDMVVESXGX

SEQ ID NO: 15059 - protein, 40 aa, Artificial Sequence
  GFR-binding peptide
  MOD_RES (5)..(6)..(39): Xaa is C or S
  MOD_RES (20)..(21)..(22)..(23)..(24): Xaa is A or G
  MOD_RES (25)..(26)..(27)..(28): Xaa is A or G or is absent
SASPXXVSQDLEPLPIVYYXXXXXXXXXEQLSNMIVKSXK

SEQ ID NO: 15060 - protein, 38 aa, Artificial Sequence
  GFR-binding peptide
  MOD_RES (3)..(4)..(38): Xaa is C or S
  MOD_RES (18)..(19)..(20)..(21)..(22): Xaa is A or G
  MOD_RES (23)..(24)..(25)..(26): Xaa is A or G or is absent
KAXXVPTELEPLTMLYYXXXXXXXXXEQLSNDMVVEGX

SEQ ID NO: 15061 - protein, 39 aa, Artificial Sequence; identical to SEQ ID NO: 7756
  GFR-binding peptide
  MOD_RES (5)..(39): Xaa is C or S
  MOD_RES (19)..(20)..(21)..(22)..(23): Xaa is A or G
  MOD_RES (24)..(25)..(26)..(27): Xaa is A or G or is absent

SEQ ID NO: 15062 - protein, 38 aa, Artificial Sequence
  GFR-binding peptide
  MOD_RES (2)..(3)..(37): Xaa is C or S
  MOD_RES (17)..(18)..(19)..(20)..(21): Xaa is A or G
  MOD_RES (22)..(23)..(24)..(25): Xaa is A or G or is absent
TXXVPTRLSPISILFIXXXXXXXXXYKQYEDMVVESXG

SEQ ID NO: 15063 - protein, 34 aa, Artificial Sequence
  GFR-binding peptide
  MOD_RES (2)..(3): Xaa is C or S
TXXVPTRLEPLTILYYDSANNVVEQLSNDMVVES

SEQ ID NO: 15064 - protein, 39 aa, Artificial Sequence
  GFR-binding peptide
  MOD_RES (6)..(6): Xaa is C or S
  MOD_RES (20)..(21)..(22)..(23)..(24): Xaa is A or G
  MOD_RES (25)..(26)..(27)..(28): Xaa is A or G or is absent
VTKPTXAPTKLEPLTVLYYXXXXXXXXXEQLSNNMVVRS

SEQ ID NO: 15065 - protein, 34 aa, Artificial Sequence
  GFR-binding peptide
  MOD_RES (3)..(4): Xaa is C or S
KPXXAPTKLEPLTVLYYDDSSNVIEQLSNNMVVR

SEQ ID NO: 15066 - protein, 31 aa, Artificial Sequence
  GFR-binding peptide
  MOD_RES (1)..(1): Xaa is C or S
XAPTKLEPLTVLYYDDSSNVIEQLSNNMVVR

SEQ ID NO: 15067 - protein, 33 aa, Artificial Sequence
  GFR-binding peptide
  MOD_RES (1)..(2): Xaa is C or S
XXVPTELSPISMLFIDEYDKVVYKQYEEMVVEG

SEQ ID NO: 15068 - protein, 39 aa, Artificial Sequence; identical to SEQ ID NO: 7767
  GFR-binding peptide
  MOD_RES (4)..(5)..(37)..(39): Xaa is C or S

SEQ ID NO: 15069 - protein, 40 aa, Artificial Sequence; identical to SEQ ID NO: 7768
  GFR-binding peptide
  MOD_RES (3)..(4)..(38)..(40): Xaa is C or S
  MOD_RES (18)..(19)..(20)..(21)..(22): Xaa is A or G
  MOD_RES (23)..(24)..(25)..(26): Xaa is A or G or is absent

SEQ ID NO: 15070 - protein, 34 aa, Artificial Sequence
  GFR-binding peptide
  MOD_RES (32)..(34): Xaa is C or S
APTQLEPLTVLYYDDSSNVIEQLSNNMVVRAXGX

SEQ ID NO: 15071 - protein, 38 aa, Artificial Sequence
  GFR-binding peptide
  MOD_RES (3)..(4)..(36)..(38): Xaa is C or S
PTXXVPTRLEPLPIVYYDSANNVVEQLSNDMVVESXGX

SEQ ID NO: 15072 - protein, 38 aa, Artificial Sequence
  GFR-binding peptide
  MOD_RES (2)..(3)..(37): Xaa is C or S
  MOD_RES (17)..(18)..(19)..(20)..(21): Xaa is A or G
  MOD_RES (22)..(23)..(24)..(25): Xaa is A or G or is absent
AXXVPTELSPISMLFIXXXXXXXXXYKQYEDMVVEGXG

SEQ ID NO: 15073 - protein, 38 aa, Artificial Sequence
  GFR-binding peptide
  MOD_RES (1)..(35)..(37): Xaa is C or S
  MOD_RES (15)..(16)..(17)..(18)..(19): Xaa is A or G
  MOD_RES (20)..(21)..(22)..(23): Xaa is A or G or is absent
XVPTELEPLTMLYYXXXXXXXXXEQLSNDMVVEGXGXR

SEQ ID NO: 15074 - protein, 34 aa, Artificial Sequence
  GFR-binding peptide
  MOD_RES (2)..(3): Xaa is C or S
PXXAPTKLSPISVLFIDDSSNVIYKQYENMVVRS

SEQ ID NO: 15075 - protein, 40 aa, Artificial Sequence
  GFR-binding peptide
  MOD_RES (4)..(5)..(37)..(39): Xaa is C or S
PKAXXVPTELSPISMLFIDENEKVVYKQYEDMVVEGXGXR

SEQ ID NO: 15076 - protein, 40 aa, Artificial Sequence
  GFR-binding peptide
  MOD_RES (4)..(5)..(39): Xaa is C or S
  MOD_RES (19)..(20)..(21)..(22)..(23): Xaa is A or G
  MOD_RES (24)..(25)..(26)..(27): Xaa is A or G or is absent
PKAXXVPTELSPISMLFIXXXXXXXXXYKQYEEMVVEGXG

SEQ ID NO: 15077 - protein, 36 aa, Artificial Sequence; identical to SEQ ID NO: 7771
  GFR-binding peptide
  MOD_RES (4)..(5)..(36): Xaa is C or S

SEQ ID NO: 15078 - protein, 43 aa, Artificial Sequence
  GFR-binding peptide
  MOD_RES (5)..(6)..(40)..(42): Xaa is C or S
  MOD_RES (20)..(21)..(22)..(23)..(24): Xaa is A or G
  MOD_RES (25)..(26)..(27)..(28): Xaa is A or G or is absent
VPKPXXAPTQLSPISVLFIXXXXXXXXXYKQYENMVVRAXGXH

SEQ ID NO: 15079 - protein, 38 aa, Artificial Sequence
  GFR-binding peptide
  MOD_RES (4)..(5)..(37): Xaa is C or S
PKAXXVPTELEPLTMLYYDENEKVVEQLSNDMVVEGXG

SEQ ID NO: 15080 - protein, 37 aa, Artificial Sequence
  GFR-binding peptide
  MOD_RES (3)..(4)..(35)..(37): Xaa is C or S
SPXXVSQDLSPISILFIIGKTPKIYKQYEMIVKSXKX

SEQ ID NO: 15081 - protein, 37 aa, Artificial Sequence
  GFR-binding peptide
  MOD_RES (34)..(36): Xaa is C or S
  MOD_RES (14)..(15)..(16)..(17)..(18): Xaa is A or G
  MOD_RES (19)..(20)..(21)..(22): Xaa is A or G or is absent
VPTRLSPISILFIXXXXXXXXXYKQYEDMVVESXGXR

SEQ ID NO: 15082 - protein, 34 aa, Artificial Sequence; identical to SEQ ID NO: 7777
  GFR-binding peptide
  MOD_RES (33)..(33): Xaa is C or S
  MOD_RES (14)..(15)..(16)..(17)..(18): Xaa is A or G
  MOD_RES (19)..(20)..(21)..(22): Xaa is A or G or is absent

SEQ ID NO: 15083 - protein, 38 aa, Artificial Sequence; identical to SEQ ID NO: 7778
  GFR-binding peptide
  MOD_RES (3)..(4)..(36)..(38): Xaa is C or S

SEQ ID NO: 15084 - protein, 34 aa, Artificial Sequence
  GFR-binding peptide
  MOD_RES (1)..(2)..(33): Xaa is C or S
XXVPQDLEPLPIVYYVGRTPKVEQLSNMVVKSXK

SEQ ID NO: 15085 - protein, 37 aa, Artificial Sequence; identical to SEQ ID NO: 7780
  GFR-binding peptide
  MOD_RES (5)..(6)..(37): Xaa is C or S

SEQ ID NO: 15086 - protein, 39 aa, Artificial Sequence; identical to SEQ ID NO: 7781
  GFR-binding peptide
  MOD_RES (4)..(5)..(39): Xaa is C or S
  MOD_RES (19)..(20)..(21)..(22)..(23): Xaa is A or G
  MOD_RES (24)..(25)..(26)..(27): Xaa is A or G or is absent

SEQ ID NO: 15087 - protein, 39 aa, Artificial Sequence
  GFR-binding peptide
  MOD_RES (3)..(4)..(36)..(38): Xaa is C or S
PTXXVPTRLNAISILYFDSANNVVLKKYRDMVVESXGXR

SEQ ID NO: 15088 - protein, 39 aa, Artificial Sequence
  GFR-binding peptide
  MOD_RES (3)..(4)..(38): Xaa is C or S
  MOD_RES (18)..(19)..(20)..(21)..(22): Xaa is A or G
  MOD_RES (23)..(24)..(25)..(26): Xaa is A or G or is absent
KAXXVPTELSPISMLFIXXXXXXXXXYKQYEEMVVEGXG

SEQ ID NO: 15089 - protein, 34 aa, Artificial Sequence; identical to SEQ ID NO: 7784
  GFR-binding peptide
  MOD_RES (2)..(2): Xaa is C or S
  MOD_RES (16)..(17)..(18)..(19)..(20): Xaa is A or G
  MOD_RES (21)..(22)..(23)..(24): Xaa is A or G or is absent

SEQ ID NO: 15090 - protein, 34 aa, Artificial Sequence
  GFR-binding peptide
  MOD_RES (1)..(2): Xaa is C or S
  MOD_RES (16)..(17)..(18)..(19)..(20): Xaa is A or G
  MOD_RES (21)..(22)..(23)..(24): Xaa is A or G or is absent
XXVPTRLSAISILYLXXXXXXXXXLKNYQDMVVE

SEQ ID NO: 15091 - protein, 35 aa, Artificial Sequence
  GFR-binding peptide
  MOD_RES (3)..(4)..(35): Xaa is C or S
SPXXVPQDLEPLPIVYYVGRTPKVEQLSNMVVKSX

SEQ ID NO: 15092 - protein, 37 aa, Artificial Sequence
  GFR-binding peptide
  MOD_RES (5)..(5): Xaa is C or S
  MOD_RES (19)..(20)..(21)..(22)..(23): Xaa is A or G
  MOD_RES (24)..(25)..(26)..(27): Xaa is A or G or is absent
TKPTXAPTKLSPISVLFIXXXXXXXXXYKQYENMVVR

SEQ ID NO: 15093 - protein, 41 aa, Artificial Sequence
  GFR-binding peptide
  MOD_RES (5)..(6)..(40): Xaa is C or S
  MOD_RES (20)..(21)..(22)..(23)..(24): Xaa is A or G
  MOD_RES (25)..(26)..(27)..(28): Xaa is A or G or is absent
IPKAXXVPTELSPISMLFIXXXXXXXXXYKQYEDMVVEGXG

SEQ ID NO: 15094 - protein, 42 aa, Artificial Sequence
  GFR-binding peptide
  MOD_RES (5)..(6)..(40)..(42): Xaa is C or S
  MOD_RES (20)..(21)..(22)..(23)..(24): Xaa is A or G
  MOD_RES (25)..(26)..(27)..(28): Xaa is A or G or is absent
TPPTXXVPTRLEPLPIVYYXXXXXXXXXEQLSNDMVVESXGX

SEQ ID NO: 15095 - protein, 37 aa, Artificial Sequence; identical to SEQ ID NO: 7787
  GFR-binding peptide
  MOD_RES (1)..(2)..(36): Xaa is C or S
  MOD_RES (16)..(17)..(18)..(19)..(20): Xaa is A or G
  MOD_RES (21)..(22)..(23)..(24): Xaa is A or G or is absent

SEQ ID NO: 15096 - protein, 34 aa, Artificial Sequence
  GFR-binding peptide
  MOD_RES (1)..(33): Xaa is C or S
XAPTKLEPLPVVYYDDSSNVIEQLSNNMVVRSXG

SEQ ID NO: 15097 - protein, 35 aa, Artificial Sequence
  GFR-binding peptide
  MOD_RES (4)..(5): Xaa is C or S
PKPXXAPTKLEPLTVLYYDDSSNVIEQLSNNMVVR

SEQ ID NO: 15098 - protein, 36 aa, Artificial Sequence
  GFR-binding peptide
  MOD_RES (1)..(2)..(34)..(36): Xaa is C or S
XXVPTELEPLPMVYYDEYDKVVEQLSNEMVVEGXGX

SEQ ID NO: 15099 - protein, 32 aa, Artificial Sequence
  GFR-binding peptide
  MOD_RES (14)..(15)..(16)..(17)..(18): Xaa is A or G
  MOD_RES (19)..(20)..(21)..(22): Xaa is A or G or is absent
VPQALEPLPIVYYXXXXXXXXXEQLSNMIVRS

SEQ ID NO: 15100 - protein, 39 aa, Artificial Sequence
  GFR-binding peptide
  MOD_RES (4)..(5)..(38): Xaa is C or S
  MOD_RES (19)..(20)..(21)..(22)..(23): Xaa is A or G
  MOD_RES (24)..(25)..(26)..(27): Xaa is A or G or is absent
ASPXXVSQDLEPLPIVYYXXXXXXXXXEQLSNMIVKSXK

SEQ ID NO: 15101 - protein, 41 aa, Artificial Sequence; identical to SEQ ID NO: 7793
  GFR-binding peptide
  MOD_RES (4)..(5)..(39)..(41): Xaa is C or S
  MOD_RES (19)..(20)..(21)..(22)..(23): Xaa is A or G
  MOD_RES (24)..(25)..(26)..(27): Xaa is A or G or is absent

SEQ ID NO: 15102 - protein, 41 aa, Artificial Sequence
  GFR-binding peptide
  MOD_RES (6)..(40): Xaa is C or S
  MOD_RES (20)..(21)..(22)..(23)..(24): Xaa is A or G
  MOD_RES (25)..(26)..(27)..(28): Xaa is A or G or is absent
VTKPTXAPTKLSPISVLFIXXXXXXXXXYKQYENMVVRSXG

SEQ ID NO: 15103 - protein, 38 aa, Artificial Sequence
  GFR-binding peptide
  MOD_RES (2)..(3)..(35)..(37): Xaa is C or S
TXXVPTRLNAISILYFDSANNVVLKKYRDMVVESXGXR

SEQ ID NO: 15104 - protein, 42 aa, Artificial Sequence
  GFR-binding peptide
  MOD_RES (6)..(7)..(41): Xaa is C or S
  MOD_RES (21)..(22)..(23)..(24)..(25): Xaa is A or G
  MOD_RES (26)..(27)..(28)..(29): Xaa is A or G or is absent
YVPKPXXAPTKLEPLPVVYYXXXXXXXXXEQLSNNMVVRSXG

SEQ ID NO: 15105 - protein, 33 aa, Artificial Sequence
  GFR-binding peptide
  MOD_RES (1)..(2)..(33): Xaa is C or S
XXVPQDLSPISILFIVGRTPKVYKQYEMVVKSX

SEQ ID NO: 15106 - protein, 37 aa, Artificial Sequence
  GFR-binding peptide
  MOD_RES (4)..(5): Xaa is C or S
  MOD_RES (19)..(20)..(21)..(22)..(23): Xaa is A or G
  MOD_RES (24)..(25)..(26)..(27): Xaa is A or G or is absent
AAPXXVPQALEPLTILYYXXXXXXXXXEQLSNMIVRS

SEQ ID NO: 15107 - protein, 43 aa, Artificial Sequence
  GFR-binding peptide
  MOD_RES (6)..(7)..(40)..(42): Xaa is C or S
  MOD_RES (21)..(22)..(23)..(24)..(25): Xaa is A or G
  MOD_RES (26)..(27)..(28)..(29): Xaa is A or G or is absent
ASASPXXVPQDLSPISILFIXXXXXXXXXYKQYEMVVKSXKXS

SEQ ID NO: 15108 - protein, 36 aa, Artificial Sequence
  GFR-binding peptide
  MOD_RES (2)..(3): Xaa is C or S
  MOD_RES (17)..(18)..(19)..(20)..(21): Xaa is A or G
  MOD_RES (22)..(23)..(24)..(25): Xaa is A or G or is absent
TXXVPTRLSAISILYLXXXXXXXXXLKNYQDMVVES

SEQ ID NO: 15109 - protein, 44 aa, Artificial Sequence
  GFR-binding peptide
  MOD_RES (6)..(7)..(41)..(43): Xaa is C or S
  MOD_RES (21)..(22)..(23)..(24)..(25): Xaa is A or G
  MOD_RES (26)..(27)..(28)..(29): Xaa is A or G or is absent
STPPTXXVPTRLSAISILYLXXXXXXXXXLKNYQDMVVESXGXR

SEQ ID NO: 15110 - protein, 37 aa, Artificial Sequence
  GFR-binding peptide
  MOD_RES (4)..(5): Xaa is C or S
  MOD_RES (19)..(20)..(21)..(22)..(23): Xaa is A or G
  MOD_RES (24)..(25)..(26)..(27): Xaa is A or G or is absent
PKPXXAPTQLEPLPVVYYXXXXXXXXXEQLSNNMVVR

SEQ ID NO: 15111 - protein, 38 aa, Artificial Sequence
  GFR-binding peptide
  MOD_RES (3)..(4)..(38): Xaa is C or S
  MOD_RES (18)..(19)..(20)..(21)..(22): Xaa is A or G
  MOD_RES (23)..(24)..(25)..(26): Xaa is A or G or is absent
KPXXAPTKLEPLTVLYYXXXXXXXXXEQLSNNMVVRSX

SEQ ID NO: 15112 - protein, 35 aa, Artificial Sequence
  GFR-binding peptide
  MOD_RES (2)..(34): Xaa is C or S
TXAPTKLSPISVLFIDDSSNVIYKQYENMVVRSXG

SEQ ID NO: 15113 - protein, 41 aa, Artificial Sequence
  GFR-binding peptide
  MOD_RES (3)..(4)..(38)..(40): Xaa is C or S
  MOD_RES (18)..(19)..(20)..(21)..(22): Xaa is A or G
  MOD_RES (23)..(24)..(25)..(26): Xaa is A or G or is absent
PTXXVPTRLSPISILFIXXXXXXXXXYKQYEDMVVESXGXR

SEQ ID NO: 15114 - protein, 38 aa, Artificial Sequence
  GFR-binding peptide
  MOD_RES (1)..(2)..(35)..(37): Xaa is C or S
  MOD_RES (16)..(17)..(18)..(19)..(20): Xaa is A or G
  MOD_RES (21)..(22)..(23)..(24): Xaa is A or G or is absent
XXVPQALSPISILFIXXXXXXXXXYKQYEMIVRSXKXS

SEQ ID NO: 15115 - protein, 42 aa, Artificial Sequence; identical to SEQ ID NO: 7801
  GFR-binding peptide
  MOD_RES (4)..(5)..(39)..(41): Xaa is C or S
  MOD_RES (19)..(20)..(21)..(22)..(23): Xaa is A or G
  MOD_RES (24)..(25)..(26)..(27): Xaa is A or G or is absent

SEQ ID NO: 15116 - protein, 40 aa, Artificial Sequence; identical to SEQ ID NO: 7806
  GFR-binding peptide
  MOD_RES (2)..(3)..(37)..(39): Xaa is C or S
  MOD_RES (17)..(18)..(19)..(20)..(21): Xaa is A or G
  MOD_RES (22)..(23)..(24)..(25): Xaa is A or G or is absent

SEQ ID NO: 15117 - protein, 37 aa, Artificial Sequence
  GFR-binding peptide
  MOD_RES (4)..(5): Xaa is C or S
  MOD_RES (19)..(20)..(21)..(22)..(23): Xaa is A or G
  MOD_RES (24)..(25)..(26)..(27): Xaa is A or G or is absent
PKAXXVPTELSPISMLFIXXXXXXXXXYKQYEEMVVE

SEQ ID NO: 15118 - protein, 35 aa, Artificial Sequence
  GFR-binding peptide
  MOD_RES (3)..(4): Xaa is C or S
KAXXVPTELEPLPMVYYDENEKVVEQLSNDMVVEG

SEQ ID NO: 15119 - protein, 34 aa, Artificial Sequence
  GFR-binding peptide
  MOD_RES (2)..(2): Xaa is C or S
  MOD_RES (16)..(17)..(18)..(19)..(20): Xaa is A or G
  MOD_RES (21)..(22)..(23)..(24): Xaa is A or G or is absent
TXAPTKLSPISVLFIXXXXXXXXXYKQYENMVVR

SEQ ID NO: 15120 - protein, 40 aa, Artificial Sequence
  GFR-binding peptide
  MOD_RES (5)..(6)..(37)..(39): Xaa is C or S
SAAPXXVPQALEPLTILYYVGRKPKVEQLSNMIVRSXKXS

SEQ ID NO: 15121 - protein, 40 aa, Artificial Sequence; identical to SEQ ID NO: 7808
  GFR-binding peptide
  MOD_RES (5)..(6)..(40): Xaa is C or S
  MOD_RES (20)..(21)..(22)..(23)..(24): Xaa is A or G
  MOD_RES (25)..(26)..(27)..(28): Xaa is A or G or is absent

SEQ ID NO: 15122 - protein, 40 aa, Artificial Sequence; identical to SEQ ID NO: 7809
  GFR-binding peptide
  MOD_RES (5)..(6)..(39): Xaa is C or S
  MOD_RES (20)..(21)..(22)..(23)..(24): Xaa is A or G
  MOD_RES (25)..(26)..(27)..(28): Xaa is A or G or is absent

SEQ ID NO: 15123 - protein, 41 aa, Artificial Sequence
  GFR-binding peptide
  MOD_RES (4)..(5)..(39)..(41): Xaa is C or S
  MOD_RES (19)..(20)..(21)..(22)..(23): Xaa is A or G
  MOD_RES (24)..(25)..(26)..(27): Xaa is A or G or is absent
PKPXXAPTKLSPISVLFIXXXXXXXXXYKQYENMVVRSXGX

SEQ ID NO: 15124 - protein, 36 aa, Artificial Sequence
  GFR-binding peptide
  MOD_RES (2)..(3)..(36): Xaa is C or S
  MOD_RES (17)..(18)..(19)..(20)..(21): Xaa is A or G
  MOD_RES (22)..(23)..(24)..(25): Xaa is A or G or is absent
PXXVPQDLEPLPIVYYXXXXXXXXXEQLSNMVVKSX

SEQ ID NO: 15125 - protein, 35 aa, Artificial Sequence; identical to SEQ ID NO: 7816
  GFR-binding peptide
  MOD_RES (33)..(35): Xaa is C or S
  MOD_RES (14)..(15)..(16)..(17)..(18): Xaa is A or G
  MOD_RES (19)..(20)..(21)..(22): Xaa is A or G or is absent

SEQ ID NO: 15126 - protein, 38 aa, Artificial Sequence; identical to SEQ ID NO: 7817
  GFR-binding peptide
  MOD_RES (2)..(3)..(35)..(37): Xaa is C or S

SEQ ID NO: 15127 - protein, 39 aa, Artificial Sequence
  GFR-binding peptide
  MOD_RES (6)..(7): Xaa is C or S
  MOD_RES (21)..(22)..(23)..(24)..(25): Xaa is A or G
  MOD_RES (26)..(27)..(28)..(29): Xaa is A or G or is absent
ASASPXXVPQDLSPISILFIXXXXXXXXXYKQYEMVVKS

SEQ ID NO: 15128 - protein, 36 aa, Artificial Sequence; identical to SEQ ID NO: 7818
  GFR-binding peptide
  MOD_RES (33)..(35): Xaa is C or S
  MOD_RES (14)..(15)..(16)..(17)..(18): Xaa is A or G
  MOD_RES (19)..(20)..(21)..(22): Xaa is A or G or is absent

SEQ ID NO: 15129 - protein, 35 aa, Artificial Sequence; identical to SEQ ID NO: 7819
  GFR-binding peptide
  MOD_RES (2)..(34): Xaa is C or S

SEQ ID NO: 15130 - protein, 38 aa, Artificial Sequence
  GFR-binding peptide
  MOD_RES (4)..(5)..(37): Xaa is C or S
PKAXXVPTELSPISMLFIDENEKVVYKQYEDMVVEGXG

SEQ ID NO: 15131 - protein, 33 aa, Artificial Sequence
  GFR-binding peptide
  MOD_RES (1)..(1): Xaa is C or S
  MOD_RES (15)..(16)..(17)..(18)..(19): Xaa is A or G
  MOD_RES (20)..(21)..(22)..(23): Xaa is A or G or is absent
XVPTELEPLTMLYYXXXXXXXXXEQLSNEMVVE

SEQ ID NO: 15132 - protein, 33 aa, Artificial Sequence
  GFR-binding peptide
  MOD_RES (1)..(33): Xaa is C or S
XVPTRLSAISILYLDSANNVVLKNYQDMVVESX

SEQ ID NO: 15133 - protein, 38 aa, Artificial Sequence
  GFR-binding peptide
  MOD_RES (3)..(37): Xaa is C or S
  MOD_RES (17)..(18)..(19)..(20)..(21): Xaa is A or G
  MOD_RES (22)..(23)..(24)..(25): Xaa is A or G or is absent
PTXAPTKLSPISVLFIXXXXXXXXXYKQYENMVVRSXG

SEQ ID NO: 15134 - protein, 34 aa, Artificial Sequence
  GFR-binding peptide
  MOD_RES (1)..(2): Xaa is C or S
  MOD_RES (16)..(17)..(18)..(19)..(20): Xaa is A or G
  MOD_RES (21)..(22)..(23)..(24): Xaa is A or G or is absent
XXVPTELEPLTMLYYXXXXXXXXXEQLSNDMVVE

SEQ ID NO: 15135 - protein, 39 aa, Artificial Sequence
  GFR-binding peptide
  MOD_RES (4)..(5)..(38): Xaa is C or S
  MOD_RES (19)..(20)..(21)..(22)..(23): Xaa is A or G
  MOD_RES (24)..(25)..(26)..(27): Xaa is A or G or is absent
AAPXXVPQALEPLPIVYYXXXXXXXXXEQLSNMIVRSXK

SEQ ID NO: 15136 - protein, 32 aa, Artificial Sequence; identical to SEQ ID NO: 7823
  GFR-binding peptide
  MOD_RES (31)..(31): Xaa is C or S

SEQ ID NO: 15137 - protein, 33 aa, Artificial Sequence; identical to SEQ ID NO: 7824
  GFR-binding peptide
  MOD_RES (1)..(1): Xaa is C or S
  MOD_RES (15)..(16)..(17)..(18)..(19): Xaa is A or G
  MOD_RES (20)..(21)..(22)..(23): Xaa is A or G or is absent

SEQ ID NO: 15138 - protein, 41 aa, Artificial Sequence
  GFR-binding peptide
  MOD_RES (5)..(6)..(38)..(40): Xaa is C or S
VPKPXXAPTKLEPLPVVYYDDSSNVIEQLSNNMVVRSXGXH

SEQ ID NO: 15139 - protein, 36 aa, Artificial Sequence
  GFR-binding peptide
  MOD_RES (1)..(2)..(35): Xaa is C or S
  MOD_RES (16)..(17)..(18)..(19)..(20): Xaa is A or G
  MOD_RES (21)..(22)..(23)..(24): Xaa is A or G or is absent
XXVPQALEPLTILYYXXXXXXXXXEQLSNMIVRSXK

SEQ ID NO: 15140 - protein, 40 aa, Artificial Sequence; identical to SEQ ID NO: 7829
  GFR-binding peptide
  MOD_RES (2)..(3)..(37)..(39): Xaa is C or S
  MOD_RES (17)..(18)..(19)..(20)..(21): Xaa is A or G
  MOD_RES (22)..(23)..(24)..(25): Xaa is A or G or is absent

SEQ ID NO: 15141 - protein, 40 aa, Artificial Sequence
  GFR-binding peptide
  MOD_RES (3)..(4)..(38)..(40): Xaa is C or S
  MOD_RES (18)..(19)..(20)..(21)..(22): Xaa is A or G
  MOD_RES (23)..(24)..(25)..(26): Xaa is A or G or is absent
KPXXAPTQLEPLTVLYYXXXXXXXXXEQLSNNMVVRAXGX

SEQ ID NO: 15142 - protein, 39 aa, Artificial Sequence
  GFR-binding peptide
  MOD_RES (5)..(6)..(38): Xaa is C or S
IPKAXXVPTELEPLPMVYYDEYDKVVEQLSNEMVVEGXG

SEQ ID NO: 15143 - protein, 39 aa, Artificial Sequence; identical to SEQ ID NO: 7832
  GFR-binding peptide
  MOD_RES (4)..(5)..(39): Xaa is C or S
  MOD_RES (19)..(20)..(21)..(22)..(23): Xaa is A or G
  MOD_RES (24)..(25)..(26)..(27): Xaa is A or G or is absent

SEQ ID NO: 15144 - protein, 32 aa, Artificial Sequence
  GFR-binding peptide
  MOD_RES (32)..(32): Xaa is C or S
VPTRLSAISILYLDSANNVVLKNYQDMVVESX

SEQ ID NO: 15145 - protein, 43 aa, Artificial Sequence
  GFR-binding peptide
  MOD_RES (6)..(7)..(41)..(43): Xaa is C or S
  MOD_RES (21)..(22)..(23)..(24)..(25): Xaa is A or G
  MOD_RES (26)..(27)..(28)..(29): Xaa is A or G or is absent
SIPKAXXVPTELEPLTMLYYXXXXXXXXXEQLSNEMVVEGXGX

SEQ ID NO: 15146 - protein, 39 aa, Artificial Sequence
  GFR-binding peptide
  MOD_RES (6)..(6): Xaa is C or S
  MOD_RES (20)..(21)..(22)..(23)..(24): Xaa is A or G
  MOD_RES (25)..(26)..(27)..(28): Xaa is A or G or is absent
VTKPTXAPTKLEPLPVVYYXXXXXXXXXEQLSNNMVVRS

SEQ ID NO: 15147 - protein, 38 aa, Artificial Sequence
  GFR-binding peptide
  MOD_RES (2)..(3)..(37): Xaa is C or S
  MOD_RES (17)..(18)..(19)..(20)..(21): Xaa is A or G
  MOD_RES (22)..(23)..(24)..(25): Xaa is A or G or is absent
PXXAPTKLEPLPVVYYXXXXXXXXXEQLSNNMVVRSXG

SEQ ID NO: 15148 - protein, 44 aa, Artificial Sequence
  GFR-binding peptide
  MOD_RES (6)..(7)..(41)..(43): Xaa is C or S
  MOD_RES (21)..(22)..(23)..(24)..(25): Xaa is A or G
  MOD_RES (26)..(27)..(28)..(29): Xaa is A or G or is absent
SIPKAXXVPTELEPLTMLYYXXXXXXXXXEQLSNEMVVEGXGXR

SEQ ID NO: 15149 - protein, 35 aa, Artificial Sequence; identical to SEQ ID NO: 7839
  GFR-binding peptide
  MOD_RES (2)..(3): Xaa is C or S
  MOD_RES (17)..(18)..(19)..(20)..(21): Xaa is A or G
  MOD_RES (22)..(23)..(24)..(25): Xaa is A or G or is absent

SEQ ID NO: 15150 - protein, 34 aa, Artificial Sequence
  GFR-binding peptide
  MOD_RES (2)..(3): Xaa is C or S
AXXVPTELEPLTMLYYDENEKVVEQLSNDMVVEG

SEQ ID NO: 15151 - protein, 37 aa, Artificial Sequence
  GFR-binding peptide
  MOD_RES (4)..(5)..(37): Xaa is C or S
PKPXXAPTKLSPISVLFIDDSSNVIYKQYENMVVRSX

SEQ ID NO: 15152 - protein, 36 aa, Artificial Sequence; identical to SEQ ID NO: 7843
  GFR-binding peptide
  MOD_RES (34)..(36): Xaa is C or S
  MOD_RES (14)..(15)..(16)..(17)..(18): Xaa is A or G
  MOD_RES (19)..(20)..(21)..(22): Xaa is A or G or is absent

SEQ ID NO: 15153 - protein, 38 aa, Artificial Sequence; identical to SEQ ID NO: 7844
  GFR-binding peptide
  MOD_RES (4)..(5): Xaa is C or S
  MOD_RES (19)..(20)..(21)..(22)..(23): Xaa is A or G
  MOD_RES (24)..(25)..(26)..(27): Xaa is A or G or is absent

SEQ ID NO: 15154 - protein, 30 aa, Artificial Sequence; identical to SEQ ID NO: 7845
  GFR-binding peptide

SEQ ID NO: 15155 - protein, 32 aa, Artificial Sequence
  GFR-binding peptide
  MOD_RES (14)..(15)..(16)..(17)..(18): Xaa is A or G
  MOD_RES (19)..(20)..(21)..(22): Xaa is A or G or is absent
VPQALEPLTILYYXXXXXXXXXEQLSNMIVRS

SEQ ID NO: 15156 - protein, 40 aa, Artificial Sequence
  GFR-binding peptide
  MOD_RES (4)..(38)..(40): Xaa is C or S
  MOD_RES (18)..(19)..(20)..(21)..(22): Xaa is A or G
  MOD_RES (23)..(24)..(25)..(26): Xaa is A or G or is absent
KPTXAPTKLSPISVLFIXXXXXXXXXYKQYENMVVRSXGX

SEQ ID NO: 15157 - protein, 38 aa, Artificial Sequence; identical to SEQ ID NO: 7846
  GFR-binding peptide
  MOD_RES (1)..(2)..(36)..(38): Xaa is C or S
  MOD_RES (16)..(17)..(18)..(19)..(20): Xaa is A or G
  MOD_RES (21)..(22)..(23)..(24): Xaa is A or G or is absent

SEQ ID NO: 15158 - protein, 37 aa, Artificial Sequence
  GFR-binding peptide
  MOD_RES (4)..(5): Xaa is C or S
  MOD_RES (19)..(20)..(21)..(22)..(23): Xaa is A or G
  MOD_RES (24)..(25)..(26)..(27): Xaa is A or G or is absent
PKPXXAPTQLEPLTVLYYXXXXXXXXXEQLSNNMVVR

SEQ ID NO: 15159 - protein, 36 aa, Artificial Sequence; identical to SEQ ID NO: 7847
  GFR-binding peptide
  MOD_RES (3)..(4): Xaa is C or S
  MOD_RES (18)..(19)..(20)..(21)..(22): Xaa is A or G
  MOD_RES (23)..(24)..(25)..(26): Xaa is A or G or is absent

SEQ ID NO: 15160 - protein, 34 aa, Artificial Sequence
  GFR-binding peptide
  MOD_RES (1)..(1): Xaa is C or S
  MOD_RES (15)..(16)..(17)..(18)..(19): Xaa is A or G
  MOD_RES (20)..(21)..(22)..(23): Xaa is A or G or is absent
XVPTELSPISMLFIXXXXXXXXXYKQYEDMVVEG

SEQ ID NO: 15161 - protein, 38 aa, Artificial Sequence
  GFR-binding peptide
  MOD_RES (1)..(35)..(37): Xaa is C or S
  MOD_RES (15)..(16)..(17)..(18)..(19): Xaa is A or G
  MOD_RES (20)..(21)..(22)..(23): Xaa is A or G or is absent
XVPTELSPISMLFIXXXXXXXXXYKQYEEMVVEGXGXR

SEQ ID NO: 15162 - protein, 40 aa, Artificial Sequence; identical to SEQ ID NO: 7854
  GFR-binding peptide
  MOD_RES (6)..(7)..(38)..(40): Xaa is C or S

SEQ ID NO: 15163 - protein, 34 aa, Artificial Sequence; identical to SEQ ID NO: 7856
  GFR-binding peptide
  MOD_RES (1)..(34): Xaa is C or S
  MOD_RES (15)..(16)..(17)..(18)..(19): Xaa is A or G
  MOD_RES (20)..(21)..(22)..(23): Xaa is A or G or is absent

SEQ ID NO: 15164 - protein, 38 aa, Artificial Sequence; identical to SEQ ID NO: 7857
  GFR-binding peptide
  MOD_RES (6)..(7)..(38): Xaa is C or S

SEQ ID NO: 15165 - protein, 40 aa, Artificial Sequence
  GFR-binding peptide
  MOD_RES (2)..(3)..(37)..(39): Xaa is C or S
  MOD_RES (17)..(18)..(19)..(20)..(21): Xaa is A or G
  MOD_RES (22)..(23)..(24)..(25): Xaa is A or G or is absent
AXXVPTELEPLTMLYYXXXXXXXXXEQLSNEMVVEGXGXR

SEQ ID NO: 15166 - protein, 37 aa, Artificial Sequence
  GFR-binding peptide
  MOD_RES (1)..(34)..(36): Xaa is C or S
  MOD_RES (15)..(16)..(17)..(18)..(19): Xaa is A or G
  MOD_RES (20)..(21)..(22)..(23): Xaa is A or G or is absent
XVPQDLEPLTILYYXXXXXXXXXEQLSNMVVKSXKXS

SEQ ID NO: 15167 - protein, 39 aa, Artificial Sequence; identical to SEQ ID NO: 7860
  GFR-binding peptide
  MOD_RES (5)..(6)..(37)..(39): Xaa is C or S

SEQ ID NO: 15168 - protein, 31 aa, Artificial Sequence
  GFR-binding peptide
APTKLSPISVLFIDDSSNVIYKQYENMVVRS

SEQ ID NO: 15169 - protein, 34 aa, Artificial Sequence; identical to SEQ ID NO: 7863
  GFR-binding peptide
  MOD_RES (3)..(4): Xaa is C or S

SEQ ID NO: 15170 - protein, 40 aa, Artificial Sequence
  GFR-binding peptide
  MOD_RES (6)..(7)..(39): Xaa is C or S
KIPKAXXVPTELSPISMLFIDENEKVVYKQYEDMVVEGXG

SEQ ID NO: 15171 - protein, 42 aa, Artificial Sequence; identical to SEQ ID NO: 7865
  GFR-binding peptide
  MOD_RES (5)..(6)..(40)..(42): Xaa is C or S
  MOD_RES (20)..(21)..(22)..(23)..(24): Xaa is A or G
  MOD_RES (25)..(26)..(27)..(28): Xaa is A or G or is absent

SEQ ID NO: 15172 - protein, 41 aa, Artificial Sequence; identical to SEQ ID NO: 7866
  GFR-binding peptide
  MOD_RES (5)..(6)..(40): Xaa is C or S
  MOD_RES (20)..(21)..(22)..(23)..(24): Xaa is A or G
  MOD_RES (25)..(26)..(27)..(28): Xaa is A or G or is absent

SEQ ID NO: 15173 - protein, 34 aa, Artificial Sequence
  GFR-binding peptide
  MOD_RES (1)..(34): Xaa is C or S
  MOD_RES (15)..(16)..(17)..(18)..(19): Xaa is A or G
  MOD_RES (20)..(21)..(22)..(23): Xaa is A or G or is absent
XVPQDLEPLPIVYYXXXXXXXXXEQLSNMVVKSX

SEQ ID NO: 15174 - protein, 35 aa, Artificial Sequence
  GFR-binding peptide
  MOD_RES (32)..(34): Xaa is C or S
VPTRLEPLPIVYYDSANNVVEQLSNDMVVESXGXR

SEQ ID NO: 15175 - protein, 40 aa, Artificial Sequence
  GFR-binding peptide
  MOD_RES (6)..(7)..(38)..(40): Xaa is C or S
ASAAPXXVPQALEPLTILYYVGRKPKVEQLSNMIVRSXKX

SEQ ID NO: 15176 - protein, 33 aa, Artificial Sequence
  GFR-binding peptide
  MOD_RES (1)..(32): Xaa is C or S
XVPQDLEPLPIVYYVGRTPKVEQLSNMVVKSXK

SEQ ID NO: 15177 - protein, 32 aa, Artificial Sequence
  GFR-binding peptide
  MOD_RES (1)..(1): Xaa is C or S
XAPTQLSPISVLFIDDSSNVIYKQYENMVVRA

SEQ ID NO: 15178 - protein, 36 aa, Artificial Sequence; identical to SEQ ID NO: 7874
  GFR-binding peptide
  MOD_RES (1)..(2)..(33)..(35): Xaa is C or S

SEQ ID NO: 15179 - protein, 36 aa, Artificial Sequence; identical to SEQ ID NO: 7875
  GFR-binding peptide
  MOD_RES (3)..(4)..(36): Xaa is C or S

SEQ ID NO: 15180 - protein, 34 aa, Artificial Sequence
  GFR-binding peptide
  MOD_RES (2)..(3)..(34): Xaa is C or S
PXXVPQALEPLTILYYVGRKPKVEQLSNMIVRSX

SEQ ID NO: 15181 - protein, 36 aa, Artificial Sequence; identical to SEQ ID NO: 7877
  GFR-binding peptide
  MOD_RES (5)..(6): Xaa is C or S

SEQ ID NO: 15182 - protein, 37 aa, Artificial Sequence
  GFR-binding peptide
  MOD_RES (6)..(7): Xaa is C or S
TVPKPXXAPTQLEPLTVLYYDDSSNVIEQLSNNMVVR

SEQ ID NO: 15183 - protein, 37 aa, Artificial Sequence
  GFR-binding peptide
  MOD_RES (5)..(6): Xaa is C or S
VPKPXXAPTQLEPLPVVYYDDSSNVIEQLSNNMVVRA

SEQ ID NO: 15184 - protein, 35 aa, Artificial Sequence
  GFR-binding peptide
  MOD_RES (2)..(3): Xaa is C or S
  MOD_RES (17)..(18)..(19)..(20)..(21): Xaa is A or G
  MOD_RES (22)..(23)..(24)..(25): Xaa is A or G or is absent
TXXVPTRLEPLTILYYXXXXXXXXXEQLSNDMVVE

SEQ ID NO: 15185 - protein, 39 aa, Artificial Sequence
  GFR-binding peptide
  MOD_RES (4)..(5)..(39): Xaa is C or S
  MOD_RES (19)..(20)..(21)..(22)..(23): Xaa is A or G
  MOD_RES (24)..(25)..(26)..(27): Xaa is A or G or is absent
PKAXXVPTELEPLTMLYYXXXXXXXXXEQLSNEMVVEGX

SEQ ID NO: 15186 - protein, 35 aa, Artificial Sequence; identical to SEQ ID NO: 7881
  GFR-binding peptide
  MOD_RES (4)..(5): Xaa is C or S

SEQ ID NO: 15187 - protein, 32 aa, Artificial Sequence
  GFR-binding peptide
  MOD_RES (1)..(1): Xaa is C or S
XVPTELEPLPMVYYDEYDKVVEQLSNEMVVEG

SEQ ID NO: 15188 - protein, 31 aa, Artificial Sequence
  GFR-binding peptide
VPTELSPISMLFIDENEKVVYKQYEDMVVEG

SEQ ID NO: 15189 - protein, 37 aa, Artificial Sequence; identical to SEQ ID NO: 7884
  GFR-binding peptide
  MOD_RES (5)..(6)..(37): Xaa is C or S

SEQ ID NO: 15190 - protein, 44 aa, Artificial Sequence
  GFR-binding peptide
  MOD_RES (6)..(7)..(41)..(43): Xaa is C or S
  MOD_RES (21)..(22)..(23)..(24)..(25): Xaa is A or G
  MOD_RES (26)..(27)..(28)..(29): Xaa is A or G or is absent
TVPKPXXAPTQLEPLTVLYYXXXXXXXXXEQLSNNMVVRAXGXH

SEQ ID NO: 15191 - protein, 37 aa, Artificial Sequence; identical to SEQ ID NO: 7888
  GFR-binding peptide
  MOD_RES (4)..(5)..(37): Xaa is C or S

SEQ ID NO: 15192 - protein, 41 aa, Artificial Sequence; identical to SEQ ID NO: 7889
  GFR-binding peptide
  MOD_RES (4)..(5)..(38)..(40): Xaa is C or S
  MOD_RES (19)..(20)..(21)..(22)..(23): Xaa is A or G
  MOD_RES (24)..(25)..(26)..(27): Xaa is A or G or is absent

SEQ ID NO: 15193 - protein, 36 aa, Artificial Sequence
  GFR-binding peptide
  MOD_RES (1)..(35): Xaa is C or S
  MOD_RES (15)..(16)..(17)..(18)..(19): Xaa is A or G
  MOD_RES (20)..(21)..(22)..(23): Xaa is A or G or is absent
XAPTQLEPLPVVYYXXXXXXXXXEQLSNNMVVRAXG

SEQ ID NO: 15194 - protein, 38 aa, Artificial Sequence
  GFR-binding peptide
  MOD_RES (4)..(5)..(37): Xaa is C or S
PKPXXAPTQLSPISVLFIDDSSNVIYKQYENMVVRAXG

SEQ ID NO: 15195 - protein, 40 aa, Artificial Sequence; identical to SEQ ID NO: 7898
  GFR-binding peptide
  MOD_RES (6)..(7)..(40): Xaa is C or S
  MOD_RES (21)..(22)..(23)..(24)..(25): Xaa is A or G
  MOD_RES (26)..(27)..(28)..(29): Xaa is A or G or is absent

SEQ ID NO: 15196 - protein, 37 aa, Artificial Sequence
  GFR-binding peptide
  MOD_RES (2)..(3)..(35)..(37): Xaa is C or S
AXXVPTELEPLPMVYYDENEKVVEQLSNDMVVEGXGX

SEQ ID NO: 15197 - protein, 34 aa, Artificial Sequence; identical to SEQ ID NO: 7901
  GFR-binding peptide
  MOD_RES (34)..(34): Xaa is C or S
  MOD_RES (14)..(15)..(16)..(17)..(18): Xaa is A or G
  MOD_RES (19)..(20)..(21)..(22): Xaa is A or G or is absent

SEQ ID NO: 15198 - protein, 32 aa, Artificial Sequence
  GFR-binding peptide
  MOD_RES (14)..(15)..(16)..(17)..(18): Xaa is A or G
  MOD_RES (19)..(20)..(21)..(22): Xaa is A or G or is absent
VSQDLEPLPIVYYXXXXXXXXXEQLSNMIVKS

SEQ ID NO: 15199 - protein, 37 aa, Artificial Sequence
  GFR-binding peptide
  MOD_RES (4)..(5)..(36): Xaa is C or S
AAPXXVPQALEPLTILYYVGRKPKVEQLSNMIVRSXK

SEQ ID NO: 15200 - protein, 33 aa, Artificial Sequence
  GFR-binding peptide
  MOD_RES (1)..(1): Xaa is C or S
  MOD_RES (15)..(16)..(17)..(18)..(19): Xaa is A or G
  MOD_RES (20)..(21)..(22)..(23): Xaa is A or G or is absent
XVPQALEPLTILYYXXXXXXXXXEQLSNMIVRS

SEQ ID NO: 15201 - protein, 40 aa, Artificial Sequence; identical to SEQ ID NO: 7904
  GFR-binding peptide
  MOD_RES (6)..(7)..(40): Xaa is C or S
  MOD_RES (21)..(22)..(23)..(24)..(25): Xaa is A or G
  MOD_RES (26)..(27)..(28)..(29): Xaa is A or G or is absent

SEQ ID NO: 15202 - protein, 33 aa, Artificial Sequence
  GFR-binding peptide
  MOD_RES (1)..(1): Xaa is C or S
  MOD_RES (15)..(16)..(17)..(18)..(19): Xaa is A or G
  MOD_RES (20)..(21)..(22)..(23): Xaa is A or G or is absent
XVSQDLEPLPIVYYXXXXXXXXXEQLSNMIVKS

SEQ ID NO: 15203 - protein, 39 aa, Artificial Sequence
  GFR-binding peptide
  MOD_RES (6)..(6): Xaa is C or S
  MOD_RES (20)..(21)..(22)..(23)..(24): Xaa is A or G
  MOD_RES (25)..(26)..(27)..(28): Xaa is A or G or is absent
VTKPTXAPTKLSPISVLFIXXXXXXXXXYKQYENMVVRS

SEQ ID NO: 15204 - protein, 39 aa, Artificial Sequence; identical to SEQ ID NO: 7911
  GFR-binding peptide
  MOD_RES (4)..(36)..(38): Xaa is C or S

SEQ ID NO: 15205 - protein, 40 aa, Artificial Sequence
  GFR-binding peptide
  MOD_RES (3)..(4)..(37)..(39): Xaa is C or S
  MOD_RES (18)..(19)..(20)..(21)..(22): Xaa is A or G
  MOD_RES (23)..(24)..(25)..(26): Xaa is A or G or is absent
SPXXVSQDLEPLPIVYYXXXXXXXXXEQLSNMIVKSXKXS

SEQ ID NO: 15206 - protein, 34 aa, Artificial Sequence
  GFR-binding peptide
  MOD_RES (2)..(3): Xaa is C or S
TXXVPTRLSAISILYLDSANNVVLKNYQDMVVES

SEQ ID NO: 15207 - protein, 39 aa, Artificial Sequence
  GFR-binding peptide
  MOD_RES (2)..(3)..(36)..(38): Xaa is C or S
  MOD_RES (17)..(18)..(19)..(20)..(21): Xaa is A or G
  MOD_RES (22)..(23)..(24)..(25): Xaa is A or G or is absent
PXXVPQALSPISILFIXXXXXXXXXYKQYEMIVRSXKXS

SEQ ID NO: 15208 - protein, 35 aa, Artificial Sequence
  GFR-binding peptide
  MOD_RES (2)..(3): Xaa is C or S
  MOD_RES (17)..(18)..(19)..(20)..(21): Xaa is A or G
  MOD_RES (22)..(23)..(24)..(25): Xaa is A or G or is absent
PXXAPTQLSPISVLFIXXXXXXXXXYKQYENMVVR

SEQ ID NO: 15209 - protein, 39 aa, Artificial Sequence; identical to SEQ ID NO: 7920
  GFR-binding peptide
  MOD_RES (1)..(2)..(36)..(38): Xaa is C or S
  MOD_RES (16)..(17)..(18)..(19)..(20): Xaa is A or G
  MOD_RES (21)..(22)..(23)..(24): Xaa is A or G or is absent

SEQ ID NO: 15210 - protein, 35 aa, Artificial Sequence; identical to SEQ ID NO: 7921
  GFR-binding peptide
  MOD_RES (34)..(34): Xaa is C or S
  MOD_RES (14)..(15)..(16)..(17)..(18): Xaa is A or G
  MOD_RES (19)..(20)..(21)..(22): Xaa is A or G or is absent

SEQ ID NO: 15211 - protein, 38 aa, Artificial Sequence
  GFR-binding peptide
  MOD_RES (2)..(3)..(35)..(37): Xaa is C or S
AXXVPTELEPLTMLYYDEYDKVVEQLSNEMVVEGXGXR

SEQ ID NO: 15212 - protein, 37 aa, Artificial Sequence
  GFR-binding peptide
  MOD_RES (4)..(5)..(36): Xaa is C or S
ASPXXVSQDLSPISILFIIGKTPKIYKQYEMIVKSXK

SEQ ID NO: 15213 - protein, 39 aa, Artificial Sequence
  GFR-binding peptide
  MOD_RES (4)..(36)..(38): Xaa is C or S
KPTXAPTKLEPLTVLYYDDSSNVIEQLSNNMVVRSXGXH

SEQ ID NO: 15214 - protein, 40 aa, Artificial Sequence
  GFR-binding peptide
  MOD_RES (3)..(4)..(38)..(40): Xaa is C or S
  MOD_RES (18)..(19)..(20)..(21)..(22): Xaa is A or G
  MOD_RES (23)..(24)..(25)..(26): Xaa is A or G or is absent
KPXXAPTQLEPLPVVYYXXXXXXXXXEQLSNNMVVRAXGX

SEQ ID NO: 15215 - protein, 38 aa, Artificial Sequence; identical to SEQ ID NO: 7925
  GFR-binding peptide
  MOD_RES (1)..(35)..(37): Xaa is C or S
  MOD_RES (15)..(16)..(17)..(18)..(19): Xaa is A or G
  MOD_RES (20)..(21)..(22)..(23): Xaa is A or G or is absent

SEQ ID NO: 15216 - protein, 38 aa, Artificial Sequence
  GFR-binding peptide
  MOD_RES (2)..(3)..(36)..(38): Xaa is C or S
  MOD_RES (17)..(18)..(19)..(20)..(21): Xaa is A or G
  MOD_RES (22)..(23)..(24)..(25): Xaa is A or G or is absent
PXXVPQALEPLPIVYYXXXXXXXXXEQLSNMIVRSXKX

SEQ ID NO: 15217 - protein, 34 aa, Artificial Sequence
  GFR-binding peptide
  MOD_RES (1)..(1): Xaa is C or S
  MOD_RES (15)..(16)..(17)..(18)..(19): Xaa is A or G
  MOD_RES (20)..(21)..(22)..(23): Xaa is A or G or is absent
XVPTELEPLTMLYYXXXXXXXXXEQLSNDMVVEG

SEQ ID NO: 15218 - protein, 35 aa, Artificial Sequence; identical to SEQ ID NO: 7926
  GFR-binding peptide
  MOD_RES (1)..(35): Xaa is C or S
  MOD_RES (15)..(16)..(17)..(18)..(19): Xaa is A or G
  MOD_RES (20)..(21)..(22)..(23): Xaa is A or G or is absent

SEQ ID NO: 15219 - protein, 38 aa, Artificial Sequence; identical to SEQ ID NO: 7928
  GFR-binding peptide
  MOD_RES (2)..(36)..(38): Xaa is C or S
  MOD_RES (16)..(17)..(18)..(19)..(20): Xaa is A or G
  MOD_RES (21)..(22)..(23)..(24): Xaa is A or G or is absent

SEQ ID NO: 15220 - protein, 41 aa, Artificial Sequence
  GFR-binding peptide
  MOD_RES (6)..(38)..(40): Xaa is C or S
VTKPTXAPTKLEPLPVVYYDDSSNVIEQLSNNMVVRSXGXH

SEQ ID NO: 15221 - protein, 36 aa, Artificial Sequence
  GFR-binding peptide
  MOD_RES (1)..(2)..(33)..(35): Xaa is C or S
XXVPQDLSPISILFIVGRTPKVYKQYEMVVKSXKXS

SEQ ID NO: 15222 - protein, 41 aa, Artificial Sequence; identical to SEQ ID NO: 7930
  GFR-binding peptide
  MOD_RES (6)..(7)..(41): Xaa is C or S
  MOD_RES (21)..(22)..(23)..(24)..(25): Xaa is A or G
  MOD_RES (26)..(27)..(28)..(29): Xaa is A or G or is absent

SEQ ID NO: 15223 - protein, 34 aa, Artificial Sequence
  GFR-binding peptide
  MOD_RES (34)..(34): Xaa is C or S
  MOD_RES (14)..(15)..(16)..(17)..(18): Xaa is A or G
  MOD_RES (19)..(20)..(21)..(22): Xaa is A or G or is absent
VPTELEPLPMVYYXXXXXXXXXEQLSNDMVVEGX

SEQ ID NO: 15224 - protein, 38 aa, Artificial Sequence; identical to SEQ ID NO: 7932
  GFR-binding peptide
  MOD_RES (3)..(4)..(35)..(37): Xaa is C or S

SEQ ID NO: 15225 - protein, 36 aa, Artificial Sequence
  GFR-binding peptide
  MOD_RES (4)..(5): Xaa is C or S
PPTXXVPTRLEPLPIVYYDSANNVVEQLSNDMVVES

SEQ ID NO: 15226 - protein, 38 aa, Artificial Sequence; identical to SEQ ID NO: 7934
  GFR-binding peptide
  MOD_RES (6)..(7)..(38): Xaa is C or S

SEQ ID NO: 15227 - protein, 40 aa, Artificial Sequence
  GFR-binding peptide
  MOD_RES (5)..(6)..(40): Xaa is C or S
  MOD_RES (20)..(21)..(22)..(23)..(24): Xaa is A or G
  MOD_RES (25)..(26)..(27)..(28): Xaa is A or G or is absent
IPKAXXVPTELEPLTMLYYXXXXXXXXXEQLSNDMVVEGX

SEQ ID NO: 15228 - protein, 33 aa, Artificial Sequence
  GFR-binding peptide
  MOD_RES (32)..(32): Xaa is C or S
VPTRLSAISILYLDSANNVVLKNYQDMVVESXG

SEQ ID NO: 15229 - protein, 34 aa, Artificial Sequence; identical to SEQ ID NO: 7937
  GFR-binding peptide
  MOD_RES (2)..(3): Xaa is C or S

SEQ ID NO: 15230 - protein, 35 aa, Artificial Sequence
  GFR-binding peptide
  MOD_RES (34)..(34): Xaa is C or S
  MOD_RES (14)..(15)..(16)..(17)..(18): Xaa is A or G
  MOD_RES (19)..(20)..(21)..(22): Xaa is A or G or is absent
VPTRLEPLTILYYXXXXXXXXXEQLSNDMVVESXG

SEQ ID NO: 15231 - protein, 36 aa, Artificial Sequence
  GFR-binding peptide
  MOD_RES (1)..(2)..(34)..(36): Xaa is C or S
XXVPTELEPLPMVYYDENEKVVEQLSNDMVVEGXGX

SEQ ID NO: 15232 - protein, 34 aa, Artificial Sequence
  GFR-binding peptide
  MOD_RES (1)..(33): Xaa is C or S
XAPTQLEPLPVVYYDDSSNVIEQLSNNMVVRAXG

SEQ ID NO: 15233 - protein, 35 aa, Artificial Sequence
  GFR-binding peptide
  MOD_RES (1)..(2): Xaa is C or S
  MOD_RES (16)..(17)..(18)..(19)..(20): Xaa is A or G
  MOD_RES (21)..(22)..(23)..(24): Xaa is A or G or is absent
XXAPTQLEPLTVLYYXXXXXXXXXEQLSNNMVVRA

SEQ ID NO: 15234 - protein, 37 aa, Artificial Sequence
  GFR-binding peptide
  MOD_RES (1)..(34)..(36): Xaa is C or S
  MOD_RES (15)..(16)..(17)..(18)..(19): Xaa is A or G
  MOD_RES (20)..(21)..(22)..(23): Xaa is A or G or is absent
XVPQDLEPLPIVYYXXXXXXXXXEQLSNMVVKSXKXS

SEQ ID NO: 15235 - protein, 35 aa, Artificial Sequence
  GFR-binding peptide
  MOD_RES (1)..(35): Xaa is C or S
  MOD_RES (15)..(16)..(17)..(18)..(19): Xaa is A or G
  MOD_RES (20)..(21)..(22)..(23): Xaa is A or G or is absent
XVPTELEPLPMVYYXXXXXXXXXEQLSNDMVVEGX

SEQ ID NO: 15236 - protein, 41 aa, Artificial Sequence; identical to SEQ ID NO: 7948
  GFR-binding peptide
  MOD_RES (6)..(7)..(38)..(40): Xaa is C or S

SEQ ID NO: 15237 - protein, 32 aa, Artificial Sequence; identical to SEQ ID NO: 7949
  GFR-binding peptide
  MOD_RES (14)..(15)..(16)..(17)..(18): Xaa is A or G
  MOD_RES (19)..(20)..(21)..(22): Xaa is A or G or is absent

SEQ ID NO: 15238 - protein, 35 aa, Artificial Sequence
  GFR-binding peptide
  MOD_RES (2)..(3): Xaa is C or S
  MOD_RES (17)..(18)..(19)..(20)..(21): Xaa is A or G
  MOD_RES (22)..(23)..(24)..(25): Xaa is A or G or is absent
TXXVPTRLEPLPIVYYXXXXXXXXXEQLSNDMVVE

SEQ ID NO: 15239 - protein, 39 aa, Artificial Sequence
  GFR-binding peptide
  MOD_RES (6)..(7): Xaa is C or S
  MOD_RES (21)..(22)..(23)..(24)..(25): Xaa is A or G
  MOD_RES (26)..(27)..(28)..(29): Xaa is A or G or is absent
KIPKAXXVPTELEPLPMVYYXXXXXXXXXEQLSNDMVVE

SEQ ID NO: 15240 - protein, 39 aa, Artificial Sequence
  GFR-binding peptide
  MOD_RES (6)..(7): Xaa is C or S
  MOD_RES (21)..(22)..(23)..(24)..(25): Xaa is A or G
  MOD_RES (26)..(27)..(28)..(29): Xaa is A or G or is absent
KIPKAXXVPTELEPLTMLYYXXXXXXXXXEQLSNDMVVE

SEQ ID NO: 15241 - protein, 38 aa, Artificial Sequence; identical to SEQ ID NO: 7954
  GFR-binding peptide
  MOD_RES (2)..(3)..(37): Xaa is C or S
  MOD_RES (17)..(18)..(19)..(20)..(21): Xaa is A or G
  MOD_RES (22)..(23)..(24)..(25): Xaa is A or G or is absent

SEQ ID NO: 15242 - protein, 35 aa, Artificial Sequence
  GFR-binding peptide
  MOD_RES (1)..(2): Xaa is C or S
  MOD_RES (16)..(17)..(18)..(19)..(20): Xaa is A or G
  MOD_RES (21)..(22)..(23)..(24): Xaa is A or G or is absent
XXVPTELSPISMLFIXXXXXXXXXYKQYEDMVVEG

SEQ ID NO: 15243 - protein, 39 aa, Artificial Sequence
  GFR-binding peptide
  MOD_RES (2)..(3)..(37)..(39): Xaa is C or S
  MOD_RES (17)..(18)..(19)..(20)..(21): Xaa is A or G
  MOD_RES (22)..(23)..(24)..(25): Xaa is A or G or is absent
TXXVPTRLNAISILYFXXXXXXXXXLKKYRDMVVESXGX

SEQ ID NO: 15244 - protein, 32 aa, Artificial Sequence
  GFR-binding peptide
  MOD_RES (1)..(2): Xaa is C or S
XXVPTRLEPLPIVYYDSANNVVEQLSNDMVVE

SEQ ID NO: 15245 - protein, 38 aa, Artificial Sequence
  GFR-binding peptide
  MOD_RES (3)..(4)..(37): Xaa is C or S
  MOD_RES (18)..(19)..(20)..(21)..(22): Xaa is A or G
  MOD_RES (23)..(24)..(25)..(26): Xaa is A or G or is absent
APXXVPQALEPLTILYYXXXXXXXXXEQLSNMIVRSXK

SEQ ID NO: 15246 - protein, 35 aa, Artificial Sequence
  GFR-binding peptide
  MOD_RES (1)..(33)..(35): Xaa is C or S
XVPTRLNAISILYFDSANNVVLKKYRDMVVESXGX

SEQ ID NO: 15247 - protein, 33 aa, Artificial Sequence; identical to SEQ ID NO: 7958
  GFR-binding peptide
  MOD_RES (1)..(1): Xaa is C or S
  MOD_RES (15)..(16)..(17)..(18)..(19): Xaa is A or G
  MOD_RES (20)..(21)..(22)..(23): Xaa is A or G or is absent

SEQ ID NO: 15248 - protein, 39 aa, Artificial Sequence
  GFR-binding peptide
  MOD_RES (3)..(4)..(38): Xaa is C or S
  MOD_RES (18)..(19)..(20)..(21)..(22): Xaa is A or G
  MOD_RES (23)..(24)..(25)..(26): Xaa is A or G or is absent
PTXXVPTRLEPLTILYYXXXXXXXXXEQLSNDMVVESXG

SEQ ID NO: 15249 - protein, 36 aa, Artificial Sequence
  GFR-binding peptide
  MOD_RES (2)..(3)..(36): Xaa is C or S
  MOD_RES (17)..(18)..(19)..(20)..(21): Xaa is A or G
  MOD_RES (22)..(23)..(24)..(25): Xaa is A or G or is absent
PXXVPQALEPLPIVYYXXXXXXXXXEQLSNMIVRSX

SEQ ID NO: 15250 - protein, 36 aa, Artificial Sequence
  GFR-binding peptide
  MOD_RES (1)..(34)..(36): Xaa is C or S
  MOD_RES (15)..(16)..(17)..(18)..(19): Xaa is A or G
  MOD_RES (20)..(21)..(22)..(23): Xaa is A or G or is absent
XVPQDLEPLTILYYXXXXXXXXXEQLSNMVVKSXKX

SEQ ID NO: 15251 - protein, 37 aa, Artificial Sequence; identical to SEQ ID NO: 7962
  GFR-binding peptide
  MOD_RES (2)..(3)..(37): Xaa is C or S
  MOD_RES (17)..(18)..(19)..(20)..(21): Xaa is A or G
  MOD_RES (22)..(23)..(24)..(25): Xaa is A or G or is absent

SEQ ID NO: 15252 - protein, 37 aa, Artificial Sequence
  GFR-binding peptide
  MOD_RES (2)..(3)..(36): Xaa is C or S
  MOD_RES (17)..(18)..(19)..(20)..(21): Xaa is A or G
  MOD_RES (22)..(23)..(24)..(25): Xaa is A or G or is absent
PXXVPQALEPLTILYYXXXXXXXXXEQLSNMIVRSXK

SEQ ID NO: 15253 - protein, 31 aa, Artificial Sequence
  GFR-binding peptide
  MOD_RES (1)..(1): Xaa is C or S
XVPTRLEPLPIVYYDSANNVVEQLSNDMVVE

SEQ ID NO: 15254 - protein, 32 aa, Artificial Sequence; identical to SEQ ID NO: 7966
  GFR-binding peptide
  MOD_RES (1)..(32): Xaa is C or S

SEQ ID NO: 15255 - protein, 40 aa, Artificial Sequence
  GFR-binding peptide
  MOD_RES (4)..(5)..(39): Xaa is C or S
  MOD_RES (19)..(20)..(21)..(22)..(23): Xaa is A or G
  MOD_RES (24)..(25)..(26)..(27): Xaa is A or G or is absent
PKPXXAPTQLSPISVLFIXXXXXXXXXYKQYENMVVRAXG

SEQ ID NO: 15256 - protein, 31 aa, Artificial Sequence; identical to SEQ ID NO: 7967
  GFR-binding peptide
  MOD_RES (31)..(31): Xaa is C or S

SEQ ID NO: 15257 - protein, 37 aa, Artificial Sequence; identical to SEQ ID NO: 7969
  GFR-binding peptide
  MOD_RES (1)..(2)..(36): Xaa is C or S
  MOD_RES (16)..(17)..(18)..(19)..(20): Xaa is A or G
  MOD_RES (21)..(22)..(23)..(24): Xaa is A or G or is absent

SEQ ID NO: 15258 - protein, 35 aa, Artificial Sequence
  GFR-binding peptide
  MOD_RES (2)..(34): Xaa is C or S
TXAPTKLEPLTVLYYDDSSNVIEQLSNNMVVRSXG

SEQ ID NO: 15259 - protein, 36 aa, Artificial Sequence
  GFR-binding peptide
  MOD_RES (33)..(35): Xaa is C or S
  MOD_RES (14)..(15)..(16)..(17)..(18): Xaa is A or G
  MOD_RES (19)..(20)..(21)..(22): Xaa is A or G or is absent
VPQALSPISILFIXXXXXXXXXYKQYEMIVRSXKXS

SEQ ID NO: 15260 - protein, 40 aa, Artificial Sequence; identical to SEQ ID NO: 7972
  GFR-binding peptide
  MOD_RES (6)..(7)..(38)..(40): Xaa is C or S

SEQ ID NO: 15261 - protein, 42 aa, Artificial Sequence
  GFR-binding peptide
  MOD_RES (5)..(6)..(39)..(41): Xaa is C or S
  MOD_RES (20)..(21)..(22)..(23)..(24): Xaa is A or G
  MOD_RES (25)..(26)..(27)..(28): Xaa is A or G or is absent
SASPXXVPQDLSPISILFIXXXXXXXXXYKQYEMVVKSXKXS

SEQ ID NO: 15262 - protein, 38 aa, Artificial Sequence; identical to SEQ ID NO: 7973
  GFR-binding peptide
  MOD_RES (4)..(5)..(38): Xaa is C or S
  MOD_RES (19)..(20)..(21)..(22)..(23): Xaa is A or G
  MOD_RES (24)..(25)..(26)..(27): Xaa is A or G or is absent

SEQ ID NO: 15263 - protein, 42 aa, Artificial Sequence
  GFR-binding peptide
  MOD_RES (6)..(7)..(41): Xaa is C or S
  MOD_RES (21)..(22)..(23)..(24)..(25): Xaa is A or G
  MOD_RES (26)..(27)..(28)..(29): Xaa is A or G or is absent
YVPKPXXAPTKLEPLTVLYYXXXXXXXXXEQLSNNMVVRSXG

SEQ ID NO: 15264 - protein, 40 aa, Artificial Sequence
  GFR-binding peptide
  MOD_RES (3)..(4)..(37)..(39): Xaa is C or S
  MOD_RES (18)..(19)..(20)..(21)..(22): Xaa is A or G
  MOD_RES (23)..(24)..(25)..(26): Xaa is A or G or is absent
SPXXVSQDLSPISILFIXXXXXXXXXYKQYEMIVKSXKXS

SEQ ID NO: 15265 - protein, 39 aa, Artificial Sequence
  GFR-binding peptide
  MOD_RES (6)..(7): Xaa is C or S
  MOD_RES (21)..(22)..(23)..(24)..(25): Xaa is A or G
  MOD_RES (26)..(27)..(28)..(29): Xaa is A or G or is absent
SIPKAXXVPTELSPISMLFIXXXXXXXXXYKQYEEMVVE

SEQ ID NO: 15266 - protein, 37 aa, Artificial Sequence; identical to SEQ ID NO: 7974
  GFR-binding peptide
  MOD_RES (2)..(3)..(34)..(36): Xaa is C or S

SEQ ID NO: 15267 - protein, 36 aa, Artificial Sequence
  GFR-binding peptide
  MOD_RES (34)..(36): Xaa is C or S
  MOD_RES (14)..(15)..(16)..(17)..(18): Xaa is A or G
  MOD_RES (19)..(20)..(21)..(22): Xaa is A or G or is absent
VPTRLSAISILYLXXXXXXXXXLKNYQDMVVESXGX

SEQ ID NO: 15268 - protein, 35 aa, Artificial Sequence
  GFR-binding peptide
  MOD_RES (34)..(34): Xaa is C or S
  MOD_RES (14)..(15)..(16)..(17)..(18): Xaa is A or G
  MOD_RES (19)..(20)..(21)..(22): Xaa is A or G or is absent
APTKLEPLPVVYYXXXXXXXXXEQLSNNMVVRSXG

SEQ ID NO: 15269 - protein, 34 aa, Artificial Sequence
  GFR-binding peptide
  MOD_RES (2)..(3)..(34): Xaa is C or S
PXXVSQDLSPISILFIIGKTPKIYKQYEMIVKSX

SEQ ID NO: 15270 - protein, 35 aa, Artificial Sequence
  GFR-binding peptide
  MOD_RES (33)..(35): Xaa is C or S
  MOD_RES (14)..(15)..(16)..(17)..(18): Xaa is A or G
  MOD_RES (19)..(20)..(21)..(22): Xaa is A or G or is absent
VPQALEPLTILYYXXXXXXXXXEQLSNMIVRSXKX

SEQ ID NO: 15271 - protein, 39 aa, Artificial Sequence
  GFR-binding peptide
  MOD_RES (6)..(7)..(38): Xaa is C or S
ASASPXXVSQDLSPISILFIIGKTPKIYKQYEMIVKSXK

SEQ ID NO: 15272 - protein, 42 aa, Artificial Sequence; identical to SEQ ID NO: 7977
  GFR-binding peptide
  MOD_RES (5)..(6)..(39)..(41): Xaa is C or S
  MOD_RES (20)..(21)..(22)..(23)..(24): Xaa is A or G
  MOD_RES (25)..(26)..(27)..(28): Xaa is A or G or is absent

SEQ ID NO: 15273 - protein, 36 aa, Artificial Sequence
  GFR-binding peptide
  MOD_RES (6)..(6): Xaa is C or S
VTKPTXAPTKLEPLPVVYYDDSSNVIEQLSNNMVVR

SEQ ID NO: 15274 - protein, 35 aa, Artificial Sequence
  GFR-binding peptide
  MOD_RES (1)..(34): Xaa is C or S
  MOD_RES (15)..(16)..(17)..(18)..(19): Xaa is A or G
  MOD_RES (20)..(21)..(22)..(23): Xaa is A or G or is absent
XVPQALEPLPIVYYXXXXXXXXXEQLSNMIVRSXK

SEQ ID NO: 15275 - protein, 43 aa, Artificial Sequence; identical to SEQ ID NO: 7981
  GFR-binding peptide
  MOD_RES (7)..(41)..(43): Xaa is C or S
  MOD_RES (21)..(22)..(23)..(24)..(25): Xaa is A or G
  MOD_RES (26)..(27)..(28)..(29): Xaa is A or G or is absent

SEQ ID NO: 15276 - protein, 41 aa, Artificial Sequence
  GFR-binding peptide
  MOD_RES (4)..(5)..(38)..(40): Xaa is C or S
  MOD_RES (19)..(20)..(21)..(22)..(23): Xaa is A or G
  MOD_RES (24)..(25)..(26)..(27): Xaa is A or G or is absent
ASPXXVSQDLSPISILFIXXXXXXXXXYKQYEMIVKSXKXS

SEQ ID NO: 15277 - protein, 44 aa, Artificial Sequence; identical to SEQ ID NO: 7986
  GFR-binding peptide
  MOD_RES (6)..(7)..(41)..(43): Xaa is C or S
  MOD_RES (21)..(22)..(23)..(24)..(25): Xaa is A or G
  MOD_RES (26)..(27)..(28)..(29): Xaa is A or G or is absent

SEQ ID NO: 15278 - protein, 35 aa, Artificial Sequence
  GFR-binding peptide
  MOD_RES (1)..(33)..(35): Xaa is C or S
XVPTRLEPLPIVYYDSANNVVEQLSNDMVVESXGX

SEQ ID NO: 15279 - protein, 34 aa, Artificial Sequence
  GFR-binding peptide
  MOD_RES (2)..(3): Xaa is C or S
AXXVPTELEPLPMVYYDEYDKVVEQLSNEMVVEG

SEQ ID NO: 15280 - protein, 33 aa, Artificial Sequence
  GFR-binding peptide
  MOD_RES (2)..(3): Xaa is C or S
AXXVPTELSPISMLFIDEYDKVVYKQYEEMVVE

SEQ ID NO: 15281 - protein, 34 aa, Artificial Sequence
  GFR-binding peptide
  MOD_RES (2)..(3)..(34): Xaa is C or S
PXXVPQDLEPLPIVYYVGRTPKVEQLSNMVVKSX

SEQ ID NO: 15282 - protein, 35 aa, Artificial Sequence; identical to SEQ ID NO: 7994
  GFR-binding peptide
  MOD_RES (1)..(32)..(34): Xaa is C or S

SEQ ID NO: 15283 - protein, 40 aa, Artificial Sequence
  GFR-binding peptide
  MOD_RES (5)..(6)..(40): Xaa is C or S
  MOD_RES (20)..(21)..(22)..(23)..(24): Xaa is A or G
  MOD_RES (25)..(26)..(27)..(28): Xaa is A or G or is absent
IPKAXXVPTELEPLPMVYYXXXXXXXXXEQLSNDMVVEGX

SEQ ID NO: 15284 - protein, 32 aa, Artificial Sequence
  GFR-binding peptide
  MOD_RES (32)..(32): Xaa is C or S
VPTELSPISMLFIDENEKVVYKQYEDMVVEGX

SEQ ID NO: 15285 - protein, 39 aa, Artificial Sequence
  GFR-binding peptide
  MOD_RES (3)..(4)..(36)..(38): Xaa is C or S
KAXXVPTELSPISMLFIDEYDKVVYKQYEEMVVEGXGXR

SEQ ID NO: 15286 - protein, 38 aa, Artificial Sequence
  GFR-binding peptide
  MOD_RES (4)..(5)..(37): Xaa is C or S
PKPXXAPTQLEPLPVVYYDDSSNVIEQLSNNMVVRAXG

SEQ ID NO: 15287 - protein, 33 aa, Artificial Sequence
  GFR-binding peptide
  MOD_RES (1)..(1): Xaa is C or S
  MOD_RES (15)..(16)..(17)..(18)..(19): Xaa is A or G
  MOD_RES (20)..(21)..(22)..(23): Xaa is A or G or is absent
XVSQDLSPISILFIXXXXXXXXXYKQYEMIVKS

SEQ ID NO: 15288 - protein, 41 aa, Artificial Sequence; identical to SEQ ID NO: 7999
  GFR-binding peptide
  MOD_RES (5)..(6)..(38)..(40): Xaa is C or S

SEQ ID NO: 15289 - protein, 38 aa, Artificial Sequence
  GFR-binding peptide
  MOD_RES (3)..(4)..(38): Xaa is C or S
  MOD_RES (18)..(19)..(20)..(21)..(22): Xaa is A or G
  MOD_RES (23)..(24)..(25)..(26): Xaa is A or G or is absent
KAXXVPTELEPLPMVYYXXXXXXXXXEQLSNDMVVEGX

SEQ ID NO: 15290 - protein, 36 aa, Artificial Sequence
  GFR-binding peptide
  MOD_RES (2)..(3)..(34)..(36): Xaa is C or S
PXXVSQDLSPISILFIIGKTPKIYKQYEMIVKSXKX

SEQ ID NO: 15291 - protein, 43 aa, Artificial Sequence
  GFR-binding peptide
  MOD_RES (5)..(6)..(40)..(42): Xaa is C or S
  MOD_RES (20)..(21)..(22)..(23)..(24): Xaa is A or G
  MOD_RES (25)..(26)..(27)..(28): Xaa is A or G or is absent
IPKAXXVPTELSPISMLFIXXXXXXXXXYKQYEEMVVEGXGXR

SEQ ID NO: 15292 - protein, 37 aa, Artificial Sequence
  GFR-binding peptide
  MOD_RES (6)..(6): Xaa is C or S
VTKPTXAPTKLEPLPVVYYDDSSNVIEQLSNNMVVRS

SEQ ID NO: 15293 - protein, 36 aa, Artificial Sequence
  GFR-binding peptide
  MOD_RES (1)..(2)..(34)..(36): Xaa is C or S
XXVPTELSPISMLFIDEYDKVVYKQYEEMVVEGXGX

SEQ ID NO: 15294 - protein, 33 aa, Artificial Sequence
  GFR-binding peptide
  MOD_RES (1)..(33): Xaa is C or S
XVPTRLNAISILYFDSANNVVLKKYRDMVVESX

SEQ ID NO: 15295 - protein, 35 aa, Artificial Sequence
  GFR-binding peptide
  MOD_RES (1)..(2): Xaa is C or S
  MOD_RES (16)..(17)..(18)..(19)..(20): Xaa is A or G
  MOD_RES (21)..(22)..(23)..(24): Xaa is A or G or is absent
XXAPTQLSPISVLFIXXXXXXXXXYKQYENMVVRA

SEQ ID NO: 15296 - protein, 35 aa, Artificial Sequence
  GFR-binding peptide
  MOD_RES (2)..(3)..(35): Xaa is C or S
AXXVPTELEPLTMLYYDENEKVVEQLSNDMVVEGX

SEQ ID NO: 15297 - protein, 37 aa, Artificial Sequence; identical to SEQ ID NO: 8005
  GFR-binding peptide
  MOD_RES (4)..(4): Xaa is C or S
  MOD_RES (18)..(19)..(20)..(21)..(22): Xaa is A or G
  MOD_RES (23)..(24)..(25)..(26): Xaa is A or G or is absent

SEQ ID NO: 15298 - protein, 39 aa, Artificial Sequence
  GFR-binding peptide
  MOD_RES (2)..(3)..(36)..(38): Xaa is C or S
  MOD_RES (17)..(18)..(19)..(20)..(21): Xaa is A or G
  MOD_RES (22)..(23)..(24)..(25): Xaa is A or G or is absent
PXXVPQDLSPISILFIXXXXXXXXXYKQYEMVVKSXKXS

SEQ ID NO: 15299 - protein, 37 aa, Artificial Sequence
  GFR-binding peptide
  MOD_RES (1)..(34)..(36): Xaa is C or S
  MOD_RES (15)..(16)..(17)..(18)..(19): Xaa is A or G
  MOD_RES (20)..(21)..(22)..(23): Xaa is A or G or is absent
XVPQDLSPISILFIXXXXXXXXXYKQYEMVVKSXKXS

SEQ ID NO: 15300 - protein, 36 aa, Artificial Sequence; identical to SEQ ID NO: 8007
  GFR-binding peptide
  MOD_RES (3)..(4)..(35): Xaa is C or S

SEQ ID NO: 15301 - protein, 40 aa, Artificial Sequence
  GFR-binding peptide
  MOD_RES (4)..(5)..(37)..(39): Xaa is C or S
PKAXXVPTELEPLTMLYYDEYDKVVEQLSNEMVVEGXGXR

SEQ ID NO: 15302 - protein, 37 aa, Artificial Sequence
  GFR-binding peptide
  MOD_RES (3)..(4)..(37): Xaa is C or S
  MOD_RES (18)..(19)..(20)..(21)..(22): Xaa is A or G
  MOD_RES (23)..(24)..(25)..(26): Xaa is A or G or is absent
SPXXVSQDLEPLPIVYYXXXXXXXXXEQLSNMIVKSX

SEQ ID NO: 15303 - protein, 36 aa, Artificial Sequence
  GFR-binding peptide
  MOD_RES (1)..(2)..(34)..(36): Xaa is C or S
XXVPTRLNAISILYFDSANNVVLKKYRDMVVESXGX

SEQ ID NO: 15304 - protein, 36 aa, Artificial Sequence
  GFR-binding peptide
  MOD_RES (1)..(2)..(35): Xaa is C or S
  MOD_RES (16)..(17)..(18)..(19)..(20): Xaa is A or G
  MOD_RES (21)..(22)..(23)..(24): Xaa is A or G or is absent
XXVPQALEPLPIVYYXXXXXXXXXEQLSNMIVRSXK

SEQ ID NO: 15305 - protein, 35 aa, Artificial Sequence
  GFR-binding peptide
  MOD_RES (2)..(3): Xaa is C or S
  MOD_RES (17)..(18)..(19)..(20)..(21): Xaa is A or G
  MOD_RES (22)..(23)..(24)..(25): Xaa is A or G or is absent
TXXVPTRLNAISILYFXXXXXXXXXLKKYRDMVVE

SEQ ID NO: 15306 - protein, 38 aa, Artificial Sequence
  GFR-binding peptide
  MOD_RES (4)..(5)..(37): Xaa is C or S
PKAXXVPTELEPLTMLYYDEYDKVVEQLSNEMVVEGXG

SEQ ID NO: 15307 - protein, 39 aa, Artificial Sequence
  GFR-binding peptide
  MOD_RES (6)..(7)..(38): Xaa is C or S
ASASPXXVPQDLEPLPIVYYVGRTPKVEQLSNMVVKSXK

SEQ ID NO: 15308 - protein, 41 aa, Artificial Sequence
  GFR-binding peptide
  MOD_RES (3)..(4)..(38)..(40): Xaa is C or S
  MOD_RES (18)..(19)..(20)..(21)..(22): Xaa is A or G
  MOD_RES (23)..(24)..(25)..(26): Xaa is A or G or is absent
KAXXVPTELEPLTMLYYXXXXXXXXXEQLSNDMVVEGXGXR

SEQ ID NO: 15309 - protein, 42 aa, Artificial Sequence; identical to SEQ ID NO: 8013
  GFR-binding peptide
  MOD_RES (5)..(6)..(40)..(42): Xaa is C or S
  MOD_RES (20)..(21)..(22)..(23)..(24): Xaa is A or G
  MOD_RES (25)..(26)..(27)..(28): Xaa is A or G or is absent

SEQ ID NO: 15310 - protein, 34 aa, Artificial Sequence; identical to SEQ ID NO: 8014
  GFR-binding peptide
  MOD_RES (2)..(3)..(34): Xaa is C or S

SEQ ID NO: 15311 - protein, 36 aa, Artificial Sequence
  GFR-binding peptide
  MOD_RES (3)..(4)..(35): Xaa is C or S
SPXXVPQDLEPLPIVYYVGRTPKVEQLSNMVVKSXK

SEQ ID NO: 15312 - protein, 36 aa, Artificial Sequence
  GFR-binding peptide
  MOD_RES (3)..(4)..(36): Xaa is C or S
KAXXVPTELEPLPMVYYDENEKVVEQLSNDMVVEGX

SEQ ID NO: 15313 - protein, 39 aa, Artificial Sequence; identical to SEQ ID NO: 8017
  GFR-binding peptide
  MOD_RES (3)..(4)..(38): Xaa is C or S
  MOD_RES (18)..(19)..(20)..(21)..(22): Xaa is A or G
  MOD_RES (23)..(24)..(25)..(26): Xaa is A or G or is absent

SEQ ID NO: 15314 - protein, 34 aa, Artificial Sequence; identical to SEQ ID NO: 8019
  GFR-binding peptide
  MOD_RES (34)..(34): Xaa is C or S
  MOD_RES (14)..(15)..(16)..(17)..(18): Xaa is A or G
  MOD_RES (19)..(20)..(21)..(22): Xaa is A or G or is absent

SEQ ID NO: 15315 - protein, 39 aa, Artificial Sequence; identical to SEQ ID NO: 8020
  GFR-binding peptide
  MOD_RES (7)..(39): Xaa is C or S

SEQ ID NO: 15316 - protein, 31 aa, Artificial Sequence
  GFR-binding peptide
  MOD_RES (1)..(1): Xaa is C or S
XVPTRLNAISILYFDSANNVVLKKYRDMVVE

SEQ ID NO: 15317 - protein, 36 aa, Artificial Sequence
  GFR-binding peptide
  MOD_RES (3)..(4)..(35): Xaa is C or S
SPXXVSQDLSPISILFIIGKTPKIYKQYEMIVKSXK

SEQ ID NO: 15318 - protein, 40 aa, Artificial Sequence; identical to SEQ ID NO: 8022
  GFR-binding peptide
  MOD_RES (7)..(7): Xaa is C or S
  MOD_RES (21)..(22)..(23)..(24)..(25): Xaa is A or G
  MOD_RES (26)..(27)..(28)..(29): Xaa is A or G or is absent

SEQ ID NO: 15319 - protein, 40 aa, Artificial Sequence
  GFR-binding peptide
  MOD_RES (4)..(5)..(37)..(39): Xaa is C or S
PKPXXAPTQLEPLTVLYYDDSSNVIEQLSNNMVVRAXGXH

SEQ ID NO: 15320 - protein, 37 aa, Artificial Sequence
  GFR-binding peptide
  MOD_RES (2)..(3)..(37): Xaa is C or S
  MOD_RES (17)..(18)..(19)..(20)..(21): Xaa is A or G
  MOD_RES (22)..(23)..(24)..(25): Xaa is A or G or is absent
AXXVPTELEPLTMLYYXXXXXXXXXEQLSNDMVVEGX

SEQ ID NO: 15321 - protein, 39 aa, Artificial Sequence
  GFR-binding peptide
  MOD_RES (2)..(3)..(37)..(39): Xaa is C or S
  MOD_RES (17)..(18)..(19)..(20)..(21): Xaa is A or G
  MOD_RES (22)..(23)..(24)..(25): Xaa is A or G or is absent
AXXVPTELEPLTMLYYXXXXXXXXXEQLSNEMVVEGXGX

SEQ ID NO: 15322 - protein, 35 aa, Artificial Sequence
  GFR-binding peptide
  MOD_RES (1)..(33)..(35): Xaa is C or S
XAPTKLEPLTVLYYDDSSNVIEQLSNNMVVRSXGX

SEQ ID NO: 15323 - protein, 39 aa, Artificial Sequence; identical to SEQ ID NO: 8025
  GFR-binding peptide
  MOD_RES (6)..(7)..(38): Xaa is C or S

SEQ ID NO: 15324 - protein, 37 aa, Artificial Sequence
  GFR-binding peptide
  MOD_RES (3)..(4)..(36): Xaa is C or S
KAXXVPTELEPLPMVYYDENEKVVEQLSNDMVVEGXG

SEQ ID NO: 15325 - protein, 35 aa, Artificial Sequence
  GFR-binding peptide
  MOD_RES (1)..(2)..(34): Xaa is C or S
XXAPTQLSPISVLFIDDSSNVIYKQYENMVVRAXG

SEQ ID NO: 15326 - protein, 42 aa, Artificial Sequence
  GFR-binding peptide
  MOD_RES (6)..(7)..(39)..(41): Xaa is C or S
TVPKPXXAPTQLEPLPVVYYDDSSNVIEQLSNNMVVRAXGXH

SEQ ID NO: 15327 - protein, 34 aa, Artificial Sequence
  GFR-binding peptide
  MOD_RES (34)..(34): Xaa is C or S
  MOD_RES (14)..(15)..(16)..(17)..(18): Xaa is A or G
  MOD_RES (19)..(20)..(21)..(22): Xaa is A or G or is absent
VPTELSPISMLFIXXXXXXXXXYKQYEDMVVEGX

SEQ ID NO: 15328 - protein, 37 aa, Artificial Sequence; identical to SEQ ID NO: 8028
  GFR-binding peptide
  MOD_RES (1)..(35)..(37): Xaa is C or S
  MOD_RES (15)..(16)..(17)..(18)..(19): Xaa is A or G
  MOD_RES (20)..(21)..(22)..(23): Xaa is A or G or is absent

SEQ ID NO: 15329 - protein, 40 aa, Artificial Sequence
  GFR-binding peptide
  MOD_RES (5)..(6)..(37)..(39): Xaa is C or S
SASPXXVSQDLEPLPIVYYIGKTPKIEQLSNMIVKSXKXS

SEQ ID NO: 15330 - protein, 40 aa, Artificial Sequence
  GFR-binding peptide
  MOD_RES (3)..(4)..(38)..(40): Xaa is C or S
  MOD_RES (18)..(19)..(20)..(21)..(22): Xaa is A or G
  MOD_RES (23)..(24)..(25)..(26): Xaa is A or G or is absent
KPXXAPTKLSPISVLFIXXXXXXXXXYKQYENMVVRSXGX

SEQ ID NO: 15331 - protein, 37 aa, Artificial Sequence
  GFR-binding peptide
  MOD_RES (3)..(4): Xaa is C or S
  MOD_RES (18)..(19)..(20)..(21)..(22): Xaa is A or G
  MOD_RES (23)..(24)..(25)..(26): Xaa is A or G or is absent
PTXXVPTRLEPLPIVYYXXXXXXXXXEQLSNDMVVES

SEQ ID NO: 15332 - protein, 39 aa, Artificial Sequence
  GFR-binding peptide
  MOD_RES (3)..(4)..(36)..(38): Xaa is C or S
KPXXAPTQLSPISVLFIDDSSNVIYKQYENMVVRAXGXH

SEQ ID NO: 15333 - protein, 35 aa, Artificial Sequence
  GFR-binding peptide
  MOD_RES (1)..(2): Xaa is C or S
  MOD_RES (16)..(17)..(18)..(19)..(20): Xaa is A or G
  MOD_RES (21)..(22)..(23)..(24): Xaa is A or G or is absent
XXVPTELEPLTMLYYXXXXXXXXXEQLSNDMVVEG

SEQ ID NO: 15334 - protein, 36 aa, Artificial Sequence
  GFR-binding peptide
  MOD_RES (1)..(34)..(36): Xaa is C or S
  MOD_RES (15)..(16)..(17)..(18)..(19): Xaa is A or G
  MOD_RES (20)..(21)..(22)..(23): Xaa is A or G or is absent
XVPQALEPLTILYYXXXXXXXXXEQLSNMIVRSXKX

SEQ ID NO: 15335 - protein, 38 aa, Artificial Sequence; identical to SEQ ID NO: 8036
  GFR-binding peptide
  MOD_RES (5)..(6): Xaa is C or S
  MOD_RES (20)..(21)..(22)..(23)..(24): Xaa is A or G
  MOD_RES (25)..(26)..(27)..(28): Xaa is A or G or is absent

SEQ ID NO: 15336 - protein, 33 aa, Artificial Sequence; identical to SEQ ID NO: 8037
  GFR-binding peptide
  MOD_RES (1)..(32): Xaa is C or S

SEQ ID NO: 15337 - protein, 39 aa, Artificial Sequence
  GFR-binding peptide
  MOD_RES (3)..(4)..(38): Xaa is C or S
  MOD_RES (18)..(19)..(20)..(21)..(22): Xaa is A or G
  MOD_RES (23)..(24)..(25)..(26): Xaa is A or G or is absent
KPXXAPTKLEPLTVLYYXXXXXXXXXEQLSNNMVVRSXG

SEQ ID NO: 15338 - protein, 39 aa, Artificial Sequence; identical to SEQ ID NO: 8038
  GFR-binding peptide
  MOD_RES (1)..(2)..(36)..(38): Xaa is C or S
  MOD_RES (16)..(17)..(18)..(19)..(20): Xaa is A or G
  MOD_RES (21)..(22)..(23)..(24): Xaa is A or G or is absent

SEQ ID NO: 15339 - protein, 41 aa, Artificial Sequence
  GFR-binding peptide
  MOD_RES (5)..(6)..(39)..(41): Xaa is C or S
  MOD_RES (20)..(21)..(22)..(23)..(24): Xaa is A or G
  MOD_RES (25)..(26)..(27)..(28): Xaa is A or G or is absent
SASPXXVSQDLEPLPIVYYXXXXXXXXXEQLSNMIVKSXKX

SEQ ID NO: 15340 - protein, 33 aa, Artificial Sequence; identical to SEQ ID NO: 8039
  GFR-binding peptide
  MOD_RES (1)..(32): Xaa is C or S

SEQ ID NO: 15341 - protein, 37 aa, Artificial Sequence; identical to SEQ ID NO: 8040
  GFR-binding peptide
  MOD_RES (1)..(2)..(36): Xaa is C or S
  MOD_RES (16)..(17)..(18)..(19)..(20): Xaa is A or G
  MOD_RES (21)..(22)..(23)..(24): Xaa is A or G or is absent

SEQ ID NO: 15342 - protein, 38 aa, Artificial Sequence; identical to SEQ ID NO: 8044
  GFR-binding peptide
  MOD_RES (3)..(4)..(38): Xaa is C or S
  MOD_RES (18)..(19)..(20)..(21)..(22): Xaa is A or G
  MOD_RES (23)..(24)..(25)..(26): Xaa is A or G or is absent

SEQ ID NO: 15343 - protein, 39 aa, Artificial Sequence
  GFR-binding peptide
  MOD_RES (5)..(6)..(38): Xaa is C or S
VPKPXXAPTKLEPLTVLYYDDSSNVIEQLSNNMVVRSXG

SEQ ID NO: 15344 - protein, 33 aa, Artificial Sequence
  GFR-binding peptide
  MOD_RES (14)..(15)..(16)..(17)..(18): Xaa is A or G
  MOD_RES (19)..(20)..(21)..(22): Xaa is A or G or is absent
VPTRLEPLTILYYXXXXXXXXXEQLSNDMVVES

SEQ ID NO: 15345 - protein, 40 aa, Artificial Sequence; identical to SEQ ID NO: 8045
  GFR-binding peptide
  MOD_RES (4)..(5)..(37)..(39): Xaa is C or S

SEQ ID NO: 15346 - protein, 36 aa, Artificial Sequence; identical to SEQ ID NO: 8046
  GFR-binding peptide
  MOD_RES (1)..(2)..(33)..(35): Xaa is C or S

SEQ ID NO: 15347 - protein, 36 aa, Artificial Sequence
  GFR-binding peptide
  MOD_RES (1)..(2)..(34)..(36): Xaa is C or S
XXAPTQLEPLPVVYYDDSSNVIEQLSNNMVVRAXGX

SEQ ID NO: 15348 - protein, 37 aa, Artificial Sequence
  GFR-binding peptide
  MOD_RES (1)..(35)..(37): Xaa is C or S
  MOD_RES (15)..(16)..(17)..(18)..(19): Xaa is A or G
  MOD_RES (20)..(21)..(22)..(23): Xaa is A or G or is absent
XVPTELSPISMLFIXXXXXXXXXYKQYEDMVVEGXGX

SEQ ID NO: 15349 - protein, 32 aa, Artificial Sequence; identical to SEQ ID NO: 8048
  GFR-binding peptide
  MOD_RES (1)..(2): Xaa is C or S

SEQ ID NO: 15350 - protein, 33 aa, Artificial Sequence; identical to SEQ ID NO: 8050
  GFR-binding peptide
  MOD_RES (1)..(1): Xaa is C or S
  MOD_RES (15)..(16)..(17)..(18)..(19): Xaa is A or G
  MOD_RES (20)..(21)..(22)..(23): Xaa is A or G or is absent

SEQ ID NO: 15351 - protein, 37 aa, Artificial Sequence
  GFR-binding peptide
  MOD_RES (4)..(5): Xaa is C or S
  MOD_RES (19)..(20)..(21)..(22)..(23): Xaa is A or G
  MOD_RES (24)..(25)..(26)..(27): Xaa is A or G or is absent
PKAXXVPTELEPLTMLYYXXXXXXXXXEQLSNDMVVE

SEQ ID NO: 15352 - protein, 41 aa, Artificial Sequence
  GFR-binding peptide
  MOD_RES (3)..(4)..(38)..(40): Xaa is C or S
  MOD_RES (18)..(19)..(20)..(21)..(22): Xaa is A or G
  MOD_RES (23)..(24)..(25)..(26): Xaa is A or G or is absent
KAXXVPTELEPLPMVYYXXXXXXXXXEQLSNEMVVEGXGXR

SEQ ID NO: 15353 - protein, 32 aa, Artificial Sequence; identical to SEQ ID NO: 8053
  GFR-binding peptide
  MOD_RES (32)..(32): Xaa is C or S

SEQ ID NO: 15354 - protein, 37 aa, Artificial Sequence
  GFR-binding peptide
  MOD_RES (3)..(4)..(37): Xaa is C or S
  MOD_RES (18)..(19)..(20)..(21)..(22): Xaa is A or G
  MOD_RES (23)..(24)..(25)..(26): Xaa is A or G or is absent
SPXXVPQDLSPISILFIXXXXXXXXXYKQYEMVVKSX

SEQ ID NO: 15355 - protein, 36 aa, Artificial Sequence
  GFR-binding peptide
  MOD_RES (3)..(4)..(35): Xaa is C or S
SPXXVPQDLSPISILFIVGRTPKVYKQYEMVVKSXK

SEQ ID NO: 15356 - protein, 44 aa, Artificial Sequence
  GFR-binding peptide
  MOD_RES (6)..(7)..(41)..(43): Xaa is C or S
  MOD_RES (21)..(22)..(23)..(24)..(25): Xaa is A or G
  MOD_RES (26)..(27)..(28)..(29): Xaa is A or G or is absent
KIPKAXXVPTELSPISMLFIXXXXXXXXXYKQYEDMVVEGXGXR

SEQ ID NO: 15357 - protein, 38 aa, Artificial Sequence; identical to SEQ ID NO: 8061
  GFR-binding peptide
  MOD_RES (5)..(6): Xaa is C or S
  MOD_RES (20)..(21)..(22)..(23)..(24): Xaa is A or G
  MOD_RES (25)..(26)..(27)..(28): Xaa is A or G or is absent

SEQ ID NO: 15358 - protein, 33 aa, Artificial Sequence
  GFR-binding peptide
  MOD_RES (32)..(32): Xaa is C or S
APTQLEPLTVLYYDDSSNVIEQLSNNMVVRAXG

SEQ ID NO: 15359 - protein, 38 aa, Artificial Sequence
  GFR-binding peptide
  MOD_RES (1)..(35)..(37): Xaa is C or S
  MOD_RES (15)..(16)..(17)..(18)..(19): Xaa is A or G
  MOD_RES (20)..(21)..(22)..(23): Xaa is A or G or is absent
XVPTRLEPLTILYYXXXXXXXXXEQLSNDMVVESXGXR

SEQ ID NO: 15360 - protein, 38 aa, Artificial Sequence
  GFR-binding peptide
  MOD_RES (3)..(4)..(38): Xaa is C or S
  MOD_RES (18)..(19)..(20)..(21)..(22): Xaa is A or G
  MOD_RES (23)..(24)..(25)..(26): Xaa is A or G or is absent
KPXXAPTQLSPISVLFIXXXXXXXXXYKQYENMVVRAX

SEQ ID NO: 15361 - protein, 35 aa, Artificial Sequence; identical to SEQ ID NO: 8069
  GFR-binding peptide
  MOD_RES (1)..(2): Xaa is C or S
  MOD_RES (16)..(17)..(18)..(19)..(20): Xaa is A or G
  MOD_RES (21)..(22)..(23)..(24): Xaa is A or G or is absent

SEQ ID NO: 15362 - protein, 36 aa, Artificial Sequence; identical to SEQ ID NO: 8070
  GFR-binding peptide
  MOD_RES (1)..(35): Xaa is C or S
  MOD_RES (15)..(16)..(17)..(18)..(19): Xaa is A or G
  MOD_RES (20)..(21)..(22)..(23): Xaa is A or G or is absent

SEQ ID NO: 15363 - protein, 38 aa, Artificial Sequence
  GFR-binding peptide
  MOD_RES (5)..(6): Xaa is C or S
  MOD_RES (20)..(21)..(22)..(23)..(24): Xaa is A or G
  MOD_RES (25)..(26)..(27)..(28): Xaa is A or G or is absent
SAAPXXVPQALSPISILFIXXXXXXXXXYKQYEMIVRS

SEQ ID NO: 15364 - protein, 33 aa, Artificial Sequence; identical to SEQ ID NO: 8073
  GFR-binding peptide
  MOD_RES (33)..(33): Xaa is C or S
  MOD_RES (14)..(15)..(16)..(17)..(18): Xaa is A or G
  MOD_RES (19)..(20)..(21)..(22): Xaa is A or G or is absent

SEQ ID NO: 15365 - protein, 37 aa, Artificial Sequence
  GFR-binding peptide
  MOD_RES (3)..(4)..(36): Xaa is C or S
KPXXAPTQLSPISVLFIDDSSNVIYKQYENMVVRAXG

SEQ ID NO: 15366 - protein, 35 aa, Artificial Sequence; identical to SEQ ID NO: 8075
  GFR-binding peptide
  MOD_RES (34)..(34): Xaa is C or S
  MOD_RES (14)..(15)..(16)..(17)..(18): Xaa is A or G
  MOD_RES (19)..(20)..(21)..(22): Xaa is A or G or is absent

SEQ ID NO: 15367 - protein, 34 aa, Artificial Sequence; identical to SEQ ID NO: 8076
  GFR-binding peptide
  MOD_RES (1)..(34): Xaa is C or S
  MOD_RES (15)..(16)..(17)..(18)..(19): Xaa is A or G
  MOD_RES (20)..(21)..(22)..(23): Xaa is A or G or is absent

SEQ ID NO: 15368 - protein, 40 aa, Artificial Sequence
  GFR-binding peptide
  MOD_RES (5)..(6)..(39): Xaa is C or S
  MOD_RES (20)..(21)..(22)..(23)..(24): Xaa is A or G
  MOD_RES (25)..(26)..(27)..(28): Xaa is A or G or is absent
SAAPXXVPQALSPISILFIXXXXXXXXXYKQYEMIVRSXK

SEQ ID NO: 15369 - protein, 37 aa, Artificial Sequence
  GFR-binding peptide
  MOD_RES (2)..(3)..(37): Xaa is C or S
  MOD_RES (17)..(18)..(19)..(20)..(21): Xaa is A or G
  MOD_RES (22)..(23)..(24)..(25): Xaa is A or G or is absent
AXXVPTELEPLPMVYYXXXXXXXXXEQLSNEMVVEGX

SEQ ID NO: 15370 - protein, 42 aa, Artificial Sequence
  GFR-binding peptide
  MOD_RES (6)..(7)..(40)..(42): Xaa is C or S
  MOD_RES (21)..(22)..(23)..(24)..(25): Xaa is A or G
  MOD_RES (26)..(27)..(28)..(29): Xaa is A or G or is absent
ASAAPXXVPQALEPLTILYYXXXXXXXXXEQLSNMIVRSXKX

SEQ ID NO: 15371 - protein, 43 aa, Artificial Sequence
  GFR-binding peptide
  MOD_RES (6)..(7)..(40)..(42): Xaa is C or S
  MOD_RES (21)..(22)..(23)..(24)..(25): Xaa is A or G
  MOD_RES (26)..(27)..(28)..(29): Xaa is A or G or is absent
ASAAPXXVPQALEPLTILYYXXXXXXXXXEQLSNMIVRSXKXS

SEQ ID NO: 15372 - protein, 32 aa, Artificial Sequence; identical to SEQ ID NO: 8084
  GFR-binding peptide
  MOD_RES (14)..(15)..(16)..(17)..(18): Xaa is A or G
  MOD_RES (19)..(20)..(21)..(22): Xaa is A or G or is absent

SEQ ID NO: 15373 - protein, 38 aa, Artificial Sequence
  GFR-binding peptide
  MOD_RES (2)..(3)..(37): Xaa is C or S
  MOD_RES (17)..(18)..(19)..(20)..(21): Xaa is A or G
  MOD_RES (22)..(23)..(24)..(25): Xaa is A or G or is absent
AXXVPTELEPLPMVYYXXXXXXXXXEQLSNEMVVEGXG

SEQ ID NO: 15374 - protein, 32 aa, Artificial Sequence
  GFR-binding peptide
  MOD_RES (1)..(2): Xaa is C or S
XXAPTKLEPLPVVYYDDSSNVIEQLSNNMVVR

SEQ ID NO: 15375 - protein, 39 aa, Artificial Sequence; identical to SEQ ID NO: 8087
  GFR-binding peptide
  MOD_RES (2)..(3)..(37)..(39): Xaa is C or S
  MOD_RES (17)..(18)..(19)..(20)..(21): Xaa is A or G
  MOD_RES (22)..(23)..(24)..(25): Xaa is A or G or is absent

SEQ ID NO: 15376 - protein, 33 aa, Artificial Sequence; identical to SEQ ID NO: 8088
  GFR-binding peptide
  MOD_RES (1)..(1): Xaa is C or S
  MOD_RES (15)..(16)..(17)..(18)..(19): Xaa is A or G
  MOD_RES (20)..(21)..(22)..(23): Xaa is A or G or is absent

SEQ ID NO: 15377 - protein, 36 aa, Artificial Sequence
  GFR-binding peptide
  MOD_RES (2)..(3)..(35): Xaa is C or S
PXXAPTQLEPLTVLYYDDSSNVIEQLSNNMVVRAXG

SEQ ID NO: 15378 - protein, 34 aa, Artificial Sequence; identical to SEQ ID NO: 8089
  GFR-binding peptide
  MOD_RES (2)..(3)..(34): Xaa is C or S

SEQ ID NO: 15379 - protein, 37 aa, Artificial Sequence
  GFR-binding peptide
  MOD_RES (2)..(3)..(37): Xaa is C or S
  MOD_RES (17)..(18)..(19)..(20)..(21): Xaa is A or G
  MOD_RES (22)..(23)..(24)..(25): Xaa is A or G or is absent
TXXVPTRLEPLPIVYYXXXXXXXXXEQLSNDMVVESX

SEQ ID NO: 15380 - protein, 34 aa, Artificial Sequence
  GFR-binding peptide
  MOD_RES (32)..(34): Xaa is C or S
VPTELEPLPMVYYDENEKVVEQLSNDMVVEGXGX

SEQ ID NO: 15381 - protein, 39 aa, Artificial Sequence
  GFR-binding peptide
  MOD_RES (3)..(4)..(37)..(39): Xaa is C or S
  MOD_RES (18)..(19)..(20)..(21)..(22): Xaa is A or G
  MOD_RES (23)..(24)..(25)..(26): Xaa is A or G or is absent
SPXXVPQDLEPLPIVYYXXXXXXXXXEQLSNMVVKSXKX

SEQ ID NO: 15382 - protein, 37 aa, Artificial Sequence
  GFR-binding peptide
  MOD_RES (6)..(7): Xaa is C or S
SIPKAXXVPTELEPLPMVYYDEYDKVVEQLSNEMVVE

SEQ ID NO: 15383 - protein, 36 aa, Artificial Sequence
  GFR-binding peptide
  MOD_RES (34)..(36): Xaa is C or S
  MOD_RES (14)..(15)..(16)..(17)..(18): Xaa is A or G
  MOD_RES (19)..(20)..(21)..(22): Xaa is A or G or is absent
APTQLSPISVLFIXXXXXXXXXYKQYENMVVRAXGX

SEQ ID NO: 15384 - protein, 33 aa, Artificial Sequence
  GFR-binding peptide
  MOD_RES (2)..(3): Xaa is C or S
PXXVSQDLEPLPIVYYIGKTPKIEQLSNMIVKS

SEQ ID NO: 15385 - protein, 41 aa, Artificial Sequence
  GFR-binding peptide
  MOD_RES (5)..(6)..(40): Xaa is C or S
  MOD_RES (20)..(21)..(22)..(23)..(24): Xaa is A or G
  MOD_RES (25)..(26)..(27)..(28): Xaa is A or G or is absent
IPKAXXVPTELSPISMLFIXXXXXXXXXYKQYEEMVVEGXG

SEQ ID NO: 15386 - protein, 37 aa, Artificial Sequence; identical to SEQ ID NO: 8094
  GFR-binding peptide
  MOD_RES (34)..(36): Xaa is C or S
  MOD_RES (14)..(15)..(16)..(17)..(18): Xaa is A or G
  MOD_RES (19)..(20)..(21)..(22): Xaa is A or G or is absent

SEQ ID NO: 15387 - protein, 36 aa, Artificial Sequence; identical to SEQ ID NO: 8095
  GFR-binding peptide
  MOD_RES (1)..(35): Xaa is C or S
  MOD_RES (15)..(16)..(17)..(18)..(19): Xaa is A or G
  MOD_RES (20)..(21)..(22)..(23): Xaa is A or G or is absent

SEQ ID NO: 15388 - protein, 38 aa, Artificial Sequence
  GFR-binding peptide
  MOD_RES (3)..(4)..(35)..(37): Xaa is C or S
SPXXVSQDLEPLPIVYYIGKTPKIEQLSNMIVKSXKXS

SEQ ID NO: 15389 - protein, 42 aa, Artificial Sequence; identical to SEQ ID NO: 8096
  GFR-binding peptide
  MOD_RES (4)..(5)..(39)..(41): Xaa is C or S
  MOD_RES (19)..(20)..(21)..(22)..(23): Xaa is A or G
  MOD_RES (24)..(25)..(26)..(27): Xaa is A or G or is absent

SEQ ID NO: 15390 - protein, 42 aa, Artificial Sequence; identical to SEQ ID NO: 8097
  GFR-binding peptide
  MOD_RES (6)..(7)..(41): Xaa is C or S
  MOD_RES (21)..(22)..(23)..(24)..(25): Xaa is A or G
  MOD_RES (26)..(27)..(28)..(29): Xaa is A or G or is absent

SEQ ID NO: 15391 - protein, 40 aa, Artificial Sequence
  GFR-binding peptide
  MOD_RES (6)..(7): Xaa is C or S
  MOD_RES (21)..(22)..(23)..(24)..(25): Xaa is A or G
  MOD_RES (26)..(27)..(28)..(29): Xaa is A or G or is absent
SIPKAXXVPTELSPISMLFIXXXXXXXXXYKQYEEMVVEG

SEQ ID NO: 15392 - protein, 34 aa, Artificial Sequence; identical to SEQ ID NO: 8101
  GFR-binding peptide
  MOD_RES (34)..(34): Xaa is C or S
  MOD_RES (14)..(15)..(16)..(17)..(18): Xaa is A or G
  MOD_RES (19)..(20)..(21)..(22): Xaa is A or G or is absent

SEQ ID NO: 15393 - protein, 38 aa, Artificial Sequence
  GFR-binding peptide
  MOD_RES (4)..(5): Xaa is C or S
  MOD_RES (19)..(20)..(21)..(22)..(23): Xaa is A or G
  MOD_RES (24)..(25)..(26)..(27): Xaa is A or G or is absent
PKPXXAPTQLSPISVLFIXXXXXXXXXYKQYENMVVRA

SEQ ID NO: 15394 - protein, 32 aa, Artificial Sequence
  GFR-binding peptide
  MOD_RES (14)..(15)..(16)..(17)..(18): Xaa is A or G
  MOD_RES (19)..(20)..(21)..(22): Xaa is A or G or is absent
APTQLEPLTVLYYXXXXXXXXXEQLSNNMVVR

SEQ ID NO: 15395 - protein, 34 aa, Artificial Sequence
  GFR-binding peptide
  MOD_RES (3)..(4): Xaa is C or S
KAXXVPTELEPLTMLYYDEYDKVVEQLSNEMVVE

SEQ ID NO: 15396 - protein, 39 aa, Artificial Sequence; identical to SEQ ID NO: 8102
  GFR-binding peptide
  MOD_RES (4)..(5)..(39): Xaa is C or S
  MOD_RES (19)..(20)..(21)..(22)..(23): Xaa is A or G
  MOD_RES (24)..(25)..(26)..(27): Xaa is A or G or is absent

SEQ ID NO: 15397 - protein, 36 aa, Artificial Sequence
  GFR-binding peptide
  MOD_RES (1)..(34)..(36): Xaa is C or S
  MOD_RES (15)..(16)..(17)..(18)..(19): Xaa is A or G
  MOD_RES (20)..(21)..(22)..(23): Xaa is A or G or is absent
XVPQDLEPLPIVYYXXXXXXXXXEQLSNMVVKSXKX

SEQ ID NO: 15398 - protein, 39 aa, Artificial Sequence
  GFR-binding peptide
  MOD_RES (4)..(5)..(39): Xaa is C or S
  MOD_RES (19)..(20)..(21)..(22)..(23): Xaa is A or G
  MOD_RES (24)..(25)..(26)..(27): Xaa is A or G or is absent
PKPXXAPTKLSPISVLFIXXXXXXXXXYKQYENMVVRSX

SEQ ID NO: 15399 - protein, 36 aa, Artificial Sequence
  GFR-binding peptide
  MOD_RES (5)..(6): Xaa is C or S
SASPXXVPQDLEPLPIVYYVGRTPKVEQLSNMVVKS

SEQ ID NO: 15400 - protein, 37 aa, Artificial Sequence
  GFR-binding peptide
  MOD_RES (3)..(4)..(36): Xaa is C or S
PTXXVPTRLEPLTILYYDSANNVVEQLSNDMVVESXG

SEQ ID NO: 15401 - protein, 35 aa, Artificial Sequence; identical to SEQ ID NO: 8106
  GFR-binding peptide
  MOD_RES (2)..(3): Xaa is C or S
  MOD_RES (17)..(18)..(19)..(20)..(21): Xaa is A or G
  MOD_RES (22)..(23)..(24)..(25): Xaa is A or G or is absent

SEQ ID NO: 15402 - protein, 41 aa, Artificial Sequence
  GFR-binding peptide
  MOD_RES (4)..(5)..(39)..(41): Xaa is C or S
  MOD_RES (19)..(20)..(21)..(22)..(23): Xaa is A or G
  MOD_RES (24)..(25)..(26)..(27): Xaa is A or G or is absent
PKPXXAPTQLEPLTVLYYXXXXXXXXXEQLSNNMVVRAXGX

SEQ ID NO: 15403 - protein, 34 aa, Artificial Sequence
  GFR-binding peptide
  MOD_RES (32)..(34): Xaa is C or S
VPTELSPISMLFIDENEKVVYKQYEDMVVEGXGX

SEQ ID NO: 15404 - protein, 40 aa, Artificial Sequence
  GFR-binding peptide
  MOD_RES (2)..(3)..(37)..(39): Xaa is C or S
  MOD_RES (17)..(18)..(19)..(20)..(21): Xaa is A or G
  MOD_RES (22)..(23)..(24)..(25): Xaa is A or G or is absent
TXXVPTRLSAISILYLXXXXXXXXXLKNYQDMVVESXGXR

SEQ ID NO: 15405 - protein, 37 aa, Artificial Sequence
  GFR-binding peptide
  MOD_RES (1)..(2)..(35)..(37): Xaa is C or S
  MOD_RES (16)..(17)..(18)..(19)..(20): Xaa is A or G
  MOD_RES (21)..(22)..(23)..(24): Xaa is A or G or is absent
XXVPQALEPLTILYYXXXXXXXXXEQLSNMIVRSXKX

SEQ ID NO: 15406 - protein, 40 aa, Artificial Sequence
  GFR-binding peptide
  MOD_RES (2)..(3)..(37)..(39): Xaa is C or S
  MOD_RES (17)..(18)..(19)..(20)..(21): Xaa is A or G
  MOD_RES (22)..(23)..(24)..(25): Xaa is A or G or is absent
PXXAPTQLEPLPVVYYXXXXXXXXXEQLSNNMVVRAXGXH

SEQ ID NO: 15407 - protein, 35 aa, Artificial Sequence
  GFR-binding peptide
  MOD_RES (5)..(5): Xaa is C or S
TKPTXAPTKLSPISVLFIDDSSNVIYKQYENMVVR

SEQ ID NO: 15408 - protein, 39 aa, Artificial Sequence; identical to SEQ ID NO: 8107
  GFR-binding peptide
  MOD_RES (4)..(38): Xaa is C or S
  MOD_RES (18)..(19)..(20)..(21)..(22): Xaa is A or G
  MOD_RES (23)..(24)..(25)..(26): Xaa is A or G or is absent

SEQ ID NO: 15409 - protein, 39 aa, Artificial Sequence; identical to SEQ ID NO: 8108
  GFR-binding peptide
  MOD_RES (5)..(6): Xaa is C or S
  MOD_RES (20)..(21)..(22)..(23)..(24): Xaa is A or G
  MOD_RES (25)..(26)..(27)..(28): Xaa is A or G or is absent

SEQ ID NO: 15410 - protein, 35 aa, Artificial Sequence
  GFR-binding peptide
  MOD_RES (32)..(34): Xaa is C or S
VPTRLNAISILYFDSANNVVLKKYRDMVVESXGXR

SEQ ID NO: 15411 - protein, 36 aa, Artificial Sequence; identical to SEQ ID NO: 8110
  GFR-binding peptide
  MOD_RES (3)..(35): Xaa is C or S

SEQ ID NO: 15412 - protein, 44 aa, Artificial Sequence
  GFR-binding peptide
  MOD_RES (6)..(7)..(41)..(43): Xaa is C or S
  MOD_RES (21)..(22)..(23)..(24)..(25): Xaa is A or G
  MOD_RES (26)..(27)..(28)..(29): Xaa is A or G or is absent
SIPKAXXVPTELSPISMLFIXXXXXXXXXYKQYEEMVVEGXGXR

SEQ ID NO: 15413 - protein, 38 aa, Artificial Sequence
  GFR-binding peptide
  MOD_RES (4)..(5): Xaa is C or S
  MOD_RES (19)..(20)..(21)..(22)..(23): Xaa is A or G
  MOD_RES (24)..(25)..(26)..(27): Xaa is A or G or is absent
PPTXXVPTRLNAISILYFXXXXXXXXXLKKYRDMVVES

SEQ ID NO: 15414 - protein, 43 aa, Artificial Sequence
  GFR-binding peptide
  MOD_RES (5)..(6)..(40)..(42): Xaa is C or S
  MOD_RES (20)..(21)..(22)..(23)..(24): Xaa is A or G
  MOD_RES (25)..(26)..(27)..(28): Xaa is A or G or is absent
VPKPXXAPTQLEPLPVVYYXXXXXXXXXEQLSNNMVVRAXGXH

SEQ ID NO: 15415 - protein, 37 aa, Artificial Sequence
  GFR-binding peptide
  MOD_RES (3)..(4): Xaa is C or S
  MOD_RES (18)..(19)..(20)..(21)..(22): Xaa is A or G
  MOD_RES (23)..(24)..(25)..(26): Xaa is A or G or is absent
KAXXVPTELSPISMLFIXXXXXXXXXYKQYEDMVVEG

SEQ ID NO: 15416 - protein, 35 aa, Artificial Sequence; identical to SEQ ID NO: 8116
  GFR-binding peptide
  MOD_RES (33)..(35): Xaa is C or S
  MOD_RES (14)..(15)..(16)..(17)..(18): Xaa is A or G
  MOD_RES (19)..(20)..(21)..(22): Xaa is A or G or is absent

SEQ ID NO: 15417 - protein, 36 aa, Artificial Sequence
  GFR-binding peptide
  MOD_RES (1)..(2)..(36): Xaa is C or S
  MOD_RES (16)..(17)..(18)..(19)..(20): Xaa is A or G
  MOD_RES (21)..(22)..(23)..(24): Xaa is A or G or is absent
XXAPTQLEPLPVVYYXXXXXXXXXEQLSNNMVVRAX

SEQ ID NO: 15418 - protein, 36 aa, Artificial Sequence; identical to SEQ ID NO: 8121
  GFR-binding peptide
  MOD_RES (33)..(35): Xaa is C or S
  MOD_RES (14)..(15)..(16)..(17)..(18): Xaa is A or G
  MOD_RES (19)..(20)..(21)..(22): Xaa is A or G or is absent

SEQ ID NO: 15419 - protein, 42 aa, Artificial Sequence; identical to SEQ ID NO: 8122
  GFR-binding peptide
  MOD_RES (5)..(39)..(41): Xaa is C or S
  MOD_RES (19)..(20)..(21)..(22)..(23): Xaa is A or G
  MOD_RES (24)..(25)..(26)..(27): Xaa is A or G or is absent

SEQ ID NO: 15420 - protein, 34 aa, Artificial Sequence
  GFR-binding peptide
  MOD_RES (1)..(34): Xaa is C or S
  MOD_RES (15)..(16)..(17)..(18)..(19): Xaa is A or G
  MOD_RES (20)..(21)..(22)..(23): Xaa is A or G or is absent
XVPQALSPISILFIXXXXXXXXXYKQYEMIVRSX

SEQ ID NO: 15421 - protein, 44 aa, Artificial Sequence
  GFR-binding peptide
  MOD_RES (7)..(41)..(43): Xaa is C or S
  MOD_RES (21)..(22)..(23)..(24)..(25): Xaa is A or G
  MOD_RES (26)..(27)..(28)..(29): Xaa is A or G or is absent
HVTKPTXAPTKLEPLPVVYYXXXXXXXXXEQLSNNMVVRSXGXH

SEQ ID NO: 15422 - protein, 39 aa, Artificial Sequence
  GFR-binding peptide
  MOD_RES (6)..(7)..(38): Xaa is C or S
ASASPXXVSQDLEPLPIVYYIGKTPKIEQLSNMIVKSXK

SEQ ID NO: 15423 - protein, 42 aa, Artificial Sequence; identical to SEQ ID NO: 8123
  GFR-binding peptide
  MOD_RES (4)..(5)..(39)..(41): Xaa is C or S
  MOD_RES (19)..(20)..(21)..(22)..(23): Xaa is A or G
  MOD_RES (24)..(25)..(26)..(27): Xaa is A or G or is absent

SEQ ID NO: 15424 - protein, 37 aa, Artificial Sequence
  GFR-binding peptide
  MOD_RES (4)..(5)..(36): Xaa is C or S
AAPXXVPQALSPISILFIVGRKPKVYKQYEMIVRSXK

SEQ ID NO: 15425 - protein, 36 aa, Artificial Sequence
  GFR-binding peptide
  MOD_RES (2)..(3): Xaa is C or S
  MOD_RES (17)..(18)..(19)..(20)..(21): Xaa is A or G
  MOD_RES (22)..(23)..(24)..(25): Xaa is A or G or is absent
TXXVPTRLNAISILYFXXXXXXXXXLKKYRDMVVES

SEQ ID NO: 15426 - protein, 33 aa, Artificial Sequence; identical to SEQ ID NO: 8125
  GFR-binding peptide
  MOD_RES (31)..(33): Xaa is C or S

SEQ ID NO: 15427 - protein, 37 aa, Artificial Sequence
  GFR-binding peptide
  MOD_RES (4)..(5): Xaa is C or S
  MOD_RES (19)..(20)..(21)..(22)..(23): Xaa is A or G
  MOD_RES (24)..(25)..(26)..(27): Xaa is A or G or is absent
PPTXXVPTRLSAISILYLXXXXXXXXXLKNYQDMVVE

SEQ ID NO: 15428 - protein, 38 aa, Artificial Sequence; identical to SEQ ID NO: 8129
  GFR-binding peptide
  MOD_RES (5)..(6): Xaa is C or S
  MOD_RES (20)..(21)..(22)..(23)..(24): Xaa is A or G
  MOD_RES (25)..(26)..(27)..(28): Xaa is A or G or is absent

SEQ ID NO: 15429 - protein, 40 aa, Artificial Sequence
  GFR-binding peptide
  MOD_RES (4)..(5)..(39): Xaa is C or S
  MOD_RES (19)..(20)..(21)..(22)..(23): Xaa is A or G
  MOD_RES (24)..(25)..(26)..(27): Xaa is A or G or is absent
PKAXXVPTELEPLPMVYYXXXXXXXXXEQLSNDMVVEGXG

SEQ ID NO: 15430 - protein, 38 aa, Artificial Sequence
  GFR-binding peptide
  MOD_RES (3)..(4)..(37): Xaa is C or S
  MOD_RES (18)..(19)..(20)..(21)..(22): Xaa is A or G
  MOD_RES (23)..(24)..(25)..(26): Xaa is A or G or is absent
SPXXVPQDLEPLTILYYXXXXXXXXXEQLSNMVVKSXK

SEQ ID NO: 15431 - protein, 39 aa, Artificial Sequence; identical to SEQ ID NO: 8132
  GFR-binding peptide
  MOD_RES (6)..(7): Xaa is C or S
  MOD_RES (21)..(22)..(23)..(24)..(25): Xaa is A or G
  MOD_RES (26)..(27)..(28)..(29): Xaa is A or G or is absent

SEQ ID NO: 15432 - protein, 35 aa, Artificial Sequence
  GFR-binding peptide
  MOD_RES (1)..(2): Xaa is C or S
  MOD_RES (16)..(17)..(18)..(19)..(20): Xaa is A or G
  MOD_RES (21)..(22)..(23)..(24): Xaa is A or G or is absent
XXAPTKLSPISVLFIXXXXXXXXXYKQYENMVVRS

SEQ ID NO: 15433 - protein, 35 aa, Artificial Sequence
  GFR-binding peptide
  MOD_RES (3)..(4): Xaa is C or S
KPXXAPTKLEPLTVLYYDDSSNVIEQLSNNMVVRS

SEQ ID NO: 15434 - protein, 36 aa, Artificial Sequence
  GFR-binding peptide
  MOD_RES (5)..(6): Xaa is C or S
SAAPXXVPQALEPLTILYYVGRKPKVEQLSNMIVRS

SEQ ID NO: 15435 - protein, 38 aa, Artificial Sequence
  GFR-binding peptide
  MOD_RES (6)..(7): Xaa is C or S
STPPTXXVPTRLEPLTILYYDSANNVVEQLSNDMVVES

SEQ ID NO: 15436 - protein, 34 aa, Artificial Sequence; identical to SEQ ID NO: 8142
  GFR-binding peptide
  MOD_RES (1)..(33): Xaa is C or S

SEQ ID NO: 15437 - protein, 41 aa, Artificial Sequence
  GFR-binding peptide
  MOD_RES (5)..(6)..(40): Xaa is C or S
  MOD_RES (20)..(21)..(22)..(23)..(24): Xaa is A or G
  MOD_RES (25)..(26)..(27)..(28): Xaa is A or G or is absent
IPKAXXVPTELEPLTMLYYXXXXXXXXXEQLSNEMVVEGXG

SEQ ID NO: 15438 - protein, 32 aa, Artificial Sequence
  GFR-binding peptide
  MOD_RES (32)..(32): Xaa is C or S
VPTELEPLPMVYYDENEKVVEQLSNDMVVEGX

SEQ ID NO: 15439 - protein, 35 aa, Artificial Sequence; identical to SEQ ID NO: 8145
  GFR-binding peptide
  MOD_RES (2)..(3)..(34): Xaa is C or S

SEQ ID NO: 15440 - protein, 35 aa, Artificial Sequence; identical to SEQ ID NO: 8147
  GFR-binding peptide
  MOD_RES (1)..(2)..(33)..(35): Xaa is C or S

SEQ ID NO: 15441 - protein, 32 aa, Artificial Sequence
  GFR-binding peptide
  MOD_RES (1)..(1): Xaa is C or S
XAPTQLEPLPVVYYDDSSNVIEQLSNNMVVRA

SEQ ID NO: 15442 - protein, 38 aa, Artificial Sequence
  GFR-binding peptide
  MOD_RES (5)..(6): Xaa is C or S
  MOD_RES (20)..(21)..(22)..(23)..(24): Xaa is A or G
  MOD_RES (25)..(26)..(27)..(28): Xaa is A or G or is absent
VPKPXXAPTKLSPISVLFIXXXXXXXXXYKQYENMVVR

SEQ ID NO: 15443 - protein, 39 aa, Artificial Sequence
  GFR-binding peptide
  MOD_RES (3)..(4)..(36)..(38): Xaa is C or S
KPXXAPTKLEPLPVVYYDDSSNVIEQLSNNMVVRSXGXH

SEQ ID NO: 15444 - protein, 33 aa, Artificial Sequence; identical to SEQ ID NO: 8150
  GFR-binding peptide
  MOD_RES (2)..(3): Xaa is C or S

SEQ ID NO: 15445 - protein, 36 aa, Artificial Sequence; identical to SEQ ID NO: 8151
  GFR-binding peptide
  MOD_RES (1)..(2)..(35): Xaa is C or S
  MOD_RES (16)..(17)..(18)..(19)..(20): Xaa is A or G
  MOD_RES (21)..(22)..(23)..(24): Xaa is A or G or is absent

SEQ ID NO: 15446 - protein, 33 aa, Artificial Sequence; identical to SEQ ID NO: 8152
  GFR-binding peptide
  MOD_RES (2)..(3): Xaa is C or S

SEQ ID NO: 15447 - protein, 38 aa, Artificial Sequence
  GFR-binding peptide
  MOD_RES (2)..(3)..(35)..(37): Xaa is C or S
PXXAPTKLSPISVLFIDDSSNVIYKQYENMVVRSXGXH

SEQ ID NO: 15448 - protein, 40 aa, Artificial Sequence; identical to SEQ ID NO: 8155
  GFR-binding peptide
  MOD_RES (5)..(39): Xaa is C or S
  MOD_RES (19)..(20)..(21)..(22)..(23): Xaa is A or G
  MOD_RES (24)..(25)..(26)..(27): Xaa is A or G or is absent

SEQ ID NO: 15449 - protein, 40 aa, Artificial Sequence
  GFR-binding peptide
  MOD_RES (4)..(5)..(37)..(39): Xaa is C or S
PPTXXVPTRLSAISILYLDSANNVVLKNYQDMVVESXGXR

SEQ ID NO: 15450 - protein, 42 aa, Artificial Sequence
  GFR-binding peptide
  MOD_RES (6)..(7)..(41): Xaa is C or S
  MOD_RES (21)..(22)..(23)..(24)..(25): Xaa is A or G
  MOD_RES (26)..(27)..(28)..(29): Xaa is A or G or is absent
YVPKPXXAPTKLSPISVLFIXXXXXXXXXYKQYENMVVRSXG

SEQ ID NO: 15451 - protein, 43 aa, Artificial Sequence
  GFR-binding peptide
  MOD_RES (6)..(7)..(41)..(43): Xaa is C or S
  MOD_RES (21)..(22)..(23)..(24)..(25): Xaa is A or G
  MOD_RES (26)..(27)..(28)..(29): Xaa is A or G or is absent
SIPKAXXVPTELEPLPMVYYXXXXXXXXXEQLSNEMVVEGXGX

SEQ ID NO: 15452 - protein, 34 aa, Artificial Sequence
  GFR-binding peptide
  MOD_RES (32)..(34): Xaa is C or S
VPTELEPLTMLYYDEYDKVVEQLSNEMVVEGXGX

SEQ ID NO: 15453 - protein, 34 aa, Artificial Sequence
  GFR-binding peptide
  MOD_RES (2)..(3)..(34): Xaa is C or S
PXXVPQALSPISILFIVGRKPKVYKQYEMIVRSX

SEQ ID NO: 15454 - protein, 33 aa, Artificial Sequence; identical to SEQ ID NO: 8159
  GFR-binding peptide
  MOD_RES (2)..(3): Xaa is C or S

SEQ ID NO: 15455 - protein, 41 aa, Artificial Sequence; identical to SEQ ID NO: 8160
  GFR-binding peptide
  MOD_RES (5)..(6)..(40): Xaa is C or S
  MOD_RES (20)..(21)..(22)..(23)..(24): Xaa is A or G
  MOD_RES (25)..(26)..(27)..(28): Xaa is A or G or is absent

SEQ ID NO: 15456 - protein, 36 aa, Artificial Sequence
  GFR-binding peptide
  MOD_RES (2)..(3)..(34)..(36): Xaa is C or S
PXXVPQDLEPLPIVYYVGRTPKVEQLSNMVVKSXKX

SEQ ID NO: 15457 - protein, 38 aa, Artificial Sequence; identical to SEQ ID NO: 8161
  GFR-binding peptide
  MOD_RES (5)..(6)..(37): Xaa is C or S

SEQ ID NO: 15458 - protein, 36 aa, Artificial Sequence; identical to SEQ ID NO: 8162
  GFR-binding peptide
  MOD_RES (2)..(3)..(36): Xaa is C or S
  MOD_RES (17)..(18)..(19)..(20)..(21): Xaa is A or G
  MOD_RES (22)..(23)..(24)..(25): Xaa is A or G or is absent

SEQ ID NO: 15459 - protein, 42 aa, Artificial Sequence
  GFR-binding peptide
  MOD_RES (6)..(7)..(39)..(41): Xaa is C or S
TVPKPXXAPTQLEPLTVLYYDDSSNVIEQLSNNMVVRAXGXH

SEQ ID NO: 15460 - protein, 33 aa, Artificial Sequence
  GFR-binding peptide
  MOD_RES (1)..(1): Xaa is C or S
  MOD_RES (15)..(16)..(17)..(18)..(19): Xaa is A or G
  MOD_RES (20)..(21)..(22)..(23): Xaa is A or G or is absent
XVPTELSPISMLFIXXXXXXXXXYKQYEDMVVE

SEQ ID NO: 15461 - protein, 36 aa, Artificial Sequence
  GFR-binding peptide
  MOD_RES (1)..(2)..(36): Xaa is C or S
  MOD_RES (16)..(17)..(18)..(19)..(20): Xaa is A or G
  MOD_RES (21)..(22)..(23)..(24): Xaa is A or G or is absent
XXVPTELSPISMLFIXXXXXXXXXYKQYEEMVVEGX

SEQ ID NO: 15462 - protein, 36 aa, Artificial Sequence; identical to SEQ ID NO: 8163
  GFR-binding peptide
  MOD_RES (3)..(4): Xaa is C or S
  MOD_RES (18)..(19)..(20)..(21)..(22): Xaa is A or G
  MOD_RES (23)..(24)..(25)..(26): Xaa is A or G or is absent

SEQ ID NO: 15463 - protein, 34 aa, Artificial Sequence; identical to SEQ ID NO: 8165
  GFR-binding peptide
  MOD_RES (33)..(33): Xaa is C or S
  MOD_RES (14)..(15)..(16)..(17)..(18): Xaa is A or G
  MOD_RES (19)..(20)..(21)..(22): Xaa is A or G or is absent

SEQ ID NO: 15464 - protein, 37 aa, Artificial Sequence
  GFR-binding peptide
  MOD_RES (7)..(7): Xaa is C or S
HVTKPTXAPTKLSPISVLFIDDSSNVIYKQYENMVVR

SEQ ID NO: 15465 - protein, 38 aa, Artificial Sequence
  GFR-binding peptide
  MOD_RES (2)..(3)..(35)..(37): Xaa is C or S
AXXVPTELEPLPMVYYDENEKVVEQLSNDMVVEGXGXR

SEQ ID NO: 15466 - protein, 38 aa, Artificial Sequence
  GFR-binding peptide
  MOD_RES (6)..(7): Xaa is C or S
KIPKAXXVPTELSPISMLFIDENEKVVYKQYEDMVVEG

SEQ ID NO: 15467 - protein, 33 aa, Artificial Sequence; identical to SEQ ID NO: 8168
  GFR-binding peptide
  MOD_RES (1)..(2)..(33): Xaa is C or S

SEQ ID NO: 15468 - protein, 31 aa, Artificial Sequence
  GFR-binding peptide
APTQLSPISVLFIDDSSNVIYKQYENMVVRA

SEQ ID NO: 15469 - protein, 35 aa, Artificial Sequence
  GFR-binding peptide
  MOD_RES (2)..(3): Xaa is C or S
  MOD_RES (17)..(18)..(19)..(20)..(21): Xaa is A or G
  MOD_RES (22)..(23)..(24)..(25): Xaa is A or G or is absent
AXXVPTELEPLPMVYYXXXXXXXXXEQLSNEMVVE

SEQ ID NO: 15470 - protein, 36 aa, Artificial Sequence
  GFR-binding peptide
  MOD_RES (3)..(4)..(36): Xaa is C or S
KAXXVPTELSPISMLFIDENEKVVYKQYEDMVVEGX

SEQ ID NO: 15471 - protein, 40 aa, Artificial Sequence
  GFR-binding peptide
  MOD_RES (2)..(3)..(37)..(39): Xaa is C or S
  MOD_RES (17)..(18)..(19)..(20)..(21): Xaa is A or G
  MOD_RES (22)..(23)..(24)..(25): Xaa is A or G or is absent
TXXVPTRLEPLTILYYXXXXXXXXXEQLSNDMVVESXGXR

SEQ ID NO: 15472 - protein, 35 aa, Artificial Sequence
  GFR-binding peptide
  MOD_RES (2)..(3): Xaa is C or S
  MOD_RES (17)..(18)..(19)..(20)..(21): Xaa is A or G
  MOD_RES (22)..(23)..(24)..(25): Xaa is A or G or is absent
PXXVPQALEPLPIVYYXXXXXXXXXEQLSNMIVRS

SEQ ID NO: 15473 - protein, 34 aa, Artificial Sequence
  GFR-binding peptide
  MOD_RES (1)..(1): Xaa is C or S
  MOD_RES (15)..(16)..(17)..(18)..(19): Xaa is A or G
  MOD_RES (20)..(21)..(22)..(23): Xaa is A or G or is absent
XVPTELSPISMLFIXXXXXXXXXYKQYEEMVVEG

SEQ ID NO: 15474 - protein, 35 aa, Artificial Sequence
  GFR-binding peptide
  MOD_RES (2)..(3): Xaa is C or S
  MOD_RES (17)..(18)..(19)..(20)..(21): Xaa is A or G
  MOD_RES (22)..(23)..(24)..(25): Xaa is A or G or is absent
PXXVPQALEPLTILYYXXXXXXXXXEQLSNMIVRS

SEQ ID NO: 15475 - protein, 32 aa, Artificial Sequence; identical to SEQ ID NO: 8175
  GFR-binding peptide
  MOD_RES (31)..(31): Xaa is C or S

SEQ ID NO: 15476 - protein, 38 aa, Artificial Sequence; identical to SEQ ID NO: 8178
  GFR-binding peptide
  MOD_RES (4)..(5): Xaa is C or S
  MOD_RES (19)..(20)..(21)..(22)..(23): Xaa is A or G
  MOD_RES (24)..(25)..(26)..(27): Xaa is A or G or is absent

SEQ ID NO: 15477 - protein, 41 aa, Artificial Sequence
  GFR-binding peptide
  MOD_RES (5)..(6)..(39)..(41): Xaa is C or S
  MOD_RES (20)..(21)..(22)..(23)..(24): Xaa is A or G
  MOD_RES (25)..(26)..(27)..(28): Xaa is A or G or is absent
SAAPXXVPQALEPLPIVYYXXXXXXXXXEQLSNMIVRSXKX

SEQ ID NO: 15478 - protein, 38 aa, Artificial Sequence; identical to SEQ ID NO: 8180
  GFR-binding peptide
  MOD_RES (4)..(5)..(37): Xaa is C or S

SEQ ID NO: 15479 - protein, 36 aa, Artificial Sequence
  GFR-binding peptide
  MOD_RES (2)..(34)..(36): Xaa is C or S
TXAPTKLEPLPVVYYDDSSNVIEQLSNNMVVRSXGX

SEQ ID NO: 15480 - protein, 39 aa, Artificial Sequence; identical to SEQ ID NO: 8182
  GFR-binding peptide
  MOD_RES (4)..(5)..(36)..(38): Xaa is C or S

SEQ ID NO: 15481 - protein, 33 aa, Artificial Sequence
  GFR-binding peptide
  MOD_RES (33)..(33): Xaa is C or S
  MOD_RES (14)..(15)..(16)..(17)..(18): Xaa is A or G
  MOD_RES (19)..(20)..(21)..(22): Xaa is A or G or is absent
VPQDLEPLTILYYXXXXXXXXXEQLSNMVVKSX

SEQ ID NO: 15482 - protein, 36 aa, Artificial Sequence
  GFR-binding peptide
  MOD_RES (2)..(3): Xaa is C or S
  MOD_RES (17)..(18)..(19)..(20)..(21): Xaa is A or G
  MOD_RES (22)..(23)..(24)..(25): Xaa is A or G or is absent
PXXAPTKLEPLTVLYYXXXXXXXXXEQLSNNMVVRS

SEQ ID NO: 15483 - protein, 32 aa, Artificial Sequence; identical to SEQ ID NO: 8185
  GFR-binding peptide
  MOD_RES (14)..(15)..(16)..(17)..(18): Xaa is A or G
  MOD_RES (19)..(20)..(21)..(22): Xaa is A or G or is absent

SEQ ID NO: 15484 - protein, 37 aa, Artificial Sequence
  GFR-binding peptide
  MOD_RES (1)..(2)..(34)..(36): Xaa is C or S
XXVPTRLSAISILYLDSANNVVLKNYQDMVVESXGXR

SEQ ID NO: 15485 - protein, 43 aa, Artificial Sequence; identical to SEQ ID NO: 8186
  GFR-binding peptide
  MOD_RES (6)..(7)..(40)..(42): Xaa is C or S
  MOD_RES (21)..(22)..(23)..(24)..(25): Xaa is A or G
  MOD_RES (26)..(27)..(28)..(29): Xaa is A or G or is absent

SEQ ID NO: 15486 - protein, 31 aa, Artificial Sequence
  GFR-binding peptide
  MOD_RES (1)..(1): Xaa is C or S
XVPQALSPISILFIVGRKPKVYKQYEMIVRS

SEQ ID NO: 15487 - protein, 38 aa, Artificial Sequence
  GFR-binding peptide
  MOD_RES (4)..(5): Xaa is C or S
  MOD_RES (19)..(20)..(21)..(22)..(23): Xaa is A or G
  MOD_RES (24)..(25)..(26)..(27): Xaa is A or G or is absent
PPTXXVPTRLSPISILFIXXXXXXXXXYKQYEDMVVES

SEQ ID NO: 15488 - protein, 39 aa, Artificial Sequence; identical to SEQ ID NO: 8189
  GFR-binding peptide
  MOD_RES (5)..(6)..(38): Xaa is C or S

SEQ ID NO: 15489 - protein, 41 aa, Artificial Sequence; identical to SEQ ID NO: 8190
  GFR-binding peptide
  MOD_RES (5)..(6)..(40): Xaa is C or S
  MOD_RES (20)..(21)..(22)..(23)..(24): Xaa is A or G
  MOD_RES (25)..(26)..(27)..(28): Xaa is A or G or is absent

SEQ ID NO: 15490 - protein, 36 aa, Artificial Sequence; identical to SEQ ID NO: 8191
  GFR-binding peptide
  MOD_RES (33)..(35): Xaa is C or S
  MOD_RES (14)..(15)..(16)..(17)..(18): Xaa is A or G
  MOD_RES (19)..(20)..(21)..(22): Xaa is A or G or is absent

SEQ ID NO: 15491 - protein, 37 aa, Artificial Sequence
  GFR-binding peptide
  MOD_RES (2)..(3)..(34)..(36): Xaa is C or S
PXXVPQALEPLTILYYVGRKPKVEQLSNMIVRSXKXS

SEQ ID NO: 15492 - protein, 37 aa, Artificial Sequence
  GFR-binding peptide
  MOD_RES (3)..(4)..(36): Xaa is C or S
KPXXAPTQLEPLPVVYYDDSSNVIEQLSNNMVVRAXG

SEQ ID NO: 15493 - protein, 30 aa, Artificial Sequence
  GFR-binding peptide
VPTRLSAISILYLDSANNVVLKNYQDMVVE

SEQ ID NO: 15494 - protein, 37 aa, Artificial Sequence
  GFR-binding peptide
  MOD_RES (4)..(5): Xaa is C or S
  MOD_RES (19)..(20)..(21)..(22)..(23): Xaa is A or G
  MOD_RES (24)..(25)..(26)..(27): Xaa is A or G or is absent
PPTXXVPTRLSPISILFIXXXXXXXXXYKQYEDMVVE

SEQ ID NO: 15495 - protein, 36 aa, Artificial Sequence
  GFR-binding peptide
  MOD_RES (1)..(2)..(34)..(36): Xaa is C or S
XXVPTRLEPLTILYYDSANNVVEQLSNDMVVESXGX

SEQ ID NO: 15496 - protein, 36 aa, Artificial Sequence
  GFR-binding peptide
  MOD_RES (3)..(3): Xaa is C or S
  MOD_RES (17)..(18)..(19)..(20)..(21): Xaa is A or G
  MOD_RES (22)..(23)..(24)..(25): Xaa is A or G or is absent
PTXAPTKLEPLPVVYYXXXXXXXXXEQLSNNMVVRS

SEQ ID NO: 15497 - protein, 37 aa, Artificial Sequence
  GFR-binding peptide
  MOD_RES (3)..(4)..(36): Xaa is C or S
KAXXVPTELEPLTMLYYDEYDKVVEQLSNEMVVEGXG

SEQ ID NO: 15498 - protein, 34 aa, Artificial Sequence; identical to SEQ ID NO: 8193
  GFR-binding peptide
  MOD_RES (1)..(32)..(34): Xaa is C or S

SEQ ID NO: 15499 - protein, 38 aa, Artificial Sequence
  GFR-binding peptide
  MOD_RES (2)..(3)..(36)..(38): Xaa is C or S
  MOD_RES (17)..(18)..(19)..(20)..(21): Xaa is A or G
  MOD_RES (22)..(23)..(24)..(25): Xaa is A or G or is absent
PXXVPQDLSPISILFIXXXXXXXXXYKQYEMVVKSXKX

SEQ ID NO: 15500 - protein, 37 aa, Artificial Sequence
  GFR-binding peptide
  MOD_RES (34)..(36): Xaa is C or S
  MOD_RES (14)..(15)..(16)..(17)..(18): Xaa is A or G
  MOD_RES (19)..(20)..(21)..(22): Xaa is A or G or is absent
APTKLSPISVLFIXXXXXXXXXYKQYENMVVRSXGXH

SEQ ID NO: 15501 - protein, 40 aa, Artificial Sequence; identical to SEQ ID NO: 8195
  GFR-binding peptide
  MOD_RES (3)..(4)..(37)..(39): Xaa is C or S
  MOD_RES (18)..(19)..(20)..(21)..(22): Xaa is A or G
  MOD_RES (23)..(24)..(25)..(26): Xaa is A or G or is absent

SEQ ID NO: 15502 - protein, 38 aa, Artificial Sequence
  GFR-binding peptide
  MOD_RES (6)..(7)..(38): Xaa is C or S
ASASPXXVSQDLEPLPIVYYIGKTPKIEQLSNMIVKSX

SEQ ID NO: 15503 - protein, 41 aa, Artificial Sequence
  GFR-binding peptide
  MOD_RES (4)..(5)..(38)..(40): Xaa is C or S
  MOD_RES (19)..(20)..(21)..(22)..(23): Xaa is A or G
  MOD_RES (24)..(25)..(26)..(27): Xaa is A or G or is absent
ASPXXVPQDLEPLPIVYYXXXXXXXXXEQLSNMVVKSXKXS

SEQ ID NO: 15504 - protein, 31 aa, Artificial Sequence
  GFR-binding peptide
  MOD_RES (1)..(1): Xaa is C or S
XAPTQLEPLPVVYYDDSSNVIEQLSNNMVVR

SEQ ID NO: 15505 - protein, 44 aa, Artificial Sequence; identical to SEQ ID NO: 8197
  GFR-binding peptide
  MOD_RES (6)..(7)..(41)..(43): Xaa is C or S
  MOD_RES (21)..(22)..(23)..(24)..(25): Xaa is A or G
  MOD_RES (26)..(27)..(28)..(29): Xaa is A or G or is absent

SEQ ID NO: 15506 - protein, 38 aa, Artificial Sequence
  GFR-binding peptide
  MOD_RES (6)..(7): Xaa is C or S
YVPKPXXAPTKLEPLPVVYYDDSSNVIEQLSNNMVVRS

SEQ ID NO: 15507 - protein, 38 aa, Artificial Sequence; identical to SEQ ID NO: 8199
  GFR-binding peptide
  MOD_RES (3)..(4)..(37): Xaa is C or S
  MOD_RES (18)..(19)..(20)..(21)..(22): Xaa is A or G
  MOD_RES (23)..(24)..(25)..(26): Xaa is A or G or is absent

SEQ ID NO: 15508 - protein, 37 aa, Artificial Sequence; identical to SEQ ID NO: 8201
  GFR-binding peptide
  MOD_RES (3)..(4)..(36): Xaa is C or S

SEQ ID NO: 15509 - protein, 43 aa, Artificial Sequence
  GFR-binding peptide
  MOD_RES (6)..(7)..(41)..(43): Xaa is C or S
  MOD_RES (21)..(22)..(23)..(24)..(25): Xaa is A or G
  MOD_RES (26)..(27)..(28)..(29): Xaa is A or G or is absent
STPPTXXVPTRLEPLPIVYYXXXXXXXXXEQLSNDMVVESXGX

SEQ ID NO: 15510 - protein, 36 aa, Artificial Sequence
  GFR-binding peptide
  MOD_RES (3)..(4)..(36): Xaa is C or S
KPXXAPTKLEPLPVVYYDDSSNVIEQLSNNMVVRSX

SEQ ID NO: 15511 - protein, 41 aa, Artificial Sequence
  GFR-binding peptide
  MOD_RES (6)..(7)..(40): Xaa is C or S
  MOD_RES (21)..(22)..(23)..(24)..(25): Xaa is A or G
  MOD_RES (26)..(27)..(28)..(29): Xaa is A or G or is absent
ASAAPXXVPQALSPISILFIXXXXXXXXXYKQYEMIVRSXK

SEQ ID NO: 15512 - protein, 37 aa, Artificial Sequence
  GFR-binding peptide
  MOD_RES (4)..(5): Xaa is C or S
  MOD_RES (19)..(20)..(21)..(22)..(23): Xaa is A or G
  MOD_RES (24)..(25)..(26)..(27): Xaa is A or G or is absent
PKAXXVPTELEPLPMVYYXXXXXXXXXEQLSNDMVVE

SEQ ID NO: 15513 - protein, 34 aa, Artificial Sequence; identical to SEQ ID NO: 8208
  GFR-binding peptide
  MOD_RES (1)..(2): Xaa is C or S
  MOD_RES (16)..(17)..(18)..(19)..(20): Xaa is A or G
  MOD_RES (21)..(22)..(23)..(24): Xaa is A or G or is absent

SEQ ID NO: 15514 - protein, 39 aa, Artificial Sequence
  GFR-binding peptide
  MOD_RES (5)..(6): Xaa is C or S
  MOD_RES (20)..(21)..(22)..(23)..(24): Xaa is A or G
  MOD_RES (25)..(26)..(27)..(28): Xaa is A or G or is absent
VPKPXXAPTKLEPLPVVYYXXXXXXXXXEQLSNNMVVRS

SEQ ID NO: 15515 - protein, 38 aa, Artificial Sequence
  GFR-binding peptide
  MOD_RES (3)..(4)..(36)..(38): Xaa is C or S
PTXXVPTRLNAISILYFDSANNVVLKKYRDMVVESXGX

SEQ ID NO: 15516 - protein, 35 aa, Artificial Sequence
  GFR-binding peptide
  MOD_RES (2)..(3)..(34): Xaa is C or S
PXXVSQDLSPISILFIIGKTPKIYKQYEMIVKSXK

SEQ ID NO: 15517 - protein, 39 aa, Artificial Sequence; identical to SEQ ID NO: 8212
  GFR-binding peptide
  MOD_RES (5)..(6)..(39): Xaa is C or S
  MOD_RES (20)..(21)..(22)..(23)..(24): Xaa is A or G
  MOD_RES (25)..(26)..(27)..(28): Xaa is A or G or is absent

SEQ ID NO: 15518 - protein, 36 aa, Artificial Sequence
  GFR-binding peptide
  MOD_RES (1)..(33)..(35): Xaa is C or S
XVPTRLNAISILYFDSANNVVLKKYRDMVVESXGXR

SEQ ID NO: 15519 - protein, 34 aa, Artificial Sequence; identical to SEQ ID NO: 8215
  GFR-binding peptide
  MOD_RES (1)..(2)..(33): Xaa is C or S

SEQ ID NO: 15520 - protein, 35 aa, Artificial Sequence
  GFR-binding peptide
  MOD_RES (2)..(3)..(35): Xaa is C or S
PXXAPTKLEPLTVLYYDDSSNVIEQLSNNMVVRSX

SEQ ID NO: 15521 - protein, 36 aa, Artificial Sequence
  GFR-binding peptide
  MOD_RES (33)..(35): Xaa is C or S
  MOD_RES (14)..(15)..(16)..(17)..(18): Xaa is A or G
  MOD_RES (19)..(20)..(21)..(22): Xaa is A or G or is absent
VPQALEPLTILYYXXXXXXXXXEQLSNMIVRSXKXS

SEQ ID NO: 15522 - protein, 33 aa, Artificial Sequence
  GFR-binding peptide
  MOD_RES (14)..(15)..(16)..(17)..(18): Xaa is A or G
  MOD_RES (19)..(20)..(21)..(22): Xaa is A or G or is absent
VPTELSPISMLFIXXXXXXXXXYKQYEDMVVEG

SEQ ID NO: 15523 - protein, 39 aa, Artificial Sequence
  GFR-binding peptide
  MOD_RES (2)..(36)..(38): Xaa is C or S
  MOD_RES (16)..(17)..(18)..(19)..(20): Xaa is A or G
  MOD_RES (21)..(22)..(23)..(24): Xaa is A or G or is absent
TXAPTKLSPISVLFIXXXXXXXXXYKQYENMVVRSXGXH

SEQ ID NO: 15524 - protein, 41 aa, Artificial Sequence; identical to SEQ ID NO: 8217
  GFR-binding peptide
  MOD_RES (6)..(7)..(39)..(41): Xaa is C or S

SEQ ID NO: 15525 - protein, 34 aa, Artificial Sequence
  GFR-binding peptide
  MOD_RES (1)..(1): Xaa is C or S
  MOD_RES (15)..(16)..(17)..(18)..(19): Xaa is A or G
  MOD_RES (20)..(21)..(22)..(23): Xaa is A or G or is absent
XAPTKLSPISVLFIXXXXXXXXXYKQYENMVVRS

SEQ ID NO: 15526 - protein, 38 aa, Artificial Sequence; identical to SEQ ID NO: 8218
  GFR-binding peptide
  MOD_RES (6)..(7)..(38): Xaa is C or S

SEQ ID NO: 15527 - protein, 33 aa, Artificial Sequence
  GFR-binding peptide
  MOD_RES (1)..(2): Xaa is C or S
XXAPTKLEPLPVVYYDDSSNVIEQLSNNMVVRS

SEQ ID NO: 15528 - protein, 35 aa, Artificial Sequence
  GFR-binding peptide
  MOD_RES (1)..(2)..(35): Xaa is C or S
  MOD_RES (16)..(17)..(18)..(19)..(20): Xaa is A or G
  MOD_RES (21)..(22)..(23)..(24): Xaa is A or G or is absent
XXVPQDLEPLPIVYYXXXXXXXXXEQLSNMVVKSX

SEQ ID NO: 15529 - protein, 38 aa, Artificial Sequence; identical to SEQ ID NO: 8220
  GFR-binding peptide
  MOD_RES (4)..(5)..(36)..(38): Xaa is C or S

SEQ ID NO: 15530 - protein, 37 aa, Artificial Sequence
  GFR-binding peptide
  MOD_RES (4)..(5): Xaa is C or S
  MOD_RES (19)..(20)..(21)..(22)..(23): Xaa is A or G
  MOD_RES (24)..(25)..(26)..(27): Xaa is A or G or is absent
PKPXXAPTKLEPLTVLYYXXXXXXXXXEQLSNNMVVR

SEQ ID NO: 15531 - protein, 35 aa, Artificial Sequence
  GFR-binding peptide
  MOD_RES (33)..(35): Xaa is C or S
  MOD_RES (14)..(15)..(16)..(17)..(18): Xaa is A or G
  MOD_RES (19)..(20)..(21)..(22): Xaa is A or G or is absent
VPQDLEPLPIVYYXXXXXXXXXEQLSNMVVKSXKX

SEQ ID NO: 15532 - protein, 36 aa, Artificial Sequence; identical to SEQ ID NO: 8223
  GFR-binding peptide
  MOD_RES (2)..(3)..(36): Xaa is C or S
  MOD_RES (17)..(18)..(19)..(20)..(21): Xaa is A or G
  MOD_RES (22)..(23)..(24)..(25): Xaa is A or G or is absent

SEQ ID NO: 15533 - protein, 36 aa, Artificial Sequence
  GFR-binding peptide
  MOD_RES (3)..(4)..(35): Xaa is C or S
SPXXVSQDLEPLPIVYYIGKTPKIEQLSNMIVKSXK

SEQ ID NO: 15534 - protein, 40 aa, Artificial Sequence; identical to SEQ ID NO: 8226
  GFR-binding peptide
  MOD_RES (5)..(6)..(39): Xaa is C or S
  MOD_RES (20)..(21)..(22)..(23)..(24): Xaa is A or G
  MOD_RES (25)..(26)..(27)..(28): Xaa is A or G or is absent

SEQ ID NO: 15535 - protein, 36 aa, Artificial Sequence
  GFR-binding peptide
  MOD_RES (4)..(5): Xaa is C or S
PKAXXVPTELEPLTMLYYDENEKVVEQLSNDMVVEG

SEQ ID NO: 15536 - protein, 36 aa, Artificial Sequence
  GFR-binding peptide
  MOD_RES (1)..(35): Xaa is C or S
  MOD_RES (15)..(16)..(17)..(18)..(19): Xaa is A or G
  MOD_RES (20)..(21)..(22)..(23): Xaa is A or G or is absent
XVPTRLSAISILYLXXXXXXXXXLKNYQDMVVESXG

SEQ ID NO: 15537 - protein, 38 aa, Artificial Sequence
  GFR-binding peptide
  MOD_RES (2)..(3)..(37): Xaa is C or S
  MOD_RES (17)..(18)..(19)..(20)..(21): Xaa is A or G
  MOD_RES (22)..(23)..(24)..(25): Xaa is A or G or is absent
PXXAPTQLSPISVLFIXXXXXXXXXYKQYENMVVRAXG

SEQ ID NO: 15538 - protein, 37 aa, Artificial Sequence; identical to SEQ ID NO: 8227
  GFR-binding peptide
  MOD_RES (3)..(4)..(36): Xaa is C or S

SEQ ID NO: 15539 - protein, 34 aa, Artificial Sequence; identical to SEQ ID NO: 8229
  GFR-binding peptide
  MOD_RES (33)..(33): Xaa is C or S
  MOD_RES (14)..(15)..(16)..(17)..(18): Xaa is A or G
  MOD_RES (19)..(20)..(21)..(22): Xaa is A or G or is absent

SEQ ID NO: 15540 - protein, 40 aa, Artificial Sequence; identical to SEQ ID NO: 8230
  GFR-binding peptide
  MOD_RES (4)..(5)..(39): Xaa is C or S
  MOD_RES (19)..(20)..(21)..(22)..(23): Xaa is A or G
  MOD_RES (24)..(25)..(26)..(27): Xaa is A or G or is absent

SEQ ID NO: 15541 - protein, 34 aa, Artificial Sequence
  GFR-binding peptide
  MOD_RES (1)..(2): Xaa is C or S
  MOD_RES (16)..(17)..(18)..(19)..(20): Xaa is A or G
  MOD_RES (21)..(22)..(23)..(24): Xaa is A or G or is absent
XXVPQDLSPISILFIXXXXXXXXXYKQYEMVVKS

SEQ ID NO: 15542 - protein, 32 aa, Artificial Sequence
  GFR-binding peptide
  MOD_RES (14)..(15)..(16)..(17)..(18): Xaa is A or G
  MOD_RES (19)..(20)..(21)..(22): Xaa is A or G or is absent
APTKLEPLTVLYYXXXXXXXXXEQLSNNMVVR

SEQ ID NO: 15543 - protein, 34 aa, Artificial Sequence
  GFR-binding peptide
  MOD_RES (1)..(2)..(34): Xaa is C or S
XXVPTELEPLPMVYYDEYDKVVEQLSNEMVVEGX

SEQ ID NO: 15544 - protein, 41 aa, Artificial Sequence
  GFR-binding peptide
  MOD_RES (5)..(6)..(38)..(40): Xaa is C or S
IPKAXXVPTELSPISMLFIDEYDKVVYKQYEEMVVEGXGXR

SEQ ID NO: 15545 - protein, 37 aa, Artificial Sequence; identical to SEQ ID NO: 8232
  GFR-binding peptide
  MOD_RES (2)..(3)..(34)..(36): Xaa is C or S

SEQ ID NO: 15546 - protein, 42 aa, Artificial Sequence
  GFR-binding peptide
  MOD_RES (6)..(7)..(40)..(42): Xaa is C or S
  MOD_RES (21)..(22)..(23)..(24)..(25): Xaa is A or G
  MOD_RES (26)..(27)..(28)..(29): Xaa is A or G or is absent
ASASPXXVSQDLEPLPIVYYXXXXXXXXXEQLSNMIVKSXKX

SEQ ID NO: 15547 - protein, 37 aa, Artificial Sequence
  GFR-binding peptide
  MOD_RES (1)..(2)..(34)..(36): Xaa is C or S
XXVPTRLNAISILYFDSANNVVLKKYRDMVVESXGXR

SEQ ID NO: 15548 - protein, 36 aa, Artificial Sequence; identical to SEQ ID NO: 8236
  GFR-binding peptide
  MOD_RES (2)..(36): Xaa is C or S
  MOD_RES (16)..(17)..(18)..(19)..(20): Xaa is A or G
  MOD_RES (21)..(22)..(23)..(24): Xaa is A or G or is absent

SEQ ID NO: 15549 - protein, 36 aa, Artificial Sequence
  GFR-binding peptide
  MOD_RES (4)..(5): Xaa is C or S
PKAXXVPTELEPLPMVYYDENEKVVEQLSNDMVVEG

SEQ ID NO: 15550 - protein, 42 aa, Artificial Sequence
  GFR-binding peptide
  MOD_RES (5)..(6)..(39)..(41): Xaa is C or S
  MOD_RES (20)..(21)..(22)..(23)..(24): Xaa is A or G
  MOD_RES (25)..(26)..(27)..(28): Xaa is A or G or is absent
SAAPXXVPQALEPLTILYYXXXXXXXXXEQLSNMIVRSXKXS

SEQ ID NO: 15551 - protein, 41 aa, Artificial Sequence
  GFR-binding peptide
  MOD_RES (4)..(5)..(39)..(41): Xaa is C or S
  MOD_RES (19)..(20)..(21)..(22)..(23): Xaa is A or G
  MOD_RES (24)..(25)..(26)..(27): Xaa is A or G or is absent
PKPXXAPTKLEPLPVVYYXXXXXXXXXEQLSNNMVVRSXGX

SEQ ID NO: 15552 - protein, 35 aa, Artificial Sequence; identical to SEQ ID NO: 8240
  GFR-binding peptide
  MOD_RES (1)..(2): Xaa is C or S
  MOD_RES (16)..(17)..(18)..(19)..(20): Xaa is A or G
  MOD_RES (21)..(22)..(23)..(24): Xaa is A or G or is absent

SEQ ID NO: 15553 - protein, 38 aa, Artificial Sequence
  GFR-binding peptide
  MOD_RES (6)..(7): Xaa is C or S
KIPKAXXVPTELEPLTMLYYDENEKVVEQLSNDMVVEG

SEQ ID NO: 15554 - protein, 39 aa, Artificial Sequence; identical to SEQ ID NO: 8241
  GFR-binding peptide
  MOD_RES (3)..(4)..(38): Xaa is C or S
  MOD_RES (18)..(19)..(20)..(21)..(22): Xaa is A or G
  MOD_RES (23)..(24)..(25)..(26): Xaa is A or G or is absent

SEQ ID NO: 15555 - protein, 32 aa, Artificial Sequence
  GFR-binding peptide
  MOD_RES (1)..(1): Xaa is C or S
XAPTQLEPLTVLYYDDSSNVIEQLSNNMVVRA

SEQ ID NO: 15556 - protein, 39 aa, Artificial Sequence
  GFR-binding peptide
  MOD_RES (4)..(5)..(39): Xaa is C or S
  MOD_RES (19)..(20)..(21)..(22)..(23): Xaa is A or G
  MOD_RES (24)..(25)..(26)..(27): Xaa is A or G or is absent
PKPXXAPTQLEPLPVVYYXXXXXXXXXEQLSNNMVVRAX

SEQ ID NO: 15557 - protein, 38 aa, Artificial Sequence
  GFR-binding peptide
  MOD_RES (3)..(35)..(37): Xaa is C or S
PTXAPTKLEPLPVVYYDDSSNVIEQLSNNMVVRSXGXH

SEQ ID NO: 15558 - protein, 41 aa, Artificial Sequence
  GFR-binding peptide
  MOD_RES (6)..(7)..(41): Xaa is C or S
  MOD_RES (21)..(22)..(23)..(24)..(25): Xaa is A or G
  MOD_RES (26)..(27)..(28)..(29): Xaa is A or G or is absent
YVPKPXXAPTKLEPLPVVYYXXXXXXXXXEQLSNNMVVRSX

SEQ ID NO: 15559 - protein, 42 aa, Artificial Sequence
  GFR-binding peptide
  MOD_RES (5)..(39)..(41): Xaa is C or S
  MOD_RES (19)..(20)..(21)..(22)..(23): Xaa is A or G
  MOD_RES (24)..(25)..(26)..(27): Xaa is A or G or is absent
TKPTXAPTKLEPLTVLYYXXXXXXXXXEQLSNNMVVRSXGXH

SEQ ID NO: 15560 - protein, 40 aa, Artificial Sequence
  GFR-binding peptide
  MOD_RES (6)..(7)..(40): Xaa is C or S
  MOD_RES (21)..(22)..(23)..(24)..(25): Xaa is A or G
  MOD_RES (26)..(27)..(28)..(29): Xaa is A or G or is absent
ASAAPXXVPQALEPLPIVYYXXXXXXXXXEQLSNMIVRSX

SEQ ID NO: 15561 - protein, 39 aa, Artificial Sequence
  GFR-binding peptide
  MOD_RES (3)..(37)..(39): Xaa is C or S
  MOD_RES (17)..(18)..(19)..(20)..(21): Xaa is A or G
  MOD_RES (22)..(23)..(24)..(25): Xaa is A or G or is absent
PTXAPTKLSPISVLFIXXXXXXXXXYKQYENMVVRSXGX

SEQ ID NO: 15562 - protein, 36 aa, Artificial Sequence
  GFR-binding peptide
  MOD_RES (5)..(6): Xaa is C or S
TPPTXXVPTRLSAISILYLDSANNVVLKNYQDMVVE

SEQ ID NO: 15563 - protein, 39 aa, Artificial Sequence
  GFR-binding peptide
  MOD_RES (1)..(2)..(36)..(38): Xaa is C or S
  MOD_RES (16)..(17)..(18)..(19)..(20): Xaa is A or G
  MOD_RES (21)..(22)..(23)..(24): Xaa is A or G or is absent
XXVPTRLSAISILYLXXXXXXXXXLKNYQDMVVESXGXR

SEQ ID NO: 15564 - protein, 36 aa, Artificial Sequence; identical to SEQ ID NO: 8248
  GFR-binding peptide
  MOD_RES (4)..(36): Xaa is C or S

SEQ ID NO: 15565 - protein, 42 aa, Artificial Sequence
  GFR-binding peptide
  MOD_RES (6)..(7)..(40)..(42): Xaa is C or S
  MOD_RES (21)..(22)..(23)..(24)..(25): Xaa is A or G
  MOD_RES (26)..(27)..(28)..(29): Xaa is A or G or is absent
ASAAPXXVPQALEPLPIVYYXXXXXXXXXEQLSNMIVRSXKX

SEQ ID NO: 15566 - protein, 35 aa, Artificial Sequence; identical to SEQ ID NO: 8249
  GFR-binding peptide
  MOD_RES (2)..(3): Xaa is C or S
  MOD_RES (17)..(18)..(19)..(20)..(21): Xaa is A or G
  MOD_RES (22)..(23)..(24)..(25): Xaa is A or G or is absent

SEQ ID NO: 15567 - protein, 38 aa, Artificial Sequence
  GFR-binding peptide
  MOD_RES (3)..(4)..(38): Xaa is C or S
  MOD_RES (18)..(19)..(20)..(21)..(22): Xaa is A or G
  MOD_RES (23)..(24)..(25)..(26): Xaa is A or G or is absent
PTXXVPTRLEPLPIVYYXXXXXXXXXEQLSNDMVVESX

SEQ ID NO: 15568 - protein, 40 aa, Artificial Sequence
  GFR-binding peptide
  MOD_RES (6)..(7)..(38)..(40): Xaa is C or S
ASAAPXXVPQALSPISILFIVGRKPKVYKQYEMIVRSXKX

SEQ ID NO: 15569 - protein, 31 aa, Artificial Sequence
  GFR-binding peptide
VPTRLSAISILYLDSANNVVLKNYQDMVVES

SEQ ID NO: 15570 - protein, 34 aa, Artificial Sequence; identical to SEQ ID NO: 8255
  GFR-binding peptide
  MOD_RES (31)..(33): Xaa is C or S

SEQ ID NO: 15571 - protein, 33 aa, Artificial Sequence
  GFR-binding peptide
  MOD_RES (1)..(32): Xaa is C or S
XVSQDLEPLPIVYYIGKTPKIEQLSNMIVKSXK

SEQ ID NO: 15572 - protein, 37 aa, Artificial Sequence; identical to SEQ ID NO: 8256
  GFR-binding peptide
  MOD_RES (5)..(5): Xaa is C or S
  MOD_RES (19)..(20)..(21)..(22)..(23): Xaa is A or G
  MOD_RES (24)..(25)..(26)..(27): Xaa is A or G or is absent

SEQ ID NO: 15573 - protein, 37 aa, Artificial Sequence
  GFR-binding peptide
  MOD_RES (3)..(4): Xaa is C or S
  MOD_RES (18)..(19)..(20)..(21)..(22): Xaa is A or G
  MOD_RES (23)..(24)..(25)..(26): Xaa is A or G or is absent
KPXXAPTQLEPLPVVYYXXXXXXXXXEQLSNNMVVRA

SEQ ID NO: 15574 - protein, 36 aa, Artificial Sequence
  GFR-binding peptide
  MOD_RES (2)..(34)..(36): Xaa is C or S
TXAPTKLSPISVLFIDDSSNVIYKQYENMVVRSXGX

SEQ ID NO: 15575 - protein, 39 aa, Artificial Sequence
  GFR-binding peptide
  MOD_RES (3)..(4)..(38): Xaa is C or S
  MOD_RES (18)..(19)..(20)..(21)..(22): Xaa is A or G
  MOD_RES (23)..(24)..(25)..(26): Xaa is A or G or is absent
KPXXAPTKLSPISVLFIXXXXXXXXXYKQYENMVVRSXG

SEQ ID NO: 15576 - protein, 38 aa, Artificial Sequence
  GFR-binding peptide
  MOD_RES (3)..(4)..(36)..(38): Xaa is C or S
KAXXVPTELEPLPMVYYDEYDKVVEQLSNEMVVEGXGX

SEQ ID NO: 15577 - protein, 34 aa, Artificial Sequence; identical to SEQ ID NO: 8262
  GFR-binding peptide
  MOD_RES (1)..(2)..(33): Xaa is C or S

SEQ ID NO: 15578 - protein, 38 aa, Artificial Sequence; identical to SEQ ID NO: 8266
  GFR-binding peptide
  MOD_RES (5)..(37): Xaa is C or S

SEQ ID NO: 15579 - protein, 32 aa, Artificial Sequence
  GFR-binding peptide
  MOD_RES (1)..(2): Xaa is C or S
XXAPTQLSPISVLFIDDSSNVIYKQYENMVVR

SEQ ID NO: 15580 - protein, 39 aa, Artificial Sequence; identical to SEQ ID NO: 8268
  GFR-binding peptide
  MOD_RES (3)..(4)..(36)..(38): Xaa is C or S

SEQ ID NO: 15581 - protein, 38 aa, Artificial Sequence
  GFR-binding peptide
  MOD_RES (3)..(4)..(35)..(37): Xaa is C or S
SPXXVSQDLSPISILFIIGKTPKIYKQYEMIVKSXKXS

SEQ ID NO: 15582 - protein, 38 aa, Artificial Sequence
  GFR-binding peptide
  MOD_RES (6)..(7): Xaa is C or S
STPPTXXVPTRLEPLPIVYYDSANNVVEQLSNDMVVES

SEQ ID NO: 15583 - protein, 35 aa, Artificial Sequence
  GFR-binding peptide
  MOD_RES (2)..(3)..(34): Xaa is C or S
PXXVPQDLEPLPIVYYVGRTPKVEQLSNMVVKSXK

SEQ ID NO: 15584 - protein, 41 aa, Artificial Sequence; identical to SEQ ID NO: 8271
  GFR-binding peptide
  MOD_RES (7)..(41): Xaa is C or S
  MOD_RES (21)..(22)..(23)..(24)..(25): Xaa is A or G
  MOD_RES (26)..(27)..(28)..(29): Xaa is A or G or is absent

SEQ ID NO: 15585 - protein, 40 aa, Artificial Sequence; identical to SEQ ID NO: 8275
  GFR-binding peptide
  MOD_RES (6)..(7): Xaa is C or S
  MOD_RES (21)..(22)..(23)..(24)..(25): Xaa is A or G
  MOD_RES (26)..(27)..(28)..(29): Xaa is A or G or is absent

SEQ ID NO: 15586 - protein, 39 aa, Artificial Sequence
  GFR-binding peptide
  MOD_RES (3)..(4)..(37)..(39): Xaa is C or S
  MOD_RES (18)..(19)..(20)..(21)..(22): Xaa is A or G
  MOD_RES (23)..(24)..(25)..(26): Xaa is A or G or is absent
SPXXVPQDLEPLTILYYXXXXXXXXXEQLSNMVVKSXKX

SEQ ID NO: 15587 - protein, 33 aa, Artificial Sequence; identical to SEQ ID NO: 8276
  GFR-binding peptide
  MOD_RES (1)..(1): Xaa is C or S
  MOD_RES (15)..(16)..(17)..(18)..(19): Xaa is A or G
  MOD_RES (20)..(21)..(22)..(23): Xaa is A or G or is absent

SEQ ID NO: 15588 - protein, 37 aa, Artificial Sequence
  GFR-binding peptide
  MOD_RES (6)..(6): Xaa is C or S
VTKPTXAPTKLEPLTVLYYDDSSNVIEQLSNNMVVRS

SEQ ID NO: 15589 - protein, 35 aa, Artificial Sequence; identical to SEQ ID NO: 8278
  GFR-binding peptide
  MOD_RES (34)..(34): Xaa is C or S
  MOD_RES (14)..(15)..(16)..(17)..(18): Xaa is A or G
  MOD_RES (19)..(20)..(21)..(22): Xaa is A or G or is absent

SEQ ID NO: 15590 - protein, 35 aa, Artificial Sequence
  GFR-binding peptide
  MOD_RES (4)..(5): Xaa is C or S
ASPXXVSQDLSPISILFIIGKTPKIYKQYEMIVKS

SEQ ID NO: 15591 - protein, 41 aa, Artificial Sequence
  GFR-binding peptide
  MOD_RES (5)..(6)..(38)..(40): Xaa is C or S
IPKAXXVPTELEPLTMLYYDEYDKVVEQLSNEMVVEGXGXR

SEQ ID NO: 15592 - protein, 37 aa, Artificial Sequence
  GFR-binding peptide
  MOD_RES (3)..(4): Xaa is C or S
  MOD_RES (18)..(19)..(20)..(21)..(22): Xaa is A or G
  MOD_RES (23)..(24)..(25)..(26): Xaa is A or G or is absent
KPXXAPTKLEPLPVVYYXXXXXXXXXEQLSNNMVVRS

SEQ ID NO: 15593 - protein, 38 aa, Artificial Sequence; identical to SEQ ID NO: 8286
  GFR-binding peptide
  MOD_RES (2)..(3)..(36)..(38): Xaa is C or S
  MOD_RES (17)..(18)..(19)..(20)..(21): Xaa is A or G
  MOD_RES (22)..(23)..(24)..(25): Xaa is A or G or is absent

SEQ ID NO: 15594 - protein, 40 aa, Artificial Sequence
  GFR-binding peptide
  MOD_RES (6)..(7)..(39): Xaa is C or S
SIPKAXXVPTELEPLTMLYYDEYDKVVEQLSNEMVVEGXG

SEQ ID NO: 15595 - protein, 35 aa, Artificial Sequence
  GFR-binding peptide
  MOD_RES (34)..(34): Xaa is C or S
  MOD_RES (14)..(15)..(16)..(17)..(18): Xaa is A or G
  MOD_RES (19)..(20)..(21)..(22): Xaa is A or G or is absent
VPTELEPLPMVYYXXXXXXXXXEQLSNDMVVEGXG

SEQ ID NO: 15596 - protein, 32 aa, Artificial Sequence
  GFR-binding peptide
  MOD_RES (14)..(15)..(16)..(17)..(18): Xaa is A or G
  MOD_RES (19)..(20)..(21)..(22): Xaa is A or G or is absent
VPTRLEPLTILYYXXXXXXXXXEQLSNDMVVE

SEQ ID NO: 15597 - protein, 39 aa, Artificial Sequence; identical to SEQ ID NO: 8290
  GFR-binding peptide
  MOD_RES (4)..(5)..(37)..(39): Xaa is C or S

SEQ ID NO: 15598 - protein, 40 aa, Artificial Sequence
  GFR-binding peptide
  MOD_RES (6)..(7)..(39): Xaa is C or S
TVPKPXXAPTQLEPLTVLYYDDSSNVIEQLSNNMVVRAXG

SEQ ID NO: 15599 - protein, 33 aa, Artificial Sequence
  GFR-binding peptide
  MOD_RES (1)..(2): Xaa is C or S
XXAPTKLEPLTVLYYDDSSNVIEQLSNNMVVRS

SEQ ID NO: 15600 - protein, 35 aa, Artificial Sequence
  GFR-binding peptide
  MOD_RES (34)..(34): Xaa is C or S
  MOD_RES (14)..(15)..(16)..(17)..(18): Xaa is A or G
  MOD_RES (19)..(20)..(21)..(22): Xaa is A or G or is absent
VPTRLSAISILYLXXXXXXXXXLKNYQDMVVESXG

SEQ ID NO: 15601 - protein, 40 aa, Artificial Sequence; identical to SEQ ID NO: 8298
  GFR-binding peptide
  MOD_RES (4)..(5)..(38)..(40): Xaa is C or S
  MOD_RES (19)..(20)..(21)..(22)..(23): Xaa is A or G
  MOD_RES (24)..(25)..(26)..(27): Xaa is A or G or is absent

SEQ ID NO: 15602 - protein, 35 aa, Artificial Sequence
  GFR-binding peptide
  MOD_RES (1)..(35): Xaa is C or S
  MOD_RES (15)..(16)..(17)..(18)..(19): Xaa is A or G
  MOD_RES (20)..(21)..(22)..(23): Xaa is A or G or is absent
XAPTQLEPLPVVYYXXXXXXXXXEQLSNNMVVRAX

SEQ ID NO: 15603 - protein, 39 aa, Artificial Sequence
  GFR-binding peptide
  MOD_RES (6)..(7)..(38): Xaa is C or S
ASASPXXVPQDLSPISILFIVGRTPKVYKQYEMVVKSXK

SEQ ID NO: 15604 - protein, 41 aa, Artificial Sequence
  GFR-binding peptide
  MOD_RES (5)..(6)..(40): Xaa is C or S
  MOD_RES (20)..(21)..(22)..(23)..(24): Xaa is A or G
  MOD_RES (25)..(26)..(27)..(28): Xaa is A or G or is absent
VPKPXXAPTKLEPLTVLYYXXXXXXXXXEQLSNNMVVRSXG

SEQ ID NO: 15605 - protein, 37 aa, Artificial Sequence; identical to SEQ ID NO: 8303
  GFR-binding peptide
  MOD_RES (2)..(3)..(36): Xaa is C or S
  MOD_RES (17)..(18)..(19)..(20)..(21): Xaa is A or G
  MOD_RES (22)..(23)..(24)..(25): Xaa is A or G or is absent

SEQ ID NO: 15606 - protein, 35 aa, Artificial Sequence
  GFR-binding peptide
  MOD_RES (1)..(35): Xaa is C or S
  MOD_RES (15)..(16)..(17)..(18)..(19): Xaa is A or G
  MOD_RES (20)..(21)..(22)..(23): Xaa is A or G or is absent
XVPTELSPISMLFIXXXXXXXXXYKQYEEMVVEGX

SEQ ID NO: 15607 - protein, 31 aa, Artificial Sequence; identical to SEQ ID NO: 8305
  GFR-binding peptide

SEQ ID NO: 15608 - protein, 35 aa, Artificial Sequence; identical to SEQ ID NO: 8308
  GFR-binding peptide
  MOD_RES (1)..(34): Xaa is C or S
  MOD_RES (15)..(16)..(17)..(18)..(19): Xaa is A or G
  MOD_RES (20)..(21)..(22)..(23): Xaa is A or G or is absent

SEQ ID NO: 15609 - protein, 39 aa, Artificial Sequence
  GFR-binding peptide
  MOD_RES (2)..(3)..(37)..(39): Xaa is C or S
  MOD_RES (17)..(18)..(19)..(20)..(21): Xaa is A or G
  MOD_RES (22)..(23)..(24)..(25): Xaa is A or G or is absent
PXXAPTKLSPISVLFIXXXXXXXXXYKQYENMVVRSXGX

SEQ ID NO: 15610 - protein, 39 aa, Artificial Sequence
  GFR-binding peptide
  MOD_RES (6)..(7): Xaa is C or S
  MOD_RES (21)..(22)..(23)..(24)..(25): Xaa is A or G
  MOD_RES (26)..(27)..(28)..(29): Xaa is A or G or is absent
ASASPXXVPQDLEPLPIVYYXXXXXXXXXEQLSNMVVKS

SEQ ID NO: 15611 - protein, 35 aa, Artificial Sequence
  GFR-binding peptide
  MOD_RES (3)..(4): Xaa is C or S
KAXXVPTELSPISMLFIDENEKVVYKQYEDMVVEG

SEQ ID NO: 15612 - protein, 42 aa, Artificial Sequence
  GFR-binding peptide
  MOD_RES (6)..(7)..(41): Xaa is C or S
  MOD_RES (21)..(22)..(23)..(24)..(25): Xaa is A or G
  MOD_RES (26)..(27)..(28)..(29): Xaa is A or G or is absent
STPPTXXVPTRLEPLTILYYXXXXXXXXXEQLSNDMVVESXG

SEQ ID NO: 15613 - protein, 36 aa, Artificial Sequence
  GFR-binding peptide
  MOD_RES (1)..(33)..(35): Xaa is C or S
XVPTRLEPLTILYYDSANNVVEQLSNDMVVESXGXR

SEQ ID NO: 15614 - protein, 37 aa, Artificial Sequence; identical to SEQ ID NO: 8309
  GFR-binding peptide
  MOD_RES (2)..(3)..(37): Xaa is C or S
  MOD_RES (17)..(18)..(19)..(20)..(21): Xaa is A or G
  MOD_RES (22)..(23)..(24)..(25): Xaa is A or G or is absent

SEQ ID NO: 15615 - protein, 33 aa, Artificial Sequence; identical to SEQ ID NO: 8311
  GFR-binding peptide
  MOD_RES (3)..(3): Xaa is C or S

SEQ ID NO: 15616 - protein, 33 aa, Artificial Sequence; identical to SEQ ID NO: 8312
  GFR-binding peptide
  MOD_RES (1)..(2)..(33): Xaa is C or S

SEQ ID NO: 15617 - protein, 37 aa, Artificial Sequence
  GFR-binding peptide
  MOD_RES (2)..(3)..(35)..(37): Xaa is C or S
TXXVPTRLSAISILYLDSANNVVLKNYQDMVVESXGX

SEQ ID NO: 15618 - protein, 41 aa, Artificial Sequence; identical to SEQ ID NO: 8315
  GFR-binding peptide
  MOD_RES (6)..(7)..(41): Xaa is C or S
  MOD_RES (21)..(22)..(23)..(24)..(25): Xaa is A or G
  MOD_RES (26)..(27)..(28)..(29): Xaa is A or G or is absent

SEQ ID NO: 15619 - protein, 36 aa, Artificial Sequence; identical to SEQ ID NO: 8316
  GFR-binding peptide
  MOD_RES (3)..(4)..(36): Xaa is C or S

SEQ ID NO: 15620 - protein, 38 aa, Artificial Sequence
  GFR-binding peptide
  MOD_RES (1)..(2)..(36)..(38): Xaa is C or S
  MOD_RES (16)..(17)..(18)..(19)..(20): Xaa is A or G
  MOD_RES (21)..(22)..(23)..(24): Xaa is A or G or is absent
XXVPTRLSAISILYLXXXXXXXXXLKNYQDMVVESXGX

SEQ ID NO: 15621 - protein, 34 aa, Artificial Sequence; identical to SEQ ID NO: 8320
  GFR-binding peptide
  MOD_RES (1)..(32)..(34): Xaa is C or S

SEQ ID NO: 15622 - protein, 35 aa, Artificial Sequence
  GFR-binding peptide
  MOD_RES (4)..(4): Xaa is C or S
KPTXAPTKLEPLPVVYYDDSSNVIEQLSNNMVVRS

SEQ ID NO: 15623 - protein, 39 aa, Artificial Sequence
  GFR-binding peptide
  MOD_RES (3)..(4)..(37)..(39): Xaa is C or S
  MOD_RES (18)..(19)..(20)..(21)..(22): Xaa is A or G
  MOD_RES (23)..(24)..(25)..(26): Xaa is A or G or is absent
SPXXVSQDLSPISILFIXXXXXXXXXYKQYEMIVKSXKX

SEQ ID NO: 15624 - protein, 36 aa, Artificial Sequence
  GFR-binding peptide
  MOD_RES (1)..(33)..(35): Xaa is C or S
XVPTRLSAISILYLDSANNVVLKNYQDMVVESXGXR

SEQ ID NO: 15625 - protein, 41 aa, Artificial Sequence
  GFR-binding peptide
  MOD_RES (6)..(7)..(40): Xaa is C or S
  MOD_RES (21)..(22)..(23)..(24)..(25): Xaa is A or G
  MOD_RES (26)..(27)..(28)..(29): Xaa is A or G or is absent
ASASPXXVSQDLSPISILFIXXXXXXXXXYKQYEMIVKSXK

SEQ ID NO: 15626 - protein, 37 aa, Artificial Sequence
  GFR-binding peptide
  MOD_RES (1)..(34)..(36): Xaa is C or S
  MOD_RES (15)..(16)..(17)..(18)..(19): Xaa is A or G
  MOD_RES (20)..(21)..(22)..(23): Xaa is A or G or is absent
XVPQALSPISILFIXXXXXXXXXYKQYEMIVRSXKXS

SEQ ID NO: 15627 - protein, 33 aa, Artificial Sequence
  GFR-binding peptide
  MOD_RES (1)..(1): Xaa is C or S
  MOD_RES (15)..(16)..(17)..(18)..(19): Xaa is A or G
  MOD_RES (20)..(21)..(22)..(23): Xaa is A or G or is absent
XVPTRLNAISILYFXXXXXXXXXLKKYRDMVVE

SEQ ID NO: 15628 - protein, 36 aa, Artificial Sequence; identical to SEQ ID NO: 8331
  GFR-binding peptide
  MOD_RES (1)..(2)..(34)..(36): Xaa is C or S

SEQ ID NO: 15629 - protein, 36 aa, Artificial Sequence
  GFR-binding peptide
  MOD_RES (3)..(35): Xaa is C or S
PTXAPTKLEPLPVVYYDDSSNVIEQLSNNMVVRSXG

SEQ ID NO: 15630 - protein, 39 aa, Artificial Sequence
  GFR-binding peptide
  MOD_RES (5)..(37)..(39): Xaa is C or S
TKPTXAPTKLEPLTVLYYDDSSNVIEQLSNNMVVRSXGX

SEQ ID NO: 15631 - protein, 34 aa, Artificial Sequence
  GFR-binding peptide
  MOD_RES (3)..(4): Xaa is C or S
KAXXVPTELEPLTMLYYDENEKVVEQLSNDMVVE

SEQ ID NO: 15632 - protein, 32 aa, Artificial Sequence
  GFR-binding peptide
  MOD_RES (14)..(15)..(16)..(17)..(18): Xaa is A or G
  MOD_RES (19)..(20)..(21)..(22): Xaa is A or G or is absent
VPQDLSPISILFIXXXXXXXXXYKQYEMVVKS

SEQ ID NO: 15633 - protein, 37 aa, Artificial Sequence; identical to SEQ ID NO: 8341
  GFR-binding peptide
  MOD_RES (3)..(35)..(37): Xaa is C or S

SEQ ID NO: 15634 - protein, 36 aa, Artificial Sequence; identical to SEQ ID NO: 8342
  GFR-binding peptide
  MOD_RES (4)..(5)..(36): Xaa is C or S

SEQ ID NO: 15635 - protein, 33 aa, Artificial Sequence; identical to SEQ ID NO: 8344
  GFR-binding peptide
  MOD_RES (31)..(33): Xaa is C or S

SEQ ID NO: 15636 - protein, 37 aa, Artificial Sequence
  GFR-binding peptide
  MOD_RES (4)..(5): Xaa is C or S
  MOD_RES (19)..(20)..(21)..(22)..(23): Xaa is A or G
  MOD_RES (24)..(25)..(26)..(27): Xaa is A or G or is absent
PKPXXAPTKLEPLPVVYYXXXXXXXXXEQLSNNMVVR

SEQ ID NO: 15637 - protein, 42 aa, Artificial Sequence
  GFR-binding peptide
  MOD_RES (6)..(7)..(41): Xaa is C or S
  MOD_RES (21)..(22)..(23)..(24)..(25): Xaa is A or G
  MOD_RES (26)..(27)..(28)..(29): Xaa is A or G or is absent
SIPKAXXVPTELEPLPMVYYXXXXXXXXXEQLSNEMVVEGXG

SEQ ID NO: 15638 - protein, 37 aa, Artificial Sequence; identical to SEQ ID NO: 8346
  GFR-binding peptide
  MOD_RES (3)..(4)..(36): Xaa is C or S

SEQ ID NO: 15639 - protein, 39 aa, Artificial Sequence; identical to SEQ ID NO: 8347
  GFR-binding peptide
  MOD_RES (5)..(6)..(39): Xaa is C or S
  MOD_RES (20)..(21)..(22)..(23)..(24): Xaa is A or G
  MOD_RES (25)..(26)..(27)..(28): Xaa is A or G or is absent

SEQ ID NO: 15640 - protein, 33 aa, Artificial Sequence
  GFR-binding peptide
  MOD_RES (1)..(2)..(33): Xaa is C or S
XXVPQALEPLTILYYVGRKPKVEQLSNMIVRSX

SEQ ID NO: 15641 - protein, 33 aa, Artificial Sequence
  GFR-binding peptide
  MOD_RES (2)..(3): Xaa is C or S
PXXVPQALEPLTILYYVGRKPKVEQLSNMIVRS

SEQ ID NO: 15642 - protein, 42 aa, Artificial Sequence; identical to SEQ ID NO: 8349
  GFR-binding peptide
  MOD_RES (5)..(6)..(40)..(42): Xaa is C or S
  MOD_RES (20)..(21)..(22)..(23)..(24): Xaa is A or G
  MOD_RES (25)..(26)..(27)..(28): Xaa is A or G or is absent

SEQ ID NO: 15643 - protein, 42 aa, Artificial Sequence
  GFR-binding peptide
  MOD_RES (6)..(7)..(41): Xaa is C or S
  MOD_RES (21)..(22)..(23)..(24)..(25): Xaa is A or G
  MOD_RES (26)..(27)..(28)..(29): Xaa is A or G or is absent
STPPTXXVPTRLSPISILFIXXXXXXXXXYKQYEDMVVESXG

SEQ ID NO: 15644 - protein, 38 aa, Artificial Sequence; identical to SEQ ID NO: 8350
  GFR-binding peptide
  MOD_RES (2)..(3)..(35)..(37): Xaa is C or S

SEQ ID NO: 15645 - protein, 38 aa, Artificial Sequence
  GFR-binding peptide
  MOD_RES (3)..(4)..(37): Xaa is C or S
  MOD_RES (18)..(19)..(20)..(21)..(22): Xaa is A or G
  MOD_RES (23)..(24)..(25)..(26): Xaa is A or G or is absent
APXXVPQALEPLPIVYYXXXXXXXXXEQLSNMIVRSXK

SEQ ID NO: 15646 - protein, 40 aa, Artificial Sequence
  GFR-binding peptide
  MOD_RES (6)..(38)..(40): Xaa is C or S
VTKPTXAPTKLSPISVLFIDDSSNVIYKQYENMVVRSXGX

SEQ ID NO: 15647 - protein, 38 aa, Artificial Sequence
  GFR-binding peptide
  MOD_RES (5)..(6)..(38): Xaa is C or S
VPKPXXAPTKLEPLPVVYYDDSSNVIEQLSNNMVVRSX

SEQ ID NO: 15648 - protein, 37 aa, Artificial Sequence
  GFR-binding peptide
  MOD_RES (1)..(2)..(35)..(37): Xaa is C or S
  MOD_RES (16)..(17)..(18)..(19)..(20): Xaa is A or G
  MOD_RES (21)..(22)..(23)..(24): Xaa is A or G or is absent
XXVPQDLEPLPIVYYXXXXXXXXXEQLSNMVVKSXKX

SEQ ID NO: 15649 - protein, 36 aa, Artificial Sequence
  GFR-binding peptide
  MOD_RES (4)..(5): Xaa is C or S
PKAXXVPTELEPLTMLYYDEYDKVVEQLSNEMVVEG

SEQ ID NO: 15650 - protein, 38 aa, Artificial Sequence
  GFR-binding peptide
  MOD_RES (4)..(5): Xaa is C or S
  MOD_RES (19)..(20)..(21)..(22)..(23): Xaa is A or G
  MOD_RES (24)..(25)..(26)..(27): Xaa is A or G or is absent
PKPXXAPTKLSPISVLFIXXXXXXXXXYKQYENMVVRS

SEQ ID NO: 15651 - protein, 40 aa, Artificial Sequence
  GFR-binding peptide
  MOD_RES (7)..(7): Xaa is C or S
  MOD_RES (21)..(22)..(23)..(24)..(25): Xaa is A or G
  MOD_RES (26)..(27)..(28)..(29): Xaa is A or G or is absent
HVTKPTXAPTKLEPLPVVYYXXXXXXXXXEQLSNNMVVRS

SEQ ID NO: 15652 - protein, 38 aa, Artificial Sequence
  GFR-binding peptide
  MOD_RES (4)..(5)..(37): Xaa is C or S
PPTXXVPTRLEPLTILYYDSANNVVEQLSNDMVVESXG

SEQ ID NO: 15653 - protein, 38 aa, Artificial Sequence; identical to SEQ ID NO: 8357
  GFR-binding peptide
  MOD_RES (4)..(5)..(36)..(38): Xaa is C or S

SEQ ID NO: 15654 - protein, 34 aa, Artificial Sequence
  GFR-binding peptide
  MOD_RES (33)..(33): Xaa is C or S
  MOD_RES (14)..(15)..(16)..(17)..(18): Xaa is A or G
  MOD_RES (19)..(20)..(21)..(22): Xaa is A or G or is absent
VPQDLEPLTILYYXXXXXXXXXEQLSNMVVKSXK

SEQ ID NO: 15655 - protein, 39 aa, Artificial Sequence
  GFR-binding peptide
  MOD_RES (5)..(6)..(39): Xaa is C or S
  MOD_RES (20)..(21)..(22)..(23)..(24): Xaa is A or G
  MOD_RES (25)..(26)..(27)..(28): Xaa is A or G or is absent
SASPXXVPQDLEPLTILYYXXXXXXXXXEQLSNMVVKSX

SEQ ID NO: 15656 - protein, 39 aa, Artificial Sequence; identical to SEQ ID NO: 8359
  GFR-binding peptide
  MOD_RES (4)..(5)..(38): Xaa is C or S
  MOD_RES (19)..(20)..(21)..(22)..(23): Xaa is A or G
  MOD_RES (24)..(25)..(26)..(27): Xaa is A or G or is absent

SEQ ID NO: 15657 - protein, 33 aa, Artificial Sequence
  GFR-binding peptide
  MOD_RES (1)..(32): Xaa is C or S
XVPQALEPLTILYYVGRKPKVEQLSNMIVRSXK

SEQ ID NO: 15658 - protein, 38 aa, Artificial Sequence
  GFR-binding peptide
  MOD_RES (2)..(3)..(37): Xaa is C or S
  MOD_RES (17)..(18)..(19)..(20)..(21): Xaa is A or G
  MOD_RES (22)..(23)..(24)..(25): Xaa is A or G or is absent
PXXAPTQLEPLTVLYYXXXXXXXXXEQLSNNMVVRAXG

SEQ ID NO: 15659 - protein, 38 aa, Artificial Sequence; identical to SEQ ID NO: 8361
  GFR-binding peptide
  MOD_RES (4)..(5)..(38): Xaa is C or S
  MOD_RES (19)..(20)..(21)..(22)..(23): Xaa is A or G
  MOD_RES (24)..(25)..(26)..(27): Xaa is A or G or is absent

SEQ ID NO: 15660 - protein, 30 aa, Artificial Sequence
  GFR-binding peptide
VPTELSPISMLFIDENEKVVYKQYEDMVVE

SEQ ID NO: 15661 - protein, 39 aa, Artificial Sequence
  GFR-binding peptide
  MOD_RES (5)..(6)..(37)..(39): Xaa is C or S
SAAPXXVPQALSPISILFIVGRKPKVYKQYEMIVRSXKX

SEQ ID NO: 15662 - protein, 34 aa, Artificial Sequence
  GFR-binding peptide
  MOD_RES (34)..(34): Xaa is C or S
  MOD_RES (14)..(15)..(16)..(17)..(18): Xaa is A or G
  MOD_RES (19)..(20)..(21)..(22): Xaa is A or G or is absent
APTKLEPLTVLYYXXXXXXXXXEQLSNNMVVRSX

SEQ ID NO: 15663 - protein, 41 aa, Artificial Sequence
  GFR-binding peptide
  MOD_RES (5)..(6)..(38)..(40): Xaa is C or S
VPKPXXAPTQLEPLPVVYYDDSSNVIEQLSNNMVVRAXGXH

SEQ ID NO: 15664 - protein, 40 aa, Artificial Sequence
  GFR-binding peptide
  MOD_RES (3)..(4)..(38)..(40): Xaa is C or S
  MOD_RES (18)..(19)..(20)..(21)..(22): Xaa is A or G
  MOD_RES (23)..(24)..(25)..(26): Xaa is A or G or is absent
PTXXVPTRLSAISILYLXXXXXXXXXLKNYQDMVVESXGX

SEQ ID NO: 15665 - protein, 40 aa, Artificial Sequence
  GFR-binding peptide
  MOD_RES (6)..(7): Xaa is C or S
  MOD_RES (21)..(22)..(23)..(24)..(25): Xaa is A or G
  MOD_RES (26)..(27)..(28)..(29): Xaa is A or G or is absent
STPPTXXVPTRLEPLTILYYXXXXXXXXXEQLSNDMVVES

SEQ ID NO: 15666 - protein, 36 aa, Artificial Sequence
  GFR-binding peptide
  MOD_RES (2)..(3): Xaa is C or S
  MOD_RES (17)..(18)..(19)..(20)..(21): Xaa is A or G
  MOD_RES (22)..(23)..(24)..(25): Xaa is A or G or is absent
PXXAPTQLEPLTVLYYXXXXXXXXXEQLSNNMVVRA

SEQ ID NO: 15667 - protein, 38 aa, Artificial Sequence; identical to SEQ ID NO: 8365
  GFR-binding peptide
  MOD_RES (4)..(5)..(36)..(38): Xaa is C or S

SEQ ID NO: 15668 - protein, 36 aa, Artificial Sequence
  GFR-binding peptide
  MOD_RES (1)..(2)..(34)..(36): Xaa is C or S
XXAPTQLSPISVLFIDDSSNVIYKQYENMVVRAXGX

SEQ ID NO: 15669 - protein, 36 aa, Artificial Sequence
  GFR-binding peptide
  MOD_RES (5)..(6): Xaa is C or S
IPKAXXVPTELEPLPMVYYDEYDKVVEQLSNEMVVE

SEQ ID NO: 15670 - protein, 35 aa, Artificial Sequence; identical to SEQ ID NO: 8368
  GFR-binding peptide
  MOD_RES (2)..(3): Xaa is C or S
  MOD_RES (17)..(18)..(19)..(20)..(21): Xaa is A or G
  MOD_RES (22)..(23)..(24)..(25): Xaa is A or G or is absent

SEQ ID NO: 15671 - protein, 36 aa, Artificial Sequence
  GFR-binding peptide
  MOD_RES (5)..(6): Xaa is C or S
IPKAXXVPTELEPLTMLYYDEYDKVVEQLSNEMVVE

SEQ ID NO: 15672 - protein, 37 aa, Artificial Sequence
  GFR-binding peptide
  MOD_RES (34)..(36): Xaa is C or S
  MOD_RES (14)..(15)..(16)..(17)..(18): Xaa is A or G
  MOD_RES (19)..(20)..(21)..(22): Xaa is A or G or is absent
VPTRLEPLTILYYXXXXXXXXXEQLSNDMVVESXGXR

SEQ ID NO: 15673 - protein, 34 aa, Artificial Sequence
  GFR-binding peptide
  MOD_RES (1)..(33): Xaa is C or S
XVPTRLEPLPIVYYDSANNVVEQLSNDMVVESXG

SEQ ID NO: 15674 - protein, 34 aa, Artificial Sequence; identical to SEQ ID NO: 8374
  GFR-binding peptide
  MOD_RES (1)..(1): Xaa is C or S
  MOD_RES (15)..(16)..(17)..(18)..(19): Xaa is A or G
  MOD_RES (20)..(21)..(22)..(23): Xaa is A or G or is absent

SEQ ID NO: 15675 - protein, 34 aa, Artificial Sequence
  GFR-binding peptide
  MOD_RES (1)..(33): Xaa is C or S
XVPTELEPLTMLYYDENEKVVEQLSNDMVVEGXG

SEQ ID NO: 15676 - protein, 36 aa, Artificial Sequence
  GFR-binding peptide
  MOD_RES (4)..(5)..(36): Xaa is C or S
ASPXXVPQDLSPISILFIVGRTPKVYKQYEMVVKSX

SEQ ID NO: 15677 - protein, 31 aa, Artificial Sequence; identical to SEQ ID NO: 8378
  GFR-binding peptide

SEQ ID NO: 15678 - protein, 41 aa, Artificial Sequence
  GFR-binding peptide
  MOD_RES (6)..(7)..(41): Xaa is C or S
  MOD_RES (21)..(22)..(23)..(24)..(25): Xaa is A or G
  MOD_RES (26)..(27)..(28)..(29): Xaa is A or G or is absent
STPPTXXVPTRLEPLPIVYYXXXXXXXXXEQLSNDMVVESX

SEQ ID NO: 15679 - protein, 35 aa, Artificial Sequence; identical to SEQ ID NO: 8379
  GFR-binding peptide
  MOD_RES (2)..(3): Xaa is C or S
  MOD_RES (17)..(18)..(19)..(20)..(21): Xaa is A or G
  MOD_RES (22)..(23)..(24)..(25): Xaa is A or G or is absent

SEQ ID NO: 15680 - protein, 40 aa, Artificial Sequence
  GFR-binding peptide
  MOD_RES (2)..(3)..(37)..(39): Xaa is C or S
  MOD_RES (17)..(18)..(19)..(20)..(21): Xaa is A or G
  MOD_RES (22)..(23)..(24)..(25): Xaa is A or G or is absent
PXXAPTQLEPLTVLYYXXXXXXXXXEQLSNNMVVRAXGXH

SEQ ID NO: 15681 - protein, 35 aa, Artificial Sequence
  GFR-binding peptide
  MOD_RES (1)..(32)..(34): Xaa is C or S
XVPQALSPISILFIVGRKPKVYKQYEMIVRSXKXS

SEQ ID NO: 15682 - protein, 40 aa, Artificial Sequence; identical to SEQ ID NO: 8382
  GFR-binding peptide
  MOD_RES (5)..(6)..(38)..(40): Xaa is C or S

SEQ ID NO: 15683 - protein, 39 aa, Artificial Sequence
  GFR-binding peptide
  MOD_RES (3)..(4)..(37)..(39): Xaa is C or S
  MOD_RES (18)..(19)..(20)..(21)..(22): Xaa is A or G
  MOD_RES (23)..(24)..(25)..(26): Xaa is A or G or is absent
APXXVPQALSPISILFIXXXXXXXXXYKQYEMIVRSXKX

SEQ ID NO: 15684 - protein, 38 aa, Artificial Sequence; identical to SEQ ID NO: 8383
  GFR-binding peptide
  MOD_RES (5)..(6): Xaa is C or S
  MOD_RES (20)..(21)..(22)..(23)..(24): Xaa is A or G
  MOD_RES (25)..(26)..(27)..(28): Xaa is A or G or is absent

SEQ ID NO: 15685 - protein, 34 aa, Artificial Sequence
  GFR-binding peptide
  MOD_RES (3)..(4): Xaa is C or S
KAXXVPTELEPLPMVYYDENEKVVEQLSNDMVVE

SEQ ID NO: 15686 - protein, 37 aa, Artificial Sequence
  GFR-binding peptide
  MOD_RES (4)..(5): Xaa is C or S
  MOD_RES (19)..(20)..(21)..(22)..(23): Xaa is A or G
  MOD_RES (24)..(25)..(26)..(27): Xaa is A or G or is absent
ASPXXVSQDLEPLPIVYYXXXXXXXXXEQLSNMIVKS

SEQ ID NO: 15687 - protein, 33 aa, Artificial Sequence; identical to SEQ ID NO: 8390
  GFR-binding peptide
  MOD_RES (33)..(33): Xaa is C or S
  MOD_RES (14)..(15)..(16)..(17)..(18): Xaa is A or G
  MOD_RES (19)..(20)..(21)..(22): Xaa is A or G or is absent

SEQ ID NO: 15688 - protein, 38 aa, Artificial Sequence
  GFR-binding peptide
  MOD_RES (3)..(4)..(37): Xaa is C or S
  MOD_RES (18)..(19)..(20)..(21)..(22): Xaa is A or G
  MOD_RES (23)..(24)..(25)..(26): Xaa is A or G or is absent
SPXXVSQDLEPLPIVYYXXXXXXXXXEQLSNMIVKSXK

SEQ ID NO: 15689 - protein, 36 aa, Artificial Sequence
  GFR-binding peptide
  MOD_RES (1)..(2)..(36): Xaa is C or S
  MOD_RES (16)..(17)..(18)..(19)..(20): Xaa is A or G
  MOD_RES (21)..(22)..(23)..(24): Xaa is A or G or is absent
XXVPTRLSAISILYLXXXXXXXXXLKNYQDMVVESX

SEQ ID NO: 15690 - protein, 39 aa, Artificial Sequence
  GFR-binding peptide
  MOD_RES (5)..(6)..(38): Xaa is C or S
VPKPXXAPTQLEPLPVVYYDDSSNVIEQLSNNMVVRAXG

SEQ ID NO: 15691 - protein, 35 aa, Artificial Sequence
  GFR-binding peptide
  MOD_RES (1)..(2)..(34): Xaa is C or S
XXVPTRLSAISILYLDSANNVVLKNYQDMVVESXG

SEQ ID NO: 15692 - protein, 40 aa, Artificial Sequence
  GFR-binding peptide
  MOD_RES (6)..(40): Xaa is C or S
  MOD_RES (20)..(21)..(22)..(23)..(24): Xaa is A or G
  MOD_RES (25)..(26)..(27)..(28): Xaa is A or G or is absent
VTKPTXAPTKLEPLPVVYYXXXXXXXXXEQLSNNMVVRSX

SEQ ID NO: 15693 - protein, 34 aa, Artificial Sequence
  GFR-binding peptide
  MOD_RES (1)..(2)..(33): Xaa is C or S
XXVPQALEPLTILYYVGRKPKVEQLSNMIVRSXK

SEQ ID NO: 15694 - protein, 36 aa, Artificial Sequence; identical to SEQ ID NO: 8397
  GFR-binding peptide
  MOD_RES (3)..(4)..(35): Xaa is C or S

SEQ ID NO: 15695 - protein, 32 aa, Artificial Sequence; identical to SEQ ID NO: 8400
  GFR-binding peptide
  MOD_RES (1)..(32): Xaa is C or S

SEQ ID NO: 15696 - protein, 39 aa, Artificial Sequence
  GFR-binding peptide
  MOD_RES (5)..(6): Xaa is C or S
  MOD_RES (20)..(21)..(22)..(23)..(24): Xaa is A or G
  MOD_RES (25)..(26)..(27)..(28): Xaa is A or G or is absent
VPKPXXAPTQLEPLPVVYYXXXXXXXXXEQLSNNMVVRA

SEQ ID NO: 15697 - protein, 36 aa, Artificial Sequence; identical to SEQ ID NO: 8401
  GFR-binding peptide
  MOD_RES (1)..(2)..(35): Xaa is C or S
  MOD_RES (16)..(17)..(18)..(19)..(20): Xaa is A or G
  MOD_RES (21)..(22)..(23)..(24): Xaa is A or G or is absent

SEQ ID NO: 15698 - protein, 34 aa, Artificial Sequence
  GFR-binding peptide
  MOD_RES (3)..(4): Xaa is C or S
PTXXVPTRLEPLPIVYYDSANNVVEQLSNDMVVE

SEQ ID NO: 15699 - protein, 33 aa, Artificial Sequence
  GFR-binding peptide
  MOD_RES (1)..(2): Xaa is C or S
XXVPTRLEPLPIVYYDSANNVVEQLSNDMVVES

SEQ ID NO: 15700 - protein, 39 aa, Artificial Sequence
  GFR-binding peptide
  MOD_RES (4)..(5)..(38): Xaa is C or S
  MOD_RES (19)..(20)..(21)..(22)..(23): Xaa is A or G
  MOD_RES (24)..(25)..(26)..(27): Xaa is A or G or is absent
ASPXXVPQDLEPLTILYYXXXXXXXXXEQLSNMVVKSXK

SEQ ID NO: 15701 - protein, 37 aa, Artificial Sequence
  GFR-binding peptide
  MOD_RES (1)..(35)..(37): Xaa is C or S
  MOD_RES (15)..(16)..(17)..(18)..(19): Xaa is A or G
  MOD_RES (20)..(21)..(22)..(23): Xaa is A or G or is absent
XAPTKLEPLPVVYYXXXXXXXXXEQLSNNMVVRSXGX

SEQ ID NO: 15702 - protein, 37 aa, Artificial Sequence
  GFR-binding peptide
  MOD_RES (1)..(35)..(37): Xaa is C or S
  MOD_RES (15)..(16)..(17)..(18)..(19): Xaa is A or G
  MOD_RES (20)..(21)..(22)..(23): Xaa is A or G or is absent
XVPTRLNAISILYFXXXXXXXXXLKKYRDMVVESXGX

SEQ ID NO: 15703 - protein, 36 aa, Artificial Sequence; identical to SEQ ID NO: 8404
  GFR-binding peptide
  MOD_RES (1)..(2)..(36): Xaa is C or S
  MOD_RES (16)..(17)..(18)..(19)..(20): Xaa is A or G
  MOD_RES (21)..(22)..(23)..(24): Xaa is A or G or is absent

SEQ ID NO: 15704 - protein, 33 aa, Artificial Sequence
  GFR-binding peptide
  MOD_RES (1)..(32): Xaa is C or S
XVPQDLSPISILFIVGRTPKVYKQYEMVVKSXK

SEQ ID NO: 15705 - protein, 36 aa, Artificial Sequence
  GFR-binding peptide
  MOD_RES (34)..(36): Xaa is C or S
  MOD_RES (14)..(15)..(16)..(17)..(18): Xaa is A or G
  MOD_RES (19)..(20)..(21)..(22): Xaa is A or G or is absent
VPTRLEPLPIVYYXXXXXXXXXEQLSNDMVVESXGX

SEQ ID NO: 15706 - protein, 38 aa, Artificial Sequence
  GFR-binding peptide
  MOD_RES (3)..(35)..(37): Xaa is C or S
PTXAPTKLEPLTVLYYDDSSNVIEQLSNNMVVRSXGXH

SEQ ID NO: 15707 - protein, 35 aa, Artificial Sequence
  GFR-binding peptide
  MOD_RES (4)..(4): Xaa is C or S
KPTXAPTKLEPLTVLYYDDSSNVIEQLSNNMVVRS

SEQ ID NO: 15708 - protein, 36 aa, Artificial Sequence; identical to SEQ ID NO: 8408
  GFR-binding peptide
  MOD_RES (2)..(3)..(36): Xaa is C or S
  MOD_RES (17)..(18)..(19)..(20)..(21): Xaa is A or G
  MOD_RES (22)..(23)..(24)..(25): Xaa is A or G or is absent

SEQ ID NO: 15709 - protein, 35 aa, Artificial Sequence
  GFR-binding peptide
  MOD_RES (1)..(33)..(35): Xaa is C or S
XVPTELEPLPMVYYDENEKVVEQLSNDMVVEGXGX

SEQ ID NO: 15710 - protein, 33 aa, Artificial Sequence; identical to SEQ ID NO: 8409
  GFR-binding peptide
  MOD_RES (1)..(1): Xaa is C or S
  MOD_RES (15)..(16)..(17)..(18)..(19): Xaa is A or G
  MOD_RES (20)..(21)..(22)..(23): Xaa is A or G or is absent

SEQ ID NO: 15711 - protein, 34 aa, Artificial Sequence; identical to SEQ ID NO: 8411
  GFR-binding peptide
  MOD_RES (1)..(2)..(33): Xaa is C or S

SEQ ID NO: 15712 - protein, 37 aa, Artificial Sequence; identical to SEQ ID NO: 8412
  GFR-binding peptide
  MOD_RES (1)..(2)..(36): Xaa is C or S
  MOD_RES (16)..(17)..(18)..(19)..(20): Xaa is A or G
  MOD_RES (21)..(22)..(23)..(24): Xaa is A or G or is absent

SEQ ID NO: 15713 - protein, 38 aa, Artificial Sequence
  GFR-binding peptide
  MOD_RES (5)..(6)..(37): Xaa is C or S
SASPXXVSQDLSPISILFIIGKTPKIYKQYEMIVKSXK

SEQ ID NO: 15714 - protein, 38 aa, Artificial Sequence; identical to SEQ ID NO: 8413
  GFR-binding peptide
  MOD_RES (5)..(6)..(38): Xaa is C or S

SEQ ID NO: 15715 - protein, 37 aa, Artificial Sequence
  GFR-binding peptide
  MOD_RES (2)..(3)..(36): Xaa is C or S
  MOD_RES (17)..(18)..(19)..(20)..(21): Xaa is A or G
  MOD_RES (22)..(23)..(24)..(25): Xaa is A or G or is absent
PXXVSQDLEPLPIVYYXXXXXXXXXEQLSNMIVKSXK

SEQ ID NO: 15716 - protein, 43 aa, Artificial Sequence; identical to SEQ ID NO: 8414
  GFR-binding peptide
  MOD_RES (6)..(7)..(41)..(43): Xaa is C or S
  MOD_RES (21)..(22)..(23)..(24)..(25): Xaa is A or G
  MOD_RES (26)..(27)..(28)..(29): Xaa is A or G or is absent

SEQ ID NO: 15717 - protein, 34 aa, Artificial Sequence
  GFR-binding peptide
  MOD_RES (1)..(2): Xaa is C or S
  MOD_RES (16)..(17)..(18)..(19)..(20): Xaa is A or G
  MOD_RES (21)..(22)..(23)..(24): Xaa is A or G or is absent
XXVPTRLEPLTILYYXXXXXXXXXEQLSNDMVVE

SEQ ID NO: 15718 - protein, 36 aa, Artificial Sequence; identical to SEQ ID NO: 8417
  GFR-binding peptide
  MOD_RES (1)..(2)..(36): Xaa is C or S
  MOD_RES (16)..(17)..(18)..(19)..(20): Xaa is A or G
  MOD_RES (21)..(22)..(23)..(24): Xaa is A or G or is absent

SEQ ID NO: 15719 - protein, 35 aa, Artificial Sequence; identical to SEQ ID NO: 8419
  GFR-binding peptide
  MOD_RES (1)..(2)..(33)..(35): Xaa is C or S

SEQ ID NO: 15720 - protein, 38 aa, Artificial Sequence; identical to SEQ ID NO: 8420
  GFR-binding peptide
  MOD_RES (3)..(4)..(35)..(37): Xaa is C or S

SEQ ID NO: 15721 - protein, 37 aa, Artificial Sequence
  GFR-binding peptide
  MOD_RES (2)..(3)..(35)..(37): Xaa is C or S
PXXAPTKLSPISVLFIDDSSNVIYKQYENMVVRSXGX

SEQ ID NO: 15722 - protein, 43 aa, Artificial Sequence
  GFR-binding peptide
  MOD_RES (7)..(41)..(43): Xaa is C or S
  MOD_RES (21)..(22)..(23)..(24)..(25): Xaa is A or G
  MOD_RES (26)..(27)..(28)..(29): Xaa is A or G or is absent
HVTKPTXAPTKLEPLPVVYYXXXXXXXXXEQLSNNMVVRSXGX

SEQ ID NO: 15723 - protein, 44 aa, Artificial Sequence; identical to SEQ ID NO: 8426
  GFR-binding peptide
  MOD_RES (7)..(41)..(43): Xaa is C or S
  MOD_RES (21)..(22)..(23)..(24)..(25): Xaa is A or G
  MOD_RES (26)..(27)..(28)..(29): Xaa is A or G or is absent

SEQ ID NO: 15724 - protein, 36 aa, Artificial Sequence
  GFR-binding peptide
  MOD_RES (3)..(4): Xaa is C or S
  MOD_RES (18)..(19)..(20)..(21)..(22): Xaa is A or G
  MOD_RES (23)..(24)..(25)..(26): Xaa is A or G or is absent
SPXXVSQDLEPLPIVYYXXXXXXXXXEQLSNMIVKS

SEQ ID NO: 15725 - protein, 41 aa, Artificial Sequence
  GFR-binding peptide
  MOD_RES (5)..(6)..(40): Xaa is C or S
  MOD_RES (20)..(21)..(22)..(23)..(24): Xaa is A or G
  MOD_RES (25)..(26)..(27)..(28): Xaa is A or G or is absent
VPKPXXAPTQLEPLPVVYYXXXXXXXXXEQLSNNMVVRAXG

SEQ ID NO: 15726 - protein, 36 aa, Artificial Sequence; identical to SEQ ID NO: 8428
  GFR-binding peptide
  MOD_RES (1)..(2)..(34)..(36): Xaa is C or S

SEQ ID NO: 15727 - protein, 38 aa, Artificial Sequence
  GFR-binding peptide
  MOD_RES (2)..(3)..(37): Xaa is C or S
  MOD_RES (17)..(18)..(19)..(20)..(21): Xaa is A or G
  MOD_RES (22)..(23)..(24)..(25): Xaa is A or G or is absent
PXXAPTKLSPISVLFIXXXXXXXXXYKQYENMVVRSXG

SEQ ID NO: 15728 - protein, 35 aa, Artificial Sequence
  GFR-binding peptide
  MOD_RES (1)..(35): Xaa is C or S
  MOD_RES (15)..(16)..(17)..(18)..(19): Xaa is A or G
  MOD_RES (20)..(21)..(22)..(23): Xaa is A or G or is absent
XAPTKLEPLTVLYYXXXXXXXXXEQLSNNMVVRSX

SEQ ID NO: 15729 - protein, 41 aa, Artificial Sequence; identical to SEQ ID NO: 8429
  GFR-binding peptide
  MOD_RES (4)..(5)..(39)..(41): Xaa is C or S
  MOD_RES (19)..(20)..(21)..(22)..(23): Xaa is A or G
  MOD_RES (24)..(25)..(26)..(27): Xaa is A or G or is absent

SEQ ID NO: 15730 - protein, 38 aa, Artificial Sequence; identical to SEQ ID NO: 8431
  GFR-binding peptide
  MOD_RES (1)..(35)..(37): Xaa is C or S
  MOD_RES (15)..(16)..(17)..(18)..(19): Xaa is A or G
  MOD_RES (20)..(21)..(22)..(23): Xaa is A or G or is absent

SEQ ID NO: 15731 - protein, 37 aa, Artificial Sequence; identical to SEQ ID NO: 8432
  GFR-binding peptide
  MOD_RES (5)..(6)..(37): Xaa is C or S

SEQ ID NO: 15732 - protein, 37 aa, Artificial Sequence
  GFR-binding peptide
  MOD_RES (5)..(6)..(37): Xaa is C or S
SASPXXVPQDLSPISILFIVGRTPKVYKQYEMVVKSX

SEQ ID NO: 15733 - protein, 37 aa, Artificial Sequence
  GFR-binding peptide
  MOD_RES (6)..(7): Xaa is C or S
SIPKAXXVPTELEPLTMLYYDEYDKVVEQLSNEMVVE

SEQ ID NO: 15734 - protein, 41 aa, Artificial Sequence; identical to SEQ ID NO: 8436
  GFR-binding peptide
  MOD_RES (3)..(4)..(38)..(40): Xaa is C or S
  MOD_RES (18)..(19)..(20)..(21)..(22): Xaa is A or G
  MOD_RES (23)..(24)..(25)..(26): Xaa is A or G or is absent

SEQ ID NO: 15735 - protein, 37 aa, Artificial Sequence
  GFR-binding peptide
  MOD_RES (4)..(5): Xaa is C or S
  MOD_RES (19)..(20)..(21)..(22)..(23): Xaa is A or G
  MOD_RES (24)..(25)..(26)..(27): Xaa is A or G or is absent
PKPXXAPTQLSPISVLFIXXXXXXXXXYKQYENMVVR

SEQ ID NO: 15736 - protein, 38 aa, Artificial Sequence
  GFR-binding peptide
  MOD_RES (3)..(4)..(36)..(38): Xaa is C or S
KAXXVPTELSPISMLFIDEYDKVVYKQYEEMVVEGXGX

SEQ ID NO: 15737 - protein, 37 aa, Artificial Sequence; identical to SEQ ID NO: 8440
  GFR-binding peptide
  MOD_RES (5)..(6): Xaa is C or S

SEQ ID NO: 15738 - protein, 38 aa, Artificial Sequence; identical to SEQ ID NO: 8442
  GFR-binding peptide
  MOD_RES (1)..(2)..(35)..(37): Xaa is C or S
  MOD_RES (16)..(17)..(18)..(19)..(20): Xaa is A or G
  MOD_RES (21)..(22)..(23)..(24): Xaa is A or G or is absent

SEQ ID NO: 15739 - protein, 35 aa, Artificial Sequence
  GFR-binding peptide
  MOD_RES (2)..(2): Xaa is C or S
  MOD_RES (16)..(17)..(18)..(19)..(20): Xaa is A or G
  MOD_RES (21)..(22)..(23)..(24): Xaa is A or G or is absent
TXAPTKLSPISVLFIXXXXXXXXXYKQYENMVVRS

SEQ ID NO: 15740 - protein, 40 aa, Artificial Sequence
  GFR-binding peptide
  MOD_RES (6)..(7): Xaa is C or S
  MOD_RES (21)..(22)..(23)..(24)..(25): Xaa is A or G
  MOD_RES (26)..(27)..(28)..(29): Xaa is A or G or is absent
KIPKAXXVPTELSPISMLFIXXXXXXXXXYKQYEDMVVEG

SEQ ID NO: 15741 - protein, 41 aa, Artificial Sequence
  GFR-binding peptide
  MOD_RES (4)..(5)..(39)..(41): Xaa is C or S
  MOD_RES (19)..(20)..(21)..(22)..(23): Xaa is A or G
  MOD_RES (24)..(25)..(26)..(27): Xaa is A or G or is absent
PKAXXVPTELEPLTMLYYXXXXXXXXXEQLSNDMVVEGXGX

SEQ ID NO: 15742 - protein, 32 aa, Artificial Sequence; identical to SEQ ID NO: 8444
  GFR-binding peptide
  MOD_RES (1)..(2): Xaa is C or S

SEQ ID NO: 15743 - protein, 36 aa, Artificial Sequence
  GFR-binding peptide
  MOD_RES (4)..(5): Xaa is C or S
PKPXXAPTKLEPLPVVYYDDSSNVIEQLSNNMVVRS

SEQ ID NO: 15744 - protein, 34 aa, Artificial Sequence; identical to SEQ ID NO: 8446
  GFR-binding peptide
  MOD_RES (1)..(1): Xaa is C or S
  MOD_RES (15)..(16)..(17)..(18)..(19): Xaa is A or G
  MOD_RES (20)..(21)..(22)..(23): Xaa is A or G or is absent

SEQ ID NO: 15745 - protein, 38 aa, Artificial Sequence
  GFR-binding peptide
  MOD_RES (3)..(4)..(38): Xaa is C or S
  MOD_RES (18)..(19)..(20)..(21)..(22): Xaa is A or G
  MOD_RES (23)..(24)..(25)..(26): Xaa is A or G or is absent
PTXXVPTRLNAISILYFXXXXXXXXXLKKYRDMVVESX

SEQ ID NO: 15746 - protein, 36 aa, Artificial Sequence
  GFR-binding peptide
  MOD_RES (3)..(4)..(36): Xaa is C or S
PTXXVPTRLEPLPIVYYDSANNVVEQLSNDMVVESX

SEQ ID NO: 15747 - protein, 38 aa, Artificial Sequence
  GFR-binding peptide
  MOD_RES (2)..(3)..(37): Xaa is C or S
  MOD_RES (17)..(18)..(19)..(20)..(21): Xaa is A or G
  MOD_RES (22)..(23)..(24)..(25): Xaa is A or G or is absent
AXXVPTELEPLPMVYYXXXXXXXXXEQLSNDMVVEGXG

SEQ ID NO: 15748 - protein, 38 aa, Artificial Sequence
  GFR-binding peptide
  MOD_RES (5)..(6)..(38): Xaa is C or S
VPKPXXAPTQLSPISVLFIDDSSNVIYKQYENMVVRAX

SEQ ID NO: 15749 - protein, 39 aa, Artificial Sequence
  GFR-binding peptide
  MOD_RES (3)..(4)..(38): Xaa is C or S
  MOD_RES (18)..(19)..(20)..(21)..(22): Xaa is A or G
  MOD_RES (23)..(24)..(25)..(26): Xaa is A or G or is absent
KAXXVPTELEPLPMVYYXXXXXXXXXEQLSNEMVVEGXG

SEQ ID NO: 15750 - protein, 39 aa, Artificial Sequence
  GFR-binding peptide
  MOD_RES (5)..(6): Xaa is C or S
  MOD_RES (20)..(21)..(22)..(23)..(24): Xaa is A or G
  MOD_RES (25)..(26)..(27)..(28): Xaa is A or G or is absent
TPPTXXVPTRLEPLPIVYYXXXXXXXXXEQLSNDMVVES

SEQ ID NO: 15751 - protein, 41 aa, Artificial Sequence
  GFR-binding peptide
  MOD_RES (6)..(7)..(40): Xaa is C or S
  MOD_RES (21)..(22)..(23)..(24)..(25): Xaa is A or G
  MOD_RES (26)..(27)..(28)..(29): Xaa is A or G or is absent
ASAAPXXVPQALEPLTILYYXXXXXXXXXEQLSNMIVRSXK

SEQ ID NO: 15752 - protein, 35 aa, Artificial Sequence
  GFR-binding peptide
  MOD_RES (1)..(2)..(35): Xaa is C or S
  MOD_RES (16)..(17)..(18)..(19)..(20): Xaa is A or G
  MOD_RES (21)..(22)..(23)..(24): Xaa is A or G or is absent
XXVPQALSPISILFIXXXXXXXXXYKQYEMIVRSX

SEQ ID NO: 15753 - protein, 40 aa, Artificial Sequence
  GFR-binding peptide
  MOD_RES (5)..(6)..(40): Xaa is C or S
  MOD_RES (20)..(21)..(22)..(23)..(24): Xaa is A or G
  MOD_RES (25)..(26)..(27)..(28): Xaa is A or G or is absent
TPPTXXVPTRLSAISILYLXXXXXXXXXLKNYQDMVVESX

SEQ ID NO: 15754 - protein, 32 aa, Artificial Sequence
  GFR-binding peptide
  MOD_RES (32)..(32): Xaa is C or S
APTQLEPLPVVYYDDSSNVIEQLSNNMVVRAX

SEQ ID NO: 15755 - protein, 40 aa, Artificial Sequence
  GFR-binding peptide
  MOD_RES (2)..(3)..(37)..(39): Xaa is C or S
  MOD_RES (17)..(18)..(19)..(20)..(21): Xaa is A or G
  MOD_RES (22)..(23)..(24)..(25): Xaa is A or G or is absent
TXXVPTRLEPLPIVYYXXXXXXXXXEQLSNDMVVESXGXR

SEQ ID NO: 15756 - protein, 41 aa, Artificial Sequence
  GFR-binding peptide
  MOD_RES (6)..(7)..(41): Xaa is C or S
  MOD_RES (21)..(22)..(23)..(24)..(25): Xaa is A or G
  MOD_RES (26)..(27)..(28)..(29): Xaa is A or G or is absent
SIPKAXXVPTELEPLPMVYYXXXXXXXXXEQLSNEMVVEGX

SEQ ID NO: 15757 - protein, 33 aa, Artificial Sequence
  GFR-binding peptide
  MOD_RES (2)..(3): Xaa is C or S
AXXVPTELSPISMLFIDENEKVVYKQYEDMVVE

SEQ ID NO: 15758 - protein, 39 aa, Artificial Sequence
  GFR-binding peptide
  MOD_RES (6)..(7): Xaa is C or S
  MOD_RES (21)..(22)..(23)..(24)..(25): Xaa is A or G
  MOD_RES (26)..(27)..(28)..(29): Xaa is A or G or is absent
ASASPXXVPQDLEPLTILYYXXXXXXXXXEQLSNMVVKS

SEQ ID NO: 15759 - protein, 39 aa, Artificial Sequence
  GFR-binding peptide
  MOD_RES (3)..(4)..(36)..(38): Xaa is C or S
KPXXAPTQLEPLTVLYYDDSSNVIEQLSNNMVVRAXGXH

SEQ ID NO: 15760 - protein, 34 aa, Artificial Sequence
  GFR-binding peptide
  MOD_RES (3)..(4): Xaa is C or S
PTXXVPTRLEPLTILYYDSANNVVEQLSNDMVVE

SEQ ID NO: 15761 - protein, 36 aa, Artificial Sequence
  GFR-binding peptide
  MOD_RES (3)..(4)..(36): Xaa is C or S
KPXXAPTQLEPLPVVYYDDSSNVIEQLSNNMVVRAX

SEQ ID NO: 15762 - protein, 35 aa, Artificial Sequence
  GFR-binding peptide
  MOD_RES (32)..(34): Xaa is C or S
VPTELSPISMLFIDEYDKVVYKQYEEMVVEGXGXR

SEQ ID NO: 15763 - protein, 32 aa, Artificial Sequence
  GFR-binding peptide
  MOD_RES (1)..(2): Xaa is C or S
XXVPQDLSPISILFIVGRTPKVYKQYEMVVKS

SEQ ID NO: 15764 - protein, 39 aa, Artificial Sequence; identical to SEQ ID NO: 8457
  GFR-binding peptide
  MOD_RES (2)..(3)..(37)..(39): Xaa is C or S
  MOD_RES (17)..(18)..(19)..(20)..(21): Xaa is A or G
  MOD_RES (22)..(23)..(24)..(25): Xaa is A or G or is absent

SEQ ID NO: 15765 - protein, 37 aa, Artificial Sequence; identical to SEQ ID NO: 8458
  GFR-binding peptide
  MOD_RES (6)..(7): Xaa is C or S

SEQ ID NO: 15766 - protein, 34 aa, Artificial Sequence
  GFR-binding peptide
  MOD_RES (1)..(2)..(34): Xaa is C or S
XXVPTELSPISMLFIDENEKVVYKQYEDMVVEGX

SEQ ID NO: 15767 - protein, 31 aa, Artificial Sequence
  GFR-binding peptide
  MOD_RES (1)..(1): Xaa is C or S
XVPQDLEPLPIVYYVGRTPKVEQLSNMVVKS

SEQ ID NO: 15768 - protein, 33 aa, Artificial Sequence; identical to SEQ ID NO: 8460
  GFR-binding peptide
  MOD_RES (2)..(3): Xaa is C or S

SEQ ID NO: 15769 - protein, 34 aa, Artificial Sequence
  GFR-binding peptide
  MOD_RES (4)..(4): Xaa is C or S
KPTXAPTKLSPISVLFIDDSSNVIYKQYENMVVR

SEQ ID NO: 15770 - protein, 35 aa, Artificial Sequence
  GFR-binding peptide
  MOD_RES (2)..(3)..(35): Xaa is C or S
PXXAPTQLEPLTVLYYDDSSNVIEQLSNNMVVRAX

SEQ ID NO: 15771 - protein, 38 aa, Artificial Sequence
  GFR-binding peptide
  MOD_RES (2)..(3)..(37): Xaa is C or S
  MOD_RES (17)..(18)..(19)..(20)..(21): Xaa is A or G
  MOD_RES (22)..(23)..(24)..(25): Xaa is A or G or is absent
TXXVPTRLEPLPIVYYXXXXXXXXXEQLSNDMVVESXG

SEQ ID NO: 15772 - protein, 37 aa, Artificial Sequence; identical to SEQ ID NO: 8462
  GFR-binding peptide
  MOD_RES (2)..(3)..(35)..(37): Xaa is C or S

SEQ ID NO: 15773 - protein, 39 aa, Artificial Sequence
  GFR-binding peptide
  MOD_RES (4)..(5)..(37)..(39): Xaa is C or S
PKAXXVPTELEPLPMVYYDENEKVVEQLSNDMVVEGXGX

SEQ ID NO: 15774 - protein, 37 aa, Artificial Sequence
  GFR-binding peptide
  MOD_RES (4)..(5): Xaa is C or S
  MOD_RES (19)..(20)..(21)..(22)..(23): Xaa is A or G
  MOD_RES (24)..(25)..(26)..(27): Xaa is A or G or is absent
ASPXXVSQDLSPISILFIXXXXXXXXXYKQYEMIVKS

SEQ ID NO: 15775 - protein, 34 aa, Artificial Sequence; identical to SEQ ID NO: 8464
  GFR-binding peptide
  MOD_RES (3)..(4): Xaa is C or S

SEQ ID NO: 15776 - protein, 40 aa, Artificial Sequence
  GFR-binding peptide
  MOD_RES (2)..(3)..(37)..(39): Xaa is C or S
  MOD_RES (17)..(18)..(19)..(20)..(21): Xaa is A or G
  MOD_RES (22)..(23)..(24)..(25): Xaa is A or G or is absent
AXXVPTELSPISMLFIXXXXXXXXXYKQYEEMVVEGXGXR

SEQ ID NO: 15777 - protein, 40 aa, Artificial Sequence
  GFR-binding peptide
  MOD_RES (6)..(7): Xaa is C or S
  MOD_RES (21)..(22)..(23)..(24)..(25): Xaa is A or G
  MOD_RES (26)..(27)..(28)..(29): Xaa is A or G or is absent
TVPKPXXAPTQLEPLPVVYYXXXXXXXXXEQLSNNMVVRA

SEQ ID NO: 15778 - protein, 38 aa, Artificial Sequence
  GFR-binding peptide
  MOD_RES (2)..(36)..(38): Xaa is C or S
  MOD_RES (16)..(17)..(18)..(19)..(20): Xaa is A or G
  MOD_RES (21)..(22)..(23)..(24): Xaa is A or G or is absent
TXAPTKLEPLPVVYYXXXXXXXXXEQLSNNMVVRSXGX

SEQ ID NO: 15779 - protein, 33 aa, Artificial Sequence; identical to SEQ ID NO: 8473
  GFR-binding peptide
  MOD_RES (31)..(33): Xaa is C or S

SEQ ID NO: 15780 - protein, 40 aa, Artificial Sequence; identical to SEQ ID NO: 8474
  GFR-binding peptide
  MOD_RES (3)..(4)..(38)..(40): Xaa is C or S
  MOD_RES (18)..(19)..(20)..(21)..(22): Xaa is A or G
  MOD_RES (23)..(24)..(25)..(26): Xaa is A or G or is absent

SEQ ID NO: 15781 - protein, 37 aa, Artificial Sequence
  GFR-binding peptide
  MOD_RES (1)..(2)..(34)..(36): Xaa is C or S
XXVPTRLEPLTILYYDSANNVVEQLSNDMVVESXGXR

SEQ ID NO: 15782 - protein, 39 aa, Artificial Sequence; identical to SEQ ID NO: 8476
  GFR-binding peptide
  MOD_RES (5)..(6)..(37)..(39): Xaa is C or S

SEQ ID NO: 15783 - protein, 37 aa, Artificial Sequence
  GFR-binding peptide
  MOD_RES (3)..(4)..(36): Xaa is C or S
PTXXVPTRLNAISILYFDSANNVVLKKYRDMVVESXG

SEQ ID NO: 15784 - protein, 40 aa, Artificial Sequence; identical to SEQ ID NO: 8480
  GFR-binding peptide
  MOD_RES (5)..(6)..(37)..(39): Xaa is C or S

SEQ ID NO: 15785 - protein, 36 aa, Artificial Sequence
  GFR-binding peptide
  MOD_RES (4)..(5)..(36): Xaa is C or S
AAPXXVPQALEPLTILYYVGRKPKVEQLSNMIVRSX

SEQ ID NO: 15786 - protein, 36 aa, Artificial Sequence
  GFR-binding peptide
  MOD_RES (1)..(2)..(35): Xaa is C or S
  MOD_RES (16)..(17)..(18)..(19)..(20): Xaa is A or G
  MOD_RES (21)..(22)..(23)..(24): Xaa is A or G or is absent
XXVSQDLSPISILFIXXXXXXXXXYKQYEMIVKSXK

SEQ ID NO: 15787 - protein, 34 aa, Artificial Sequence
  GFR-binding peptide
  MOD_RES (33)..(33): Xaa is C or S
  MOD_RES (14)..(15)..(16)..(17)..(18): Xaa is A or G
  MOD_RES (19)..(20)..(21)..(22): Xaa is A or G or is absent
VPQDLSPISILFIXXXXXXXXXYKQYEMVVKSXK

SEQ ID NO: 15788 - protein, 36 aa, Artificial Sequence
  GFR-binding peptide
  MOD_RES (4)..(5): Xaa is C or S
PKAXXVPTELEPLPMVYYDEYDKVVEQLSNEMVVEG

SEQ ID NO: 15789 - protein, 34 aa, Artificial Sequence
  GFR-binding peptide
  MOD_RES (3)..(4): Xaa is C or S
KAXXVPTELEPLPMVYYDEYDKVVEQLSNEMVVE

SEQ ID NO: 15790 - protein, 35 aa, Artificial Sequence
  GFR-binding peptide
  MOD_RES (1)..(34): Xaa is C or S
  MOD_RES (15)..(16)..(17)..(18)..(19): Xaa is A or G
  MOD_RES (20)..(21)..(22)..(23): Xaa is A or G or is absent
XVSQDLSPISILFIXXXXXXXXXYKQYEMIVKSXK

SEQ ID NO: 15791 - protein, 35 aa, Artificial Sequence; identical to SEQ ID NO: 8490
  GFR-binding peptide
  MOD_RES (1)..(35): Xaa is C or S
  MOD_RES (15)..(16)..(17)..(18)..(19): Xaa is A or G
  MOD_RES (20)..(21)..(22)..(23): Xaa is A or G or is absent

SEQ ID NO: 15792 - protein, 34 aa, Artificial Sequence
  GFR-binding peptide
  MOD_RES (3)..(4): Xaa is C or S
PTXXVPTRLNAISILYFDSANNVVLKKYRDMVVE

SEQ ID NO: 15793 - protein, 39 aa, Artificial Sequence
  GFR-binding peptide
  MOD_RES (1)..(2)..(36)..(38): Xaa is C or S
  MOD_RES (16)..(17)..(18)..(19)..(20): Xaa is A or G
  MOD_RES (21)..(22)..(23)..(24): Xaa is A or G or is absent
XXVPTRLEPLTILYYXXXXXXXXXEQLSNDMVVESXGXR

SEQ ID NO: 15794 - protein, 38 aa, Artificial Sequence; identical to SEQ ID NO: 8496
  GFR-binding peptide
  MOD_RES (1)..(35)..(37): Xaa is C or S
  MOD_RES (15)..(16)..(17)..(18)..(19): Xaa is A or G
  MOD_RES (20)..(21)..(22)..(23): Xaa is A or G or is absent

SEQ ID NO: 15795 - protein, 38 aa, Artificial Sequence; identical to SEQ ID NO: 8497
  GFR-binding peptide
  MOD_RES (5)..(6)..(37): Xaa is C or S

SEQ ID NO: 15796 - protein, 33 aa, Artificial Sequence
  GFR-binding peptide
  MOD_RES (1)..(33): Xaa is C or S
XVPTELEPLPMVYYDEYDKVVEQLSNEMVVEGX

SEQ ID NO: 15797 - protein, 43 aa, Artificial Sequence
  GFR-binding peptide
  MOD_RES (6)..(7)..(40)..(42): Xaa is C or S
  MOD_RES (21)..(22)..(23)..(24)..(25): Xaa is A or G
  MOD_RES (26)..(27)..(28)..(29): Xaa is A or G or is absent
ASASPXXVSQDLEPLTILYYXXXXXXXXXEQLSNMIVKSXKXS

SEQ ID NO: 15798 - protein, 36 aa, Artificial Sequence
  GFR-binding peptide
  MOD_RES (3)..(4)..(36): Xaa is C or S
KAXXVPTELEPLPMVYYDEYDKVVEQLSNEMVVEGX

SEQ ID NO: 15799 - protein, 34 aa, Artificial Sequence
  GFR-binding peptide
  MOD_RES (3)..(4): Xaa is C or S
KPXXAPTKLEPLPVVYYDDSSNVIEQLSNNMVVR

SEQ ID NO: 15800 - protein, 36 aa, Artificial Sequence; identical to SEQ ID NO: 8500
  GFR-binding peptide
  MOD_RES (5)..(6): Xaa is C or S

SEQ ID NO: 15801 - protein, 36 aa, Artificial Sequence
  GFR-binding peptide
  MOD_RES (5)..(6): Xaa is C or S
VPKPXXAPTKLEPLPVVYYDDSSNVIEQLSNNMVVR

SEQ ID NO: 15802 - protein, 39 aa, Artificial Sequence
  GFR-binding peptide
  MOD_RES (1)..(2)..(36)..(38): Xaa is C or S
  MOD_RES (16)..(17)..(18)..(19)..(20): Xaa is A or G
  MOD_RES (21)..(22)..(23)..(24): Xaa is A or G or is absent
XXVPTELSPISMLFIXXXXXXXXXYKQYEDMVVEGXGXR

SEQ ID NO: 15803 - protein, 34 aa, Artificial Sequence; identical to SEQ ID NO: 8505
  GFR-binding peptide
  MOD_RES (3)..(4): Xaa is C or S

SEQ ID NO: 15804 - protein, 36 aa, Artificial Sequence
  GFR-binding peptide
  MOD_RES (2)..(3)..(35): Xaa is C or S
AXXVPTELEPLTMLYYDENEKVVEQLSNDMVVEGXG

SEQ ID NO: 15805 - protein, 40 aa, Artificial Sequence
  GFR-binding peptide
  MOD_RES (5)..(6)..(40): Xaa is C or S
  MOD_RES (20)..(21)..(22)..(23)..(24): Xaa is A or G
  MOD_RES (25)..(26)..(27)..(28): Xaa is A or G or is absent
VPKPXXAPTKLEPLPVVYYXXXXXXXXXEQLSNNMVVRSX

SEQ ID NO: 15806 - protein, 40 aa, Artificial Sequence
  GFR-binding peptide
  MOD_RES (4)..(5)..(39): Xaa is C or S
  MOD_RES (19)..(20)..(21)..(22)..(23): Xaa is A or G
  MOD_RES (24)..(25)..(26)..(27): Xaa is A or G or is absent
PKAXXVPTELEPLPMVYYXXXXXXXXXEQLSNEMVVEGXG

SEQ ID NO: 15807 - protein, 38 aa, Artificial Sequence
  GFR-binding peptide
  MOD_RES (2)..(3)..(36)..(38): Xaa is C or S
  MOD_RES (17)..(18)..(19)..(20)..(21): Xaa is A or G
  MOD_RES (22)..(23)..(24)..(25): Xaa is A or G or is absent
PXXVSQDLEPLPIVYYXXXXXXXXXEQLSNMIVKSXKX

SEQ ID NO: 15808 - protein, 39 aa, Artificial Sequence
  GFR-binding peptide
  MOD_RES (6)..(7)..(39): Xaa is C or S
STPPTXXVPTRLEPLPIVYYDSANNVVEQLSNDMVVESX

SEQ ID NO: 15809 - protein, 35 aa, Artificial Sequence
  GFR-binding peptide
  MOD_RES (1)..(2): Xaa is C or S
  MOD_RES (16)..(17)..(18)..(19)..(20): Xaa is A or G
  MOD_RES (21)..(22)..(23)..(24): Xaa is A or G or is absent
XXVPTRLEPLTILYYXXXXXXXXXEQLSNDMVVES

SEQ ID NO: 15810 - protein, 39 aa, Artificial Sequence
  GFR-binding peptide
  MOD_RES (4)..(5)..(36)..(38): Xaa is C or S
ASPXXVPQDLEPLPIVYYVGRTPKVEQLSNMVVKSXKXS

SEQ ID NO: 15811 - protein, 39 aa, Artificial Sequence
  GFR-binding peptide
  MOD_RES (6)..(7)..(39): Xaa is C or S
YVPKPXXAPTKLSPISVLFIDDSSNVIYKQYENMVVRSX

SEQ ID NO: 15812 - protein, 44 aa, Artificial Sequence
  GFR-binding peptide
  MOD_RES (6)..(7)..(41)..(43): Xaa is C or S
  MOD_RES (21)..(22)..(23)..(24)..(25): Xaa is A or G
  MOD_RES (26)..(27)..(28)..(29): Xaa is A or G or is absent
STPPTXXVPTRLEPLTILYYXXXXXXXXXEQLSNDMVVESXGXR

SEQ ID NO: 15813 - protein, 37 aa, Artificial Sequence
  GFR-binding peptide
  MOD_RES (1)..(2)..(35)..(37): Xaa is C or S
  MOD_RES (16)..(17)..(18)..(19)..(20): Xaa is A or G
  MOD_RES (21)..(22)..(23)..(24): Xaa is A or G or is absent
XXVPQALEPLPIVYYXXXXXXXXXEQLSNMIVRSXKX

SEQ ID NO: 15814 - protein, 37 aa, Artificial Sequence
  GFR-binding peptide
  MOD_RES (3)..(4)..(36): Xaa is C or S
KPXXAPTKLEPLPVVYYDDSSNVIEQLSNNMVVRSXG

SEQ ID NO: 15815 - protein, 37 aa, Artificial Sequence
  GFR-binding peptide
  MOD_RES (6)..(7): Xaa is C or S
ASASPXXVSQDLEPLPIVYYIGKTPKIEQLSNMIVKS

SEQ ID NO: 15816 - protein, 38 aa, Artificial Sequence
  GFR-binding peptide
  MOD_RES (4)..(5): Xaa is C or S
  MOD_RES (19)..(20)..(21)..(22)..(23): Xaa is A or G
  MOD_RES (24)..(25)..(26)..(27): Xaa is A or G or is absent
PKAXXVPTELSPISMLFIXXXXXXXXXYKQYEEMVVEG

SEQ ID NO: 15817 - protein, 32 aa, Artificial Sequence
  GFR-binding peptide
  MOD_RES (1)..(1): Xaa is C or S
XVPTRLEPLTILYYDSANNVVEQLSNDMVVES

SEQ ID NO: 15818 - protein, 39 aa, Artificial Sequence
  GFR-binding peptide
  MOD_RES (4)..(5)..(37)..(39): Xaa is C or S
PKAXXVPTELEPLTMLYYDEYDKVVEQLSNEMVVEGXGX

SEQ ID NO: 15819 - protein, 36 aa, Artificial Sequence; identical to SEQ ID NO: 8517
  GFR-binding peptide
  MOD_RES (3)..(4): Xaa is C or S
  MOD_RES (18)..(19)..(20)..(21)..(22): Xaa is A or G
  MOD_RES (23)..(24)..(25)..(26): Xaa is A or G or is absent

SEQ ID NO: 15820 - protein, 37 aa, Artificial Sequence; identical to SEQ ID NO: 8518
  GFR-binding peptide
  MOD_RES (4)..(5): Xaa is C or S
  MOD_RES (19)..(20)..(21)..(22)..(23): Xaa is A or G
  MOD_RES (24)..(25)..(26)..(27): Xaa is A or G or is absent

SEQ ID NO: 15821 - protein, 41 aa, Artificial Sequence
  GFR-binding peptide
  MOD_RES (5)..(6)..(40): Xaa is C or S
  MOD_RES (20)..(21)..(22)..(23)..(24): Xaa is A or G
  MOD_RES (25)..(26)..(27)..(28): Xaa is A or G or is absent
VPKPXXAPTKLSPISVLFIXXXXXXXXXYKQYENMVVRSXG

SEQ ID NO: 15822 - protein, 37 aa, Artificial Sequence; identical to SEQ ID NO: 8524
  GFR-binding peptide
  MOD_RES (5)..(6): Xaa is C or S

SEQ ID NO: 15823 - protein, 33 aa, Artificial Sequence; identical to SEQ ID NO: 8526
  GFR-binding peptide
  MOD_RES (1)..(2)..(33): Xaa is C or S

SEQ ID NO: 15824 - protein, 42 aa, Artificial Sequence
  GFR-binding peptide
  MOD_RES (6)..(7)..(39)..(41): Xaa is C or S
STPPTXXVPTRLSAISILYLDSANNVVLKNYQDMVVESXGXR

SEQ ID NO: 15825 - protein, 33 aa, Artificial Sequence; identical to SEQ ID NO: 8529
  GFR-binding peptide
  MOD_RES (1)..(32): Xaa is C or S

SEQ ID NO: 15826 - protein, 35 aa, Artificial Sequence
  GFR-binding peptide
  MOD_RES (1)..(35): Xaa is C or S
  MOD_RES (15)..(16)..(17)..(18)..(19): Xaa is A or G
  MOD_RES (20)..(21)..(22)..(23): Xaa is A or G or is absent
XVPTRLSAISILYLXXXXXXXXXLKNYQDMVVESX

SEQ ID NO: 15827 - protein, 32 aa, Artificial Sequence
  GFR-binding peptide
  MOD_RES (32)..(32): Xaa is C or S
VPTELSPISMLFIDEYDKVVYKQYEEMVVEGX

SEQ ID NO: 15828 - protein, 38 aa, Artificial Sequence
  GFR-binding peptide
  MOD_RES (2)..(3)..(35)..(37): Xaa is C or S
TXXVPTRLSAISILYLDSANNVVLKNYQDMVVESXGXR

SEQ ID NO: 15829 - protein, 39 aa, Artificial Sequence
  GFR-binding peptide
  MOD_RES (1)..(2)..(36)..(38): Xaa is C or S
  MOD_RES (16)..(17)..(18)..(19)..(20): Xaa is A or G
  MOD_RES (21)..(22)..(23)..(24): Xaa is A or G or is absent
XXAPTQLEPLPVVYYXXXXXXXXXEQLSNNMVVRAXGXH

SEQ ID NO: 15830 - protein, 41 aa, Artificial Sequence
  GFR-binding peptide
  MOD_RES (4)..(5)..(39)..(41): Xaa is C or S
  MOD_RES (19)..(20)..(21)..(22)..(23): Xaa is A or G
  MOD_RES (24)..(25)..(26)..(27): Xaa is A or G or is absent
PPTXXVPTRLEPLTILYYXXXXXXXXXEQLSNDMVVESXGX

SEQ ID NO: 15831 - protein, 38 aa, Artificial Sequence; identical to SEQ ID NO: 8534
  GFR-binding peptide
  MOD_RES (1)..(2)..(35)..(37): Xaa is C or S
  MOD_RES (16)..(17)..(18)..(19)..(20): Xaa is A or G
  MOD_RES (21)..(22)..(23)..(24): Xaa is A or G or is absent

SEQ ID NO: 15832 - protein, 39 aa, Artificial Sequence; identical to SEQ ID NO: 8535
  GFR-binding peptide
  MOD_RES (6)..(7)..(39): Xaa is C or S

SEQ ID NO: 15833 - protein, 36 aa, Artificial Sequence; identical to SEQ ID NO: 8536
  GFR-binding peptide
  MOD_RES (5)..(6): Xaa is C or S

SEQ ID NO: 15834 - protein, 43 aa, Artificial Sequence
  GFR-binding peptide
  MOD_RES (6)..(7)..(41)..(43): Xaa is C or S
  MOD_RES (21)..(22)..(23)..(24)..(25): Xaa is A or G
  MOD_RES (26)..(27)..(28)..(29): Xaa is A or G or is absent
TVPKPXXAPTQLEPLPVVYYXXXXXXXXXEQLSNNMVVRAXGX

SEQ ID NO: 15835 - protein, 34 aa, Artificial Sequence
  GFR-binding peptide
  MOD_RES (1)..(2): Xaa is C or S
  MOD_RES (16)..(17)..(18)..(19)..(20): Xaa is A or G
  MOD_RES (21)..(22)..(23)..(24): Xaa is A or G or is absent
XXVPQDLEPLPIVYYXXXXXXXXXEQLSNMVVKS

SEQ ID NO: 15836 - protein, 37 aa, Artificial Sequence; identical to SEQ ID NO: 8538
  GFR-binding peptide
  MOD_RES (6)..(7): Xaa is C or S

SEQ ID NO: 15837 - protein, 35 aa, Artificial Sequence
  GFR-binding peptide
  MOD_RES (1)..(2)..(34): Xaa is C or S
XXAPTKLEPLPVVYYDDSSNVIEQLSNNMVVRSXG

SEQ ID NO: 15838 - protein, 37 aa, Artificial Sequence; identical to SEQ ID NO: 8541
  GFR-binding peptide
  MOD_RES (4)..(5): Xaa is C or S
  MOD_RES (19)..(20)..(21)..(22)..(23): Xaa is A or G
  MOD_RES (24)..(25)..(26)..(27): Xaa is A or G or is absent

SEQ ID NO: 15839 - protein, 33 aa, Artificial Sequence
  GFR-binding peptide
  MOD_RES (1)..(1): Xaa is C or S
  MOD_RES (15)..(16)..(17)..(18)..(19): Xaa is A or G
  MOD_RES (20)..(21)..(22)..(23): Xaa is A or G or is absent
XVPTRLSAISILYLXXXXXXXXXLKNYQDMVVE

SEQ ID NO: 15840 - protein, 33 aa, Artificial Sequence
  GFR-binding peptide
  MOD_RES (2)..(2): Xaa is C or S
TXAPTKLEPLPVVYYDDSSNVIEQLSNNMVVRS

SEQ ID NO: 15841 - protein, 37 aa, Artificial Sequence
  GFR-binding peptide
  MOD_RES (1)..(2)..(35)..(37): Xaa is C or S
  MOD_RES (16)..(17)..(18)..(19)..(20): Xaa is A or G
  MOD_RES (21)..(22)..(23)..(24): Xaa is A or G or is absent
XXVPQDLEPLTILYYXXXXXXXXXEQLSNMVVKSXKX

SEQ ID NO: 15842 - protein, 39 aa, Artificial Sequence; identical to SEQ ID NO: 8546
  GFR-binding peptide
  MOD_RES (4)..(5)..(36)..(38): Xaa is C or S

SEQ ID NO: 15843 - protein, 39 aa, Artificial Sequence
  GFR-binding peptide
  MOD_RES (6)..(7)..(38): Xaa is C or S
ASAAPXXVPQALEPLTILYYVGRKPKVEQLSNMIVRSXK

SEQ ID NO: 15844 - protein, 34 aa, Artificial Sequence
  GFR-binding peptide
  MOD_RES (31)..(33): Xaa is C or S
VPQALSPISILFIVGRKPKVYKQYEMIVRSXKXS

SEQ ID NO: 15845 - protein, 39 aa, Artificial Sequence
  GFR-binding peptide
  MOD_RES (3)..(4)..(36)..(38): Xaa is C or S
PTXXVPTRLSAISILYLDSANNVVLKNYQDMVVESXGXR

SEQ ID NO: 15846 - protein, 32 aa, Artificial Sequence; identical to SEQ ID NO: 8549
  GFR-binding peptide
  MOD_RES (1)..(1): Xaa is C or S

SEQ ID NO: 15847 - protein, 37 aa, Artificial Sequence; identical to SEQ ID NO: 8551
  GFR-binding peptide
  MOD_RES (2)..(3)..(35)..(37): Xaa is C or S

SEQ ID NO: 15848 - protein, 39 aa, Artificial Sequence
  GFR-binding peptide
  MOD_RES (2)..(3)..(37)..(39): Xaa is C or S
  MOD_RES (17)..(18)..(19)..(20)..(21): Xaa is A or G
  MOD_RES (22)..(23)..(24)..(25): Xaa is A or G or is absent
PXXAPTQLEPLPVVYYXXXXXXXXXEQLSNNMVVRAXGX

SEQ ID NO: 15849 - protein, 37 aa, Artificial Sequence; identical to SEQ ID NO: 8554
  GFR-binding peptide
  MOD_RES (4)..(5): Xaa is C or S
  MOD_RES (19)..(20)..(21)..(22)..(23): Xaa is A or G
  MOD_RES (24)..(25)..(26)..(27): Xaa is A or G or is absent

SEQ ID NO: 15850 - protein, 41 aa, Artificial Sequence; identical to SEQ ID NO: 8556
  GFR-binding peptide
  MOD_RES (6)..(7)..(41): Xaa is C or S
  MOD_RES (21)..(22)..(23)..(24)..(25): Xaa is A or G
  MOD_RES (26)..(27)..(28)..(29): Xaa is A or G or is absent

SEQ ID NO: 15851 - protein, 36 aa, Artificial Sequence
  GFR-binding peptide
  MOD_RES (2)..(3)..(34)..(36): Xaa is C or S
PXXVPQALEPLTILYYVGRKPKVEQLSNMIVRSXKX

SEQ ID NO: 15852 - protein, 41 aa, Artificial Sequence; identical to SEQ ID NO: 8557
  GFR-binding peptide
  MOD_RES (3)..(4)..(38)..(40): Xaa is C or S
  MOD_RES (18)..(19)..(20)..(21)..(22): Xaa is A or G
  MOD_RES (23)..(24)..(25)..(26): Xaa is A or G or is absent

SEQ ID NO: 15853 - protein, 32 aa, Artificial Sequence; identical to SEQ ID NO: 8558
  GFR-binding peptide
  MOD_RES (1)..(1): Xaa is C or S

SEQ ID NO: 15854 - protein, 40 aa, Artificial Sequence; identical to SEQ ID NO: 8560
  GFR-binding peptide
  MOD_RES (5)..(6)..(39): Xaa is C or S
  MOD_RES (20)..(21)..(22)..(23)..(24): Xaa is A or G
  MOD_RES (25)..(26)..(27)..(28): Xaa is A or G or is absent

SEQ ID NO: 15855 - protein, 36 aa, Artificial Sequence; identical to SEQ ID NO: 8561
  GFR-binding peptide
  MOD_RES (2)..(3)..(34)..(36): Xaa is C or S

SEQ ID NO: 15856 - protein, 37 aa, Artificial Sequence; identical to SEQ ID NO: 8563
  GFR-binding peptide
  MOD_RES (34)..(36): Xaa is C or S
  MOD_RES (14)..(15)..(16)..(17)..(18): Xaa is A or G
  MOD_RES (19)..(20)..(21)..(22): Xaa is A or G or is absent

SEQ ID NO: 15857 - protein, 36 aa, Artificial Sequence; identical to SEQ ID NO: 8564
  GFR-binding peptide
  MOD_RES (2)..(3)..(34)..(36): Xaa is C or S

SEQ ID NO: 15858 - protein, 40 aa, Artificial Sequence; identical to SEQ ID NO: 8566
  GFR-binding peptide
  MOD_RES (6)..(7)..(39): Xaa is C or S

SEQ ID NO: 15859 - protein, 34 aa, Artificial Sequence
  GFR-binding peptide
  MOD_RES (33)..(33): Xaa is C or S
  MOD_RES (14)..(15)..(16)..(17)..(18): Xaa is A or G
  MOD_RES (19)..(20)..(21)..(22): Xaa is A or G or is absent
VSQDLEPLPIVYYXXXXXXXXXEQLSNMIVKSXK

SEQ ID NO: 15860 - protein, 38 aa, Artificial Sequence
  GFR-binding peptide
  MOD_RES (5)..(6)..(38): Xaa is C or S
VPKPXXAPTQLEPLPVVYYDDSSNVIEQLSNNMVVRAX

SEQ ID NO: 15861 - protein, 38 aa, Artificial Sequence
  GFR-binding peptide
  MOD_RES (1)..(2)..(35)..(37): Xaa is C or S
  MOD_RES (16)..(17)..(18)..(19)..(20): Xaa is A or G
  MOD_RES (21)..(22)..(23)..(24): Xaa is A or G or is absent
XXVPQALEPLTILYYXXXXXXXXXEQLSNMIVRSXKXS

SEQ ID NO: 15862 - protein, 37 aa, Artificial Sequence
  GFR-binding peptide
  MOD_RES (4)..(5)..(37): Xaa is C or S
PPTXXVPTRLEPLTILYYDSANNVVEQLSNDMVVESX

SEQ ID NO: 15863 - protein, 35 aa, Artificial Sequence
  GFR-binding peptide
  MOD_RES (3)..(4)..(35): Xaa is C or S
APXXVPQALEPLTILYYVGRKPKVEQLSNMIVRSX

SEQ ID NO: 15864 - protein, 35 aa, Artificial Sequence
  GFR-binding peptide
  MOD_RES (4)..(5): Xaa is C or S
PKAXXVPTELSPISMLFIDENEKVVYKQYEDMVVE

SEQ ID NO: 15865 - protein, 32 aa, Artificial Sequence
  GFR-binding peptide
  MOD_RES (1)..(32): Xaa is C or S
XVPQDLEPLPIVYYVGRTPKVEQLSNMVVKSX

SEQ ID NO: 15866 - protein, 36 aa, Artificial Sequence
  GFR-binding peptide
  MOD_RES (2)..(3)..(34)..(36): Xaa is C or S
PXXVSQDLEPLPIVYYIGKTPKIEQLSNMIVKSXKX

SEQ ID NO: 15867 - protein, 35 aa, Artificial Sequence; identical to SEQ ID NO: 8570
  GFR-binding peptide
  MOD_RES (33)..(35): Xaa is C or S
  MOD_RES (14)..(15)..(16)..(17)..(18): Xaa is A or G
  MOD_RES (19)..(20)..(21)..(22): Xaa is A or G or is absent

SEQ ID NO: 15868 - protein, 31 aa, Artificial Sequence
  GFR-binding peptide
  MOD_RES (31)..(31): Xaa is C or S
VSQDLEPLPIVYYIGKTPKIEQLSNMIVKSX

SEQ ID NO: 15869 - protein, 37 aa, Artificial Sequence
  GFR-binding peptide
  MOD_RES (2)..(3)..(35)..(37): Xaa is C or S
PXXAPTQLSPISVLFIDDSSNVIYKQYENMVVRAXGX

SEQ ID NO: 15870 - protein, 40 aa, Artificial Sequence
  GFR-binding peptide
  MOD_RES (4)..(5)..(37)..(39): Xaa is C or S
PKPXXAPTQLEPLPVVYYDDSSNVIEQLSNNMVVRAXGXH

SEQ ID NO: 15871 - protein, 41 aa, Artificial Sequence
  GFR-binding peptide
  MOD_RES (5)..(6)..(38)..(40): Xaa is C or S
VPKPXXAPTQLEPLTVLYYDDSSNVIEQLSNNMVVRAXGXH

SEQ ID NO: 15872 - protein, 41 aa, Artificial Sequence; identical to SEQ ID NO: 8571
  GFR-binding peptide
  MOD_RES (6)..(7)..(39)..(41): Xaa is C or S

SEQ ID NO: 15873 - protein, 37 aa, Artificial Sequence; identical to SEQ ID NO: 8574
  GFR-binding peptide
  MOD_RES (5)..(6)..(37): Xaa is C or S

SEQ ID NO: 15874 - protein, 37 aa, Artificial Sequence; identical to SEQ ID NO: 8575
  GFR-binding peptide
  MOD_RES (2)..(3)..(34)..(36): Xaa is C or S

SEQ ID NO: 15875 - protein, 31 aa, Artificial Sequence; identical to SEQ ID NO: 8576
  GFR-binding peptide
  MOD_RES (1)..(1): Xaa is C or S

SEQ ID NO: 15876 - protein, 41 aa, Artificial Sequence
  GFR-binding peptide
  MOD_RES (3)..(4)..(38)..(40): Xaa is C or S
  MOD_RES (18)..(19)..(20)..(21)..(22): Xaa is A or G
  MOD_RES (23)..(24)..(25)..(26): Xaa is A or G or is absent
KPXXAPTQLSPISVLFIXXXXXXXXXYKQYENMVVRAXGXH

SEQ ID NO: 15877 - protein, 41 aa, Artificial Sequence
  GFR-binding peptide
  MOD_RES (5)..(6)..(39)..(41): Xaa is C or S
  MOD_RES (20)..(21)..(22)..(23)..(24): Xaa is A or G
  MOD_RES (25)..(26)..(27)..(28): Xaa is A or G or is absent
SASPXXVPQDLSPISILFIXXXXXXXXXYKQYEMVVKSXKX

SEQ ID NO: 15878 - protein, 35 aa, Artificial Sequence
  GFR-binding peptide
  MOD_RES (3)..(4): Xaa is C or S
KPXXAPTKLSPISVLFIDDSSNVIYKQYENMVVRS

SEQ ID NO: 15879 - protein, 37 aa, Artificial Sequence
  GFR-binding peptide
  MOD_RES (1)..(2)..(36): Xaa is C or S
  MOD_RES (16)..(17)..(18)..(19)..(20): Xaa is A or G
  MOD_RES (21)..(22)..(23)..(24): Xaa is A or G or is absent
XXVPTELEPLTMLYYXXXXXXXXXEQLSNDMVVEGXG

SEQ ID NO: 15880 - protein, 39 aa, Artificial Sequence; identical to SEQ ID NO: 8580
  GFR-binding peptide
  MOD_RES (3)..(4)..(36)..(38): Xaa is C or S

SEQ ID NO: 15881 - protein, 40 aa, Artificial Sequence
  GFR-binding peptide
  MOD_RES (4)..(5)..(37)..(39): Xaa is C or S
PKPXXAPTKLEPLPVVYYDDSSNVIEQLSNNMVVRSXGXH

SEQ ID NO: 15882 - protein, 34 aa, Artificial Sequence; identical to SEQ ID NO: 8581
  GFR-binding peptide
  MOD_RES (1)..(33): Xaa is C or S

SEQ ID NO: 15883 - protein, 35 aa, Artificial Sequence; identical to SEQ ID NO: 8583
  GFR-binding peptide
  MOD_RES (1)..(35): Xaa is C or S
  MOD_RES (15)..(16)..(17)..(18)..(19): Xaa is A or G
  MOD_RES (20)..(21)..(22)..(23): Xaa is A or G or is absent

SEQ ID NO: 15884 - protein, 38 aa, Artificial Sequence
  GFR-binding peptide
  MOD_RES (2)..(3)..(35)..(37): Xaa is C or S
AXXVPTELSPISMLFIDENEKVVYKQYEDMVVEGXGXR

SEQ ID NO: 15885 - protein, 40 aa, Artificial Sequence
  GFR-binding peptide
  MOD_RES (6)..(7)..(40): Xaa is C or S
  MOD_RES (21)..(22)..(23)..(24)..(25): Xaa is A or G
  MOD_RES (26)..(27)..(28)..(29): Xaa is A or G or is absent
ASASPXXVPQDLEPLPIVYYXXXXXXXXXEQLSNMVVKSX

SEQ ID NO: 15886 - protein, 39 aa, Artificial Sequence
  GFR-binding peptide
  MOD_RES (6)..(7): Xaa is C or S
  MOD_RES (21)..(22)..(23)..(24)..(25): Xaa is A or G
  MOD_RES (26)..(27)..(28)..(29): Xaa is A or G or is absent
TVPKPXXAPTQLSPISVLFIXXXXXXXXXYKQYENMVVR

SEQ ID NO: 15887 - protein, 42 aa, Artificial Sequence; identical to SEQ ID NO: 8585
  GFR-binding peptide
  MOD_RES (6)..(7)..(40)..(42): Xaa is C or S
  MOD_RES (21)..(22)..(23)..(24)..(25): Xaa is A or G
  MOD_RES (26)..(27)..(28)..(29): Xaa is A or G or is absent

SEQ ID NO: 15888 - protein, 41 aa, Artificial Sequence; identical to SEQ ID NO: 8586
  GFR-binding peptide
  MOD_RES (5)..(6)..(39)..(41): Xaa is C or S
  MOD_RES (20)..(21)..(22)..(23)..(24): Xaa is A or G
  MOD_RES (25)..(26)..(27)..(28): Xaa is A or G or is absent

SEQ ID NO: 15889 - protein, 37 aa, Artificial Sequence
  GFR-binding peptide
  MOD_RES (2)..(3)..(37): Xaa is C or S
  MOD_RES (17)..(18)..(19)..(20)..(21): Xaa is A or G
  MOD_RES (22)..(23)..(24)..(25): Xaa is A or G or is absent
AXXVPTELEPLTMLYYXXXXXXXXXEQLSNEMVVEGX

SEQ ID NO: 15890 - protein, 41 aa, Artificial Sequence; identical to SEQ ID NO: 8588
  GFR-binding peptide
  MOD_RES (4)..(5)..(39)..(41): Xaa is C or S
  MOD_RES (19)..(20)..(21)..(22)..(23): Xaa is A or G
  MOD_RES (24)..(25)..(26)..(27): Xaa is A or G or is absent

SEQ ID NO: 15891 - protein, 36 aa, Artificial Sequence
  GFR-binding peptide
  MOD_RES (3)..(4)..(36): Xaa is C or S
KAXXVPTELSPISMLFIDEYDKVVYKQYEEMVVEGX

SEQ ID NO: 15892 - protein, 37 aa, Artificial Sequence
  GFR-binding peptide
  MOD_RES (4)..(4): Xaa is C or S
  MOD_RES (18)..(19)..(20)..(21)..(22): Xaa is A or G
  MOD_RES (23)..(24)..(25)..(26): Xaa is A or G or is absent
KPTXAPTKLEPLPVVYYXXXXXXXXXEQLSNNMVVRS

SEQ ID NO: 15893 - protein, 37 aa, Artificial Sequence; identical to SEQ ID NO: 8590
  GFR-binding peptide
  MOD_RES (3)..(4)..(35)..(37): Xaa is C or S

SEQ ID NO: 15894 - protein, 40 aa, Artificial Sequence
  GFR-binding peptide
  MOD_RES (4)..(5)..(37)..(39): Xaa is C or S
PKAXXVPTELSPISMLFIDEYDKVVYKQYEEMVVEGXGXR

SEQ ID NO: 15895 - protein, 35 aa, Artificial Sequence
  GFR-binding peptide
  MOD_RES (1)..(2)..(34): Xaa is C or S
XXAPTQLEPLPVVYYDDSSNVIEQLSNNMVVRAXG

SEQ ID NO: 15896 - protein, 39 aa, Artificial Sequence; identical to SEQ ID NO: 8592
  GFR-binding peptide
  MOD_RES (2)..(3)..(36)..(38): Xaa is C or S
  MOD_RES (17)..(18)..(19)..(20)..(21): Xaa is A or G
  MOD_RES (22)..(23)..(24)..(25): Xaa is A or G or is absent

SEQ ID NO: 15897 - protein, 35 aa, Artificial Sequence; identical to SEQ ID NO: 8594
  GFR-binding peptide
  MOD_RES (1)..(34): Xaa is C or S
  MOD_RES (15)..(16)..(17)..(18)..(19): Xaa is A or G
  MOD_RES (20)..(21)..(22)..(23): Xaa is A or G or is absent

SEQ ID NO: 15898 - protein, 39 aa, Artificial Sequence
  GFR-binding peptide
  MOD_RES (4)..(5)..(37)..(39): Xaa is C or S
PKAXXVPTELSPISMLFIDENEKVVYKQYEDMVVEGXGX

SEQ ID NO: 15899 - protein, 35 aa, Artificial Sequence
  GFR-binding peptide
  MOD_RES (2)..(3): Xaa is C or S
  MOD_RES (17)..(18)..(19)..(20)..(21): Xaa is A or G
  MOD_RES (22)..(23)..(24)..(25): Xaa is A or G or is absent
TXXVPTRLSAISILYLXXXXXXXXXLKNYQDMVVE

SEQ ID NO: 15900 - protein, 37 aa, Artificial Sequence
  GFR-binding peptide
  MOD_RES (5)..(6): Xaa is C or S
TPPTXXVPTRLEPLPIVYYDSANNVVEQLSNDMVVES

SEQ ID NO: 15901 - protein, 35 aa, Artificial Sequence
  GFR-binding peptide
  MOD_RES (1)..(2): Xaa is C or S
  MOD_RES (16)..(17)..(18)..(19)..(20): Xaa is A or G
  MOD_RES (21)..(22)..(23)..(24): Xaa is A or G or is absent
XXVPTELSPISMLFIXXXXXXXXXYKQYEEMVVEG

SEQ ID NO: 15902 - protein, 41 aa, Artificial Sequence
  GFR-binding peptide
  MOD_RES (5)..(6)..(40): Xaa is C or S
  MOD_RES (20)..(21)..(22)..(23)..(24): Xaa is A or G
  MOD_RES (25)..(26)..(27)..(28): Xaa is A or G or is absent
TPPTXXVPTRLEPLPIVYYXXXXXXXXXEQLSNDMVVESXG

SEQ ID NO: 15903 - protein, 37 aa, Artificial Sequence
  GFR-binding peptide
  MOD_RES (1)..(2)..(36): Xaa is C or S
  MOD_RES (16)..(17)..(18)..(19)..(20): Xaa is A or G
  MOD_RES (21)..(22)..(23)..(24): Xaa is A or G or is absent
XXAPTKLSPISVLFIXXXXXXXXXYKQYENMVVRSXG

SEQ ID NO: 15904 - protein, 42 aa, Artificial Sequence; identical to SEQ ID NO: 8601
  GFR-binding peptide
  MOD_RES (6)..(7)..(40)..(42): Xaa is C or S
  MOD_RES (21)..(22)..(23)..(24)..(25): Xaa is A or G
  MOD_RES (26)..(27)..(28)..(29): Xaa is A or G or is absent

SEQ ID NO: 15905 - protein, 34 aa, Artificial Sequence
  GFR-binding peptide
  MOD_RES (1)..(1): Xaa is C or S
  MOD_RES (15)..(16)..(17)..(18)..(19): Xaa is A or G
  MOD_RES (20)..(21)..(22)..(23): Xaa is A or G or is absent
XAPTKLEPLTVLYYXXXXXXXXXEQLSNNMVVRS

SEQ ID NO: 15906 - protein, 32 aa, Artificial Sequence
  GFR-binding peptide
  MOD_RES (1)..(2): Xaa is C or S
XXVPTELEPLPMVYYDEYDKVVEQLSNEMVVE

SEQ ID NO: 15907 - protein, 32 aa, Artificial Sequence
  GFR-binding peptide
  MOD_RES (31)..(31): Xaa is C or S
VPQALEPLTILYYVGRKPKVEQLSNMIVRSXK

SEQ ID NO: 15908 - protein, 36 aa, Artificial Sequence
  GFR-binding peptide
  MOD_RES (2)..(3)..(34)..(36): Xaa is C or S
PXXVPQDLSPISILFIVGRTPKVYKQYEMVVKSXKX

SEQ ID NO: 15909 - protein, 37 aa, Artificial Sequence
  GFR-binding peptide
  MOD_RES (3)..(4): Xaa is C or S
  MOD_RES (18)..(19)..(20)..(21)..(22): Xaa is A or G
  MOD_RES (23)..(24)..(25)..(26): Xaa is A or G or is absent
PTXXVPTRLSAISILYLXXXXXXXXXLKNYQDMVVES

SEQ ID NO: 15910 - protein, 39 aa, Artificial Sequence
  GFR-binding peptide
  MOD_RES (6)..(7)..(39): Xaa is C or S
TVPKPXXAPTQLEPLPVVYYDDSSNVIEQLSNNMVVRAX

SEQ ID NO: 15911 - protein, 36 aa, Artificial Sequence
  GFR-binding peptide
  MOD_RES (1)..(35): Xaa is C or S
  MOD_RES (15)..(16)..(17)..(18)..(19): Xaa is A or G
  MOD_RES (20)..(21)..(22)..(23): Xaa is A or G or is absent
XVPTRLEPLTILYYXXXXXXXXXEQLSNDMVVESXG

SEQ ID NO: 15912 - protein, 40 aa, Artificial Sequence
  GFR-binding peptide
  MOD_RES (5)..(6)..(37)..(39): Xaa is C or S
SASPXXVSQDLSPISILFIIGKTPKIYKQYEMIVKSXKXS

SEQ ID NO: 15913 - protein, 34 aa, Artificial Sequence; identical to SEQ ID NO: 8608
  GFR-binding peptide
  MOD_RES (1)..(32)..(34): Xaa is C or S

SEQ ID NO: 15914 - protein, 39 aa, Artificial Sequence
  GFR-binding peptide
  MOD_RES (4)..(5)..(36)..(38): Xaa is C or S
ASPXXVPQDLSPISILFIVGRTPKVYKQYEMVVKSXKXS

SEQ ID NO: 15915 - protein, 39 aa, Artificial Sequence; identical to SEQ ID NO: 8610
  GFR-binding peptide
  MOD_RES (6)..(7)..(38): Xaa is C or S

SEQ ID NO: 15916 - protein, 38 aa, Artificial Sequence; identical to SEQ ID NO: 8613
  GFR-binding peptide
  MOD_RES (3)..(4)..(37): Xaa is C or S
  MOD_RES (18)..(19)..(20)..(21)..(22): Xaa is A or G
  MOD_RES (23)..(24)..(25)..(26): Xaa is A or G or is absent

SEQ ID NO: 15917 - protein, 36 aa, Artificial Sequence
  GFR-binding peptide
  MOD_RES (3)..(4): Xaa is C or S
  MOD_RES (18)..(19)..(20)..(21)..(22): Xaa is A or G
  MOD_RES (23)..(24)..(25)..(26): Xaa is A or G or is absent
SPXXVSQDLSPISILFIXXXXXXXXXYKQYEMIVKS

SEQ ID NO: 15918 - protein, 38 aa, Artificial Sequence
  GFR-binding peptide
  MOD_RES (1)..(35)..(37): Xaa is C or S
  MOD_RES (15)..(16)..(17)..(18)..(19): Xaa is A or G
  MOD_RES (20)..(21)..(22)..(23): Xaa is A or G or is absent
XAPTKLSPISVLFIXXXXXXXXXYKQYENMVVRSXGXH

SEQ ID NO: 15919 - protein, 35 aa, Artificial Sequence
  GFR-binding peptide
  MOD_RES (33)..(35): Xaa is C or S
  MOD_RES (14)..(15)..(16)..(17)..(18): Xaa is A or G
  MOD_RES (19)..(20)..(21)..(22): Xaa is A or G or is absent
VSQDLSPISILFIXXXXXXXXXYKQYEMIVKSXKX

SEQ ID NO: 15920 - protein, 38 aa, Artificial Sequence
  GFR-binding peptide
  MOD_RES (3)..(4)..(38): Xaa is C or S
  MOD_RES (18)..(19)..(20)..(21)..(22): Xaa is A or G
  MOD_RES (23)..(24)..(25)..(26): Xaa is A or G or is absent
KAXXVPTELEPLPMVYYXXXXXXXXXEQLSNEMVVEGX

SEQ ID NO: 15921 - protein, 39 aa, Artificial Sequence; identical to SEQ ID NO: 8615
  GFR-binding peptide
  MOD_RES (1)..(2)..(36)..(38): Xaa is C or S
  MOD_RES (16)..(17)..(18)..(19)..(20): Xaa is A or G
  MOD_RES (21)..(22)..(23)..(24): Xaa is A or G or is absent

SEQ ID NO: 15922 - protein, 36 aa, Artificial Sequence
  GFR-binding peptide
  MOD_RES (1)..(2)..(35): Xaa is C or S
  MOD_RES (16)..(17)..(18)..(19)..(20): Xaa is A or G
  MOD_RES (21)..(22)..(23)..(24): Xaa is A or G or is absent
XXVPQDLEPLTILYYXXXXXXXXXEQLSNMVVKSXK

SEQ ID NO: 15923 - protein, 44 aa, Artificial Sequence
  GFR-binding peptide
  MOD_RES (6)..(7)..(41)..(43): Xaa is C or S
  MOD_RES (21)..(22)..(23)..(24)..(25): Xaa is A or G
  MOD_RES (26)..(27)..(28)..(29): Xaa is A or G or is absent
TVPKPXXAPTQLEPLPVVYYXXXXXXXXXEQLSNNMVVRAXGXH

SEQ ID NO: 15924 - protein, 36 aa, Artificial Sequence
  GFR-binding peptide
  MOD_RES (1)..(2)..(36): Xaa is C or S
  MOD_RES (16)..(17)..(18)..(19)..(20): Xaa is A or G
  MOD_RES (21)..(22)..(23)..(24): Xaa is A or G or is absent
XXAPTKLEPLTVLYYXXXXXXXXXEQLSNNMVVRSX

SEQ ID NO: 15925 - protein, 37 aa, Artificial Sequence
  GFR-binding peptide
  MOD_RES (6)..(7): Xaa is C or S
STPPTXXVPTRLEPLTILYYDSANNVVEQLSNDMVVE

SEQ ID NO: 15926 - protein, 36 aa, Artificial Sequence; identical to SEQ ID NO: 8629
  GFR-binding peptide
  MOD_RES (34)..(36): Xaa is C or S
  MOD_RES (14)..(15)..(16)..(17)..(18): Xaa is A or G
  MOD_RES (19)..(20)..(21)..(22): Xaa is A or G or is absent

SEQ ID NO: 15927 - protein, 37 aa, Artificial Sequence; identical to SEQ ID NO: 8631
  GFR-binding peptide
  MOD_RES (1)..(34)..(36): Xaa is C or S
  MOD_RES (15)..(16)..(17)..(18)..(19): Xaa is A or G
  MOD_RES (20)..(21)..(22)..(23): Xaa is A or G or is absent

SEQ ID NO: 15928 - protein, 36 aa, Artificial Sequence; identical to SEQ ID NO: 8636
  GFR-binding peptide
  MOD_RES (3)..(4)..(36): Xaa is C or S

SEQ ID NO: 15929 - protein, 37 aa, Artificial Sequence
  GFR-binding peptide
  MOD_RES (1)..(2)..(36): Xaa is C or S
  MOD_RES (16)..(17)..(18)..(19)..(20): Xaa is A or G
  MOD_RES (21)..(22)..(23)..(24): Xaa is A or G or is absent
XXAPTQLEPLTVLYYXXXXXXXXXEQLSNNMVVRAXG

SEQ ID NO: 15930 - protein, 35 aa, Artificial Sequence
  GFR-binding peptide
  MOD_RES (2)..(3): Xaa is C or S
  MOD_RES (17)..(18)..(19)..(20)..(21): Xaa is A or G
  MOD_RES (22)..(23)..(24)..(25): Xaa is A or G or is absent
AXXVPTELEPLTMLYYXXXXXXXXXEQLSNEMVVE

SEQ ID NO: 15931 - protein, 38 aa, Artificial Sequence
  GFR-binding peptide
  MOD_RES (2)..(3)..(35)..(37): Xaa is C or S
TXXVPTRLEPLTILYYDSANNVVEQLSNDMVVESXGXR

SEQ ID NO: 15932 - protein, 38 aa, Artificial Sequence
  GFR-binding peptide
  MOD_RES (1)..(2)..(36)..(38): Xaa is C or S
  MOD_RES (16)..(17)..(18)..(19)..(20): Xaa is A or G
  MOD_RES (21)..(22)..(23)..(24): Xaa is A or G or is absent
XXVPTELSPISMLFIXXXXXXXXXYKQYEEMVVEGXGX

SEQ ID NO: 15933 - protein, 35 aa, Artificial Sequence
  GFR-binding peptide
  MOD_RES (2)..(3)..(35): Xaa is C or S
TXXVPTRLEPLTILYYDSANNVVEQLSNDMVVESX

SEQ ID NO: 15934 - protein, 34 aa, Artificial Sequence
  GFR-binding peptide
  MOD_RES (1)..(33): Xaa is C or S
XVPTRLSAISILYLDSANNVVLKNYQDMVVESXG

SEQ ID NO: 15935 - protein, 41 aa, Artificial Sequence
  GFR-binding peptide
  MOD_RES (6)..(7)..(41): Xaa is C or S
  MOD_RES (21)..(22)..(23)..(24)..(25): Xaa is A or G
  MOD_RES (26)..(27)..(28)..(29): Xaa is A or G or is absent
STPPTXXVPTRLEPLTILYYXXXXXXXXXEQLSNDMVVESX

SEQ ID NO: 15936 - protein, 34 aa, Artificial Sequence
  GFR-binding peptide
  MOD_RES (2)..(3): Xaa is C or S
AXXVPTELEPLPMVYYDENEKVVEQLSNDMVVEG

SEQ ID NO: 15937 - protein, 40 aa, Artificial Sequence
  GFR-binding peptide
  MOD_RES (4)..(5)..(38)..(40): Xaa is C or S
  MOD_RES (19)..(20)..(21)..(22)..(23): Xaa is A or G
  MOD_RES (24)..(25)..(26)..(27): Xaa is A or G or is absent
ASPXXVPQDLEPLPIVYYXXXXXXXXXEQLSNMVVKSXKX

SEQ ID NO: 15938 - protein, 37 aa, Artificial Sequence
  GFR-binding peptide
  MOD_RES (1)..(2)..(34)..(36): Xaa is C or S
XXVPTRLEPLPIVYYDSANNVVEQLSNDMVVESXGXR

SEQ ID NO: 15939 - protein, 36 aa, Artificial Sequence
  GFR-binding peptide
  MOD_RES (1)..(2)..(36): Xaa is C or S
  MOD_RES (16)..(17)..(18)..(19)..(20): Xaa is A or G
  MOD_RES (21)..(22)..(23)..(24): Xaa is A or G or is absent
XXAPTKLSPISVLFIXXXXXXXXXYKQYENMVVRSX

SEQ ID NO: 15940 - protein, 35 aa, Artificial Sequence; identical to SEQ ID NO: 8646
  GFR-binding peptide
  MOD_RES (3)..(35): Xaa is C or S

SEQ ID NO: 15941 - protein, 37 aa, Artificial Sequence
  GFR-binding peptide
  MOD_RES (2)..(3)..(37): Xaa is C or S
  MOD_RES (17)..(18)..(19)..(20)..(21): Xaa is A or G
  MOD_RES (22)..(23)..(24)..(25): Xaa is A or G or is absent
AXXVPTELEPLPMVYYXXXXXXXXXEQLSNDMVVEGX

SEQ ID NO: 15942 - protein, 37 aa, Artificial Sequence
  GFR-binding peptide
  MOD_RES (34)..(36): Xaa is C or S
  MOD_RES (14)..(15)..(16)..(17)..(18): Xaa is A or G
  MOD_RES (19)..(20)..(21)..(22): Xaa is A or G or is absent
VPTRLSAISILYLXXXXXXXXXLKNYQDMVVESXGXR

SEQ ID NO: 15943 - protein, 40 aa, Artificial Sequence
  GFR-binding peptide
  MOD_RES (4)..(5)..(39): Xaa is C or S
  MOD_RES (19)..(20)..(21)..(22)..(23): Xaa is A or G
  MOD_RES (24)..(25)..(26)..(27): Xaa is A or G or is absent
PPTXXVPTRLNAISILYFXXXXXXXXXLKKYRDMVVESXG

SEQ ID NO: 15944 - protein, 30 aa, Artificial Sequence
  GFR-binding peptide
APTQLEPLPVVYYDDSSNVIEQLSNNMVVR

SEQ ID NO: 15945 - protein, 31 aa, Artificial Sequence
  GFR-binding peptide
  MOD_RES (31)..(31): Xaa is C or S
VPQALEPLTILYYVGRKPKVEQLSNMIVRSX

SEQ ID NO: 15946 - protein, 36 aa, Artificial Sequence; identical to SEQ ID NO: 8649
  GFR-binding peptide
  MOD_RES (3)..(4): Xaa is C or S
  MOD_RES (18)..(19)..(20)..(21)..(22): Xaa is A or G
  MOD_RES (23)..(24)..(25)..(26): Xaa is A or G or is absent

SEQ ID NO: 15947 - protein, 35 aa, Artificial Sequence; identical to SEQ ID NO: 8651
  GFR-binding peptide
  MOD_RES (3)..(4)..(35): Xaa is C or S

SEQ ID NO: 15948 - protein, 39 aa, Artificial Sequence; identical to SEQ ID NO: 8652
  GFR-binding peptide
  MOD_RES (6)..(7): Xaa is C or S
  MOD_RES (21)..(22)..(23)..(24)..(25): Xaa is A or G
  MOD_RES (26)..(27)..(28)..(29): Xaa is A or G or is absent

SEQ ID NO: 15949 - protein, 35 aa, Artificial Sequence
  GFR-binding peptide
  MOD_RES (1)..(2)..(34): Xaa is C or S
XXVPTELEPLTMLYYDENEKVVEQLSNDMVVEGXG

SEQ ID NO: 15950 - protein, 35 aa, Artificial Sequence
  GFR-binding peptide
  MOD_RES (1)..(2)..(34): Xaa is C or S
XXVPTRLNAISILYFDSANNVVLKKYRDMVVESXG

SEQ ID NO: 15951 - protein, 39 aa, Artificial Sequence
  GFR-binding peptide
  MOD_RES (7)..(39): Xaa is C or S
HVTKPTXAPTKLEPLTVLYYDDSSNVIEQLSNNMVVRSX

SEQ ID NO: 15952 - protein, 38 aa, Artificial Sequence; identical to SEQ ID NO: 8656
  GFR-binding peptide
  MOD_RES (4)..(5): Xaa is C or S
  MOD_RES (19)..(20)..(21)..(22)..(23): Xaa is A or G
  MOD_RES (24)..(25)..(26)..(27): Xaa is A or G or is absent

SEQ ID NO: 15953 - protein, 33 aa, Artificial Sequence; identical to SEQ ID NO: 8658
  GFR-binding peptide
  MOD_RES (1)..(2)..(33): Xaa is C or S

SEQ ID NO: 15954 - protein, 34 aa, Artificial Sequence
  GFR-binding peptide
  MOD_RES (1)..(2)..(33): Xaa is C or S
XXVSQDLSPISILFIIGKTPKIYKQYEMIVKSXK

SEQ ID NO: 15955 - protein, 33 aa, Artificial Sequence
  GFR-binding peptide
  MOD_RES (1)..(1): Xaa is C or S
  MOD_RES (15)..(16)..(17)..(18)..(19): Xaa is A or G
  MOD_RES (20)..(21)..(22)..(23): Xaa is A or G or is absent
XAPTKLSPISVLFIXXXXXXXXXYKQYENMVVR

SEQ ID NO: 15956 - protein, 32 aa, Artificial Sequence
  GFR-binding peptide
  MOD_RES (32)..(32): Xaa is C or S
VPTELEPLPMVYYDEYDKVVEQLSNEMVVEGX

SEQ ID NO: 15957 - protein, 34 aa, Artificial Sequence; identical to SEQ ID NO: 8660
  GFR-binding peptide
  MOD_RES (1)..(1): Xaa is C or S
  MOD_RES (15)..(16)..(17)..(18)..(19): Xaa is A or G
  MOD_RES (20)..(21)..(22)..(23): Xaa is A or G or is absent

SEQ ID NO: 15958 - protein, 38 aa, Artificial Sequence; identical to SEQ ID NO: 8661
  GFR-binding peptide
  MOD_RES (4)..(5): Xaa is C or S
  MOD_RES (19)..(20)..(21)..(22)..(23): Xaa is A or G
  MOD_RES (24)..(25)..(26)..(27): Xaa is A or G or is absent

SEQ ID NO: 15959 - protein, 38 aa, Artificial Sequence
  GFR-binding peptide
  MOD_RES (4)..(5)..(38): Xaa is C or S
  MOD_RES (19)..(20)..(21)..(22)..(23): Xaa is A or G
  MOD_RES (24)..(25)..(26)..(27): Xaa is A or G or is absent
ASPXXVPQDLEPLPIVYYXXXXXXXXXEQLSNMVVKSX

SEQ ID NO: 15960 - protein, 34 aa, Artificial Sequence
  GFR-binding peptide
  MOD_RES (1)..(2)..(34): Xaa is C or S
XXAPTQLSPISVLFIDDSSNVIYKQYENMVVRAX

SEQ ID NO: 15961 - protein, 41 aa, Artificial Sequence
  GFR-binding peptide
  MOD_RES (6)..(40): Xaa is C or S
  MOD_RES (20)..(21)..(22)..(23)..(24): Xaa is A or G
  MOD_RES (25)..(26)..(27)..(28): Xaa is A or G or is absent
VTKPTXAPTKLEPLTVLYYXXXXXXXXXEQLSNNMVVRSXG

SEQ ID NO: 15962 - protein, 33 aa, Artificial Sequence
  GFR-binding peptide
  MOD_RES (33)..(33): Xaa is C or S
  MOD_RES (14)..(15)..(16)..(17)..(18): Xaa is A or G
  MOD_RES (19)..(20)..(21)..(22): Xaa is A or G or is absent
VPQALEPLPIVYYXXXXXXXXXEQLSNMIVRSX

SEQ ID NO: 15963 - protein, 38 aa, Artificial Sequence; identical to SEQ ID NO: 8667
  GFR-binding peptide
  MOD_RES (2)..(3)..(37): Xaa is C or S
  MOD_RES (17)..(18)..(19)..(20)..(21): Xaa is A or G
  MOD_RES (22)..(23)..(24)..(25): Xaa is A or G or is absent

SEQ ID NO: 15964 - protein, 36 aa, Artificial Sequence
  GFR-binding peptide
  MOD_RES (2)..(3): Xaa is C or S
  MOD_RES (17)..(18)..(19)..(20)..(21): Xaa is A or G
  MOD_RES (22)..(23)..(24)..(25): Xaa is A or G or is absent
AXXVPTELEPLPMVYYXXXXXXXXXEQLSNDMVVEG

SEQ ID NO: 15965 - protein, 37 aa, Artificial Sequence
  GFR-binding peptide
  MOD_RES (2)..(3)..(35)..(37): Xaa is C or S
PXXAPTKLEPLPVVYYDDSSNVIEQLSNNMVVRSXGX

SEQ ID NO: 15966 - protein, 34 aa, Artificial Sequence
  GFR-binding peptide
  MOD_RES (1)..(34): Xaa is C or S
  MOD_RES (15)..(16)..(17)..(18)..(19): Xaa is A or G
  MOD_RES (20)..(21)..(22)..(23): Xaa is A or G or is absent
XVPQALEPLTILYYXXXXXXXXXEQLSNMIVRSX

SEQ ID NO: 15967 - protein, 34 aa, Artificial Sequence
  GFR-binding peptide
  MOD_RES (1)..(2): Xaa is C or S
  MOD_RES (16)..(17)..(18)..(19)..(20): Xaa is A or G
  MOD_RES (21)..(22)..(23)..(24): Xaa is A or G or is absent
XXAPTQLEPLTVLYYXXXXXXXXXEQLSNNMVVR

SEQ ID NO: 15968 - protein, 43 aa, Artificial Sequence
  GFR-binding peptide
  MOD_RES (6)..(7)..(41)..(43): Xaa is C or S
  MOD_RES (21)..(22)..(23)..(24)..(25): Xaa is A or G
  MOD_RES (26)..(27)..(28)..(29): Xaa is A or G or is absent
STPPTXXVPTRLSAISILYLXXXXXXXXXLKNYQDMVVESXGX

SEQ ID NO: 15969 - protein, 34 aa, Artificial Sequence
  GFR-binding peptide
  MOD_RES (2)..(34): Xaa is C or S
TXAPTKLSPISVLFIDDSSNVIYKQYENMVVRSX

SEQ ID NO: 15970 - protein, 36 aa, Artificial Sequence
  GFR-binding peptide
  MOD_RES (1)..(35): Xaa is C or S
  MOD_RES (15)..(16)..(17)..(18)..(19): Xaa is A or G
  MOD_RES (20)..(21)..(22)..(23): Xaa is A or G or is absent
XVPTELSPISMLFIXXXXXXXXXYKQYEEMVVEGXG

SEQ ID NO: 15971 - protein, 37 aa, Artificial Sequence
  GFR-binding peptide
  MOD_RES (2)..(3)..(37): Xaa is C or S
  MOD_RES (17)..(18)..(19)..(20)..(21): Xaa is A or G
  MOD_RES (22)..(23)..(24)..(25): Xaa is A or G or is absent
AXXVPTELSPISMLFIXXXXXXXXXYKQYEDMVVEGX

SEQ ID NO: 15972 - protein, 38 aa, Artificial Sequence; identical to SEQ ID NO: 8673
  GFR-binding peptide
  MOD_RES (2)..(3)..(37): Xaa is C or S
  MOD_RES (17)..(18)..(19)..(20)..(21): Xaa is A or G
  MOD_RES (22)..(23)..(24)..(25): Xaa is A or G or is absent

SEQ ID NO: 15973 - protein, 38 aa, Artificial Sequence; identical to SEQ ID NO: 8674
  GFR-binding peptide
  MOD_RES (3)..(4)..(35)..(37): Xaa is C or S

SEQ ID NO: 15974 - protein, 37 aa, Artificial Sequence
  GFR-binding peptide
  MOD_RES (3)..(4): Xaa is C or S
  MOD_RES (18)..(19)..(20)..(21)..(22): Xaa is A or G
  MOD_RES (23)..(24)..(25)..(26): Xaa is A or G or is absent
KAXXVPTELEPLPMVYYXXXXXXXXXEQLSNEMVVEG

SEQ ID NO: 15975 - protein, 38 aa, Artificial Sequence
  GFR-binding peptide
  MOD_RES (1)..(2)..(36)..(38): Xaa is C or S
  MOD_RES (16)..(17)..(18)..(19)..(20): Xaa is A or G
  MOD_RES (21)..(22)..(23)..(24): Xaa is A or G or is absent
XXAPTQLSPISVLFIXXXXXXXXXYKQYENMVVRAXGX

SEQ ID NO: 15976 - protein, 39 aa, Artificial Sequence
  GFR-binding peptide
  MOD_RES (4)..(5)..(39): Xaa is C or S
  MOD_RES (19)..(20)..(21)..(22)..(23): Xaa is A or G
  MOD_RES (24)..(25)..(26)..(27): Xaa is A or G or is absent
PPTXXVPTRLSAISILYLXXXXXXXXXLKNYQDMVVESX

SEQ ID NO: 15977 - protein, 36 aa, Artificial Sequence
  GFR-binding peptide
  MOD_RES (34)..(36): Xaa is C or S
  MOD_RES (14)..(15)..(16)..(17)..(18): Xaa is A or G
  MOD_RES (19)..(20)..(21)..(22): Xaa is A or G or is absent
VPTRLEPLTILYYXXXXXXXXXEQLSNDMVVESXGX

SEQ ID NO: 15978 - protein, 32 aa, Artificial Sequence
  GFR-binding peptide
  MOD_RES (1)..(2): Xaa is C or S
XXVPTRLEPLTILYYDSANNVVEQLSNDMVVE

SEQ ID NO: 15979 - protein, 34 aa, Artificial Sequence
  GFR-binding peptide
  MOD_RES (34)..(34): Xaa is C or S
  MOD_RES (14)..(15)..(16)..(17)..(18): Xaa is A or G
  MOD_RES (19)..(20)..(21)..(22): Xaa is A or G or is absent
VPTRLSAISILYLXXXXXXXXXLKNYQDMVVESX

SEQ ID NO: 15980 - protein, 36 aa, Artificial Sequence
  GFR-binding peptide
  MOD_RES (2)..(3)..(36): Xaa is C or S
  MOD_RES (17)..(18)..(19)..(20)..(21): Xaa is A or G
  MOD_RES (22)..(23)..(24)..(25): Xaa is A or G or is absent
PXXVPQDLEPLTILYYXXXXXXXXXEQLSNMVVKSX

SEQ ID NO: 15981 - protein, 41 aa, Artificial Sequence
  GFR-binding peptide
  MOD_RES (5)..(6)..(40): Xaa is C or S
  MOD_RES (20)..(21)..(22)..(23)..(24): Xaa is A or G
  MOD_RES (25)..(26)..(27)..(28): Xaa is A or G or is absent
IPKAXXVPTELEPLTMLYYXXXXXXXXXEQLSNDMVVEGXG

SEQ ID NO: 15982 - protein, 39 aa, Artificial Sequence
  GFR-binding peptide
  MOD_RES (3)..(4)..(38): Xaa is C or S
  MOD_RES (18)..(19)..(20)..(21)..(22): Xaa is A or G
  MOD_RES (23)..(24)..(25)..(26): Xaa is A or G or is absent
PTXXVPTRLNAISILYFXXXXXXXXXLKKYRDMVVESXG

SEQ ID NO: 15983 - protein, 38 aa, Artificial Sequence
  GFR-binding peptide
  MOD_RES (1)..(35)..(37): Xaa is C or S
  MOD_RES (15)..(16)..(17)..(18)..(19): Xaa is A or G
  MOD_RES (20)..(21)..(22)..(23): Xaa is A or G or is absent
XVPTRLEPLPIVYYXXXXXXXXXEQLSNDMVVESXGXR

SEQ ID NO: 15984 - protein, 38 aa, Artificial Sequence
  GFR-binding peptide
  MOD_RES (3)..(4)..(36)..(38): Xaa is C or S
KAXXVPTELEPLTMLYYDENEKVVEQLSNDMVVEGXGX

SEQ ID NO: 15985 - protein, 39 aa, Artificial Sequence
  GFR-binding peptide
  MOD_RES (4)..(5)..(37)..(39): Xaa is C or S
PPTXXVPTRLNAISILYFDSANNVVLKKYRDMVVESXGX

SEQ ID NO: 15986 - protein, 38 aa, Artificial Sequence; identical to SEQ ID NO: 8680
  GFR-binding peptide
  MOD_RES (5)..(6)..(37): Xaa is C or S

SEQ ID NO: 15987 - protein, 36 aa, Artificial Sequence
  GFR-binding peptide
  MOD_RES (2)..(3): Xaa is C or S
  MOD_RES (17)..(18)..(19)..(20)..(21): Xaa is A or G
  MOD_RES (22)..(23)..(24)..(25): Xaa is A or G or is absent
TXXVPTRLSPISILFIXXXXXXXXXYKQYEDMVVES

SEQ ID NO: 15988 - protein, 32 aa, Artificial Sequence
  GFR-binding peptide
  MOD_RES (1)..(1): Xaa is C or S
XAPTKLEPLTVLYYDDSSNVIEQLSNNMVVRS

SEQ ID NO: 15989 - protein, 40 aa, Artificial Sequence
  GFR-binding peptide
  MOD_RES (6)..(7)..(39): Xaa is C or S
YVPKPXXAPTKLSPISVLFIDDSSNVIYKQYENMVVRSXG

SEQ ID NO: 15990 - protein, 41 aa, Artificial Sequence
  GFR-binding peptide
  MOD_RES (3)..(4)..(38)..(40): Xaa is C or S
  MOD_RES (18)..(19)..(20)..(21)..(22): Xaa is A or G
  MOD_RES (23)..(24)..(25)..(26): Xaa is A or G or is absent
KAXXVPTELEPLTMLYYXXXXXXXXXEQLSNEMVVEGXGXR

SEQ ID NO: 15991 - protein, 36 aa, Artificial Sequence
  GFR-binding peptide
  MOD_RES (2)..(3)..(36): Xaa is C or S
  MOD_RES (17)..(18)..(19)..(20)..(21): Xaa is A or G
  MOD_RES (22)..(23)..(24)..(25): Xaa is A or G or is absent
PXXVSQDLEPLPIVYYXXXXXXXXXEQLSNMIVKSX

SEQ ID NO: 15992 - protein, 35 aa, Artificial Sequence; identical to SEQ ID NO: 8688
  GFR-binding peptide
  MOD_RES (1)..(2)..(34): Xaa is C or S

SEQ ID NO: 15993 - protein, 34 aa, Artificial Sequence
  GFR-binding peptide
  MOD_RES (34)..(34): Xaa is C or S
  MOD_RES (14)..(15)..(16)..(17)..(18): Xaa is A or G
  MOD_RES (19)..(20)..(21)..(22): Xaa is A or G or is absent
APTKLEPLPVVYYXXXXXXXXXEQLSNNMVVRSX

SEQ ID NO: 15994 - protein, 37 aa, Artificial Sequence; identical to SEQ ID NO: 8693
  GFR-binding peptide
  MOD_RES (3)..(4)..(35)..(37): Xaa is C or S

SEQ ID NO: 15995 - protein, 34 aa, Artificial Sequence
  GFR-binding peptide
  MOD_RES (1)..(2): Xaa is C or S
  MOD_RES (16)..(17)..(18)..(19)..(20): Xaa is A or G
  MOD_RES (21)..(22)..(23)..(24): Xaa is A or G or is absent
XXVPTRLEPLPIVYYXXXXXXXXXEQLSNDMVVE

SEQ ID NO: 15996 - protein, 33 aa, Artificial Sequence
  GFR-binding peptide
  MOD_RES (2)..(3): Xaa is C or S
PXXVPQDLEPLPIVYYVGRTPKVEQLSNMVVKS

SEQ ID NO: 15997 - protein, 37 aa, Artificial Sequence; identical to SEQ ID NO: 8696
  GFR-binding peptide
  MOD_RES (1)..(2)..(35)..(37): Xaa is C or S
  MOD_RES (16)..(17)..(18)..(19)..(20): Xaa is A or G
  MOD_RES (21)..(22)..(23)..(24): Xaa is A or G or is absent

SEQ ID NO: 15998 - protein, 37 aa, Artificial Sequence
  GFR-binding peptide
  MOD_RES (2)..(3)..(37): Xaa is C or S
  MOD_RES (17)..(18)..(19)..(20)..(21): Xaa is A or G
  MOD_RES (22)..(23)..(24)..(25): Xaa is A or G or is absent
PXXAPTKLEPLPVVYYXXXXXXXXXEQLSNNMVVRSX

SEQ ID NO: 15999 - protein, 34 aa, Artificial Sequence; identical to SEQ ID NO: 8697
  GFR-binding peptide
  MOD_RES (1)..(34): Xaa is C or S
  MOD_RES (15)..(16)..(17)..(18)..(19): Xaa is A or G
  MOD_RES (20)..(21)..(22)..(23): Xaa is A or G or is absent

SEQ ID NO: 16000 - protein, 37 aa, Artificial Sequence
  GFR-binding peptide
  MOD_RES (2)..(3)..(35)..(37): Xaa is C or S
PXXAPTQLEPLPVVYYDDSSNVIEQLSNNMVVRAXGX

SEQ ID NO: 16001 - protein, 39 aa, Artificial Sequence
  GFR-binding peptide
  MOD_RES (5)..(6)..(38): Xaa is C or S
TPPTXXVPTRLEPLTILYYDSANNVVEQLSNDMVVESXG

SEQ ID NO: 16002 - protein, 37 aa, Artificial Sequence
  GFR-binding peptide
  MOD_RES (2)..(3)..(36): Xaa is C or S
  MOD_RES (17)..(18)..(19)..(20)..(21): Xaa is A or G
  MOD_RES (22)..(23)..(24)..(25): Xaa is A or G or is absent
PXXVPQDLEPLPIVYYXXXXXXXXXEQLSNMVVKSXK

SEQ ID NO: 16003 - protein, 43 aa, Artificial Sequence; identical to SEQ ID NO: 8706
  GFR-binding peptide
  MOD_RES (5)..(6)..(40)..(42): Xaa is C or S
  MOD_RES (20)..(21)..(22)..(23)..(24): Xaa is A or G
  MOD_RES (25)..(26)..(27)..(28): Xaa is A or G or is absent

SEQ ID NO: 16004 - protein, 38 aa, Artificial Sequence
  GFR-binding peptide
  MOD_RES (2)..(3)..(35)..(37): Xaa is C or S
AXXVPTELEPLTMLYYDENEKVVEQLSNDMVVEGXGXR

SEQ ID NO: 16005 - protein, 35 aa, Artificial Sequence
  GFR-binding peptide
  MOD_RES (34)..(34): Xaa is C or S
  MOD_RES (14)..(15)..(16)..(17)..(18): Xaa is A or G
  MOD_RES (19)..(20)..(21)..(22): Xaa is A or G or is absent
VPTELEPLTMLYYXXXXXXXXXEQLSNEMVVEGXG

SEQ ID NO: 16006 - protein, 34 aa, Artificial Sequence
  GFR-binding peptide
  MOD_RES (34)..(34): Xaa is C or S
  MOD_RES (14)..(15)..(16)..(17)..(18): Xaa is A or G
  MOD_RES (19)..(20)..(21)..(22): Xaa is A or G or is absent
APTKLSPISVLFIXXXXXXXXXYKQYENMVVRSX

SEQ ID NO: 16007 - protein, 36 aa, Artificial Sequence; identical to SEQ ID NO: 8711
  GFR-binding peptide
  MOD_RES (1)..(2)..(35): Xaa is C or S
  MOD_RES (16)..(17)..(18)..(19)..(20): Xaa is A or G
  MOD_RES (21)..(22)..(23)..(24): Xaa is A or G or is absent

SEQ ID NO: 16008 - protein, 39 aa, Artificial Sequence
  GFR-binding peptide
  MOD_RES (5)..(6)..(39): Xaa is C or S
  MOD_RES (20)..(21)..(22)..(23)..(24): Xaa is A or G
  MOD_RES (25)..(26)..(27)..(28): Xaa is A or G or is absent
SASPXXVSQDLSPISILFIXXXXXXXXXYKQYEMIVKSX

SEQ ID NO: 16009 - protein, 40 aa, Artificial Sequence
  GFR-binding peptide
  MOD_RES (2)..(3)..(37)..(39): Xaa is C or S
  MOD_RES (17)..(18)..(19)..(20)..(21): Xaa is A or G
  MOD_RES (22)..(23)..(24)..(25): Xaa is A or G or is absent
PXXAPTKLEPLPVVYYXXXXXXXXXEQLSNNMVVRSXGXH

SEQ ID NO: 16010 - protein, 37 aa, Artificial Sequence
  GFR-binding peptide
  MOD_RES (1)..(35)..(37): Xaa is C or S
  MOD_RES (15)..(16)..(17)..(18)..(19): Xaa is A or G
  MOD_RES (20)..(21)..(22)..(23): Xaa is A or G or is absent
XVPTELSPISMLFIXXXXXXXXXYKQYEEMVVEGXGX

SEQ ID NO: 16011 - protein, 32 aa, Artificial Sequence; identical to SEQ ID NO: 8715
  GFR-binding peptide
  MOD_RES (1)..(1): Xaa is C or S

SEQ ID NO: 16012 - protein, 36 aa, Artificial Sequence; identical to SEQ ID NO: 8716
  GFR-binding peptide
  MOD_RES (3)..(4): Xaa is C or S
  MOD_RES (18)..(19)..(20)..(21)..(22): Xaa is A or G
  MOD_RES (23)..(24)..(25)..(26): Xaa is A or G or is absent

SEQ ID NO: 16013 - protein, 38 aa, Artificial Sequence
  GFR-binding peptide
  MOD_RES (5)..(37): Xaa is C or S
TKPTXAPTKLEPLPVVYYDDSSNVIEQLSNNMVVRSXG

SEQ ID NO: 16014 - protein, 41 aa, Artificial Sequence; identical to SEQ ID NO: 8719
  GFR-binding peptide
  MOD_RES (3)..(4)..(38)..(40): Xaa is C or S
  MOD_RES (18)..(19)..(20)..(21)..(22): Xaa is A or G
  MOD_RES (23)..(24)..(25)..(26): Xaa is A or G or is absent

SEQ ID NO: 16015 - protein, 33 aa, Artificial Sequence
  GFR-binding peptide
  MOD_RES (1)..(1): Xaa is C or S
  MOD_RES (15)..(16)..(17)..(18)..(19): Xaa is A or G
  MOD_RES (20)..(21)..(22)..(23): Xaa is A or G or is absent
XAPTQLSPISVLFIXXXXXXXXXYKQYENMVVR

SEQ ID NO: 16016 - protein, 33 aa, Artificial Sequence
  GFR-binding peptide
  MOD_RES (32)..(32): Xaa is C or S
VPTELSPISMLFIDEYDKVVYKQYEEMVVEGXG

SEQ ID NO: 16017 - protein, 32 aa, Artificial Sequence
  GFR-binding peptide
  MOD_RES (32)..(32): Xaa is C or S
APTQLSPISVLFIDDSSNVIYKQYENMVVRAX

SEQ ID NO: 16018 - protein, 38 aa, Artificial Sequence
  GFR-binding peptide
  MOD_RES (5)..(6): Xaa is C or S
  MOD_RES (20)..(21)..(22)..(23)..(24): Xaa is A or G
  MOD_RES (25)..(26)..(27)..(28): Xaa is A or G or is absent
VPKPXXAPTQLSPISVLFIXXXXXXXXXYKQYENMVVR

SEQ ID NO: 16019 - protein, 38 aa, Artificial Sequence
  GFR-binding peptide
  MOD_RES (4)..(5)..(37): Xaa is C or S
PKAXXVPTELEPLPMVYYDENEKVVEQLSNDMVVEGXG

SEQ ID NO: 16020 - protein, 38 aa, Artificial Sequence
  GFR-binding peptide
  MOD_RES (3)..(37): Xaa is C or S
  MOD_RES (17)..(18)..(19)..(20)..(21): Xaa is A or G
  MOD_RES (22)..(23)..(24)..(25): Xaa is A or G or is absent
PTXAPTKLEPLTVLYYXXXXXXXXXEQLSNNMVVRSXG

SEQ ID NO: 16021 - protein, 35 aa, Artificial Sequence
  GFR-binding peptide
  MOD_RES (3)..(35): Xaa is C or S
PTXAPTKLEPLPVVYYDDSSNVIEQLSNNMVVRSX

SEQ ID NO: 16022 - protein, 33 aa, Artificial Sequence
  GFR-binding peptide
  MOD_RES (2)..(3): Xaa is C or S
PXXAPTKLSPISVLFIDDSSNVIYKQYENMVVR

SEQ ID NO: 16023 - protein, 37 aa, Artificial Sequence; identical to SEQ ID NO: 8728
  GFR-binding peptide
  MOD_RES (5)..(6): Xaa is C or S

SEQ ID NO: 16024 - protein, 32 aa, Artificial Sequence
  GFR-binding peptide
  MOD_RES (14)..(15)..(16)..(17)..(18): Xaa is A or G
  MOD_RES (19)..(20)..(21)..(22): Xaa is A or G or is absent
VPTELEPLTMLYYXXXXXXXXXEQLSNDMVVE

SEQ ID NO: 16025 - protein, 38 aa, Artificial Sequence
  GFR-binding peptide
  MOD_RES (7)..(7): Xaa is C or S
HVTKPTXAPTKLEPLPVVYYDDSSNVIEQLSNNMVVRS

SEQ ID NO: 16026 - protein, 40 aa, Artificial Sequence
  GFR-binding peptide
  MOD_RES (5)..(6)..(38)..(40): Xaa is C or S
TPPTXXVPTRLEPLTILYYDSANNVVEQLSNDMVVESXGX

SEQ ID NO: 16027 - protein, 35 aa, Artificial Sequence
  GFR-binding peptide
  MOD_RES (3)..(4): Xaa is C or S
KPXXAPTQLEPLTVLYYDDSSNVIEQLSNNMVVRA

SEQ ID NO: 16028 - protein, 35 aa, Artificial Sequence
  GFR-binding peptide
  MOD_RES (1)..(34): Xaa is C or S
  MOD_RES (15)..(16)..(17)..(18)..(19): Xaa is A or G
  MOD_RES (20)..(21)..(22)..(23): Xaa is A or G or is absent
XVPQDLSPISILFIXXXXXXXXXYKQYEMVVKSXK

SEQ ID NO: 16029 - protein, 35 aa, Artificial Sequence
  GFR-binding peptide
  MOD_RES (1)..(35): Xaa is C or S
  MOD_RES (15)..(16)..(17)..(18)..(19): Xaa is A or G
  MOD_RES (20)..(21)..(22)..(23): Xaa is A or G or is absent
XAPTKLSPISVLFIXXXXXXXXXYKQYENMVVRSX

SEQ ID NO: 16030 - protein, 35 aa, Artificial Sequence
  GFR-binding peptide
  MOD_RES (4)..(5): Xaa is C or S
AAPXXVPQALEPLTILYYVGRKPKVEQLSNMIVRS

SEQ ID NO: 16031 - protein, 40 aa, Artificial Sequence; identical to SEQ ID NO: 8737
  GFR-binding peptide
  MOD_RES (6)..(7)..(39): Xaa is C or S

SEQ ID NO: 16032 - protein, 35 aa, Artificial Sequence
  GFR-binding peptide
  MOD_RES (2)..(3)..(34): Xaa is C or S
PXXVSQDLEPLPIVYYIGKTPKIEQLSNMIVKSXK

SEQ ID NO: 16033 - protein, 42 aa, Artificial Sequence; identical to SEQ ID NO: 8739
  GFR-binding peptide
  MOD_RES (6)..(7)..(41): Xaa is C or S
  MOD_RES (21)..(22)..(23)..(24)..(25): Xaa is A or G
  MOD_RES (26)..(27)..(28)..(29): Xaa is A or G or is absent

SEQ ID NO: 16034 - protein, 35 aa, Artificial Sequence; identical to SEQ ID NO: 8740
  GFR-binding peptide
  MOD_RES (1)..(33)..(35): Xaa is C or S

SEQ ID NO: 16035 - protein, 44 aa, Artificial Sequence
  GFR-binding peptide
  MOD_RES (7)..(41)..(43): Xaa is C or S
  MOD_RES (21)..(22)..(23)..(24)..(25): Xaa is A or G
  MOD_RES (26)..(27)..(28)..(29): Xaa is A or G or is absent
HVTKPTXAPTKLEPLTVLYYXXXXXXXXXEQLSNNMVVRSXGXH

SEQ ID NO: 16036 - protein, 39 aa, Artificial Sequence; identical to SEQ ID NO: 8741
  GFR-binding peptide
  MOD_RES (5)..(6): Xaa is C or S
  MOD_RES (20)..(21)..(22)..(23)..(24): Xaa is A or G
  MOD_RES (25)..(26)..(27)..(28): Xaa is A or G or is absent

SEQ ID NO: 16037 - protein, 40 aa, Artificial Sequence
  GFR-binding peptide
  MOD_RES (4)..(5)..(37)..(39): Xaa is C or S
PPTXXVPTRLNAISILYFDSANNVVLKKYRDMVVESXGXR

SEQ ID NO: 16038 - protein, 41 aa, Artificial Sequence; identical to SEQ ID NO: 8743
  GFR-binding peptide
  MOD_RES (5)..(6)..(39)..(41): Xaa is C or S
  MOD_RES (20)..(21)..(22)..(23)..(24): Xaa is A or G
  MOD_RES (25)..(26)..(27)..(28): Xaa is A or G or is absent

SEQ ID NO: 16039 - protein, 36 aa, Artificial Sequence
  GFR-binding peptide
  MOD_RES (4)..(5): Xaa is C or S
PPTXXVPTRLEPLTILYYDSANNVVEQLSNDMVVES

SEQ ID NO: 16040 - protein, 36 aa, Artificial Sequence; identical to SEQ ID NO: 8744
  GFR-binding peptide
  MOD_RES (5)..(6): Xaa is C or S

SEQ ID NO: 16041 - protein, 42 aa, Artificial Sequence
  GFR-binding peptide
  MOD_RES (4)..(5)..(39)..(41): Xaa is C or S
  MOD_RES (19)..(20)..(21)..(22)..(23): Xaa is A or G
  MOD_RES (24)..(25)..(26)..(27): Xaa is A or G or is absent
PPTXXVPTRLEPLPIVYYXXXXXXXXXEQLSNDMVVESXGXR

SEQ ID NO: 16042 - protein, 36 aa, Artificial Sequence
  GFR-binding peptide
  MOD_RES (1)..(2)..(35): Xaa is C or S
  MOD_RES (16)..(17)..(18)..(19)..(20): Xaa is A or G
  MOD_RES (21)..(22)..(23)..(24): Xaa is A or G or is absent
XXVPQDLSPISILFIXXXXXXXXXYKQYEMVVKSXK

SEQ ID NO: 16043 - protein, 35 aa, Artificial Sequence
  GFR-binding peptide
  MOD_RES (2)..(3)..(34): Xaa is C or S
PXXVPQALEPLTILYYVGRKPKVEQLSNMIVRSXK

SEQ ID NO: 16044 - protein, 36 aa, Artificial Sequence
  GFR-binding peptide
  MOD_RES (4)..(5): Xaa is C or S
PKAXXVPTELSPISMLFIDENEKVVYKQYEDMVVEG

SEQ ID NO: 16045 - protein, 36 aa, Artificial Sequence
  GFR-binding peptide
  MOD_RES (6)..(6): Xaa is C or S
VTKPTXAPTKLEPLTVLYYDDSSNVIEQLSNNMVVR

SEQ ID NO: 16046 - protein, 38 aa, Artificial Sequence
  GFR-binding peptide
  MOD_RES (1)..(2)..(36)..(38): Xaa is C or S
  MOD_RES (16)..(17)..(18)..(19)..(20): Xaa is A or G
  MOD_RES (21)..(22)..(23)..(24): Xaa is A or G or is absent
XXVPTRLEPLPIVYYXXXXXXXXXEQLSNDMVVESXGX

SEQ ID NO: 16047 - protein, 31 aa, Artificial Sequence
  GFR-binding peptide
  MOD_RES (1)..(1): Xaa is C or S
XAPTKLSPISVLFIDDSSNVIYKQYENMVVR

SEQ ID NO: 16048 - protein, 38 aa, Artificial Sequence; identical to SEQ ID NO: 8750
  GFR-binding peptide
  MOD_RES (2)..(3)..(37): Xaa is C or S
  MOD_RES (17)..(18)..(19)..(20)..(21): Xaa is A or G
  MOD_RES (22)..(23)..(24)..(25): Xaa is A or G or is absent

SEQ ID NO: 16049 - protein, 37 aa, Artificial Sequence
  GFR-binding peptide
  MOD_RES (6)..(7): Xaa is C or S
ASASPXXVPQDLEPLPIVYYVGRTPKVEQLSNMVVKS

SEQ ID NO: 16050 - protein, 42 aa, Artificial Sequence
  GFR-binding peptide
  MOD_RES (6)..(7)..(41): Xaa is C or S
  MOD_RES (21)..(22)..(23)..(24)..(25): Xaa is A or G
  MOD_RES (26)..(27)..(28)..(29): Xaa is A or G or is absent
TVPKPXXAPTQLEPLTVLYYXXXXXXXXXEQLSNNMVVRAXG

SEQ ID NO: 16051 - protein, 34 aa, Artificial Sequence
  GFR-binding peptide
  MOD_RES (1)..(2)..(34): Xaa is C or S
XXVPTRLNAISILYFDSANNVVLKKYRDMVVESX

SEQ ID NO: 16052 - protein, 35 aa, Artificial Sequence
  GFR-binding peptide
  MOD_RES (2)..(3): Xaa is C or S
  MOD_RES (17)..(18)..(19)..(20)..(21): Xaa is A or G
  MOD_RES (22)..(23)..(24)..(25): Xaa is A or G or is absent
PXXVPQDLEPLPIVYYXXXXXXXXXEQLSNMVVKS

SEQ ID NO: 16053 - protein, 33 aa, Artificial Sequence
  GFR-binding peptide
  MOD_RES (1)..(33): Xaa is C or S
XVPTELSPISMLFIDENEKVVYKQYEDMVVEGX

SEQ ID NO: 16054 - protein, 35 aa, Artificial Sequence; identical to SEQ ID NO: 8757
  GFR-binding peptide
  MOD_RES (1)..(2)..(33)..(35): Xaa is C or S

SEQ ID NO: 16055 - protein, 39 aa, Artificial Sequence
  GFR-binding peptide
  MOD_RES (3)..(4)..(38): Xaa is C or S
  MOD_RES (18)..(19)..(20)..(21)..(22): Xaa is A or G
  MOD_RES (23)..(24)..(25)..(26): Xaa is A or G or is absent
KPXXAPTQLEPLTVLYYXXXXXXXXXEQLSNNMVVRAXG

SEQ ID NO: 16056 - protein, 32 aa, Artificial Sequence
  GFR-binding peptide
  MOD_RES (1)..(32): Xaa is C or S
XVPQDLSPISILFIVGRTPKVYKQYEMVVKSX

SEQ ID NO: 16057 - protein, 41 aa, Artificial Sequence
  GFR-binding peptide
  MOD_RES (5)..(6)..(39)..(41): Xaa is C or S
  MOD_RES (20)..(21)..(22)..(23)..(24): Xaa is A or G
  MOD_RES (25)..(26)..(27)..(28): Xaa is A or G or is absent
SAAPXXVPQALEPLTILYYXXXXXXXXXEQLSNMIVRSXKX

SEQ ID NO: 16058 - protein, 35 aa, Artificial Sequence
  GFR-binding peptide
  MOD_RES (3)..(3): Xaa is C or S
  MOD_RES (17)..(18)..(19)..(20)..(21): Xaa is A or G
  MOD_RES (22)..(23)..(24)..(25): Xaa is A or G or is absent
PTXAPTKLEPLPVVYYXXXXXXXXXEQLSNNMVVR

SEQ ID NO: 16059 - protein, 40 aa, Artificial Sequence
  GFR-binding peptide
  MOD_RES (4)..(5)..(39): Xaa is C or S
  MOD_RES (19)..(20)..(21)..(22)..(23): Xaa is A or G
  MOD_RES (24)..(25)..(26)..(27): Xaa is A or G or is absent
PKPXXAPTQLEPLTVLYYXXXXXXXXXEQLSNNMVVRAXG

SEQ ID NO: 16060 - protein, 37 aa, Artificial Sequence
  GFR-binding peptide
  MOD_RES (4)..(5)..(37): Xaa is C or S
PKPXXAPTQLSPISVLFIDDSSNVIYKQYENMVVRAX

SEQ ID NO: 16061 - protein, 39 aa, Artificial Sequence
  GFR-binding peptide
  MOD_RES (5)..(6)..(38): Xaa is C or S
IPKAXXVPTELSPISMLFIDEYDKVVYKQYEEMVVEGXG

SEQ ID NO: 16062 - protein, 33 aa, Artificial Sequence
  GFR-binding peptide
  MOD_RES (1)..(1): Xaa is C or S
  MOD_RES (15)..(16)..(17)..(18)..(19): Xaa is A or G
  MOD_RES (20)..(21)..(22)..(23): Xaa is A or G or is absent
XVPTELEPLPMVYYXXXXXXXXXEQLSNDMVVE

SEQ ID NO: 16063 - protein, 36 aa, Artificial Sequence
  GFR-binding peptide
  MOD_RES (5)..(6): Xaa is C or S
SASPXXVSQDLEPLPIVYYIGKTPKIEQLSNMIVKS

SEQ ID NO: 16064 - protein, 37 aa, Artificial Sequence
  GFR-binding peptide
  MOD_RES (6)..(7): Xaa is C or S
KIPKAXXVPTELSPISMLFIDENEKVVYKQYEDMVVE

SEQ ID NO: 16065 - protein, 39 aa, Artificial Sequence
  GFR-binding peptide
  MOD_RES (2)..(3)..(37)..(39): Xaa is C or S
  MOD_RES (17)..(18)..(19)..(20)..(21): Xaa is A or G
  MOD_RES (22)..(23)..(24)..(25): Xaa is A or G or is absent
TXXVPTRLEPLTILYYXXXXXXXXXEQLSNDMVVESXGX

SEQ ID NO: 16066 - protein, 38 aa, Artificial Sequence; identical to SEQ ID NO: 8772
  GFR-binding peptide
  MOD_RES (2)..(3)..(35)..(37): Xaa is C or S

SEQ ID NO: 16067 - protein, 34 aa, Artificial Sequence
  GFR-binding peptide
  MOD_RES (1)..(33): Xaa is C or S
XAPTKLSPISVLFIDDSSNVIYKQYENMVVRSXG

SEQ ID NO: 16068 - protein, 39 aa, Artificial Sequence
  GFR-binding peptide
  MOD_RES (5)..(39): Xaa is C or S
  MOD_RES (19)..(20)..(21)..(22)..(23): Xaa is A or G
  MOD_RES (24)..(25)..(26)..(27): Xaa is A or G or is absent
TKPTXAPTKLEPLPVVYYXXXXXXXXXEQLSNNMVVRSX

SEQ ID NO: 16069 - protein, 38 aa, Artificial Sequence
  GFR-binding peptide
  MOD_RES (4)..(5)..(38): Xaa is C or S
  MOD_RES (19)..(20)..(21)..(22)..(23): Xaa is A or G
  MOD_RES (24)..(25)..(26)..(27): Xaa is A or G or is absent
AAPXXVPQALEPLPIVYYXXXXXXXXXEQLSNMIVRSX

SEQ ID NO: 16070 - protein, 36 aa, Artificial Sequence
  GFR-binding peptide
  MOD_RES (4)..(5): Xaa is C or S
PPTXXVPTRLSAISILYLDSANNVVLKNYQDMVVES

SEQ ID NO: 16071 - protein, 36 aa, Artificial Sequence
  GFR-binding peptide
  MOD_RES (4)..(5): Xaa is C or S
PKAXXVPTELSPISMLFIDEYDKVVYKQYEEMVVEG

SEQ ID NO: 16072 - protein, 42 aa, Artificial Sequence
  GFR-binding peptide
  MOD_RES (6)..(7)..(40)..(42): Xaa is C or S
  MOD_RES (21)..(22)..(23)..(24)..(25): Xaa is A or G
  MOD_RES (26)..(27)..(28)..(29): Xaa is A or G or is absent
ASASPXXVPQDLSPISILFIXXXXXXXXXYKQYEMVVKSXKX

SEQ ID NO: 16073 - protein, 36 aa, Artificial Sequence; identical to SEQ ID NO: 8778
  GFR-binding peptide
  MOD_RES (4)..(5)..(36): Xaa is C or S

SEQ ID NO: 16074 - protein, 35 aa, Artificial Sequence
  GFR-binding peptide
  MOD_RES (34)..(34): Xaa is C or S
  MOD_RES (14)..(15)..(16)..(17)..(18): Xaa is A or G
  MOD_RES (19)..(20)..(21)..(22): Xaa is A or G or is absent
VPTELEPLPMVYYXXXXXXXXXEQLSNEMVVEGXG

SEQ ID NO: 16075 - protein, 37 aa, Artificial Sequence
  GFR-binding peptide
  MOD_RES (4)..(5): Xaa is C or S
  MOD_RES (19)..(20)..(21)..(22)..(23): Xaa is A or G
  MOD_RES (24)..(25)..(26)..(27): Xaa is A or G or is absent
PKPXXAPTKLSPISVLFIXXXXXXXXXYKQYENMVVR

SEQ ID NO: 16076 - protein, 36 aa, Artificial Sequence
  GFR-binding peptide
  MOD_RES (34)..(36): Xaa is C or S
  MOD_RES (14)..(15)..(16)..(17)..(18): Xaa is A or G
  MOD_RES (19)..(20)..(21)..(22): Xaa is A or G or is absent
APTKLEPLTVLYYXXXXXXXXXEQLSNNMVVRSXGX

SEQ ID NO: 16077 - protein, 38 aa, Artificial Sequence; identical to SEQ ID NO: 8782
  GFR-binding peptide
  MOD_RES (3)..(4)..(38): Xaa is C or S
  MOD_RES (18)..(19)..(20)..(21)..(22): Xaa is A or G
  MOD_RES (23)..(24)..(25)..(26): Xaa is A or G or is absent

SEQ ID NO: 16078 - protein, 37 aa, Artificial Sequence
  GFR-binding peptide
  MOD_RES (1)..(35)..(37): Xaa is C or S
  MOD_RES (15)..(16)..(17)..(18)..(19): Xaa is A or G
  MOD_RES (20)..(21)..(22)..(23): Xaa is A or G or is absent
XAPTKLSPISVLFIXXXXXXXXXYKQYENMVVRSXGX

SEQ ID NO: 16079 - protein, 38 aa, Artificial Sequence; identical to SEQ ID NO: 8783
  GFR-binding peptide
  MOD_RES (5)..(6): Xaa is C or S
  MOD_RES (20)..(21)..(22)..(23)..(24): Xaa is A or G
  MOD_RES (25)..(26)..(27)..(28): Xaa is A or G or is absent

SEQ ID NO: 16080 - protein, 35 aa, Artificial Sequence; identical to SEQ ID NO: 8784
  GFR-binding peptide
  MOD_RES (5)..(5): Xaa is C or S

SEQ ID NO: 16081 - protein, 30 aa, Artificial Sequence; identical to SEQ ID NO: 8785
  GFR-binding peptide

SEQ ID NO: 16082 - protein, 31 aa, Artificial Sequence
  GFR-binding peptide
  MOD_RES (1)..(1): Xaa is C or S
XVPTRLEPLTILYYDSANNVVEQLSNDMVVE

SEQ ID NO: 16083 - protein, 34 aa, Artificial Sequence
  GFR-binding peptide
  MOD_RES (3)..(4): Xaa is C or S
KPXXAPTQLSPISVLFIDDSSNVIYKQYENMVVR

SEQ ID NO: 16084 - protein, 40 aa, Artificial Sequence
  GFR-binding peptide
  MOD_RES (5)..(6)..(38)..(40): Xaa is C or S
TPPTXXVPTRLSAISILYLDSANNVVLKNYQDMVVESXGX

SEQ ID NO: 16085 - protein, 34 aa, Artificial Sequence
  GFR-binding peptide
  MOD_RES (1)..(33): Xaa is C or S
XAPTQLSPISVLFIDDSSNVIYKQYENMVVRAXG

SEQ ID NO: 16086 - protein, 36 aa, Artificial Sequence; identical to SEQ ID NO: 8793
  GFR-binding peptide
  MOD_RES (5)..(6): Xaa is C or S

SEQ ID NO: 16087 - protein, 33 aa, Artificial Sequence
  GFR-binding peptide
  MOD_RES (1)..(33): Xaa is C or S
XAPTKLEPLTVLYYDDSSNVIEQLSNNMVVRSX

SEQ ID NO: 16088 - protein, 32 aa, Artificial Sequence; identical to SEQ ID NO: 8795
  GFR-binding peptide
  MOD_RES (1)..(2): Xaa is C or S

SEQ ID NO: 16089 - protein, 43 aa, Artificial Sequence
  GFR-binding peptide
  MOD_RES (5)..(6)..(40)..(42): Xaa is C or S
  MOD_RES (20)..(21)..(22)..(23)..(24): Xaa is A or G
  MOD_RES (25)..(26)..(27)..(28): Xaa is A or G or is absent
TPPTXXVPTRLSAISILYLXXXXXXXXXLKNYQDMVVESXGXR

SEQ ID NO: 16090 - protein, 39 aa, Artificial Sequence
  GFR-binding peptide
  MOD_RES (5)..(6)..(38): Xaa is C or S
TPPTXXVPTRLNAISILYFDSANNVVLKKYRDMVVESXG

SEQ ID NO: 16091 - protein, 35 aa, Artificial Sequence
  GFR-binding peptide
  MOD_RES (2)..(3): Xaa is C or S
  MOD_RES (17)..(18)..(19)..(20)..(21): Xaa is A or G
  MOD_RES (22)..(23)..(24)..(25): Xaa is A or G or is absent
PXXVPQDLEPLTILYYXXXXXXXXXEQLSNMVVKS

SEQ ID NO: 16092 - protein, 38 aa, Artificial Sequence
  GFR-binding peptide
  MOD_RES (4)..(5)..(37): Xaa is C or S
PKPXXAPTKLEPLPVVYYDDSSNVIEQLSNNMVVRSXG

SEQ ID NO: 16093 - protein, 43 aa, Artificial Sequence
  GFR-binding peptide
  MOD_RES (5)..(6)..(40)..(42): Xaa is C or S
  MOD_RES (20)..(21)..(22)..(23)..(24): Xaa is A or G
  MOD_RES (25)..(26)..(27)..(28): Xaa is A or G or is absent
VPKPXXAPTKLSPISVLFIXXXXXXXXXYKQYENMVVRSXGXH

SEQ ID NO: 16094 - protein, 34 aa, Artificial Sequence
  GFR-binding peptide
  MOD_RES (33)..(33): Xaa is C or S
  MOD_RES (14)..(15)..(16)..(17)..(18): Xaa is A or G
  MOD_RES (19)..(20)..(21)..(22): Xaa is A or G or is absent
VPQDLEPLPIVYYXXXXXXXXXEQLSNMVVKSXK

SEQ ID NO: 16095 - protein, 35 aa, Artificial Sequence
  GFR-binding peptide
  MOD_RES (3)..(3): Xaa is C or S
  MOD_RES (17)..(18)..(19)..(20)..(21): Xaa is A or G
  MOD_RES (22)..(23)..(24)..(25): Xaa is A or G or is absent
PTXAPTKLEPLTVLYYXXXXXXXXXEQLSNNMVVR

SEQ ID NO: 16096 - protein, 44 aa, Artificial Sequence
  GFR-binding peptide
  MOD_RES (6)..(7)..(41)..(43): Xaa is C or S
  MOD_RES (21)..(22)..(23)..(24)..(25): Xaa is A or G
  MOD_RES (26)..(27)..(28)..(29): Xaa is A or G or is absent
YVPKPXXAPTKLEPLPVVYYXXXXXXXXXEQLSNNMVVRSXGXH

SEQ ID NO: 16097 - protein, 31 aa, Artificial Sequence
  GFR-binding peptide
  MOD_RES (31)..(31): Xaa is C or S
VPQDLSPISILFIVGRTPKVYKQYEMVVKSX

SEQ ID NO: 16098 - protein, 36 aa, Artificial Sequence; identical to SEQ ID NO: 8800
  GFR-binding peptide
  MOD_RES (3)..(4): Xaa is C or S
  MOD_RES (18)..(19)..(20)..(21)..(22): Xaa is A or G
  MOD_RES (23)..(24)..(25)..(26): Xaa is A or G or is absent

SEQ ID NO: 16099 - protein, 39 aa, Artificial Sequence
  GFR-binding peptide
  MOD_RES (4)..(5)..(39): Xaa is C or S
  MOD_RES (19)..(20)..(21)..(22)..(23): Xaa is A or G
  MOD_RES (24)..(25)..(26)..(27): Xaa is A or G or is absent
PKPXXAPTQLEPLTVLYYXXXXXXXXXEQLSNNMVVRAX

SEQ ID NO: 16100 - protein, 35 aa, Artificial Sequence
  GFR-binding peptide
  MOD_RES (1)..(33)..(35): Xaa is C or S
XAPTQLEPLTVLYYDDSSNVIEQLSNNMVVRAXGX

SEQ ID NO: 16101 - protein, 34 aa, Artificial Sequence; identical to SEQ ID NO: 8802
  GFR-binding peptide
  MOD_RES (1)..(2): Xaa is C or S
  MOD_RES (16)..(17)..(18)..(19)..(20): Xaa is A or G
  MOD_RES (21)..(22)..(23)..(24): Xaa is A or G or is absent

SEQ ID NO: 16102 - protein, 38 aa, Artificial Sequence
  GFR-binding peptide
  MOD_RES (1)..(2)..(36)..(38): Xaa is C or S
  MOD_RES (16)..(17)..(18)..(19)..(20): Xaa is A or G
  MOD_RES (21)..(22)..(23)..(24): Xaa is A or G or is absent
XXVPTRLEPLTILYYXXXXXXXXXEQLSNDMVVESXGX

SEQ ID NO: 16103 - protein, 38 aa, Artificial Sequence
  GFR-binding peptide
  MOD_RES (5)..(6)..(38): Xaa is C or S
IPKAXXVPTELEPLTMLYYDEYDKVVEQLSNEMVVEGX

SEQ ID NO: 16104 - protein, 40 aa, Artificial Sequence
  GFR-binding peptide
  MOD_RES (6)..(40): Xaa is C or S
  MOD_RES (20)..(21)..(22)..(23)..(24): Xaa is A or G
  MOD_RES (25)..(26)..(27)..(28): Xaa is A or G or is absent
VTKPTXAPTKLEPLTVLYYXXXXXXXXXEQLSNNMVVRSX

SEQ ID NO: 16105 - protein, 37 aa, Artificial Sequence
  GFR-binding peptide
  MOD_RES (1)..(2)..(34)..(36): Xaa is C or S
XXVPTELEPLPMVYYDENEKVVEQLSNDMVVEGXGXR

SEQ ID NO: 16106 - protein, 34 aa, Artificial Sequence
  GFR-binding peptide
  MOD_RES (33)..(33): Xaa is C or S
  MOD_RES (14)..(15)..(16)..(17)..(18): Xaa is A or G
  MOD_RES (19)..(20)..(21)..(22): Xaa is A or G or is absent
VSQDLSPISILFIXXXXXXXXXYKQYEMIVKSXK

SEQ ID NO: 16107 - protein, 32 aa, Artificial Sequence
  GFR-binding peptide
  MOD_RES (1)..(32): Xaa is C or S
XVSQDLSPISILFIIGKTPKIYKQYEMIVKSX

SEQ ID NO: 16108 - protein, 44 aa, Artificial Sequence; identical to SEQ ID NO: 8808
  GFR-binding peptide
  MOD_RES (6)..(7)..(41)..(43): Xaa is C or S
  MOD_RES (21)..(22)..(23)..(24)..(25): Xaa is A or G
  MOD_RES (26)..(27)..(28)..(29): Xaa is A or G or is absent

SEQ ID NO: 16109 - protein, 42 aa, Artificial Sequence; identical to SEQ ID NO: 8809
  GFR-binding peptide
  MOD_RES (5)..(6)..(39)..(41): Xaa is C or S
  MOD_RES (20)..(21)..(22)..(23)..(24): Xaa is A or G
  MOD_RES (25)..(26)..(27)..(28): Xaa is A or G or is absent

SEQ ID NO: 16110 - protein, 37 aa, Artificial Sequence; identical to SEQ ID NO: 8810
  GFR-binding peptide
  MOD_RES (5)..(6): Xaa is C or S

SEQ ID NO: 16111 - protein, 40 aa, Artificial Sequence; identical to SEQ ID NO: 8811
  GFR-binding peptide
  MOD_RES (6)..(7): Xaa is C or S
  MOD_RES (21)..(22)..(23)..(24)..(25): Xaa is A or G
  MOD_RES (26)..(27)..(28)..(29): Xaa is A or G or is absent

SEQ ID NO: 16112 - protein, 39 aa, Artificial Sequence
  GFR-binding peptide
  MOD_RES (3)..(4)..(38): Xaa is C or S
  MOD_RES (18)..(19)..(20)..(21)..(22): Xaa is A or G
  MOD_RES (23)..(24)..(25)..(26): Xaa is A or G or is absent
KPXXAPTQLEPLPVVYYXXXXXXXXXEQLSNNMVVRAXG

SEQ ID NO: 16113 - protein, 43 aa, Artificial Sequence; identical to SEQ ID NO: 8813
  GFR-binding peptide
  MOD_RES (6)..(7)..(41)..(43): Xaa is C or S
  MOD_RES (21)..(22)..(23)..(24)..(25): Xaa is A or G
  MOD_RES (26)..(27)..(28)..(29): Xaa is A or G or is absent

SEQ ID NO: 16114 - protein, 32 aa, Artificial Sequence; identical to SEQ ID NO: 8814
  GFR-binding peptide
  MOD_RES (14)..(15)..(16)..(17)..(18): Xaa is A or G
  MOD_RES (19)..(20)..(21)..(22): Xaa is A or G or is absent

SEQ ID NO: 16115 - protein, 42 aa, Artificial Sequence
  GFR-binding peptide
  MOD_RES (4)..(5)..(39)..(41): Xaa is C or S
  MOD_RES (19)..(20)..(21)..(22)..(23): Xaa is A or G
  MOD_RES (24)..(25)..(26)..(27): Xaa is A or G or is absent
PKPXXAPTKLSPISVLFIXXXXXXXXXYKQYENMVVRSXGXH

SEQ ID NO: 16116 - protein, 39 aa, Artificial Sequence
  GFR-binding peptide
  MOD_RES (6)..(7)..(39): Xaa is C or S
STPPTXXVPTRLSAISILYLDSANNVVLKNYQDMVVESX

SEQ ID NO: 16117 - protein, 38 aa, Artificial Sequence; identical to SEQ ID NO: 8816
  GFR-binding peptide
  MOD_RES (4)..(5)..(37): Xaa is C or S

SEQ ID NO: 16118 - protein, 33 aa, Artificial Sequence; identical to SEQ ID NO: 8817
  GFR-binding peptide
  MOD_RES (14)..(15)..(16)..(17)..(18): Xaa is A or G
  MOD_RES (19)..(20)..(21)..(22): Xaa is A or G or is absent

SEQ ID NO: 16119 - protein, 40 aa, Artificial Sequence; identical to SEQ ID NO: 8819
  GFR-binding peptide
  MOD_RES (2)..(3)..(37)..(39): Xaa is C or S
  MOD_RES (17)..(18)..(19)..(20)..(21): Xaa is A or G
  MOD_RES (22)..(23)..(24)..(25): Xaa is A or G or is absent

SEQ ID NO: 16120 - protein, 36 aa, Artificial Sequence
  GFR-binding peptide
  MOD_RES (1)..(34)..(36): Xaa is C or S
  MOD_RES (15)..(16)..(17)..(18)..(19): Xaa is A or G
  MOD_RES (20)..(21)..(22)..(23): Xaa is A or G or is absent
XVSQDLSPISILFIXXXXXXXXXYKQYEMIVKSXKX

SEQ ID NO: 16121 - protein, 35 aa, Artificial Sequence
  GFR-binding peptide
  MOD_RES (2)..(3)..(35): Xaa is C or S
AXXVPTELEPLTMLYYDEYDKVVEQLSNEMVVEGX

SEQ ID NO: 16122 - protein, 34 aa, Artificial Sequence
  GFR-binding peptide
  MOD_RES (1)..(2)..(34): Xaa is C or S
XXVPTELSPISMLFIDEYDKVVYKQYEEMVVEGX

SEQ ID NO: 16123 - protein, 33 aa, Artificial Sequence
  GFR-binding peptide
  MOD_RES (1)..(1): Xaa is C or S
  MOD_RES (15)..(16)..(17)..(18)..(19): Xaa is A or G
  MOD_RES (20)..(21)..(22)..(23): Xaa is A or G or is absent
XVPTRLSPISILFIXXXXXXXXXYKQYEDMVVE

SEQ ID NO: 16124 - protein, 40 aa, Artificial Sequence
  GFR-binding peptide
  MOD_RES (2)..(3)..(37)..(39): Xaa is C or S
  MOD_RES (17)..(18)..(19)..(20)..(21): Xaa is A or G
  MOD_RES (22)..(23)..(24)..(25): Xaa is A or G or is absent
PXXAPTKLSPISVLFIXXXXXXXXXYKQYENMVVRSXGXH

SEQ ID NO: 16125 - protein, 37 aa, Artificial Sequence; identical to SEQ ID NO: 8820
  GFR-binding peptide
  MOD_RES (6)..(7): Xaa is C or S

SEQ ID NO: 16126 - protein, 41 aa, Artificial Sequence
  GFR-binding peptide
  MOD_RES (5)..(39)..(41): Xaa is C or S
  MOD_RES (19)..(20)..(21)..(22)..(23): Xaa is A or G
  MOD_RES (24)..(25)..(26)..(27): Xaa is A or G or is absent
TKPTXAPTKLSPISVLFIXXXXXXXXXYKQYENMVVRSXGX

SEQ ID NO: 16127 - protein, 31 aa, Artificial Sequence
  GFR-binding peptide
  MOD_RES (1)..(1): Xaa is C or S
XVPTELSPISMLFIDEYDKVVYKQYEEMVVE

SEQ ID NO: 16128 - protein, 40 aa, Artificial Sequence
  GFR-binding peptide
  MOD_RES (3)..(4)..(38)..(40): Xaa is C or S
  MOD_RES (18)..(19)..(20)..(21)..(22): Xaa is A or G
  MOD_RES (23)..(24)..(25)..(26): Xaa is A or G or is absent
PTXXVPTRLNAISILYFXXXXXXXXXLKKYRDMVVESXGX

SEQ ID NO: 16129 - protein, 38 aa, Artificial Sequence
  GFR-binding peptide
  MOD_RES (5)..(6)..(38): Xaa is C or S
IPKAXXVPTELEPLTMLYYDENEKVVEQLSNDMVVEGX

SEQ ID NO: 16130 - protein, 39 aa, Artificial Sequence; identical to SEQ ID NO: 8823
  GFR-binding peptide
  MOD_RES (6)..(7)..(39): Xaa is C or S

SEQ ID NO: 16131 - protein, 36 aa, Artificial Sequence; identical to SEQ ID NO: 8824
  GFR-binding peptide
  MOD_RES (1)..(2)..(33)..(35): Xaa is C or S

SEQ ID NO: 16132 - protein, 37 aa, Artificial Sequence; identical to SEQ ID NO: 8825
  GFR-binding peptide
  MOD_RES (3)..(4): Xaa is C or S
  MOD_RES (18)..(19)..(20)..(21)..(22): Xaa is A or G
  MOD_RES (23)..(24)..(25)..(26): Xaa is A or G or is absent

SEQ ID NO: 16133 - protein, 41 aa, Artificial Sequence; identical to SEQ ID NO: 8826
  GFR-binding peptide
  MOD_RES (4)..(5)..(39)..(41): Xaa is C or S
  MOD_RES (19)..(20)..(21)..(22)..(23): Xaa is A or G
  MOD_RES (24)..(25)..(26)..(27): Xaa is A or G or is absent

SEQ ID NO: 16134 - protein, 41 aa, Artificial Sequence; identical to SEQ ID NO: 8827
  GFR-binding peptide
  MOD_RES (5)..(6)..(40): Xaa is C or S
  MOD_RES (20)..(21)..(22)..(23)..(24): Xaa is A or G
  MOD_RES (25)..(26)..(27)..(28): Xaa is A or G or is absent

SEQ ID NO: 16135 - protein, 31 aa, Artificial Sequence; identical to SEQ ID NO: 8828
  GFR-binding peptide
  MOD_RES (1)..(1): Xaa is C or S

SEQ ID NO: 16136 - protein, 38 aa, Artificial Sequence
  GFR-binding peptide
  MOD_RES (4)..(5): Xaa is C or S
  MOD_RES (19)..(20)..(21)..(22)..(23): Xaa is A or G
  MOD_RES (24)..(25)..(26)..(27): Xaa is A or G or is absent
PKAXXVPTELEPLTMLYYXXXXXXXXXEQLSNEMVVEG

SEQ ID NO: 16137 - protein, 33 aa, Artificial Sequence
  GFR-binding peptide
  MOD_RES (2)..(3): Xaa is C or S
TXXVPTRLNAISILYFDSANNVVLKKYRDMVVE

SEQ ID NO: 16138 - protein, 35 aa, Artificial Sequence
  GFR-binding peptide
  MOD_RES (2)..(3)..(34): Xaa is C or S
PXXVPQDLSPISILFIVGRTPKVYKQYEMVVKSXK

SEQ ID NO: 16139 - protein, 38 aa, Artificial Sequence
  GFR-binding peptide
  MOD_RES (4)..(36)..(38): Xaa is C or S
KPTXAPTKLEPLTVLYYDDSSNVIEQLSNNMVVRSXGX

SEQ ID NO: 16140 - protein, 36 aa, Artificial Sequence; identical to SEQ ID NO: 8830
  GFR-binding peptide
  MOD_RES (2)..(3)..(35): Xaa is C or S

SEQ ID NO: 16141 - protein, 39 aa, Artificial Sequence
  GFR-binding peptide
  MOD_RES (3)..(4)..(38): Xaa is C or S
  MOD_RES (18)..(19)..(20)..(21)..(22): Xaa is A or G
  MOD_RES (23)..(24)..(25)..(26): Xaa is A or G or is absent
PTXXVPTRLSPISILFIXXXXXXXXXYKQYEDMVVESXG

SEQ ID NO: 16142 - protein, 42 aa, Artificial Sequence; identical to SEQ ID NO: 8834
  GFR-binding peptide
  MOD_RES (7)..(41): Xaa is C or S
  MOD_RES (21)..(22)..(23)..(24)..(25): Xaa is A or G
  MOD_RES (26)..(27)..(28)..(29): Xaa is A or G or is absent

SEQ ID NO: 16143 - protein, 39 aa, Artificial Sequence
  GFR-binding peptide
  MOD_RES (5)..(6): Xaa is C or S
  MOD_RES (20)..(21)..(22)..(23)..(24): Xaa is A or G
  MOD_RES (25)..(26)..(27)..(28): Xaa is A or G or is absent
IPKAXXVPTELEPLPMVYYXXXXXXXXXEQLSNDMVVEG

SEQ ID NO: 16144 - protein, 38 aa, Artificial Sequence; identical to SEQ ID NO: 8838
  GFR-binding peptide
  MOD_RES (5)..(6): Xaa is C or S
  MOD_RES (20)..(21)..(22)..(23)..(24): Xaa is A or G
  MOD_RES (25)..(26)..(27)..(28): Xaa is A or G or is absent

SEQ ID NO: 16145 - protein, 43 aa, Artificial Sequence; identical to SEQ ID NO: 8839
  GFR-binding peptide
  MOD_RES (6)..(40)..(42): Xaa is C or S
  MOD_RES (20)..(21)..(22)..(23)..(24): Xaa is A or G
  MOD_RES (25)..(26)..(27)..(28): Xaa is A or G or is absent

SEQ ID NO: 16146 - protein, 35 aa, Artificial Sequence
  GFR-binding peptide
  MOD_RES (3)..(4): Xaa is C or S
KAXXVPTELEPLTMLYYDENEKVVEQLSNDMVVEG

SEQ ID NO: 16147 - protein, 39 aa, Artificial Sequence
  GFR-binding peptide
  MOD_RES (6)..(7): Xaa is C or S
  MOD_RES (21)..(22)..(23)..(24)..(25): Xaa is A or G
  MOD_RES (26)..(27)..(28)..(29): Xaa is A or G or is absent
ASAAPXXVPQALEPLPIVYYXXXXXXXXXEQLSNMIVRS

SEQ ID NO: 16148 - protein, 36 aa, Artificial Sequence
  GFR-binding peptide
  MOD_RES (3)..(4)..(35): Xaa is C or S
APXXVPQALEPLTILYYVGRKPKVEQLSNMIVRSXK

SEQ ID NO: 16149 - protein, 40 aa, Artificial Sequence
  GFR-binding peptide
  MOD_RES (5)..(6)..(40): Xaa is C or S
  MOD_RES (20)..(21)..(22)..(23)..(24): Xaa is A or G
  MOD_RES (25)..(26)..(27)..(28): Xaa is A or G or is absent
IPKAXXVPTELEPLPMVYYXXXXXXXXXEQLSNEMVVEGX

SEQ ID NO: 16150 - protein, 41 aa, Artificial Sequence; identical to SEQ ID NO: 8841
  GFR-binding peptide
  MOD_RES (3)..(4)..(38)..(40): Xaa is C or S
  MOD_RES (18)..(19)..(20)..(21)..(22): Xaa is A or G
  MOD_RES (23)..(24)..(25)..(26): Xaa is A or G or is absent

SEQ ID NO: 16151 - protein, 37 aa, Artificial Sequence; identical to SEQ ID NO: 8842
  GFR-binding peptide
  MOD_RES (3)..(4): Xaa is C or S
  MOD_RES (18)..(19)..(20)..(21)..(22): Xaa is A or G
  MOD_RES (23)..(24)..(25)..(26): Xaa is A or G or is absent

SEQ ID NO: 16152 - protein, 34 aa, Artificial Sequence
  GFR-binding peptide
  MOD_RES (1)..(2): Xaa is C or S
  MOD_RES (16)..(17)..(18)..(19)..(20): Xaa is A or G
  MOD_RES (21)..(22)..(23)..(24): Xaa is A or G or is absent
XXAPTQLEPLPVVYYXXXXXXXXXEQLSNNMVVR

SEQ ID NO: 16153 - protein, 32 aa, Artificial Sequence; identical to SEQ ID NO: 8845
  GFR-binding peptide
  MOD_RES (1)..(2): Xaa is C or S

SEQ ID NO: 16154 - protein, 33 aa, Artificial Sequence
  GFR-binding peptide
  MOD_RES (1)..(33): Xaa is C or S
XVPTELSPISMLFIDEYDKVVYKQYEEMVVEGX

SEQ ID NO: 16155 - protein, 30 aa, Artificial Sequence; identical to SEQ ID NO: 8847
  GFR-binding peptide

SEQ ID NO: 16156 - protein, 36 aa, Artificial Sequence
  GFR-binding peptide
  MOD_RES (3)..(4)..(36): Xaa is C or S
KPXXAPTQLSPISVLFIDDSSNVIYKQYENMVVRAX

SEQ ID NO: 16157 - protein, 33 aa, Artificial Sequence
  GFR-binding peptide
  MOD_RES (1)..(32): Xaa is C or S
XVSQDLSPISILFIIGKTPKIYKQYEMIVKSXK

SEQ ID NO: 16158 - protein, 34 aa, Artificial Sequence; identical to SEQ ID NO: 8851
  GFR-binding peptide
  MOD_RES (1)..(2): Xaa is C or S
  MOD_RES (16)..(17)..(18)..(19)..(20): Xaa is A or G
  MOD_RES (21)..(22)..(23)..(24): Xaa is A or G or is absent

SEQ ID NO: 16159 - protein, 40 aa, Artificial Sequence
  GFR-binding peptide
  MOD_RES (2)..(3)..(37)..(39): Xaa is C or S
  MOD_RES (17)..(18)..(19)..(20)..(21): Xaa is A or G
  MOD_RES (22)..(23)..(24)..(25): Xaa is A or G or is absent
AXXVPTELSPISMLFIXXXXXXXXXYKQYEDMVVEGXGXR

SEQ ID NO: 16160 - protein, 34 aa, Artificial Sequence
  GFR-binding peptide
  MOD_RES (2)..(3): Xaa is C or S
TXXVPTRLEPLPIVYYDSANNVVEQLSNDMVVES

SEQ ID NO: 16161 - protein, 33 aa, Artificial Sequence; identical to SEQ ID NO: 8854
  GFR-binding peptide
  MOD_RES (14)..(15)..(16)..(17)..(18): Xaa is A or G
  MOD_RES (19)..(20)..(21)..(22): Xaa is A or G or is absent

SEQ ID NO: 16162 - protein, 35 aa, Artificial Sequence
  GFR-binding peptide
  MOD_RES (4)..(5): Xaa is C or S
PKPXXAPTKLSPISVLFIDDSSNVIYKQYENMVVR

SEQ ID NO: 16163 - protein, 35 aa, Artificial Sequence; identical to SEQ ID NO: 8857
  GFR-binding peptide
  MOD_RES (1)..(35): Xaa is C or S
  MOD_RES (15)..(16)..(17)..(18)..(19): Xaa is A or G
  MOD_RES (20)..(21)..(22)..(23): Xaa is A or G or is absent

SEQ ID NO: 16164 - protein, 36 aa, Artificial Sequence; identical to SEQ ID NO: 8858
  GFR-binding peptide
  MOD_RES (3)..(4)..(35): Xaa is C or S

SEQ ID NO: 16165 - protein, 39 aa, Artificial Sequence
  GFR-binding peptide
  MOD_RES (2)..(3)..(37)..(39): Xaa is C or S
  MOD_RES (17)..(18)..(19)..(20)..(21): Xaa is A or G
  MOD_RES (22)..(23)..(24)..(25): Xaa is A or G or is absent
PXXAPTKLEPLPVVYYXXXXXXXXXEQLSNNMVVRSXGX

SEQ ID NO: 16166 - protein, 33 aa, Artificial Sequence
  GFR-binding peptide
  MOD_RES (14)..(15)..(16)..(17)..(18): Xaa is A or G
  MOD_RES (19)..(20)..(21)..(22): Xaa is A or G or is absent
VPTELSPISMLFIXXXXXXXXXYKQYEEMVVEG

SEQ ID NO: 16167 - protein, 40 aa, Artificial Sequence; identical to SEQ ID NO: 8863
  GFR-binding peptide
  MOD_RES (3)..(4)..(38)..(40): Xaa is C or S
  MOD_RES (18)..(19)..(20)..(21)..(22): Xaa is A or G
  MOD_RES (23)..(24)..(25)..(26): Xaa is A or G or is absent

SEQ ID NO: 16168 - protein, 42 aa, Artificial Sequence
  GFR-binding peptide
  MOD_RES (4)..(5)..(39)..(41): Xaa is C or S
  MOD_RES (19)..(20)..(21)..(22)..(23): Xaa is A or G
  MOD_RES (24)..(25)..(26)..(27): Xaa is A or G or is absent
PKAXXVPTELSPISMLFIXXXXXXXXXYKQYEDMVVEGXGXR

SEQ ID NO: 16169 - protein, 33 aa, Artificial Sequence; identical to SEQ ID NO: 8866
  GFR-binding peptide
  MOD_RES (1)..(1): Xaa is C or S
  MOD_RES (15)..(16)..(17)..(18)..(19): Xaa is A or G
  MOD_RES (20)..(21)..(22)..(23): Xaa is A or G or is absent

SEQ ID NO: 16170 - protein, 38 aa, Artificial Sequence
  GFR-binding peptide
  MOD_RES (5)..(6): Xaa is C or S
  MOD_RES (20)..(21)..(22)..(23)..(24): Xaa is A or G
  MOD_RES (25)..(26)..(27)..(28): Xaa is A or G or is absent
SAAPXXVPQALEPLPIVYYXXXXXXXXXEQLSNMIVRS

SEQ ID NO: 16171 - protein, 35 aa, Artificial Sequence; identical to SEQ ID NO: 8868
  GFR-binding peptide
  MOD_RES (3)..(4)..(35): Xaa is C or S

SEQ ID NO: 16172 - protein, 39 aa, Artificial Sequence
  GFR-binding peptide
  MOD_RES (6)..(7): Xaa is C or S
  MOD_RES (21)..(22)..(23)..(24)..(25): Xaa is A or G
  MOD_RES (26)..(27)..(28)..(29): Xaa is A or G or is absent
ASAAPXXVPQALEPLTILYYXXXXXXXXXEQLSNMIVRS

SEQ ID NO: 16173 - protein, 41 aa, Artificial Sequence
  GFR-binding peptide
  MOD_RES (6)..(7)..(39)..(41): Xaa is C or S
KIPKAXXVPTELSPISMLFIDENEKVVYKQYEDMVVEGXGX

SEQ ID NO: 16174 - protein, 39 aa, Artificial Sequence
  GFR-binding peptide
  MOD_RES (3)..(4)..(36)..(38): Xaa is C or S
KPXXAPTKLSPISVLFIDDSSNVIYKQYENMVVRSXGXH

SEQ ID NO: 16175 - protein, 39 aa, Artificial Sequence
  GFR-binding peptide
  MOD_RES (6)..(7)..(39): Xaa is C or S
KIPKAXXVPTELEPLTMLYYDENEKVVEQLSNDMVVEGX

SEQ ID NO: 16176 - protein, 35 aa, Artificial Sequence; identical to SEQ ID NO: 8875
  GFR-binding peptide
  MOD_RES (1)..(35): Xaa is C or S
  MOD_RES (15)..(16)..(17)..(18)..(19): Xaa is A or G
  MOD_RES (20)..(21)..(22)..(23): Xaa is A or G or is absent

SEQ ID NO: 16177 - protein, 43 aa, Artificial Sequence
  GFR-binding peptide
  MOD_RES (6)..(7)..(41)..(43): Xaa is C or S
  MOD_RES (21)..(22)..(23)..(24)..(25): Xaa is A or G
  MOD_RES (26)..(27)..(28)..(29): Xaa is A or G or is absent
YVPKPXXAPTKLEPLPVVYYXXXXXXXXXEQLSNNMVVRSXGX

SEQ ID NO: 16178 - protein, 35 aa, Artificial Sequence; identical to SEQ ID NO: 8881
  GFR-binding peptide
  MOD_RES (1)..(2)..(35): Xaa is C or S
  MOD_RES (16)..(17)..(18)..(19)..(20): Xaa is A or G
  MOD_RES (21)..(22)..(23)..(24): Xaa is A or G or is absent

SEQ ID NO: 16179 - protein, 34 aa, Artificial Sequence
  GFR-binding peptide
  MOD_RES (31)..(33): Xaa is C or S
VPQDLSPISILFIVGRTPKVYKQYEMVVKSXKXS

SEQ ID NO: 16180 - protein, 35 aa, Artificial Sequence
  GFR-binding peptide
  MOD_RES (1)..(35): Xaa is C or S
  MOD_RES (15)..(16)..(17)..(18)..(19): Xaa is A or G
  MOD_RES (20)..(21)..(22)..(23): Xaa is A or G or is absent
XVPTRLSPISILFIXXXXXXXXXYKQYEDMVVESX

SEQ ID NO: 16181 - protein, 43 aa, Artificial Sequence
  GFR-binding peptide
  MOD_RES (5)..(6)..(40)..(42): Xaa is C or S
  MOD_RES (20)..(21)..(22)..(23)..(24): Xaa is A or G
  MOD_RES (25)..(26)..(27)..(28): Xaa is A or G or is absent
TPPTXXVPTRLEPLPIVYYXXXXXXXXXEQLSNDMVVESXGXR

SEQ ID NO: 16182 - protein, 33 aa, Artificial Sequence
  GFR-binding peptide
  MOD_RES (33)..(33): Xaa is C or S
  MOD_RES (14)..(15)..(16)..(17)..(18): Xaa is A or G
  MOD_RES (19)..(20)..(21)..(22): Xaa is A or G or is absent
VSQDLSPISILFIXXXXXXXXXYKQYEMIVKSX

SEQ ID NO: 16183 - protein, 40 aa, Artificial Sequence
  GFR-binding peptide
  MOD_RES (4)..(5)..(37)..(39): Xaa is C or S
PKPXXAPTKLEPLTVLYYDDSSNVIEQLSNNMVVRSXGXH

SEQ ID NO: 16184 - protein, 37 aa, Artificial Sequence
  GFR-binding peptide
  MOD_RES (4)..(5)..(37): Xaa is C or S
PKAXXVPTELSPISMLFIDEYDKVVYKQYEEMVVEGX

SEQ ID NO: 16185 - protein, 35 aa, Artificial Sequence
  GFR-binding peptide
  MOD_RES (1)..(34): Xaa is C or S
  MOD_RES (15)..(16)..(17)..(18)..(19): Xaa is A or G
  MOD_RES (20)..(21)..(22)..(23): Xaa is A or G or is absent
XVSQDLEPLPIVYYXXXXXXXXXEQLSNMIVKSXK

SEQ ID NO: 16186 - protein, 34 aa, Artificial Sequence
  GFR-binding peptide
  MOD_RES (1)..(2)..(34): Xaa is C or S
XXAPTKLSPISVLFIDDSSNVIYKQYENMVVRSX

SEQ ID NO: 16187 - protein, 40 aa, Artificial Sequence
  GFR-binding peptide
  MOD_RES (2)..(3)..(37)..(39): Xaa is C or S
  MOD_RES (17)..(18)..(19)..(20)..(21): Xaa is A or G
  MOD_RES (22)..(23)..(24)..(25): Xaa is A or G or is absent
PXXAPTKLEPLTVLYYXXXXXXXXXEQLSNNMVVRSXGXH

SEQ ID NO: 16188 - protein, 40 aa, Artificial Sequence
  GFR-binding peptide
  MOD_RES (4)..(38)..(40): Xaa is C or S
  MOD_RES (18)..(19)..(20)..(21)..(22): Xaa is A or G
  MOD_RES (23)..(24)..(25)..(26): Xaa is A or G or is absent
KPTXAPTKLEPLTVLYYXXXXXXXXXEQLSNNMVVRSXGX

SEQ ID NO: 16189 - protein, 32 aa, Artificial Sequence; identical to SEQ ID NO: 8886
  GFR-binding peptide
  MOD_RES (1)..(2): Xaa is C or S

SEQ ID NO: 16190 - protein, 34 aa, Artificial Sequence
  GFR-binding peptide
  MOD_RES (1)..(2): Xaa is C or S
  MOD_RES (16)..(17)..(18)..(19)..(20): Xaa is A or G
  MOD_RES (21)..(22)..(23)..(24): Xaa is A or G or is absent
XXAPTKLEPLPVVYYXXXXXXXXXEQLSNNMVVR

SEQ ID NO: 16191 - protein, 33 aa, Artificial Sequence
  GFR-binding peptide
  MOD_RES (1)..(1): Xaa is C or S
  MOD_RES (15)..(16)..(17)..(18)..(19): Xaa is A or G
  MOD_RES (20)..(21)..(22)..(23): Xaa is A or G or is absent
XVPQDLEPLTILYYXXXXXXXXXEQLSNMVVKS

SEQ ID NO: 16192 - protein, 37 aa, Artificial Sequence
  GFR-binding peptide
  MOD_RES (2)..(3)..(37): Xaa is C or S
  MOD_RES (17)..(18)..(19)..(20)..(21): Xaa is A or G
  MOD_RES (22)..(23)..(24)..(25): Xaa is A or G or is absent
PXXAPTKLEPLTVLYYXXXXXXXXXEQLSNNMVVRSX

SEQ ID NO: 16193 - protein, 37 aa, Artificial Sequence; identical to SEQ ID NO: 8889
  GFR-binding peptide
  MOD_RES (1)..(2)..(35)..(37): Xaa is C or S
  MOD_RES (16)..(17)..(18)..(19)..(20): Xaa is A or G
  MOD_RES (21)..(22)..(23)..(24): Xaa is A or G or is absent

SEQ ID NO: 16194 - protein, 36 aa, Artificial Sequence
  GFR-binding peptide
  MOD_RES (4)..(5)..(36): Xaa is C or S
ASPXXVPQDLEPLPIVYYVGRTPKVEQLSNMVVKSX

SEQ ID NO: 16195 - protein, 40 aa, Artificial Sequence; identical to SEQ ID NO: 8892
  GFR-binding peptide
  MOD_RES (5)..(6)..(37)..(39): Xaa is C or S

SEQ ID NO: 16196 - protein, 37 aa, Artificial Sequence
  GFR-binding peptide
  MOD_RES (2)..(36): Xaa is C or S
  MOD_RES (16)..(17)..(18)..(19)..(20): Xaa is A or G
  MOD_RES (21)..(22)..(23)..(24): Xaa is A or G or is absent
TXAPTKLEPLPVVYYXXXXXXXXXEQLSNNMVVRSXG

SEQ ID NO: 16197 - protein, 32 aa, Artificial Sequence
  GFR-binding peptide
  MOD_RES (1)..(2): Xaa is C or S
XXVSQDLSPISILFIIGKTPKIYKQYEMIVKS

SEQ ID NO: 16198 - protein, 37 aa, Artificial Sequence; identical to SEQ ID NO: 8895
  GFR-binding peptide
  MOD_RES (6)..(7): Xaa is C or S

SEQ ID NO: 16199 - protein, 37 aa, Artificial Sequence
  GFR-binding peptide
  MOD_RES (2)..(3)..(36): Xaa is C or S
  MOD_RES (17)..(18)..(19)..(20)..(21): Xaa is A or G
  MOD_RES (22)..(23)..(24)..(25): Xaa is A or G or is absent
PXXVPQALSPISILFIXXXXXXXXXYKQYEMIVRSXK

SEQ ID NO: 16200 - protein, 32 aa, Artificial Sequence
  GFR-binding peptide
  MOD_RES (14)..(15)..(16)..(17)..(18): Xaa is A or G
  MOD_RES (19)..(20)..(21)..(22): Xaa is A or G or is absent
VPQDLEPLPIVYYXXXXXXXXXEQLSNMVVKS

SEQ ID NO: 16201 - protein, 41 aa, Artificial Sequence; identical to SEQ ID NO: 8898
  GFR-binding peptide
  MOD_RES (6)..(7)..(38)..(40): Xaa is C or S

SEQ ID NO: 16202 - protein, 35 aa, Artificial Sequence; identical to SEQ ID NO: 8901
  GFR-binding peptide
  MOD_RES (2)..(3): Xaa is C or S
  MOD_RES (17)..(18)..(19)..(20)..(21): Xaa is A or G
  MOD_RES (22)..(23)..(24)..(25): Xaa is A or G or is absent

SEQ ID NO: 16203 - protein, 39 aa, Artificial Sequence; identical to SEQ ID NO: 8902
  GFR-binding peptide
  MOD_RES (1)..(2)..(36)..(38): Xaa is C or S
  MOD_RES (16)..(17)..(18)..(19)..(20): Xaa is A or G
  MOD_RES (21)..(22)..(23)..(24): Xaa is A or G or is absent

SEQ ID NO: 16204 - protein, 36 aa, Artificial Sequence
  GFR-binding peptide
  MOD_RES (2)..(3): Xaa is C or S
  MOD_RES (17)..(18)..(19)..(20)..(21): Xaa is A or G
  MOD_RES (22)..(23)..(24)..(25): Xaa is A or G or is absent
TXXVPTRLEPLTILYYXXXXXXXXXEQLSNDMVVES

SEQ ID NO: 16205 - protein, 31 aa, Artificial Sequence
  GFR-binding peptide
APTQLEPLPVVYYDDSSNVIEQLSNNMVVRA

SEQ ID NO: 16206 - protein, 34 aa, Artificial Sequence
  GFR-binding peptide
  MOD_RES (32)..(34): Xaa is C or S
APTKLEPLPVVYYDDSSNVIEQLSNNMVVRSXGX

SEQ ID NO: 16207 - protein, 37 aa, Artificial Sequence
  GFR-binding peptide
  MOD_RES (2)..(3)..(35)..(37): Xaa is C or S
TXXVPTRLNAISILYFDSANNVVLKKYRDMVVESXGX

SEQ ID NO: 16208 - protein, 36 aa, Artificial Sequence; identical to SEQ ID NO: 8905
  GFR-binding peptide
  MOD_RES (4)..(5)..(36): Xaa is C or S

SEQ ID NO: 16209 - protein, 31 aa, Artificial Sequence; identical to SEQ ID NO: 8908
  GFR-binding peptide
  MOD_RES (1)..(1): Xaa is C or S

SEQ ID NO: 16210 - protein, 38 aa, Artificial Sequence
  GFR-binding peptide
  MOD_RES (7)..(7): Xaa is C or S
HVTKPTXAPTKLSPISVLFIDDSSNVIYKQYENMVVRS

SEQ ID NO: 16211 - protein, 40 aa, Artificial Sequence
  GFR-binding peptide
  MOD_RES (3)..(4)..(37)..(39): Xaa is C or S
  MOD_RES (18)..(19)..(20)..(21)..(22): Xaa is A or G
  MOD_RES (23)..(24)..(25)..(26): Xaa is A or G or is absent
SPXXVPQDLEPLTILYYXXXXXXXXXEQLSNMVVKSXKXS

SEQ ID NO: 16212 - protein, 42 aa, Artificial Sequence; identical to SEQ ID NO: 8910
  GFR-binding peptide
  MOD_RES (5)..(6)..(39)..(41): Xaa is C or S
  MOD_RES (20)..(21)..(22)..(23)..(24): Xaa is A or G
  MOD_RES (25)..(26)..(27)..(28): Xaa is A or G or is absent

SEQ ID NO: 16213 - protein, 39 aa, Artificial Sequence
  GFR-binding peptide
  MOD_RES (6)..(7): Xaa is C or S
  MOD_RES (21)..(22)..(23)..(24)..(25): Xaa is A or G
  MOD_RES (26)..(27)..(28)..(29): Xaa is A or G or is absent
YVPKPXXAPTKLEPLTVLYYXXXXXXXXXEQLSNNMVVR

SEQ ID NO: 16214 - protein, 41 aa, Artificial Sequence; identical to SEQ ID NO: 8912
  GFR-binding peptide
  MOD_RES (6)..(7)..(40): Xaa is C or S
  MOD_RES (21)..(22)..(23)..(24)..(25): Xaa is A or G
  MOD_RES (26)..(27)..(28)..(29): Xaa is A or G or is absent

SEQ ID NO: 16215 - protein, 41 aa, Artificial Sequence; identical to SEQ ID NO: 8913
  GFR-binding peptide
  MOD_RES (6)..(7)..(40): Xaa is C or S
  MOD_RES (21)..(22)..(23)..(24)..(25): Xaa is A or G
  MOD_RES (26)..(27)..(28)..(29): Xaa is A or G or is absent

SEQ ID NO: 16216 - protein, 39 aa, Artificial Sequence; identical to SEQ ID NO: 8915
  GFR-binding peptide
  MOD_RES (2)..(3)..(37)..(39): Xaa is C or S
  MOD_RES (17)..(18)..(19)..(20)..(21): Xaa is A or G
  MOD_RES (22)..(23)..(24)..(25): Xaa is A or G or is absent

SEQ ID NO: 16217 - protein, 35 aa, Artificial Sequence; identical to SEQ ID NO: 8916
  GFR-binding peptide
  MOD_RES (32)..(34): Xaa is C or S

SEQ ID NO: 16218 - protein, 36 aa, Artificial Sequence
  GFR-binding peptide
  MOD_RES (34)..(36): Xaa is C or S
  MOD_RES (14)..(15)..(16)..(17)..(18): Xaa is A or G
  MOD_RES (19)..(20)..(21)..(22): Xaa is A or G or is absent
VPTRLNAISILYFXXXXXXXXXLKKYRDMVVESXGX

SEQ ID NO: 16219 - protein, 41 aa, Artificial Sequence
  GFR-binding peptide
  MOD_RES (3)..(4)..(38)..(40): Xaa is C or S
  MOD_RES (18)..(19)..(20)..(21)..(22): Xaa is A or G
  MOD_RES (23)..(24)..(25)..(26): Xaa is A or G or is absent
PTXXVPTRLEPLTILYYXXXXXXXXXEQLSNDMVVESXGXR

SEQ ID NO: 16220 - protein, 33 aa, Artificial Sequence
  GFR-binding peptide
  MOD_RES (32)..(32): Xaa is C or S
VPTRLNAISILYFDSANNVVLKKYRDMVVESXG

SEQ ID NO: 16221 - protein, 38 aa, Artificial Sequence
  GFR-binding peptide
  MOD_RES (4)..(5): Xaa is C or S
  MOD_RES (19)..(20)..(21)..(22)..(23): Xaa is A or G
  MOD_RES (24)..(25)..(26)..(27): Xaa is A or G or is absent
PKAXXVPTELEPLTMLYYXXXXXXXXXEQLSNDMVVEG

SEQ ID NO: 16222 - protein, 38 aa, Artificial Sequence; identical to SEQ ID NO: 8920
  GFR-binding peptide
  MOD_RES (3)..(4)..(36)..(38): Xaa is C or S

SEQ ID NO: 16223 - protein, 33 aa, Artificial Sequence
  GFR-binding peptide
  MOD_RES (1)..(33): Xaa is C or S
XVPTELEPLPMVYYDENEKVVEQLSNDMVVEGX

SEQ ID NO: 16224 - protein, 33 aa, Artificial Sequence; identical to SEQ ID NO: 8925
  GFR-binding peptide
  MOD_RES (1)..(1): Xaa is C or S
  MOD_RES (15)..(16)..(17)..(18)..(19): Xaa is A or G
  MOD_RES (20)..(21)..(22)..(23): Xaa is A or G or is absent

SEQ ID NO: 16225 - protein, 40 aa, Artificial Sequence; identical to SEQ ID NO: 8926
  GFR-binding peptide
  MOD_RES (5)..(6)..(38)..(40): Xaa is C or S

SEQ ID NO: 16226 - protein, 33 aa, Artificial Sequence
  GFR-binding peptide
  MOD_RES (31)..(33): Xaa is C or S
VPQDLEPLPIVYYVGRTPKVEQLSNMVVKSXKX

SEQ ID NO: 16227 - protein, 39 aa, Artificial Sequence; identical to SEQ ID NO: 8927
  GFR-binding peptide
  MOD_RES (6)..(7)..(38): Xaa is C or S

SEQ ID NO: 16228 - protein, 40 aa, Artificial Sequence; identical to SEQ ID NO: 8928
  GFR-binding peptide
  MOD_RES (4)..(5)..(39): Xaa is C or S
  MOD_RES (19)..(20)..(21)..(22)..(23): Xaa is A or G
  MOD_RES (24)..(25)..(26)..(27): Xaa is A or G or is absent

SEQ ID NO: 16229 - protein, 42 aa, Artificial Sequence
  GFR-binding peptide
  MOD_RES (6)..(7)..(41): Xaa is C or S
  MOD_RES (21)..(22)..(23)..(24)..(25): Xaa is A or G
  MOD_RES (26)..(27)..(28)..(29): Xaa is A or G or is absent
STPPTXXVPTRLSAISILYLXXXXXXXXXLKNYQDMVVESXG

SEQ ID NO: 16230 - protein, 33 aa, Artificial Sequence
  GFR-binding peptide
  MOD_RES (2)..(3): Xaa is C or S
PXXAPTKLEPLPVVYYDDSSNVIEQLSNNMVVR

SEQ ID NO: 16231 - protein, 34 aa, Artificial Sequence
  GFR-binding peptide
  MOD_RES (1)..(2): Xaa is C or S
  MOD_RES (16)..(17)..(18)..(19)..(20): Xaa is A or G
  MOD_RES (21)..(22)..(23)..(24): Xaa is A or G or is absent
XXVPQDLEPLTILYYXXXXXXXXXEQLSNMVVKS

SEQ ID NO: 16232 - protein, 43 aa, Artificial Sequence
  GFR-binding peptide
  MOD_RES (5)..(6)..(40)..(42): Xaa is C or S
  MOD_RES (20)..(21)..(22)..(23)..(24): Xaa is A or G
  MOD_RES (25)..(26)..(27)..(28): Xaa is A or G or is absent
IPKAXXVPTELEPLPMVYYXXXXXXXXXEQLSNDMVVEGXGXR

SEQ ID NO: 16233 - protein, 39 aa, Artificial Sequence; identical to SEQ ID NO: 8935
  GFR-binding peptide
  MOD_RES (3)..(4)..(37)..(39): Xaa is C or S
  MOD_RES (18)..(19)..(20)..(21)..(22): Xaa is A or G
  MOD_RES (23)..(24)..(25)..(26): Xaa is A or G or is absent

SEQ ID NO: 16234 - protein, 33 aa, Artificial Sequence
  GFR-binding peptide
  MOD_RES (32)..(32): Xaa is C or S
VPTELSPISMLFIDENEKVVYKQYEDMVVEGXG

SEQ ID NO: 16235 - protein, 39 aa, Artificial Sequence
  GFR-binding peptide
  MOD_RES (4)..(5)..(39): Xaa is C or S
  MOD_RES (19)..(20)..(21)..(22)..(23): Xaa is A or G
  MOD_RES (24)..(25)..(26)..(27): Xaa is A or G or is absent
PKPXXAPTKLEPLTVLYYXXXXXXXXXEQLSNNMVVRSX

SEQ ID NO: 16236 - protein, 38 aa, Artificial Sequence
  GFR-binding peptide
  MOD_RES (1)..(35)..(37): Xaa is C or S
  MOD_RES (15)..(16)..(17)..(18)..(19): Xaa is A or G
  MOD_RES (20)..(21)..(22)..(23): Xaa is A or G or is absent
XVPTELEPLTMLYYXXXXXXXXXEQLSNEMVVEGXGXR

SEQ ID NO: 16237 - protein, 35 aa, Artificial Sequence; identical to SEQ ID NO: 8937
  GFR-binding peptide
  MOD_RES (1)..(32)..(34): Xaa is C or S

SEQ ID NO: 16238 - protein, 36 aa, Artificial Sequence
  GFR-binding peptide
  MOD_RES (4)..(5): Xaa is C or S
PKPXXAPTKLEPLTVLYYDDSSNVIEQLSNNMVVRS

SEQ ID NO: 16239 - protein, 40 aa, Artificial Sequence; identical to SEQ ID NO: 8938
  GFR-binding peptide
  MOD_RES (6)..(7): Xaa is C or S
  MOD_RES (21)..(22)..(23)..(24)..(25): Xaa is A or G
  MOD_RES (26)..(27)..(28)..(29): Xaa is A or G or is absent

SEQ ID NO: 16240 - protein, 35 aa, Artificial Sequence
  GFR-binding peptide
  MOD_RES (3)..(35): Xaa is C or S
PTXAPTKLEPLTVLYYDDSSNVIEQLSNNMVVRSX

SEQ ID NO: 16241 - protein, 39 aa, Artificial Sequence; identical to SEQ ID NO: 8944
  GFR-binding peptide
  MOD_RES (1)..(2)..(36)..(38): Xaa is C or S
  MOD_RES (16)..(17)..(18)..(19)..(20): Xaa is A or G
  MOD_RES (21)..(22)..(23)..(24): Xaa is A or G or is absent

SEQ ID NO: 16242 - protein, 42 aa, Artificial Sequence
  GFR-binding peptide
  MOD_RES (6)..(7)..(39)..(41): Xaa is C or S
SIPKAXXVPTELEPLTMLYYDEYDKVVEQLSNEMVVEGXGXR

SEQ ID NO: 16243 - protein, 38 aa, Artificial Sequence
  GFR-binding peptide
  MOD_RES (6)..(7): Xaa is C or S
YVPKPXXAPTKLSPISVLFIDDSSNVIYKQYENMVVRS

SEQ ID NO: 16244 - protein, 38 aa, Artificial Sequence
  GFR-binding peptide
  MOD_RES (1)..(35)..(37): Xaa is C or S
  MOD_RES (15)..(16)..(17)..(18)..(19): Xaa is A or G
  MOD_RES (20)..(21)..(22)..(23): Xaa is A or G or is absent
XVPTELSPISMLFIXXXXXXXXXYKQYEDMVVEGXGXR

SEQ ID NO: 16245 - protein, 32 aa, Artificial Sequence
  GFR-binding peptide
  MOD_RES (14)..(15)..(16)..(17)..(18): Xaa is A or G
  MOD_RES (19)..(20)..(21)..(22): Xaa is A or G or is absent
APTQLSPISVLFIXXXXXXXXXYKQYENMVVR

SEQ ID NO: 16246 - protein, 36 aa, Artificial Sequence; identical to SEQ ID NO: 8950
  GFR-binding peptide
  MOD_RES (2)..(3): Xaa is C or S
  MOD_RES (17)..(18)..(19)..(20)..(21): Xaa is A or G
  MOD_RES (22)..(23)..(24)..(25): Xaa is A or G or is absent

SEQ ID NO: 16247 - protein, 35 aa, Artificial Sequence; identical to SEQ ID NO: 8951
  GFR-binding peptide
  MOD_RES (2)..(3)..(35): Xaa is C or S

SEQ ID NO: 16248 - protein, 39 aa, Artificial Sequence
  GFR-binding peptide
  MOD_RES (3)..(4)..(36)..(38): Xaa is C or S
KAXXVPTELEPLPMVYYDENEKVVEQLSNDMVVEGXGXR

SEQ ID NO: 16249 - protein, 34 aa, Artificial Sequence
  GFR-binding peptide
  MOD_RES (1)..(2)..(34): Xaa is C or S
XXVPTRLEPLTILYYDSANNVVEQLSNDMVVESX

SEQ ID NO: 16250 - protein, 42 aa, Artificial Sequence; identical to SEQ ID NO: 8955
  GFR-binding peptide
  MOD_RES (6)..(7)..(39)..(41): Xaa is C or S

SEQ ID NO: 16251 - protein, 35 aa, Artificial Sequence; identical to SEQ ID NO: 8957
  GFR-binding peptide
  MOD_RES (1)..(33)..(35): Xaa is C or S

SEQ ID NO: 16252 - protein, 40 aa, Artificial Sequence; identical to SEQ ID NO: 8959
  GFR-binding peptide
  MOD_RES (3)..(4)..(37)..(39): Xaa is C or S
  MOD_RES (18)..(19)..(20)..(21)..(22): Xaa is A or G
  MOD_RES (23)..(24)..(25)..(26): Xaa is A or G or is absent

SEQ ID NO: 16253 - protein, 39 aa, Artificial Sequence; identical to SEQ ID NO: 8960
  GFR-binding peptide
  MOD_RES (6)..(7)..(38): Xaa is C or S

SEQ ID NO: 16254 - protein, 35 aa, Artificial Sequence
  GFR-binding peptide
  MOD_RES (2)..(3): Xaa is C or S
  MOD_RES (17)..(18)..(19)..(20)..(21): Xaa is A or G
  MOD_RES (22)..(23)..(24)..(25): Xaa is A or G or is absent
PXXVPQALSPISILFIXXXXXXXXXYKQYEMIVRS

SEQ ID NO: 16255 - protein, 38 aa, Artificial Sequence
  GFR-binding peptide
  MOD_RES (6)..(7)..(38): Xaa is C or S
ASASPXXVPQDLEPLPIVYYVGRTPKVEQLSNMVVKSX

SEQ ID NO: 16256 - protein, 34 aa, Artificial Sequence; identical to SEQ ID NO: 8964
  GFR-binding peptide
  MOD_RES (32)..(34): Xaa is C or S

SEQ ID NO: 16257 - protein, 35 aa, Artificial Sequence; identical to SEQ ID NO: 8968
  GFR-binding peptide
  MOD_RES (32)..(34): Xaa is C or S

SEQ ID NO: 16258 - protein, 43 aa, Artificial Sequence
  GFR-binding peptide
  MOD_RES (6)..(7)..(41)..(43): Xaa is C or S
  MOD_RES (21)..(22)..(23)..(24)..(25): Xaa is A or G
  MOD_RES (26)..(27)..(28)..(29): Xaa is A or G or is absent
STPPTXXVPTRLSPISILFIXXXXXXXXXYKQYEDMVVESXGX

SEQ ID NO: 16259 - protein, 36 aa, Artificial Sequence; identical to SEQ ID NO: 8971
  GFR-binding peptide
  MOD_RES (5)..(6): Xaa is C or S

SEQ ID NO: 16260 - protein, 40 aa, Artificial Sequence
  GFR-binding peptide
  MOD_RES (5)..(37)..(39): Xaa is C or S
TKPTXAPTKLEPLTVLYYDDSSNVIEQLSNNMVVRSXGXH

SEQ ID NO: 16261 - protein, 41 aa, Artificial Sequence
  GFR-binding peptide
  MOD_RES (4)..(5)..(38)..(40): Xaa is C or S
  MOD_RES (19)..(20)..(21)..(22)..(23): Xaa is A or G
  MOD_RES (24)..(25)..(26)..(27): Xaa is A or G or is absent
ASPXXVPQDLEPLTILYYXXXXXXXXXEQLSNMVVKSXKXS

SEQ ID NO: 16262 - protein, 30 aa, Artificial Sequence
  GFR-binding peptide
APTQLSPISVLFIDDSSNVIYKQYENMVVR

SEQ ID NO: 16263 - protein, 41 aa, Artificial Sequence; identical to SEQ ID NO: 8972
  GFR-binding peptide
  MOD_RES (4)..(5)..(38)..(40): Xaa is C or S
  MOD_RES (19)..(20)..(21)..(22)..(23): Xaa is A or G
  MOD_RES (24)..(25)..(26)..(27): Xaa is A or G or is absent

SEQ ID NO: 16264 - protein, 37 aa, Artificial Sequence
  GFR-binding peptide
  MOD_RES (6)..(7): Xaa is C or S
TVPKPXXAPTQLSPISVLFIDDSSNVIYKQYENMVVR

SEQ ID NO: 16265 - protein, 39 aa, Artificial Sequence
  GFR-binding peptide
  MOD_RES (4)..(38): Xaa is C or S
  MOD_RES (18)..(19)..(20)..(21)..(22): Xaa is A or G
  MOD_RES (23)..(24)..(25)..(26): Xaa is A or G or is absent
KPTXAPTKLSPISVLFIXXXXXXXXXYKQYENMVVRSXG

SEQ ID NO: 16266 - protein, 41 aa, Artificial Sequence
  GFR-binding peptide
  MOD_RES (6)..(7)..(39)..(41): Xaa is C or S
YVPKPXXAPTKLEPLTVLYYDDSSNVIEQLSNNMVVRSXGX

SEQ ID NO: 16267 - protein, 34 aa, Artificial Sequence
  GFR-binding peptide
  MOD_RES (1)..(33): Xaa is C or S
XVPTELSPISMLFIDENEKVVYKQYEDMVVEGXG

SEQ ID NO: 16268 - protein, 36 aa, Artificial Sequence
  GFR-binding peptide
  MOD_RES (3)..(4): Xaa is C or S
  MOD_RES (18)..(19)..(20)..(21)..(22): Xaa is A or G
  MOD_RES (23)..(24)..(25)..(26): Xaa is A or G or is absent
APXXVPQALSPISILFIXXXXXXXXXYKQYEMIVRS

SEQ ID NO: 16269 - protein, 42 aa, Artificial Sequence; identical to SEQ ID NO: 8979
  GFR-binding peptide
  MOD_RES (6)..(7)..(41): Xaa is C or S
  MOD_RES (21)..(22)..(23)..(24)..(25): Xaa is A or G
  MOD_RES (26)..(27)..(28)..(29): Xaa is A or G or is absent

SEQ ID NO: 16270 - protein, 38 aa, Artificial Sequence; identical to SEQ ID NO: 8980
  GFR-binding peptide
  MOD_RES (5)..(6)..(38): Xaa is C or S

SEQ ID NO: 16271 - protein, 41 aa, Artificial Sequence
  GFR-binding peptide
  MOD_RES (6)..(7)..(39)..(41): Xaa is C or S
YVPKPXXAPTKLSPISVLFIDDSSNVIYKQYENMVVRSXGX

SEQ ID NO: 16272 - protein, 32 aa, Artificial Sequence; identical to SEQ ID NO: 8981
  GFR-binding peptide
  MOD_RES (31)..(31): Xaa is C or S

SEQ ID NO: 16273 - protein, 38 aa, Artificial Sequence
  GFR-binding peptide
  MOD_RES (2)..(3)..(36)..(38): Xaa is C or S
  MOD_RES (17)..(18)..(19)..(20)..(21): Xaa is A or G
  MOD_RES (22)..(23)..(24)..(25): Xaa is A or G or is absent
PXXVPQALEPLTILYYXXXXXXXXXEQLSNMIVRSXKX

SEQ ID NO: 16274 - protein, 37 aa, Artificial Sequence
  GFR-binding peptide
  MOD_RES (1)..(34)..(36): Xaa is C or S
  MOD_RES (15)..(16)..(17)..(18)..(19): Xaa is A or G
  MOD_RES (20)..(21)..(22)..(23): Xaa is A or G or is absent
XVPQALEPLPIVYYXXXXXXXXXEQLSNMIVRSXKXS

SEQ ID NO: 16275 - protein, 42 aa, Artificial Sequence
  GFR-binding peptide
  MOD_RES (4)..(5)..(39)..(41): Xaa is C or S
  MOD_RES (19)..(20)..(21)..(22)..(23): Xaa is A or G
  MOD_RES (24)..(25)..(26)..(27): Xaa is A or G or is absent
PKAXXVPTELSPISMLFIXXXXXXXXXYKQYEEMVVEGXGXR

SEQ ID NO: 16276 - protein, 36 aa, Artificial Sequence
  GFR-binding peptide
  MOD_RES (34)..(36): Xaa is C or S
  MOD_RES (14)..(15)..(16)..(17)..(18): Xaa is A or G
  MOD_RES (19)..(20)..(21)..(22): Xaa is A or G or is absent
APTKLSPISVLFIXXXXXXXXXYKQYENMVVRSXGX

SEQ ID NO: 16277 - protein, 36 aa, Artificial Sequence
  GFR-binding peptide
  MOD_RES (3)..(4): Xaa is C or S
  MOD_RES (18)..(19)..(20)..(21)..(22): Xaa is A or G
  MOD_RES (23)..(24)..(25)..(26): Xaa is A or G or is absent
PTXXVPTRLNAISILYFXXXXXXXXXLKKYRDMVVE

SEQ ID NO: 16278 - protein, 33 aa, Artificial Sequence
  GFR-binding peptide
  MOD_RES (2)..(3): Xaa is C or S
PXXVPQALSPISILFIVGRKPKVYKQYEMIVRS

SEQ ID NO: 16279 - protein, 30 aa, Artificial Sequence
  GFR-binding peptide
VPTRLNAISILYFDSANNVVLKKYRDMVVE

SEQ ID NO: 16280 - protein, 39 aa, Artificial Sequence
  GFR-binding peptide
  MOD_RES (5)..(6)..(37)..(39): Xaa is C or S
SASPXXVSQDLEPLPIVYYIGKTPKIEQLSNMIVKSXKX

SEQ ID NO: 16281 - protein, 35 aa, Artificial Sequence; identical to SEQ ID NO: 8987
  GFR-binding peptide
  MOD_RES (3)..(3): Xaa is C or S
  MOD_RES (17)..(18)..(19)..(20)..(21): Xaa is A or G
  MOD_RES (22)..(23)..(24)..(25): Xaa is A or G or is absent

SEQ ID NO: 16282 - protein, 39 aa, Artificial Sequence
  GFR-binding peptide
  MOD_RES (2)..(3)..(36)..(38): Xaa is C or S
  MOD_RES (17)..(18)..(19)..(20)..(21): Xaa is A or G
  MOD_RES (22)..(23)..(24)..(25): Xaa is A or G or is absent
PXXVPQALEPLPIVYYXXXXXXXXXEQLSNMIVRSXKXS

SEQ ID NO: 16283 - protein, 41 aa, Artificial Sequence; identical to SEQ ID NO: 8991
  GFR-binding peptide
  MOD_RES (5)..(6)..(40): Xaa is C or S
  MOD_RES (20)..(21)..(22)..(23)..(24): Xaa is A or G
  MOD_RES (25)..(26)..(27)..(28): Xaa is A or G or is absent

SEQ ID NO: 16284 - protein, 38 aa, Artificial Sequence
  GFR-binding peptide
  MOD_RES (3)..(4)..(38): Xaa is C or S
  MOD_RES (18)..(19)..(20)..(21)..(22): Xaa is A or G
  MOD_RES (23)..(24)..(25)..(26): Xaa is A or G or is absent
KPXXAPTQLEPLTVLYYXXXXXXXXXEQLSNNMVVRAX

SEQ ID NO: 16285 - protein, 38 aa, Artificial Sequence
  GFR-binding peptide
  MOD_RES (4)..(38): Xaa is C or S
  MOD_RES (18)..(19)..(20)..(21)..(22): Xaa is A or G
  MOD_RES (23)..(24)..(25)..(26): Xaa is A or G or is absent
KPTXAPTKLSPISVLFIXXXXXXXXXYKQYENMVVRSX

SEQ ID NO: 16286 - protein, 35 aa, Artificial Sequence; identical to SEQ ID NO: 8995
  GFR-binding peptide
  MOD_RES (1)..(34): Xaa is C or S
  MOD_RES (15)..(16)..(17)..(18)..(19): Xaa is A or G
  MOD_RES (20)..(21)..(22)..(23): Xaa is A or G or is absent

SEQ ID NO: 16287 - protein, 36 aa, Artificial Sequence
  GFR-binding peptide
  MOD_RES (1)..(35): Xaa is C or S
  MOD_RES (15)..(16)..(17)..(18)..(19): Xaa is A or G
  MOD_RES (20)..(21)..(22)..(23): Xaa is A or G or is absent
XVPTELSPISMLFIXXXXXXXXXYKQYEDMVVEGXG

SEQ ID NO: 16288 - protein, 33 aa, Artificial Sequence; identical to SEQ ID NO: 8997
  GFR-binding peptide
  MOD_RES (1)..(33): Xaa is C or S

SEQ ID NO: 16289 - protein, 41 aa, Artificial Sequence
  GFR-binding peptide
  MOD_RES (6)..(7)..(39)..(41): Xaa is C or S
STPPTXXVPTRLEPLTILYYDSANNVVEQLSNDMVVESXGX

SEQ ID NO: 16290 - protein, 34 aa, Artificial Sequence
  GFR-binding peptide
  MOD_RES (33)..(33): Xaa is C or S
  MOD_RES (14)..(15)..(16)..(17)..(18): Xaa is A or G
  MOD_RES (19)..(20)..(21)..(22): Xaa is A or G or is absent
VPQALEPLTILYYXXXXXXXXXEQLSNMIVRSXK

SEQ ID NO: 16291 - protein, 36 aa, Artificial Sequence; identical to SEQ ID NO: 9001
  GFR-binding peptide
  MOD_RES (2)..(3): Xaa is C or S
  MOD_RES (17)..(18)..(19)..(20)..(21): Xaa is A or G
  MOD_RES (22)..(23)..(24)..(25): Xaa is A or G or is absent

SEQ ID NO: 16292 - protein, 37 aa, Artificial Sequence
  GFR-binding peptide
  MOD_RES (6)..(7): Xaa is C or S
KIPKAXXVPTELEPLPMVYYDENEKVVEQLSNDMVVE

SEQ ID NO: 16293 - protein, 33 aa, Artificial Sequence
  GFR-binding peptide
  MOD_RES (1)..(2): Xaa is C or S
XXVPTELEPLTMLYYDENEKVVEQLSNDMVVEG

SEQ ID NO: 16294 - protein, 38 aa, Artificial Sequence
  GFR-binding peptide
  MOD_RES (5)..(5): Xaa is C or S
  MOD_RES (19)..(20)..(21)..(22)..(23): Xaa is A or G
  MOD_RES (24)..(25)..(26)..(27): Xaa is A or G or is absent
TKPTXAPTKLEPLTVLYYXXXXXXXXXEQLSNNMVVRS

SEQ ID NO: 16295 - protein, 31 aa, Artificial Sequence; identical to SEQ ID NO: 9003
  GFR-binding peptide
  MOD_RES (1)..(1): Xaa is C or S

SEQ ID NO: 16296 - protein, 35 aa, Artificial Sequence
  GFR-binding peptide
  MOD_RES (1)..(2)..(33)..(35): Xaa is C or S
XXVPQDLSPISILFIVGRTPKVYKQYEMVVKSXKX

SEQ ID NO: 16297 - protein, 36 aa, Artificial Sequence
  GFR-binding peptide
  MOD_RES (1)..(35): Xaa is C or S
  MOD_RES (15)..(16)..(17)..(18)..(19): Xaa is A or G
  MOD_RES (20)..(21)..(22)..(23): Xaa is A or G or is absent
XAPTKLSPISVLFIXXXXXXXXXYKQYENMVVRSXG

SEQ ID NO: 16298 - protein, 38 aa, Artificial Sequence; identical to SEQ ID NO: 9005
  GFR-binding peptide
  MOD_RES (3)..(4)..(36)..(38): Xaa is C or S

SEQ ID NO: 16299 - protein, 42 aa, Artificial Sequence; identical to SEQ ID NO: 9006
  GFR-binding peptide
  MOD_RES (5)..(6)..(40)..(42): Xaa is C or S
  MOD_RES (20)..(21)..(22)..(23)..(24): Xaa is A or G
  MOD_RES (25)..(26)..(27)..(28): Xaa is A or G or is absent

SEQ ID NO: 16300 - protein, 39 aa, Artificial Sequence; identical to SEQ ID NO: 9009
  GFR-binding peptide
  MOD_RES (1)..(2)..(36)..(38): Xaa is C or S
  MOD_RES (16)..(17)..(18)..(19)..(20): Xaa is A or G
  MOD_RES (21)..(22)..(23)..(24): Xaa is A or G or is absent

SEQ ID NO: 16301 - protein, 42 aa, Artificial Sequence
  GFR-binding peptide
  MOD_RES (4)..(5)..(39)..(41): Xaa is C or S
  MOD_RES (19)..(20)..(21)..(22)..(23): Xaa is A or G
  MOD_RES (24)..(25)..(26)..(27): Xaa is A or G or is absent
PPTXXVPTRLNAISILYFXXXXXXXXXLKKYRDMVVESXGXR

SEQ ID NO: 16302 - protein, 41 aa, Artificial Sequence
  GFR-binding peptide
  MOD_RES (6)..(7)..(41): Xaa is C or S
  MOD_RES (21)..(22)..(23)..(24)..(25): Xaa is A or G
  MOD_RES (26)..(27)..(28)..(29): Xaa is A or G or is absent
YVPKPXXAPTKLEPLTVLYYXXXXXXXXXEQLSNNMVVRSX

SEQ ID NO: 16303 - protein, 35 aa, Artificial Sequence
  GFR-binding peptide
  MOD_RES (2)..(3)..(34): Xaa is C or S
PXXVPQALSPISILFIVGRKPKVYKQYEMIVRSXK

SEQ ID NO: 16304 - protein, 31 aa, Artificial Sequence
  GFR-binding peptide
VPTRLNAISILYFDSANNVVLKKYRDMVVES

SEQ ID NO: 16305 - protein, 36 aa, Artificial Sequence
  GFR-binding peptide
  MOD_RES (1)..(2)..(33)..(35): Xaa is C or S
XXVPQDLEPLPIVYYVGRTPKVEQLSNMVVKSXKXS

SEQ ID NO: 16306 - protein, 32 aa, Artificial Sequence; identical to SEQ ID NO: 9012
  GFR-binding peptide
  MOD_RES (1)..(2): Xaa is C or S

SEQ ID NO: 16307 - protein, 34 aa, Artificial Sequence
  GFR-binding peptide
  MOD_RES (1)..(34): Xaa is C or S
  MOD_RES (15)..(16)..(17)..(18)..(19): Xaa is A or G
  MOD_RES (20)..(21)..(22)..(23): Xaa is A or G or is absent
XVPQDLSPISILFIXXXXXXXXXYKQYEMVVKSX

SEQ ID NO: 16308 - protein, 44 aa, Artificial Sequence; identical to SEQ ID NO: 9014
  GFR-binding peptide
  MOD_RES (6)..(7)..(41)..(43): Xaa is C or S
  MOD_RES (21)..(22)..(23)..(24)..(25): Xaa is A or G
  MOD_RES (26)..(27)..(28)..(29): Xaa is A or G or is absent

SEQ ID NO: 16309 - protein, 34 aa, Artificial Sequence; identical to SEQ ID NO: 9015
  GFR-binding peptide
  MOD_RES (1)..(32)..(34): Xaa is C or S

SEQ ID NO: 16310 - protein, 33 aa, Artificial Sequence
  GFR-binding peptide
  MOD_RES (1)..(33): Xaa is C or S
XAPTQLEPLTVLYYDDSSNVIEQLSNNMVVRAX

SEQ ID NO: 16311 - protein, 39 aa, Artificial Sequence
  GFR-binding peptide
  MOD_RES (7)..(39): Xaa is C or S
HVTKPTXAPTKLEPLPVVYYDDSSNVIEQLSNNMVVRSX

SEQ ID NO: 16312 - protein, 39 aa, Artificial Sequence; identical to SEQ ID NO: 9017
  GFR-binding peptide
  MOD_RES (7)..(7): Xaa is C or S
  MOD_RES (21)..(22)..(23)..(24)..(25): Xaa is A or G
  MOD_RES (26)..(27)..(28)..(29): Xaa is A or G or is absent

SEQ ID NO: 16313 - protein, 39 aa, Artificial Sequence
  GFR-binding peptide
  MOD_RES (4)..(5)..(39): Xaa is C or S
  MOD_RES (19)..(20)..(21)..(22)..(23): Xaa is A or G
  MOD_RES (24)..(25)..(26)..(27): Xaa is A or G or is absent
PKPXXAPTQLSPISVLFIXXXXXXXXXYKQYENMVVRAX

SEQ ID NO: 16314 - protein, 37 aa, Artificial Sequence; identical to SEQ ID NO: 9019
  GFR-binding peptide
  MOD_RES (6)..(7): Xaa is C or S

SEQ ID NO: 16315 - protein, 40 aa, Artificial Sequence; identical to SEQ ID NO: 9020
  GFR-binding peptide
  MOD_RES (5)..(6)..(40): Xaa is C or S
  MOD_RES (20)..(21)..(22)..(23)..(24): Xaa is A or G
  MOD_RES (25)..(26)..(27)..(28): Xaa is A or G or is absent

SEQ ID NO: 16316 - protein, 39 aa, Artificial Sequence
  GFR-binding peptide
  MOD_RES (5)..(6): Xaa is C or S
  MOD_RES (20)..(21)..(22)..(23)..(24): Xaa is A or G
  MOD_RES (25)..(26)..(27)..(28): Xaa is A or G or is absent
IPKAXXVPTELSPISMLFIXXXXXXXXXYKQYEDMVVEG

SEQ ID NO: 16317 - protein, 36 aa, Artificial Sequence
  GFR-binding peptide
  MOD_RES (5)..(6): Xaa is C or S
VPKPXXAPTKLEPLTVLYYDDSSNVIEQLSNNMVVR

SEQ ID NO: 16318 - protein, 37 aa, Artificial Sequence
  GFR-binding peptide
  MOD_RES (5)..(6): Xaa is C or S
TPPTXXVPTRLEPLTILYYDSANNVVEQLSNDMVVES

SEQ ID NO: 16319 - protein, 39 aa, Artificial Sequence
  GFR-binding peptide
  MOD_RES (5)..(6): Xaa is C or S
  MOD_RES (20)..(21)..(22)..(23)..(24): Xaa is A or G
  MOD_RES (25)..(26)..(27)..(28): Xaa is A or G or is absent
TPPTXXVPTRLSAISILYLXXXXXXXXXLKNYQDMVVES

SEQ ID NO: 16320 - protein, 38 aa, Artificial Sequence
  GFR-binding peptide
  MOD_RES (6)..(7): Xaa is C or S
SIPKAXXVPTELEPLTMLYYDEYDKVVEQLSNEMVVEG

SEQ ID NO: 16321 - protein, 37 aa, Artificial Sequence
  GFR-binding peptide
  MOD_RES (3)..(4)..(36): Xaa is C or S
PTXXVPTRLEPLPIVYYDSANNVVEQLSNDMVVESXG

SEQ ID NO: 16322 - protein, 37 aa, Artificial Sequence
  GFR-binding peptide
  MOD_RES (4)..(5)..(37): Xaa is C or S
PKPXXAPTKLEPLTVLYYDDSSNVIEQLSNNMVVRSX

SEQ ID NO: 16323 - protein, 43 aa, Artificial Sequence
  GFR-binding peptide
  MOD_RES (6)..(7)..(41)..(43): Xaa is C or S
  MOD_RES (21)..(22)..(23)..(24)..(25): Xaa is A or G
  MOD_RES (26)..(27)..(28)..(29): Xaa is A or G or is absent
SIPKAXXVPTELSPISMLFIXXXXXXXXXYKQYEEMVVEGXGX

SEQ ID NO: 16324 - protein, 37 aa, Artificial Sequence
  GFR-binding peptide
  MOD_RES (3)..(4)..(35)..(37): Xaa is C or S
SPXXVSQDLEPLPIVYYIGKTPKIEQLSNMIVKSXKX

SEQ ID NO: 16325 - protein, 38 aa, Artificial Sequence
  GFR-binding peptide
  MOD_RES (1)..(2)..(35)..(37): Xaa is C or S
  MOD_RES (16)..(17)..(18)..(19)..(20): Xaa is A or G
  MOD_RES (21)..(22)..(23)..(24): Xaa is A or G or is absent
XXVPQDLEPLTILYYXXXXXXXXXEQLSNMVVKSXKXS

SEQ ID NO: 16326 - protein, 41 aa, Artificial Sequence
  GFR-binding peptide
  MOD_RES (3)..(4)..(38)..(40): Xaa is C or S
  MOD_RES (18)..(19)..(20)..(21)..(22): Xaa is A or G
  MOD_RES (23)..(24)..(25)..(26): Xaa is A or G or is absent
KPXXAPTKLEPLPVVYYXXXXXXXXXEQLSNNMVVRSXGXH

SEQ ID NO: 16327 - protein, 33 aa, Artificial Sequence
  GFR-binding peptide
  MOD_RES (14)..(15)..(16)..(17)..(18): Xaa is A or G
  MOD_RES (19)..(20)..(21)..(22): Xaa is A or G or is absent
VPTELEPLPMVYYXXXXXXXXXEQLSNEMVVEG

SEQ ID NO: 16328 - protein, 44 aa, Artificial Sequence
  GFR-binding peptide
  MOD_RES (6)..(7)..(41)..(43): Xaa is C or S
  MOD_RES (21)..(22)..(23)..(24)..(25): Xaa is A or G
  MOD_RES (26)..(27)..(28)..(29): Xaa is A or G or is absent
STPPTXXVPTRLEPLPIVYYXXXXXXXXXEQLSNDMVVESXGXR

SEQ ID NO: 16329 - protein, 39 aa, Artificial Sequence
  GFR-binding peptide
  MOD_RES (5)..(6): Xaa is C or S
  MOD_RES (20)..(21)..(22)..(23)..(24): Xaa is A or G
  MOD_RES (25)..(26)..(27)..(28): Xaa is A or G or is absent
TPPTXXVPTRLNAISILYFXXXXXXXXXLKKYRDMVVES

SEQ ID NO: 16330 - protein, 33 aa, Artificial Sequence; identical to SEQ ID NO: 9030
  GFR-binding peptide
  MOD_RES (2)..(3): Xaa is C or S

SEQ ID NO: 16331 - protein, 39 aa, Artificial Sequence
  GFR-binding peptide
  MOD_RES (4)..(36)..(38): Xaa is C or S
KPTXAPTKLEPLPVVYYDDSSNVIEQLSNNMVVRSXGXH

SEQ ID NO: 16332 - protein, 36 aa, Artificial Sequence; identical to SEQ ID NO: 9036
  GFR-binding peptide
  MOD_RES (2)..(34)..(36): Xaa is C or S

SEQ ID NO: 16333 - protein, 41 aa, Artificial Sequence
  GFR-binding peptide
  MOD_RES (4)..(5)..(38)..(40): Xaa is C or S
  MOD_RES (19)..(20)..(21)..(22)..(23): Xaa is A or G
  MOD_RES (24)..(25)..(26)..(27): Xaa is A or G or is absent
ASPXXVPQDLSPISILFIXXXXXXXXXYKQYEMVVKSXKXS

SEQ ID NO: 16334 - protein, 36 aa, Artificial Sequence
  GFR-binding peptide
  MOD_RES (5)..(6): Xaa is C or S
VPKPXXAPTQLEPLPVVYYDDSSNVIEQLSNNMVVR

SEQ ID NO: 16335 - protein, 35 aa, Artificial Sequence
  GFR-binding peptide
  MOD_RES (1)..(2): Xaa is C or S
  MOD_RES (16)..(17)..(18)..(19)..(20): Xaa is A or G
  MOD_RES (21)..(22)..(23)..(24): Xaa is A or G or is absent
XXAPTKLEPLTVLYYXXXXXXXXXEQLSNNMVVRS

SEQ ID NO: 16336 - protein, 36 aa, Artificial Sequence; identical to SEQ ID NO: 9038
  GFR-binding peptide
  MOD_RES (1)..(34)..(36): Xaa is C or S
  MOD_RES (15)..(16)..(17)..(18)..(19): Xaa is A or G
  MOD_RES (20)..(21)..(22)..(23): Xaa is A or G or is absent

SEQ ID NO: 16337 - protein, 39 aa, Artificial Sequence
  GFR-binding peptide
  MOD_RES (4)..(5)..(36)..(38): Xaa is C or S
ASPXXVSQDLSPISILFIIGKTPKIYKQYEMIVKSXKXS

SEQ ID NO: 16338 - protein, 36 aa, Artificial Sequence; identical to SEQ ID NO: 9040
  GFR-binding peptide
  MOD_RES (33)..(35): Xaa is C or S
  MOD_RES (14)..(15)..(16)..(17)..(18): Xaa is A or G
  MOD_RES (19)..(20)..(21)..(22): Xaa is A or G or is absent

SEQ ID NO: 16339 - protein, 35 aa, Artificial Sequence
  GFR-binding peptide
  MOD_RES (1)..(2): Xaa is C or S
  MOD_RES (16)..(17)..(18)..(19)..(20): Xaa is A or G
  MOD_RES (21)..(22)..(23)..(24): Xaa is A or G or is absent
XXVPTRLSAISILYLXXXXXXXXXLKNYQDMVVES

SEQ ID NO: 16340 - protein, 39 aa, Artificial Sequence; identical to SEQ ID NO: 9041
  GFR-binding peptide
  MOD_RES (3)..(4)..(37)..(39): Xaa is C or S
  MOD_RES (18)..(19)..(20)..(21)..(22): Xaa is A or G
  MOD_RES (23)..(24)..(25)..(26): Xaa is A or G or is absent

SEQ ID NO: 16341 - protein, 40 aa, Artificial Sequence
  GFR-binding peptide
  MOD_RES (3)..(4)..(38)..(40): Xaa is C or S
  MOD_RES (18)..(19)..(20)..(21)..(22): Xaa is A or G
  MOD_RES (23)..(24)..(25)..(26): Xaa is A or G or is absent
KPXXAPTKLEPLPVVYYXXXXXXXXXEQLSNNMVVRSXGX

SEQ ID NO: 16342 - protein, 32 aa, Artificial Sequence
  GFR-binding peptide
  MOD_RES (1)..(2): Xaa is C or S
XXVPTELEPLTMLYYDEYDKVVEQLSNEMVVE

SEQ ID NO: 16343 - protein, 39 aa, Artificial Sequence
  GFR-binding peptide
  MOD_RES (1)..(2)..(36)..(38): Xaa is C or S
  MOD_RES (16)..(17)..(18)..(19)..(20): Xaa is A or G
  MOD_RES (21)..(22)..(23)..(24): Xaa is A or G or is absent
XXVPTELSPISMLFIXXXXXXXXXYKQYEEMVVEGXGXR

SEQ ID NO: 16344 - protein, 39 aa, Artificial Sequence; identical to SEQ ID NO: 9042
  GFR-binding peptide
  MOD_RES (3)..(37)..(39): Xaa is C or S
  MOD_RES (17)..(18)..(19)..(20)..(21): Xaa is A or G
  MOD_RES (22)..(23)..(24)..(25): Xaa is A or G or is absent

SEQ ID NO: 16345 - protein, 39 aa, Artificial Sequence
  GFR-binding peptide
  MOD_RES (3)..(4)..(36)..(38): Xaa is C or S
KAXXVPTELEPLPMVYYDEYDKVVEQLSNEMVVEGXGXR

SEQ ID NO: 16346 - protein, 41 aa, Artificial Sequence; identical to SEQ ID NO: 9043
  GFR-binding peptide
  MOD_RES (6)..(38)..(40): Xaa is C or S

SEQ ID NO: 16347 - protein, 35 aa, Artificial Sequence
  GFR-binding peptide
  MOD_RES (32)..(34): Xaa is C or S
VPTELEPLTMLYYDEYDKVVEQLSNEMVVEGXGXR

SEQ ID NO: 16348 - protein, 39 aa, Artificial Sequence; identical to SEQ ID NO: 9044
  GFR-binding peptide
  MOD_RES (5)..(6)..(38): Xaa is C or S

SEQ ID NO: 16349 - protein, 38 aa, Artificial Sequence
  GFR-binding peptide
  MOD_RES (4)..(5)..(38): Xaa is C or S
  MOD_RES (19)..(20)..(21)..(22)..(23): Xaa is A or G
  MOD_RES (24)..(25)..(26)..(27): Xaa is A or G or is absent
AAPXXVPQALEPLTILYYXXXXXXXXXEQLSNMIVRSX

SEQ ID NO: 16350 - protein, 36 aa, Artificial Sequence
  GFR-binding peptide
  MOD_RES (1)..(35): Xaa is C or S
  MOD_RES (15)..(16)..(17)..(18)..(19): Xaa is A or G
  MOD_RES (20)..(21)..(22)..(23): Xaa is A or G or is absent
XVPTELEPLTMLYYXXXXXXXXXEQLSNDMVVEGXG

SEQ ID NO: 16351 - protein, 40 aa, Artificial Sequence; identical to SEQ ID NO: 9050
  GFR-binding peptide
  MOD_RES (5)..(6)..(37)..(39): Xaa is C or S

SEQ ID NO: 16352 - protein, 43 aa, Artificial Sequence; identical to SEQ ID NO: 9053
  GFR-binding peptide
  MOD_RES (5)..(6)..(40)..(42): Xaa is C or S
  MOD_RES (20)..(21)..(22)..(23)..(24): Xaa is A or G
  MOD_RES (25)..(26)..(27)..(28): Xaa is A or G or is absent

SEQ ID NO: 16353 - protein, 40 aa, Artificial Sequence; identical to SEQ ID NO: 9054
  GFR-binding peptide
  MOD_RES (6)..(7): Xaa is C or S
  MOD_RES (21)..(22)..(23)..(24)..(25): Xaa is A or G
  MOD_RES (26)..(27)..(28)..(29): Xaa is A or G or is absent

SEQ ID NO: 16354 - protein, 35 aa, Artificial Sequence; identical to SEQ ID NO: 9055
  GFR-binding peptide
  MOD_RES (4)..(5): Xaa is C or S

SEQ ID NO: 16355 - protein, 42 aa, Artificial Sequence; identical to SEQ ID NO: 9056
  GFR-binding peptide
  MOD_RES (6)..(7)..(41): Xaa is C or S
  MOD_RES (21)..(22)..(23)..(24)..(25): Xaa is A or G
  MOD_RES (26)..(27)..(28)..(29): Xaa is A or G or is absent

SEQ ID NO: 16356 - protein, 42 aa, Artificial Sequence
  GFR-binding peptide
  MOD_RES (6)..(7)..(39)..(41): Xaa is C or S
STPPTXXVPTRLNAISILYFDSANNVVLKKYRDMVVESXGXR

SEQ ID NO: 16357 - protein, 36 aa, Artificial Sequence
  GFR-binding peptide
  MOD_RES (1)..(33)..(35): Xaa is C or S
XAPTQLEPLPVVYYDDSSNVIEQLSNNMVVRAXGXH

SEQ ID NO: 16358 - protein, 37 aa, Artificial Sequence
  GFR-binding peptide
  MOD_RES (5)..(6)..(37): Xaa is C or S
SASPXXVSQDLEPLPIVYYIGKTPKIEQLSNMIVKSX

SEQ ID NO: 16359 - protein, 31 aa, Artificial Sequence
  GFR-binding peptide
  MOD_RES (1)..(1): Xaa is C or S
XVSQDLEPLPIVYYIGKTPKIEQLSNMIVKS

SEQ ID NO: 16360 - protein, 37 aa, Artificial Sequence
  GFR-binding peptide
  MOD_RES (1)..(2)..(36): Xaa is C or S
  MOD_RES (16)..(17)..(18)..(19)..(20): Xaa is A or G
  MOD_RES (21)..(22)..(23)..(24): Xaa is A or G or is absent
XXVPTELEPLPMVYYXXXXXXXXXEQLSNEMVVEGXG

SEQ ID NO: 16361 - protein, 39 aa, Artificial Sequence
  GFR-binding peptide
  MOD_RES (5)..(6)..(38): Xaa is C or S
TPPTXXVPTRLSAISILYLDSANNVVLKNYQDMVVESXG

SEQ ID NO: 16362 - protein, 38 aa, Artificial Sequence
  GFR-binding peptide
  MOD_RES (5)..(6): Xaa is C or S
  MOD_RES (20)..(21)..(22)..(23)..(24): Xaa is A or G
  MOD_RES (25)..(26)..(27)..(28): Xaa is A or G or is absent
VPKPXXAPTQLEPLPVVYYXXXXXXXXXEQLSNNMVVR

SEQ ID NO: 16363 - protein, 35 aa, Artificial Sequence
  GFR-binding peptide
  MOD_RES (32)..(34): Xaa is C or S
VPTELEPLTMLYYDENEKVVEQLSNDMVVEGXGXR

SEQ ID NO: 16364 - protein, 36 aa, Artificial Sequence
  GFR-binding peptide
  MOD_RES (2)..(36): Xaa is C or S
  MOD_RES (16)..(17)..(18)..(19)..(20): Xaa is A or G
  MOD_RES (21)..(22)..(23)..(24): Xaa is A or G or is absent
TXAPTKLSPISVLFIXXXXXXXXXYKQYENMVVRSX

SEQ ID NO: 16365 - protein, 32 aa, Artificial Sequence
  GFR-binding peptide
  MOD_RES (1)..(2): Xaa is C or S
XXVSQDLEPLPIVYYIGKTPKIEQLSNMIVKS

SEQ ID NO: 16366 - protein, 39 aa, Artificial Sequence; identical to SEQ ID NO: 9070
  GFR-binding peptide
  MOD_RES (3)..(4)..(37)..(39): Xaa is C or S
  MOD_RES (18)..(19)..(20)..(21)..(22): Xaa is A or G
  MOD_RES (23)..(24)..(25)..(26): Xaa is A or G or is absent

SEQ ID NO: 16367 - protein, 38 aa, Artificial Sequence; identical to SEQ ID NO: 9071
  GFR-binding peptide
  MOD_RES (3)..(4)..(37): Xaa is C or S
  MOD_RES (18)..(19)..(20)..(21)..(22): Xaa is A or G
  MOD_RES (23)..(24)..(25)..(26): Xaa is A or G or is absent

SEQ ID NO: 16368 - protein, 32 aa, Artificial Sequence
  GFR-binding peptide
  MOD_RES (32)..(32): Xaa is C or S
VPTRLEPLPIVYYDSANNVVEQLSNDMVVESX

SEQ ID NO: 16369 - protein, 35 aa, Artificial Sequence
  GFR-binding peptide
  MOD_RES (3)..(3): Xaa is C or S
  MOD_RES (17)..(18)..(19)..(20)..(21): Xaa is A or G
  MOD_RES (22)..(23)..(24)..(25): Xaa is A or G or is absent
PTXAPTKLSPISVLFIXXXXXXXXXYKQYENMVVR

SEQ ID NO: 16370 - protein, 35 aa, Artificial Sequence; identical to SEQ ID NO: 9072
  GFR-binding peptide
  MOD_RES (1)..(35): Xaa is C or S
  MOD_RES (15)..(16)..(17)..(18)..(19): Xaa is A or G
  MOD_RES (20)..(21)..(22)..(23): Xaa is A or G or is absent

SEQ ID NO: 16371 - protein, 39 aa, Artificial Sequence
  GFR-binding peptide
  MOD_RES (4)..(5)..(37)..(39): Xaa is C or S
PKPXXAPTQLEPLTVLYYDDSSNVIEQLSNNMVVRAXGX

SEQ ID NO: 16372 - protein, 36 aa, Artificial Sequence
  GFR-binding peptide
  MOD_RES (5)..(5): Xaa is C or S
TKPTXAPTKLEPLTVLYYDDSSNVIEQLSNNMVVRS

SEQ ID NO: 16373 - protein, 37 aa, Artificial Sequence; identical to SEQ ID NO: 9075
  GFR-binding peptide
  MOD_RES (1)..(2)..(34)..(36): Xaa is C or S

SEQ ID NO: 16374 - protein, 36 aa, Artificial Sequence; identical to SEQ ID NO: 9079
  GFR-binding peptide
  MOD_RES (1)..(35): Xaa is C or S
  MOD_RES (15)..(16)..(17)..(18)..(19): Xaa is A or G
  MOD_RES (20)..(21)..(22)..(23): Xaa is A or G or is absent

SEQ ID NO: 16375 - protein, 36 aa, Artificial Sequence; identical to SEQ ID NO: 9085
  GFR-binding peptide
  MOD_RES (3)..(4): Xaa is C or S
  MOD_RES (18)..(19)..(20)..(21)..(22): Xaa is A or G
  MOD_RES (23)..(24)..(25)..(26): Xaa is A or G or is absent

SEQ ID NO: 16376 - protein, 34 aa, Artificial Sequence
  GFR-binding peptide
  MOD_RES (2)..(34): Xaa is C or S
TXAPTKLEPLPVVYYDDSSNVIEQLSNNMVVRSX

SEQ ID NO: 16377 - protein, 35 aa, Artificial Sequence
  GFR-binding peptide
  MOD_RES (4)..(5): Xaa is C or S
PKAXXVPTELEPLPMVYYDEYDKVVEQLSNEMVVE

SEQ ID NO: 16378 - protein, 40 aa, Artificial Sequence
  GFR-binding peptide
  MOD_RES (3)..(37)..(39): Xaa is C or S
  MOD_RES (17)..(18)..(19)..(20)..(21): Xaa is A or G
  MOD_RES (22)..(23)..(24)..(25): Xaa is A or G or is absent
PTXAPTKLSPISVLFIXXXXXXXXXYKQYENMVVRSXGXH

SEQ ID NO: 16379 - protein, 36 aa, Artificial Sequence; identical to SEQ ID NO: 9099
  GFR-binding peptide
  MOD_RES (1)..(2)..(36): Xaa is C or S
  MOD_RES (16)..(17)..(18)..(19)..(20): Xaa is A or G
  MOD_RES (21)..(22)..(23)..(24): Xaa is A or G or is absent

SEQ ID NO: 16380 - protein, 33 aa, Artificial Sequence
  GFR-binding peptide
  MOD_RES (14)..(15)..(16)..(17)..(18): Xaa is A or G
  MOD_RES (19)..(20)..(21)..(22): Xaa is A or G or is absent
APTKLEPLPVVYYXXXXXXXXXEQLSNNMVVRS

SEQ ID NO: 16381 - protein, 43 aa, Artificial Sequence
  GFR-binding peptide
  MOD_RES (6)..(7)..(41)..(43): Xaa is C or S
  MOD_RES (21)..(22)..(23)..(24)..(25): Xaa is A or G
  MOD_RES (26)..(27)..(28)..(29): Xaa is A or G or is absent
TVPKPXXAPTQLSPISVLFIXXXXXXXXXYKQYENMVVRAXGX

SEQ ID NO: 16382 - protein, 32 aa, Artificial Sequence; identical to SEQ ID NO: 9100
  GFR-binding peptide
  MOD_RES (1)..(2): Xaa is C or S

SEQ ID NO: 16383 - protein, 37 aa, Artificial Sequence
  GFR-binding peptide
  MOD_RES (2)..(3)..(34)..(36): Xaa is C or S
PXXVSQDLSPISILFIIGKTPKIYKQYEMIVKSXKXS

SEQ ID NO: 16384 - protein, 38 aa, Artificial Sequence; identical to SEQ ID NO: 9101
  GFR-binding peptide
  MOD_RES (1)..(35)..(37): Xaa is C or S
  MOD_RES (15)..(16)..(17)..(18)..(19): Xaa is A or G
  MOD_RES (20)..(21)..(22)..(23): Xaa is A or G or is absent

SEQ ID NO: 16385 - protein, 39 aa, Artificial Sequence
  GFR-binding peptide
  MOD_RES (4)..(5)..(37)..(39): Xaa is C or S
PKPXXAPTQLSPISVLFIDDSSNVIYKQYENMVVRAXGX

SEQ ID NO: 16386 - protein, 39 aa, Artificial Sequence
  GFR-binding peptide
  MOD_RES (2)..(3)..(37)..(39): Xaa is C or S
  MOD_RES (17)..(18)..(19)..(20)..(21): Xaa is A or G
  MOD_RES (22)..(23)..(24)..(25): Xaa is A or G or is absent
AXXVPTELEPLPMVYYXXXXXXXXXEQLSNEMVVEGXGX

SEQ ID NO: 16387 - protein, 37 aa, Artificial Sequence
  GFR-binding peptide
  MOD_RES (2)..(3)..(37): Xaa is C or S
  MOD_RES (17)..(18)..(19)..(20)..(21): Xaa is A or G
  MOD_RES (22)..(23)..(24)..(25): Xaa is A or G or is absent
TXXVPTRLSAISILYLXXXXXXXXXLKNYQDMVVESX

SEQ ID NO: 16388 - protein, 35 aa, Artificial Sequence; identical to SEQ ID NO: 9104
  GFR-binding peptide
  MOD_RES (33)..(35): Xaa is C or S
  MOD_RES (14)..(15)..(16)..(17)..(18): Xaa is A or G
  MOD_RES (19)..(20)..(21)..(22): Xaa is A or G or is absent

SEQ ID NO: 16389 - protein, 33 aa, Artificial Sequence
  GFR-binding peptide
  MOD_RES (14)..(15)..(16)..(17)..(18): Xaa is A or G
  MOD_RES (19)..(20)..(21)..(22): Xaa is A or G or is absent
VPTRLNAISILYFXXXXXXXXXLKKYRDMVVES

SEQ ID NO: 16390 - protein, 33 aa, Artificial Sequence; identical to SEQ ID NO: 9107
  GFR-binding peptide
  MOD_RES (14)..(15)..(16)..(17)..(18): Xaa is A or G
  MOD_RES (19)..(20)..(21)..(22): Xaa is A or G or is absent

SEQ ID NO: 16391 - protein, 31 aa, Artificial Sequence
  GFR-binding peptide
  MOD_RES (1)..(1): Xaa is C or S
XVPQDLSPISILFIVGRTPKVYKQYEMVVKS

SEQ ID NO: 16392 - protein, 41 aa, Artificial Sequence; identical to SEQ ID NO: 9110
  GFR-binding peptide
  MOD_RES (4)..(5)..(39)..(41): Xaa is C or S
  MOD_RES (19)..(20)..(21)..(22)..(23): Xaa is A or G
  MOD_RES (24)..(25)..(26)..(27): Xaa is A or G or is absent

SEQ ID NO: 16393 - protein, 31 aa, Artificial Sequence; identical to SEQ ID NO: 9111
  GFR-binding peptide
  MOD_RES (31)..(31): Xaa is C or S

SEQ ID NO: 16394 - protein, 40 aa, Artificial Sequence; identical to SEQ ID NO: 9113
  GFR-binding peptide
  MOD_RES (5)..(6)..(39): Xaa is C or S
  MOD_RES (20)..(21)..(22)..(23)..(24): Xaa is A or G
  MOD_RES (25)..(26)..(27)..(28): Xaa is A or G or is absent

SEQ ID NO: 16395 - protein, 36 aa, Artificial Sequence
  GFR-binding peptide
  MOD_RES (34)..(36): Xaa is C or S
  MOD_RES (14)..(15)..(16)..(17)..(18): Xaa is A or G
  MOD_RES (19)..(20)..(21)..(22): Xaa is A or G or is absent
VPTELEPLTMLYYXXXXXXXXXEQLSNEMVVEGXGX

SEQ ID NO: 16396 - protein, 36 aa, Artificial Sequence
  GFR-binding peptide
  MOD_RES (5)..(6): Xaa is C or S
VPKPXXAPTQLEPLTVLYYDDSSNVIEQLSNNMVVR

SEQ ID NO: 16397 - protein, 33 aa, Artificial Sequence
  GFR-binding peptide
  MOD_RES (14)..(15)..(16)..(17)..(18): Xaa is A or G
  MOD_RES (19)..(20)..(21)..(22): Xaa is A or G or is absent
VPTRLSAISILYLXXXXXXXXXLKNYQDMVVES

SEQ ID NO: 16398 - protein, 36 aa, Artificial Sequence; identical to SEQ ID NO: 9117
  GFR-binding peptide
  MOD_RES (34)..(36): Xaa is C or S
  MOD_RES (14)..(15)..(16)..(17)..(18): Xaa is A or G
  MOD_RES (19)..(20)..(21)..(22): Xaa is A or G or is absent

SEQ ID NO: 16399 - protein, 33 aa, Artificial Sequence
  GFR-binding peptide
  MOD_RES (2)..(2): Xaa is C or S
TXAPTKLEPLTVLYYDDSSNVIEQLSNNMVVRS

SEQ ID NO: 16400 - protein, 36 aa, Artificial Sequence
  GFR-binding peptide
  MOD_RES (4)..(36): Xaa is C or S
KPTXAPTKLEPLPVVYYDDSSNVIEQLSNNMVVRSX

SEQ ID NO: 16401 - protein, 37 aa, Artificial Sequence
  GFR-binding peptide
  MOD_RES (1)..(2)..(36): Xaa is C or S
  MOD_RES (16)..(17)..(18)..(19)..(20): Xaa is A or G
  MOD_RES (21)..(22)..(23)..(24): Xaa is A or G or is absent
XXVPTRLEPLTILYYXXXXXXXXXEQLSNDMVVESXG

SEQ ID NO: 16402 - protein, 40 aa, Artificial Sequence
  GFR-binding peptide
  MOD_RES (6)..(7): Xaa is C or S
  MOD_RES (21)..(22)..(23)..(24)..(25): Xaa is A or G
  MOD_RES (26)..(27)..(28)..(29): Xaa is A or G or is absent
STPPTXXVPTRLNAISILYFXXXXXXXXXLKKYRDMVVES

SEQ ID NO: 16403 - protein, 37 aa, Artificial Sequence; identical to SEQ ID NO: 9128
  GFR-binding peptide
  MOD_RES (4)..(5)..(36): Xaa is C or S

SEQ ID NO: 16404 - protein, 38 aa, Artificial Sequence
  GFR-binding peptide
  MOD_RES (5)..(37): Xaa is C or S
TKPTXAPTKLEPLTVLYYDDSSNVIEQLSNNMVVRSXG

SEQ ID NO: 16405 - protein, 44 aa, Artificial Sequence; identical to SEQ ID NO: 9131
  GFR-binding peptide
  MOD_RES (6)..(7)..(41)..(43): Xaa is C or S
  MOD_RES (21)..(22)..(23)..(24)..(25): Xaa is A or G
  MOD_RES (26)..(27)..(28)..(29): Xaa is A or G or is absent

SEQ ID NO: 16406 - protein, 38 aa, Artificial Sequence; identical to SEQ ID NO: 9133
  GFR-binding peptide
  MOD_RES (5)..(6)..(38): Xaa is C or S

SEQ ID NO: 16407 - protein, 37 aa, Artificial Sequence; identical to SEQ ID NO: 9134
  GFR-binding peptide
  MOD_RES (3)..(4)..(37): Xaa is C or S
  MOD_RES (18)..(19)..(20)..(21)..(22): Xaa is A or G
  MOD_RES (23)..(24)..(25)..(26): Xaa is A or G or is absent

SEQ ID NO: 16408 - protein, 33 aa, Artificial Sequence
  GFR-binding peptide
  MOD_RES (2)..(3): Xaa is C or S
PXXAPTQLSPISVLFIDDSSNVIYKQYENMVVR

SEQ ID NO: 16409 - protein, 36 aa, Artificial Sequence
  GFR-binding peptide
  MOD_RES (1)..(35): Xaa is C or S
  MOD_RES (15)..(16)..(17)..(18)..(19): Xaa is A or G
  MOD_RES (20)..(21)..(22)..(23): Xaa is A or G or is absent
XVPTRLSPISILFIXXXXXXXXXYKQYEDMVVESXG

SEQ ID NO: 16410 - protein, 40 aa, Artificial Sequence
  GFR-binding peptide
  MOD_RES (5)..(6)..(38)..(40): Xaa is C or S
IPKAXXVPTELEPLTMLYYDEYDKVVEQLSNEMVVEGXGX

SEQ ID NO: 16411 - protein, 39 aa, Artificial Sequence; identical to SEQ ID NO: 9138
  GFR-binding peptide
  MOD_RES (4)..(5)..(38): Xaa is C or S
  MOD_RES (19)..(20)..(21)..(22)..(23): Xaa is A or G
  MOD_RES (24)..(25)..(26)..(27): Xaa is A or G or is absent

SEQ ID NO: 16412 - protein, 32 aa, Artificial Sequence
  GFR-binding peptide
  MOD_RES (1)..(1): Xaa is C or S
XVPTELSPISMLFIDENEKVVYKQYEDMVVEG

SEQ ID NO: 16413 - protein, 33 aa, Artificial Sequence
  GFR-binding peptide
  MOD_RES (14)..(15)..(16)..(17)..(18): Xaa is A or G
  MOD_RES (19)..(20)..(21)..(22): Xaa is A or G or is absent
APTKLEPLTVLYYXXXXXXXXXEQLSNNMVVRS

SEQ ID NO: 16414 - protein, 43 aa, Artificial Sequence; identical to SEQ ID NO: 9141
  GFR-binding peptide
  MOD_RES (5)..(6)..(40)..(42): Xaa is C or S
  MOD_RES (20)..(21)..(22)..(23)..(24): Xaa is A or G
  MOD_RES (25)..(26)..(27)..(28): Xaa is A or G or is absent

SEQ ID NO: 16415 - protein, 32 aa, Artificial Sequence; identical to SEQ ID NO: 9146
  GFR-binding peptide
  MOD_RES (1)..(2): Xaa is C or S

SEQ ID NO: 16416 - protein, 39 aa, Artificial Sequence
  GFR-binding peptide
  MOD_RES (5)..(6)..(39): Xaa is C or S
  MOD_RES (20)..(21)..(22)..(23)..(24): Xaa is A or G
  MOD_RES (25)..(26)..(27)..(28): Xaa is A or G or is absent
SASPXXVSQDLEPLPIVYYXXXXXXXXXEQLSNMIVKSX

SEQ ID NO: 16417 - protein, 40 aa, Artificial Sequence; identical to SEQ ID NO: 9148
  GFR-binding peptide
  MOD_RES (3)..(37)..(39): Xaa is C or S
  MOD_RES (17)..(18)..(19)..(20)..(21): Xaa is A or G
  MOD_RES (22)..(23)..(24)..(25): Xaa is A or G or is absent

SEQ ID NO: 16418 - protein, 35 aa, Artificial Sequence
  GFR-binding peptide
  MOD_RES (3)..(4)..(35): Xaa is C or S
SPXXVSQDLSPISILFIIGKTPKIYKQYEMIVKSX

SEQ ID NO: 16419 - protein, 38 aa, Artificial Sequence
  GFR-binding peptide
  MOD_RES (4)..(5)..(36)..(38): Xaa is C or S
ASPXXVPQDLEPLPIVYYVGRTPKVEQLSNMVVKSXKX

SEQ ID NO: 16420 - protein, 35 aa, Artificial Sequence; identical to SEQ ID NO: 9152
  GFR-binding peptide
  MOD_RES (34)..(34): Xaa is C or S
  MOD_RES (14)..(15)..(16)..(17)..(18): Xaa is A or G
  MOD_RES (19)..(20)..(21)..(22): Xaa is A or G or is absent

SEQ ID NO: 16421 - protein, 35 aa, Artificial Sequence
  GFR-binding peptide
  MOD_RES (3)..(4): Xaa is C or S
KPXXAPTQLSPISVLFIDDSSNVIYKQYENMVVRA

SEQ ID NO: 16422 - protein, 40 aa, Artificial Sequence
  GFR-binding peptide
  MOD_RES (5)..(6)..(39): Xaa is C or S
  MOD_RES (20)..(21)..(22)..(23)..(24): Xaa is A or G
  MOD_RES (25)..(26)..(27)..(28): Xaa is A or G or is absent
SASPXXVSQDLSPISILFIXXXXXXXXXYKQYEMIVKSXK

SEQ ID NO: 16423 - protein, 34 aa, Artificial Sequence; identical to SEQ ID NO: 9153
  GFR-binding peptide
  MOD_RES (33)..(33): Xaa is C or S
  MOD_RES (14)..(15)..(16)..(17)..(18): Xaa is A or G
  MOD_RES (19)..(20)..(21)..(22): Xaa is A or G or is absent

SEQ ID NO: 16424 - protein, 37 aa, Artificial Sequence
  GFR-binding peptide
  MOD_RES (4)..(5)..(37): Xaa is C or S
PKPXXAPTKLEPLPVVYYDDSSNVIEQLSNNMVVRSX

SEQ ID NO: 16425 - protein, 39 aa, Artificial Sequence; identical to SEQ ID NO: 9155
  GFR-binding peptide
  MOD_RES (4)..(5)..(39): Xaa is C or S
  MOD_RES (19)..(20)..(21)..(22)..(23): Xaa is A or G
  MOD_RES (24)..(25)..(26)..(27): Xaa is A or G or is absent

SEQ ID NO: 16426 - protein, 40 aa, Artificial Sequence
  GFR-binding peptide
  MOD_RES (3)..(4)..(38)..(40): Xaa is C or S
  MOD_RES (18)..(19)..(20)..(21)..(22): Xaa is A or G
  MOD_RES (23)..(24)..(25)..(26): Xaa is A or G or is absent
KPXXAPTQLSPISVLFIXXXXXXXXXYKQYENMVVRAXGX

SEQ ID NO: 16427 - protein, 36 aa, Artificial Sequence
  GFR-binding peptide
  MOD_RES (2)..(3): Xaa is C or S
  MOD_RES (17)..(18)..(19)..(20)..(21): Xaa is A or G
  MOD_RES (22)..(23)..(24)..(25): Xaa is A or G or is absent
AXXVPTELEPLTMLYYXXXXXXXXXEQLSNEMVVEG

SEQ ID NO: 16428 - protein, 35 aa, Artificial Sequence
  GFR-binding peptide
  MOD_RES (3)..(35): Xaa is C or S
PTXAPTKLSPISVLFIDDSSNVIYKQYENMVVRSX

SEQ ID NO: 16429 - protein, 35 aa, Artificial Sequence
  GFR-binding peptide
  MOD_RES (34)..(34): Xaa is C or S
  MOD_RES (14)..(15)..(16)..(17)..(18): Xaa is A or G
  MOD_RES (19)..(20)..(21)..(22): Xaa is A or G or is absent
APTQLEPLPVVYYXXXXXXXXXEQLSNNMVVRAXG

SEQ ID NO: 16430 - protein, 35 aa, Artificial Sequence; identical to SEQ ID NO: 9157
  GFR-binding peptide
  MOD_RES (34)..(34): Xaa is C or S
  MOD_RES (14)..(15)..(16)..(17)..(18): Xaa is A or G
  MOD_RES (19)..(20)..(21)..(22): Xaa is A or G or is absent

SEQ ID NO: 16431 - protein, 42 aa, Artificial Sequence
  GFR-binding peptide
  MOD_RES (7)..(41): Xaa is C or S
  MOD_RES (21)..(22)..(23)..(24)..(25): Xaa is A or G
  MOD_RES (26)..(27)..(28)..(29): Xaa is A or G or is absent
HVTKPTXAPTKLEPLTVLYYXXXXXXXXXEQLSNNMVVRSXG

SEQ ID NO: 16432 - protein, 40 aa, Artificial Sequence
  GFR-binding peptide
  MOD_RES (5)..(6)..(38)..(40): Xaa is C or S
IPKAXXVPTELSPISMLFIDEYDKVVYKQYEEMVVEGXGX

SEQ ID NO: 16433 - protein, 38 aa, Artificial Sequence
  GFR-binding peptide
  MOD_RES (6)..(7): Xaa is C or S
SIPKAXXVPTELEPLPMVYYDEYDKVVEQLSNEMVVEG

SEQ ID NO: 16434 - protein, 39 aa, Artificial Sequence
  GFR-binding peptide
  MOD_RES (6)..(7): Xaa is C or S
  MOD_RES (21)..(22)..(23)..(24)..(25): Xaa is A or G
  MOD_RES (26)..(27)..(28)..(29): Xaa is A or G or is absent
YVPKPXXAPTKLEPLPVVYYXXXXXXXXXEQLSNNMVVR

SEQ ID NO: 16435 - protein, 40 aa, Artificial Sequence
  GFR-binding peptide
  MOD_RES (5)..(6)..(40): Xaa is C or S
  MOD_RES (20)..(21)..(22)..(23)..(24): Xaa is A or G
  MOD_RES (25)..(26)..(27)..(28): Xaa is A or G or is absent
IPKAXXVPTELEPLTMLYYXXXXXXXXXEQLSNEMVVEGX

SEQ ID NO: 16436 - protein, 40 aa, Artificial Sequence; identical to SEQ ID NO: 9161
  GFR-binding peptide
  MOD_RES (4)..(5)..(38)..(40): Xaa is C or S
  MOD_RES (19)..(20)..(21)..(22)..(23): Xaa is A or G
  MOD_RES (24)..(25)..(26)..(27): Xaa is A or G or is absent

SEQ ID NO: 16437 - protein, 34 aa, Artificial Sequence
  GFR-binding peptide
  MOD_RES (1)..(1): Xaa is C or S
  MOD_RES (15)..(16)..(17)..(18)..(19): Xaa is A or G
  MOD_RES (20)..(21)..(22)..(23): Xaa is A or G or is absent
XVPTRLEPLPIVYYXXXXXXXXXEQLSNDMVVES

SEQ ID NO: 16438 - protein, 36 aa, Artificial Sequence; identical to SEQ ID NO: 9162
  GFR-binding peptide
  MOD_RES (1)..(35): Xaa is C or S
  MOD_RES (15)..(16)..(17)..(18)..(19): Xaa is A or G
  MOD_RES (20)..(21)..(22)..(23): Xaa is A or G or is absent

SEQ ID NO: 16439 - protein, 40 aa, Artificial Sequence
  GFR-binding peptide
  MOD_RES (6)..(7): Xaa is C or S
  MOD_RES (21)..(22)..(23)..(24)..(25): Xaa is A or G
  MOD_RES (26)..(27)..(28)..(29): Xaa is A or G or is absent
STPPTXXVPTRLSAISILYLXXXXXXXXXLKNYQDMVVES

SEQ ID NO: 16440 - protein, 37 aa, Artificial Sequence
  GFR-binding peptide
  MOD_RES (4)..(5)..(37): Xaa is C or S
PKAXXVPTELEPLTMLYYDEYDKVVEQLSNEMVVEGX

SEQ ID NO: 16441 - protein, 31 aa, Artificial Sequence
  GFR-binding peptide
VPTRLEPLTILYYDSANNVVEQLSNDMVVES

SEQ ID NO: 16442 - protein, 41 aa, Artificial Sequence; identical to SEQ ID NO: 9165
  GFR-binding peptide
  MOD_RES (6)..(7)..(41): Xaa is C or S
  MOD_RES (21)..(22)..(23)..(24)..(25): Xaa is A or G
  MOD_RES (26)..(27)..(28)..(29): Xaa is A or G or is absent

SEQ ID NO: 16443 - protein, 38 aa, Artificial Sequence
  GFR-binding peptide
  MOD_RES (5)..(6)..(38): Xaa is C or S
IPKAXXVPTELEPLPMVYYDENEKVVEQLSNDMVVEGX

SEQ ID NO: 16444 - protein, 42 aa, Artificial Sequence
  GFR-binding peptide
  MOD_RES (6)..(7)..(39)..(41): Xaa is C or S
TVPKPXXAPTQLSPISVLFIDDSSNVIYKQYENMVVRAXGXH

SEQ ID NO: 16445 - protein, 35 aa, Artificial Sequence
  GFR-binding peptide
  MOD_RES (4)..(5): Xaa is C or S
AAPXXVPQALSPISILFIVGRKPKVYKQYEMIVRS

SEQ ID NO: 16446 - protein, 33 aa, Artificial Sequence
  GFR-binding peptide
  MOD_RES (2)..(3): Xaa is C or S
TXXVPTRLEPLPIVYYDSANNVVEQLSNDMVVE

SEQ ID NO: 16447 - protein, 36 aa, Artificial Sequence
  GFR-binding peptide
  MOD_RES (2)..(3)..(35): Xaa is C or S
TXXVPTRLEPLPIVYYDSANNVVEQLSNDMVVESXG

SEQ ID NO: 16448 - protein, 38 aa, Artificial Sequence
  GFR-binding peptide
  MOD_RES (4)..(5)..(38): Xaa is C or S
  MOD_RES (19)..(20)..(21)..(22)..(23): Xaa is A or G
  MOD_RES (24)..(25)..(26)..(27): Xaa is A or G or is absent
ASPXXVSQDLEPLPIVYYXXXXXXXXXEQLSNMIVKSX

SEQ ID NO: 16449 - protein, 37 aa, Artificial Sequence; identical to SEQ ID NO: 9172
  GFR-binding peptide
  MOD_RES (2)..(3)..(37): Xaa is C or S
  MOD_RES (17)..(18)..(19)..(20)..(21): Xaa is A or G
  MOD_RES (22)..(23)..(24)..(25): Xaa is A or G or is absent

SEQ ID NO: 16450 - protein, 34 aa, Artificial Sequence
  GFR-binding peptide
  MOD_RES (1)..(1): Xaa is C or S
  MOD_RES (15)..(16)..(17)..(18)..(19): Xaa is A or G
  MOD_RES (20)..(21)..(22)..(23): Xaa is A or G or is absent
XVPTRLEPLTILYYXXXXXXXXXEQLSNDMVVES

SEQ ID NO: 16451 - protein, 35 aa, Artificial Sequence
  GFR-binding peptide
  MOD_RES (1)..(2): Xaa is C or S
  MOD_RES (16)..(17)..(18)..(19)..(20): Xaa is A or G
  MOD_RES (21)..(22)..(23)..(24): Xaa is A or G or is absent
XXVPTRLEPLPIVYYXXXXXXXXXEQLSNDMVVES

SEQ ID NO: 16452 - protein, 36 aa, Artificial Sequence
  GFR-binding peptide
  MOD_RES (2)..(3)..(35): Xaa is C or S
AXXVPTELEPLTMLYYDEYDKVVEQLSNEMVVEGXG

SEQ ID NO: 16453 - protein, 36 aa, Artificial Sequence
  GFR-binding peptide
  MOD_RES (3)..(4): Xaa is C or S
  MOD_RES (18)..(19)..(20)..(21)..(22): Xaa is A or G
  MOD_RES (23)..(24)..(25)..(26): Xaa is A or G or is absent
KAXXVPTELSPISMLFIXXXXXXXXXYKQYEEMVVE

SEQ ID NO: 16454 - protein, 36 aa, Artificial Sequence
  GFR-binding peptide
  MOD_RES (5)..(5): Xaa is C or S
TKPTXAPTKLSPISVLFIDDSSNVIYKQYENMVVRS

SEQ ID NO: 16455 - protein, 40 aa, Artificial Sequence
  GFR-binding peptide
  MOD_RES (5)..(6)..(37)..(39): Xaa is C or S
SASPXXVPQDLSPISILFIVGRTPKVYKQYEMVVKSXKXS

SEQ ID NO: 16456 - protein, 40 aa, Artificial Sequence
  GFR-binding peptide
  MOD_RES (6)..(7)..(39): Xaa is C or S
STPPTXXVPTRLEPLPIVYYDSANNVVEQLSNDMVVESXG

SEQ ID NO: 16457 - protein, 34 aa, Artificial Sequence
  GFR-binding peptide
  MOD_RES (1)..(2): Xaa is C or S
  MOD_RES (16)..(17)..(18)..(19)..(20): Xaa is A or G
  MOD_RES (21)..(22)..(23)..(24): Xaa is A or G or is absent
XXAPTKLEPLTVLYYXXXXXXXXXEQLSNNMVVR

SEQ ID NO: 16458 - protein, 34 aa, Artificial Sequence
  GFR-binding peptide
  MOD_RES (2)..(3): Xaa is C or S
PXXAPTQLSPISVLFIDDSSNVIYKQYENMVVRA

SEQ ID NO: 16459 - protein, 38 aa, Artificial Sequence
  GFR-binding peptide
  MOD_RES (4)..(5)..(37): Xaa is C or S
PPTXXVPTRLNAISILYFDSANNVVLKKYRDMVVESXG

SEQ ID NO: 16460 - protein, 37 aa, Artificial Sequence
  GFR-binding peptide
  MOD_RES (1)..(2)..(34)..(36): Xaa is C or S
XXVPTELSPISMLFIDENEKVVYKQYEDMVVEGXGXR

SEQ ID NO: 16461 - protein, 31 aa, Artificial Sequence
  GFR-binding peptide
VPTELEPLPMVYYDEYDKVVEQLSNEMVVEG

SEQ ID NO: 16462 - protein, 43 aa, Artificial Sequence
  GFR-binding peptide
  MOD_RES (6)..(7)..(40)..(42): Xaa is C or S
  MOD_RES (21)..(22)..(23)..(24)..(25): Xaa is A or G
  MOD_RES (26)..(27)..(28)..(29): Xaa is A or G or is absent
ASASPXXVPQDLEPLPIVYYXXXXXXXXXEQLSNMVVKSXKXS

SEQ ID NO: 16463 - protein, 39 aa, Artificial Sequence
  GFR-binding peptide
  MOD_RES (6)..(7): Xaa is C or S
  MOD_RES (21)..(22)..(23)..(24)..(25): Xaa is A or G
  MOD_RES (26)..(27)..(28)..(29): Xaa is A or G or is absent
SIPKAXXVPTELEPLPMVYYXXXXXXXXXEQLSNEMVVE

SEQ ID NO: 16464 - protein, 39 aa, Artificial Sequence
  GFR-binding peptide
  MOD_RES (6)..(7): Xaa is C or S
  MOD_RES (21)..(22)..(23)..(24)..(25): Xaa is A or G
  MOD_RES (26)..(27)..(28)..(29): Xaa is A or G or is absent
ASAAPXXVPQALSPISILFIXXXXXXXXXYKQYEMIVRS

SEQ ID NO: 16465 - protein, 38 aa, Artificial Sequence; identical to SEQ ID NO: 9184
  GFR-binding peptide
  MOD_RES (5)..(6): Xaa is C or S
  MOD_RES (20)..(21)..(22)..(23)..(24): Xaa is A or G
  MOD_RES (25)..(26)..(27)..(28): Xaa is A or G or is absent

SEQ ID NO: 16466 - protein, 39 aa, Artificial Sequence; identical to SEQ ID NO: 9186
  GFR-binding peptide
  MOD_RES (3)..(4)..(38): Xaa is C or S
  MOD_RES (18)..(19)..(20)..(21)..(22): Xaa is A or G
  MOD_RES (23)..(24)..(25)..(26): Xaa is A or G or is absent

SEQ ID NO: 16467 - protein, 38 aa, Artificial Sequence; identical to SEQ ID NO: 9188
  GFR-binding peptide
  MOD_RES (2)..(3)..(37): Xaa is C or S
  MOD_RES (17)..(18)..(19)..(20)..(21): Xaa is A or G
  MOD_RES (22)..(23)..(24)..(25): Xaa is A or G or is absent

SEQ ID NO: 16468 - protein, 34 aa, Artificial Sequence
  GFR-binding peptide
  MOD_RES (3)..(4): Xaa is C or S
PTXXVPTRLSAISILYLDSANNVVLKNYQDMVVE

SEQ ID NO: 16469 - protein, 37 aa, Artificial Sequence
  GFR-binding peptide
  MOD_RES (5)..(6): Xaa is C or S
IPKAXXVPTELSPISMLFIDENEKVVYKQYEDMVVEG

SEQ ID NO: 16470 - protein, 31 aa, Artificial Sequence
  GFR-binding peptide
  MOD_RES (1)..(1): Xaa is C or S
XVPTELEPLTMLYYDENEKVVEQLSNDMVVE

SEQ ID NO: 16471 - protein, 38 aa, Artificial Sequence
  GFR-binding peptide
  MOD_RES (1)..(2)..(36)..(38): Xaa is C or S
  MOD_RES (16)..(17)..(18)..(19)..(20): Xaa is A or G
  MOD_RES (21)..(22)..(23)..(24): Xaa is A or G or is absent
XXVPTELEPLTMLYYXXXXXXXXXEQLSNDMVVEGXGX

SEQ ID NO: 16472 - protein, 36 aa, Artificial Sequence
  GFR-binding peptide
  MOD_RES (1)..(2)..(34)..(36): Xaa is C or S
XXAPTKLEPLTVLYYDDSSNVIEQLSNNMVVRSXGX

SEQ ID NO: 16473 - protein, 41 aa, Artificial Sequence
  GFR-binding peptide
  MOD_RES (5)..(39)..(41): Xaa is C or S
  MOD_RES (19)..(20)..(21)..(22)..(23): Xaa is A or G
  MOD_RES (24)..(25)..(26)..(27): Xaa is A or G or is absent
TKPTXAPTKLEPLTVLYYXXXXXXXXXEQLSNNMVVRSXGX

SEQ ID NO: 16474 - protein, 40 aa, Artificial Sequence; identical to SEQ ID NO: 9195
  GFR-binding peptide
  MOD_RES (3)..(4)..(38)..(40): Xaa is C or S
  MOD_RES (18)..(19)..(20)..(21)..(22): Xaa is A or G
  MOD_RES (23)..(24)..(25)..(26): Xaa is A or G or is absent

SEQ ID NO: 16475 - protein, 31 aa, Artificial Sequence; identical to SEQ ID NO: 9197
  GFR-binding peptide

SEQ ID NO: 16476 - protein, 36 aa, Artificial Sequence; identical to SEQ ID NO: 9198
  GFR-binding peptide
  MOD_RES (1)..(34)..(36): Xaa is C or S
  MOD_RES (15)..(16)..(17)..(18)..(19): Xaa is A or G
  MOD_RES (20)..(21)..(22)..(23): Xaa is A or G or is absent

SEQ ID NO: 16477 - protein, 34 aa, Artificial Sequence; identical to SEQ ID NO: 9202
  GFR-binding peptide
  MOD_RES (31)..(33): Xaa is C or S

SEQ ID NO: 16478 - protein, 42 aa, Artificial Sequence
  GFR-binding peptide
  MOD_RES (5)..(6)..(40)..(42): Xaa is C or S
  MOD_RES (20)..(21)..(22)..(23)..(24): Xaa is A or G
  MOD_RES (25)..(26)..(27)..(28): Xaa is A or G or is absent
TPPTXXVPTRLSPISILFIXXXXXXXXXYKQYEDMVVESXGX

SEQ ID NO: 16479 - protein, 34 aa, Artificial Sequence
  GFR-binding peptide
  MOD_RES (2)..(3)..(34): Xaa is C or S
PXXVSQDLEPLPIVYYIGKTPKIEQLSNMIVKSX

SEQ ID NO: 16480 - protein, 38 aa, Artificial Sequence
  GFR-binding peptide
  MOD_RES (3)..(4)..(37): Xaa is C or S
  MOD_RES (18)..(19)..(20)..(21)..(22): Xaa is A or G
  MOD_RES (23)..(24)..(25)..(26): Xaa is A or G or is absent
SPXXVSQDLSPISILFIXXXXXXXXXYKQYEMIVKSXK

SEQ ID NO: 16481 - protein, 37 aa, Artificial Sequence
  GFR-binding peptide
  MOD_RES (6)..(7): Xaa is C or S
ASASPXXVSQDLSPISILFIIGKTPKIYKQYEMIVKS

SEQ ID NO: 16482 - protein, 33 aa, Artificial Sequence
  GFR-binding peptide
  MOD_RES (1)..(1): Xaa is C or S
  MOD_RES (15)..(16)..(17)..(18)..(19): Xaa is A or G
  MOD_RES (20)..(21)..(22)..(23): Xaa is A or G or is absent
XVPTRLEPLPIVYYXXXXXXXXXEQLSNDMVVE

SEQ ID NO: 16483 - protein, 39 aa, Artificial Sequence
  GFR-binding peptide
  MOD_RES (5)..(6)..(39): Xaa is C or S
  MOD_RES (20)..(21)..(22)..(23)..(24): Xaa is A or G
  MOD_RES (25)..(26)..(27)..(28): Xaa is A or G or is absent
SASPXXVPQDLEPLPIVYYXXXXXXXXXEQLSNMVVKSX

SEQ ID NO: 16484 - protein, 36 aa, Artificial Sequence
  GFR-binding peptide
  MOD_RES (1)..(35): Xaa is C or S
  MOD_RES (15)..(16)..(17)..(18)..(19): Xaa is A or G
  MOD_RES (20)..(21)..(22)..(23): Xaa is A or G or is absent
XAPTKLEPLPVVYYXXXXXXXXXEQLSNNMVVRSXG

SEQ ID NO: 16485 - protein, 35 aa, Artificial Sequence
  GFR-binding peptide
  MOD_RES (2)..(3): Xaa is C or S
  MOD_RES (17)..(18)..(19)..(20)..(21): Xaa is A or G
  MOD_RES (22)..(23)..(24)..(25): Xaa is A or G or is absent
PXXAPTKLSPISVLFIXXXXXXXXXYKQYENMVVR

SEQ ID NO: 16486 - protein, 37 aa, Artificial Sequence
  GFR-binding peptide
  MOD_RES (1)..(2)..(34)..(36): Xaa is C or S
XXVPTELEPLTMLYYDENEKVVEQLSNDMVVEGXGXR

SEQ ID NO: 16487 - protein, 36 aa, Artificial Sequence; identical to SEQ ID NO: 9213
  GFR-binding peptide
  MOD_RES (1)..(35): Xaa is C or S
  MOD_RES (15)..(16)..(17)..(18)..(19): Xaa is A or G
  MOD_RES (20)..(21)..(22)..(23): Xaa is A or G or is absent

SEQ ID NO: 16488 - protein, 36 aa, Artificial Sequence
  GFR-binding peptide
  MOD_RES (1)..(2)..(34)..(36): Xaa is C or S
XXAPTKLSPISVLFIDDSSNVIYKQYENMVVRSXGX

SEQ ID NO: 16489 - protein, 37 aa, Artificial Sequence
  GFR-binding peptide
  MOD_RES (1)..(2)..(36): Xaa is C or S
  MOD_RES (16)..(17)..(18)..(19)..(20): Xaa is A or G
  MOD_RES (21)..(22)..(23)..(24): Xaa is A or G or is absent
XXAPTQLEPLPVVYYXXXXXXXXXEQLSNNMVVRAXG

SEQ ID NO: 16490 - protein, 38 aa, Artificial Sequence
  GFR-binding peptide
  MOD_RES (5)..(6)..(37): Xaa is C or S
SAAPXXVPQALSPISILFIVGRKPKVYKQYEMIVRSXK

SEQ ID NO: 16491 - protein, 38 aa, Artificial Sequence
  GFR-binding peptide
  MOD_RES (5)..(6)..(38): Xaa is C or S
VPKPXXAPTQLEPLTVLYYDDSSNVIEQLSNNMVVRAX

SEQ ID NO: 16492 - protein, 36 aa, Artificial Sequence; identical to SEQ ID NO: 9218
  GFR-binding peptide
  MOD_RES (2)..(3): Xaa is C or S
  MOD_RES (17)..(18)..(19)..(20)..(21): Xaa is A or G
  MOD_RES (22)..(23)..(24)..(25): Xaa is A or G or is absent

SEQ ID NO: 16493 - protein, 39 aa, Artificial Sequence
  GFR-binding peptide
  MOD_RES (2)..(3)..(36)..(38): Xaa is C or S
  MOD_RES (17)..(18)..(19)..(20)..(21): Xaa is A or G
  MOD_RES (22)..(23)..(24)..(25): Xaa is A or G or is absent
PXXVPQDLEPLPIVYYXXXXXXXXXEQLSNMVVKSXKXS

SEQ ID NO: 16494 - protein, 34 aa, Artificial Sequence
  GFR-binding peptide
  MOD_RES (1)..(33): Xaa is C or S
XVPTELEPLPMVYYDEYDKVVEQLSNEMVVEGXG

SEQ ID NO: 16495 - protein, 37 aa, Artificial Sequence
  GFR-binding peptide
  MOD_RES (5)..(6)..(37): Xaa is C or S
SAAPXXVPQALSPISILFIVGRKPKVYKQYEMIVRSX

SEQ ID NO: 16496 - protein, 38 aa, Artificial Sequence; identical to SEQ ID NO: 9220
  GFR-binding peptide
  MOD_RES (6)..(6): Xaa is C or S
  MOD_RES (20)..(21)..(22)..(23)..(24): Xaa is A or G
  MOD_RES (25)..(26)..(27)..(28): Xaa is A or G or is absent

SEQ ID NO: 16497 - protein, 35 aa, Artificial Sequence; identical to SEQ ID NO: 9222
  GFR-binding peptide
  MOD_RES (2)..(3)..(34): Xaa is C or S

SEQ ID NO: 16498 - protein, 36 aa, Artificial Sequence
  GFR-binding peptide
  MOD_RES (2)..(3): Xaa is C or S
  MOD_RES (17)..(18)..(19)..(20)..(21): Xaa is A or G
  MOD_RES (22)..(23)..(24)..(25): Xaa is A or G or is absent
AXXVPTELSPISMLFIXXXXXXXXXYKQYEEMVVEG

SEQ ID NO: 16499 - protein, 36 aa, Artificial Sequence; identical to SEQ ID NO: 9223
  GFR-binding peptide
  MOD_RES (2)..(3): Xaa is C or S
  MOD_RES (17)..(18)..(19)..(20)..(21): Xaa is A or G
  MOD_RES (22)..(23)..(24)..(25): Xaa is A or G or is absent

SEQ ID NO: 16500 - protein, 42 aa, Artificial Sequence; identical to SEQ ID NO: 9225
  GFR-binding peptide
  MOD_RES (5)..(6)..(40)..(42): Xaa is C or S
  MOD_RES (20)..(21)..(22)..(23)..(24): Xaa is A or G
  MOD_RES (25)..(26)..(27)..(28): Xaa is A or G or is absent

SEQ ID NO: 16501 - protein, 34 aa, Artificial Sequence
  GFR-binding peptide
  MOD_RES (1)..(2): Xaa is C or S
  MOD_RES (16)..(17)..(18)..(19)..(20): Xaa is A or G
  MOD_RES (21)..(22)..(23)..(24): Xaa is A or G or is absent
XXVPTELSPISMLFIXXXXXXXXXYKQYEEMVVE

SEQ ID NO: 16502 - protein, 38 aa, Artificial Sequence; identical to SEQ ID NO: 9228
  GFR-binding peptide
  MOD_RES (1)..(2)..(36)..(38): Xaa is C or S
  MOD_RES (16)..(17)..(18)..(19)..(20): Xaa is A or G
  MOD_RES (21)..(22)..(23)..(24): Xaa is A or G or is absent

SEQ ID NO: 16503 - protein, 34 aa, Artificial Sequence
  GFR-binding peptide
  MOD_RES (3)..(4): Xaa is C or S
SPXXVSQDLSPISILFIIGKTPKIYKQYEMIVKS

SEQ ID NO: 16504 - protein, 36 aa, Artificial Sequence
  GFR-binding peptide
  MOD_RES (2)..(3): Xaa is C or S
  MOD_RES (17)..(18)..(19)..(20)..(21): Xaa is A or G
  MOD_RES (22)..(23)..(24)..(25): Xaa is A or G or is absent
AXXVPTELEPLPMVYYXXXXXXXXXEQLSNEMVVEG

SEQ ID NO: 16505 - protein, 36 aa, Artificial Sequence
  GFR-binding peptide
  MOD_RES (34)..(36): Xaa is C or S
  MOD_RES (14)..(15)..(16)..(17)..(18): Xaa is A or G
  MOD_RES (19)..(20)..(21)..(22): Xaa is A or G or is absent
VPTELSPISMLFIXXXXXXXXXYKQYEEMVVEGXGX

SEQ ID NO: 16506 - protein, 39 aa, Artificial Sequence
  GFR-binding peptide
  MOD_RES (3)..(4)..(38): Xaa is C or S
  MOD_RES (18)..(19)..(20)..(21)..(22): Xaa is A or G
  MOD_RES (23)..(24)..(25)..(26): Xaa is A or G or is absent
KAXXVPTELEPLTMLYYXXXXXXXXXEQLSNDMVVEGXG

SEQ ID NO: 16507 - protein, 43 aa, Artificial Sequence
  GFR-binding peptide
  MOD_RES (6)..(40)..(42): Xaa is C or S
  MOD_RES (20)..(21)..(22)..(23)..(24): Xaa is A or G
  MOD_RES (25)..(26)..(27)..(28): Xaa is A or G or is absent
VTKPTXAPTKLEPLTVLYYXXXXXXXXXEQLSNNMVVRSXGXH

SEQ ID NO: 16508 - protein, 40 aa, Artificial Sequence
  GFR-binding peptide
  MOD_RES (5)..(6)..(40): Xaa is C or S
  MOD_RES (20)..(21)..(22)..(23)..(24): Xaa is A or G
  MOD_RES (25)..(26)..(27)..(28): Xaa is A or G or is absent
TPPTXXVPTRLEPLTILYYXXXXXXXXXEQLSNDMVVESX

SEQ ID NO: 16509 - protein, 35 aa, Artificial Sequence; identical to SEQ ID NO: 9233
  GFR-binding peptide
  MOD_RES (2)..(3): Xaa is C or S
  MOD_RES (17)..(18)..(19)..(20)..(21): Xaa is A or G
  MOD_RES (22)..(23)..(24)..(25): Xaa is A or G or is absent

SEQ ID NO: 16510 - protein, 37 aa, Artificial Sequence; identical to SEQ ID NO: 9235
  GFR-binding peptide
  MOD_RES (2)..(3)..(36): Xaa is C or S
  MOD_RES (17)..(18)..(19)..(20)..(21): Xaa is A or G
  MOD_RES (22)..(23)..(24)..(25): Xaa is A or G or is absent

SEQ ID NO: 16511 - protein, 40 aa, Artificial Sequence
  GFR-binding peptide
  MOD_RES (4)..(5)..(39): Xaa is C or S
  MOD_RES (19)..(20)..(21)..(22)..(23): Xaa is A or G
  MOD_RES (24)..(25)..(26)..(27): Xaa is A or G or is absent
PKPXXAPTKLSPISVLFIXXXXXXXXXYKQYENMVVRSXG

SEQ ID NO: 16512 - protein, 39 aa, Artificial Sequence
  GFR-binding peptide
  MOD_RES (5)..(6)..(38): Xaa is C or S
VPKPXXAPTQLEPLTVLYYDDSSNVIEQLSNNMVVRAXG

SEQ ID NO: 16513 - protein, 38 aa, Artificial Sequence
  GFR-binding peptide
  MOD_RES (4)..(5): Xaa is C or S
  MOD_RES (19)..(20)..(21)..(22)..(23): Xaa is A or G
  MOD_RES (24)..(25)..(26)..(27): Xaa is A or G or is absent
PKAXXVPTELEPLPMVYYXXXXXXXXXEQLSNDMVVEG

SEQ ID NO: 16514 - protein, 37 aa, Artificial Sequence; identical to SEQ ID NO: 9238
  GFR-binding peptide
  MOD_RES (1)..(2)..(35)..(37): Xaa is C or S
  MOD_RES (16)..(17)..(18)..(19)..(20): Xaa is A or G
  MOD_RES (21)..(22)..(23)..(24): Xaa is A or G or is absent

SEQ ID NO: 16515 - protein, 38 aa, Artificial Sequence
  GFR-binding peptide
  MOD_RES (4)..(5)..(37): Xaa is C or S
PPTXXVPTRLEPLPIVYYDSANNVVEQLSNDMVVESXG

SEQ ID NO: 16516 - protein, 39 aa, Artificial Sequence; identical to SEQ ID NO: 9242
  GFR-binding peptide
  MOD_RES (2)..(3)..(37)..(39): Xaa is C or S
  MOD_RES (17)..(18)..(19)..(20)..(21): Xaa is A or G
  MOD_RES (22)..(23)..(24)..(25): Xaa is A or G or is absent

SEQ ID NO: 16517 - protein, 40 aa, Artificial Sequence
  GFR-binding peptide
  MOD_RES (6)..(40): Xaa is C or S
  MOD_RES (20)..(21)..(22)..(23)..(24): Xaa is A or G
  MOD_RES (25)..(26)..(27)..(28): Xaa is A or G or is absent
VTKPTXAPTKLSPISVLFIXXXXXXXXXYKQYENMVVRSX

SEQ ID NO: 16518 - protein, 38 aa, Artificial Sequence
  GFR-binding peptide
  MOD_RES (1)..(2)..(36)..(38): Xaa is C or S
  MOD_RES (16)..(17)..(18)..(19)..(20): Xaa is A or G
  MOD_RES (21)..(22)..(23)..(24): Xaa is A or G or is absent
XXVPTELEPLTMLYYXXXXXXXXXEQLSNEMVVEGXGX

SEQ ID NO: 16519 - protein, 37 aa, Artificial Sequence; identical to SEQ ID NO: 9244
  GFR-binding peptide
  MOD_RES (3)..(4)..(37): Xaa is C or S
  MOD_RES (18)..(19)..(20)..(21)..(22): Xaa is A or G
  MOD_RES (23)..(24)..(25)..(26): Xaa is A or G or is absent

SEQ ID NO: 16520 - protein, 34 aa, Artificial Sequence
  GFR-binding peptide
  MOD_RES (1)..(33): Xaa is C or S
XVPTRLNAISILYFDSANNVVLKKYRDMVVESXG

SEQ ID NO: 16521 - protein, 37 aa, Artificial Sequence
  GFR-binding peptide
  MOD_RES (2)..(3)..(37): Xaa is C or S
  MOD_RES (17)..(18)..(19)..(20)..(21): Xaa is A or G
  MOD_RES (22)..(23)..(24)..(25): Xaa is A or G or is absent
PXXAPTQLSPISVLFIXXXXXXXXXYKQYENMVVRAX

SEQ ID NO: 16522 - protein, 37 aa, Artificial Sequence
  GFR-binding peptide
  MOD_RES (1)..(35)..(37): Xaa is C or S
  MOD_RES (15)..(16)..(17)..(18)..(19): Xaa is A or G
  MOD_RES (20)..(21)..(22)..(23): Xaa is A or G or is absent
XVPTRLEPLTILYYXXXXXXXXXEQLSNDMVVESXGX

SEQ ID NO: 16523 - protein, 35 aa, Artificial Sequence
  GFR-binding peptide
  MOD_RES (1)..(34): Xaa is C or S
  MOD_RES (15)..(16)..(17)..(18)..(19): Xaa is A or G
  MOD_RES (20)..(21)..(22)..(23): Xaa is A or G or is absent
XVPQDLEPLTILYYXXXXXXXXXEQLSNMVVKSXK

SEQ ID NO: 16524 - protein, 35 aa, Artificial Sequence
  GFR-binding peptide
  MOD_RES (3)..(4): Xaa is C or S
KAXXVPTELSPISMLFIDEYDKVVYKQYEEMVVEG

SEQ ID NO: 16525 - protein, 39 aa, Artificial Sequence
  GFR-binding peptide
  MOD_RES (6)..(7): Xaa is C or S
  MOD_RES (21)..(22)..(23)..(24)..(25): Xaa is A or G
  MOD_RES (26)..(27)..(28)..(29): Xaa is A or G or is absent
SIPKAXXVPTELEPLTMLYYXXXXXXXXXEQLSNEMVVE

SEQ ID NO: 16526 - protein, 41 aa, Artificial Sequence
  GFR-binding peptide
  MOD_RES (4)..(5)..(39)..(41): Xaa is C or S
  MOD_RES (19)..(20)..(21)..(22)..(23): Xaa is A or G
  MOD_RES (24)..(25)..(26)..(27): Xaa is A or G or is absent
PKAXXVPTELSPISMLFIXXXXXXXXXYKQYEEMVVEGXGX

SEQ ID NO: 16527 - protein, 39 aa, Artificial Sequence; identical to SEQ ID NO: 9252
  GFR-binding peptide
  MOD_RES (6)..(7): Xaa is C or S
  MOD_RES (21)..(22)..(23)..(24)..(25): Xaa is A or G
  MOD_RES (26)..(27)..(28)..(29): Xaa is A or G or is absent

SEQ ID NO: 16528 - protein, 35 aa, Artificial Sequence
  GFR-binding peptide
  MOD_RES (1)..(35): Xaa is C or S
  MOD_RES (15)..(16)..(17)..(18)..(19): Xaa is A or G
  MOD_RES (20)..(21)..(22)..(23): Xaa is A or G or is absent
XVPTELEPLPMVYYXXXXXXXXXEQLSNEMVVEGX

SEQ ID NO: 16529 - protein, 42 aa, Artificial Sequence
  GFR-binding peptide
  MOD_RES (7)..(41): Xaa is C or S
  MOD_RES (21)..(22)..(23)..(24)..(25): Xaa is A or G
  MOD_RES (26)..(27)..(28)..(29): Xaa is A or G or is absent
HVTKPTXAPTKLSPISVLFIXXXXXXXXXYKQYENMVVRSXG

SEQ ID NO: 16530 - protein, 36 aa, Artificial Sequence; identical to SEQ ID NO: 9253
  GFR-binding peptide
  MOD_RES (1)..(34)..(36): Xaa is C or S
  MOD_RES (15)..(16)..(17)..(18)..(19): Xaa is A or G
  MOD_RES (20)..(21)..(22)..(23): Xaa is A or G or is absent

SEQ ID NO: 16531 - protein, 34 aa, Artificial Sequence
  GFR-binding peptide
  MOD_RES (1)..(2)..(34): Xaa is C or S
XXAPTQLEPLPVVYYDDSSNVIEQLSNNMVVRAX

SEQ ID NO: 16532 - protein, 36 aa, Artificial Sequence; identical to SEQ ID NO: 9254
  GFR-binding peptide
  MOD_RES (2)..(3): Xaa is C or S
  MOD_RES (17)..(18)..(19)..(20)..(21): Xaa is A or G
  MOD_RES (22)..(23)..(24)..(25): Xaa is A or G or is absent

SEQ ID NO: 16533 - protein, 39 aa, Artificial Sequence
  GFR-binding peptide
  MOD_RES (2)..(3)..(37)..(39): Xaa is C or S
  MOD_RES (17)..(18)..(19)..(20)..(21): Xaa is A or G
  MOD_RES (22)..(23)..(24)..(25): Xaa is A or G or is absent
TXXVPTRLSAISILYLXXXXXXXXXLKNYQDMVVESXGX

SEQ ID NO: 16534 - protein, 38 aa, Artificial Sequence; identical to SEQ ID NO: 9255
  GFR-binding peptide
  MOD_RES (5)..(6)..(37): Xaa is C or S

SEQ ID NO: 16535 - protein, 36 aa, Artificial Sequence; identical to SEQ ID NO: 9257
  GFR-binding peptide
  MOD_RES (1)..(33)..(35): Xaa is C or S

SEQ ID NO: 16536 - protein, 43 aa, Artificial Sequence
  GFR-binding peptide
  MOD_RES (6)..(7)..(41)..(43): Xaa is C or S
  MOD_RES (21)..(22)..(23)..(24)..(25): Xaa is A or G
  MOD_RES (26)..(27)..(28)..(29): Xaa is A or G or is absent
TVPKPXXAPTQLEPLTVLYYXXXXXXXXXEQLSNNMVVRAXGX

SEQ ID NO: 16537 - protein, 37 aa, Artificial Sequence; identical to SEQ ID NO: 9258
  GFR-binding peptide
  MOD_RES (4)..(5)..(36): Xaa is C or S

SEQ ID NO: 16538 - protein, 41 aa, Artificial Sequence
  GFR-binding peptide
  MOD_RES (4)..(5)..(39)..(41): Xaa is C or S
  MOD_RES (19)..(20)..(21)..(22)..(23): Xaa is A or G
  MOD_RES (24)..(25)..(26)..(27): Xaa is A or G or is absent
PKAXXVPTELSPISMLFIXXXXXXXXXYKQYEDMVVEGXGX

SEQ ID NO: 16539 - protein, 34 aa, Artificial Sequence; identical to SEQ ID NO: 9261
  GFR-binding peptide
  MOD_RES (3)..(4): Xaa is C or S

SEQ ID NO: 16540 - protein, 41 aa, Artificial Sequence
  GFR-binding peptide
  MOD_RES (6)..(7)..(39)..(41): Xaa is C or S
KIPKAXXVPTELEPLTMLYYDENEKVVEQLSNDMVVEGXGX

SEQ ID NO: 16541 - protein, 34 aa, Artificial Sequence; identical to SEQ ID NO: 9262
  GFR-binding peptide
  MOD_RES (34)..(34): Xaa is C or S
  MOD_RES (14)..(15)..(16)..(17)..(18): Xaa is A or G
  MOD_RES (19)..(20)..(21)..(22): Xaa is A or G or is absent

SEQ ID NO: 16542 - protein, 40 aa, Artificial Sequence; identical to SEQ ID NO: 9264
  GFR-binding peptide
  MOD_RES (4)..(5)..(37)..(39): Xaa is C or S

SEQ ID NO: 16543 - protein, 37 aa, Artificial Sequence; identical to SEQ ID NO: 9265
  GFR-binding peptide
  MOD_RES (4)..(5): Xaa is C or S
  MOD_RES (19)..(20)..(21)..(22)..(23): Xaa is A or G
  MOD_RES (24)..(25)..(26)..(27): Xaa is A or G or is absent

SEQ ID NO: 16544 - protein, 32 aa, Artificial Sequence
  GFR-binding peptide
  MOD_RES (1)..(2): Xaa is C or S
XXVPQALEPLTILYYVGRKPKVEQLSNMIVRS

SEQ ID NO: 16545 - protein, 38 aa, Artificial Sequence
  GFR-binding peptide
  MOD_RES (6)..(38): Xaa is C or S
VTKPTXAPTKLEPLTVLYYDDSSNVIEQLSNNMVVRSX

SEQ ID NO: 16546 - protein, 35 aa, Artificial Sequence
  GFR-binding peptide
  MOD_RES (2)..(3)..(35): Xaa is C or S
TXXVPTRLSAISILYLDSANNVVLKNYQDMVVESX

SEQ ID NO: 16547 - protein, 36 aa, Artificial Sequence
  GFR-binding peptide
  MOD_RES (5)..(6): Xaa is C or S
VPKPXXAPTQLSPISVLFIDDSSNVIYKQYENMVVR

SEQ ID NO: 16548 - protein, 40 aa, Artificial Sequence
  GFR-binding peptide
  MOD_RES (4)..(5)..(39): Xaa is C or S
  MOD_RES (19)..(20)..(21)..(22)..(23): Xaa is A or G
  MOD_RES (24)..(25)..(26)..(27): Xaa is A or G or is absent
PKPXXAPTKLEPLTVLYYXXXXXXXXXEQLSNNMVVRSXG

SEQ ID NO: 16549 - protein, 38 aa, Artificial Sequence
  GFR-binding peptide
  MOD_RES (2)..(3)..(35)..(37): Xaa is C or S
TXXVPTRLEPLPIVYYDSANNVVEQLSNDMVVESXGXR

SEQ ID NO: 16550 - protein, 36 aa, Artificial Sequence; identical to SEQ ID NO: 9273
  GFR-binding peptide
  MOD_RES (2)..(3): Xaa is C or S
  MOD_RES (17)..(18)..(19)..(20)..(21): Xaa is A or G
  MOD_RES (22)..(23)..(24)..(25): Xaa is A or G or is absent

SEQ ID NO: 16551 - protein, 41 aa, Artificial Sequence; identical to SEQ ID NO: 9276
  GFR-binding peptide
  MOD_RES (6)..(7)..(38)..(40): Xaa is C or S

SEQ ID NO: 16552 - protein, 36 aa, Artificial Sequence
  GFR-binding peptide
  MOD_RES (3)..(4)..(36): Xaa is C or S
KAXXVPTELEPLTMLYYDEYDKVVEQLSNEMVVEGX

SEQ ID NO: 16553 - protein, 30 aa, Artificial Sequence
  GFR-binding peptide
APTKLEPLPVVYYDDSSNVIEQLSNNMVVR

SEQ ID NO: 16554 - protein, 33 aa, Artificial Sequence
  GFR-binding peptide
  MOD_RES (14)..(15)..(16)..(17)..(18): Xaa is A or G
  MOD_RES (19)..(20)..(21)..(22): Xaa is A or G or is absent
APTKLSPISVLFIXXXXXXXXXYKQYENMVVRS

SEQ ID NO: 16555 - protein, 44 aa, Artificial Sequence
  GFR-binding peptide
  MOD_RES (6)..(7)..(41)..(43): Xaa is C or S
  MOD_RES (21)..(22)..(23)..(24)..(25): Xaa is A or G
  MOD_RES (26)..(27)..(28)..(29): Xaa is A or G or is absent
KIPKAXXVPTELEPLPMVYYXXXXXXXXXEQLSNDMVVEGXGXR

SEQ ID NO: 16556 - protein, 36 aa, Artificial Sequence
  GFR-binding peptide
  MOD_RES (1)..(2)..(35): Xaa is C or S
  MOD_RES (16)..(17)..(18)..(19)..(20): Xaa is A or G
  MOD_RES (21)..(22)..(23)..(24): Xaa is A or G or is absent
XXVPQALSPISILFIXXXXXXXXXYKQYEMIVRSXK

SEQ ID NO: 16557 - protein, 39 aa, Artificial Sequence; identical to SEQ ID NO: 9279
  GFR-binding peptide
  MOD_RES (4)..(5)..(36)..(38): Xaa is C or S

SEQ ID NO: 16558 - protein, 37 aa, Artificial Sequence; identical to SEQ ID NO: 9280
  GFR-binding peptide
  MOD_RES (1)..(2)..(36): Xaa is C or S
  MOD_RES (16)..(17)..(18)..(19)..(20): Xaa is A or G
  MOD_RES (21)..(22)..(23)..(24): Xaa is A or G or is absent

SEQ ID NO: 16559 - protein, 42 aa, Artificial Sequence; identical to SEQ ID NO: 9281
  GFR-binding peptide
  MOD_RES (6)..(7)..(41): Xaa is C or S
  MOD_RES (21)..(22)..(23)..(24)..(25): Xaa is A or G
  MOD_RES (26)..(27)..(28)..(29): Xaa is A or G or is absent

SEQ ID NO: 16560 - protein, 40 aa, Artificial Sequence
  GFR-binding peptide
  MOD_RES (5)..(6)..(39): Xaa is C or S
  MOD_RES (20)..(21)..(22)..(23)..(24): Xaa is A or G
  MOD_RES (25)..(26)..(27)..(28): Xaa is A or G or is absent
SASPXXVPQDLEPLPIVYYXXXXXXXXXEQLSNMVVKSXK

SEQ ID NO: 16561 - protein, 37 aa, Artificial Sequence
  GFR-binding peptide
  MOD_RES (1)..(2)..(34)..(36): Xaa is C or S
XXAPTKLSPISVLFIDDSSNVIYKQYENMVVRSXGXH

SEQ ID NO: 16562 - protein, 33 aa, Artificial Sequence
  GFR-binding peptide
  MOD_RES (1)..(33): Xaa is C or S
XAPTQLEPLPVVYYDDSSNVIEQLSNNMVVRAX

SEQ ID NO: 16563 - protein, 36 aa, Artificial Sequence
  GFR-binding peptide
  MOD_RES (1)..(2)..(34)..(36): Xaa is C or S
XXVPTRLEPLPIVYYDSANNVVEQLSNDMVVESXGX

SEQ ID NO: 16564 - protein, 38 aa, Artificial Sequence
  GFR-binding peptide
  MOD_RES (6)..(7)..(38): Xaa is C or S
ASAAPXXVPQALSPISILFIVGRKPKVYKQYEMIVRSX

SEQ ID NO: 16565 - protein, 33 aa, Artificial Sequence
  GFR-binding peptide
  MOD_RES (31)..(33): Xaa is C or S
VSQDLEPLPIVYYIGKTPKIEQLSNMIVKSXKX

SEQ ID NO: 16566 - protein, 33 aa, Artificial Sequence; identical to SEQ ID NO: 9284
  GFR-binding peptide
  MOD_RES (32)..(32): Xaa is C or S

SEQ ID NO: 16567 - protein, 31 aa, Artificial Sequence
  GFR-binding peptide
VPTELEPLTMLYYDEYDKVVEQLSNEMVVEG

SEQ ID NO: 16568 - protein, 37 aa, Artificial Sequence; identical to SEQ ID NO: 9285
  GFR-binding peptide
  MOD_RES (4)..(5): Xaa is C or S
  MOD_RES (19)..(20)..(21)..(22)..(23): Xaa is A or G
  MOD_RES (24)..(25)..(26)..(27): Xaa is A or G or is absent

SEQ ID NO: 16569 - protein, 34 aa, Artificial Sequence
  GFR-binding peptide
  MOD_RES (34)..(34): Xaa is C or S
  MOD_RES (14)..(15)..(16)..(17)..(18): Xaa is A or G
  MOD_RES (19)..(20)..(21)..(22): Xaa is A or G or is absent
VPTELEPLPMVYYXXXXXXXXXEQLSNEMVVEGX

SEQ ID NO: 16570 - protein, 37 aa, Artificial Sequence
  GFR-binding peptide
  MOD_RES (2)..(3)..(34)..(36): Xaa is C or S
PXXVPQDLEPLPIVYYVGRTPKVEQLSNMVVKSXKXS

SEQ ID NO: 16571 - protein, 41 aa, Artificial Sequence
  GFR-binding peptide
  MOD_RES (5)..(39)..(41): Xaa is C or S
  MOD_RES (19)..(20)..(21)..(22)..(23): Xaa is A or G
  MOD_RES (24)..(25)..(26)..(27): Xaa is A or G or is absent
TKPTXAPTKLEPLPVVYYXXXXXXXXXEQLSNNMVVRSXGX

SEQ ID NO: 16572 - protein, 36 aa, Artificial Sequence
  GFR-binding peptide
  MOD_RES (2)..(3)..(36): Xaa is C or S
  MOD_RES (17)..(18)..(19)..(20)..(21): Xaa is A or G
  MOD_RES (22)..(23)..(24)..(25): Xaa is A or G or is absent
PXXVPQDLSPISILFIXXXXXXXXXYKQYEMVVKSX

SEQ ID NO: 16573 - protein, 35 aa, Artificial Sequence
  GFR-binding peptide
  MOD_RES (4)..(5): Xaa is C or S
PKAXXVPTELSPISMLFIDEYDKVVYKQYEEMVVE

SEQ ID NO: 16574 - protein, 40 aa, Artificial Sequence
  GFR-binding peptide
  MOD_RES (4)..(5)..(37)..(39): Xaa is C or S
PPTXXVPTRLEPLPIVYYDSANNVVEQLSNDMVVESXGXR

SEQ ID NO: 16575 - protein, 40 aa, Artificial Sequence; identical to SEQ ID NO: 9287
  GFR-binding peptide
  MOD_RES (5)..(6)..(38)..(40): Xaa is C or S

SEQ ID NO: 16576 - protein, 33 aa, Artificial Sequence
  GFR-binding peptide
  MOD_RES (33)..(33): Xaa is C or S
  MOD_RES (14)..(15)..(16)..(17)..(18): Xaa is A or G
  MOD_RES (19)..(20)..(21)..(22): Xaa is A or G or is absent
VPQDLSPISILFIXXXXXXXXXYKQYEMVVKSX

SEQ ID NO: 16577 - protein, 35 aa, Artificial Sequence
  GFR-binding peptide
  MOD_RES (1)..(2): Xaa is C or S
  MOD_RES (16)..(17)..(18)..(19)..(20): Xaa is A or G
  MOD_RES (21)..(22)..(23)..(24): Xaa is A or G or is absent
XXVPTRLSPISILFIXXXXXXXXXYKQYEDMVVES

SEQ ID NO: 16578 - protein, 34 aa, Artificial Sequence
  GFR-binding peptide
  MOD_RES (34)..(34): Xaa is C or S
  MOD_RES (14)..(15)..(16)..(17)..(18): Xaa is A or G
  MOD_RES (19)..(20)..(21)..(22): Xaa is A or G or is absent
VPTRLNAISILYFXXXXXXXXXLKKYRDMVVESX

SEQ ID NO: 16579 - protein, 34 aa, Artificial Sequence
  GFR-binding peptide
  MOD_RES (34)..(34): Xaa is C or S
  MOD_RES (14)..(15)..(16)..(17)..(18): Xaa is A or G
  MOD_RES (19)..(20)..(21)..(22): Xaa is A or G or is absent
APTQLEPLPVVYYXXXXXXXXXEQLSNNMVVRAX

SEQ ID NO: 16580 - protein, 37 aa, Artificial Sequence
  GFR-binding peptide
  MOD_RES (4)..(5)..(36): Xaa is C or S
ASPXXVSQDLEPLPIVYYIGKTPKIEQLSNMIVKSXK

SEQ ID NO: 16581 - protein, 31 aa, Artificial Sequence
  GFR-binding peptide
  MOD_RES (1)..(1): Xaa is C or S
XVSQDLSPISILFIIGKTPKIYKQYEMIVKS

SEQ ID NO: 16582 - protein, 42 aa, Artificial Sequence; identical to SEQ ID NO: 9291
  GFR-binding peptide
  MOD_RES (4)..(5)..(39)..(41): Xaa is C or S
  MOD_RES (19)..(20)..(21)..(22)..(23): Xaa is A or G
  MOD_RES (24)..(25)..(26)..(27): Xaa is A or G or is absent

SEQ ID NO: 16583 - protein, 39 aa, Artificial Sequence; identical to SEQ ID NO: 9292
  GFR-binding peptide
  MOD_RES (6)..(7): Xaa is C or S
  MOD_RES (21)..(22)..(23)..(24)..(25): Xaa is A or G
  MOD_RES (26)..(27)..(28)..(29): Xaa is A or G or is absent

SEQ ID NO: 16584 - protein, 44 aa, Artificial Sequence; identical to SEQ ID NO: 9294
  GFR-binding peptide
  MOD_RES (6)..(7)..(41)..(43): Xaa is C or S
  MOD_RES (21)..(22)..(23)..(24)..(25): Xaa is A or G
  MOD_RES (26)..(27)..(28)..(29): Xaa is A or G or is absent

SEQ ID NO: 16585 - protein, 35 aa, Artificial Sequence
  GFR-binding peptide
  MOD_RES (32)..(34): Xaa is C or S
APTKLSPISVLFIDDSSNVIYKQYENMVVRSXGXH

SEQ ID NO: 16586 - protein, 34 aa, Artificial Sequence
  GFR-binding peptide
  MOD_RES (2)..(3): Xaa is C or S
AXXVPTELSPISMLFIDEYDKVVYKQYEEMVVEG

SEQ ID NO: 16587 - protein, 40 aa, Artificial Sequence
  GFR-binding peptide
  MOD_RES (5)..(6)..(38)..(40): Xaa is C or S
IPKAXXVPTELSPISMLFIDENEKVVYKQYEDMVVEGXGX

SEQ ID NO: 16588 - protein, 38 aa, Artificial Sequence
  GFR-binding peptide
  MOD_RES (3)..(4)..(38): Xaa is C or S
  MOD_RES (18)..(19)..(20)..(21)..(22): Xaa is A or G
  MOD_RES (23)..(24)..(25)..(26): Xaa is A or G or is absent
KPXXAPTKLSPISVLFIXXXXXXXXXYKQYENMVVRSX

SEQ ID NO: 16589 - protein, 40 aa, Artificial Sequence
  GFR-binding peptide
  MOD_RES (5)..(6)..(38)..(40): Xaa is C or S
IPKAXXVPTELEPLTMLYYDENEKVVEQLSNDMVVEGXGX

SEQ ID NO: 16590 - protein, 41 aa, Artificial Sequence; identical to SEQ ID NO: 9299
  GFR-binding peptide
  MOD_RES (4)..(5)..(39)..(41): Xaa is C or S
  MOD_RES (19)..(20)..(21)..(22)..(23): Xaa is A or G
  MOD_RES (24)..(25)..(26)..(27): Xaa is A or G or is absent

SEQ ID NO: 16591 - protein, 34 aa, Artificial Sequence
  GFR-binding peptide
  MOD_RES (1)..(2)..(33): Xaa is C or S
XXVPQDLSPISILFIVGRTPKVYKQYEMVVKSXK

SEQ ID NO: 16592 - protein, 42 aa, Artificial Sequence; identical to SEQ ID NO: 9302
  GFR-binding peptide
  MOD_RES (6)..(7)..(40)..(42): Xaa is C or S
  MOD_RES (21)..(22)..(23)..(24)..(25): Xaa is A or G
  MOD_RES (26)..(27)..(28)..(29): Xaa is A or G or is absent

SEQ ID NO: 16593 - protein, 39 aa, Artificial Sequence
  GFR-binding peptide
  MOD_RES (7)..(7): Xaa is C or S
  MOD_RES (21)..(22)..(23)..(24)..(25): Xaa is A or G
  MOD_RES (26)..(27)..(28)..(29): Xaa is A or G or is absent
HVTKPTXAPTKLSPISVLFIXXXXXXXXXYKQYENMVVR

SEQ ID NO: 16594 - protein, 36 aa, Artificial Sequence
  GFR-binding peptide
  MOD_RES (1)..(2)..(36): Xaa is C or S
  MOD_RES (16)..(17)..(18)..(19)..(20): Xaa is A or G
  MOD_RES (21)..(22)..(23)..(24): Xaa is A or G or is absent
XXVPTRLEPLPIVYYXXXXXXXXXEQLSNDMVVESX

SEQ ID NO: 16595 - protein, 37 aa, Artificial Sequence
  GFR-binding peptide
  MOD_RES (3)..(4)..(37): Xaa is C or S
  MOD_RES (18)..(19)..(20)..(21)..(22): Xaa is A or G
  MOD_RES (23)..(24)..(25)..(26): Xaa is A or G or is absent
APXXVPQALSPISILFIXXXXXXXXXYKQYEMIVRSX

SEQ ID NO: 16596 - protein, 43 aa, Artificial Sequence; identical to SEQ ID NO: 9303
  GFR-binding peptide
  MOD_RES (6)..(7)..(40)..(42): Xaa is C or S
  MOD_RES (21)..(22)..(23)..(24)..(25): Xaa is A or G
  MOD_RES (26)..(27)..(28)..(29): Xaa is A or G or is absent

SEQ ID NO: 16597 - protein, 33 aa, Artificial Sequence; identical to SEQ ID NO: 9304
  GFR-binding peptide
  MOD_RES (31)..(33): Xaa is C or S

SEQ ID NO: 16598 - protein, 37 aa, Artificial Sequence
  GFR-binding peptide
  MOD_RES (3)..(37): Xaa is C or S
  MOD_RES (17)..(18)..(19)..(20)..(21): Xaa is A or G
  MOD_RES (22)..(23)..(24)..(25): Xaa is A or G or is absent
PTXAPTKLEPLTVLYYXXXXXXXXXEQLSNNMVVRSX

SEQ ID NO: 16599 - protein, 40 aa, Artificial Sequence; identical to SEQ ID NO: 9305
  GFR-binding peptide
  MOD_RES (6)..(40): Xaa is C or S
  MOD_RES (20)..(21)..(22)..(23)..(24): Xaa is A or G
  MOD_RES (25)..(26)..(27)..(28): Xaa is A or G or is absent

SEQ ID NO: 16600 - protein, 38 aa, Artificial Sequence
  GFR-binding peptide
  MOD_RES (5)..(6): Xaa is C or S
  MOD_RES (20)..(21)..(22)..(23)..(24): Xaa is A or G
  MOD_RES (25)..(26)..(27)..(28): Xaa is A or G or is absent
IPKAXXVPTELEPLTMLYYXXXXXXXXXEQLSNDMVVE

SEQ ID NO: 16601 - protein, 37 aa, Artificial Sequence
  GFR-binding peptide
  MOD_RES (5)..(6): Xaa is C or S
VPKPXXAPTKLSPISVLFIDDSSNVIYKQYENMVVRS

SEQ ID NO: 16602 - protein, 34 aa, Artificial Sequence
  GFR-binding peptide
  MOD_RES (1)..(2)..(34): Xaa is C or S
XXVPTELEPLPMVYYDENEKVVEQLSNDMVVEGX

SEQ ID NO: 16603 - protein, 41 aa, Artificial Sequence
  GFR-binding peptide
  MOD_RES (6)..(38)..(40): Xaa is C or S
VTKPTXAPTKLSPISVLFIDDSSNVIYKQYENMVVRSXGXH

SEQ ID NO: 16604 - protein, 39 aa, Artificial Sequence
  GFR-binding peptide
  MOD_RES (5)..(6)..(38): Xaa is C or S
VPKPXXAPTQLSPISVLFIDDSSNVIYKQYENMVVRAXG

SEQ ID NO: 16605 - protein, 41 aa, Artificial Sequence
  GFR-binding peptide
  MOD_RES (6)..(7)..(41): Xaa is C or S
  MOD_RES (21)..(22)..(23)..(24)..(25): Xaa is A or G
  MOD_RES (26)..(27)..(28)..(29): Xaa is A or G or is absent
TVPKPXXAPTQLSPISVLFIXXXXXXXXXYKQYENMVVRAX

SEQ ID NO: 16606 - protein, 39 aa, Artificial Sequence
  GFR-binding peptide
  MOD_RES (5)..(6)..(38): Xaa is C or S
VPKPXXAPTKLEPLPVVYYDDSSNVIEQLSNNMVVRSXG

SEQ ID NO: 16607 - protein, 38 aa, Artificial Sequence
  GFR-binding peptide
  MOD_RES (2)..(3)..(35)..(37): Xaa is C or S
PXXAPTKLEPLTVLYYDDSSNVIEQLSNNMVVRSXGXH

SEQ ID NO: 16608 - protein, 39 aa, Artificial Sequence; identical to SEQ ID NO: 9309
  GFR-binding peptide
  MOD_RES (5)..(37)..(39): Xaa is C or S

SEQ ID NO: 16609 - protein, 38 aa, Artificial Sequence
  GFR-binding peptide
  MOD_RES (1)..(2)..(36)..(38): Xaa is C or S
  MOD_RES (16)..(17)..(18)..(19)..(20): Xaa is A or G
  MOD_RES (21)..(22)..(23)..(24): Xaa is A or G or is absent
XXAPTKLSPISVLFIXXXXXXXXXYKQYENMVVRSXGX

SEQ ID NO: 16610 - protein, 38 aa, Artificial Sequence
  GFR-binding peptide
  MOD_RES (5)..(6): Xaa is C or S
  MOD_RES (20)..(21)..(22)..(23)..(24): Xaa is A or G
  MOD_RES (25)..(26)..(27)..(28): Xaa is A or G or is absent
IPKAXXVPTELEPLPMVYYXXXXXXXXXEQLSNDMVVE

SEQ ID NO: 16611 - protein, 33 aa, Artificial Sequence; identical to SEQ ID NO: 9313
  GFR-binding peptide
  MOD_RES (32)..(32): Xaa is C or S

SEQ ID NO: 16612 - protein, 36 aa, Artificial Sequence
  GFR-binding peptide
  MOD_RES (5)..(6): Xaa is C or S
TPPTXXVPTRLEPLPIVYYDSANNVVEQLSNDMVVE

SEQ ID NO: 16613 - protein, 34 aa, Artificial Sequence
  GFR-binding peptide
  MOD_RES (1)..(1): Xaa is C or S
  MOD_RES (15)..(16)..(17)..(18)..(19): Xaa is A or G
  MOD_RES (20)..(21)..(22)..(23): Xaa is A or G or is absent
XVPTRLSPISILFIXXXXXXXXXYKQYEDMVVES

SEQ ID NO: 16614 - protein, 34 aa, Artificial Sequence
  GFR-binding peptide
  MOD_RES (1)..(2): Xaa is C or S
  MOD_RES (16)..(17)..(18)..(19)..(20): Xaa is A or G
  MOD_RES (21)..(22)..(23)..(24): Xaa is A or G or is absent
XXVPQALSPISILFIXXXXXXXXXYKQYEMIVRS

SEQ ID NO: 16615 - protein, 40 aa, Artificial Sequence
  GFR-binding peptide
  MOD_RES (4)..(5)..(38)..(40): Xaa is C or S
  MOD_RES (19)..(20)..(21)..(22)..(23): Xaa is A or G
  MOD_RES (24)..(25)..(26)..(27): Xaa is A or G or is absent
ASPXXVPQDLEPLTILYYXXXXXXXXXEQLSNMVVKSXKX

SEQ ID NO: 16616 - protein, 36 aa, Artificial Sequence; identical to SEQ ID NO: 9316
  GFR-binding peptide
  MOD_RES (3)..(4): Xaa is C or S
  MOD_RES (18)..(19)..(20)..(21)..(22): Xaa is A or G
  MOD_RES (23)..(24)..(25)..(26): Xaa is A or G or is absent

SEQ ID NO: 16617 - protein, 36 aa, Artificial Sequence
  GFR-binding peptide
  MOD_RES (1)..(2)..(34)..(36): Xaa is C or S
XXVPTRLSAISILYLDSANNVVLKNYQDMVVESXGX

SEQ ID NO: 16618 - protein, 37 aa, Artificial Sequence
  GFR-binding peptide
  MOD_RES (34)..(36): Xaa is C or S
  MOD_RES (14)..(15)..(16)..(17)..(18): Xaa is A or G
  MOD_RES (19)..(20)..(21)..(22): Xaa is A or G or is absent
VPTELSPISMLFIXXXXXXXXXYKQYEDMVVEGXGXR

SEQ ID NO: 16619 - protein, 37 aa, Artificial Sequence; identical to SEQ ID NO: 9317
  GFR-binding peptide
  MOD_RES (3)..(4)..(37): Xaa is C or S
  MOD_RES (18)..(19)..(20)..(21)..(22): Xaa is A or G
  MOD_RES (23)..(24)..(25)..(26): Xaa is A or G or is absent

SEQ ID NO: 16620 - protein, 39 aa, Artificial Sequence
  GFR-binding peptide
  MOD_RES (4)..(38): Xaa is C or S
  MOD_RES (18)..(19)..(20)..(21)..(22): Xaa is A or G
  MOD_RES (23)..(24)..(25)..(26): Xaa is A or G or is absent
KPTXAPTKLEPLPVVYYXXXXXXXXXEQLSNNMVVRSXG

SEQ ID NO: 16621 - protein, 41 aa, Artificial Sequence
  GFR-binding peptide
  MOD_RES (4)..(5)..(39)..(41): Xaa is C or S
  MOD_RES (19)..(20)..(21)..(22)..(23): Xaa is A or G
  MOD_RES (24)..(25)..(26)..(27): Xaa is A or G or is absent
PKPXXAPTKLEPLTVLYYXXXXXXXXXEQLSNNMVVRSXGX

SEQ ID NO: 16622 - protein, 33 aa, Artificial Sequence; identical to SEQ ID NO: 9322
  GFR-binding peptide
  MOD_RES (1)..(32): Xaa is C or S

SEQ ID NO: 16623 - protein, 40 aa, Artificial Sequence; identical to SEQ ID NO: 9323
  GFR-binding peptide
  MOD_RES (5)..(6)..(40): Xaa is C or S
  MOD_RES (20)..(21)..(22)..(23)..(24): Xaa is A or G
  MOD_RES (25)..(26)..(27)..(28): Xaa is A or G or is absent

SEQ ID NO: 16624 - protein, 35 aa, Artificial Sequence
  GFR-binding peptide
  MOD_RES (32)..(34): Xaa is C or S
VPTELSPISMLFIDENEKVVYKQYEDMVVEGXGXR

SEQ ID NO: 16625 - protein, 41 aa, Artificial Sequence
  GFR-binding peptide
  MOD_RES (7)..(41): Xaa is C or S
  MOD_RES (21)..(22)..(23)..(24)..(25): Xaa is A or G
  MOD_RES (26)..(27)..(28)..(29): Xaa is A or G or is absent
HVTKPTXAPTKLSPISVLFIXXXXXXXXXYKQYENMVVRSX

SEQ ID NO: 16626 - protein, 35 aa, Artificial Sequence; identical to SEQ ID NO: 9324
  GFR-binding peptide
  MOD_RES (1)..(33)..(35): Xaa is C or S

SEQ ID NO: 16627 - protein, 37 aa, Artificial Sequence; identical to SEQ ID NO: 9327
  GFR-binding peptide
  MOD_RES (1)..(2)..(35)..(37): Xaa is C or S
  MOD_RES (16)..(17)..(18)..(19)..(20): Xaa is A or G
  MOD_RES (21)..(22)..(23)..(24): Xaa is A or G or is absent

SEQ ID NO: 16628 - protein, 35 aa, Artificial Sequence
  GFR-binding peptide
  MOD_RES (33)..(35): Xaa is C or S
  MOD_RES (14)..(15)..(16)..(17)..(18): Xaa is A or G
  MOD_RES (19)..(20)..(21)..(22): Xaa is A or G or is absent
VPQDLEPLTILYYXXXXXXXXXEQLSNMVVKSXKX

SEQ ID NO: 16629 - protein, 37 aa, Artificial Sequence; identical to SEQ ID NO: 9328
  GFR-binding peptide
  MOD_RES (3)..(4)..(36): Xaa is C or S

SEQ ID NO: 16630 - protein, 35 aa, Artificial Sequence
  GFR-binding peptide
  MOD_RES (2)..(3): Xaa is C or S
  MOD_RES (17)..(18)..(19)..(20)..(21): Xaa is A or G
  MOD_RES (22)..(23)..(24)..(25): Xaa is A or G or is absent
PXXAPTKLEPLPVVYYXXXXXXXXXEQLSNNMVVR

SEQ ID NO: 16631 - protein, 32 aa, Artificial Sequence
  GFR-binding peptide
  MOD_RES (32)..(32): Xaa is C or S
VPTRLEPLTILYYDSANNVVEQLSNDMVVESX

SEQ ID NO: 16632 - protein, 36 aa, Artificial Sequence; identical to SEQ ID NO: 9330
  GFR-binding peptide
  MOD_RES (34)..(36): Xaa is C or S
  MOD_RES (14)..(15)..(16)..(17)..(18): Xaa is A or G
  MOD_RES (19)..(20)..(21)..(22): Xaa is A or G or is absent

SEQ ID NO: 16633 - protein, 33 aa, Artificial Sequence; identical to SEQ ID NO: 9331
  GFR-binding peptide
  MOD_RES (14)..(15)..(16)..(17)..(18): Xaa is A or G
  MOD_RES (19)..(20)..(21)..(22): Xaa is A or G or is absent

SEQ ID NO: 16634 - protein, 35 aa, Artificial Sequence; identical to SEQ ID NO: 9332
  GFR-binding peptide
  MOD_RES (3)..(4)..(35): Xaa is C or S

SEQ ID NO: 16635 - protein, 38 aa, Artificial Sequence
  GFR-binding peptide
  MOD_RES (5)..(6): Xaa is C or S
  MOD_RES (20)..(21)..(22)..(23)..(24): Xaa is A or G
  MOD_RES (25)..(26)..(27)..(28): Xaa is A or G or is absent
TPPTXXVPTRLEPLPIVYYXXXXXXXXXEQLSNDMVVE

SEQ ID NO: 16636 - protein, 39 aa, Artificial Sequence
  GFR-binding peptide
  MOD_RES (5)..(6): Xaa is C or S
  MOD_RES (20)..(21)..(22)..(23)..(24): Xaa is A or G
  MOD_RES (25)..(26)..(27)..(28): Xaa is A or G or is absent
VPKPXXAPTKLSPISVLFIXXXXXXXXXYKQYENMVVRS

SEQ ID NO: 16637 - protein, 43 aa, Artificial Sequence; identical to SEQ ID NO: 9334
  GFR-binding peptide
  MOD_RES (6)..(7)..(41)..(43): Xaa is C or S
  MOD_RES (21)..(22)..(23)..(24)..(25): Xaa is A or G
  MOD_RES (26)..(27)..(28)..(29): Xaa is A or G or is absent

SEQ ID NO: 16638 - protein, 35 aa, Artificial Sequence; identical to SEQ ID NO: 9335
  GFR-binding peptide
  MOD_RES (2)..(3)..(34): Xaa is C or S

SEQ ID NO: 16639 - protein, 37 aa, Artificial Sequence
  GFR-binding peptide
  MOD_RES (6)..(7): Xaa is C or S
STPPTXXVPTRLNAISILYFDSANNVVLKKYRDMVVE

SEQ ID NO: 16640 - protein, 36 aa, Artificial Sequence; identical to SEQ ID NO: 9337
  GFR-binding peptide
  MOD_RES (2)..(3): Xaa is C or S
  MOD_RES (17)..(18)..(19)..(20)..(21): Xaa is A or G
  MOD_RES (22)..(23)..(24)..(25): Xaa is A or G or is absent

SEQ ID NO: 16641 - protein, 35 aa, Artificial Sequence
  GFR-binding peptide
  MOD_RES (1)..(35): Xaa is C or S
  MOD_RES (15)..(16)..(17)..(18)..(19): Xaa is A or G
  MOD_RES (20)..(21)..(22)..(23): Xaa is A or G or is absent
XVPTELSPISMLFIXXXXXXXXXYKQYEDMVVEGX

SEQ ID NO: 16642 - protein, 33 aa, Artificial Sequence
  GFR-binding peptide
  MOD_RES (1)..(1): Xaa is C or S
  MOD_RES (15)..(16)..(17)..(18)..(19): Xaa is A or G
  MOD_RES (20)..(21)..(22)..(23): Xaa is A or G or is absent
XAPTQLEPLPVVYYXXXXXXXXXEQLSNNMVVR

SEQ ID NO: 16643 - protein, 33 aa, Artificial Sequence; identical to SEQ ID NO: 9341
  GFR-binding peptide
  MOD_RES (14)..(15)..(16)..(17)..(18): Xaa is A or G
  MOD_RES (19)..(20)..(21)..(22): Xaa is A or G or is absent

SEQ ID NO: 16644 - protein, 31 aa, Artificial Sequence; identical to SEQ ID NO: 9343
  GFR-binding peptide

SEQ ID NO: 16645 - protein, 38 aa, Artificial Sequence
  GFR-binding peptide
  MOD_RES (2)..(3)..(37): Xaa is C or S
  MOD_RES (17)..(18)..(19)..(20)..(21): Xaa is A or G
  MOD_RES (22)..(23)..(24)..(25): Xaa is A or G or is absent
PXXAPTQLEPLPVVYYXXXXXXXXXEQLSNNMVVRAXG

SEQ ID NO: 16646 - protein, 41 aa, Artificial Sequence
  GFR-binding peptide
  MOD_RES (6)..(7)..(39)..(41): Xaa is C or S
TVPKPXXAPTQLEPLPVVYYDDSSNVIEQLSNNMVVRAXGX

SEQ ID NO: 16647 - protein, 40 aa, Artificial Sequence
  GFR-binding peptide
  MOD_RES (5)..(6)..(40): Xaa is C or S
  MOD_RES (20)..(21)..(22)..(23)..(24): Xaa is A or G
  MOD_RES (25)..(26)..(27)..(28): Xaa is A or G or is absent
VPKPXXAPTQLEPLTVLYYXXXXXXXXXEQLSNNMVVRAX

SEQ ID NO: 16648 - protein, 40 aa, Artificial Sequence
  GFR-binding peptide
  MOD_RES (5)..(6)..(38)..(40): Xaa is C or S
VPKPXXAPTKLSPISVLFIDDSSNVIYKQYENMVVRSXGX

SEQ ID NO: 16649 - protein, 39 aa, Artificial Sequence
  GFR-binding peptide
  MOD_RES (3)..(4)..(36)..(38): Xaa is C or S
KPXXAPTKLEPLTVLYYDDSSNVIEQLSNNMVVRSXGXH

SEQ ID NO: 16650 - protein, 37 aa, Artificial Sequence; identical to SEQ ID NO: 9347
  GFR-binding peptide
  MOD_RES (34)..(36): Xaa is C or S
  MOD_RES (14)..(15)..(16)..(17)..(18): Xaa is A or G
  MOD_RES (19)..(20)..(21)..(22): Xaa is A or G or is absent

SEQ ID NO: 16651 - protein, 35 aa, Artificial Sequence; identical to SEQ ID NO: 9350
  GFR-binding peptide
  MOD_RES (1)..(35): Xaa is C or S
  MOD_RES (15)..(16)..(17)..(18)..(19): Xaa is A or G
  MOD_RES (20)..(21)..(22)..(23): Xaa is A or G or is absent

SEQ ID NO: 16652 - protein, 33 aa, Artificial Sequence
  GFR-binding peptide
  MOD_RES (2)..(3): Xaa is C or S
PXXAPTQLEPLPVVYYDDSSNVIEQLSNNMVVR

SEQ ID NO: 16653 - protein, 39 aa, Artificial Sequence; identical to SEQ ID NO: 9352
  GFR-binding peptide
  MOD_RES (5)..(6)..(38): Xaa is C or S

SEQ ID NO: 16654 - protein, 36 aa, Artificial Sequence; identical to SEQ ID NO: 9354
  GFR-binding peptide
  MOD_RES (3)..(4): Xaa is C or S
  MOD_RES (18)..(19)..(20)..(21)..(22): Xaa is A or G
  MOD_RES (23)..(24)..(25)..(26): Xaa is A or G or is absent

SEQ ID NO: 16655 - protein, 40 aa, Artificial Sequence
  GFR-binding peptide
  MOD_RES (5)..(6)..(38)..(40): Xaa is C or S
VPKPXXAPTQLEPLTVLYYDDSSNVIEQLSNNMVVRAXGX

SEQ ID NO: 16656 - protein, 39 aa, Artificial Sequence
  GFR-binding peptide
  MOD_RES (6)..(7)..(39): Xaa is C or S
YVPKPXXAPTKLEPLPVVYYDDSSNVIEQLSNNMVVRSX

SEQ ID NO: 16657 - protein, 39 aa, Artificial Sequence
  GFR-binding peptide
  MOD_RES (5)..(6)..(38): Xaa is C or S
VPKPXXAPTKLSPISVLFIDDSSNVIYKQYENMVVRSXG

SEQ ID NO: 16658 - protein, 35 aa, Artificial Sequence; identical to SEQ ID NO: 9359
  GFR-binding peptide
  MOD_RES (4)..(5): Xaa is C or S

SEQ ID NO: 16659 - protein, 36 aa, Artificial Sequence
  GFR-binding peptide
  MOD_RES (1)..(2)..(33)..(35): Xaa is C or S
XXVPQALEPLTILYYVGRKPKVEQLSNMIVRSXKXS

SEQ ID NO: 16660 - protein, 38 aa, Artificial Sequence; identical to SEQ ID NO: 9361
  GFR-binding peptide
  MOD_RES (3)..(4)..(38): Xaa is C or S
  MOD_RES (18)..(19)..(20)..(21)..(22): Xaa is A or G
  MOD_RES (23)..(24)..(25)..(26): Xaa is A or G or is absent

SEQ ID NO: 16661 - protein, 36 aa, Artificial Sequence
  GFR-binding peptide
  MOD_RES (1)..(33)..(35): Xaa is C or S
XVPTELEPLPMVYYDENEKVVEQLSNDMVVEGXGXR

SEQ ID NO: 16662 - protein, 38 aa, Artificial Sequence; identical to SEQ ID NO: 9364
  GFR-binding peptide
  MOD_RES (5)..(6)..(37): Xaa is C or S

SEQ ID NO: 16663 - protein, 42 aa, Artificial Sequence
  GFR-binding peptide
  MOD_RES (4)..(5)..(39)..(41): Xaa is C or S
  MOD_RES (19)..(20)..(21)..(22)..(23): Xaa is A or G
  MOD_RES (24)..(25)..(26)..(27): Xaa is A or G or is absent
PKPXXAPTQLEPLPVVYYXXXXXXXXXEQLSNNMVVRAXGXH

SEQ ID NO: 16664 - protein, 36 aa, Artificial Sequence
  GFR-binding peptide
  MOD_RES (1)..(2)..(33)..(35): Xaa is C or S
XXVSQDLSPISILFIIGKTPKIYKQYEMIVKSXKXS

SEQ ID NO: 16665 - protein, 40 aa, Artificial Sequence; identical to SEQ ID NO: 9366
  GFR-binding peptide
  MOD_RES (2)..(3)..(37)..(39): Xaa is C or S
  MOD_RES (17)..(18)..(19)..(20)..(21): Xaa is A or G
  MOD_RES (22)..(23)..(24)..(25): Xaa is A or G or is absent

SEQ ID NO: 16666 - protein, 38 aa, Artificial Sequence
  GFR-binding peptide
  MOD_RES (3)..(4)..(36)..(38): Xaa is C or S
PTXXVPTRLEPLTILYYDSANNVVEQLSNDMVVESXGX

SEQ ID NO: 16667 - protein, 38 aa, Artificial Sequence
  GFR-binding peptide
  MOD_RES (5)..(6): Xaa is C or S
  MOD_RES (20)..(21)..(22)..(23)..(24): Xaa is A or G
  MOD_RES (25)..(26)..(27)..(28): Xaa is A or G or is absent
VPKPXXAPTQLEPLTVLYYXXXXXXXXXEQLSNNMVVR

SEQ ID NO: 16668 - protein, 39 aa, Artificial Sequence
  GFR-binding peptide
  MOD_RES (4)..(5)..(37)..(39): Xaa is C or S
PPTXXVPTRLEPLTILYYDSANNVVEQLSNDMVVESXGX

SEQ ID NO: 16669 - protein, 40 aa, Artificial Sequence
  GFR-binding peptide
  MOD_RES (2)..(3)..(37)..(39): Xaa is C or S
  MOD_RES (17)..(18)..(19)..(20)..(21): Xaa is A or G
  MOD_RES (22)..(23)..(24)..(25): Xaa is A or G or is absent
PXXAPTQLSPISVLFIXXXXXXXXXYKQYENMVVRAXGXH

SEQ ID NO: 16670 - protein, 44 aa, Artificial Sequence
  GFR-binding peptide
  MOD_RES (7)..(41)..(43): Xaa is C or S
  MOD_RES (21)..(22)..(23)..(24)..(25): Xaa is A or G
  MOD_RES (26)..(27)..(28)..(29): Xaa is A or G or is absent
HVTKPTXAPTKLSPISVLFIXXXXXXXXXYKQYENMVVRSXGXH

SEQ ID NO: 16671 - protein, 33 aa, Artificial Sequence
  GFR-binding peptide
  MOD_RES (32)..(32): Xaa is C or S
VPTELEPLTMLYYDENEKVVEQLSNDMVVEGXG

SEQ ID NO: 16672 - protein, 39 aa, Artificial Sequence; identical to SEQ ID NO: 9373
  GFR-binding peptide
  MOD_RES (4)..(5)..(36)..(38): Xaa is C or S

SEQ ID NO: 16673 - protein, 41 aa, Artificial Sequence
  GFR-binding peptide
  MOD_RES (3)..(4)..(38)..(40): Xaa is C or S
  MOD_RES (18)..(19)..(20)..(21)..(22): Xaa is A or G
  MOD_RES (23)..(24)..(25)..(26): Xaa is A or G or is absent
KPXXAPTKLSPISVLFIXXXXXXXXXYKQYENMVVRSXGXH

SEQ ID NO: 16674 - protein, 42 aa, Artificial Sequence
  GFR-binding peptide
  MOD_RES (4)..(5)..(39)..(41): Xaa is C or S
  MOD_RES (19)..(20)..(21)..(22)..(23): Xaa is A or G
  MOD_RES (24)..(25)..(26)..(27): Xaa is A or G or is absent
PKAXXVPTELEPLTMLYYXXXXXXXXXEQLSNDMVVEGXGXR

SEQ ID NO: 16675 - protein, 40 aa, Artificial Sequence
  GFR-binding peptide
  MOD_RES (5)..(6)..(40): Xaa is C or S
  MOD_RES (20)..(21)..(22)..(23)..(24): Xaa is A or G
  MOD_RES (25)..(26)..(27)..(28): Xaa is A or G or is absent
IPKAXXVPTELSPISMLFIXXXXXXXXXYKQYEDMVVEGX

SEQ ID NO: 16676 - protein, 36 aa, Artificial Sequence
  GFR-binding peptide
  MOD_RES (33)..(35): Xaa is C or S
  MOD_RES (14)..(15)..(16)..(17)..(18): Xaa is A or G
  MOD_RES (19)..(20)..(21)..(22): Xaa is A or G or is absent
VPQDLEPLTILYYXXXXXXXXXEQLSNMVVKSXKXS

SEQ ID NO: 16677 - protein, 33 aa, Artificial Sequence
  GFR-binding peptide
  MOD_RES (1)..(2): Xaa is C or S
XXVPTELSPISMLFIDENEKVVYKQYEDMVVEG

SEQ ID NO: 16678 - protein, 33 aa, Artificial Sequence
  GFR-binding peptide
  MOD_RES (1)..(2)..(33): Xaa is C or S
XXVPQDLEPLPIVYYVGRTPKVEQLSNMVVKSX

SEQ ID NO: 16679 - protein, 35 aa, Artificial Sequence
  GFR-binding peptide
  MOD_RES (3)..(4)..(35): Xaa is C or S
SPXXVPQDLSPISILFIVGRTPKVYKQYEMVVKSX

SEQ ID NO: 16680 - protein, 41 aa, Artificial Sequence
  GFR-binding peptide
  MOD_RES (5)..(6)..(38)..(40): Xaa is C or S
IPKAXXVPTELEPLPMVYYDEYDKVVEQLSNEMVVEGXGXR

SEQ ID NO: 16681 - protein, 37 aa, Artificial Sequence; identical to SEQ ID NO: 9377
  GFR-binding peptide
  MOD_RES (1)..(34)..(36): Xaa is C or S
  MOD_RES (15)..(16)..(17)..(18)..(19): Xaa is A or G
  MOD_RES (20)..(21)..(22)..(23): Xaa is A or G or is absent

SEQ ID NO: 16682 - protein, 37 aa, Artificial Sequence; identical to SEQ ID NO: 9380
  GFR-binding peptide
  MOD_RES (3)..(4)..(37): Xaa is C or S
  MOD_RES (18)..(19)..(20)..(21)..(22): Xaa is A or G
  MOD_RES (23)..(24)..(25)..(26): Xaa is A or G or is absent

SEQ ID NO: 16683 - protein, 42 aa, Artificial Sequence; identical to SEQ ID NO: 9382
  GFR-binding peptide
  MOD_RES (5)..(6)..(39)..(41): Xaa is C or S
  MOD_RES (20)..(21)..(22)..(23)..(24): Xaa is A or G
  MOD_RES (25)..(26)..(27)..(28): Xaa is A or G or is absent

SEQ ID NO: 16684 - protein, 32 aa, Artificial Sequence
  GFR-binding peptide
  MOD_RES (14)..(15)..(16)..(17)..(18): Xaa is A or G
  MOD_RES (19)..(20)..(21)..(22): Xaa is A or G or is absent
VPTRLEPLPIVYYXXXXXXXXXEQLSNDMVVE

SEQ ID NO: 16685 - protein, 38 aa, Artificial Sequence
  GFR-binding peptide
  MOD_RES (5)..(5): Xaa is C or S
  MOD_RES (19)..(20)..(21)..(22)..(23): Xaa is A or G
  MOD_RES (24)..(25)..(26)..(27): Xaa is A or G or is absent
TKPTXAPTKLSPISVLFIXXXXXXXXXYKQYENMVVRS

SEQ ID NO: 16686 - protein, 32 aa, Artificial Sequence; identical to SEQ ID NO: 9383
  GFR-binding peptide
  MOD_RES (14)..(15)..(16)..(17)..(18): Xaa is A or G
  MOD_RES (19)..(20)..(21)..(22): Xaa is A or G or is absent

SEQ ID NO: 16687 - protein, 32 aa, Artificial Sequence
  GFR-binding peptide
  MOD_RES (1)..(2): Xaa is C or S
XXVPTRLSAISILYLDSANNVVLKNYQDMVVE

SEQ ID NO: 16688 - protein, 40 aa, Artificial Sequence
  GFR-binding peptide
  MOD_RES (5)..(39): Xaa is C or S
  MOD_RES (19)..(20)..(21)..(22)..(23): Xaa is A or G
  MOD_RES (24)..(25)..(26)..(27): Xaa is A or G or is absent
TKPTXAPTKLEPLPVVYYXXXXXXXXXEQLSNNMVVRSXG

SEQ ID NO: 16689 - protein, 39 aa, Artificial Sequence; identical to SEQ ID NO: 9387
  GFR-binding peptide
  MOD_RES (4)..(5)..(39): Xaa is C or S
  MOD_RES (19)..(20)..(21)..(22)..(23): Xaa is A or G
  MOD_RES (24)..(25)..(26)..(27): Xaa is A or G or is absent

SEQ ID NO: 16690 - protein, 38 aa, Artificial Sequence; identical to SEQ ID NO: 9390
  GFR-binding peptide
  MOD_RES (1)..(2)..(35)..(37): Xaa is C or S
  MOD_RES (16)..(17)..(18)..(19)..(20): Xaa is A or G
  MOD_RES (21)..(22)..(23)..(24): Xaa is A or G or is absent

SEQ ID NO: 16691 - protein, 40 aa, Artificial Sequence
  GFR-binding peptide
  MOD_RES (5)..(6)..(38)..(40): Xaa is C or S
VPKPXXAPTQLSPISVLFIDDSSNVIYKQYENMVVRAXGX

SEQ ID NO: 16692 - protein, 35 aa, Artificial Sequence
  GFR-binding peptide
  MOD_RES (2)..(3): Xaa is C or S
  MOD_RES (17)..(18)..(19)..(20)..(21): Xaa is A or G
  MOD_RES (22)..(23)..(24)..(25): Xaa is A or G or is absent
PXXVSQDLSPISILFIXXXXXXXXXYKQYEMIVKS

SEQ ID NO: 16693 - protein, 33 aa, Artificial Sequence
  GFR-binding peptide
  MOD_RES (2)..(3): Xaa is C or S
PXXAPTKLEPLTVLYYDDSSNVIEQLSNNMVVR

SEQ ID NO: 16694 - protein, 39 aa, Artificial Sequence
  GFR-binding peptide
  MOD_RES (6)..(7)..(39): Xaa is C or S
TVPKPXXAPTQLSPISVLFIDDSSNVIYKQYENMVVRAX

SEQ ID NO: 16695 - protein, 38 aa, Artificial Sequence; identical to SEQ ID NO: 9397
  GFR-binding peptide
  MOD_RES (5)..(6): Xaa is C or S
  MOD_RES (20)..(21)..(22)..(23)..(24): Xaa is A or G
  MOD_RES (25)..(26)..(27)..(28): Xaa is A or G or is absent

SEQ ID NO: 16696 - protein, 39 aa, Artificial Sequence
  GFR-binding peptide
  MOD_RES (6)..(7): Xaa is C or S
  MOD_RES (21)..(22)..(23)..(24)..(25): Xaa is A or G
  MOD_RES (26)..(27)..(28)..(29): Xaa is A or G or is absent
TVPKPXXAPTQLEPLTVLYYXXXXXXXXXEQLSNNMVVR

SEQ ID NO: 16697 - protein, 34 aa, Artificial Sequence; identical to SEQ ID NO: 9398
  GFR-binding peptide
  MOD_RES (1)..(2): Xaa is C or S
  MOD_RES (16)..(17)..(18)..(19)..(20): Xaa is A or G
  MOD_RES (21)..(22)..(23)..(24): Xaa is A or G or is absent

SEQ ID NO: 16698 - protein, 33 aa, Artificial Sequence
  GFR-binding peptide
  MOD_RES (1)..(33): Xaa is C or S
XAPTKLSPISVLFIDDSSNVIYKQYENMVVRSX

SEQ ID NO: 16699 - protein, 39 aa, Artificial Sequence; identical to SEQ ID NO: 9400
  GFR-binding peptide
  MOD_RES (4)..(5)..(39): Xaa is C or S
  MOD_RES (19)..(20)..(21)..(22)..(23): Xaa is A or G
  MOD_RES (24)..(25)..(26)..(27): Xaa is A or G or is absent

SEQ ID NO: 16700 - protein, 37 aa, Artificial Sequence
  GFR-binding peptide
  MOD_RES (2)..(3)..(35)..(37): Xaa is C or S
AXXVPTELEPLTMLYYDENEKVVEQLSNDMVVEGXGX

SEQ ID NO: 16701 - protein, 35 aa, Artificial Sequence
  GFR-binding peptide
  MOD_RES (34)..(34): Xaa is C or S
  MOD_RES (14)..(15)..(16)..(17)..(18): Xaa is A or G
  MOD_RES (19)..(20)..(21)..(22): Xaa is A or G or is absent
APTQLSPISVLFIXXXXXXXXXYKQYENMVVRAXG

SEQ ID NO: 16702 - protein, 38 aa, Artificial Sequence; identical to SEQ ID NO: 9401
  GFR-binding peptide
  MOD_RES (4)..(5)..(38): Xaa is C or S
  MOD_RES (19)..(20)..(21)..(22)..(23): Xaa is A or G
  MOD_RES (24)..(25)..(26)..(27): Xaa is A or G or is absent

SEQ ID NO: 16703 - protein, 39 aa, Artificial Sequence
  GFR-binding peptide
  MOD_RES (5)..(6)..(39): Xaa is C or S
  MOD_RES (20)..(21)..(22)..(23)..(24): Xaa is A or G
  MOD_RES (25)..(26)..(27)..(28): Xaa is A or G or is absent
SAAPXXVPQALEPLTILYYXXXXXXXXXEQLSNMIVRSX

SEQ ID NO: 16704 - protein, 40 aa, Artificial Sequence
  GFR-binding peptide
  MOD_RES (4)..(5)..(37)..(39): Xaa is C or S
PKPXXAPTQLSPISVLFIDDSSNVIYKQYENMVVRAXGXH

SEQ ID NO: 16705 - protein, 38 aa, Artificial Sequence
  GFR-binding peptide
  MOD_RES (3)..(4)..(38): Xaa is C or S
  MOD_RES (18)..(19)..(20)..(21)..(22): Xaa is A or G
  MOD_RES (23)..(24)..(25)..(26): Xaa is A or G or is absent
PTXXVPTRLSAISILYLXXXXXXXXXLKNYQDMVVESX

SEQ ID NO: 16706 - protein, 35 aa, Artificial Sequence
  GFR-binding peptide
  MOD_RES (3)..(4): Xaa is C or S
KAXXVPTELEPLPMVYYDEYDKVVEQLSNEMVVEG

SEQ ID NO: 16707 - protein, 34 aa, Artificial Sequence; identical to SEQ ID NO: 9404
  GFR-binding peptide
  MOD_RES (1)..(2)..(34): Xaa is C or S

SEQ ID NO: 16708 - protein, 33 aa, Artificial Sequence
  GFR-binding peptide
  MOD_RES (32)..(32): Xaa is C or S
APTKLEPLTVLYYDDSSNVIEQLSNNMVVRSXG

SEQ ID NO: 16709 - protein, 35 aa, Artificial Sequence
  GFR-binding peptide
  MOD_RES (2)..(3): Xaa is C or S
  MOD_RES (17)..(18)..(19)..(20)..(21): Xaa is A or G
  MOD_RES (22)..(23)..(24)..(25): Xaa is A or G or is absent
AXXVPTELSPISMLFIXXXXXXXXXYKQYEDMVVE

SEQ ID NO: 16710 - protein, 41 aa, Artificial Sequence
  GFR-binding peptide
  MOD_RES (5)..(6)..(38)..(40): Xaa is C or S
TPPTXXVPTRLSAISILYLDSANNVVLKNYQDMVVESXGXR

SEQ ID NO: 16711 - protein, 42 aa, Artificial Sequence
  GFR-binding peptide
  MOD_RES (6)..(7)..(39)..(41): Xaa is C or S
SIPKAXXVPTELSPISMLFIDEYDKVVYKQYEEMVVEGXGXR

SEQ ID NO: 16712 - protein, 37 aa, Artificial Sequence; identical to SEQ ID NO: 9406
  GFR-binding peptide
  MOD_RES (4)..(5)..(36): Xaa is C or S

SEQ ID NO: 16713 - protein, 38 aa, Artificial Sequence
  GFR-binding peptide
  MOD_RES (5)..(6): Xaa is C or S
  MOD_RES (20)..(21)..(22)..(23)..(24): Xaa is A or G
  MOD_RES (25)..(26)..(27)..(28): Xaa is A or G or is absent
SASPXXVSQDLEPLPIVYYXXXXXXXXXEQLSNMIVKS

SEQ ID NO: 16714 - protein, 37 aa, Artificial Sequence
  GFR-binding peptide
  MOD_RES (2)..(3)..(37): Xaa is C or S
  MOD_RES (17)..(18)..(19)..(20)..(21): Xaa is A or G
  MOD_RES (22)..(23)..(24)..(25): Xaa is A or G or is absent
TXXVPTRLEPLTILYYXXXXXXXXXEQLSNDMVVESX

SEQ ID NO: 16715 - protein, 40 aa, Artificial Sequence
  GFR-binding peptide
  MOD_RES (6)..(7)..(39): Xaa is C or S
STPPTXXVPTRLSAISILYLDSANNVVLKNYQDMVVESXG

SEQ ID NO: 16716 - protein, 43 aa, Artificial Sequence
  GFR-binding peptide
  MOD_RES (6)..(7)..(41)..(43): Xaa is C or S
  MOD_RES (21)..(22)..(23)..(24)..(25): Xaa is A or G
  MOD_RES (26)..(27)..(28)..(29): Xaa is A or G or is absent
KIPKAXXVPTELSPISMLFIXXXXXXXXXYKQYEDMVVEGXGX

SEQ ID NO: 16717 - protein, 36 aa, Artificial Sequence
  GFR-binding peptide
  MOD_RES (3)..(4): Xaa is C or S
  MOD_RES (18)..(19)..(20)..(21)..(22): Xaa is A or G
  MOD_RES (23)..(24)..(25)..(26): Xaa is A or G or is absent
KAXXVPTELSPISMLFIXXXXXXXXXYKQYEDMVVE

SEQ ID NO: 16718 - protein, 32 aa, Artificial Sequence; identical to SEQ ID NO: 9416
  GFR-binding peptide
  MOD_RES (1)..(32): Xaa is C or S

SEQ ID NO: 16719 - protein, 40 aa, Artificial Sequence; identical to SEQ ID NO: 9419
  GFR-binding peptide
  MOD_RES (6)..(38)..(40): Xaa is C or S

SEQ ID NO: 16720 - protein, 33 aa, Artificial Sequence
  GFR-binding peptide
  MOD_RES (1)..(1): Xaa is C or S
  MOD_RES (15)..(16)..(17)..(18)..(19): Xaa is A or G
  MOD_RES (20)..(21)..(22)..(23): Xaa is A or G or is absent
XVPTRLEPLTILYYXXXXXXXXXEQLSNDMVVE

SEQ ID NO: 16721 - protein, 36 aa, Artificial Sequence; identical to SEQ ID NO: 9420
  GFR-binding peptide
  MOD_RES (2)..(3): Xaa is C or S
  MOD_RES (17)..(18)..(19)..(20)..(21): Xaa is A or G
  MOD_RES (22)..(23)..(24)..(25): Xaa is A or G or is absent

SEQ ID NO: 16722 - protein, 32 aa, Artificial Sequence
  GFR-binding peptide
  MOD_RES (32)..(32): Xaa is C or S
APTKLSPISVLFIDDSSNVIYKQYENMVVRSX

SEQ ID NO: 16723 - protein, 43 aa, Artificial Sequence
  GFR-binding peptide
  MOD_RES (5)..(6)..(40)..(42): Xaa is C or S
  MOD_RES (20)..(21)..(22)..(23)..(24): Xaa is A or G
  MOD_RES (25)..(26)..(27)..(28): Xaa is A or G or is absent
VPKPXXAPTQLEPLTVLYYXXXXXXXXXEQLSNNMVVRAXGXH

SEQ ID NO: 16724 - protein, 37 aa, Artificial Sequence
  GFR-binding peptide
  MOD_RES (3)..(35)..(37): Xaa is C or S
PTXAPTKLEPLPVVYYDDSSNVIEQLSNNMVVRSXGX

SEQ ID NO: 16725 - protein, 34 aa, Artificial Sequence
  GFR-binding peptide
  MOD_RES (1)..(2)..(34): Xaa is C or S
XXAPTQLEPLTVLYYDDSSNVIEQLSNNMVVRAX

SEQ ID NO: 16726 - protein, 39 aa, Artificial Sequence
  GFR-binding peptide
  MOD_RES (5)..(6)..(39): Xaa is C or S
  MOD_RES (20)..(21)..(22)..(23)..(24): Xaa is A or G
  MOD_RES (25)..(26)..(27)..(28): Xaa is A or G or is absent
SAAPXXVPQALSPISILFIXXXXXXXXXYKQYEMIVRSX

SEQ ID NO: 16727 - protein, 41 aa, Artificial Sequence
  GFR-binding peptide
  MOD_RES (7)..(39)..(41): Xaa is C or S
HVTKPTXAPTKLSPISVLFIDDSSNVIYKQYENMVVRSXGX

SEQ ID NO: 16728 - protein, 37 aa, Artificial Sequence
  GFR-binding peptide
  MOD_RES (1)..(2)..(36): Xaa is C or S
  MOD_RES (16)..(17)..(18)..(19)..(20): Xaa is A or G
  MOD_RES (21)..(22)..(23)..(24): Xaa is A or G or is absent
XXAPTKLEPLTVLYYXXXXXXXXXEQLSNNMVVRSXG

SEQ ID NO: 16729 - protein, 32 aa, Artificial Sequence; identical to SEQ ID NO: 9429
  GFR-binding peptide
  MOD_RES (1)..(32): Xaa is C or S

SEQ ID NO: 16730 - protein, 40 aa, Artificial Sequence
  GFR-binding peptide
  MOD_RES (6)..(7)..(40): Xaa is C or S
  MOD_RES (21)..(22)..(23)..(24)..(25): Xaa is A or G
  MOD_RES (26)..(27)..(28)..(29): Xaa is A or G or is absent
ASASPXXVSQDLSPISILFIXXXXXXXXXYKQYEMIVKSX

SEQ ID NO: 16731 - protein, 38 aa, Artificial Sequence; identical to SEQ ID NO: 9431
  GFR-binding peptide
  MOD_RES (1)..(35)..(37): Xaa is C or S
  MOD_RES (15)..(16)..(17)..(18)..(19): Xaa is A or G
  MOD_RES (20)..(21)..(22)..(23): Xaa is A or G or is absent

SEQ ID NO: 16732 - protein, 31 aa, Artificial Sequence
  GFR-binding peptide
APTQLEPLTVLYYDDSSNVIEQLSNNMVVRA

SEQ ID NO: 16733 - protein, 38 aa, Artificial Sequence
  GFR-binding peptide
  MOD_RES (6)..(7): Xaa is C or S
YVPKPXXAPTKLEPLTVLYYDDSSNVIEQLSNNMVVRS

SEQ ID NO: 16734 - protein, 39 aa, Artificial Sequence
  GFR-binding peptide
  MOD_RES (4)..(5)..(39): Xaa is C or S
  MOD_RES (19)..(20)..(21)..(22)..(23): Xaa is A or G
  MOD_RES (24)..(25)..(26)..(27): Xaa is A or G or is absent
PKPXXAPTKLEPLPVVYYXXXXXXXXXEQLSNNMVVRSX

SEQ ID NO: 16735 - protein, 38 aa, Artificial Sequence; identical to SEQ ID NO: 9433
  GFR-binding peptide
  MOD_RES (1)..(2)..(35)..(37): Xaa is C or S
  MOD_RES (16)..(17)..(18)..(19)..(20): Xaa is A or G
  MOD_RES (21)..(22)..(23)..(24): Xaa is A or G or is absent

SEQ ID NO: 16736 - protein, 36 aa, Artificial Sequence; identical to SEQ ID NO: 9434
  GFR-binding peptide
  MOD_RES (1)..(2)..(36): Xaa is C or S
  MOD_RES (16)..(17)..(18)..(19)..(20): Xaa is A or G
  MOD_RES (21)..(22)..(23)..(24): Xaa is A or G or is absent

SEQ ID NO: 16737 - protein, 38 aa, Artificial Sequence
  GFR-binding peptide
  MOD_RES (3)..(4)..(37): Xaa is C or S
  MOD_RES (18)..(19)..(20)..(21)..(22): Xaa is A or G
  MOD_RES (23)..(24)..(25)..(26): Xaa is A or G or is absent
SPXXVPQDLEPLPIVYYXXXXXXXXXEQLSNMVVKSXK

SEQ ID NO: 16738 - protein, 41 aa, Artificial Sequence
  GFR-binding peptide
  MOD_RES (6)..(7)..(39)..(41): Xaa is C or S
STPPTXXVPTRLNAISILYFDSANNVVLKKYRDMVVESXGX

SEQ ID NO: 16739 - protein, 43 aa, Artificial Sequence
  GFR-binding peptide
  MOD_RES (5)..(6)..(40)..(42): Xaa is C or S
  MOD_RES (20)..(21)..(22)..(23)..(24): Xaa is A or G
  MOD_RES (25)..(26)..(27)..(28): Xaa is A or G or is absent
TPPTXXVPTRLSPISILFIXXXXXXXXXYKQYEDMVVESXGXR

SEQ ID NO: 16740 - protein, 31 aa, Artificial Sequence; identical to SEQ ID NO: 9440
  GFR-binding peptide
  MOD_RES (31)..(31): Xaa is C or S

SEQ ID NO: 16741 - protein, 34 aa, Artificial Sequence; identical to SEQ ID NO: 9443
  GFR-binding peptide
  MOD_RES (31)..(33): Xaa is C or S

SEQ ID NO: 16742 - protein, 37 aa, Artificial Sequence
  GFR-binding peptide
  MOD_RES (1)..(2)..(34)..(36): Xaa is C or S
XXAPTQLSPISVLFIDDSSNVIYKQYENMVVRAXGXH

SEQ ID NO: 16743 - protein, 30 aa, Artificial Sequence; identical to SEQ ID NO: 9444
  GFR-binding peptide

SEQ ID NO: 16744 - protein, 35 aa, Artificial Sequence
  GFR-binding peptide
  MOD_RES (34)..(34): Xaa is C or S
  MOD_RES (14)..(15)..(16)..(17)..(18): Xaa is A or G
  MOD_RES (19)..(20)..(21)..(22): Xaa is A or G or is absent
VPTRLEPLPIVYYXXXXXXXXXEQLSNDMVVESXG

SEQ ID NO: 16745 - protein, 41 aa, Artificial Sequence; identical to SEQ ID NO: 9445
  GFR-binding peptide
  MOD_RES (3)..(4)..(38)..(40): Xaa is C or S
  MOD_RES (18)..(19)..(20)..(21)..(22): Xaa is A or G
  MOD_RES (23)..(24)..(25)..(26): Xaa is A or G or is absent

SEQ ID NO: 16746 - protein, 36 aa, Artificial Sequence
  GFR-binding peptide
  MOD_RES (2)..(3)..(35): Xaa is C or S
AXXVPTELSPISMLFIDEYDKVVYKQYEEMVVEGXG

SEQ ID NO: 16747 - protein, 38 aa, Artificial Sequence; identical to SEQ ID NO: 9446
  GFR-binding peptide
  MOD_RES (5)..(6)..(37): Xaa is C or S

SEQ ID NO: 16748 - protein, 35 aa, Artificial Sequence
  GFR-binding peptide
  MOD_RES (32)..(34): Xaa is C or S
VPTRLSAISILYLDSANNVVLKNYQDMVVESXGXR

SEQ ID NO: 16749 - protein, 38 aa, Artificial Sequence; identical to SEQ ID NO: 9448
  GFR-binding peptide
  MOD_RES (4)..(5)..(36)..(38): Xaa is C or S

SEQ ID NO: 16750 - protein, 39 aa, Artificial Sequence; identical to SEQ ID NO: 9450
  GFR-binding peptide
  MOD_RES (3)..(4)..(38): Xaa is C or S
  MOD_RES (18)..(19)..(20)..(21)..(22): Xaa is A or G
  MOD_RES (23)..(24)..(25)..(26): Xaa is A or G or is absent

SEQ ID NO: 16751 - protein, 37 aa, Artificial Sequence
  GFR-binding peptide
  MOD_RES (3)..(4): Xaa is C or S
  MOD_RES (18)..(19)..(20)..(21)..(22): Xaa is A or G
  MOD_RES (23)..(24)..(25)..(26): Xaa is A or G or is absent
KPXXAPTQLSPISVLFIXXXXXXXXXYKQYENMVVRA

SEQ ID NO: 16752 - protein, 35 aa, Artificial Sequence; identical to SEQ ID NO: 9452
  GFR-binding peptide
  MOD_RES (3)..(4)..(35): Xaa is C or S

SEQ ID NO: 16753 - protein, 39 aa, Artificial Sequence; identical to SEQ ID NO: 9453
  GFR-binding peptide
  MOD_RES (5)..(6): Xaa is C or S
  MOD_RES (20)..(21)..(22)..(23)..(24): Xaa is A or G
  MOD_RES (25)..(26)..(27)..(28): Xaa is A or G or is absent

SEQ ID NO: 16754 - protein, 31 aa, Artificial Sequence
  GFR-binding peptide
  MOD_RES (1)..(1): Xaa is C or S
XVPTELEPLTMLYYDEYDKVVEQLSNEMVVE

SEQ ID NO: 16755 - protein, 42 aa, Artificial Sequence
  GFR-binding peptide
  MOD_RES (5)..(6)..(40)..(42): Xaa is C or S
  MOD_RES (20)..(21)..(22)..(23)..(24): Xaa is A or G
  MOD_RES (25)..(26)..(27)..(28): Xaa is A or G or is absent
VPKPXXAPTKLEPLPVVYYXXXXXXXXXEQLSNNMVVRSXGX

SEQ ID NO: 16756 - protein, 33 aa, Artificial Sequence
  GFR-binding peptide
  MOD_RES (32)..(32): Xaa is C or S
APTQLSPISVLFIDDSSNVIYKQYENMVVRAXG

SEQ ID NO: 16757 - protein, 38 aa, Artificial Sequence
  GFR-binding peptide
  MOD_RES (3)..(4)..(35)..(37): Xaa is C or S
SPXXVPQDLEPLPIVYYVGRTPKVEQLSNMVVKSXKXS

SEQ ID NO: 16758 - protein, 34 aa, Artificial Sequence
  GFR-binding peptide
  MOD_RES (1)..(1): Xaa is C or S
  MOD_RES (15)..(16)..(17)..(18)..(19): Xaa is A or G
  MOD_RES (20)..(21)..(22)..(23): Xaa is A or G or is absent
XVPTRLSAISILYLXXXXXXXXXLKNYQDMVVES

SEQ ID NO: 16759 - protein, 38 aa, Artificial Sequence
  GFR-binding peptide
  MOD_RES (5)..(6)..(37): Xaa is C or S
SASPXXVPQDLSPISILFIVGRTPKVYKQYEMVVKSXK

SEQ ID NO: 16760 - protein, 41 aa, Artificial Sequence
  GFR-binding peptide
  MOD_RES (5)..(6)..(38)..(40): Xaa is C or S
VPKPXXAPTKLEPLTVLYYDDSSNVIEQLSNNMVVRSXGXH

SEQ ID NO: 16761 - protein, 36 aa, Artificial Sequence
  GFR-binding peptide
  MOD_RES (1)..(33)..(35): Xaa is C or S
XVPTRLEPLPIVYYDSANNVVEQLSNDMVVESXGXR

SEQ ID NO: 16762 - protein, 36 aa, Artificial Sequence
  GFR-binding peptide
  MOD_RES (3)..(4): Xaa is C or S
  MOD_RES (18)..(19)..(20)..(21)..(22): Xaa is A or G
  MOD_RES (23)..(24)..(25)..(26): Xaa is A or G or is absent
KPXXAPTKLSPISVLFIXXXXXXXXXYKQYENMVVR

SEQ ID NO: 16763 - protein, 39 aa, Artificial Sequence
  GFR-binding peptide
  MOD_RES (4)..(5)..(39): Xaa is C or S
  MOD_RES (19)..(20)..(21)..(22)..(23): Xaa is A or G
  MOD_RES (24)..(25)..(26)..(27): Xaa is A or G or is absent
PPTXXVPTRLSPISILFIXXXXXXXXXYKQYEDMVVESX

SEQ ID NO: 16764 - protein, 35 aa, Artificial Sequence
  GFR-binding peptide
  MOD_RES (1)..(2)..(35): Xaa is C or S
  MOD_RES (16)..(17)..(18)..(19)..(20): Xaa is A or G
  MOD_RES (21)..(22)..(23)..(24): Xaa is A or G or is absent
XXVPQALEPLTILYYXXXXXXXXXEQLSNMIVRSX

SEQ ID NO: 16765 - protein, 37 aa, Artificial Sequence; identical to SEQ ID NO: 9463
  GFR-binding peptide
  MOD_RES (2)..(3)..(36): Xaa is C or S
  MOD_RES (17)..(18)..(19)..(20)..(21): Xaa is A or G
  MOD_RES (22)..(23)..(24)..(25): Xaa is A or G or is absent

SEQ ID NO: 16766 - protein, 34 aa, Artificial Sequence
  GFR-binding peptide
  MOD_RES (3)..(4): Xaa is C or S
SPXXVSQDLEPLPIVYYIGKTPKIEQLSNMIVKS

SEQ ID NO: 16767 - protein, 34 aa, Artificial Sequence
  GFR-binding peptide
  MOD_RES (1)..(1): Xaa is C or S
  MOD_RES (15)..(16)..(17)..(18)..(19): Xaa is A or G
  MOD_RES (20)..(21)..(22)..(23): Xaa is A or G or is absent
XVPTRLNAISILYFXXXXXXXXXLKKYRDMVVES

SEQ ID NO: 16768 - protein, 33 aa, Artificial Sequence
  GFR-binding peptide
  MOD_RES (1)..(33): Xaa is C or S
XVPTRLEPLTILYYDSANNVVEQLSNDMVVESX

SEQ ID NO: 16769 - protein, 34 aa, Artificial Sequence; identical to SEQ ID NO: 9466
  GFR-binding peptide
  MOD_RES (3)..(4): Xaa is C or S

SEQ ID NO: 16770 - protein, 41 aa, Artificial Sequence; identical to SEQ ID NO: 9467
  GFR-binding peptide
  MOD_RES (5)..(6)..(39)..(41): Xaa is C or S
  MOD_RES (20)..(21)..(22)..(23)..(24): Xaa is A or G
  MOD_RES (25)..(26)..(27)..(28): Xaa is A or G or is absent

SEQ ID NO: 16771 - protein, 36 aa, Artificial Sequence; identical to SEQ ID NO: 9468
  GFR-binding peptide
  MOD_RES (3)..(4)..(35): Xaa is C or S

SEQ ID NO: 16772 - protein, 39 aa, Artificial Sequence
  GFR-binding peptide
  MOD_RES (6)..(7)..(39): Xaa is C or S
STPPTXXVPTRLNAISILYFDSANNVVLKKYRDMVVESX

SEQ ID NO: 16773 - protein, 35 aa, Artificial Sequence
  GFR-binding peptide
  MOD_RES (2)..(3): Xaa is C or S
  MOD_RES (17)..(18)..(19)..(20)..(21): Xaa is A or G
  MOD_RES (22)..(23)..(24)..(25): Xaa is A or G or is absent
AXXVPTELEPLTMLYYXXXXXXXXXEQLSNDMVVE

SEQ ID NO: 16774 - protein, 40 aa, Artificial Sequence
  GFR-binding peptide
  MOD_RES (6)..(38)..(40): Xaa is C or S
VTKPTXAPTKLEPLPVVYYDDSSNVIEQLSNNMVVRSXGX

SEQ ID NO: 16775 - protein, 39 aa, Artificial Sequence; identical to SEQ ID NO: 9473
  GFR-binding peptide
  MOD_RES (6)..(7): Xaa is C or S
  MOD_RES (21)..(22)..(23)..(24)..(25): Xaa is A or G
  MOD_RES (26)..(27)..(28)..(29): Xaa is A or G or is absent

SEQ ID NO: 16776 - protein, 35 aa, Artificial Sequence; identical to SEQ ID NO: 9474
  GFR-binding peptide
  MOD_RES (2)..(3)..(34): Xaa is C or S

SEQ ID NO: 16777 - protein, 39 aa, Artificial Sequence
  GFR-binding peptide
  MOD_RES (4)..(5)..(39): Xaa is C or S
  MOD_RES (19)..(20)..(21)..(22)..(23): Xaa is A or G
  MOD_RES (24)..(25)..(26)..(27): Xaa is A or G or is absent
PKAXXVPTELSPISMLFIXXXXXXXXXYKQYEEMVVEGX

SEQ ID NO: 16778 - protein, 34 aa, Artificial Sequence
  GFR-binding peptide
  MOD_RES (1)..(33): Xaa is C or S
XVPTELEPLTMLYYDEYDKVVEQLSNEMVVEGXG

SEQ ID NO: 16779 - protein, 37 aa, Artificial Sequence
  GFR-binding peptide
  MOD_RES (3)..(4)..(37): Xaa is C or S
  MOD_RES (18)..(19)..(20)..(21)..(22): Xaa is A or G
  MOD_RES (23)..(24)..(25)..(26): Xaa is A or G or is absent
APXXVPQALEPLTILYYXXXXXXXXXEQLSNMIVRSX

SEQ ID NO: 16780 - protein, 42 aa, Artificial Sequence
  GFR-binding peptide
  MOD_RES (5)..(6)..(40)..(42): Xaa is C or S
  MOD_RES (20)..(21)..(22)..(23)..(24): Xaa is A or G
  MOD_RES (25)..(26)..(27)..(28): Xaa is A or G or is absent
VPKPXXAPTKLEPLTVLYYXXXXXXXXXEQLSNNMVVRSXGX

SEQ ID NO: 16781 - protein, 40 aa, Artificial Sequence
  GFR-binding peptide
  MOD_RES (5)..(37)..(39): Xaa is C or S
TKPTXAPTKLSPISVLFIDDSSNVIYKQYENMVVRSXGXH

SEQ ID NO: 16782 - protein, 38 aa, Artificial Sequence
  GFR-binding peptide
  MOD_RES (3)..(4)..(38): Xaa is C or S
  MOD_RES (18)..(19)..(20)..(21)..(22): Xaa is A or G
  MOD_RES (23)..(24)..(25)..(26): Xaa is A or G or is absent
PTXXVPTRLEPLTILYYXXXXXXXXXEQLSNDMVVESX

SEQ ID NO: 16783 - protein, 30 aa, Artificial Sequence
  GFR-binding peptide
APTKLSPISVLFIDDSSNVIYKQYENMVVR

SEQ ID NO: 16784 - protein, 37 aa, Artificial Sequence
  GFR-binding peptide
  MOD_RES (4)..(5): Xaa is C or S
  MOD_RES (19)..(20)..(21)..(22)..(23): Xaa is A or G
  MOD_RES (24)..(25)..(26)..(27): Xaa is A or G or is absent
ASPXXVPQDLEPLTILYYXXXXXXXXXEQLSNMVVKS

SEQ ID NO: 16785 - protein, 35 aa, Artificial Sequence
  GFR-binding peptide
  MOD_RES (32)..(34): Xaa is C or S
VPTRLEPLTILYYDSANNVVEQLSNDMVVESXGXR

SEQ ID NO: 16786 - protein, 41 aa, Artificial Sequence; identical to SEQ ID NO: 9485
  GFR-binding peptide
  MOD_RES (3)..(4)..(38)..(40): Xaa is C or S
  MOD_RES (18)..(19)..(20)..(21)..(22): Xaa is A or G
  MOD_RES (23)..(24)..(25)..(26): Xaa is A or G or is absent

SEQ ID NO: 16787 - protein, 36 aa, Artificial Sequence; identical to SEQ ID NO: 9488
  GFR-binding peptide
  MOD_RES (5)..(5): Xaa is C or S

SEQ ID NO: 16788 - protein, 34 aa, Artificial Sequence
  GFR-binding peptide
  MOD_RES (32)..(34): Xaa is C or S
VPTRLEPLTILYYDSANNVVEQLSNDMVVESXGX

SEQ ID NO: 16789 - protein, 36 aa, Artificial Sequence
  GFR-binding peptide
  MOD_RES (1)..(2)..(36): Xaa is C or S
  MOD_RES (16)..(17)..(18)..(19)..(20): Xaa is A or G
  MOD_RES (21)..(22)..(23)..(24): Xaa is A or G or is absent
XXVPTELEPLTMLYYXXXXXXXXXEQLSNDMVVEGX

SEQ ID NO: 16790 - protein, 34 aa, Artificial Sequence; identical to SEQ ID NO: 9490
  GFR-binding peptide
  MOD_RES (2)..(3): Xaa is C or S

SEQ ID NO: 16791 - protein, 40 aa, Artificial Sequence; identical to SEQ ID NO: 9492
  GFR-binding peptide
  MOD_RES (2)..(3)..(37)..(39): Xaa is C or S
  MOD_RES (17)..(18)..(19)..(20)..(21): Xaa is A or G
  MOD_RES (22)..(23)..(24)..(25): Xaa is A or G or is absent

SEQ ID NO: 16792 - protein, 39 aa, Artificial Sequence
  GFR-binding peptide
  MOD_RES (3)..(37)..(39): Xaa is C or S
  MOD_RES (17)..(18)..(19)..(20)..(21): Xaa is A or G
  MOD_RES (22)..(23)..(24)..(25): Xaa is A or G or is absent
PTXAPTKLEPLPVVYYXXXXXXXXXEQLSNNMVVRSXGX

SEQ ID NO: 16793 - protein, 37 aa, Artificial Sequence
  GFR-binding peptide
  MOD_RES (3)..(4): Xaa is C or S
  MOD_RES (18)..(19)..(20)..(21)..(22): Xaa is A or G
  MOD_RES (23)..(24)..(25)..(26): Xaa is A or G or is absent
KAXXVPTELEPLTMLYYXXXXXXXXXEQLSNDMVVEG

SEQ ID NO: 16794 - protein, 40 aa, Artificial Sequence; identical to SEQ ID NO: 9493
  GFR-binding peptide
  MOD_RES (3)..(4)..(38)..(40): Xaa is C or S
  MOD_RES (18)..(19)..(20)..(21)..(22): Xaa is A or G
  MOD_RES (23)..(24)..(25)..(26): Xaa is A or G or is absent

SEQ ID NO: 16795 - protein, 38 aa, Artificial Sequence
  GFR-binding peptide
  MOD_RES (5)..(37): Xaa is C or S
TKPTXAPTKLSPISVLFIDDSSNVIYKQYENMVVRSXG

SEQ ID NO: 16796 - protein, 34 aa, Artificial Sequence; identical to SEQ ID NO: 9496
  GFR-binding peptide
  MOD_RES (1)..(2): Xaa is C or S
  MOD_RES (16)..(17)..(18)..(19)..(20): Xaa is A or G
  MOD_RES (21)..(22)..(23)..(24): Xaa is A or G or is absent

SEQ ID NO: 16797 - protein, 34 aa, Artificial Sequence
  GFR-binding peptide
  MOD_RES (3)..(4): Xaa is C or S
SPXXVPQDLSPISILFIVGRTPKVYKQYEMVVKS

SEQ ID NO: 16798 - protein, 34 aa, Artificial Sequence; identical to SEQ ID NO: 9499
  GFR-binding peptide
  MOD_RES (34)..(34): Xaa is C or S
  MOD_RES (14)..(15)..(16)..(17)..(18): Xaa is A or G
  MOD_RES (19)..(20)..(21)..(22): Xaa is A or G or is absent

SEQ ID NO: 16799 - protein, 36 aa, Artificial Sequence; identical to SEQ ID NO: 9501
  GFR-binding peptide
  MOD_RES (3)..(4): Xaa is C or S
  MOD_RES (18)..(19)..(20)..(21)..(22): Xaa is A or G
  MOD_RES (23)..(24)..(25)..(26): Xaa is A or G or is absent

SEQ ID NO: 16800 - protein, 43 aa, Artificial Sequence; identical to SEQ ID NO: 9503
  GFR-binding peptide
  MOD_RES (6)..(7)..(40)..(42): Xaa is C or S
  MOD_RES (21)..(22)..(23)..(24)..(25): Xaa is A or G
  MOD_RES (26)..(27)..(28)..(29): Xaa is A or G or is absent

SEQ ID NO: 16801 - protein, 35 aa, Artificial Sequence
  GFR-binding peptide
  MOD_RES (2)..(3): Xaa is C or S
  MOD_RES (17)..(18)..(19)..(20)..(21): Xaa is A or G
  MOD_RES (22)..(23)..(24)..(25): Xaa is A or G or is absent
AXXVPTELEPLPMVYYXXXXXXXXXEQLSNDMVVE

SEQ ID NO: 16802 - protein, 41 aa, Artificial Sequence; identical to SEQ ID NO: 9504
  GFR-binding peptide
  MOD_RES (6)..(7)..(38)..(40): Xaa is C or S

SEQ ID NO: 16803 - protein, 35 aa, Artificial Sequence; identical to SEQ ID NO: 9505
  GFR-binding peptide
  MOD_RES (4)..(5): Xaa is C or S

SEQ ID NO: 16804 - protein, 41 aa, Artificial Sequence
  GFR-binding peptide
  MOD_RES (7)..(39)..(41): Xaa is C or S
HVTKPTXAPTKLEPLTVLYYDDSSNVIEQLSNNMVVRSXGX

SEQ ID NO: 16805 - protein, 37 aa, Artificial Sequence
  GFR-binding peptide
  MOD_RES (1)..(35)..(37): Xaa is C or S
  MOD_RES (15)..(16)..(17)..(18)..(19): Xaa is A or G
  MOD_RES (20)..(21)..(22)..(23): Xaa is A or G or is absent
XAPTQLEPLPVVYYXXXXXXXXXEQLSNNMVVRAXGX

SEQ ID NO: 16806 - protein, 38 aa, Artificial Sequence
  GFR-binding peptide
  MOD_RES (3)..(4)..(38): Xaa is C or S
  MOD_RES (18)..(19)..(20)..(21)..(22): Xaa is A or G
  MOD_RES (23)..(24)..(25)..(26): Xaa is A or G or is absent
KPXXAPTQLEPLPVVYYXXXXXXXXXEQLSNNMVVRAX

SEQ ID NO: 16807 - protein, 35 aa, Artificial Sequence; identical to SEQ ID NO: 9506
  GFR-binding peptide
  MOD_RES (1)..(2)..(34): Xaa is C or S

SEQ ID NO: 16808 - protein, 34 aa, Artificial Sequence
  GFR-binding peptide
  MOD_RES (33)..(33): Xaa is C or S
  MOD_RES (14)..(15)..(16)..(17)..(18): Xaa is A or G
  MOD_RES (19)..(20)..(21)..(22): Xaa is A or G or is absent
VPQALEPLPIVYYXXXXXXXXXEQLSNMIVRSXK

SEQ ID NO: 16809 - protein, 39 aa, Artificial Sequence; identical to SEQ ID NO: 9509
  GFR-binding peptide
  MOD_RES (5)..(6)..(39): Xaa is C or S
  MOD_RES (20)..(21)..(22)..(23)..(24): Xaa is A or G
  MOD_RES (25)..(26)..(27)..(28): Xaa is A or G or is absent

SEQ ID NO: 16810 - protein, 41 aa, Artificial Sequence
  GFR-binding peptide
  MOD_RES (4)..(5)..(39)..(41): Xaa is C or S
  MOD_RES (19)..(20)..(21)..(22)..(23): Xaa is A or G
  MOD_RES (24)..(25)..(26)..(27): Xaa is A or G or is absent
PPTXXVPTRLNAISILYFXXXXXXXXXLKKYRDMVVESXGX

SEQ ID NO: 16811 - protein, 32 aa, Artificial Sequence
  GFR-binding peptide
  MOD_RES (1)..(1): Xaa is C or S
XAPTKLSPISVLFIDDSSNVIYKQYENMVVRS

SEQ ID NO: 16812 - protein, 33 aa, Artificial Sequence; identical to SEQ ID NO: 9515
  GFR-binding peptide
  MOD_RES (33)..(33): Xaa is C or S
  MOD_RES (14)..(15)..(16)..(17)..(18): Xaa is A or G
  MOD_RES (19)..(20)..(21)..(22): Xaa is A or G or is absent

SEQ ID NO: 16813 - protein, 40 aa, Artificial Sequence
  GFR-binding peptide
  MOD_RES (5)..(6)..(38)..(40): Xaa is C or S
VPKPXXAPTKLEPLTVLYYDDSSNVIEQLSNNMVVRSXGX

SEQ ID NO: 16814 - protein, 38 aa, Artificial Sequence
  GFR-binding peptide
  MOD_RES (2)..(3)..(37): Xaa is C or S
  MOD_RES (17)..(18)..(19)..(20)..(21): Xaa is A or G
  MOD_RES (22)..(23)..(24)..(25): Xaa is A or G or is absent
TXXVPTRLSAISILYLXXXXXXXXXLKNYQDMVVESXG

SEQ ID NO: 16815 - protein, 38 aa, Artificial Sequence
  GFR-binding peptide
  MOD_RES (4)..(5): Xaa is C or S
  MOD_RES (19)..(20)..(21)..(22)..(23): Xaa is A or G
  MOD_RES (24)..(25)..(26)..(27): Xaa is A or G or is absent
PKPXXAPTQLEPLTVLYYXXXXXXXXXEQLSNNMVVRA

SEQ ID NO: 16816 - protein, 35 aa, Artificial Sequence
  GFR-binding peptide
  MOD_RES (32)..(34): Xaa is C or S
APTKLEPLTVLYYDDSSNVIEQLSNNMVVRSXGXH

SEQ ID NO: 16817 - protein, 36 aa, Artificial Sequence; identical to SEQ ID NO: 9520
  GFR-binding peptide
  MOD_RES (34)..(36): Xaa is C or S
  MOD_RES (14)..(15)..(16)..(17)..(18): Xaa is A or G
  MOD_RES (19)..(20)..(21)..(22): Xaa is A or G or is absent

SEQ ID NO: 16818 - protein, 42 aa, Artificial Sequence; identical to SEQ ID NO: 9522
  GFR-binding peptide
  MOD_RES (4)..(5)..(39)..(41): Xaa is C or S
  MOD_RES (19)..(20)..(21)..(22)..(23): Xaa is A or G
  MOD_RES (24)..(25)..(26)..(27): Xaa is A or G or is absent

SEQ ID NO: 16819 - protein, 33 aa, Artificial Sequence
  GFR-binding peptide
  MOD_RES (1)..(33): Xaa is C or S
XVPTELEPLTMLYYDENEKVVEQLSNDMVVEGX

SEQ ID NO: 16820 - protein, 32 aa, Artificial Sequence; identical to SEQ ID NO: 9523
  GFR-binding peptide
  MOD_RES (31)..(31): Xaa is C or S

SEQ ID NO: 16821 - protein, 34 aa, Artificial Sequence
  GFR-binding peptide
  MOD_RES (2)..(3): Xaa is C or S
PXXAPTQLEPLTVLYYDDSSNVIEQLSNNMVVRA

SEQ ID NO: 16822 - protein, 36 aa, Artificial Sequence
  GFR-binding peptide
  MOD_RES (34)..(36): Xaa is C or S
  MOD_RES (14)..(15)..(16)..(17)..(18): Xaa is A or G
  MOD_RES (19)..(20)..(21)..(22): Xaa is A or G or is absent
VPTELEPLTMLYYXXXXXXXXXEQLSNDMVVEGXGX

SEQ ID NO: 16823 - protein, 39 aa, Artificial Sequence; identical to SEQ ID NO: 9525
  GFR-binding peptide
  MOD_RES (2)..(3)..(36)..(38): Xaa is C or S
  MOD_RES (17)..(18)..(19)..(20)..(21): Xaa is A or G
  MOD_RES (22)..(23)..(24)..(25): Xaa is A or G or is absent

SEQ ID NO: 16824 - protein, 38 aa, Artificial Sequence; identical to SEQ ID NO: 9526
  GFR-binding peptide
  MOD_RES (3)..(4)..(38): Xaa is C or S
  MOD_RES (18)..(19)..(20)..(21)..(22): Xaa is A or G
  MOD_RES (23)..(24)..(25)..(26): Xaa is A or G or is absent

SEQ ID NO: 16825 - protein, 33 aa, Artificial Sequence
  GFR-binding peptide
  MOD_RES (14)..(15)..(16)..(17)..(18): Xaa is A or G
  MOD_RES (19)..(20)..(21)..(22): Xaa is A or G or is absent
VPTRLSPISILFIXXXXXXXXXYKQYEDMVVES

SEQ ID NO: 16826 - protein, 38 aa, Artificial Sequence; identical to SEQ ID NO: 9529
  GFR-binding peptide
  MOD_RES (3)..(37): Xaa is C or S
  MOD_RES (17)..(18)..(19)..(20)..(21): Xaa is A or G
  MOD_RES (22)..(23)..(24)..(25): Xaa is A or G or is absent

SEQ ID NO: 16827 - protein, 35 aa, Artificial Sequence
  GFR-binding peptide
  MOD_RES (3)..(4): Xaa is C or S
KPXXAPTQLEPLPVVYYDDSSNVIEQLSNNMVVRA

SEQ ID NO: 16828 - protein, 39 aa, Artificial Sequence
  GFR-binding peptide
  MOD_RES (6)..(7): Xaa is C or S
  MOD_RES (21)..(22)..(23)..(24)..(25): Xaa is A or G
  MOD_RES (26)..(27)..(28)..(29): Xaa is A or G or is absent
ASASPXXVSQDLSPISILFIXXXXXXXXXYKQYEMIVKS

SEQ ID NO: 16829 - protein, 40 aa, Artificial Sequence; identical to SEQ ID NO: 9532
  GFR-binding peptide
  MOD_RES (2)..(3)..(37)..(39): Xaa is C or S
  MOD_RES (17)..(18)..(19)..(20)..(21): Xaa is A or G
  MOD_RES (22)..(23)..(24)..(25): Xaa is A or G or is absent

SEQ ID NO: 16830 - protein, 38 aa, Artificial Sequence; identical to SEQ ID NO: 9536
  GFR-binding peptide
  MOD_RES (6)..(7): Xaa is C or S

SEQ ID NO: 16831 - protein, 39 aa, Artificial Sequence; identical to SEQ ID NO: 9537
  GFR-binding peptide
  MOD_RES (5)..(6): Xaa is C or S
  MOD_RES (20)..(21)..(22)..(23)..(24): Xaa is A or G
  MOD_RES (25)..(26)..(27)..(28): Xaa is A or G or is absent

SEQ ID NO: 16832 - protein, 37 aa, Artificial Sequence
  GFR-binding peptide
  MOD_RES (2)..(3)..(34)..(36): Xaa is C or S
PXXVPQALSPISILFIVGRKPKVYKQYEMIVRSXKXS

SEQ ID NO: 16833 - protein, 38 aa, Artificial Sequence
  GFR-binding peptide
  MOD_RES (5)..(6): Xaa is C or S
  MOD_RES (20)..(21)..(22)..(23)..(24): Xaa is A or G
  MOD_RES (25)..(26)..(27)..(28): Xaa is A or G or is absent
SASPXXVSQDLSPISILFIXXXXXXXXXYKQYEMIVKS

SEQ ID NO: 16834 - protein, 33 aa, Artificial Sequence
  GFR-binding peptide
  MOD_RES (1)..(2): Xaa is C or S
XXVPTELEPLPMVYYDENEKVVEQLSNDMVVEG

SEQ ID NO: 16835 - protein, 40 aa, Artificial Sequence; identical to SEQ ID NO: 9538
  GFR-binding peptide
  MOD_RES (5)..(6)..(37)..(39): Xaa is C or S

SEQ ID NO: 16836 - protein, 37 aa, Artificial Sequence; identical to SEQ ID NO: 9539
  GFR-binding peptide
  MOD_RES (4)..(36): Xaa is C or S

SEQ ID NO: 16837 - protein, 40 aa, Artificial Sequence; identical to SEQ ID NO: 9541
  GFR-binding peptide
  MOD_RES (4)..(5)..(39): Xaa is C or S
  MOD_RES (19)..(20)..(21)..(22)..(23): Xaa is A or G
  MOD_RES (24)..(25)..(26)..(27): Xaa is A or G or is absent

SEQ ID NO: 16838 - protein, 38 aa, Artificial Sequence
  GFR-binding peptide
  MOD_RES (6)..(7): Xaa is C or S
SIPKAXXVPTELSPISMLFIDEYDKVVYKQYEEMVVEG

SEQ ID NO: 16839 - protein, 37 aa, Artificial Sequence
  GFR-binding peptide
  MOD_RES (6)..(7): Xaa is C or S
YVPKPXXAPTKLSPISVLFIDDSSNVIYKQYENMVVR

SEQ ID NO: 16840 - protein, 41 aa, Artificial Sequence
  GFR-binding peptide
  MOD_RES (3)..(4)..(38)..(40): Xaa is C or S
  MOD_RES (18)..(19)..(20)..(21)..(22): Xaa is A or G
  MOD_RES (23)..(24)..(25)..(26): Xaa is A or G or is absent
KAXXVPTELEPLPMVYYXXXXXXXXXEQLSNDMVVEGXGXR

SEQ ID NO: 16841 - protein, 39 aa, Artificial Sequence; identical to SEQ ID NO: 9546
  GFR-binding peptide
  MOD_RES (6)..(7)..(38): Xaa is C or S

SEQ ID NO: 16842 - protein, 36 aa, Artificial Sequence
  GFR-binding peptide
  MOD_RES (4)..(4): Xaa is C or S
  MOD_RES (18)..(19)..(20)..(21)..(22): Xaa is A or G
  MOD_RES (23)..(24)..(25)..(26): Xaa is A or G or is absent
KPTXAPTKLEPLTVLYYXXXXXXXXXEQLSNNMVVR

SEQ ID NO: 16843 - protein, 37 aa, Artificial Sequence
  GFR-binding peptide
  MOD_RES (5)..(37): Xaa is C or S
TKPTXAPTKLSPISVLFIDDSSNVIYKQYENMVVRSX

SEQ ID NO: 16844 - protein, 41 aa, Artificial Sequence; identical to SEQ ID NO: 9549
  GFR-binding peptide
  MOD_RES (4)..(5)..(38)..(40): Xaa is C or S
  MOD_RES (19)..(20)..(21)..(22)..(23): Xaa is A or G
  MOD_RES (24)..(25)..(26)..(27): Xaa is A or G or is absent

SEQ ID NO: 16845 - protein, 35 aa, Artificial Sequence
  GFR-binding peptide
  MOD_RES (5)..(5): Xaa is C or S
TKPTXAPTKLEPLTVLYYDDSSNVIEQLSNNMVVR

SEQ ID NO: 16846 - protein, 36 aa, Artificial Sequence
  GFR-binding peptide
  MOD_RES (3)..(4)..(36): Xaa is C or S
PTXXVPTRLNAISILYFDSANNVVLKKYRDMVVESX

SEQ ID NO: 16847 - protein, 38 aa, Artificial Sequence
  GFR-binding peptide
  MOD_RES (1)..(35)..(37): Xaa is C or S
  MOD_RES (15)..(16)..(17)..(18)..(19): Xaa is A or G
  MOD_RES (20)..(21)..(22)..(23): Xaa is A or G or is absent
XAPTQLEPLTVLYYXXXXXXXXXEQLSNNMVVRAXGXH

SEQ ID NO: 16848 - protein, 42 aa, Artificial Sequence
  GFR-binding peptide
  MOD_RES (6)..(40)..(42): Xaa is C or S
  MOD_RES (20)..(21)..(22)..(23)..(24): Xaa is A or G
  MOD_RES (25)..(26)..(27)..(28): Xaa is A or G or is absent
VTKPTXAPTKLSPISVLFIXXXXXXXXXYKQYENMVVRSXGX

SEQ ID NO: 16849 - protein, 40 aa, Artificial Sequence
  GFR-binding peptide
  MOD_RES (4)..(5)..(39): Xaa is C or S
  MOD_RES (19)..(20)..(21)..(22)..(23): Xaa is A or G
  MOD_RES (24)..(25)..(26)..(27): Xaa is A or G or is absent
PPTXXVPTRLEPLPIVYYXXXXXXXXXEQLSNDMVVESXG

SEQ ID NO: 16850 - protein, 39 aa, Artificial Sequence
  GFR-binding peptide
  MOD_RES (5)..(6)..(38): Xaa is C or S
TPPTXXVPTRLEPLPIVYYDSANNVVEQLSNDMVVESXG

SEQ ID NO: 16851 - protein, 35 aa, Artificial Sequence
  GFR-binding peptide
  MOD_RES (1)..(2)..(34): Xaa is C or S
XXAPTKLSPISVLFIDDSSNVIYKQYENMVVRSXG

SEQ ID NO: 16852 - protein, 34 aa, Artificial Sequence
  GFR-binding peptide
  MOD_RES (34)..(34): Xaa is C or S
  MOD_RES (14)..(15)..(16)..(17)..(18): Xaa is A or G
  MOD_RES (19)..(20)..(21)..(22): Xaa is A or G or is absent
APTQLEPLTVLYYXXXXXXXXXEQLSNNMVVRAX

SEQ ID NO: 16853 - protein, 34 aa, Artificial Sequence; identical to SEQ ID NO: 9559
  GFR-binding peptide
  MOD_RES (1)..(32)..(34): Xaa is C or S

SEQ ID NO: 16854 - protein, 33 aa, Artificial Sequence; identical to SEQ ID NO: 9560
  GFR-binding peptide
  MOD_RES (14)..(15)..(16)..(17)..(18): Xaa is A or G
  MOD_RES (19)..(20)..(21)..(22): Xaa is A or G or is absent

SEQ ID NO: 16855 - protein, 36 aa, Artificial Sequence
  GFR-binding peptide
  MOD_RES (34)..(36): Xaa is C or S
  MOD_RES (14)..(15)..(16)..(17)..(18): Xaa is A or G
  MOD_RES (19)..(20)..(21)..(22): Xaa is A or G or is absent
VPTELEPLPMVYYXXXXXXXXXEQLSNDMVVEGXGX

SEQ ID NO: 16856 - protein, 37 aa, Artificial Sequence
  GFR-binding peptide
  MOD_RES (5)..(6): Xaa is C or S
TPPTXXVPTRLSAISILYLDSANNVVLKNYQDMVVES

SEQ ID NO: 16857 - protein, 37 aa, Artificial Sequence
  GFR-binding peptide
  MOD_RES (6)..(7): Xaa is C or S
KIPKAXXVPTELEPLTMLYYDENEKVVEQLSNDMVVE

SEQ ID NO: 16858 - protein, 40 aa, Artificial Sequence; identical to SEQ ID NO: 9562
  GFR-binding peptide
  MOD_RES (5)..(6)..(39): Xaa is C or S
  MOD_RES (20)..(21)..(22)..(23)..(24): Xaa is A or G
  MOD_RES (25)..(26)..(27)..(28): Xaa is A or G or is absent

SEQ ID NO: 16859 - protein, 33 aa, Artificial Sequence
  GFR-binding peptide
  MOD_RES (1)..(33): Xaa is C or S
XVPTRLEPLPIVYYDSANNVVEQLSNDMVVESX

SEQ ID NO: 16860 - protein, 33 aa, Artificial Sequence
  GFR-binding peptide
  MOD_RES (1)..(2)..(33): Xaa is C or S
XXVSQDLEPLPIVYYIGKTPKIEQLSNMIVKSX

SEQ ID NO: 16861 - protein, 43 aa, Artificial Sequence
  GFR-binding peptide
  MOD_RES (5)..(6)..(40)..(42): Xaa is C or S
  MOD_RES (20)..(21)..(22)..(23)..(24): Xaa is A or G
  MOD_RES (25)..(26)..(27)..(28): Xaa is A or G or is absent
TPPTXXVPTRLNAISILYFXXXXXXXXXLKKYRDMVVESXGXR

SEQ ID NO: 16862 - protein, 41 aa, Artificial Sequence
  GFR-binding peptide
  MOD_RES (6)..(7)..(39)..(41): Xaa is C or S
SIPKAXXVPTELEPLPMVYYDEYDKVVEQLSNEMVVEGXGX

SEQ ID NO: 16863 - protein, 40 aa, Artificial Sequence
  GFR-binding peptide
  MOD_RES (3)..(4)..(37)..(39): Xaa is C or S
  MOD_RES (18)..(19)..(20)..(21)..(22): Xaa is A or G
  MOD_RES (23)..(24)..(25)..(26): Xaa is A or G or is absent
SPXXVPQDLEPLPIVYYXXXXXXXXXEQLSNMVVKSXKXS

SEQ ID NO: 16864 - protein, 36 aa, Artificial Sequence
  GFR-binding peptide
  MOD_RES (1)..(2)..(34)..(36): Xaa is C or S
XXVPTELEPLTMLYYDENEKVVEQLSNDMVVEGXGX

SEQ ID NO: 16865 - protein, 36 aa, Artificial Sequence; identical to SEQ ID NO: 9571
  GFR-binding peptide
  MOD_RES (33)..(35): Xaa is C or S
  MOD_RES (14)..(15)..(16)..(17)..(18): Xaa is A or G
  MOD_RES (19)..(20)..(21)..(22): Xaa is A or G or is absent

SEQ ID NO: 16866 - protein, 31 aa, Artificial Sequence
  GFR-binding peptide
  MOD_RES (1)..(1): Xaa is C or S
XVPTRLSAISILYLDSANNVVLKNYQDMVVE

SEQ ID NO: 16867 - protein, 35 aa, Artificial Sequence
  GFR-binding peptide
  MOD_RES (1)..(2)..(35): Xaa is C or S
  MOD_RES (16)..(17)..(18)..(19)..(20): Xaa is A or G
  MOD_RES (21)..(22)..(23)..(24): Xaa is A or G or is absent
XXVSQDLSPISILFIXXXXXXXXXYKQYEMIVKSX

SEQ ID NO: 16868 - protein, 35 aa, Artificial Sequence
  GFR-binding peptide
  MOD_RES (1)..(2)..(35): Xaa is C or S
  MOD_RES (16)..(17)..(18)..(19)..(20): Xaa is A or G
  MOD_RES (21)..(22)..(23)..(24): Xaa is A or G or is absent
XXVPQDLEPLTILYYXXXXXXXXXEQLSNMVVKSX

SEQ ID NO: 16869 - protein, 33 aa, Artificial Sequence; identical to SEQ ID NO: 9572
  GFR-binding peptide
  MOD_RES (1)..(1): Xaa is C or S
  MOD_RES (15)..(16)..(17)..(18)..(19): Xaa is A or G
  MOD_RES (20)..(21)..(22)..(23): Xaa is A or G or is absent

SEQ ID NO: 16870 - protein, 38 aa, Artificial Sequence
  GFR-binding peptide
  MOD_RES (5)..(6)..(38): Xaa is C or S
TPPTXXVPTRLNAISILYFDSANNVVLKKYRDMVVESX

SEQ ID NO: 16871 - protein, 38 aa, Artificial Sequence
  GFR-binding peptide
  MOD_RES (3)..(4)..(36)..(38): Xaa is C or S
KPXXAPTQLSPISVLFIDDSSNVIYKQYENMVVRAXGX

SEQ ID NO: 16872 - protein, 38 aa, Artificial Sequence
  GFR-binding peptide
  MOD_RES (6)..(38): Xaa is C or S
VTKPTXAPTKLEPLPVVYYDDSSNVIEQLSNNMVVRSX

SEQ ID NO: 16873 - protein, 34 aa, Artificial Sequence
  GFR-binding peptide
  MOD_RES (34)..(34): Xaa is C or S
  MOD_RES (14)..(15)..(16)..(17)..(18): Xaa is A or G
  MOD_RES (19)..(20)..(21)..(22): Xaa is A or G or is absent
VPTELEPLTMLYYXXXXXXXXXEQLSNEMVVEGX

SEQ ID NO: 16874 - protein, 36 aa, Artificial Sequence
  GFR-binding peptide
  MOD_RES (3)..(4): Xaa is C or S
  MOD_RES (18)..(19)..(20)..(21)..(22): Xaa is A or G
  MOD_RES (23)..(24)..(25)..(26): Xaa is A or G or is absent
APXXVPQALEPLPIVYYXXXXXXXXXEQLSNMIVRS

SEQ ID NO: 16875 - protein, 40 aa, Artificial Sequence
  GFR-binding peptide
  MOD_RES (3)..(4)..(38)..(40): Xaa is C or S
  MOD_RES (18)..(19)..(20)..(21)..(22): Xaa is A or G
  MOD_RES (23)..(24)..(25)..(26): Xaa is A or G or is absent
KPXXAPTKLEPLTVLYYXXXXXXXXXEQLSNNMVVRSXGX

SEQ ID NO: 16876 - protein, 41 aa, Artificial Sequence; identical to SEQ ID NO: 9576
  GFR-binding peptide
  MOD_RES (3)..(4)..(38)..(40): Xaa is C or S
  MOD_RES (18)..(19)..(20)..(21)..(22): Xaa is A or G
  MOD_RES (23)..(24)..(25)..(26): Xaa is A or G or is absent

SEQ ID NO: 16877 - protein, 38 aa, Artificial Sequence; identical to SEQ ID NO: 9577
  GFR-binding peptide
  MOD_RES (4)..(5)..(37): Xaa is C or S

SEQ ID NO: 16878 - protein, 37 aa, Artificial Sequence
  GFR-binding peptide
  MOD_RES (5)..(6): Xaa is C or S
VPKPXXAPTKLEPLPVVYYDDSSNVIEQLSNNMVVRS

SEQ ID NO: 16879 - protein, 41 aa, Artificial Sequence; identical to SEQ ID NO: 9580
  GFR-binding peptide
  MOD_RES (6)..(7)..(41): Xaa is C or S
  MOD_RES (21)..(22)..(23)..(24)..(25): Xaa is A or G
  MOD_RES (26)..(27)..(28)..(29): Xaa is A or G or is absent

SEQ ID NO: 16880 - protein, 37 aa, Artificial Sequence; identical to SEQ ID NO: 9581
  GFR-binding peptide
  MOD_RES (4)..(5): Xaa is C or S
  MOD_RES (19)..(20)..(21)..(22)..(23): Xaa is A or G
  MOD_RES (24)..(25)..(26)..(27): Xaa is A or G or is absent

SEQ ID NO: 16881 - protein, 32 aa, Artificial Sequence
  GFR-binding peptide
  MOD_RES (14)..(15)..(16)..(17)..(18): Xaa is A or G
  MOD_RES (19)..(20)..(21)..(22): Xaa is A or G or is absent
APTQLEPLPVVYYXXXXXXXXXEQLSNNMVVR

SEQ ID NO: 16882 - protein, 35 aa, Artificial Sequence; identical to SEQ ID NO: 9586
  GFR-binding peptide
  MOD_RES (1)..(2)..(34): Xaa is C or S

SEQ ID NO: 16883 - protein, 43 aa, Artificial Sequence
  GFR-binding peptide
  MOD_RES (6)..(7)..(41)..(43): Xaa is C or S
  MOD_RES (21)..(22)..(23)..(24)..(25): Xaa is A or G
  MOD_RES (26)..(27)..(28)..(29): Xaa is A or G or is absent
YVPKPXXAPTKLEPLTVLYYXXXXXXXXXEQLSNNMVVRSXGX

SEQ ID NO: 16884 - protein, 36 aa, Artificial Sequence; identical to SEQ ID NO: 9591
  GFR-binding peptide
  MOD_RES (1)..(34)..(36): Xaa is C or S
  MOD_RES (15)..(16)..(17)..(18)..(19): Xaa is A or G
  MOD_RES (20)..(21)..(22)..(23): Xaa is A or G or is absent

SEQ ID NO: 16885 - protein, 32 aa, Artificial Sequence; identical to SEQ ID NO: 9595
  GFR-binding peptide
  MOD_RES (14)..(15)..(16)..(17)..(18): Xaa is A or G
  MOD_RES (19)..(20)..(21)..(22): Xaa is A or G or is absent

SEQ ID NO: 16886 - protein, 39 aa, Artificial Sequence
  GFR-binding peptide
  MOD_RES (4)..(5)..(39): Xaa is C or S
  MOD_RES (19)..(20)..(21)..(22)..(23): Xaa is A or G
  MOD_RES (24)..(25)..(26)..(27): Xaa is A or G or is absent
PKAXXVPTELEPLPMVYYXXXXXXXXXEQLSNDMVVEGX

SEQ ID NO: 16887 - protein, 38 aa, Artificial Sequence
  GFR-binding peptide
  MOD_RES (3)..(4)..(35)..(37): Xaa is C or S
APXXVPQALEPLTILYYVGRKPKVEQLSNMIVRSXKXS

SEQ ID NO: 16888 - protein, 36 aa, Artificial Sequence; identical to SEQ ID NO: 9596
  GFR-binding peptide
  MOD_RES (6)..(6): Xaa is C or S

SEQ ID NO: 16889 - protein, 42 aa, Artificial Sequence; identical to SEQ ID NO: 9598
  GFR-binding peptide
  MOD_RES (6)..(7)..(40)..(42): Xaa is C or S
  MOD_RES (21)..(22)..(23)..(24)..(25): Xaa is A or G
  MOD_RES (26)..(27)..(28)..(29): Xaa is A or G or is absent

SEQ ID NO: 16890 - protein, 40 aa, Artificial Sequence; identical to SEQ ID NO: 9600
  GFR-binding peptide
  MOD_RES (6)..(7)..(40): Xaa is C or S
  MOD_RES (21)..(22)..(23)..(24)..(25): Xaa is A or G
  MOD_RES (26)..(27)..(28)..(29): Xaa is A or G or is absent

SEQ ID NO: 16891 - protein, 38 aa, Artificial Sequence
  GFR-binding peptide
  MOD_RES (2)..(3)..(36)..(38): Xaa is C or S
  MOD_RES (17)..(18)..(19)..(20)..(21): Xaa is A or G
  MOD_RES (22)..(23)..(24)..(25): Xaa is A or G or is absent
PXXVPQALSPISILFIXXXXXXXXXYKQYEMIVRSXKX

SEQ ID NO: 16892 - protein, 33 aa, Artificial Sequence
  GFR-binding peptide
  MOD_RES (1)..(1): Xaa is C or S
  MOD_RES (15)..(16)..(17)..(18)..(19): Xaa is A or G
  MOD_RES (20)..(21)..(22)..(23): Xaa is A or G or is absent
XAPTQLEPLTVLYYXXXXXXXXXEQLSNNMVVR

SEQ ID NO: 16893 - protein, 37 aa, Artificial Sequence
  GFR-binding peptide
  MOD_RES (2)..(3)..(35)..(37): Xaa is C or S
AXXVPTELSPISMLFIDEYDKVVYKQYEEMVVEGXGX

SEQ ID NO: 16894 - protein, 41 aa, Artificial Sequence
  GFR-binding peptide
  MOD_RES (5)..(6)..(40): Xaa is C or S
  MOD_RES (20)..(21)..(22)..(23)..(24): Xaa is A or G
  MOD_RES (25)..(26)..(27)..(28): Xaa is A or G or is absent
TPPTXXVPTRLSPISILFIXXXXXXXXXYKQYEDMVVESXG

SEQ ID NO: 16895 - protein, 37 aa, Artificial Sequence
  GFR-binding peptide
  MOD_RES (2)..(3)..(35)..(37): Xaa is C or S
AXXVPTELEPLTMLYYDEYDKVVEQLSNEMVVEGXGX

SEQ ID NO: 16896 - protein, 33 aa, Artificial Sequence
  GFR-binding peptide
  MOD_RES (32)..(32): Xaa is C or S
VPTELEPLPMVYYDEYDKVVEQLSNEMVVEGXG

SEQ ID NO: 16897 - protein, 32 aa, Artificial Sequence
  GFR-binding peptide
  MOD_RES (14)..(15)..(16)..(17)..(18): Xaa is A or G
  MOD_RES (19)..(20)..(21)..(22): Xaa is A or G or is absent
VPQDLEPLTILYYXXXXXXXXXEQLSNMVVKS

SEQ ID NO: 16898 - protein, 37 aa, Artificial Sequence
  GFR-binding peptide
  MOD_RES (1)..(2)..(36): Xaa is C or S
  MOD_RES (16)..(17)..(18)..(19)..(20): Xaa is A or G
  MOD_RES (21)..(22)..(23)..(24): Xaa is A or G or is absent
XXVPTRLSAISILYLXXXXXXXXXLKNYQDMVVESXG

SEQ ID NO: 16899 - protein, 42 aa, Artificial Sequence; identical to SEQ ID NO: 9614
  GFR-binding peptide
  MOD_RES (6)..(7)..(41): Xaa is C or S
  MOD_RES (21)..(22)..(23)..(24)..(25): Xaa is A or G
  MOD_RES (26)..(27)..(28)..(29): Xaa is A or G or is absent

SEQ ID NO: 16900 - protein, 37 aa, Artificial Sequence
  GFR-binding peptide
  MOD_RES (4)..(36): Xaa is C or S
KPTXAPTKLEPLTVLYYDDSSNVIEQLSNNMVVRSXG

SEQ ID NO: 16901 - protein, 36 aa, Artificial Sequence
  GFR-binding peptide
  MOD_RES (2)..(3): Xaa is C or S
  MOD_RES (17)..(18)..(19)..(20)..(21): Xaa is A or G
  MOD_RES (22)..(23)..(24)..(25): Xaa is A or G or is absent
PXXAPTKLSPISVLFIXXXXXXXXXYKQYENMVVRS

SEQ ID NO: 16902 - protein, 35 aa, Artificial Sequence
  GFR-binding peptide
  MOD_RES (1)..(2): Xaa is C or S
  MOD_RES (16)..(17)..(18)..(19)..(20): Xaa is A or G
  MOD_RES (21)..(22)..(23)..(24): Xaa is A or G or is absent
XXVPTRLNAISILYFXXXXXXXXXLKKYRDMVVES

SEQ ID NO: 16903 - protein, 38 aa, Artificial Sequence
  GFR-binding peptide
  MOD_RES (5)..(6)..(38): Xaa is C or S
VPKPXXAPTKLSPISVLFIDDSSNVIYKQYENMVVRSX

SEQ ID NO: 16904 - protein, 40 aa, Artificial Sequence; identical to SEQ ID NO: 9622
  GFR-binding peptide
  MOD_RES (4)..(5)..(38)..(40): Xaa is C or S
  MOD_RES (19)..(20)..(21)..(22)..(23): Xaa is A or G
  MOD_RES (24)..(25)..(26)..(27): Xaa is A or G or is absent

SEQ ID NO: 16905 - protein, 42 aa, Artificial Sequence
  GFR-binding peptide
  MOD_RES (7)..(39)..(41): Xaa is C or S
HVTKPTXAPTKLEPLPVVYYDDSSNVIEQLSNNMVVRSXGXH

SEQ ID NO: 16906 - protein, 39 aa, Artificial Sequence
  GFR-binding peptide
  MOD_RES (1)..(2)..(36)..(38): Xaa is C or S
  MOD_RES (16)..(17)..(18)..(19)..(20): Xaa is A or G
  MOD_RES (21)..(22)..(23)..(24): Xaa is A or G or is absent
XXAPTKLEPLPVVYYXXXXXXXXXEQLSNNMVVRSXGXH

SEQ ID NO: 16907 - protein, 41 aa, Artificial Sequence
  GFR-binding peptide
  MOD_RES (6)..(7)..(41): Xaa is C or S
  MOD_RES (21)..(22)..(23)..(24)..(25): Xaa is A or G
  MOD_RES (26)..(27)..(28)..(29): Xaa is A or G or is absent
SIPKAXXVPTELEPLTMLYYXXXXXXXXXEQLSNEMVVEGX

SEQ ID NO: 16908 - protein, 37 aa, Artificial Sequence; identical to SEQ ID NO: 9624
  GFR-binding peptide
  MOD_RES (2)..(3)..(37): Xaa is C or S
  MOD_RES (17)..(18)..(19)..(20)..(21): Xaa is A or G
  MOD_RES (22)..(23)..(24)..(25): Xaa is A or G or is absent

SEQ ID NO: 16909 - protein, 38 aa, Artificial Sequence
  GFR-binding peptide
  MOD_RES (5)..(6): Xaa is C or S
  MOD_RES (20)..(21)..(22)..(23)..(24): Xaa is A or G
  MOD_RES (25)..(26)..(27)..(28): Xaa is A or G or is absent
TPPTXXVPTRLEPLTILYYXXXXXXXXXEQLSNDMVVE

SEQ ID NO: 16910 - protein, 39 aa, Artificial Sequence
  GFR-binding peptide
  MOD_RES (4)..(5)..(39): Xaa is C or S
  MOD_RES (19)..(20)..(21)..(22)..(23): Xaa is A or G
  MOD_RES (24)..(25)..(26)..(27): Xaa is A or G or is absent
PPTXXVPTRLNAISILYFXXXXXXXXXLKKYRDMVVESX

SEQ ID NO: 16911 - protein, 39 aa, Artificial Sequence
  GFR-binding peptide
  MOD_RES (4)..(5)..(37)..(39): Xaa is C or S
PKPXXAPTKLSPISVLFIDDSSNVIYKQYENMVVRSXGX

SEQ ID NO: 16912 - protein, 37 aa, Artificial Sequence
  GFR-binding peptide
  MOD_RES (6)..(7): Xaa is C or S
STPPTXXVPTRLSAISILYLDSANNVVLKNYQDMVVE

SEQ ID NO: 16913 - protein, 38 aa, Artificial Sequence
  GFR-binding peptide
  MOD_RES (3)..(4)..(36)..(38): Xaa is C or S
KPXXAPTQLEPLTVLYYDDSSNVIEQLSNNMVVRAXGX

SEQ ID NO: 16914 - protein, 42 aa, Artificial Sequence
  GFR-binding peptide
  MOD_RES (4)..(5)..(39)..(41): Xaa is C or S
  MOD_RES (19)..(20)..(21)..(22)..(23): Xaa is A or G
  MOD_RES (24)..(25)..(26)..(27): Xaa is A or G or is absent
PPTXXVPTRLSAISILYLXXXXXXXXXLKNYQDMVVESXGXR

SEQ ID NO: 16915 - protein, 33 aa, Artificial Sequence
  GFR-binding peptide
  MOD_RES (1)..(1): Xaa is C or S
  MOD_RES (15)..(16)..(17)..(18)..(19): Xaa is A or G
  MOD_RES (20)..(21)..(22)..(23): Xaa is A or G or is absent
XVPQDLEPLPIVYYXXXXXXXXXEQLSNMVVKS

SEQ ID NO: 16916 - protein, 37 aa, Artificial Sequence
  GFR-binding peptide
  MOD_RES (2)..(3)..(35)..(37): Xaa is C or S
AXXVPTELSPISMLFIDENEKVVYKQYEDMVVEGXGX

SEQ ID NO: 16917 - protein, 41 aa, Artificial Sequence
  GFR-binding peptide
  MOD_RES (4)..(38)..(40): Xaa is C or S
  MOD_RES (18)..(19)..(20)..(21)..(22): Xaa is A or G
  MOD_RES (23)..(24)..(25)..(26): Xaa is A or G or is absent
KPTXAPTKLEPLPVVYYXXXXXXXXXEQLSNNMVVRSXGXH

SEQ ID NO: 16918 - protein, 32 aa, Artificial Sequence; identical to SEQ ID NO: 9635
  GFR-binding peptide
  MOD_RES (1)..(32): Xaa is C or S

SEQ ID NO: 16919 - protein, 36 aa, Artificial Sequence
  GFR-binding peptide
  MOD_RES (1)..(2)..(34)..(36): Xaa is C or S
XXVPTELSPISMLFIDENEKVVYKQYEDMVVEGXGX

SEQ ID NO: 16920 - protein, 34 aa, Artificial Sequence; identical to SEQ ID NO: 9638
  GFR-binding peptide
  MOD_RES (1)..(1): Xaa is C or S
  MOD_RES (15)..(16)..(17)..(18)..(19): Xaa is A or G
  MOD_RES (20)..(21)..(22)..(23): Xaa is A or G or is absent

SEQ ID NO: 16921 - protein, 36 aa, Artificial Sequence
  GFR-binding peptide
  MOD_RES (4)..(36): Xaa is C or S
KPTXAPTKLEPLTVLYYDDSSNVIEQLSNNMVVRSX

SEQ ID NO: 16922 - protein, 36 aa, Artificial Sequence; identical to SEQ ID NO: 9641
  GFR-binding peptide
  MOD_RES (4)..(5): Xaa is C or S

SEQ ID NO: 16923 - protein, 39 aa, Artificial Sequence
  GFR-binding peptide
  MOD_RES (3)..(4)..(38): Xaa is C or S
  MOD_RES (18)..(19)..(20)..(21)..(22): Xaa is A or G
  MOD_RES (23)..(24)..(25)..(26): Xaa is A or G or is absent
PTXXVPTRLEPLPIVYYXXXXXXXXXEQLSNDMVVESXG

SEQ ID NO: 16924 - protein, 36 aa, Artificial Sequence
  GFR-binding peptide
  MOD_RES (1)..(35): Xaa is C or S
  MOD_RES (15)..(16)..(17)..(18)..(19): Xaa is A or G
  MOD_RES (20)..(21)..(22)..(23): Xaa is A or G or is absent
XVPTELEPLTMLYYXXXXXXXXXEQLSNEMVVEGXG

SEQ ID NO: 16925 - protein, 37 aa, Artificial Sequence
  GFR-binding peptide
  MOD_RES (6)..(7): Xaa is C or S
ASAAPXXVPQALEPLTILYYVGRKPKVEQLSNMIVRS

SEQ ID NO: 16926 - protein, 39 aa, Artificial Sequence; identical to SEQ ID NO: 9646
  GFR-binding peptide
  MOD_RES (2)..(3)..(37)..(39): Xaa is C or S
  MOD_RES (17)..(18)..(19)..(20)..(21): Xaa is A or G
  MOD_RES (22)..(23)..(24)..(25): Xaa is A or G or is absent

SEQ ID NO: 16927 - protein, 41 aa, Artificial Sequence; identical to SEQ ID NO: 9649
  GFR-binding peptide
  MOD_RES (5)..(6)..(38)..(40): Xaa is C or S

SEQ ID NO: 16928 - protein, 32 aa, Artificial Sequence; identical to SEQ ID NO: 9650
  GFR-binding peptide
  MOD_RES (31)..(31): Xaa is C or S

SEQ ID NO: 16929 - protein, 42 aa, Artificial Sequence; identical to SEQ ID NO: 9652
  GFR-binding peptide
  MOD_RES (6)..(7)..(40)..(42): Xaa is C or S
  MOD_RES (21)..(22)..(23)..(24)..(25): Xaa is A or G
  MOD_RES (26)..(27)..(28)..(29): Xaa is A or G or is absent

SEQ ID NO: 16930 - protein, 37 aa, Artificial Sequence
  GFR-binding peptide
  MOD_RES (4)..(5)..(37): Xaa is C or S
PPTXXVPTRLNAISILYFDSANNVVLKKYRDMVVESX

SEQ ID NO: 16931 - protein, 41 aa, Artificial Sequence
  GFR-binding peptide
  MOD_RES (4)..(5)..(38)..(40): Xaa is C or S
  MOD_RES (19)..(20)..(21)..(22)..(23): Xaa is A or G
  MOD_RES (24)..(25)..(26)..(27): Xaa is A or G or is absent
AAPXXVPQALEPLTILYYXXXXXXXXXEQLSNMIVRSXKXS

SEQ ID NO: 16932 - protein, 37 aa, Artificial Sequence
  GFR-binding peptide
  MOD_RES (3)..(4)..(35)..(37): Xaa is C or S
SPXXVPQDLEPLPIVYYVGRTPKVEQLSNMVVKSXKX

SEQ ID NO: 16933 - protein, 34 aa, Artificial Sequence
  GFR-binding peptide
  MOD_RES (31)..(33): Xaa is C or S
VSQDLEPLPIVYYIGKTPKIEQLSNMIVKSXKXS

SEQ ID NO: 16934 - protein, 41 aa, Artificial Sequence; identical to SEQ ID NO: 9655
  GFR-binding peptide
  MOD_RES (6)..(7)..(41): Xaa is C or S
  MOD_RES (21)..(22)..(23)..(24)..(25): Xaa is A or G
  MOD_RES (26)..(27)..(28)..(29): Xaa is A or G or is absent

SEQ ID NO: 16935 - protein, 37 aa, Artificial Sequence; identical to SEQ ID NO: 9656
  GFR-binding peptide
  MOD_RES (1)..(2)..(34)..(36): Xaa is C or S

SEQ ID NO: 16936 - protein, 42 aa, Artificial Sequence
  GFR-binding peptide
  MOD_RES (5)..(6)..(40)..(42): Xaa is C or S
  MOD_RES (20)..(21)..(22)..(23)..(24): Xaa is A or G
  MOD_RES (25)..(26)..(27)..(28): Xaa is A or G or is absent
IPKAXXVPTELSPISMLFIXXXXXXXXXYKQYEDMVVEGXGX

SEQ ID NO: 16937 - protein, 37 aa, Artificial Sequence
  GFR-binding peptide
  MOD_RES (1)..(35)..(37): Xaa is C or S
  MOD_RES (15)..(16)..(17)..(18)..(19): Xaa is A or G
  MOD_RES (20)..(21)..(22)..(23): Xaa is A or G or is absent
XAPTQLEPLTVLYYXXXXXXXXXEQLSNNMVVRAXGX

SEQ ID NO: 16938 - protein, 33 aa, Artificial Sequence
  GFR-binding peptide
  MOD_RES (33)..(33): Xaa is C or S
  MOD_RES (14)..(15)..(16)..(17)..(18): Xaa is A or G
  MOD_RES (19)..(20)..(21)..(22): Xaa is A or G or is absent
VPQALEPLTILYYXXXXXXXXXEQLSNMIVRSX

SEQ ID NO: 16939 - protein, 40 aa, Artificial Sequence
  GFR-binding peptide
  MOD_RES (3)..(4)..(38)..(40): Xaa is C or S
  MOD_RES (18)..(19)..(20)..(21)..(22): Xaa is A or G
  MOD_RES (23)..(24)..(25)..(26): Xaa is A or G or is absent
KAXXVPTELSPISMLFIXXXXXXXXXYKQYEDMVVEGXGX

SEQ ID NO: 16940 - protein, 41 aa, Artificial Sequence
  GFR-binding peptide
  MOD_RES (3)..(4)..(38)..(40): Xaa is C or S
  MOD_RES (18)..(19)..(20)..(21)..(22): Xaa is A or G
  MOD_RES (23)..(24)..(25)..(26): Xaa is A or G or is absent
KAXXVPTELSPISMLFIXXXXXXXXXYKQYEDMVVEGXGXR

SEQ ID NO: 16941 - protein, 35 aa, Artificial Sequence
  GFR-binding peptide
  MOD_RES (1)..(35): Xaa is C or S
  MOD_RES (15)..(16)..(17)..(18)..(19): Xaa is A or G
  MOD_RES (20)..(21)..(22)..(23): Xaa is A or G or is absent
XVPTELEPLTMLYYXXXXXXXXXEQLSNEMVVEGX

SEQ ID NO: 16942 - protein, 36 aa, Artificial Sequence; identical to SEQ ID NO: 9661
  GFR-binding peptide
  MOD_RES (3)..(4)..(36): Xaa is C or S

SEQ ID NO: 16943 - protein, 35 aa, Artificial Sequence
  GFR-binding peptide
  MOD_RES (1)..(2)..(34): Xaa is C or S
XXVPTELEPLPMVYYDENEKVVEQLSNDMVVEGXG

SEQ ID NO: 16944 - protein, 35 aa, Artificial Sequence
  GFR-binding peptide
  MOD_RES (1)..(34): Xaa is C or S
  MOD_RES (15)..(16)..(17)..(18)..(19): Xaa is A or G
  MOD_RES (20)..(21)..(22)..(23): Xaa is A or G or is absent
XVPQALEPLTILYYXXXXXXXXXEQLSNMIVRSXK

SEQ ID NO: 16945 - protein, 35 aa, Artificial Sequence
  GFR-binding peptide
  MOD_RES (1)..(35): Xaa is C or S
  MOD_RES (15)..(16)..(17)..(18)..(19): Xaa is A or G
  MOD_RES (20)..(21)..(22)..(23): Xaa is A or G or is absent
XAPTQLEPLTVLYYXXXXXXXXXEQLSNNMVVRAX

SEQ ID NO: 16946 - protein, 43 aa, Artificial Sequence; identical to SEQ ID NO: 9667
  GFR-binding peptide
  MOD_RES (6)..(7)..(41)..(43): Xaa is C or S
  MOD_RES (21)..(22)..(23)..(24)..(25): Xaa is A or G
  MOD_RES (26)..(27)..(28)..(29): Xaa is A or G or is absent

SEQ ID NO: 16947 - protein, 43 aa, Artificial Sequence; identical to SEQ ID NO: 9668
  GFR-binding peptide
  MOD_RES (5)..(6)..(40)..(42): Xaa is C or S
  MOD_RES (20)..(21)..(22)..(23)..(24): Xaa is A or G
  MOD_RES (25)..(26)..(27)..(28): Xaa is A or G or is absent

SEQ ID NO: 16948 - protein, 34 aa, Artificial Sequence
  GFR-binding peptide
  MOD_RES (2)..(3): Xaa is C or S
AXXVPTELEPLTMLYYDEYDKVVEQLSNEMVVEG

SEQ ID NO: 16949 - protein, 42 aa, Artificial Sequence
  GFR-binding peptide
  MOD_RES (5)..(6)..(40)..(42): Xaa is C or S
  MOD_RES (20)..(21)..(22)..(23)..(24): Xaa is A or G
  MOD_RES (25)..(26)..(27)..(28): Xaa is A or G or is absent
VPKPXXAPTQLSPISVLFIXXXXXXXXXYKQYENMVVRAXGX

SEQ ID NO: 16950 - protein, 31 aa, Artificial Sequence
  GFR-binding peptide
VPTELSPISMLFIDEYDKVVYKQYEEMVVEG

SEQ ID NO: 16951 - protein, 37 aa, Artificial Sequence; identical to SEQ ID NO: 9673
  GFR-binding peptide
  MOD_RES (34)..(36): Xaa is C or S
  MOD_RES (14)..(15)..(16)..(17)..(18): Xaa is A or G
  MOD_RES (19)..(20)..(21)..(22): Xaa is A or G or is absent

SEQ ID NO: 16952 - protein, 39 aa, Artificial Sequence; identical to SEQ ID NO: 9676
  GFR-binding peptide
  MOD_RES (2)..(3)..(36)..(38): Xaa is C or S
  MOD_RES (17)..(18)..(19)..(20)..(21): Xaa is A or G
  MOD_RES (22)..(23)..(24)..(25): Xaa is A or G or is absent

SEQ ID NO: 16953 - protein, 43 aa, Artificial Sequence
  GFR-binding peptide
  MOD_RES (7)..(41)..(43): Xaa is C or S
  MOD_RES (21)..(22)..(23)..(24)..(25): Xaa is A or G
  MOD_RES (26)..(27)..(28)..(29): Xaa is A or G or is absent
HVTKPTXAPTKLSPISVLFIXXXXXXXXXYKQYENMVVRSXGX

SEQ ID NO: 16954 - protein, 38 aa, Artificial Sequence
  GFR-binding peptide
  MOD_RES (2)..(3)..(36)..(38): Xaa is C or S
  MOD_RES (17)..(18)..(19)..(20)..(21): Xaa is A or G
  MOD_RES (22)..(23)..(24)..(25): Xaa is A or G or is absent
PXXVPQDLEPLTILYYXXXXXXXXXEQLSNMVVKSXKX

SEQ ID NO: 16955 - protein, 35 aa, Artificial Sequence; identical to SEQ ID NO: 9679
  GFR-binding peptide
  MOD_RES (2)..(3): Xaa is C or S
  MOD_RES (17)..(18)..(19)..(20)..(21): Xaa is A or G
  MOD_RES (22)..(23)..(24)..(25): Xaa is A or G or is absent

SEQ ID NO: 16956 - protein, 37 aa, Artificial Sequence
  GFR-binding peptide
  MOD_RES (4)..(5): Xaa is C or S
  MOD_RES (19)..(20)..(21)..(22)..(23): Xaa is A or G
  MOD_RES (24)..(25)..(26)..(27): Xaa is A or G or is absent
PPTXXVPTRLEPLTILYYXXXXXXXXXEQLSNDMVVE

SEQ ID NO: 16957 - protein, 36 aa, Artificial Sequence; identical to SEQ ID NO: 9680
  GFR-binding peptide
  MOD_RES (3)..(3): Xaa is C or S
  MOD_RES (17)..(18)..(19)..(20)..(21): Xaa is A or G
  MOD_RES (22)..(23)..(24)..(25): Xaa is A or G or is absent

SEQ ID NO: 16958 - protein, 40 aa, Artificial Sequence
  GFR-binding peptide
  MOD_RES (3)..(4)..(38)..(40): Xaa is C or S
  MOD_RES (18)..(19)..(20)..(21)..(22): Xaa is A or G
  MOD_RES (23)..(24)..(25)..(26): Xaa is A or G or is absent
PTXXVPTRLEPLTILYYXXXXXXXXXEQLSNDMVVESXGX

SEQ ID NO: 16959 - protein, 33 aa, Artificial Sequence
  GFR-binding peptide
  MOD_RES (14)..(15)..(16)..(17)..(18): Xaa is A or G
  MOD_RES (19)..(20)..(21)..(22): Xaa is A or G or is absent
VPTRLEPLPIVYYXXXXXXXXXEQLSNDMVVES

SEQ ID NO: 16960 - protein, 38 aa, Artificial Sequence
  GFR-binding peptide
  MOD_RES (7)..(7): Xaa is C or S
HVTKPTXAPTKLEPLTVLYYDDSSNVIEQLSNNMVVRS

SEQ ID NO: 16961 - protein, 35 aa, Artificial Sequence
  GFR-binding peptide
  MOD_RES (1)..(2)..(34): Xaa is C or S
XXAPTQLEPLTVLYYDDSSNVIEQLSNNMVVRAXG

SEQ ID NO: 16962 - protein, 32 aa, Artificial Sequence
  GFR-binding peptide
  MOD_RES (1)..(1): Xaa is C or S
XAPTKLEPLPVVYYDDSSNVIEQLSNNMVVRS

SEQ ID NO: 16963 - protein, 36 aa, Artificial Sequence
  GFR-binding peptide
  MOD_RES (1)..(34)..(36): Xaa is C or S
  MOD_RES (15)..(16)..(17)..(18)..(19): Xaa is A or G
  MOD_RES (20)..(21)..(22)..(23): Xaa is A or G or is absent
XVPQALEPLPIVYYXXXXXXXXXEQLSNMIVRSXKX

SEQ ID NO: 16964 - protein, 39 aa, Artificial Sequence
  GFR-binding peptide
  MOD_RES (4)..(5)..(38): Xaa is C or S
  MOD_RES (19)..(20)..(21)..(22)..(23): Xaa is A or G
  MOD_RES (24)..(25)..(26)..(27): Xaa is A or G or is absent
ASPXXVPQDLEPLPIVYYXXXXXXXXXEQLSNMVVKSXK

SEQ ID NO: 16965 - protein, 36 aa, Artificial Sequence; identical to SEQ ID NO: 9683
  GFR-binding peptide
  MOD_RES (5)..(6): Xaa is C or S

SEQ ID NO: 16966 - protein, 39 aa, Artificial Sequence
  GFR-binding peptide
  MOD_RES (6)..(7): Xaa is C or S
  MOD_RES (21)..(22)..(23)..(24)..(25): Xaa is A or G
  MOD_RES (26)..(27)..(28)..(29): Xaa is A or G or is absent
TVPKPXXAPTQLEPLPVVYYXXXXXXXXXEQLSNNMVVR

SEQ ID NO: 16967 - protein, 38 aa, Artificial Sequence
  GFR-binding peptide
  MOD_RES (1)..(2)..(36)..(38): Xaa is C or S
  MOD_RES (16)..(17)..(18)..(19)..(20): Xaa is A or G
  MOD_RES (21)..(22)..(23)..(24): Xaa is A or G or is absent
XXVPTRLNAISILYFXXXXXXXXXLKKYRDMVVESXGX

SEQ ID NO: 16968 - protein, 34 aa, Artificial Sequence; identical to SEQ ID NO: 9684
  GFR-binding peptide
  MOD_RES (1)..(2)..(33): Xaa is C or S

SEQ ID NO: 16969 - protein, 39 aa, Artificial Sequence
  GFR-binding peptide
  MOD_RES (6)..(7)..(39): Xaa is C or S
YVPKPXXAPTKLEPLTVLYYDDSSNVIEQLSNNMVVRSX

SEQ ID NO: 16970 - protein, 40 aa, Artificial Sequence; identical to SEQ ID NO: 9686
  GFR-binding peptide
  MOD_RES (5)..(37)..(39): Xaa is C or S

SEQ ID NO: 16971 - protein, 34 aa, Artificial Sequence
  GFR-binding peptide
  MOD_RES (34)..(34): Xaa is C or S
  MOD_RES (14)..(15)..(16)..(17)..(18): Xaa is A or G
  MOD_RES (19)..(20)..(21)..(22): Xaa is A or G or is absent
VPTRLSPISILFIXXXXXXXXXYKQYEDMVVESX

SEQ ID NO: 16972 - protein, 42 aa, Artificial Sequence
  GFR-binding peptide
  MOD_RES (6)..(7)..(41): Xaa is C or S
  MOD_RES (21)..(22)..(23)..(24)..(25): Xaa is A or G
  MOD_RES (26)..(27)..(28)..(29): Xaa is A or G or is absent
KIPKAXXVPTELEPLPMVYYXXXXXXXXXEQLSNDMVVEGXG

SEQ ID NO: 16973 - protein, 40 aa, Artificial Sequence
  GFR-binding peptide
  MOD_RES (6)..(7)..(40): Xaa is C or S
  MOD_RES (21)..(22)..(23)..(24)..(25): Xaa is A or G
  MOD_RES (26)..(27)..(28)..(29): Xaa is A or G or is absent
ASASPXXVPQDLEPLTILYYXXXXXXXXXEQLSNMVVKSX

SEQ ID NO: 16974 - protein, 41 aa, Artificial Sequence; identical to SEQ ID NO: 9689
  GFR-binding peptide
  MOD_RES (6)..(7)..(40): Xaa is C or S
  MOD_RES (21)..(22)..(23)..(24)..(25): Xaa is A or G
  MOD_RES (26)..(27)..(28)..(29): Xaa is A or G or is absent

SEQ ID NO: 16975 - protein, 34 aa, Artificial Sequence
  GFR-binding peptide
  MOD_RES (1)..(2)..(34): Xaa is C or S
XXVPTRLEPLPIVYYDSANNVVEQLSNDMVVESX

SEQ ID NO: 16976 - protein, 37 aa, Artificial Sequence; identical to SEQ ID NO: 9690
  GFR-binding peptide
  MOD_RES (4)..(5): Xaa is C or S
  MOD_RES (19)..(20)..(21)..(22)..(23): Xaa is A or G
  MOD_RES (24)..(25)..(26)..(27): Xaa is A or G or is absent

SEQ ID NO: 16977 - protein, 35 aa, Artificial Sequence; identical to SEQ ID NO: 9691
  GFR-binding peptide
  MOD_RES (1)..(2)..(35): Xaa is C or S
  MOD_RES (16)..(17)..(18)..(19)..(20): Xaa is A or G
  MOD_RES (21)..(22)..(23)..(24): Xaa is A or G or is absent

SEQ ID NO: 16978 - protein, 38 aa, Artificial Sequence
  GFR-binding peptide
  MOD_RES (3)..(4)..(35)..(37): Xaa is C or S
APXXVPQALSPISILFIVGRKPKVYKQYEMIVRSXKXS

SEQ ID NO: 16979 - protein, 40 aa, Artificial Sequence
  GFR-binding peptide
  MOD_RES (5)..(6)..(40): Xaa is C or S
  MOD_RES (20)..(21)..(22)..(23)..(24): Xaa is A or G
  MOD_RES (25)..(26)..(27)..(28): Xaa is A or G or is absent
TPPTXXVPTRLEPLPIVYYXXXXXXXXXEQLSNDMVVESX

SEQ ID NO: 16980 - protein, 37 aa, Artificial Sequence
  GFR-binding peptide
  MOD_RES (1)..(2)..(35)..(37): Xaa is C or S
  MOD_RES (16)..(17)..(18)..(19)..(20): Xaa is A or G
  MOD_RES (21)..(22)..(23)..(24): Xaa is A or G or is absent
XXVSQDLEPLPIVYYXXXXXXXXXEQLSNMIVKSXKX

SEQ ID NO: 16981 - protein, 39 aa, Artificial Sequence
  GFR-binding peptide
  MOD_RES (6)..(7)..(39): Xaa is C or S
SIPKAXXVPTELSPISMLFIDEYDKVVYKQYEEMVVEGX

SEQ ID NO: 16982 - protein, 36 aa, Artificial Sequence
  GFR-binding peptide
  MOD_RES (1)..(2)..(34)..(36): Xaa is C or S
XXVPTELEPLTMLYYDEYDKVVEQLSNEMVVEGXGX

SEQ ID NO: 16983 - protein, 36 aa, Artificial Sequence
  GFR-binding peptide
  MOD_RES (3)..(4): Xaa is C or S
  MOD_RES (18)..(19)..(20)..(21)..(22): Xaa is A or G
  MOD_RES (23)..(24)..(25)..(26): Xaa is A or G or is absent
KAXXVPTELEPLPMVYYXXXXXXXXXEQLSNEMVVE

SEQ ID NO: 16984 - protein, 42 aa, Artificial Sequence
  GFR-binding peptide
  MOD_RES (5)..(6)..(39)..(41): Xaa is C or S
  MOD_RES (20)..(21)..(22)..(23)..(24): Xaa is A or G
  MOD_RES (25)..(26)..(27)..(28): Xaa is A or G or is absent
SAAPXXVPQALSPISILFIXXXXXXXXXYKQYEMIVRSXKXS

SEQ ID NO: 16985 - protein, 30 aa, Artificial Sequence; identical to SEQ ID NO: 9695
  GFR-binding peptide

SEQ ID NO: 16986 - protein, 39 aa, Artificial Sequence
  GFR-binding peptide
  MOD_RES (4)..(5)..(38): Xaa is C or S
  MOD_RES (19)..(20)..(21)..(22)..(23): Xaa is A or G
  MOD_RES (24)..(25)..(26)..(27): Xaa is A or G or is absent
ASPXXVSQDLSPISILFIXXXXXXXXXYKQYEMIVKSXK

SEQ ID NO: 16987 - protein, 37 aa, Artificial Sequence
  GFR-binding peptide
  MOD_RES (5)..(6): Xaa is C or S
TPPTXXVPTRLNAISILYFDSANNVVLKKYRDMVVES

SEQ ID NO: 16988 - protein, 34 aa, Artificial Sequence
  GFR-binding peptide
  MOD_RES (32)..(34): Xaa is C or S
APTQLEPLPVVYYDDSSNVIEQLSNNMVVRAXGX

SEQ ID NO: 16989 - protein, 42 aa, Artificial Sequence
  GFR-binding peptide
  MOD_RES (4)..(5)..(39)..(41): Xaa is C or S
  MOD_RES (19)..(20)..(21)..(22)..(23): Xaa is A or G
  MOD_RES (24)..(25)..(26)..(27): Xaa is A or G or is absent
PKPXXAPTQLSPISVLFIXXXXXXXXXYKQYENMVVRAXGXH

SEQ ID NO: 16990 - protein, 37 aa, Artificial Sequence
  GFR-binding peptide
  MOD_RES (2)..(34)..(36): Xaa is C or S
TXAPTKLEPLPVVYYDDSSNVIEQLSNNMVVRSXGXH

SEQ ID NO: 16991 - protein, 40 aa, Artificial Sequence
  GFR-binding peptide
  MOD_RES (3)..(4)..(38)..(40): Xaa is C or S
  MOD_RES (18)..(19)..(20)..(21)..(22): Xaa is A or G
  MOD_RES (23)..(24)..(25)..(26): Xaa is A or G or is absent
PTXXVPTRLEPLPIVYYXXXXXXXXXEQLSNDMVVESXGX

SEQ ID NO: 16992 - protein, 37 aa, Artificial Sequence
  GFR-binding peptide
  MOD_RES (4)..(36): Xaa is C or S
KPTXAPTKLSPISVLFIDDSSNVIYKQYENMVVRSXG

SEQ ID NO: 16993 - protein, 33 aa, Artificial Sequence; identical to SEQ ID NO: 9706
  GFR-binding peptide
  MOD_RES (31)..(33): Xaa is C or S

SEQ ID NO: 16994 - protein, 39 aa, Artificial Sequence
  GFR-binding peptide
  MOD_RES (6)..(7)..(38): Xaa is C or S
ASAAPXXVPQALSPISILFIVGRKPKVYKQYEMIVRSXK

SEQ ID NO: 16995 - protein, 39 aa, Artificial Sequence; identical to SEQ ID NO: 9708
  GFR-binding peptide
  MOD_RES (6)..(7): Xaa is C or S
  MOD_RES (21)..(22)..(23)..(24)..(25): Xaa is A or G
  MOD_RES (26)..(27)..(28)..(29): Xaa is A or G or is absent

SEQ ID NO: 16996 - protein, 40 aa, Artificial Sequence; identical to SEQ ID NO: 9709
  GFR-binding peptide
  MOD_RES (5)..(6)..(39): Xaa is C or S
  MOD_RES (20)..(21)..(22)..(23)..(24): Xaa is A or G
  MOD_RES (25)..(26)..(27)..(28): Xaa is A or G or is absent

SEQ ID NO: 16997 - protein, 43 aa, Artificial Sequence
  GFR-binding peptide
  MOD_RES (6)..(7)..(40)..(42): Xaa is C or S
  MOD_RES (21)..(22)..(23)..(24)..(25): Xaa is A or G
  MOD_RES (26)..(27)..(28)..(29): Xaa is A or G or is absent
ASASPXXVSQDLSPISILFIXXXXXXXXXYKQYEMIVKSXKXS

SEQ ID NO: 16998 - protein, 35 aa, Artificial Sequence
  GFR-binding peptide
  MOD_RES (34)..(34): Xaa is C or S
  MOD_RES (14)..(15)..(16)..(17)..(18): Xaa is A or G
  MOD_RES (19)..(20)..(21)..(22): Xaa is A or G or is absent
VPTELSPISMLFIXXXXXXXXXYKQYEEMVVEGXG

SEQ ID NO: 16999 - protein, 37 aa, Artificial Sequence
  GFR-binding peptide
  MOD_RES (1)..(35)..(37): Xaa is C or S
  MOD_RES (15)..(16)..(17)..(18)..(19): Xaa is A or G
  MOD_RES (20)..(21)..(22)..(23): Xaa is A or G or is absent
XVPTRLSAISILYLXXXXXXXXXLKNYQDMVVESXGX

SEQ ID NO: 17000 - protein, 35 aa, Artificial Sequence; identical to SEQ ID NO: 9713
  GFR-binding peptide
  MOD_RES (4)..(5): Xaa is C or S

SEQ ID NO: 17001 - protein, 37 aa, Artificial Sequence
  GFR-binding peptide
  MOD_RES (1)..(2)..(34)..(36): Xaa is C or S
XXAPTQLEPLTVLYYDDSSNVIEQLSNNMVVRAXGXH

SEQ ID NO: 17002 - protein, 34 aa, Artificial Sequence
  GFR-binding peptide
  MOD_RES (1)..(2): Xaa is C or S
  MOD_RES (16)..(17)..(18)..(19)..(20): Xaa is A or G
  MOD_RES (21)..(22)..(23)..(24): Xaa is A or G or is absent
XXAPTKLSPISVLFIXXXXXXXXXYKQYENMVVR

SEQ ID NO: 17003 - protein, 34 aa, Artificial Sequence; identical to SEQ ID NO: 9718
  GFR-binding peptide
  MOD_RES (2)..(3): Xaa is C or S

SEQ ID NO: 17004 - protein, 35 aa, Artificial Sequence
  GFR-binding peptide
  MOD_RES (1)..(2)..(34): Xaa is C or S
XXAPTKLEPLTVLYYDDSSNVIEQLSNNMVVRSXG

SEQ ID NO: 17005 - protein, 38 aa, Artificial Sequence
  GFR-binding peptide
  MOD_RES (3)..(4)..(36)..(38): Xaa is C or S
KPXXAPTKLSPISVLFIDDSSNVIYKQYENMVVRSXGX

SEQ ID NO: 17006 - protein, 35 aa, Artificial Sequence; identical to SEQ ID NO: 9720
  GFR-binding peptide
  MOD_RES (1)..(34): Xaa is C or S
  MOD_RES (15)..(16)..(17)..(18)..(19): Xaa is A or G
  MOD_RES (20)..(21)..(22)..(23): Xaa is A or G or is absent

SEQ ID NO: 17007 - protein, 36 aa, Artificial Sequence
  GFR-binding peptide
  MOD_RES (4)..(4): Xaa is C or S
  MOD_RES (18)..(19)..(20)..(21)..(22): Xaa is A or G
  MOD_RES (23)..(24)..(25)..(26): Xaa is A or G or is absent
KPTXAPTKLEPLPVVYYXXXXXXXXXEQLSNNMVVR

SEQ ID NO: 17008 - protein, 37 aa, Artificial Sequence; identical to SEQ ID NO: 9721
  GFR-binding peptide
  MOD_RES (4)..(5)..(37): Xaa is C or S

SEQ ID NO: 17009 - protein, 42 aa, Artificial Sequence
  GFR-binding peptide
  MOD_RES (6)..(7)..(41): Xaa is C or S
  MOD_RES (21)..(22)..(23)..(24)..(25): Xaa is A or G
  MOD_RES (26)..(27)..(28)..(29): Xaa is A or G or is absent
TVPKPXXAPTQLSPISVLFIXXXXXXXXXYKQYENMVVRAXG

SEQ ID NO: 17010 - protein, 34 aa, Artificial Sequence; identical to SEQ ID NO: 9724
  GFR-binding peptide
  MOD_RES (1)..(2): Xaa is C or S
  MOD_RES (16)..(17)..(18)..(19)..(20): Xaa is A or G
  MOD_RES (21)..(22)..(23)..(24): Xaa is A or G or is absent

SEQ ID NO: 17011 - protein, 30 aa, Artificial Sequence; identical to SEQ ID NO: 9729
  GFR-binding peptide

SEQ ID NO: 17012 - protein, 40 aa, Artificial Sequence; identical to SEQ ID NO: 9731
  GFR-binding peptide
  MOD_RES (6)..(7)..(39): Xaa is C or S

SEQ ID NO: 17013 - protein, 36 aa, Artificial Sequence
  GFR-binding peptide
  MOD_RES (2)..(3): Xaa is C or S
  MOD_RES (17)..(18)..(19)..(20)..(21): Xaa is A or G
  MOD_RES (22)..(23)..(24)..(25): Xaa is A or G or is absent
PXXAPTKLEPLPVVYYXXXXXXXXXEQLSNNMVVRS

SEQ ID NO: 17014 - protein, 43 aa, Artificial Sequence
  GFR-binding peptide
  MOD_RES (5)..(6)..(40)..(42): Xaa is C or S
  MOD_RES (20)..(21)..(22)..(23)..(24): Xaa is A or G
  MOD_RES (25)..(26)..(27)..(28): Xaa is A or G or is absent
IPKAXXVPTELSPISMLFIXXXXXXXXXYKQYEDMVVEGXGXR

SEQ ID NO: 17015 - protein, 37 aa, Artificial Sequence; identical to SEQ ID NO: 9733
  GFR-binding peptide
  MOD_RES (3)..(4)..(35)..(37): Xaa is C or S

SEQ ID NO: 17016 - protein, 37 aa, Artificial Sequence
  GFR-binding peptide
  MOD_RES (3)..(37): Xaa is C or S
  MOD_RES (17)..(18)..(19)..(20)..(21): Xaa is A or G
  MOD_RES (22)..(23)..(24)..(25): Xaa is A or G or is absent
PTXAPTKLEPLPVVYYXXXXXXXXXEQLSNNMVVRSX

SEQ ID NO: 17017 - protein, 41 aa, Artificial Sequence
  GFR-binding peptide
  MOD_RES (4)..(5)..(38)..(40): Xaa is C or S
  MOD_RES (19)..(20)..(21)..(22)..(23): Xaa is A or G
  MOD_RES (24)..(25)..(26)..(27): Xaa is A or G or is absent
AAPXXVPQALEPLPIVYYXXXXXXXXXEQLSNMIVRSXKXS

SEQ ID NO: 17018 - protein, 40 aa, Artificial Sequence; identical to SEQ ID NO: 9735
  GFR-binding peptide
  MOD_RES (5)..(6)..(40): Xaa is C or S
  MOD_RES (20)..(21)..(22)..(23)..(24): Xaa is A or G
  MOD_RES (25)..(26)..(27)..(28): Xaa is A or G or is absent

SEQ ID NO: 17019 - protein, 36 aa, Artificial Sequence
  GFR-binding peptide
  MOD_RES (1)..(2)..(36): Xaa is C or S
  MOD_RES (16)..(17)..(18)..(19)..(20): Xaa is A or G
  MOD_RES (21)..(22)..(23)..(24): Xaa is A or G or is absent
XXVPTRLEPLTILYYXXXXXXXXXEQLSNDMVVESX

SEQ ID NO: 17020 - protein, 37 aa, Artificial Sequence
  GFR-binding peptide
  MOD_RES (4)..(5): Xaa is C or S
  MOD_RES (19)..(20)..(21)..(22)..(23): Xaa is A or G
  MOD_RES (24)..(25)..(26)..(27): Xaa is A or G or is absent
PPTXXVPTRLEPLPIVYYXXXXXXXXXEQLSNDMVVE

SEQ ID NO: 17021 - protein, 36 aa, Artificial Sequence
  GFR-binding peptide
  MOD_RES (3)..(4): Xaa is C or S
  MOD_RES (18)..(19)..(20)..(21)..(22): Xaa is A or G
  MOD_RES (23)..(24)..(25)..(26): Xaa is A or G or is absent
KAXXVPTELEPLTMLYYXXXXXXXXXEQLSNEMVVE

SEQ ID NO: 17022 - protein, 40 aa, Artificial Sequence; identical to SEQ ID NO: 9741
  GFR-binding peptide
  MOD_RES (4)..(5)..(38)..(40): Xaa is C or S
  MOD_RES (19)..(20)..(21)..(22)..(23): Xaa is A or G
  MOD_RES (24)..(25)..(26)..(27): Xaa is A or G or is absent

SEQ ID NO: 17023 - protein, 39 aa, Artificial Sequence
  GFR-binding peptide
  MOD_RES (4)..(5)..(38): Xaa is C or S
  MOD_RES (19)..(20)..(21)..(22)..(23): Xaa is A or G
  MOD_RES (24)..(25)..(26)..(27): Xaa is A or G or is absent
AAPXXVPQALSPISILFIXXXXXXXXXYKQYEMIVRSXK

SEQ ID NO: 17024 - protein, 37 aa, Artificial Sequence; identical to SEQ ID NO: 9745
  GFR-binding peptide
  MOD_RES (34)..(36): Xaa is C or S
  MOD_RES (14)..(15)..(16)..(17)..(18): Xaa is A or G
  MOD_RES (19)..(20)..(21)..(22): Xaa is A or G or is absent

SEQ ID NO: 17025 - protein, 39 aa, Artificial Sequence
  GFR-binding peptide
  MOD_RES (6)..(7)..(39): Xaa is C or S
KIPKAXXVPTELEPLPMVYYDENEKVVEQLSNDMVVEGX

SEQ ID NO: 17026 - protein, 34 aa, Artificial Sequence; identical to SEQ ID NO: 9746
  GFR-binding peptide
  MOD_RES (1)..(1): Xaa is C or S
  MOD_RES (15)..(16)..(17)..(18)..(19): Xaa is A or G
  MOD_RES (20)..(21)..(22)..(23): Xaa is A or G or is absent

SEQ ID NO: 17027 - protein, 36 aa, Artificial Sequence
  GFR-binding peptide
  MOD_RES (1)..(2)..(33)..(35): Xaa is C or S
XXVPQALSPISILFIVGRKPKVYKQYEMIVRSXKXS

SEQ ID NO: 17028 - protein, 40 aa, Artificial Sequence; identical to SEQ ID NO: 9748
  GFR-binding peptide
  MOD_RES (4)..(5)..(39): Xaa is C or S
  MOD_RES (19)..(20)..(21)..(22)..(23): Xaa is A or G
  MOD_RES (24)..(25)..(26)..(27): Xaa is A or G or is absent

SEQ ID NO: 17029 - protein, 35 aa, Artificial Sequence; identical to SEQ ID NO: 9754
  GFR-binding peptide
  MOD_RES (1)..(2)..(34): Xaa is C or S

SEQ ID NO: 17030 - protein, 38 aa, Artificial Sequence
  GFR-binding peptide
  MOD_RES (2)..(3)..(37): Xaa is C or S
  MOD_RES (17)..(18)..(19)..(20)..(21): Xaa is A or G
  MOD_RES (22)..(23)..(24)..(25): Xaa is A or G or is absent
PXXAPTKLEPLTVLYYXXXXXXXXXEQLSNNMVVRSXG

SEQ ID NO: 17031 - protein, 39 aa, Artificial Sequence; identical to SEQ ID NO: 9755
  GFR-binding peptide
  MOD_RES (3)..(4)..(36)..(38): Xaa is C or S

SEQ ID NO: 17032 - protein, 38 aa, Artificial Sequence; identical to SEQ ID NO: 9756
  GFR-binding peptide
  MOD_RES (1)..(35)..(37): Xaa is C or S
  MOD_RES (15)..(16)..(17)..(18)..(19): Xaa is A or G
  MOD_RES (20)..(21)..(22)..(23): Xaa is A or G or is absent

SEQ ID NO: 17033 - protein, 32 aa, Artificial Sequence
  GFR-binding peptide
  MOD_RES (1)..(1): Xaa is C or S
XVPTELEPLPMVYYDENEKVVEQLSNDMVVEG

SEQ ID NO: 17034 - protein, 41 aa, Artificial Sequence
  GFR-binding peptide
  MOD_RES (4)..(38)..(40): Xaa is C or S
  MOD_RES (18)..(19)..(20)..(21)..(22): Xaa is A or G
  MOD_RES (23)..(24)..(25)..(26): Xaa is A or G or is absent
KPTXAPTKLSPISVLFIXXXXXXXXXYKQYENMVVRSXGXH

SEQ ID NO: 17035 - protein, 41 aa, Artificial Sequence
  GFR-binding peptide
  MOD_RES (5)..(6)..(40): Xaa is C or S
  MOD_RES (20)..(21)..(22)..(23)..(24): Xaa is A or G
  MOD_RES (25)..(26)..(27)..(28): Xaa is A or G or is absent
TPPTXXVPTRLNAISILYFXXXXXXXXXLKKYRDMVVESXG

SEQ ID NO: 17036 - protein, 33 aa, Artificial Sequence
  GFR-binding peptide
  MOD_RES (1)..(2): Xaa is C or S
XXAPTKLSPISVLFIDDSSNVIYKQYENMVVRS

SEQ ID NO: 17037 - protein, 34 aa, Artificial Sequence
  GFR-binding peptide
  MOD_RES (3)..(4): Xaa is C or S
SPXXVPQDLEPLPIVYYVGRTPKVEQLSNMVVKS

SEQ ID NO: 17038 - protein, 37 aa, Artificial Sequence
  GFR-binding peptide
  MOD_RES (1)..(2)..(34)..(36): Xaa is C or S
XXVPTELEPLPMVYYDEYDKVVEQLSNEMVVEGXGXR

SEQ ID NO: 17039 - protein, 37 aa, Artificial Sequence; identical to SEQ ID NO: 9764
  GFR-binding peptide
  MOD_RES (3)..(4)..(35)..(37): Xaa is C or S

SEQ ID NO: 17040 - protein, 35 aa, Artificial Sequence; identical to SEQ ID NO: 9767
  GFR-binding peptide
  MOD_RES (1)..(2): Xaa is C or S
  MOD_RES (16)..(17)..(18)..(19)..(20): Xaa is A or G
  MOD_RES (21)..(22)..(23)..(24): Xaa is A or G or is absent

SEQ ID NO: 17041 - protein, 39 aa, Artificial Sequence
  GFR-binding peptide
  MOD_RES (1)..(2)..(36)..(38): Xaa is C or S
  MOD_RES (16)..(17)..(18)..(19)..(20): Xaa is A or G
  MOD_RES (21)..(22)..(23)..(24): Xaa is A or G or is absent
XXAPTKLSPISVLFIXXXXXXXXXYKQYENMVVRSXGXH

SEQ ID NO: 17042 - protein, 35 aa, Artificial Sequence; identical to SEQ ID NO: 9770
  GFR-binding peptide
  MOD_RES (1)..(32)..(34): Xaa is C or S

SEQ ID NO: 17043 - protein, 38 aa, Artificial Sequence
  GFR-binding peptide
  MOD_RES (5)..(5): Xaa is C or S
  MOD_RES (19)..(20)..(21)..(22)..(23): Xaa is A or G
  MOD_RES (24)..(25)..(26)..(27): Xaa is A or G or is absent
TKPTXAPTKLEPLPVVYYXXXXXXXXXEQLSNNMVVRS

SEQ ID NO: 17044 - protein, 38 aa, Artificial Sequence
  GFR-binding peptide
  MOD_RES (3)..(4)..(36)..(38): Xaa is C or S
KPXXAPTKLEPLTVLYYDDSSNVIEQLSNNMVVRSXGX

SEQ ID NO: 17045 - protein, 33 aa, Artificial Sequence; identical to SEQ ID NO: 9775
  GFR-binding peptide
  MOD_RES (2)..(3): Xaa is C or S

SEQ ID NO: 17046 - protein, 33 aa, Artificial Sequence; identical to SEQ ID NO: 9776
  GFR-binding peptide
  MOD_RES (1)..(32): Xaa is C or S

SEQ ID NO: 17047 - protein, 42 aa, Artificial Sequence
  GFR-binding peptide
  MOD_RES (2)..(36): Xaa is C or S
  MOD_RES (14)..(15)..(16)..(17)..(18): Xaa is A or G
  MOD_RES (19)..(20)..(21)..(22): Xaa is A or G or is absent
EXKNHQLFVQVEKXXXXXXXXXVKAMKVSREETPVXELGEDN

SEQ ID NO: 17048 - protein, 37 aa, Artificial Sequence
  GFR-binding peptide
  MOD_RES (1)..(1): Xaa is C or S
  MOD_RES (14)..(15)..(16)..(17)..(18): Xaa is A or G
  MOD_RES (19)..(20)..(21)..(22): Xaa is A or G or is absent
XELHEELRSMEGLXXXXXXXXXMIQVTINSHHVRSPQ

SEQ ID NO: 17049 - protein, 36 aa, Artificial Sequence
  GFR-binding peptide
  MOD_RES (1)..(3): Xaa is C or S
XEXQSHEELSMEGIHQGQHPKIRMIQMTINSQGTPV

SEQ ID NO: 17050 - protein, 40 aa, Artificial Sequence
  GFR-binding peptide
  MOD_RES (1)..(35): Xaa is C or S
  MOD_RES (13)..(14)..(15)..(16)..(17): Xaa is A or G
  MOD_RES (18)..(19)..(20)..(21): Xaa is A or G or is absent
XQSHEELSMEGLXXXXXXXXXMIQMTINSQGTPVXELGED

SEQ ID NO: 17051 - protein, 43 aa, Artificial Sequence
  GFR-binding peptide
  MOD_RES (1)..(3)..(37): Xaa is C or S
XEXKNHQLFSMEGLHQGQHPKIRMIQMTINSEETPVXELGEDN

SEQ ID NO: 17052 - protein, 35 aa, Artificial Sequence
  GFR-binding peptide
  MOD_RES (1)..(35): Xaa is C or S
XQSHEELSMEGIHQGQHPKIRMIQMTINSQGTPVX

SEQ ID NO: 17053 - protein, 42 aa, Artificial Sequence
  GFR-binding peptide
  MOD_RES (2)..(4)..(41): Xaa is C or S
  MOD_RES (17)..(18)..(19)..(20)..(21): Xaa is A or G
  MOD_RES (22)..(23)..(24)..(25): Xaa is A or G or is absent
AXAXELHEELRSMEGIXXXXXXXXXMIQVTINSHHVRSPQXK

SEQ ID NO: 17054 - protein, 38 aa, Artificial Sequence
  GFR-binding peptide
  MOD_RES (1)..(3): Xaa is C or S
  MOD_RES (16)..(17)..(18)..(19)..(20): Xaa is A or G
  MOD_RES (21)..(22)..(23)..(24): Xaa is A or G or is absent
XAXELHEELRSMEGIXXXXXXXXXMIQVTINSHHVRSP

SEQ ID NO: 17055 - protein, 41 aa, Artificial Sequence
  GFR-binding peptide
  MOD_RES (1)..(3)..(40): Xaa is C or S
  MOD_RES (16)..(17)..(18)..(19)..(20): Xaa is A or G
  MOD_RES (21)..(22)..(23)..(24): Xaa is A or G or is absent
XKXALHDELTSMEGIXXXXXXXXXMIQVTINSLQVQTPRXQ

SEQ ID NO: 17056 - protein, 39 aa, Artificial Sequence
  GFR-binding peptide
  MOD_RES (2)..(36): Xaa is C or S
  MOD_RES (14)..(15)..(16)..(17)..(18): Xaa is A or G
  MOD_RES (19)..(20)..(21)..(22): Xaa is A or G or is absent
EXKNHQLFVQVEKXXXXXXXXXVKAMKVSREETPVXELG

SEQ ID NO: 17057 - protein, 32 aa, Artificial Sequence
  GFR-binding peptide
NHQLFVTAKKHQGQHPKIRIKRMQVPREETPV

SEQ ID NO: 17058 - protein, 42 aa, Artificial Sequence
  GFR-binding peptide
  MOD_RES (1)..(38): Xaa is C or S
XELHEELRVTAKKLKPKKRVYEIKRVQVPRHHVRSPQXKVSS

SEQ ID NO: 17059 - protein, 34 aa, Artificial Sequence
  GFR-binding peptide
  MOD_RES (33)..(33): Xaa is C or S
  MOD_RES (11)..(12)..(13)..(14)..(15): Xaa is A or G
  MOD_RES (16)..(17)..(18)..(19): Xaa is A or G or is absent
SHEELVTAKKXXXXXXXXXIKRMQVPRQGTPVXE

SEQ ID NO: 17060 - protein, 35 aa, Artificial Sequence
  GFR-binding peptide
  MOD_RES (35)..(35): Xaa is C or S
  MOD_RES (11)..(12)..(13)..(14)..(15): Xaa is A or G
  MOD_RES (16)..(17)..(18)..(19): Xaa is A or G or is absent
HDELTVTAKKXXXXXXXXXIKRVQVPRLQVQTPRX

SEQ ID NO: 17061 - protein, 36 aa, Artificial Sequence
  GFR-binding peptide
  MOD_RES (35)..(35): Xaa is C or S
  MOD_RES (11)..(12)..(13)..(14)..(15): Xaa is A or G
  MOD_RES (16)..(17)..(18)..(19): Xaa is A or G or is absent
HEELRSMEGLXXXXXXXXXMIQVTINSHHVRSPQXK

SEQ ID NO: 17062 - protein, 43 aa, Artificial Sequence
  GFR-binding peptide
  MOD_RES (1)..(3)..(37): Xaa is C or S
  MOD_RES (15)..(16)..(17)..(18)..(19): Xaa is A or G
  MOD_RES (20)..(21)..(22)..(23): Xaa is A or G or is absent
XEXQSHEELVQVEKXXXXXXXXXVKAMKVSRQGTPVXELGEDN

SEQ ID NO: 17063 - protein, 40 aa, Artificial Sequence
  GFR-binding peptide
  MOD_RES (34)..(34): Xaa is C or S
  MOD_RES (12)..(13)..(14)..(15)..(16): Xaa is A or G
  MOD_RES (17)..(18)..(19)..(20): Xaa is A or G or is absent
QSHEELVQVEKXXXXXXXXXVKAMKVSRQGTPVXELGEDN

SEQ ID NO: 17064 - protein, 38 aa, Artificial Sequence
  GFR-binding peptide
  MOD_RES (37)..(37): Xaa is C or S
  MOD_RES (13)..(14)..(15)..(16)..(17): Xaa is A or G
  MOD_RES (18)..(19)..(20)..(21): Xaa is A or G or is absent
ALHDELTVQVEKXXXXXXXXXVKAVKVSRLQVQTPRXQ

SEQ ID NO: 17065 - protein, 41 aa, Artificial Sequence
  GFR-binding peptide
  MOD_RES (2)..(4)..(38): Xaa is C or S
  MOD_RES (16)..(17)..(18)..(19)..(20): Xaa is A or G
  MOD_RES (21)..(22)..(23)..(24): Xaa is A or G or is absent
RXEXQSHEELVQVEKXXXXXXXXXVKAMKVSRQGTPVXELG

SEQ ID NO: 17066 - protein, 36 aa, Artificial Sequence
  GFR-binding peptide
  MOD_RES (2)..(36): Xaa is C or S
  MOD_RES (14)..(15)..(16)..(17)..(18): Xaa is A or G
  MOD_RES (19)..(20)..(21)..(22): Xaa is A or G or is absent
EXQSHEELVQVEKXXXXXXXXXVKAMKVSRQGTPVX

SEQ ID NO: 17067 - protein, 36 aa, Artificial Sequence
  GFR-binding peptide
  MOD_RES (2)..(36): Xaa is C or S
  MOD_RES (14)..(15)..(16)..(17)..(18): Xaa is A or G
  MOD_RES (19)..(20)..(21)..(22): Xaa is A or G or is absent
EXKNHQLFSMEGIXXXXXXXXXMIQMTINSEETPVX

SEQ ID NO: 17068 - protein, 35 aa, Artificial Sequence
  GFR-binding peptide
  MOD_RES (2)..(2): Xaa is C or S
EXKNHQLFSMEGLHQGQHPKIRMIQMTINSEETPV

SEQ ID NO: 17069 - protein, 39 aa, Artificial Sequence
  GFR-binding peptide
  MOD_RES (1)..(38): Xaa is C or S
XELHEELRSMEGILKPKKRVYEMIQVTINSHHVRSPQXK

SEQ ID NO: 17070 - protein, 38 aa, Artificial Sequence
  GFR-binding peptide
  MOD_RES (1)..(35): Xaa is C or S
  MOD_RES (13)..(14)..(15)..(16)..(17): Xaa is A or G
  MOD_RES (18)..(19)..(20)..(21): Xaa is A or G or is absent
XKNHQLFSMEGIXXXXXXXXXMIQMTINSEETPVXELG

SEQ ID NO: 17071 - protein, 36 aa, Artificial Sequence
  GFR-binding peptide
  MOD_RES (1)..(3): Xaa is C or S
XEXKNHQLFVQVEKHQGQHPKIRVKAMKVSREETPV

SEQ ID NO: 17072 - protein, 40 aa, Artificial Sequence
  GFR-binding peptide
  MOD_RES (2)..(39): Xaa is C or S
  MOD_RES (15)..(16)..(17)..(18)..(19): Xaa is A or G
  MOD_RES (20)..(21)..(22)..(23): Xaa is A or G or is absent
KXALHDELTVQVEKXXXXXXXXXVKAVKVSRLQVQTPRXQ

SEQ ID NO: 17073 - protein, 37 aa, Artificial Sequence
  GFR-binding peptide
  MOD_RES (34)..(34): Xaa is C or S
  MOD_RES (12)..(13)..(14)..(15)..(16): Xaa is A or G
  MOD_RES (17)..(18)..(19)..(20): Xaa is A or G or is absent
QSHEELVQVEKXXXXXXXXXVKAMKVSRQGTPVXELG

SEQ ID NO: 17074 - protein, 37 aa, Artificial Sequence
  GFR-binding peptide
  MOD_RES (36)..(36): Xaa is C or S
  MOD_RES (12)..(13)..(14)..(15)..(16): Xaa is A or G
  MOD_RES (17)..(18)..(19)..(20): Xaa is A or G or is absent
LHEELRVQVEKXXXXXXXXXVKAVKVSRHHVRSPQXK

SEQ ID NO: 17075 - protein, 40 aa, Artificial Sequence
  GFR-binding peptide
  MOD_RES (2)..(4): Xaa is C or S
  MOD_RES (17)..(18)..(19)..(20)..(21): Xaa is A or G
  MOD_RES (22)..(23)..(24)..(25): Xaa is A or G or is absent
EXKXALHDELTVQVEKXXXXXXXXXVKAVKVSRLQVQTPR

SEQ ID NO: 17076 - protein, 37 aa, Artificial Sequence
  GFR-binding peptide
  MOD_RES (37)..(37): Xaa is C or S
ALHDELTVQVEKFIPKKRVIEVKAVKVSRLQVQTPRX

SEQ ID NO: 17077 - protein, 42 aa, Artificial Sequence
  GFR-binding peptide
  MOD_RES (1)..(38): Xaa is C or S
  MOD_RES (14)..(15)..(16)..(17)..(18): Xaa is A or G
  MOD_RES (19)..(20)..(21)..(22): Xaa is A or G or is absent
XALHDELTSMEGIXXXXXXXXXMIQVTINSLQVQTPRXQVNR

SEQ ID NO: 17078 - protein, 36 aa, Artificial Sequence
  GFR-binding peptide
  MOD_RES (2)..(2): Xaa is C or S
  MOD_RES (15)..(16)..(17)..(18)..(19): Xaa is A or G
  MOD_RES (20)..(21)..(22)..(23): Xaa is A or G or is absent
AXELHEELRVTAKKXXXXXXXXXIKRVQVPRHHVRS

SEQ ID NO: 17079 - protein, 36 aa, Artificial Sequence
  GFR-binding peptide
  MOD_RES (36)..(36): Xaa is C or S
LHEELRSMEGILKPKKRVYEMIQVTINSHHVRSPQX

SEQ ID NO: 17080 - protein, 45 aa, Artificial Sequence
  GFR-binding peptide
  MOD_RES (2)..(4)..(41): Xaa is C or S
AXAXELHEELRSMEGILKPKKRVYEMIQVTINSHHVRSPQXKVSS

SEQ ID NO: 17081 - protein, 34 aa, Artificial Sequence
  GFR-binding peptide
ELHEELRVTAKKLKPKKRVYEIKRVQVPRHHVRS

SEQ ID NO: 17082 - protein, 37 aa, Artificial Sequence
  GFR-binding peptide
  MOD_RES (2)..(4): Xaa is C or S
RXEXQSHEELVTAKKHQGQHPKIRIKRMQVPRQGTPV

SEQ ID NO: 17083 - protein, 35 aa, Artificial Sequence
  GFR-binding peptide
  MOD_RES (35)..(35): Xaa is C or S
HDELTSMEGIFIPKKRVIEMIQVTINSLQVQTPRX

SEQ ID NO: 17084 - protein, 37 aa, Artificial Sequence
  GFR-binding peptide
  MOD_RES (1)..(1): Xaa is C or S
  MOD_RES (14)..(15)..(16)..(17)..(18): Xaa is A or G
  MOD_RES (19)..(20)..(21)..(22): Xaa is A or G or is absent
XELHEELRVQVEKXXXXXXXXXVKAVKVSRHHVRSPQ

SEQ ID NO: 17085 - protein, 34 aa, Artificial Sequence
  GFR-binding peptide
  MOD_RES (1)..(1): Xaa is C or S
  MOD_RES (13)..(14)..(15)..(16)..(17): Xaa is A or G
  MOD_RES (18)..(19)..(20)..(21): Xaa is A or G or is absent
XKNHQLFSMEGLXXXXXXXXXMIQMTINSEETPV

SEQ ID NO: 17086 - protein, 33 aa, Artificial Sequence
  GFR-binding peptide
KNHQLFSMEGLHQGQHPKIRMIQMTINSEETPV

SEQ ID NO: 17087 - protein, 44 aa, Artificial Sequence
  GFR-binding peptide
  MOD_RES (2)..(4)..(41): Xaa is C or S
EXKXALHDELTSMEGIFIPKKRVIEMIQVTINSLQVQTPRXQVN

SEQ ID NO: 17088 - protein, 40 aa, Artificial Sequence
  GFR-binding peptide
  MOD_RES (1)..(3)..(37): Xaa is C or S
  MOD_RES (15)..(16)..(17)..(18)..(19): Xaa is A or G
  MOD_RES (20)..(21)..(22)..(23): Xaa is A or G or is absent
XEXKNHQLFVQVEKXXXXXXXXXVKAMKVSREETPVXELG

SEQ ID NO: 17089 - protein, 39 aa, Artificial Sequence
  GFR-binding peptide
  MOD_RES (2)..(36): Xaa is C or S
  MOD_RES (14)..(15)..(16)..(17)..(18): Xaa is A or G
  MOD_RES (19)..(20)..(21)..(22): Xaa is A or G or is absent
EXKNHQLFSMEGLXXXXXXXXXMIQMTINSEETPVXELG

SEQ ID NO: 17090 - protein, 38 aa, Artificial Sequence
  GFR-binding peptide
  MOD_RES (1)..(3)..(37): Xaa is C or S
  MOD_RES (15)..(16)..(17)..(18)..(19): Xaa is A or G
  MOD_RES (20)..(21)..(22)..(23): Xaa is A or G or is absent
XEXQSHEELSMEGLXXXXXXXXXMIQMTINSQGTPVXE

SEQ ID NO: 17091 - protein, 41 aa, Artificial Sequence
  GFR-binding peptide
  MOD_RES (1)..(35): Xaa is C or S
  MOD_RES (13)..(14)..(15)..(16)..(17): Xaa is A or G
  MOD_RES (18)..(19)..(20)..(21): Xaa is A or G or is absent
XQSHEELVQVEKXXXXXXXXXVKAMKVSRQGTPVXELGEDN

SEQ ID NO: 17092 - protein, 40 aa, Artificial Sequence
  GFR-binding peptide
  MOD_RES (2)..(39): Xaa is C or S
AXELHEELRVQVEKLKPKKRVYEVKAVKVSRHHVRSPQXK

SEQ ID NO: 17093 - protein, 42 aa, Artificial Sequence
  GFR-binding peptide
  MOD_RES (2)..(39): Xaa is C or S
  MOD_RES (15)..(16)..(17)..(18)..(19): Xaa is A or G
  MOD_RES (20)..(21)..(22)..(23): Xaa is A or G or is absent
KXALHDELTSMEGIXXXXXXXXXMIQVTINSLQVQTPRXQVN

SEQ ID NO: 17094 - protein, 36 aa, Artificial Sequence
  GFR-binding peptide
  MOD_RES (33)..(33): Xaa is C or S
  MOD_RES (11)..(12)..(13)..(14)..(15): Xaa is A or G
  MOD_RES (16)..(17)..(18)..(19): Xaa is A or G or is absent
SHEELVQVEKXXXXXXXXXVKAMKVSRQGTPVXELG

SEQ ID NO: 17095 - protein, 38 aa, Artificial Sequence
  GFR-binding peptide
  MOD_RES (2)..(36): Xaa is C or S
EXQSHEELVQVEKHQGQHPKIRVKAMKVSRQGTPVXEL

SEQ ID NO: 17096 - protein, 38 aa, Artificial Sequence
  GFR-binding peptide
  MOD_RES (2)..(2): Xaa is C or S
AXELHEELRVTAKKLKPKKRVYEIKRVQVPRHHVRSPQ

SEQ ID NO: 17097 - protein, 40 aa, Artificial Sequence
  GFR-binding peptide
  MOD_RES (1)..(35): Xaa is C or S
XQSHEELSMEGIHQGQHPKIRMIQMTINSQGTPVXELGED

SEQ ID NO: 17098 - protein, 37 aa, Artificial Sequence
  GFR-binding peptide
  MOD_RES (2)..(4): Xaa is C or S
  MOD_RES (16)..(17)..(18)..(19)..(20): Xaa is A or G
  MOD_RES (21)..(22)..(23)..(24): Xaa is A or G or is absent
RXEXQSHEELSMEGIXXXXXXXXXMIQMTINSQGTPV

SEQ ID NO: 17099 - protein, 39 aa, Artificial Sequence
  GFR-binding peptide
  MOD_RES (35)..(35): Xaa is C or S
  MOD_RES (11)..(12)..(13)..(14)..(15): Xaa is A or G
  MOD_RES (16)..(17)..(18)..(19): Xaa is A or G or is absent
HEELRVTAKKXXXXXXXXXIKRVQVPRHHVRSPQXKVSS

SEQ ID NO: 17100 - protein, 37 aa, Artificial Sequence
  GFR-binding peptide
  MOD_RES (35)..(35): Xaa is C or S
HDELTSMEGIFIPKKRVIEMIQVTINSLQVQTPRXQV

SEQ ID NO: 17101 - protein, 38 aa, Artificial Sequence
  GFR-binding peptide
  MOD_RES (36)..(36): Xaa is C or S
LHEELRVQVEKLKPKKRVYEVKAVKVSRHHVRSPQXKV

SEQ ID NO: 17102 - protein, 39 aa, Artificial Sequence
  GFR-binding peptide
  MOD_RES (37)..(37): Xaa is C or S
ELHEELRVQVEKLKPKKRVYEVKAVKVSRHHVRSPQXKV

SEQ ID NO: 17103 - protein, 43 aa, Artificial Sequence
  GFR-binding peptide
  MOD_RES (2)..(39): Xaa is C or S
  MOD_RES (15)..(16)..(17)..(18)..(19): Xaa is A or G
  MOD_RES (20)..(21)..(22)..(23): Xaa is A or G or is absent
AXELHEELRVQVEKXXXXXXXXXVKAVKVSRHHVRSPQXKVSS

SEQ ID NO: 17104 - protein, 42 aa, Artificial Sequence
  GFR-binding peptide
  MOD_RES (1)..(3)..(37): Xaa is C or S
XEXKNHQLFVTAKKHQGQHPKIRIKRMQVPREETPVXELGED

SEQ ID NO: 17105 - protein, 41 aa, Artificial Sequence
  GFR-binding peptide
  MOD_RES (1)..(38): Xaa is C or S
XELHEELRSMEGILKPKKRVYEMIQVTINSHHVRSPQXKVS

SEQ ID NO: 17106 - protein, 35 aa, Artificial Sequence
  GFR-binding peptide
  MOD_RES (13)..(14)..(15)..(16)..(17): Xaa is A or G
  MOD_RES (18)..(19)..(20)..(21): Xaa is A or G or is absent
ALHDELTVQVEKXXXXXXXXXVKAVKVSRLQVQTP

SEQ ID NO: 17107 - protein, 38 aa, Artificial Sequence
  GFR-binding peptide
  MOD_RES (35)..(35): Xaa is C or S
HEELRVTAKKLKPKKRVYEIKRVQVPRHHVRSPQXKVS

SEQ ID NO: 17108 - protein, 37 aa, Artificial Sequence
  GFR-binding peptide
  MOD_RES (33)..(33): Xaa is C or S
NHQLFVQVEKHQGQHPKIRVKAMKVSREETPVXELGE

SEQ ID NO: 17109 - protein, 38 aa, Artificial Sequence
  GFR-binding peptide
  MOD_RES (2)..(4)..(38): Xaa is C or S
RXEXQSHEELVTAKKHQGQHPKIRIKRMQVPRQGTPVX

SEQ ID NO: 17110 - protein, 40 aa, Artificial Sequence
  GFR-binding peptide
  MOD_RES (1)..(3)..(37): Xaa is C or S
  MOD_RES (15)..(16)..(17)..(18)..(19): Xaa is A or G
  MOD_RES (20)..(21)..(22)..(23): Xaa is A or G or is absent
XEXQSHEELSMEGIXXXXXXXXXMIQMTINSQGTPVXELG

SEQ ID NO: 17111 - protein, 43 aa, Artificial Sequence
  GFR-binding peptide
  MOD_RES (2)..(4)..(38): Xaa is C or S
  MOD_RES (16)..(17)..(18)..(19)..(20): Xaa is A or G
  MOD_RES (21)..(22)..(23)..(24): Xaa is A or G or is absent
RXEXQSHEELSMEGLXXXXXXXXXMIQMTINSQGTPVXELGED

SEQ ID NO: 17112 - protein, 35 aa, Artificial Sequence
  GFR-binding peptide
  MOD_RES (35)..(35): Xaa is C or S
HEELRVTAKKLKPKKRVYEIKRVQVPRHHVRSPQX

SEQ ID NO: 17113 - protein, 39 aa, Artificial Sequence
  GFR-binding peptide
  MOD_RES (2)..(4)..(38): Xaa is C or S
RXEXQSHEELSMEGIHQGQHPKIRMIQMTINSQGTPVXE

SEQ ID NO: 17114 - protein, 35 aa, Artificial Sequence
  GFR-binding peptide
  MOD_RES (33)..(33): Xaa is C or S
NHQLFVQVEKHQGQHPKIRVKAMKVSREETPVXEL

SEQ ID NO: 17115 - protein, 40 aa, Artificial Sequence
  GFR-binding peptide
  MOD_RES (37)..(37): Xaa is C or S
  MOD_RES (13)..(14)..(15)..(16)..(17): Xaa is A or G
  MOD_RES (18)..(19)..(20)..(21): Xaa is A or G or is absent
ELHEELRVTAKKXXXXXXXXXIKRVQVPRHHVRSPQXKVS

SEQ ID NO: 17116 - protein, 34 aa, Artificial Sequence
  GFR-binding peptide
  MOD_RES (34)..(34): Xaa is C or S
  MOD_RES (12)..(13)..(14)..(15)..(16): Xaa is A or G
  MOD_RES (17)..(18)..(19)..(20): Xaa is A or G or is absent
QSHEELSMEGLXXXXXXXXXMIQMTINSQGTPVX

SEQ ID NO: 17117 - protein, 40 aa, Artificial Sequence
  GFR-binding peptide
  MOD_RES (37)..(37): Xaa is C or S
ALHDELTSMEGLFIPKKRVIEMIQVTINSLQVQTPRXQVN

SEQ ID NO: 17118 - protein, 38 aa, Artificial Sequence
  GFR-binding peptide
  MOD_RES (2)..(4)..(38): Xaa is C or S
RXEXQSHEELVQVEKHQGQHPKIRVKAMKVSRQGTPVX

SEQ ID NO: 17119 - protein, 42 aa, Artificial Sequence
  GFR-binding peptide
  MOD_RES (2)..(36): Xaa is C or S
  MOD_RES (14)..(15)..(16)..(17)..(18): Xaa is A or G
  MOD_RES (19)..(20)..(21)..(22): Xaa is A or G or is absent
EXKNHQLFSMEGLXXXXXXXXXMIQMTINSEETPVXELGEDN

SEQ ID NO: 17120 - protein, 39 aa, Artificial Sequence
  GFR-binding peptide
  MOD_RES (1)..(3)..(37): Xaa is C or S
XEXKNHQLFSMEGIHQGQHPKIRMIQMTINSEETPVXEL

SEQ ID NO: 17121 - protein, 45 aa, Artificial Sequence
  GFR-binding peptide
  MOD_RES (2)..(4)..(41): Xaa is C or S
EXKXALHDELTSMEGLFIPKKRVIEMIQVTINSLQVQTPRXQVNR

SEQ ID NO: 17122 - protein, 42 aa, Artificial Sequence
  GFR-binding peptide
  MOD_RES (2)..(4)..(38): Xaa is C or S
  MOD_RES (16)..(17)..(18)..(19)..(20): Xaa is A or G
  MOD_RES (21)..(22)..(23)..(24): Xaa is A or G or is absent
RXEXQSHEELVQVEKXXXXXXXXXVKAMKVSRQGTPVXELGE

SEQ ID NO: 17123 - protein, 39 aa, Artificial Sequence
  GFR-binding peptide
  MOD_RES (34)..(34): Xaa is C or S
KNHQLFSMEGIHQGQHPKIRMIQMTINSEETPVXELGED

SEQ ID NO: 17124 - protein, 39 aa, Artificial Sequence
  GFR-binding peptide
  MOD_RES (1)..(35): Xaa is C or S
XKNHQLFSMEGLHQGQHPKIRMIQMTINSEETPVXELGE

SEQ ID NO: 17125 - protein, 36 aa, Artificial Sequence
  GFR-binding peptide
  MOD_RES (1)..(35): Xaa is C or S
  MOD_RES (13)..(14)..(15)..(16)..(17): Xaa is A or G
  MOD_RES (18)..(19)..(20)..(21): Xaa is A or G or is absent
XKNHQLFSMEGIXXXXXXXXXMIQMTINSEETPVXE

SEQ ID NO: 17126 - protein, 32 aa, Artificial Sequence
  GFR-binding peptide
HEELRVQVEKLKPKKRVYEVKAVKVSRHHVRS

SEQ ID NO: 17127 - protein, 42 aa, Artificial Sequence
  GFR-binding peptide
  MOD_RES (1)..(38): Xaa is C or S
XALHDELTSMEGIFIPKKRVIEMIQVTINSLQVQTPRXQVNR

SEQ ID NO: 17128 - protein, 37 aa, Artificial Sequence
  GFR-binding peptide
  MOD_RES (2)..(36): Xaa is C or S
  MOD_RES (14)..(15)..(16)..(17)..(18): Xaa is A or G
  MOD_RES (19)..(20)..(21)..(22): Xaa is A or G or is absent
EXQSHEELSMEGIXXXXXXXXXMIQMTINSQGTPVXE

SEQ ID NO: 17129 - protein, 41 aa, Artificial Sequence
  GFR-binding peptide
  MOD_RES (2)..(4)..(38): Xaa is C or S
  MOD_RES (16)..(17)..(18)..(19)..(20): Xaa is A or G
  MOD_RES (21)..(22)..(23)..(24): Xaa is A or G or is absent
RXEXQSHEELVTAKKXXXXXXXXXIKRMQVPRQGTPVXELG

SEQ ID NO: 17130 - protein, 35 aa, Artificial Sequence
  GFR-binding peptide
  MOD_RES (34)..(34): Xaa is C or S
  MOD_RES (12)..(13)..(14)..(15)..(16): Xaa is A or G
  MOD_RES (17)..(18)..(19)..(20): Xaa is A or G or is absent
KNHQLFVTAKKXXXXXXXXXIKRMQVPREETPVXE

SEQ ID NO: 17131 - protein, 38 aa, Artificial Sequence
  GFR-binding peptide
  MOD_RES (34)..(34): Xaa is C or S
  MOD_RES (12)..(13)..(14)..(15)..(16): Xaa is A or G
  MOD_RES (17)..(18)..(19)..(20): Xaa is A or G or is absent
QSHEELSMEGIXXXXXXXXXMIQMTINSQGTPVXELGE

SEQ ID NO: 17132 - protein, 37 aa, Artificial Sequence
  GFR-binding peptide
  MOD_RES (1)..(3)..(37): Xaa is C or S
  MOD_RES (15)..(16)..(17)..(18)..(19): Xaa is A or G
  MOD_RES (20)..(21)..(22)..(23): Xaa is A or G or is absent
XEXQSHEELSMEGLXXXXXXXXXMIQMTINSQGTPVX

SEQ ID NO: 17133 - protein, 39 aa, Artificial Sequence
  GFR-binding peptide
  MOD_RES (2)..(4): Xaa is C or S
  MOD_RES (17)..(18)..(19)..(20)..(21): Xaa is A or G
  MOD_RES (22)..(23)..(24)..(25): Xaa is A or G or is absent
EXKXALHDELTSMEGIXXXXXXXXXMIQVTINSLQVQTP

SEQ ID NO: 17134 - protein, 33 aa, Artificial Sequence
  GFR-binding peptide
QSHEELVTAKKHQGQHPKIRIKRMQVPRQGTPV

SEQ ID NO: 17135 - protein, 36 aa, Artificial Sequence
  GFR-binding peptide
  MOD_RES (34)..(34): Xaa is C or S
  MOD_RES (12)..(13)..(14)..(15)..(16): Xaa is A or G
  MOD_RES (17)..(18)..(19)..(20): Xaa is A or G or is absent
KNHQLFVQVEKXXXXXXXXXVKAMKVSREETPVXEL

SEQ ID NO: 17136 - protein, 38 aa, Artificial Sequence
  GFR-binding peptide
  MOD_RES (2)..(36): Xaa is C or S
EXKNHQLFSMEGIHQGQHPKIRMIQMTINSEETPVXEL

SEQ ID NO: 17137 - protein, 40 aa, Artificial Sequence
  GFR-binding peptide
  MOD_RES (36)..(36): Xaa is C or S
LHDELTSMEGLFIPKKRVIEMIQVTINSLQVQTPRXQVNR

SEQ ID NO: 17138 - protein, 35 aa, Artificial Sequence
  GFR-binding peptide
LHDELTVQVEKFIPKKRVIEVKAVKVSRLQVQTPR

SEQ ID NO: 17139 - protein, 39 aa, Artificial Sequence
  GFR-binding peptide
  MOD_RES (1)..(3)..(37): Xaa is C or S
XEXQSHEELVTAKKHQGQHPKIRIKRMQVPRQGTPVXEL

SEQ ID NO: 17140 - protein, 41 aa, Artificial Sequence
  GFR-binding peptide
  MOD_RES (37)..(37): Xaa is C or S
ALHDELTVQVEKFIPKKRVIEVKAVKVSRLQVQTPRXQVNR

SEQ ID NO: 17141 - protein, 35 aa, Artificial Sequence
  GFR-binding peptide
  MOD_RES (2)..(2): Xaa is C or S
EXKNHQLFVQVEKHQGQHPKIRVKAMKVSREETPV

SEQ ID NO: 17142 - protein, 37 aa, Artificial Sequence
  GFR-binding peptide
  MOD_RES (2)..(36): Xaa is C or S
  MOD_RES (14)..(15)..(16)..(17)..(18): Xaa is A or G
  MOD_RES (19)..(20)..(21)..(22): Xaa is A or G or is absent
EXKNHQLFVTAKKXXXXXXXXXIKRMQVPREETPVXE

SEQ ID NO: 17143 - protein, 38 aa, Artificial Sequence
  GFR-binding peptide
  MOD_RES (37)..(37): Xaa is C or S
  MOD_RES (13)..(14)..(15)..(16)..(17): Xaa is A or G
  MOD_RES (18)..(19)..(20)..(21): Xaa is A or G or is absent
ELHEELRVTAKKXXXXXXXXXIKRVQVPRHHVRSPQXK

SEQ ID NO: 17144 - protein, 39 aa, Artificial Sequence
  GFR-binding peptide
  MOD_RES (2)..(39): Xaa is C or S
  MOD_RES (15)..(16)..(17)..(18)..(19): Xaa is A or G
  MOD_RES (20)..(21)..(22)..(23): Xaa is A or G or is absent
KXALHDELTSMEGIXXXXXXXXXMIQVTINSLQVQTPRX

SEQ ID NO: 17145 - protein, 34 aa, Artificial Sequence
  GFR-binding peptide
  MOD_RES (11)..(12)..(13)..(14)..(15): Xaa is A or G
  MOD_RES (16)..(17)..(18)..(19): Xaa is A or G or is absent
HDELTVTAKKXXXXXXXXXIKRVQVPRLQVQTPR

SEQ ID NO: 17146 - protein, 44 aa, Artificial Sequence
  GFR-binding peptide
  MOD_RES (1)..(3)..(40): Xaa is C or S
  MOD_RES (16)..(17)..(18)..(19)..(20): Xaa is A or G
  MOD_RES (21)..(22)..(23)..(24): Xaa is A or G or is absent
XKXALHDELTSMEGLXXXXXXXXXMIQVTINSLQVQTPRXQVNR

SEQ ID NO: 17147 - protein, 42 aa, Artificial Sequence
  GFR-binding peptide
  MOD_RES (2)..(4)..(38): Xaa is C or S
  MOD_RES (16)..(17)..(18)..(19)..(20): Xaa is A or G
  MOD_RES (21)..(22)..(23)..(24): Xaa is A or G or is absent
RXEXQSHEELVTAKKXXXXXXXXXIKRMQVPRQGTPVXELGE

SEQ ID NO: 17148 - protein, 41 aa, Artificial Sequence
  GFR-binding peptide
  MOD_RES (1)..(38): Xaa is C or S
XALHDELTSMEGIFIPKKRVIEMIQVTINSLQVQTPRXQVN

SEQ ID NO: 17149 - protein, 38 aa, Artificial Sequence
  GFR-binding peptide
  MOD_RES (33)..(33): Xaa is C or S
  MOD_RES (11)..(12)..(13)..(14)..(15): Xaa is A or G
  MOD_RES (16)..(17)..(18)..(19): Xaa is A or G or is absent
NHQLFVQVEKXXXXXXXXXVKAMKVSREETPVXELGED

SEQ ID NO: 17150 - protein, 40 aa, Artificial Sequence
  GFR-binding peptide
  MOD_RES (2)..(4): Xaa is C or S
  MOD_RES (17)..(18)..(19)..(20)..(21): Xaa is A or G
  MOD_RES (22)..(23)..(24)..(25): Xaa is A or G or is absent
AXAXELHEELRSMEGLXXXXXXXXXMIQVTINSHHVRSPQ

SEQ ID NO: 17151 - protein, 36 aa, Artificial Sequence
  GFR-binding peptide
  MOD_RES (13)..(14)..(15)..(16)..(17): Xaa is A or G
  MOD_RES (18)..(19)..(20)..(21): Xaa is A or G or is absent
ALHDELTSMEGIXXXXXXXXXMIQVTINSLQVQTPR

SEQ ID NO: 17152 - protein, 36 aa, Artificial Sequence
  GFR-binding peptide
  MOD_RES (1)..(35): Xaa is C or S
XKNHQLFVTAKKHQGQHPKIRIKRMQVPREETPVXE

SEQ ID NO: 17153 - protein, 37 aa, Artificial Sequence
  GFR-binding peptide
  MOD_RES (37)..(37): Xaa is C or S
ELHEELRVTAKKLKPKKRVYEIKRVQVPRHHVRSPQX

SEQ ID NO: 17154 - protein, 40 aa, Artificial Sequence
  GFR-binding peptide
  MOD_RES (1)..(38): Xaa is C or S
XALHDELTVQVEKFIPKKRVIEVKAVKVSRLQVQTPRXQV

SEQ ID NO: 17155 - protein, 45 aa, Artificial Sequence
  GFR-binding peptide
  MOD_RES (2)..(4)..(41): Xaa is C or S
  MOD_RES (17)..(18)..(19)..(20)..(21): Xaa is A or G
  MOD_RES (22)..(23)..(24)..(25): Xaa is A or G or is absent
EXKXALHDELTVQVEKXXXXXXXXXVKAVKVSRLQVQTPRXQVNR

SEQ ID NO: 17156 - protein, 39 aa, Artificial Sequence
  GFR-binding peptide
  MOD_RES (1)..(3): Xaa is C or S
XKXALHDELTVTAKKFIPKKRVIEIKRVQVPRLQVQTPR

SEQ ID NO: 17157 - protein, 43 aa, Artificial Sequence
  GFR-binding peptide
  MOD_RES (2)..(4)..(38): Xaa is C or S
RXEXKNHQLFVTAKKHQGQHPKIRIKRMQVPREETPVXELGED

SEQ ID NO: 17158 - protein, 39 aa, Artificial Sequence
  GFR-binding peptide
  MOD_RES (1)..(3): Xaa is C or S
  MOD_RES (16)..(17)..(18)..(19)..(20): Xaa is A or G
  MOD_RES (21)..(22)..(23)..(24): Xaa is A or G or is absent
XAXELHEELRVTAKKXXXXXXXXXIKRVQVPRHHVRSPQ

SEQ ID NO: 17159 - protein, 40 aa, Artificial Sequence
  GFR-binding peptide
  MOD_RES (1)..(3)..(37): Xaa is C or S
XEXQSHEELSMEGLHQGQHPKIRMIQMTINSQGTPVXELG

SEQ ID NO: 17160 - protein, 33 aa, Artificial Sequence
  GFR-binding peptide
  MOD_RES (11)..(12)..(13)..(14)..(15): Xaa is A or G
  MOD_RES (16)..(17)..(18)..(19): Xaa is A or G or is absent
HDELTSMEGIXXXXXXXXXMIQVTINSLQVQTP

SEQ ID NO: 17161 - protein, 40 aa, Artificial Sequence
  GFR-binding peptide
  MOD_RES (2)..(39): Xaa is C or S
KXALHDELTVQVEKFIPKKRVIEVKAVKVSRLQVQTPRXQ

SEQ ID NO: 17162 - protein, 35 aa, Artificial Sequence
  GFR-binding peptide
  MOD_RES (34)..(34): Xaa is C or S
KNHQLFVQVEKHQGQHPKIRVKAMKVSREETPVXE

SEQ ID NO: 17163 - protein, 37 aa, Artificial Sequence
  GFR-binding peptide
  MOD_RES (37)..(37): Xaa is C or S
ELHEELRSMEGLLKPKKRVYEMIQVTINSHHVRSPQX

SEQ ID NO: 17164 - protein, 40 aa, Artificial Sequence
  GFR-binding peptide
  MOD_RES (2)..(4): Xaa is C or S
  MOD_RES (17)..(18)..(19)..(20)..(21): Xaa is A or G
  MOD_RES (22)..(23)..(24)..(25): Xaa is A or G or is absent
EXKXALHDELTSMEGLXXXXXXXXXMIQVTINSLQVQTPR

SEQ ID NO: 17165 - protein, 35 aa, Artificial Sequence
  GFR-binding peptide
LHEELRVTAKKLKPKKRVYEIKRVQVPRHHVRSPQ

SEQ ID NO: 17166 - protein, 36 aa, Artificial Sequence
  GFR-binding peptide
  MOD_RES (1)..(35): Xaa is C or S
XKNHQLFSMEGLHQGQHPKIRMIQMTINSEETPVXE

SEQ ID NO: 17167 - protein, 38 aa, Artificial Sequence
  GFR-binding peptide
  MOD_RES (36)..(36): Xaa is C or S
  MOD_RES (12)..(13)..(14)..(15)..(16): Xaa is A or G
  MOD_RES (17)..(18)..(19)..(20): Xaa is A or G or is absent
LHDELTSMEGIXXXXXXXXXMIQVTINSLQVQTPRXQV

SEQ ID NO: 17168 - protein, 39 aa, Artificial Sequence
  GFR-binding peptide
  MOD_RES (1)..(3): Xaa is C or S
XAXELHEELRVQVEKLKPKKRVYEVKAVKVSRHHVRSPQ

SEQ ID NO: 17169 - protein, 40 aa, Artificial Sequence
  GFR-binding peptide
  MOD_RES (2)..(4): Xaa is C or S
  MOD_RES (17)..(18)..(19)..(20)..(21): Xaa is A or G
  MOD_RES (22)..(23)..(24)..(25): Xaa is A or G or is absent
AXAXELHEELRVTAKKXXXXXXXXXIKRVQVPRHHVRSPQ

SEQ ID NO: 17170 - protein, 36 aa, Artificial Sequence
  GFR-binding peptide
  MOD_RES (2)..(36): Xaa is C or S
  MOD_RES (14)..(15)..(16)..(17)..(18): Xaa is A or G
  MOD_RES (19)..(20)..(21)..(22): Xaa is A or G or is absent
EXQSHEELVTAKKXXXXXXXXXIKRMQVPRQGTPVX

SEQ ID NO: 17171 - protein, 44 aa, Artificial Sequence
  GFR-binding peptide
  MOD_RES (2)..(4)..(41): Xaa is C or S
AXAXELHEELRSMEGILKPKKRVYEMIQVTINSHHVRSPQXKVS

SEQ ID NO: 17172 - protein, 43 aa, Artificial Sequence
  GFR-binding peptide
  MOD_RES (2)..(39): Xaa is C or S
AXELHEELRSMEGILKPKKRVYEMIQVTINSHHVRSPQXKVSS

SEQ ID NO: 17173 - protein, 40 aa, Artificial Sequence
  GFR-binding peptide
  MOD_RES (2)..(36): Xaa is C or S
EXQSHEELSMEGLHQGQHPKIRMIQMTINSQGTPVXELGE

SEQ ID NO: 17174 - protein, 40 aa, Artificial Sequence
  GFR-binding peptide
  MOD_RES (34)..(34): Xaa is C or S
KNHQLFSMEGIHQGQHPKIRMIQMTINSEETPVXELGEDN

SEQ ID NO: 17175 - protein, 34 aa, Artificial Sequence
  GFR-binding peptide
  MOD_RES (1)..(1): Xaa is C or S
  MOD_RES (13)..(14)..(15)..(16)..(17): Xaa is A or G
  MOD_RES (18)..(19)..(20)..(21): Xaa is A or G or is absent
XQSHEELVTAKKXXXXXXXXXIKRMQVPRQGTPV

SEQ ID NO: 17176 - protein, 38 aa, Artificial Sequence
  GFR-binding peptide
  MOD_RES (34)..(34): Xaa is C or S
QSHEELSMEGLHQGQHPKIRMIQMTINSQGTPVXELGE

SEQ ID NO: 17177 - protein, 36 aa, Artificial Sequence
  GFR-binding peptide
  MOD_RES (36)..(36): Xaa is C or S
LHDELTVTAKKFIPKKRVIEIKRVQVPRLQVQTPRX

SEQ ID NO: 17178 - protein, 38 aa, Artificial Sequence
  GFR-binding peptide
  MOD_RES (34)..(34): Xaa is C or S
KNHQLFVQVEKHQGQHPKIRVKAMKVSREETPVXELGE

SEQ ID NO: 17179 - protein, 35 aa, Artificial Sequence
  GFR-binding peptide
ELHEELRSMEGILKPKKRVYEMIQVTINSHHVRSP

SEQ ID NO: 17180 - protein, 36 aa, Artificial Sequence
  GFR-binding peptide
  MOD_RES (1)..(3): Xaa is C or S
  MOD_RES (15)..(16)..(17)..(18)..(19): Xaa is A or G
  MOD_RES (20)..(21)..(22)..(23): Xaa is A or G or is absent
XEXKNHQLFSMEGIXXXXXXXXXMIQMTINSEETPV

SEQ ID NO: 17181 - protein, 38 aa, Artificial Sequence
  GFR-binding peptide
  MOD_RES (1)..(35): Xaa is C or S
XKNHQLFVTAKKHQGQHPKIRIKRMQVPREETPVXELG

SEQ ID NO: 17182 - protein, 37 aa, Artificial Sequence
  GFR-binding peptide
  MOD_RES (35)..(35): Xaa is C or S
HEELRVTAKKLKPKKRVYEIKRVQVPRHHVRSPQXKV

SEQ ID NO: 17183 - protein, 41 aa, Artificial Sequence
  GFR-binding peptide
  MOD_RES (2)..(39): Xaa is C or S
AXELHEELRVQVEKLKPKKRVYEVKAVKVSRHHVRSPQXKV

SEQ ID NO: 17184 - protein, 37 aa, Artificial Sequence
  GFR-binding peptide
  MOD_RES (1)..(1): Xaa is C or S
  MOD_RES (14)..(15)..(16)..(17)..(18): Xaa is A or G
  MOD_RES (19)..(20)..(21)..(22): Xaa is A or G or is absent
XELHEELRVTAKKXXXXXXXXXIKRVQVPRHHVRSPQ

SEQ ID NO: 17185 - protein, 39 aa, Artificial Sequence
  GFR-binding peptide
  MOD_RES (2)..(4)..(38): Xaa is C or S
  MOD_RES (16)..(17)..(18)..(19)..(20): Xaa is A or G
  MOD_RES (21)..(22)..(23)..(24): Xaa is A or G or is absent
RXEXKNHQLFSMEGLXXXXXXXXXMIQMTINSEETPVXE

SEQ ID NO: 17186 - protein, 34 aa, Artificial Sequence
  GFR-binding peptide
HEELRSMEGILKPKKRVYEMIQVTINSHHVRSPQ

SEQ ID NO: 17187 - protein, 38 aa, Artificial Sequence
  GFR-binding peptide
  MOD_RES (2)..(4)..(38): Xaa is C or S
  MOD_RES (16)..(17)..(18)..(19)..(20): Xaa is A or G
  MOD_RES (21)..(22)..(23)..(24): Xaa is A or G or is absent
RXEXQSHEELVQVEKXXXXXXXXXVKAMKVSRQGTPVX

SEQ ID NO: 17188 - protein, 39 aa, Artificial Sequence
  GFR-binding peptide
  MOD_RES (2)..(36): Xaa is C or S
EXQSHEELVTAKKHQGQHPKIRIKRMQVPRQGTPVXELG

SEQ ID NO: 17189 - protein, 40 aa, Artificial Sequence
  GFR-binding peptide
  MOD_RES (37)..(37): Xaa is C or S
  MOD_RES (13)..(14)..(15)..(16)..(17): Xaa is A or G
  MOD_RES (18)..(19)..(20)..(21): Xaa is A or G or is absent
ELHEELRSMEGLXXXXXXXXXMIQVTINSHHVRSPQXKVS

SEQ ID NO: 17190 - protein, 36 aa, Artificial Sequence
  GFR-binding peptide
  MOD_RES (33)..(33): Xaa is C or S
  MOD_RES (11)..(12)..(13)..(14)..(15): Xaa is A or G
  MOD_RES (16)..(17)..(18)..(19): Xaa is A or G or is absent
SHEELVTAKKXXXXXXXXXIKRMQVPRQGTPVXELG

SEQ ID NO: 17191 - protein, 36 aa, Artificial Sequence
  GFR-binding peptide
  MOD_RES (1)..(3): Xaa is C or S
  MOD_RES (15)..(16)..(17)..(18)..(19): Xaa is A or G
  MOD_RES (20)..(21)..(22)..(23): Xaa is A or G or is absent
XEXQSHEELVTAKKXXXXXXXXXIKRMQVPRQGTPV

SEQ ID NO: 17192 - protein, 40 aa, Artificial Sequence
  GFR-binding peptide
  MOD_RES (34)..(34): Xaa is C or S
QSHEELSMEGIHQGQHPKIRMIQMTINSQGTPVXELGEDN

SEQ ID NO: 17193 - protein, 36 aa, Artificial Sequence
  GFR-binding peptide
  MOD_RES (1)..(1): Xaa is C or S
  MOD_RES (14)..(15)..(16)..(17)..(18): Xaa is A or G
  MOD_RES (19)..(20)..(21)..(22): Xaa is A or G or is absent
XALHDELTSMEGIXXXXXXXXXMIQVTINSLQVQTP

SEQ ID NO: 17194 - protein, 35 aa, Artificial Sequence
  GFR-binding peptide
  MOD_RES (1)..(35): Xaa is C or S
  MOD_RES (13)..(14)..(15)..(16)..(17): Xaa is A or G
  MOD_RES (18)..(19)..(20)..(21): Xaa is A or G or is absent
XQSHEELSMEGLXXXXXXXXXMIQMTINSQGTPVX

SEQ ID NO: 17195 - protein, 41 aa, Artificial Sequence
  GFR-binding peptide
  MOD_RES (2)..(39): Xaa is C or S
  MOD_RES (15)..(16)..(17)..(18)..(19): Xaa is A or G
  MOD_RES (20)..(21)..(22)..(23): Xaa is A or G or is absent
KXALHDELTVQVEKXXXXXXXXXVKAVKVSRLQVQTPRXQV

SEQ ID NO: 17196 - protein, 40 aa, Artificial Sequence
  GFR-binding peptide
  MOD_RES (2)..(39): Xaa is C or S
  MOD_RES (15)..(16)..(17)..(18)..(19): Xaa is A or G
  MOD_RES (20)..(21)..(22)..(23): Xaa is A or G or is absent
AXELHEELRVTAKKXXXXXXXXXIKRVQVPRHHVRSPQXK

SEQ ID NO: 17197 - protein, 43 aa, Artificial Sequence
  GFR-binding peptide
  MOD_RES (2)..(39): Xaa is C or S
KXALHDELTVQVEKFIPKKRVIEVKAVKVSRLQVQTPRXQVNR

SEQ ID NO: 17198 - protein, 39 aa, Artificial Sequence
  GFR-binding peptide
  MOD_RES (1)..(35): Xaa is C or S
XQSHEELVQVEKHQGQHPKIRVKAMKVSRQGTPVXELGE

SEQ ID NO: 17199 - protein, 37 aa, Artificial Sequence
  GFR-binding peptide
  MOD_RES (35)..(35): Xaa is C or S
HDELTVTAKKFIPKKRVIEIKRVQVPRLQVQTPRXQV

SEQ ID NO: 17200 - protein, 35 aa, Artificial Sequence
  GFR-binding peptide
  MOD_RES (1)..(1): Xaa is C or S
  MOD_RES (14)..(15)..(16)..(17)..(18): Xaa is A or G
  MOD_RES (19)..(20)..(21)..(22): Xaa is A or G or is absent
XALHDELTVQVEKXXXXXXXXXVKAVKVSRLQVQT

SEQ ID NO: 17201 - protein, 38 aa, Artificial Sequence
  GFR-binding peptide
  MOD_RES (1)..(38): Xaa is C or S
XELHEELRVTAKKLKPKKRVYEIKRVQVPRHHVRSPQX

SEQ ID NO: 17202 - protein, 37 aa, Artificial Sequence
  GFR-binding peptide
  MOD_RES (34)..(34): Xaa is C or S
QSHEELSMEGIHQGQHPKIRMIQMTINSQGTPVXELG

SEQ ID NO: 17203 - protein, 34 aa, Artificial Sequence
  GFR-binding peptide
  MOD_RES (34)..(34): Xaa is C or S
  MOD_RES (12)..(13)..(14)..(15)..(16): Xaa is A or G
  MOD_RES (17)..(18)..(19)..(20): Xaa is A or G or is absent
KNHQLFSMEGLXXXXXXXXXMIQMTINSEETPVX

SEQ ID NO: 17204 - protein, 41 aa, Artificial Sequence
  GFR-binding peptide
  MOD_RES (2)..(39): Xaa is C or S
  MOD_RES (15)..(16)..(17)..(18)..(19): Xaa is A or G
  MOD_RES (20)..(21)..(22)..(23): Xaa is A or G or is absent
AXELHEELRVTAKKXXXXXXXXXIKRVQVPRHHVRSPQXKV

SEQ ID NO: 17205 - protein, 36 aa, Artificial Sequence
  GFR-binding peptide
  MOD_RES (36)..(36): Xaa is C or S
  MOD_RES (12)..(13)..(14)..(15)..(16): Xaa is A or G
  MOD_RES (17)..(18)..(19)..(20): Xaa is A or G or is absent
LHEELRVQVEKXXXXXXXXXVKAVKVSRHHVRSPQX

SEQ ID NO: 17206 - protein, 35 aa, Artificial Sequence
  GFR-binding peptide
  MOD_RES (1)..(1): Xaa is C or S
XALHDELTSMEGLFIPKKRVIEMIQVTINSLQVQT

SEQ ID NO: 17207 - protein, 43 aa, Artificial Sequence
  GFR-binding peptide
  MOD_RES (1)..(3)..(37): Xaa is C or S
  MOD_RES (15)..(16)..(17)..(18)..(19): Xaa is A or G
  MOD_RES (20)..(21)..(22)..(23): Xaa is A or G or is absent
XEXKNHQLFSMEGIXXXXXXXXXMIQMTINSEETPVXELGEDN

SEQ ID NO: 17208 - protein, 33 aa, Artificial Sequence
  GFR-binding peptide
  MOD_RES (33)..(33): Xaa is C or S
NHQLFVQVEKHQGQHPKIRVKAMKVSREETPVX

SEQ ID NO: 17209 - protein, 37 aa, Artificial Sequence
  GFR-binding peptide
  MOD_RES (37)..(37): Xaa is C or S
  MOD_RES (13)..(14)..(15)..(16)..(17): Xaa is A or G
  MOD_RES (18)..(19)..(20)..(21): Xaa is A or G or is absent
ELHEELRVQVEKXXXXXXXXXVKAVKVSRHHVRSPQX

SEQ ID NO: 17210 - protein, 34 aa, Artificial Sequence
  GFR-binding peptide
  MOD_RES (33)..(33): Xaa is C or S
  MOD_RES (11)..(12)..(13)..(14)..(15): Xaa is A or G
  MOD_RES (16)..(17)..(18)..(19): Xaa is A or G or is absent
NHQLFSMEGLXXXXXXXXXMIQMTINSEETPVXE

SEQ ID NO: 17211 - protein, 42 aa, Artificial Sequence
  GFR-binding peptide
  MOD_RES (1)..(38): Xaa is C or S
XELHEELRVQVEKLKPKKRVYEVKAVKVSRHHVRSPQXKVSS

SEQ ID NO: 17212 - protein, 41 aa, Artificial Sequence
  GFR-binding peptide
  MOD_RES (2)..(36): Xaa is C or S
EXKNHQLFVTAKKHQGQHPKIRIKRMQVPREETPVXELGED

SEQ ID NO: 17213 - protein, 34 aa, Artificial Sequence
  GFR-binding peptide
ELHEELRSMEGLLKPKKRVYEMIQVTINSHHVRS

SEQ ID NO: 17214 - protein, 43 aa, Artificial Sequence
  GFR-binding peptide
  MOD_RES (2)..(39): Xaa is C or S
AXELHEELRSMEGLLKPKKRVYEMIQVTINSHHVRSPQXKVSS

SEQ ID NO: 17215 - protein, 42 aa, Artificial Sequence
  GFR-binding peptide
  MOD_RES (2)..(36): Xaa is C or S
EXQSHEELVTAKKHQGQHPKIRIKRMQVPRQGTPVXELGEDN

SEQ ID NO: 17216 - protein, 40 aa, Artificial Sequence
  GFR-binding peptide
  MOD_RES (2)..(36): Xaa is C or S
EXKNHQLFSMEGIHQGQHPKIRMIQMTINSEETPVXELGE

SEQ ID NO: 17217 - protein, 37 aa, Artificial Sequence
  GFR-binding peptide
  MOD_RES (34)..(34): Xaa is C or S
KNHQLFSMEGIHQGQHPKIRMIQMTINSEETPVXELG

SEQ ID NO: 17218 - protein, 38 aa, Artificial Sequence
  GFR-binding peptide
  MOD_RES (37)..(37): Xaa is C or S
  MOD_RES (13)..(14)..(15)..(16)..(17): Xaa is A or G
  MOD_RES (18)..(19)..(20)..(21): Xaa is A or G or is absent
ELHEELRSMEGLXXXXXXXXXMIQVTINSHHVRSPQXK

SEQ ID NO: 17219 - protein, 43 aa, Artificial Sequence
  GFR-binding peptide
  MOD_RES (2)..(4)..(38): Xaa is C or S
  MOD_RES (16)..(17)..(18)..(19)..(20): Xaa is A or G
  MOD_RES (21)..(22)..(23)..(24): Xaa is A or G or is absent
RXEXKNHQLFVQVEKXXXXXXXXXVKAMKVSREETPVXELGED

SEQ ID NO: 17220 - protein, 44 aa, Artificial Sequence
  GFR-binding peptide
  MOD_RES (2)..(4)..(41): Xaa is C or S
  MOD_RES (17)..(18)..(19)..(20)..(21): Xaa is A or G
  MOD_RES (22)..(23)..(24)..(25): Xaa is A or G or is absent
AXAXELHEELRVQVEKXXXXXXXXXVKAVKVSRHHVRSPQXKVS

SEQ ID NO: 17221 - protein, 36 aa, Artificial Sequence
  GFR-binding peptide
  MOD_RES (1)..(3): Xaa is C or S
XEXKNHQLFVTAKKHQGQHPKIRIKRMQVPREETPV

SEQ ID NO: 17222 - protein, 38 aa, Artificial Sequence
  GFR-binding peptide
  MOD_RES (37)..(37): Xaa is C or S
ALHDELTSMEGIFIPKKRVIEMIQVTINSLQVQTPRXQ

SEQ ID NO: 17223 - protein, 32 aa, Artificial Sequence
  GFR-binding peptide
  MOD_RES (11)..(12)..(13)..(14)..(15): Xaa is A or G
  MOD_RES (16)..(17)..(18)..(19): Xaa is A or G or is absent
SHEELSMEGLXXXXXXXXXMIQMTINSQGTPV

SEQ ID NO: 17224 - protein, 37 aa, Artificial Sequence
  GFR-binding peptide
  MOD_RES (36)..(36): Xaa is C or S
LHDELTSMEGLFIPKKRVIEMIQVTINSLQVQTPRXQ

SEQ ID NO: 17225 - protein, 43 aa, Artificial Sequence
  GFR-binding peptide
  MOD_RES (1)..(3)..(37): Xaa is C or S
  MOD_RES (15)..(16)..(17)..(18)..(19): Xaa is A or G
  MOD_RES (20)..(21)..(22)..(23): Xaa is A or G or is absent
XEXQSHEELVTAKKXXXXXXXXXIKRMQVPRQGTPVXELGEDN

SEQ ID NO: 17226 - protein, 35 aa, Artificial Sequence
  GFR-binding peptide
  MOD_RES (12)..(13)..(14)..(15)..(16): Xaa is A or G
  MOD_RES (17)..(18)..(19)..(20): Xaa is A or G or is absent
LHDELTSMEGLXXXXXXXXXMIQVTINSLQVQTPR

SEQ ID NO: 17227 - protein, 38 aa, Artificial Sequence
  GFR-binding peptide
  MOD_RES (2)..(2): Xaa is C or S
  MOD_RES (15)..(16)..(17)..(18)..(19): Xaa is A or G
  MOD_RES (20)..(21)..(22)..(23): Xaa is A or G or is absent
KXALHDELTSMEGIXXXXXXXXXMIQVTINSLQVQTPR

SEQ ID NO: 17228 - protein, 37 aa, Artificial Sequence
  GFR-binding peptide
  MOD_RES (35)..(35): Xaa is C or S
  MOD_RES (11)..(12)..(13)..(14)..(15): Xaa is A or G
  MOD_RES (16)..(17)..(18)..(19): Xaa is A or G or is absent
HDELTVQVEKXXXXXXXXXVKAVKVSRLQVQTPRXQV

SEQ ID NO: 17229 - protein, 38 aa, Artificial Sequence
  GFR-binding peptide
  MOD_RES (1)..(38): Xaa is C or S
XELHEELRSMEGLLKPKKRVYEMIQVTINSHHVRSPQX

SEQ ID NO: 17230 - protein, 37 aa, Artificial Sequence
  GFR-binding peptide
  MOD_RES (35)..(35): Xaa is C or S
  MOD_RES (11)..(12)..(13)..(14)..(15): Xaa is A or G
  MOD_RES (16)..(17)..(18)..(19): Xaa is A or G or is absent
HDELTVTAKKXXXXXXXXXIKRVQVPRLQVQTPRXQV

SEQ ID NO: 17231 - protein, 33 aa, Artificial Sequence
  GFR-binding peptide
HEELRSMEGLLKPKKRVYEMIQVTINSHHVRSP

SEQ ID NO: 17232 - protein, 33 aa, Artificial Sequence
  GFR-binding peptide
  MOD_RES (33)..(33): Xaa is C or S
  MOD_RES (11)..(12)..(13)..(14)..(15): Xaa is A or G
  MOD_RES (16)..(17)..(18)..(19): Xaa is A or G or is absent
NHQLFSMEGIXXXXXXXXXMIQMTINSEETPVX

SEQ ID NO: 17233 - protein, 41 aa, Artificial Sequence
  GFR-binding peptide
  MOD_RES (2)..(39): Xaa is C or S
KXALHDELTVQVEKFIPKKRVIEVKAVKVSRLQVQTPRXQV

SEQ ID NO: 17234 - protein, 34 aa, Artificial Sequence
  GFR-binding peptide
  MOD_RES (33)..(33): Xaa is C or S
  MOD_RES (11)..(12)..(13)..(14)..(15): Xaa is A or G
  MOD_RES (16)..(17)..(18)..(19): Xaa is A or G or is absent
SHEELVQVEKXXXXXXXXXVKAMKVSRQGTPVXE

SEQ ID NO: 17235 - protein, 36 aa, Artificial Sequence
  GFR-binding peptide
  MOD_RES (2)..(36): Xaa is C or S
  MOD_RES (14)..(15)..(16)..(17)..(18): Xaa is A or G
  MOD_RES (19)..(20)..(21)..(22): Xaa is A or G or is absent
EXQSHEELSMEGLXXXXXXXXXMIQMTINSQGTPVX

SEQ ID NO: 17236 - protein, 36 aa, Artificial Sequence
  GFR-binding peptide
  MOD_RES (13)..(14)..(15)..(16)..(17): Xaa is A or G
  MOD_RES (18)..(19)..(20)..(21): Xaa is A or G or is absent
ELHEELRSMEGIXXXXXXXXXMIQVTINSHHVRSPQ

SEQ ID NO: 17237 - protein, 40 aa, Artificial Sequence
  GFR-binding peptide
  MOD_RES (36)..(36): Xaa is C or S
LHDELTVTAKKFIPKKRVIEIKRVQVPRLQVQTPRXQVNR

SEQ ID NO: 17238 - protein, 40 aa, Artificial Sequence
  GFR-binding peptide
  MOD_RES (2)..(36): Xaa is C or S
EXQSHEELVTAKKHQGQHPKIRIKRMQVPRQGTPVXELGE

SEQ ID NO: 17239 - protein, 42 aa, Artificial Sequence
  GFR-binding peptide
  MOD_RES (1)..(3)..(40): Xaa is C or S
XKXALHDELTSMEGIFIPKKRVIEMIQVTINSLQVQTPRXQV

SEQ ID NO: 17240 - protein, 40 aa, Artificial Sequence
  GFR-binding peptide
  MOD_RES (2)..(4): Xaa is C or S
EXKXALHDELTSMEGLFIPKKRVIEMIQVTINSLQVQTPR

SEQ ID NO: 17241 - protein, 39 aa, Artificial Sequence
  GFR-binding peptide
  MOD_RES (34)..(34): Xaa is C or S
  MOD_RES (12)..(13)..(14)..(15)..(16): Xaa is A or G
  MOD_RES (17)..(18)..(19)..(20): Xaa is A or G or is absent
KNHQLFVQVEKXXXXXXXXXVKAMKVSREETPVXELGED

SEQ ID NO: 17242 - protein, 37 aa, Artificial Sequence
  GFR-binding peptide
  MOD_RES (1)..(35): Xaa is C or S
  MOD_RES (13)..(14)..(15)..(16)..(17): Xaa is A or G
  MOD_RES (18)..(19)..(20)..(21): Xaa is A or G or is absent
XKNHQLFVQVEKXXXXXXXXXVKAMKVSREETPVXEL

SEQ ID NO: 17243 - protein, 39 aa, Artificial Sequence
  GFR-binding peptide
  MOD_RES (37)..(37): Xaa is C or S
  MOD_RES (13)..(14)..(15)..(16)..(17): Xaa is A or G
  MOD_RES (18)..(19)..(20)..(21): Xaa is A or G or is absent
ELHEELRSMEGIXXXXXXXXXMIQVTINSHHVRSPQXKV

SEQ ID NO: 17244 - protein, 34 aa, Artificial Sequence
  GFR-binding peptide
  MOD_RES (1)..(1): Xaa is C or S
  MOD_RES (13)..(14)..(15)..(16)..(17): Xaa is A or G
  MOD_RES (18)..(19)..(20)..(21): Xaa is A or G or is absent
XQSHEELVQVEKXXXXXXXXXVKAMKVSRQGTPV

SEQ ID NO: 17245 - protein, 39 aa, Artificial Sequence
  GFR-binding peptide
  MOD_RES (1)..(35): Xaa is C or S
XQSHEELVTAKKHQGQHPKIRIKRMQVPRQGTPVXELGE

SEQ ID NO: 17246 - protein, 39 aa, Artificial Sequence
  GFR-binding peptide
  MOD_RES (36)..(36): Xaa is C or S
LHDELTVQVEKFIPKKRVIEVKAVKVSRLQVQTPRXQVN

SEQ ID NO: 17247 - protein, 34 aa, Artificial Sequence
  GFR-binding peptide
  MOD_RES (33)..(33): Xaa is C or S
  MOD_RES (11)..(12)..(13)..(14)..(15): Xaa is A or G
  MOD_RES (16)..(17)..(18)..(19): Xaa is A or G or is absent
SHEELSMEGIXXXXXXXXXMIQMTINSQGTPVXE

SEQ ID NO: 17248 - protein, 37 aa, Artificial Sequence
  GFR-binding peptide
  MOD_RES (2)..(36): Xaa is C or S
EXKNHQLFVQVEKHQGQHPKIRVKAMKVSREETPVXE

SEQ ID NO: 17249 - protein, 42 aa, Artificial Sequence
  GFR-binding peptide
  MOD_RES (1)..(3)..(40): Xaa is C or S
  MOD_RES (16)..(17)..(18)..(19)..(20): Xaa is A or G
  MOD_RES (21)..(22)..(23)..(24): Xaa is A or G or is absent
XAXELHEELRSMEGLXXXXXXXXXMIQVTINSHHVRSPQXKV

SEQ ID NO: 17250 - protein, 39 aa, Artificial Sequence
  GFR-binding peptide
  MOD_RES (1)..(3)..(37): Xaa is C or S
  MOD_RES (15)..(16)..(17)..(18)..(19): Xaa is A or G
  MOD_RES (20)..(21)..(22)..(23): Xaa is A or G or is absent
XEXQSHEELSMEGIXXXXXXXXXMIQMTINSQGTPVXEL

SEQ ID NO: 17251 - protein, 37 aa, Artificial Sequence
  GFR-binding peptide
  MOD_RES (2)..(36): Xaa is C or S
  MOD_RES (14)..(15)..(16)..(17)..(18): Xaa is A or G
  MOD_RES (19)..(20)..(21)..(22): Xaa is A or G or is absent
EXKNHQLFVQVEKXXXXXXXXXVKAMKVSREETPVXE

SEQ ID NO: 17252 - protein, 35 aa, Artificial Sequence
  GFR-binding peptide
  MOD_RES (33)..(33): Xaa is C or S
SHEELSMEGIHQGQHPKIRMIQMTINSQGTPVXEL

SEQ ID NO: 17253 - protein, 35 aa, Artificial Sequence
  GFR-binding peptide
  MOD_RES (33)..(33): Xaa is C or S
  MOD_RES (11)..(12)..(13)..(14)..(15): Xaa is A or G
  MOD_RES (16)..(17)..(18)..(19): Xaa is A or G or is absent
SHEELSMEGLXXXXXXXXXMIQMTINSQGTPVXEL

SEQ ID NO: 17254 - protein, 37 aa, Artificial Sequence
  GFR-binding peptide
  MOD_RES (1)..(3)..(37): Xaa is C or S
XEXKNHQLFSMEGLHQGQHPKIRMIQMTINSEETPVX

SEQ ID NO: 17255 - protein, 39 aa, Artificial Sequence
  GFR-binding peptide
  MOD_RES (33)..(33): Xaa is C or S
  MOD_RES (11)..(12)..(13)..(14)..(15): Xaa is A or G
  MOD_RES (16)..(17)..(18)..(19): Xaa is A or G or is absent
SHEELVQVEKXXXXXXXXXVKAMKVSRQGTPVXELGEDN

SEQ ID NO: 17256 - protein, 40 aa, Artificial Sequence
  GFR-binding peptide
  MOD_RES (34)..(34): Xaa is C or S
  MOD_RES (12)..(13)..(14)..(15)..(16): Xaa is A or G
  MOD_RES (17)..(18)..(19)..(20): Xaa is A or G or is absent
KNHQLFVQVEKXXXXXXXXXVKAMKVSREETPVXELGEDN

SEQ ID NO: 17257 - protein, 34 aa, Artificial Sequence
  GFR-binding peptide
LHDELTSMEGIFIPKKRVIEMIQVTINSLQVQTP

SEQ ID NO: 17258 - protein, 37 aa, Artificial Sequence
  GFR-binding peptide
  MOD_RES (1)..(35): Xaa is C or S
  MOD_RES (13)..(14)..(15)..(16)..(17): Xaa is A or G
  MOD_RES (18)..(19)..(20)..(21): Xaa is A or G or is absent
XQSHEELSMEGIXXXXXXXXXMIQMTINSQGTPVXEL

SEQ ID NO: 17259 - protein, 39 aa, Artificial Sequence
  GFR-binding peptide
  MOD_RES (37)..(37): Xaa is C or S
ALHDELTVTAKKFIPKKRVIEIKRVQVPRLQVQTPRXQV

SEQ ID NO: 17260 - protein, 40 aa, Artificial Sequence
  GFR-binding peptide
  MOD_RES (37)..(37): Xaa is C or S
ELHEELRVTAKKLKPKKRVYEIKRVQVPRHHVRSPQXKVS

SEQ ID NO: 17261 - protein, 34 aa, Artificial Sequence
  GFR-binding peptide
  MOD_RES (34)..(34): Xaa is C or S
  MOD_RES (12)..(13)..(14)..(15)..(16): Xaa is A or G
  MOD_RES (17)..(18)..(19)..(20): Xaa is A or G or is absent
QSHEELVTAKKXXXXXXXXXIKRMQVPRQGTPVX

SEQ ID NO: 17262 - protein, 39 aa, Artificial Sequence
  GFR-binding peptide
  MOD_RES (2)..(39): Xaa is C or S
  MOD_RES (15)..(16)..(17)..(18)..(19): Xaa is A or G
  MOD_RES (20)..(21)..(22)..(23): Xaa is A or G or is absent
KXALHDELTSMEGLXXXXXXXXXMIQVTINSLQVQTPRX

SEQ ID NO: 17263 - protein, 40 aa, Artificial Sequence
  GFR-binding peptide
  MOD_RES (37)..(37): Xaa is C or S
ELHEELRSMEGLLKPKKRVYEMIQVTINSHHVRSPQXKVS

SEQ ID NO: 17264 - protein, 37 aa, Artificial Sequence
  GFR-binding peptide
  MOD_RES (1)..(3): Xaa is C or S
  MOD_RES (16)..(17)..(18)..(19)..(20): Xaa is A or G
  MOD_RES (21)..(22)..(23)..(24): Xaa is A or G or is absent
XKXALHDELTSMEGLXXXXXXXXXMIQVTINSLQVQT

SEQ ID NO: 17265 - protein, 35 aa, Artificial Sequence
  GFR-binding peptide
  MOD_RES (2)..(2): Xaa is C or S
EXQSHEELSMEGIHQGQHPKIRMIQMTINSQGTPV

SEQ ID NO: 17266 - protein, 40 aa, Artificial Sequence
  GFR-binding peptide
  MOD_RES (1)..(38): Xaa is C or S
  MOD_RES (14)..(15)..(16)..(17)..(18): Xaa is A or G
  MOD_RES (19)..(20)..(21)..(22): Xaa is A or G or is absent
XALHDELTSMEGLXXXXXXXXXMIQVTINSLQVQTPRXQV

SEQ ID NO: 17267 - protein, 34 aa, Artificial Sequence
  GFR-binding peptide
  MOD_RES (13)..(14)..(15)..(16)..(17): Xaa is A or G
  MOD_RES (18)..(19)..(20)..(21): Xaa is A or G or is absent
ELHEELRVTAKKXXXXXXXXXIKRVQVPRHHVRS

SEQ ID NO: 17268 - protein, 39 aa, Artificial Sequence
  GFR-binding peptide
  MOD_RES (1)..(3)..(37): Xaa is C or S
  MOD_RES (15)..(16)..(17)..(18)..(19): Xaa is A or G
  MOD_RES (20)..(21)..(22)..(23): Xaa is A or G or is absent
XEXKNHQLFVQVEKXXXXXXXXXVKAMKVSREETPVXEL

SEQ ID NO: 17269 - protein, 43 aa, Artificial Sequence
  GFR-binding peptide
  MOD_RES (2)..(4)..(41): Xaa is C or S
  MOD_RES (17)..(18)..(19)..(20)..(21): Xaa is A or G
  MOD_RES (22)..(23)..(24)..(25): Xaa is A or G or is absent
AXAXELHEELRSMEGLXXXXXXXXXMIQVTINSHHVRSPQXKV

SEQ ID NO: 17270 - protein, 41 aa, Artificial Sequence
  GFR-binding peptide
  MOD_RES (1)..(3)..(37): Xaa is C or S
  MOD_RES (15)..(16)..(17)..(18)..(19): Xaa is A or G
  MOD_RES (20)..(21)..(22)..(23): Xaa is A or G or is absent
XEXQSHEELSMEGLXXXXXXXXXMIQMTINSQGTPVXELGE

SEQ ID NO: 17271 - protein, 32 aa, Artificial Sequence
  GFR-binding peptide
NHQLFSMEGIHQGQHPKIRMIQMTINSEETPV

SEQ ID NO: 17272 - protein, 35 aa, Artificial Sequence
  GFR-binding peptide
  MOD_RES (35)..(35): Xaa is C or S
  MOD_RES (11)..(12)..(13)..(14)..(15): Xaa is A or G
  MOD_RES (16)..(17)..(18)..(19): Xaa is A or G or is absent
HDELTVQVEKXXXXXXXXXVKAVKVSRLQVQTPRX

SEQ ID NO: 17273 - protein, 38 aa, Artificial Sequence
  GFR-binding peptide
  MOD_RES (2)..(4): Xaa is C or S
AXAXELHEELRSMEGILKPKKRVYEMIQVTINSHHVRS

SEQ ID NO: 17274 - protein, 35 aa, Artificial Sequence
  GFR-binding peptide
  MOD_RES (34)..(34): Xaa is C or S
  MOD_RES (12)..(13)..(14)..(15)..(16): Xaa is A or G
  MOD_RES (17)..(18)..(19)..(20): Xaa is A or G or is absent
KNHQLFSMEGLXXXXXXXXXMIQMTINSEETPVXE

SEQ ID NO: 17275 - protein, 37 aa, Artificial Sequence
  GFR-binding peptide
  MOD_RES (1)..(3)..(37): Xaa is C or S
  MOD_RES (15)..(16)..(17)..(18)..(19): Xaa is A or G
  MOD_RES (20)..(21)..(22)..(23): Xaa is A or G or is absent
XEXQSHEELVQVEKXXXXXXXXXVKAMKVSRQGTPVX

SEQ ID NO: 17276 - protein, 42 aa, Artificial Sequence
  GFR-binding peptide
  MOD_RES (2)..(4)..(38): Xaa is C or S
RXEXQSHEELVTAKKHQGQHPKIRIKRMQVPRQGTPVXELGE

SEQ ID NO: 17277 - protein, 41 aa, Artificial Sequence
  GFR-binding peptide
  MOD_RES (1)..(3)..(40): Xaa is C or S
  MOD_RES (16)..(17)..(18)..(19)..(20): Xaa is A or G
  MOD_RES (21)..(22)..(23)..(24): Xaa is A or G or is absent
XKXALHDELTVQVEKXXXXXXXXXVKAVKVSRLQVQTPRXQ

SEQ ID NO: 17278 - protein, 38 aa, Artificial Sequence
  GFR-binding peptide
  MOD_RES (2)..(2): Xaa is C or S
  MOD_RES (15)..(16)..(17)..(18)..(19): Xaa is A or G
  MOD_RES (20)..(21)..(22)..(23): Xaa is A or G or is absent
AXELHEELRSMEGIXXXXXXXXXMIQVTINSHHVRSPQ

SEQ ID NO: 17279 - protein, 38 aa, Artificial Sequence
  GFR-binding peptide
  MOD_RES (33)..(33): Xaa is C or S
SHEELSMEGLHQGQHPKIRMIQMTINSQGTPVXELGED

SEQ ID NO: 17280 - protein, 36 aa, Artificial Sequence
  GFR-binding peptide
  MOD_RES (35)..(35): Xaa is C or S
  MOD_RES (11)..(12)..(13)..(14)..(15): Xaa is A or G
  MOD_RES (16)..(17)..(18)..(19): Xaa is A or G or is absent
HDELTSMEGIXXXXXXXXXMIQVTINSLQVQTPRXQ

SEQ ID NO: 17281 - protein, 33 aa, Artificial Sequence
  GFR-binding peptide
  MOD_RES (33)..(33): Xaa is C or S
NHQLFSMEGLHQGQHPKIRMIQMTINSEETPVX

SEQ ID NO: 17282 - protein, 39 aa, Artificial Sequence
  GFR-binding peptide
  MOD_RES (36)..(36): Xaa is C or S
LHEELRSMEGILKPKKRVYEMIQVTINSHHVRSPQXKVS

SEQ ID NO: 17283 - protein, 39 aa, Artificial Sequence
  GFR-binding peptide
  MOD_RES (1)..(38): Xaa is C or S
  MOD_RES (14)..(15)..(16)..(17)..(18): Xaa is A or G
  MOD_RES (19)..(20)..(21)..(22): Xaa is A or G or is absent
XALHDELTSMEGIXXXXXXXXXMIQVTINSLQVQTPRXQ

SEQ ID NO: 17284 - protein, 41 aa, Artificial Sequence
  GFR-binding peptide
  MOD_RES (2)..(4)..(38): Xaa is C or S
RXEXQSHEELVTAKKHQGQHPKIRIKRMQVPRQGTPVXELG

SEQ ID NO: 17285 - protein, 33 aa, Artificial Sequence
  GFR-binding peptide
  MOD_RES (12)..(13)..(14)..(15)..(16): Xaa is A or G
  MOD_RES (17)..(18)..(19)..(20): Xaa is A or G or is absent
LHDELTVQVEKXXXXXXXXXVKAVKVSRLQVQT

SEQ ID NO: 17286 - protein, 38 aa, Artificial Sequence
  GFR-binding peptide
  MOD_RES (33)..(33): Xaa is C or S
SHEELVTAKKHQGQHPKIRIKRMQVPRQGTPVXELGED

SEQ ID NO: 17287 - protein, 43 aa, Artificial Sequence
  GFR-binding peptide
  MOD_RES (1)..(3)..(37): Xaa is C or S
  MOD_RES (15)..(16)..(17)..(18)..(19): Xaa is A or G
  MOD_RES (20)..(21)..(22)..(23): Xaa is A or G or is absent
XEXQSHEELSMEGLXXXXXXXXXMIQMTINSQGTPVXELGEDN

SEQ ID NO: 17288 - protein, 41 aa, Artificial Sequence
  GFR-binding peptide
  MOD_RES (1)..(3)..(40): Xaa is C or S
  MOD_RES (16)..(17)..(18)..(19)..(20): Xaa is A or G
  MOD_RES (21)..(22)..(23)..(24): Xaa is A or G or is absent
XKXALHDELTVTAKKXXXXXXXXXIKRVQVPRLQVQTPRXQ

SEQ ID NO: 17289 - protein, 39 aa, Artificial Sequence
  GFR-binding peptide
  MOD_RES (1)..(38): Xaa is C or S
XALHDELTSMEGIFIPKKRVIEMIQVTINSLQVQTPRXQ

SEQ ID NO: 17290 - protein, 39 aa, Artificial Sequence
  GFR-binding peptide
  MOD_RES (2)..(39): Xaa is C or S
KXALHDELTVTAKKFIPKKRVIEIKRVQVPRLQVQTPRX

SEQ ID NO: 17291 - protein, 39 aa, Artificial Sequence
  GFR-binding peptide
  MOD_RES (34)..(34): Xaa is C or S
  MOD_RES (12)..(13)..(14)..(15)..(16): Xaa is A or G
  MOD_RES (17)..(18)..(19)..(20): Xaa is A or G or is absent
QSHEELVQVEKXXXXXXXXXVKAMKVSRQGTPVXELGED

SEQ ID NO: 17292 - protein, 39 aa, Artificial Sequence
  GFR-binding peptide
  MOD_RES (36)..(36): Xaa is C or S
LHEELRVTAKKLKPKKRVYEIKRVQVPRHHVRSPQXKVS

SEQ ID NO: 17293 - protein, 38 aa, Artificial Sequence
  GFR-binding peptide
  MOD_RES (1)..(3): Xaa is C or S
  MOD_RES (16)..(17)..(18)..(19)..(20): Xaa is A or G
  MOD_RES (21)..(22)..(23)..(24): Xaa is A or G or is absent
XAXELHEELRVQVEKXXXXXXXXXVKAVKVSRHHVRSP

SEQ ID NO: 17294 - protein, 35 aa, Artificial Sequence
  GFR-binding peptide
  MOD_RES (2)..(2): Xaa is C or S
  MOD_RES (14)..(15)..(16)..(17)..(18): Xaa is A or G
  MOD_RES (19)..(20)..(21)..(22): Xaa is A or G or is absent
EXQSHEELSMEGIXXXXXXXXXMIQMTINSQGTPV

SEQ ID NO: 17295 - protein, 40 aa, Artificial Sequence
  GFR-binding peptide
  MOD_RES (2)..(36): Xaa is C or S
  MOD_RES (14)..(15)..(16)..(17)..(18): Xaa is A or G
  MOD_RES (19)..(20)..(21)..(22): Xaa is A or G or is absent
EXQSHEELVTAKKXXXXXXXXXIKRMQVPRQGTPVXELGE

SEQ ID NO: 17296 - protein, 42 aa, Artificial Sequence
  GFR-binding peptide
  MOD_RES (2)..(4)..(38): Xaa is C or S
RXEXQSHEELVQVEKHQGQHPKIRVKAMKVSRQGTPVXELGE

SEQ ID NO: 17297 - protein, 41 aa, Artificial Sequence
  GFR-binding peptide
  MOD_RES (1)..(3)..(37): Xaa is C or S
  MOD_RES (15)..(16)..(17)..(18)..(19): Xaa is A or G
  MOD_RES (20)..(21)..(22)..(23): Xaa is A or G or is absent
XEXKNHQLFVTAKKXXXXXXXXXIKRMQVPREETPVXELGE

SEQ ID NO: 17298 - protein, 42 aa, Artificial Sequence
  GFR-binding peptide
  MOD_RES (2)..(39): Xaa is C or S
AXELHEELRSMEGILKPKKRVYEMIQVTINSHHVRSPQXKVS

SEQ ID NO: 17299 - protein, 43 aa, Artificial Sequence
  GFR-binding peptide
  MOD_RES (1)..(3)..(37): Xaa is C or S
XEXKNHQLFVQVEKHQGQHPKIRVKAMKVSREETPVXELGEDN

SEQ ID NO: 17300 - protein, 35 aa, Artificial Sequence
  GFR-binding peptide
  MOD_RES (1)..(1): Xaa is C or S
  MOD_RES (14)..(15)..(16)..(17)..(18): Xaa is A or G
  MOD_RES (19)..(20)..(21)..(22): Xaa is A or G or is absent
XELHEELRSMEGIXXXXXXXXXMIQVTINSHHVRS

SEQ ID NO: 17301 - protein, 40 aa, Artificial Sequence
  GFR-binding peptide
  MOD_RES (36)..(36): Xaa is C or S
LHEELRVQVEKLKPKKRVYEVKAVKVSRHHVRSPQXKVSS

SEQ ID NO: 17302 - protein, 34 aa, Artificial Sequence
  GFR-binding peptide
LHEELRVTAKKLKPKKRVYEIKRVQVPRHHVRSP

SEQ ID NO: 17303 - protein, 39 aa, Artificial Sequence
  GFR-binding peptide
  MOD_RES (2)..(4)..(38): Xaa is C or S
  MOD_RES (16)..(17)..(18)..(19)..(20): Xaa is A or G
  MOD_RES (21)..(22)..(23)..(24): Xaa is A or G or is absent
RXEXQSHEELSMEGIXXXXXXXXXMIQMTINSQGTPVXE

SEQ ID NO: 17304 - protein, 38 aa, Artificial Sequence
  GFR-binding peptide
  MOD_RES (36)..(36): Xaa is C or S
LHEELRSMEGLLKPKKRVYEMIQVTINSHHVRSPQXKV

SEQ ID NO: 17305 - protein, 34 aa, Artificial Sequence
  GFR-binding peptide
  MOD_RES (34)..(34): Xaa is C or S
KNHQLFSMEGIHQGQHPKIRMIQMTINSEETPVX

SEQ ID NO: 17306 - protein, 40 aa, Artificial Sequence
  GFR-binding peptide
  MOD_RES (37)..(37): Xaa is C or S
  MOD_RES (13)..(14)..(15)..(16)..(17): Xaa is A or G
  MOD_RES (18)..(19)..(20)..(21): Xaa is A or G or is absent
ALHDELTSMEGLXXXXXXXXXMIQVTINSLQVQTPRXQVN

SEQ ID NO: 17307 - protein, 34 aa, Artificial Sequence
  GFR-binding peptide
LHEELRSMEGILKPKKRVYEMIQVTINSHHVRSP

SEQ ID NO: 17308 - protein, 33 aa, Artificial Sequence
  GFR-binding peptide
  MOD_RES (12)..(13)..(14)..(15)..(16): Xaa is A or G
  MOD_RES (17)..(18)..(19)..(20): Xaa is A or G or is absent
LHEELRVQVEKXXXXXXXXXVKAVKVSRHHVRS

SEQ ID NO: 17309 - protein, 38 aa, Artificial Sequence
  GFR-binding peptide
  MOD_RES (34)..(34): Xaa is C or S
  MOD_RES (12)..(13)..(14)..(15)..(16): Xaa is A or G
  MOD_RES (17)..(18)..(19)..(20): Xaa is A or G or is absent
KNHQLFSMEGIXXXXXXXXXMIQMTINSEETPVXELGE

SEQ ID NO: 17310 - protein, 33 aa, Artificial Sequence
  GFR-binding peptide
  MOD_RES (12)..(13)..(14)..(15)..(16): Xaa is A or G
  MOD_RES (17)..(18)..(19)..(20): Xaa is A or G or is absent
KNHQLFVTAKKXXXXXXXXXIKRMQVPREETPV

SEQ ID NO: 17311 - protein, 39 aa, Artificial Sequence
  GFR-binding peptide
  MOD_RES (36)..(36): Xaa is C or S
  MOD_RES (12)..(13)..(14)..(15)..(16): Xaa is A or G
  MOD_RES (17)..(18)..(19)..(20): Xaa is A or G or is absent
LHDELTSMEGLXXXXXXXXXMIQVTINSLQVQTPRXQVN

SEQ ID NO: 17312 - protein, 41 aa, Artificial Sequence
  GFR-binding peptide
  MOD_RES (2)..(4)..(38): Xaa is C or S
  MOD_RES (16)..(17)..(18)..(19)..(20): Xaa is A or G
  MOD_RES (21)..(22)..(23)..(24): Xaa is A or G or is absent
RXEXQSHEELSMEGIXXXXXXXXXMIQMTINSQGTPVXELG

SEQ ID NO: 17313 - protein, 42 aa, Artificial Sequence
  GFR-binding peptide
  MOD_RES (2)..(36): Xaa is C or S
EXQSHEELSMEGLHQGQHPKIRMIQMTINSQGTPVXELGEDN

SEQ ID NO: 17314 - protein, 37 aa, Artificial Sequence
  GFR-binding peptide
  MOD_RES (1)..(35): Xaa is C or S
XQSHEELSMEGLHQGQHPKIRMIQMTINSQGTPVXEL

SEQ ID NO: 17315 - protein, 35 aa, Artificial Sequence
  GFR-binding peptide
  MOD_RES (1)..(35): Xaa is C or S
XKNHQLFSMEGIHQGQHPKIRMIQMTINSEETPVX

SEQ ID NO: 17316 - protein, 38 aa, Artificial Sequence
  GFR-binding peptide
  MOD_RES (35)..(35): Xaa is C or S
HDELTSMEGLFIPKKRVIEMIQVTINSLQVQTPRXQVN

SEQ ID NO: 17317 - protein, 35 aa, Artificial Sequence
  GFR-binding peptide
  MOD_RES (34)..(34): Xaa is C or S
QSHEELVQVEKHQGQHPKIRVKAMKVSRQGTPVXE

SEQ ID NO: 17318 - protein, 34 aa, Artificial Sequence
  GFR-binding peptide
  MOD_RES (33)..(33): Xaa is C or S
NHQLFSMEGIHQGQHPKIRMIQMTINSEETPVXE

SEQ ID NO: 17319 - protein, 37 aa, Artificial Sequence
  GFR-binding peptide
  MOD_RES (35)..(35): Xaa is C or S
  MOD_RES (11)..(12)..(13)..(14)..(15): Xaa is A or G
  MOD_RES (16)..(17)..(18)..(19): Xaa is A or G or is absent
HDELTSMEGIXXXXXXXXXMIQVTINSLQVQTPRXQV

SEQ ID NO: 17320 - protein, 37 aa, Artificial Sequence
  GFR-binding peptide
  MOD_RES (36)..(36): Xaa is C or S
  MOD_RES (12)..(13)..(14)..(15)..(16): Xaa is A or G
  MOD_RES (17)..(18)..(19)..(20): Xaa is A or G or is absent
LHEELRSMEGLXXXXXXXXXMIQVTINSHHVRSPQXK

SEQ ID NO: 17321 - protein, 36 aa, Artificial Sequence
  GFR-binding peptide
  MOD_RES (1)..(35): Xaa is C or S
XQSHEELVTAKKHQGQHPKIRIKRMQVPRQGTPVXE

SEQ ID NO: 17322 - protein, 41 aa, Artificial Sequence
  GFR-binding peptide
  MOD_RES (1)..(35): Xaa is C or S
XQSHEELSMEGLHQGQHPKIRMIQMTINSQGTPVXELGEDN

SEQ ID NO: 17323 - protein, 42 aa, Artificial Sequence
  GFR-binding peptide
  MOD_RES (1)..(3)..(37): Xaa is C or S
XEXKNHQLFVQVEKHQGQHPKIRVKAMKVSREETPVXELGED

SEQ ID NO: 17324 - protein, 38 aa, Artificial Sequence
  GFR-binding peptide
  MOD_RES (2)..(36): Xaa is C or S
EXQSHEELVTAKKHQGQHPKIRIKRMQVPRQGTPVXEL

SEQ ID NO: 17325 - protein, 33 aa, Artificial Sequence
  GFR-binding peptide
  MOD_RES (12)..(13)..(14)..(15)..(16): Xaa is A or G
  MOD_RES (17)..(18)..(19)..(20): Xaa is A or G or is absent
KNHQLFSMEGIXXXXXXXXXMIQMTINSEETPV

SEQ ID NO: 17326 - protein, 37 aa, Artificial Sequence
  GFR-binding peptide
  MOD_RES (33)..(33): Xaa is C or S
NHQLFVTAKKHQGQHPKIRIKRMQVPREETPVXELGE

SEQ ID NO: 17327 - protein, 35 aa, Artificial Sequence
  GFR-binding peptide
  MOD_RES (1)..(35): Xaa is C or S
  MOD_RES (13)..(14)..(15)..(16)..(17): Xaa is A or G
  MOD_RES (18)..(19)..(20)..(21): Xaa is A or G or is absent
XQSHEELVTAKKXXXXXXXXXIKRMQVPRQGTPVX

SEQ ID NO: 17328 - protein, 39 aa, Artificial Sequence
  GFR-binding peptide
  MOD_RES (33)..(33): Xaa is C or S
NHQLFSMEGIHQGQHPKIRMIQMTINSEETPVXELGEDN

SEQ ID NO: 17329 - protein, 38 aa, Artificial Sequence
  GFR-binding peptide
  MOD_RES (33)..(33): Xaa is C or S
  MOD_RES (11)..(12)..(13)..(14)..(15): Xaa is A or G
  MOD_RES (16)..(17)..(18)..(19): Xaa is A or G or is absent
NHQLFSMEGLXXXXXXXXXMIQMTINSEETPVXELGED

SEQ ID NO: 17330 - protein, 35 aa, Artificial Sequence
  GFR-binding peptide
  MOD_RES (33)..(33): Xaa is C or S
NHQLFVTAKKHQGQHPKIRIKRMQVPREETPVXEL

SEQ ID NO: 17331 - protein, 37 aa, Artificial Sequence
  GFR-binding peptide
  MOD_RES (33)..(33): Xaa is C or S
  MOD_RES (11)..(12)..(13)..(14)..(15): Xaa is A or G
  MOD_RES (16)..(17)..(18)..(19): Xaa is A or G or is absent
SHEELSMEGLXXXXXXXXXMIQMTINSQGTPVXELGE

SEQ ID NO: 17332 - protein, 35 aa, Artificial Sequence
  GFR-binding peptide
  MOD_RES (1)..(1): Xaa is C or S
XALHDELTVTAKKFIPKKRVIEIKRVQVPRLQVQT

SEQ ID NO: 17333 - protein, 42 aa, Artificial Sequence
  GFR-binding peptide
  MOD_RES (2)..(36): Xaa is C or S
  MOD_RES (14)..(15)..(16)..(17)..(18): Xaa is A or G
  MOD_RES (19)..(20)..(21)..(22): Xaa is A or G or is absent
EXQSHEELSMEGIXXXXXXXXXMIQMTINSQGTPVXELGEDN

SEQ ID NO: 17334 - protein, 42 aa, Artificial Sequence
  GFR-binding peptide
  MOD_RES (1)..(3)..(37): Xaa is C or S
  MOD_RES (15)..(16)..(17)..(18)..(19): Xaa is A or G
  MOD_RES (20)..(21)..(22)..(23): Xaa is A or G or is absent
XEXQSHEELVTAKKXXXXXXXXXIKRMQVPRQGTPVXELGED

SEQ ID NO: 17335 - protein, 37 aa, Artificial Sequence
  GFR-binding peptide
  MOD_RES (2)..(2): Xaa is C or S
  MOD_RES (15)..(16)..(17)..(18)..(19): Xaa is A or G
  MOD_RES (20)..(21)..(22)..(23): Xaa is A or G or is absent
KXALHDELTSMEGIXXXXXXXXXMIQVTINSLQVQTP

SEQ ID NO: 17336 - protein, 33 aa, Artificial Sequence
  GFR-binding peptide
  MOD_RES (11)..(12)..(13)..(14)..(15): Xaa is A or G
  MOD_RES (16)..(17)..(18)..(19): Xaa is A or G or is absent
HEELRSMEGIXXXXXXXXXMIQVTINSHHVRSP

SEQ ID NO: 17337 - protein, 33 aa, Artificial Sequence
  GFR-binding peptide
  MOD_RES (11)..(12)..(13)..(14)..(15): Xaa is A or G
  MOD_RES (16)..(17)..(18)..(19): Xaa is A or G or is absent
HDELTVTAKKXXXXXXXXXIKRVQVPRLQVQTP

SEQ ID NO: 17338 - protein, 43 aa, Artificial Sequence
  GFR-binding peptide
  MOD_RES (2)..(4)..(41): Xaa is C or S
  MOD_RES (17)..(18)..(19)..(20)..(21): Xaa is A or G
  MOD_RES (22)..(23)..(24)..(25): Xaa is A or G or is absent
EXKXALHDELTSMEGIXXXXXXXXXMIQVTINSLQVQTPRXQV

SEQ ID NO: 17339 - protein, 40 aa, Artificial Sequence
  GFR-binding peptide
  MOD_RES (1)..(35): Xaa is C or S
XKNHQLFSMEGIHQGQHPKIRMIQMTINSEETPVXELGED

SEQ ID NO: 17340 - protein, 40 aa, Artificial Sequence
  GFR-binding peptide
  MOD_RES (2)..(4): Xaa is C or S
EXKXALHDELTVQVEKFIPKKRVIEVKAVKVSRLQVQTPR

SEQ ID NO: 17341 - protein, 37 aa, Artificial Sequence
  GFR-binding peptide
  MOD_RES (2)..(2): Xaa is C or S
KXALHDELTSMEGIFIPKKRVIEMIQVTINSLQVQTP

SEQ ID NO: 17342 - protein, 38 aa, Artificial Sequence
  GFR-binding peptide
  MOD_RES (37)..(37): Xaa is C or S
ELHEELRSMEGLLKPKKRVYEMIQVTINSHHVRSPQXK

SEQ ID NO: 17343 - protein, 38 aa, Artificial Sequence
  GFR-binding peptide
  MOD_RES (34)..(34): Xaa is C or S
  MOD_RES (12)..(13)..(14)..(15)..(16): Xaa is A or G
  MOD_RES (17)..(18)..(19)..(20): Xaa is A or G or is absent
KNHQLFVTAKKXXXXXXXXXIKRMQVPREETPVXELGE

SEQ ID NO: 17344 - protein, 33 aa, Artificial Sequence
  GFR-binding peptide
  MOD_RES (33)..(33): Xaa is C or S
SHEELSMEGIHQGQHPKIRMIQMTINSQGTPVX

SEQ ID NO: 17345 - protein, 35 aa, Artificial Sequence
  GFR-binding peptide
  MOD_RES (2)..(2): Xaa is C or S
EXKNHQLFVTAKKHQGQHPKIRIKRMQVPREETPV

SEQ ID NO: 17346 - protein, 41 aa, Artificial Sequence
  GFR-binding peptide
  MOD_RES (1)..(35): Xaa is C or S
  MOD_RES (13)..(14)..(15)..(16)..(17): Xaa is A or G
  MOD_RES (18)..(19)..(20)..(21): Xaa is A or G or is absent
XKNHQLFSMEGLXXXXXXXXXMIQMTINSEETPVXELGEDN

SEQ ID NO: 17347 - protein, 39 aa, Artificial Sequence
  GFR-binding peptide
  MOD_RES (35)..(35): Xaa is C or S
HEELRSMEGLLKPKKRVYEMIQVTINSHHVRSPQXKVSS

SEQ ID NO: 17348 - protein, 42 aa, Artificial Sequence
  GFR-binding peptide
  MOD_RES (2)..(39): Xaa is C or S
  MOD_RES (15)..(16)..(17)..(18)..(19): Xaa is A or G
  MOD_RES (20)..(21)..(22)..(23): Xaa is A or G or is absent
AXELHEELRVQVEKXXXXXXXXXVKAVKVSRHHVRSPQXKVS

SEQ ID NO: 17349 - protein, 37 aa, Artificial Sequence
  GFR-binding peptide
  MOD_RES (2)..(2): Xaa is C or S
  MOD_RES (15)..(16)..(17)..(18)..(19): Xaa is A or G
  MOD_RES (20)..(21)..(22)..(23): Xaa is A or G or is absent
AXELHEELRSMEGLXXXXXXXXXMIQVTINSHHVRSP

SEQ ID NO: 17350 - protein, 42 aa, Artificial Sequence
  GFR-binding peptide
  MOD_RES (2)..(39): Xaa is C or S
KXALHDELTSMEGLFIPKKRVIEMIQVTINSLQVQTPRXQVN

SEQ ID NO: 17351 - protein, 42 aa, Artificial Sequence
  GFR-binding peptide
  MOD_RES (2)..(39): Xaa is C or S
KXALHDELTVTAKKFIPKKRVIEIKRVQVPRLQVQTPRXQVN

SEQ ID NO: 17352 - protein, 38 aa, Artificial Sequence
  GFR-binding peptide
  MOD_RES (34)..(34): Xaa is C or S
KNHQLFSMEGLHQGQHPKIRMIQMTINSEETPVXELGE

SEQ ID NO: 17353 - protein, 42 aa, Artificial Sequence
  GFR-binding peptide
  MOD_RES (2)..(39): Xaa is C or S
  MOD_RES (15)..(16)..(17)..(18)..(19): Xaa is A or G
  MOD_RES (20)..(21)..(22)..(23): Xaa is A or G or is absent
KXALHDELTSMEGLXXXXXXXXXMIQVTINSLQVQTPRXQVN

SEQ ID NO: 17354 - protein, 37 aa, Artificial Sequence
  GFR-binding peptide
  MOD_RES (33)..(33): Xaa is C or S
  MOD_RES (11)..(12)..(13)..(14)..(15): Xaa is A or G
  MOD_RES (16)..(17)..(18)..(19): Xaa is A or G or is absent
NHQLFSMEGIXXXXXXXXXMIQMTINSEETPVXELGE

SEQ ID NO: 17355 - protein, 41 aa, Artificial Sequence
  GFR-binding peptide
  MOD_RES (1)..(35): Xaa is C or S
XKNHQLFSMEGIHQGQHPKIRMIQMTINSEETPVXELGEDN

SEQ ID NO: 17356 - protein, 41 aa, Artificial Sequence
  GFR-binding peptide
  MOD_RES (2)..(4)..(41): Xaa is C or S
  MOD_RES (17)..(18)..(19)..(20)..(21): Xaa is A or G
  MOD_RES (22)..(23)..(24)..(25): Xaa is A or G or is absent
EXKXALHDELTSMEGIXXXXXXXXXMIQVTINSLQVQTPRX

SEQ ID NO: 17357 - protein, 39 aa, Artificial Sequence
  GFR-binding peptide
  MOD_RES (1)..(3): Xaa is C or S
XKXALHDELTVQVEKFIPKKRVIEVKAVKVSRLQVQTPR

SEQ ID NO: 17358 - protein, 34 aa, Artificial Sequence
  GFR-binding peptide
  MOD_RES (33)..(33): Xaa is C or S
SHEELSMEGLHQGQHPKIRMIQMTINSQGTPVXE

SEQ ID NO: 17359 - protein, 39 aa, Artificial Sequence
  GFR-binding peptide
  MOD_RES (37)..(37): Xaa is C or S
  MOD_RES (13)..(14)..(15)..(16)..(17): Xaa is A or G
  MOD_RES (18)..(19)..(20)..(21): Xaa is A or G or is absent
ALHDELTSMEGIXXXXXXXXXMIQVTINSLQVQTPRXQV

SEQ ID NO: 17360 - protein, 42 aa, Artificial Sequence
  GFR-binding peptide
  MOD_RES (2)..(4)..(41): Xaa is C or S
  MOD_RES (17)..(18)..(19)..(20)..(21): Xaa is A or G
  MOD_RES (22)..(23)..(24)..(25): Xaa is A or G or is absent
EXKXALHDELTSMEGIXXXXXXXXXMIQVTINSLQVQTPRXQ

SEQ ID NO: 17361 - protein, 38 aa, Artificial Sequence
  GFR-binding peptide
  MOD_RES (1)..(38): Xaa is C or S
XALHDELTSMEGIFIPKKRVIEMIQVTINSLQVQTPRX

SEQ ID NO: 17362 - protein, 40 aa, Artificial Sequence
  GFR-binding peptide
  MOD_RES (36)..(36): Xaa is C or S
  MOD_RES (12)..(13)..(14)..(15)..(16): Xaa is A or G
  MOD_RES (17)..(18)..(19)..(20): Xaa is A or G or is absent
LHEELRSMEGLXXXXXXXXXMIQVTINSHHVRSPQXKVSS

SEQ ID NO: 17363 - protein, 42 aa, Artificial Sequence
  GFR-binding peptide
  MOD_RES (1)..(38): Xaa is C or S
  MOD_RES (14)..(15)..(16)..(17)..(18): Xaa is A or G
  MOD_RES (19)..(20)..(21)..(22): Xaa is A or G or is absent
XELHEELRSMEGLXXXXXXXXXMIQVTINSHHVRSPQXKVSS

SEQ ID NO: 17364 - protein, 39 aa, Artificial Sequence
  GFR-binding peptide
  MOD_RES (1)..(3)..(37): Xaa is C or S
XEXQSHEELVQVEKHQGQHPKIRVKAMKVSRQGTPVXEL

SEQ ID NO: 17365 - protein, 41 aa, Artificial Sequence
  GFR-binding peptide
  MOD_RES (37)..(37): Xaa is C or S
  MOD_RES (13)..(14)..(15)..(16)..(17): Xaa is A or G
  MOD_RES (18)..(19)..(20)..(21): Xaa is A or G or is absent
ALHDELTVTAKKXXXXXXXXXIKRVQVPRLQVQTPRXQVNR

SEQ ID NO: 17366 - protein, 35 aa, Artificial Sequence
  GFR-binding peptide
  MOD_RES (1)..(35): Xaa is C or S
  MOD_RES (13)..(14)..(15)..(16)..(17): Xaa is A or G
  MOD_RES (18)..(19)..(20)..(21): Xaa is A or G or is absent
XKNHQLFSMEGLXXXXXXXXXMIQMTINSEETPVX

SEQ ID NO: 17367 - protein, 34 aa, Artificial Sequence
  GFR-binding peptide
  MOD_RES (34)..(34): Xaa is C or S
  MOD_RES (12)..(13)..(14)..(15)..(16): Xaa is A or G
  MOD_RES (17)..(18)..(19)..(20): Xaa is A or G or is absent
KNHQLFVQVEKXXXXXXXXXVKAMKVSREETPVX

SEQ ID NO: 17368 - protein, 37 aa, Artificial Sequence
  GFR-binding peptide
  MOD_RES (37)..(37): Xaa is C or S
  MOD_RES (13)..(14)..(15)..(16)..(17): Xaa is A or G
  MOD_RES (18)..(19)..(20)..(21): Xaa is A or G or is absent
ALHDELTVTAKKXXXXXXXXXIKRVQVPRLQVQTPRX

SEQ ID NO: 17369 - protein, 36 aa, Artificial Sequence
  GFR-binding peptide
ALHDELTSMEGIFIPKKRVIEMIQVTINSLQVQTPR

SEQ ID NO: 17370 - protein, 41 aa, Artificial Sequence
  GFR-binding peptide
  MOD_RES (2)..(4)..(41): Xaa is C or S
  MOD_RES (17)..(18)..(19)..(20)..(21): Xaa is A or G
  MOD_RES (22)..(23)..(24)..(25): Xaa is A or G or is absent
AXAXELHEELRSMEGIXXXXXXXXXMIQVTINSHHVRSPQX

SEQ ID NO: 17371 - protein, 35 aa, Artificial Sequence
  GFR-binding peptide
  MOD_RES (1)..(1): Xaa is C or S
XALHDELTVQVEKFIPKKRVIEVKAVKVSRLQVQT

SEQ ID NO: 17372 - protein, 36 aa, Artificial Sequence
  GFR-binding peptide
  MOD_RES (1)..(1): Xaa is C or S
  MOD_RES (14)..(15)..(16)..(17)..(18): Xaa is A or G
  MOD_RES (19)..(20)..(21)..(22): Xaa is A or G or is absent
XELHEELRSMEGLXXXXXXXXXMIQVTINSHHVRSP

SEQ ID NO: 17373 - protein, 44 aa, Artificial Sequence
  GFR-binding peptide
  MOD_RES (1)..(3)..(40): Xaa is C or S
XAXELHEELRSMEGLLKPKKRVYEMIQVTINSHHVRSPQXKVSS

SEQ ID NO: 17374 - protein, 44 aa, Artificial Sequence
  GFR-binding peptide
  MOD_RES (2)..(4)..(38): Xaa is C or S
  MOD_RES (16)..(17)..(18)..(19)..(20): Xaa is A or G
  MOD_RES (21)..(22)..(23)..(24): Xaa is A or G or is absent
RXEXKNHQLFVQVEKXXXXXXXXXVKAMKVSREETPVXELGEDN

SEQ ID NO: 17375 - protein, 40 aa, Artificial Sequence
  GFR-binding peptide
  MOD_RES (2)..(4)..(38): Xaa is C or S
  MOD_RES (16)..(17)..(18)..(19)..(20): Xaa is A or G
  MOD_RES (21)..(22)..(23)..(24): Xaa is A or G or is absent
RXEXKNHQLFVQVEKXXXXXXXXXVKAMKVSREETPVXEL

SEQ ID NO: 17376 - protein, 42 aa, Artificial Sequence
  GFR-binding peptide
  MOD_RES (2)..(36): Xaa is C or S
EXQSHEELVQVEKHQGQHPKIRVKAMKVSRQGTPVXELGEDN

SEQ ID NO: 17377 - protein, 34 aa, Artificial Sequence
  GFR-binding peptide
HDELTVTAKKFIPKKRVIEIKRVQVPRLQVQTPR

SEQ ID NO: 17378 - protein, 39 aa, Artificial Sequence
  GFR-binding peptide
  MOD_RES (1)..(3)..(37): Xaa is C or S
XEXQSHEELSMEGLHQGQHPKIRMIQMTINSQGTPVXEL

SEQ ID NO: 17379 - protein, 34 aa, Artificial Sequence
  GFR-binding peptide
  MOD_RES (1)..(1): Xaa is C or S
XKNHQLFSMEGIHQGQHPKIRMIQMTINSEETPV

SEQ ID NO: 17380 - protein, 34 aa, Artificial Sequence
  GFR-binding peptide
HDELTSMEGIFIPKKRVIEMIQVTINSLQVQTPR

SEQ ID NO: 17381 - protein, 36 aa, Artificial Sequence
  GFR-binding peptide
  MOD_RES (1)..(35): Xaa is C or S
XQSHEELVQVEKHQGQHPKIRVKAMKVSRQGTPVXE

SEQ ID NO: 17382 - protein, 38 aa, Artificial Sequence
  GFR-binding peptide
  MOD_RES (1)..(3)..(37): Xaa is C or S
XEXKNHQLFSMEGIHQGQHPKIRMIQMTINSEETPVXE

SEQ ID NO: 17383 - protein, 34 aa, Artificial Sequence
  GFR-binding peptide
ALHDELTVTAKKFIPKKRVIEIKRVQVPRLQVQT

SEQ ID NO: 17384 - protein, 39 aa, Artificial Sequence
  GFR-binding peptide
  MOD_RES (2)..(36): Xaa is C or S
EXQSHEELVQVEKHQGQHPKIRVKAMKVSRQGTPVXELG

SEQ ID NO: 17385 - protein, 36 aa, Artificial Sequence
  GFR-binding peptide
  MOD_RES (35)..(35): Xaa is C or S
  MOD_RES (11)..(12)..(13)..(14)..(15): Xaa is A or G
  MOD_RES (16)..(17)..(18)..(19): Xaa is A or G or is absent
HEELRVQVEKXXXXXXXXXVKAVKVSRHHVRSPQXK

SEQ ID NO: 17386 - protein, 39 aa, Artificial Sequence
  GFR-binding peptide
  MOD_RES (33)..(33): Xaa is C or S
  MOD_RES (11)..(12)..(13)..(14)..(15): Xaa is A or G
  MOD_RES (16)..(17)..(18)..(19): Xaa is A or G or is absent
SHEELSMEGLXXXXXXXXXMIQMTINSQGTPVXELGEDN

SEQ ID NO: 17387 - protein, 38 aa, Artificial Sequence
  GFR-binding peptide
  MOD_RES (1)..(35): Xaa is C or S
  MOD_RES (13)..(14)..(15)..(16)..(17): Xaa is A or G
  MOD_RES (18)..(19)..(20)..(21): Xaa is A or G or is absent
XQSHEELSMEGIXXXXXXXXXMIQMTINSQGTPVXELG

SEQ ID NO: 17388 - protein, 41 aa, Artificial Sequence
  GFR-binding peptide
  MOD_RES (1)..(38): Xaa is C or S
  MOD_RES (14)..(15)..(16)..(17)..(18): Xaa is A or G
  MOD_RES (19)..(20)..(21)..(22): Xaa is A or G or is absent
XELHEELRVTAKKXXXXXXXXXIKRVQVPRHHVRSPQXKVS

SEQ ID NO: 17389 - protein, 35 aa, Artificial Sequence
  GFR-binding peptide
  MOD_RES (33)..(33): Xaa is C or S
  MOD_RES (11)..(12)..(13)..(14)..(15): Xaa is A or G
  MOD_RES (16)..(17)..(18)..(19): Xaa is A or G or is absent
NHQLFSMEGIXXXXXXXXXMIQMTINSEETPVXEL

SEQ ID NO: 17390 - protein, 43 aa, Artificial Sequence
  GFR-binding peptide
  MOD_RES (2)..(4)..(38): Xaa is C or S
RXEXKNHQLFVQVEKHQGQHPKIRVKAMKVSREETPVXELGED

SEQ ID NO: 17391 - protein, 40 aa, Artificial Sequence
  GFR-binding peptide
  MOD_RES (1)..(3)..(40): Xaa is C or S
XKXALHDELTVTAKKFIPKKRVIEIKRVQVPRLQVQTPRX

SEQ ID NO: 17392 - protein, 40 aa, Artificial Sequence
  GFR-binding peptide
  MOD_RES (1)..(38): Xaa is C or S
XALHDELTSMEGLFIPKKRVIEMIQVTINSLQVQTPRXQV

SEQ ID NO: 17393 - protein, 33 aa, Artificial Sequence
  GFR-binding peptide
KNHQLFVTAKKHQGQHPKIRIKRMQVPREETPV

SEQ ID NO: 17394 - protein, 39 aa, Artificial Sequence
  GFR-binding peptide
  MOD_RES (36)..(36): Xaa is C or S
  MOD_RES (12)..(13)..(14)..(15)..(16): Xaa is A or G
  MOD_RES (17)..(18)..(19)..(20): Xaa is A or G or is absent
LHDELTVQVEKXXXXXXXXXVKAVKVSRLQVQTPRXQVN

SEQ ID NO: 17395 - protein, 36 aa, Artificial Sequence
  GFR-binding peptide
  MOD_RES (2)..(2): Xaa is C or S
KXALHDELTVQVEKFIPKKRVIEVKAVKVSRLQVQT

SEQ ID NO: 17396 - protein, 38 aa, Artificial Sequence
  GFR-binding peptide
  MOD_RES (36)..(36): Xaa is C or S
  MOD_RES (12)..(13)..(14)..(15)..(16): Xaa is A or G
  MOD_RES (17)..(18)..(19)..(20): Xaa is A or G or is absent
LHEELRSMEGIXXXXXXXXXMIQVTINSHHVRSPQXKV

SEQ ID NO: 17397 - protein, 40 aa, Artificial Sequence
  GFR-binding peptide
  MOD_RES (1)..(3)..(37): Xaa is C or S
XEXQSHEELVTAKKHQGQHPKIRIKRMQVPRQGTPVXELG

SEQ ID NO: 17398 - protein, 40 aa, Artificial Sequence
  GFR-binding peptide
  MOD_RES (2)..(36): Xaa is C or S
EXQSHEELVQVEKHQGQHPKIRVKAMKVSRQGTPVXELGE

SEQ ID NO: 17399 - protein, 36 aa, Artificial Sequence
  GFR-binding peptide
  MOD_RES (1)..(3): Xaa is C or S
  MOD_RES (15)..(16)..(17)..(18)..(19): Xaa is A or G
  MOD_RES (20)..(21)..(22)..(23): Xaa is A or G or is absent
XEXKNHQLFSMEGLXXXXXXXXXMIQMTINSEETPV

SEQ ID NO: 17400 - protein, 36 aa, Artificial Sequence
  GFR-binding peptide
  MOD_RES (34)..(34): Xaa is C or S
  MOD_RES (12)..(13)..(14)..(15)..(16): Xaa is A or G
  MOD_RES (17)..(18)..(19)..(20): Xaa is A or G or is absent
KNHQLFSMEGLXXXXXXXXXMIQMTINSEETPVXEL

SEQ ID NO: 17401 - protein, 39 aa, Artificial Sequence
  GFR-binding peptide
  MOD_RES (33)..(33): Xaa is C or S
NHQLFVTAKKHQGQHPKIRIKRMQVPREETPVXELGEDN

SEQ ID NO: 17402 - protein, 33 aa, Artificial Sequence
  GFR-binding peptide
  MOD_RES (11)..(12)..(13)..(14)..(15): Xaa is A or G
  MOD_RES (16)..(17)..(18)..(19): Xaa is A or G or is absent
HEELRVQVEKXXXXXXXXXVKAVKVSRHHVRSP

SEQ ID NO: 17403 - protein, 38 aa, Artificial Sequence
  GFR-binding peptide
  MOD_RES (1)..(38): Xaa is C or S
XELHEELRVQVEKLKPKKRVYEVKAVKVSRHHVRSPQX

SEQ ID NO: 17404 - protein, 41 aa, Artificial Sequence
  GFR-binding peptide
  MOD_RES (37)..(37): Xaa is C or S
ELHEELRSMEGLLKPKKRVYEMIQVTINSHHVRSPQXKVSS

SEQ ID NO: 17405 - protein, 37 aa, Artificial Sequence
  GFR-binding peptide
  MOD_RES (2)..(36): Xaa is C or S
EXKNHQLFSMEGLHQGQHPKIRMIQMTINSEETPVXE

SEQ ID NO: 17406 - protein, 38 aa, Artificial Sequence
  GFR-binding peptide
  MOD_RES (36)..(36): Xaa is C or S
  MOD_RES (12)..(13)..(14)..(15)..(16): Xaa is A or G
  MOD_RES (17)..(18)..(19)..(20): Xaa is A or G or is absent
LHEELRVTAKKXXXXXXXXXIKRVQVPRHHVRSPQXKV

SEQ ID NO: 17407 - protein, 39 aa, Artificial Sequence
  GFR-binding peptide
  MOD_RES (33)..(33): Xaa is C or S
NHQLFVQVEKHQGQHPKIRVKAMKVSREETPVXELGEDN

SEQ ID NO: 17408 - protein, 39 aa, Artificial Sequence
  GFR-binding peptide
  MOD_RES (1)..(3): Xaa is C or S
XAXELHEELRSMEGILKPKKRVYEMIQVTINSHHVRSPQ

SEQ ID NO: 17409 - protein, 36 aa, Artificial Sequence
  GFR-binding peptide
  MOD_RES (34)..(34): Xaa is C or S
KNHQLFSMEGIHQGQHPKIRMIQMTINSEETPVXEL

SEQ ID NO: 17410 - protein, 37 aa, Artificial Sequence
  GFR-binding peptide
  MOD_RES (37)..(37): Xaa is C or S
  MOD_RES (13)..(14)..(15)..(16)..(17): Xaa is A or G
  MOD_RES (18)..(19)..(20)..(21): Xaa is A or G or is absent
ELHEELRVTAKKXXXXXXXXXIKRVQVPRHHVRSPQX

SEQ ID NO: 17411 - protein, 38 aa, Artificial Sequence
  GFR-binding peptide
  MOD_RES (33)..(33): Xaa is C or S
SHEELVQVEKHQGQHPKIRVKAMKVSRQGTPVXELGED

SEQ ID NO: 17412 - protein, 40 aa, Artificial Sequence
  GFR-binding peptide
  MOD_RES (2)..(4)..(38): Xaa is C or S
  MOD_RES (16)..(17)..(18)..(19)..(20): Xaa is A or G
  MOD_RES (21)..(22)..(23)..(24): Xaa is A or G or is absent
RXEXQSHEELSMEGIXXXXXXXXXMIQMTINSQGTPVXEL

SEQ ID NO: 17413 - protein, 33 aa, Artificial Sequence
  GFR-binding peptide
  MOD_RES (11)..(12)..(13)..(14)..(15): Xaa is A or G
  MOD_RES (16)..(17)..(18)..(19): Xaa is A or G or is absent
HEELRVTAKKXXXXXXXXXIKRVQVPRHHVRSP

SEQ ID NO: 17414 - protein, 43 aa, Artificial Sequence
  GFR-binding peptide
  MOD_RES (1)..(3)..(40): Xaa is C or S
  MOD_RES (16)..(17)..(18)..(19)..(20): Xaa is A or G
  MOD_RES (21)..(22)..(23)..(24): Xaa is A or G or is absent
XAXELHEELRSMEGIXXXXXXXXXMIQVTINSHHVRSPQXKVS

SEQ ID NO: 17415 - protein, 37 aa, Artificial Sequence
  GFR-binding peptide
  MOD_RES (2)..(2): Xaa is C or S
AXELHEELRVTAKKLKPKKRVYEIKRVQVPRHHVRSP

SEQ ID NO: 17416 - protein, 38 aa, Artificial Sequence
  GFR-binding peptide
  MOD_RES (2)..(36): Xaa is C or S
  MOD_RES (14)..(15)..(16)..(17)..(18): Xaa is A or G
  MOD_RES (19)..(20)..(21)..(22): Xaa is A or G or is absent
EXKNHQLFVQVEKXXXXXXXXXVKAMKVSREETPVXEL

SEQ ID NO: 17417 - protein, 36 aa, Artificial Sequence
  GFR-binding peptide
  MOD_RES (13)..(14)..(15)..(16)..(17): Xaa is A or G
  MOD_RES (18)..(19)..(20)..(21): Xaa is A or G or is absent
ALHDELTVQVEKXXXXXXXXXVKAVKVSRLQVQTPR

SEQ ID NO: 17418 - protein, 38 aa, Artificial Sequence
  GFR-binding peptide
  MOD_RES (1)..(3)..(37): Xaa is C or S
  MOD_RES (15)..(16)..(17)..(18)..(19): Xaa is A or G
  MOD_RES (20)..(21)..(22)..(23): Xaa is A or G or is absent
XEXQSHEELVTAKKXXXXXXXXXIKRMQVPRQGTPVXE

SEQ ID NO: 17419 - protein, 36 aa, Artificial Sequence
  GFR-binding peptide
  MOD_RES (2)..(2): Xaa is C or S
  MOD_RES (15)..(16)..(17)..(18)..(19): Xaa is A or G
  MOD_RES (20)..(21)..(22)..(23): Xaa is A or G or is absent
KXALHDELTVQVEKXXXXXXXXXVKAVKVSRLQVQT

SEQ ID NO: 17420 - protein, 43 aa, Artificial Sequence
  GFR-binding peptide
  MOD_RES (2)..(4)..(41): Xaa is C or S
AXAXELHEELRSMEGILKPKKRVYEMIQVTINSHHVRSPQXKV

SEQ ID NO: 17421 - protein, 37 aa, Artificial Sequence
  GFR-binding peptide
  MOD_RES (2)..(2): Xaa is C or S
AXELHEELRSMEGLLKPKKRVYEMIQVTINSHHVRSP

SEQ ID NO: 17422 - protein, 40 aa, Artificial Sequence
  GFR-binding peptide
  MOD_RES (2)..(4): Xaa is C or S
AXAXELHEELRVQVEKLKPKKRVYEVKAVKVSRHHVRSPQ

SEQ ID NO: 17423 - protein, 40 aa, Artificial Sequence
  GFR-binding peptide
  MOD_RES (1)..(38): Xaa is C or S
XELHEELRSMEGILKPKKRVYEMIQVTINSHHVRSPQXKV

SEQ ID NO: 17424 - protein, 38 aa, Artificial Sequence
  GFR-binding peptide
  MOD_RES (2)..(4)..(38): Xaa is C or S
  MOD_RES (16)..(17)..(18)..(19)..(20): Xaa is A or G
  MOD_RES (21)..(22)..(23)..(24): Xaa is A or G or is absent
RXEXQSHEELSMEGIXXXXXXXXXMIQMTINSQGTPVX

SEQ ID NO: 17425 - protein, 38 aa, Artificial Sequence
  GFR-binding peptide
  MOD_RES (33)..(33): Xaa is C or S
  MOD_RES (11)..(12)..(13)..(14)..(15): Xaa is A or G
  MOD_RES (16)..(17)..(18)..(19): Xaa is A or G or is absent
SHEELSMEGIXXXXXXXXXMIQMTINSQGTPVXELGED

SEQ ID NO: 17426 - protein, 40 aa, Artificial Sequence
  GFR-binding peptide
  MOD_RES (1)..(3)..(37): Xaa is C or S
  MOD_RES (15)..(16)..(17)..(18)..(19): Xaa is A or G
  MOD_RES (20)..(21)..(22)..(23): Xaa is A or G or is absent
XEXKNHQLFVTAKKXXXXXXXXXIKRMQVPREETPVXELG

SEQ ID NO: 17427 - protein, 43 aa, Artificial Sequence
  GFR-binding peptide
  MOD_RES (2)..(4)..(38): Xaa is C or S
  MOD_RES (16)..(17)..(18)..(19)..(20): Xaa is A or G
  MOD_RES (21)..(22)..(23)..(24): Xaa is A or G or is absent
RXEXKNHQLFVTAKKXXXXXXXXXIKRMQVPREETPVXELGED

SEQ ID NO: 17428 - protein, 35 aa, Artificial Sequence
  GFR-binding peptide
  MOD_RES (1)..(1): Xaa is C or S
  MOD_RES (14)..(15)..(16)..(17)..(18): Xaa is A or G
  MOD_RES (19)..(20)..(21)..(22): Xaa is A or G or is absent
XALHDELTSMEGLXXXXXXXXXMIQVTINSLQVQT

SEQ ID NO: 17429 - protein, 39 aa, Artificial Sequence
  GFR-binding peptide
  MOD_RES (35)..(35): Xaa is C or S
HDELTSMEGLFIPKKRVIEMIQVTINSLQVQTPRXQVNR

SEQ ID NO: 17430 - protein, 41 aa, Artificial Sequence
  GFR-binding peptide
  MOD_RES (2)..(36): Xaa is C or S
EXQSHEELSMEGIHQGQHPKIRMIQMTINSQGTPVXELGED

SEQ ID NO: 17431 - protein, 38 aa, Artificial Sequence
  GFR-binding peptide
  MOD_RES (33)..(33): Xaa is C or S
NHQLFSMEGLHQGQHPKIRMIQMTINSEETPVXELGED

SEQ ID NO: 17432 - protein, 40 aa, Artificial Sequence
  GFR-binding peptide
  MOD_RES (36)..(36): Xaa is C or S
  MOD_RES (12)..(13)..(14)..(15)..(16): Xaa is A or G
  MOD_RES (17)..(18)..(19)..(20): Xaa is A or G or is absent
LHEELRVTAKKXXXXXXXXXIKRVQVPRHHVRSPQXKVSS

SEQ ID NO: 17433 - protein, 40 aa, Artificial Sequence
  GFR-binding peptide
  MOD_RES (1)..(3)..(40): Xaa is C or S
  MOD_RES (16)..(17)..(18)..(19)..(20): Xaa is A or G
  MOD_RES (21)..(22)..(23)..(24): Xaa is A or G or is absent
XAXELHEELRSMEGIXXXXXXXXXMIQVTINSHHVRSPQX

SEQ ID NO: 17434 - protein, 35 aa, Artificial Sequence
  GFR-binding peptide
  MOD_RES (33)..(33): Xaa is C or S
NHQLFSMEGLHQGQHPKIRMIQMTINSEETPVXEL

SEQ ID NO: 17435 - protein, 39 aa, Artificial Sequence
  GFR-binding peptide
  MOD_RES (1)..(35): Xaa is C or S
XKNHQLFVTAKKHQGQHPKIRIKRMQVPREETPVXELGE

SEQ ID NO: 17436 - protein, 41 aa, Artificial Sequence
  GFR-binding peptide
  MOD_RES (1)..(3)..(37): Xaa is C or S
XEXQSHEELVTAKKHQGQHPKIRIKRMQVPRQGTPVXELGE

SEQ ID NO: 17437 - protein, 37 aa, Artificial Sequence
  GFR-binding peptide
  MOD_RES (37)..(37): Xaa is C or S
ALHDELTSMEGIFIPKKRVIEMIQVTINSLQVQTPRX

SEQ ID NO: 17438 - protein, 42 aa, Artificial Sequence
  GFR-binding peptide
  MOD_RES (1)..(3)..(37): Xaa is C or S
XEXKNHQLFSMEGLHQGQHPKIRMIQMTINSEETPVXELGED

SEQ ID NO: 17439 - protein, 38 aa, Artificial Sequence
  GFR-binding peptide
  MOD_RES (35)..(35): Xaa is C or S
HEELRSMEGLLKPKKRVYEMIQVTINSHHVRSPQXKVS

SEQ ID NO: 17440 - protein, 38 aa, Artificial Sequence
  GFR-binding peptide
  MOD_RES (1)..(3): Xaa is C or S
XKXALHDELTVQVEKFIPKKRVIEVKAVKVSRLQVQTP

SEQ ID NO: 17441 - protein, 39 aa, Artificial Sequence
  GFR-binding peptide
  MOD_RES (33)..(33): Xaa is C or S
  MOD_RES (11)..(12)..(13)..(14)..(15): Xaa is A or G
  MOD_RES (16)..(17)..(18)..(19): Xaa is A or G or is absent
NHQLFSMEGIXXXXXXXXXMIQMTINSEETPVXELGEDN

SEQ ID NO: 17442 - protein, 41 aa, Artificial Sequence
  GFR-binding peptide
  MOD_RES (2)..(39): Xaa is C or S
KXALHDELTSMEGLFIPKKRVIEMIQVTINSLQVQTPRXQV

SEQ ID NO: 17443 - protein, 41 aa, Artificial Sequence
  GFR-binding peptide
  MOD_RES (1)..(3)..(37): Xaa is C or S
XEXQSHEELSMEGLHQGQHPKIRMIQMTINSQGTPVXELGE

SEQ ID NO: 17444 - protein, 40 aa, Artificial Sequence
  GFR-binding peptide
  MOD_RES (2)..(4): Xaa is C or S
AXAXELHEELRSMEGILKPKKRVYEMIQVTINSHHVRSPQ

SEQ ID NO: 17445 - protein, 37 aa, Artificial Sequence
  GFR-binding peptide
  MOD_RES (1)..(1): Xaa is C or S
XELHEELRSMEGLLKPKKRVYEMIQVTINSHHVRSPQ

SEQ ID NO: 17446 - protein, 40 aa, Artificial Sequence
  GFR-binding peptide
  MOD_RES (1)..(35): Xaa is C or S
XKNHQLFVTAKKHQGQHPKIRIKRMQVPREETPVXELGED

SEQ ID NO: 17447 - protein, 39 aa, Artificial Sequence
  GFR-binding peptide
  MOD_RES (37)..(37): Xaa is C or S
  MOD_RES (13)..(14)..(15)..(16)..(17): Xaa is A or G
  MOD_RES (18)..(19)..(20)..(21): Xaa is A or G or is absent
ALHDELTVTAKKXXXXXXXXXIKRVQVPRLQVQTPRXQV

SEQ ID NO: 17448 - protein, 36 aa, Artificial Sequence
  GFR-binding peptide
  MOD_RES (36)..(36): Xaa is C or S
  MOD_RES (12)..(13)..(14)..(15)..(16): Xaa is A or G
  MOD_RES (17)..(18)..(19)..(20): Xaa is A or G or is absent
LHDELTSMEGLXXXXXXXXXMIQVTINSLQVQTPRX

SEQ ID NO: 17449 - protein, 38 aa, Artificial Sequence
  GFR-binding peptide
  MOD_RES (1)..(3)..(37): Xaa is C or S
XEXQSHEELVQVEKHQGQHPKIRVKAMKVSRQGTPVXE

SEQ ID NO: 17450 - protein, 32 aa, Artificial Sequence
  GFR-binding peptide
  MOD_RES (11)..(12)..(13)..(14)..(15): Xaa is A or G
  MOD_RES (16)..(17)..(18)..(19): Xaa is A or G or is absent
HDELTSMEGIXXXXXXXXXMIQVTINSLQVQT

SEQ ID NO: 17451 - protein, 41 aa, Artificial Sequence
  GFR-binding peptide
  MOD_RES (2)..(4)..(38): Xaa is C or S
RXEXQSHEELSMEGIHQGQHPKIRMIQMTINSQGTPVXELG

SEQ ID NO: 17452 - protein, 42 aa, Artificial Sequence
  GFR-binding peptide
  MOD_RES (1)..(3)..(40): Xaa is C or S
XAXELHEELRSMEGILKPKKRVYEMIQVTINSHHVRSPQXKV

SEQ ID NO: 17453 - protein, 37 aa, Artificial Sequence
  GFR-binding peptide
  MOD_RES (1)..(35): Xaa is C or S
XKNHQLFSMEGIHQGQHPKIRMIQMTINSEETPVXEL

SEQ ID NO: 17454 - protein, 39 aa, Artificial Sequence
  GFR-binding peptide
  MOD_RES (35)..(35): Xaa is C or S
  MOD_RES (11)..(12)..(13)..(14)..(15): Xaa is A or G
  MOD_RES (16)..(17)..(18)..(19): Xaa is A or G or is absent
HEELRSMEGLXXXXXXXXXMIQVTINSHHVRSPQXKVSS

SEQ ID NO: 17455 - protein, 41 aa, Artificial Sequence
  GFR-binding peptide
  MOD_RES (37)..(37): Xaa is C or S
  MOD_RES (13)..(14)..(15)..(16)..(17): Xaa is A or G
  MOD_RES (18)..(19)..(20)..(21): Xaa is A or G or is absent
ELHEELRVTAKKXXXXXXXXXIKRVQVPRHHVRSPQXKVSS

SEQ ID NO: 17456 - protein, 37 aa, Artificial Sequence
  GFR-binding peptide
  MOD_RES (1)..(3)..(37): Xaa is C or S
XEXQSHEELVQVEKHQGQHPKIRVKAMKVSRQGTPVX

SEQ ID NO: 17457 - protein, 39 aa, Artificial Sequence
  GFR-binding peptide
  MOD_RES (36)..(36): Xaa is C or S
LHDELTSMEGLFIPKKRVIEMIQVTINSLQVQTPRXQVN

SEQ ID NO: 17458 - protein, 45 aa, Artificial Sequence
  GFR-binding peptide
  MOD_RES (2)..(4)..(41): Xaa is C or S
  MOD_RES (17)..(18)..(19)..(20)..(21): Xaa is A or G
  MOD_RES (22)..(23)..(24)..(25): Xaa is A or G or is absent
EXKXALHDELTVTAKKXXXXXXXXXIKRVQVPRLQVQTPRXQVNR

SEQ ID NO: 17459 - protein, 38 aa, Artificial Sequence
  GFR-binding peptide
  MOD_RES (2)..(4): Xaa is C or S
  MOD_RES (17)..(18)..(19)..(20)..(21): Xaa is A or G
  MOD_RES (22)..(23)..(24)..(25): Xaa is A or G or is absent
EXKXALHDELTVQVEKXXXXXXXXXVKAVKVSRLQVQT

SEQ ID NO: 17460 - protein, 42 aa, Artificial Sequence
  GFR-binding peptide
  MOD_RES (2)..(4)..(41): Xaa is C or S
AXAXELHEELRSMEGLLKPKKRVYEMIQVTINSHHVRSPQXK

SEQ ID NO: 17461 - protein, 44 aa, Artificial Sequence
  GFR-binding peptide
  MOD_RES (2)..(4)..(38): Xaa is C or S
  MOD_RES (16)..(17)..(18)..(19)..(20): Xaa is A or G
  MOD_RES (21)..(22)..(23)..(24): Xaa is A or G or is absent
RXEXQSHEELSMEGIXXXXXXXXXMIQMTINSQGTPVXELGEDN

SEQ ID NO: 17462 - protein, 35 aa, Artificial Sequence
  GFR-binding peptide
  MOD_RES (33)..(33): Xaa is C or S
NHQLFSMEGIHQGQHPKIRMIQMTINSEETPVXEL

SEQ ID NO: 17463 - protein, 38 aa, Artificial Sequence
  GFR-binding peptide
  MOD_RES (2)..(2): Xaa is C or S
AXELHEELRVQVEKLKPKKRVYEVKAVKVSRHHVRSPQ

SEQ ID NO: 17464 - protein, 42 aa, Artificial Sequence
  GFR-binding peptide
  MOD_RES (2)..(39): Xaa is C or S
  MOD_RES (15)..(16)..(17)..(18)..(19): Xaa is A or G
  MOD_RES (20)..(21)..(22)..(23): Xaa is A or G or is absent
AXELHEELRSMEGLXXXXXXXXXMIQVTINSHHVRSPQXKVS

SEQ ID NO: 17465 - protein, 42 aa, Artificial Sequence
  GFR-binding peptide
  MOD_RES (2)..(36): Xaa is C or S
EXKNHQLFVQVEKHQGQHPKIRVKAMKVSREETPVXELGEDN

SEQ ID NO: 17466 - protein, 37 aa, Artificial Sequence
  GFR-binding peptide
  MOD_RES (1)..(35): Xaa is C or S
  MOD_RES (13)..(14)..(15)..(16)..(17): Xaa is A or G
  MOD_RES (18)..(19)..(20)..(21): Xaa is A or G or is absent
XKNHQLFSMEGIXXXXXXXXXMIQMTINSEETPVXEL

SEQ ID NO: 17467 - protein, 37 aa, Artificial Sequence
  GFR-binding peptide
  MOD_RES (1)..(1): Xaa is C or S
XALHDELTSMEGLFIPKKRVIEMIQVTINSLQVQTPR

SEQ ID NO: 17468 - protein, 37 aa, Artificial Sequence
  GFR-binding peptide
  MOD_RES (1)..(35): Xaa is C or S
  MOD_RES (13)..(14)..(15)..(16)..(17): Xaa is A or G
  MOD_RES (18)..(19)..(20)..(21): Xaa is A or G or is absent
XKNHQLFSMEGLXXXXXXXXXMIQMTINSEETPVXEL

SEQ ID NO: 17469 - protein, 33 aa, Artificial Sequence
  GFR-binding peptide
  MOD_RES (33)..(33): Xaa is C or S
NHQLFSMEGIHQGQHPKIRMIQMTINSEETPVX

SEQ ID NO: 17470 - protein, 38 aa, Artificial Sequence
  GFR-binding peptide
  MOD_RES (1)..(3): Xaa is C or S
XAXELHEELRVTAKKLKPKKRVYEIKRVQVPRHHVRSP

SEQ ID NO: 17471 - protein, 38 aa, Artificial Sequence
  GFR-binding peptide
  MOD_RES (33)..(33): Xaa is C or S
SHEELSMEGIHQGQHPKIRMIQMTINSQGTPVXELGED

SEQ ID NO: 17472 - protein, 39 aa, Artificial Sequence
  GFR-binding peptide
  MOD_RES (1)..(38): Xaa is C or S
  MOD_RES (14)..(15)..(16)..(17)..(18): Xaa is A or G
  MOD_RES (19)..(20)..(21)..(22): Xaa is A or G or is absent
XELHEELRVTAKKXXXXXXXXXIKRVQVPRHHVRSPQXK

SEQ ID NO: 17473 - protein, 40 aa, Artificial Sequence
  GFR-binding peptide
  MOD_RES (1)..(35): Xaa is C or S
XQSHEELVQVEKHQGQHPKIRVKAMKVSRQGTPVXELGED

SEQ ID NO: 17474 - protein, 39 aa, Artificial Sequence
  GFR-binding peptide
  MOD_RES (1)..(35): Xaa is C or S
  MOD_RES (13)..(14)..(15)..(16)..(17): Xaa is A or G
  MOD_RES (18)..(19)..(20)..(21): Xaa is A or G or is absent
XKNHQLFVQVEKXXXXXXXXXVKAMKVSREETPVXELGE

SEQ ID NO: 17475 - protein, 42 aa, Artificial Sequence
  GFR-binding peptide
  MOD_RES (1)..(3)..(37): Xaa is C or S
  MOD_RES (15)..(16)..(17)..(18)..(19): Xaa is A or G
  MOD_RES (20)..(21)..(22)..(23): Xaa is A or G or is absent
XEXQSHEELVQVEKXXXXXXXXXVKAMKVSRQGTPVXELGED

SEQ ID NO: 17476 - protein, 39 aa, Artificial Sequence
  GFR-binding peptide
  MOD_RES (2)..(4): Xaa is C or S
EXKXALHDELTVQVEKFIPKKRVIEVKAVKVSRLQVQTP

SEQ ID NO: 17477 - protein, 33 aa, Artificial Sequence
  GFR-binding peptide
HEELRVQVEKLKPKKRVYEVKAVKVSRHHVRSP

SEQ ID NO: 17478 - protein, 39 aa, Artificial Sequence
  GFR-binding peptide
  MOD_RES (2)..(39): Xaa is C or S
AXELHEELRSMEGILKPKKRVYEMIQVTINSHHVRSPQX

SEQ ID NO: 17479 - protein, 37 aa, Artificial Sequence
  GFR-binding peptide
  MOD_RES (1)..(35): Xaa is C or S
XKNHQLFSMEGLHQGQHPKIRMIQMTINSEETPVXEL

SEQ ID NO: 17480 - protein, 43 aa, Artificial Sequence
  GFR-binding peptide
  MOD_RES (2)..(4)..(41): Xaa is C or S
EXKXALHDELTSMEGLFIPKKRVIEMIQVTINSLQVQTPRXQV

SEQ ID NO: 17481 - protein, 37 aa, Artificial Sequence
  GFR-binding peptide
  MOD_RES (1)..(1): Xaa is C or S
  MOD_RES (14)..(15)..(16)..(17)..(18): Xaa is A or G
  MOD_RES (19)..(20)..(21)..(22): Xaa is A or G or is absent
XALHDELTVQVEKXXXXXXXXXVKAVKVSRLQVQTPR

SEQ ID NO: 17482 - protein, 33 aa, Artificial Sequence
  GFR-binding peptide
  MOD_RES (12)..(13)..(14)..(15)..(16): Xaa is A or G
  MOD_RES (17)..(18)..(19)..(20): Xaa is A or G or is absent
LHEELRSMEGIXXXXXXXXXMIQVTINSHHVRS

SEQ ID NO: 17483 - protein, 37 aa, Artificial Sequence
  GFR-binding peptide
  MOD_RES (33)..(33): Xaa is C or S
  MOD_RES (11)..(12)..(13)..(14)..(15): Xaa is A or G
  MOD_RES (16)..(17)..(18)..(19): Xaa is A or G or is absent
SHEELVQVEKXXXXXXXXXVKAMKVSRQGTPVXELGE

SEQ ID NO: 17484 - protein, 39 aa, Artificial Sequence
  GFR-binding peptide
  MOD_RES (1)..(35): Xaa is C or S
XKNHQLFVQVEKHQGQHPKIRVKAMKVSREETPVXELGE

SEQ ID NO: 17485 - protein, 38 aa, Artificial Sequence
  GFR-binding peptide
  MOD_RES (2)..(4)..(38): Xaa is C or S
RXEXKNHQLFSMEGIHQGQHPKIRMIQMTINSEETPVX

SEQ ID NO: 17486 - protein, 39 aa, Artificial Sequence
  GFR-binding peptide
  MOD_RES (36)..(36): Xaa is C or S
LHEELRSMEGLLKPKKRVYEMIQVTINSHHVRSPQXKVS

SEQ ID NO: 17487 - protein, 39 aa, Artificial Sequence
  GFR-binding peptide
  MOD_RES (1)..(38): Xaa is C or S
  MOD_RES (14)..(15)..(16)..(17)..(18): Xaa is A or G
  MOD_RES (19)..(20)..(21)..(22): Xaa is A or G or is absent
XELHEELRSMEGIXXXXXXXXXMIQVTINSHHVRSPQXK

SEQ ID NO: 17488 - protein, 37 aa, Artificial Sequence
  GFR-binding peptide
  MOD_RES (1)..(35): Xaa is C or S
  MOD_RES (13)..(14)..(15)..(16)..(17): Xaa is A or G
  MOD_RES (18)..(19)..(20)..(21): Xaa is A or G or is absent
XQSHEELVTAKKXXXXXXXXXIKRMQVPRQGTPVXEL

SEQ ID NO: 17489 - protein, 38 aa, Artificial Sequence
  GFR-binding peptide
  MOD_RES (1)..(3)..(37): Xaa is C or S
XEXKNHQLFVQVEKHQGQHPKIRVKAMKVSREETPVXE

SEQ ID NO: 17490 - protein, 38 aa, Artificial Sequence
  GFR-binding peptide
  MOD_RES (2)..(2): Xaa is C or S
KXALHDELTSMEGLFIPKKRVIEMIQVTINSLQVQTPR

SEQ ID NO: 17491 - protein, 36 aa, Artificial Sequence
  GFR-binding peptide
  MOD_RES (2)..(36): Xaa is C or S
EXQSHEELSMEGLHQGQHPKIRMIQMTINSQGTPVX

SEQ ID NO: 17492 - protein, 39 aa, Artificial Sequence
  GFR-binding peptide
  MOD_RES (2)..(36): Xaa is C or S
EXKNHQLFVQVEKHQGQHPKIRVKAMKVSREETPVXELG

SEQ ID NO: 17493 - protein, 37 aa, Artificial Sequence
  GFR-binding peptide
  MOD_RES (2)..(36): Xaa is C or S
EXQSHEELSMEGLHQGQHPKIRMIQMTINSQGTPVXE

SEQ ID NO: 17494 - protein, 38 aa, Artificial Sequence
  GFR-binding peptide
  MOD_RES (2)..(4): Xaa is C or S
AXAXELHEELRVTAKKLKPKKRVYEIKRVQVPRHHVRS

SEQ ID NO: 17495 - protein, 40 aa, Artificial Sequence
  GFR-binding peptide
  MOD_RES (1)..(38): Xaa is C or S
XELHEELRSMEGLLKPKKRVYEMIQVTINSHHVRSPQXKV

SEQ ID NO: 17496 - protein, 42 aa, Artificial Sequence
  GFR-binding peptide
  MOD_RES (1)..(3)..(37): Xaa is C or S
XEXQSHEELSMEGLHQGQHPKIRMIQMTINSQGTPVXELGED

SEQ ID NO: 17497 - protein, 37 aa, Artificial Sequence
  GFR-binding peptide
  MOD_RES (1)..(3)..(37): Xaa is C or S
XEXQSHEELSMEGIHQGQHPKIRMIQMTINSQGTPVX

SEQ ID NO: 17498 - protein, 39 aa, Artificial Sequence
  GFR-binding peptide
  MOD_RES (34)..(34): Xaa is C or S
KNHQLFVTAKKHQGQHPKIRIKRMQVPREETPVXELGED

SEQ ID NO: 17499 - protein, 41 aa, Artificial Sequence
  GFR-binding peptide
  MOD_RES (2)..(36): Xaa is C or S
  MOD_RES (14)..(15)..(16)..(17)..(18): Xaa is A or G
  MOD_RES (19)..(20)..(21)..(22): Xaa is A or G or is absent
EXQSHEELVTAKKXXXXXXXXXIKRMQVPRQGTPVXELGED

SEQ ID NO: 17500 - protein, 41 aa, Artificial Sequence
  GFR-binding peptide
  MOD_RES (2)..(39): Xaa is C or S
AXELHEELRSMEGLLKPKKRVYEMIQVTINSHHVRSPQXKV

SEQ ID NO: 17501 - protein, 39 aa, Artificial Sequence
  GFR-binding peptide
  MOD_RES (1)..(3)..(37): Xaa is C or S
  MOD_RES (15)..(16)..(17)..(18)..(19): Xaa is A or G
  MOD_RES (20)..(21)..(22)..(23): Xaa is A or G or is absent
XEXKNHQLFSMEGLXXXXXXXXXMIQMTINSEETPVXEL

SEQ ID NO: 17502 - protein, 42 aa, Artificial Sequence
  GFR-binding peptide
  MOD_RES (1)..(38): Xaa is C or S
  MOD_RES (14)..(15)..(16)..(17)..(18): Xaa is A or G
  MOD_RES (19)..(20)..(21)..(22): Xaa is A or G or is absent
XELHEELRSMEGIXXXXXXXXXMIQVTINSHHVRSPQXKVSS

SEQ ID NO: 17503 - protein, 39 aa, Artificial Sequence
  GFR-binding peptide
  MOD_RES (1)..(3): Xaa is C or S
XKXALHDELTSMEGIFIPKKRVIEMIQVTINSLQVQTPR

SEQ ID NO: 17504 - protein, 43 aa, Artificial Sequence
  GFR-binding peptide
  MOD_RES (1)..(3)..(40): Xaa is C or S
XKXALHDELTSMEGIFIPKKRVIEMIQVTINSLQVQTPRXQVN

SEQ ID NO: 17505 - protein, 33 aa, Artificial Sequence
  GFR-binding peptide
QSHEELVQVEKHQGQHPKIRVKAMKVSRQGTPV

SEQ ID NO: 17506 - protein, 39 aa, Artificial Sequence
  GFR-binding peptide
  MOD_RES (34)..(34): Xaa is C or S
  MOD_RES (12)..(13)..(14)..(15)..(16): Xaa is A or G
  MOD_RES (17)..(18)..(19)..(20): Xaa is A or G or is absent
KNHQLFSMEGLXXXXXXXXXMIQMTINSEETPVXELGED

SEQ ID NO: 17507 - protein, 44 aa, Artificial Sequence
  GFR-binding peptide
  MOD_RES (1)..(3)..(40): Xaa is C or S
XKXALHDELTSMEGIFIPKKRVIEMIQVTINSLQVQTPRXQVNR

SEQ ID NO: 17508 - protein, 44 aa, Artificial Sequence
  GFR-binding peptide
  MOD_RES (1)..(3)..(40): Xaa is C or S
XKXALHDELTSMEGLFIPKKRVIEMIQVTINSLQVQTPRXQVNR

SEQ ID NO: 17509 - protein, 38 aa, Artificial Sequence
  GFR-binding peptide
  MOD_RES (2)..(4): Xaa is C or S
EXKXALHDELTSMEGLFIPKKRVIEMIQVTINSLQVQT

SEQ ID NO: 17510 - protein, 38 aa, Artificial Sequence
  GFR-binding peptide
  MOD_RES (34)..(34): Xaa is C or S
  MOD_RES (12)..(13)..(14)..(15)..(16): Xaa is A or G
  MOD_RES (17)..(18)..(19)..(20): Xaa is A or G or is absent
QSHEELVTAKKXXXXXXXXXIKRMQVPRQGTPVXELGE

SEQ ID NO: 17511 - protein, 35 aa, Artificial Sequence
  GFR-binding peptide
  MOD_RES (34)..(34): Xaa is C or S
  MOD_RES (12)..(13)..(14)..(15)..(16): Xaa is A or G
  MOD_RES (17)..(18)..(19)..(20): Xaa is A or G or is absent
KNHQLFSMEGIXXXXXXXXXMIQMTINSEETPVXE

SEQ ID NO: 17512 - protein, 32 aa, Artificial Sequence
  GFR-binding peptide
  MOD_RES (11)..(12)..(13)..(14)..(15): Xaa is A or G
  MOD_RES (16)..(17)..(18)..(19): Xaa is A or G or is absent
SHEELVTAKKXXXXXXXXXIKRMQVPRQGTPV

SEQ ID NO: 17513 - protein, 40 aa, Artificial Sequence
  GFR-binding peptide
  MOD_RES (1)..(35): Xaa is C or S
  MOD_RES (13)..(14)..(15)..(16)..(17): Xaa is A or G
  MOD_RES (18)..(19)..(20)..(21): Xaa is A or G or is absent
XKNHQLFVTAKKXXXXXXXXXIKRMQVPREETPVXELGED

SEQ ID NO: 17514 - protein, 33 aa, Artificial Sequence
  GFR-binding peptide
QSHEELSMEGIHQGQHPKIRMIQMTINSQGTPV

SEQ ID NO: 17515 - protein, 35 aa, Artificial Sequence
  GFR-binding peptide
  MOD_RES (1)..(35): Xaa is C or S
XKNHQLFVTAKKHQGQHPKIRIKRMQVPREETPVX

SEQ ID NO: 17516 - protein, 40 aa, Artificial Sequence
  GFR-binding peptide
  MOD_RES (1)..(35): Xaa is C or S
  MOD_RES (13)..(14)..(15)..(16)..(17): Xaa is A or G
  MOD_RES (18)..(19)..(20)..(21): Xaa is A or G or is absent
XQSHEELVQVEKXXXXXXXXXVKAMKVSRQGTPVXELGED

SEQ ID NO: 17517 - protein, 39 aa, Artificial Sequence
  GFR-binding peptide
  MOD_RES (2)..(4): Xaa is C or S
AXAXELHEELRSMEGILKPKKRVYEMIQVTINSHHVRSP

SEQ ID NO: 17518 - protein, 43 aa, Artificial Sequence
  GFR-binding peptide
  MOD_RES (2)..(39): Xaa is C or S
  MOD_RES (15)..(16)..(17)..(18)..(19): Xaa is A or G
  MOD_RES (20)..(21)..(22)..(23): Xaa is A or G or is absent
AXELHEELRVTAKKXXXXXXXXXIKRVQVPRHHVRSPQXKVSS

SEQ ID NO: 17519 - protein, 37 aa, Artificial Sequence
  GFR-binding peptide
  MOD_RES (2)..(36): Xaa is C or S
EXQSHEELSMEGIHQGQHPKIRMIQMTINSQGTPVXE

SEQ ID NO: 17520 - protein, 36 aa, Artificial Sequence
  GFR-binding peptide
  MOD_RES (36)..(36): Xaa is C or S
  MOD_RES (12)..(13)..(14)..(15)..(16): Xaa is A or G
  MOD_RES (17)..(18)..(19)..(20): Xaa is A or G or is absent
LHEELRSMEGLXXXXXXXXXMIQVTINSHHVRSPQX

SEQ ID NO: 17521 - protein, 33 aa, Artificial Sequence
  GFR-binding peptide
  MOD_RES (33)..(33): Xaa is C or S
  MOD_RES (11)..(12)..(13)..(14)..(15): Xaa is A or G
  MOD_RES (16)..(17)..(18)..(19): Xaa is A or G or is absent
NHQLFVTAKKXXXXXXXXXIKRMQVPREETPVX

SEQ ID NO: 17522 - protein, 34 aa, Artificial Sequence
  GFR-binding peptide
  MOD_RES (34)..(34): Xaa is C or S
QSHEELSMEGIHQGQHPKIRMIQMTINSQGTPVX

SEQ ID NO: 17523 - protein, 33 aa, Artificial Sequence
  GFR-binding peptide
  MOD_RES (11)..(12)..(13)..(14)..(15): Xaa is A or G
  MOD_RES (16)..(17)..(18)..(19): Xaa is A or G or is absent
HDELTVQVEKXXXXXXXXXVKAVKVSRLQVQTP

SEQ ID NO: 17524 - protein, 37 aa, Artificial Sequence
  GFR-binding peptide
  MOD_RES (37)..(37): Xaa is C or S
  MOD_RES (13)..(14)..(15)..(16)..(17): Xaa is A or G
  MOD_RES (18)..(19)..(20)..(21): Xaa is A or G or is absent
ELHEELRSMEGLXXXXXXXXXMIQVTINSHHVRSPQX

SEQ ID NO: 17525 - protein, 37 aa, Artificial Sequence
  GFR-binding peptide
  MOD_RES (33)..(33): Xaa is C or S
SHEELVTAKKHQGQHPKIRIKRMQVPRQGTPVXELGE

SEQ ID NO: 17526 - protein, 40 aa, Artificial Sequence
  GFR-binding peptide
  MOD_RES (2)..(4)..(38): Xaa is C or S
  MOD_RES (16)..(17)..(18)..(19)..(20): Xaa is A or G
  MOD_RES (21)..(22)..(23)..(24): Xaa is A or G or is absent
RXEXKNHQLFVTAKKXXXXXXXXXIKRMQVPREETPVXEL

SEQ ID NO: 17527 - protein, 38 aa, Artificial Sequence
  GFR-binding peptide
  MOD_RES (2)..(4): Xaa is C or S
EXKXALHDELTSMEGIFIPKKRVIEMIQVTINSLQVQT

SEQ ID NO: 17528 - protein, 37 aa, Artificial Sequence
  GFR-binding peptide
  MOD_RES (37)..(37): Xaa is C or S
ELHEELRVQVEKLKPKKRVYEVKAVKVSRHHVRSPQX

SEQ ID NO: 17529 - protein, 37 aa, Artificial Sequence
  GFR-binding peptide
  MOD_RES (1)..(3): Xaa is C or S
  MOD_RES (16)..(17)..(18)..(19)..(20): Xaa is A or G
  MOD_RES (21)..(22)..(23)..(24): Xaa is A or G or is absent
XAXELHEELRSMEGLXXXXXXXXXMIQVTINSHHVRS

SEQ ID NO: 17530 - protein, 45 aa, Artificial Sequence
  GFR-binding peptide
  MOD_RES (2)..(4)..(41): Xaa is C or S
  MOD_RES (17)..(18)..(19)..(20)..(21): Xaa is A or G
  MOD_RES (22)..(23)..(24)..(25): Xaa is A or G or is absent
AXAXELHEELRSMEGIXXXXXXXXXMIQVTINSHHVRSPQXKVSS

SEQ ID NO: 17531 - protein, 38 aa, Artificial Sequence
  GFR-binding peptide
  MOD_RES (1)..(3)..(37): Xaa is C or S
XEXQSHEELSMEGIHQGQHPKIRMIQMTINSQGTPVXE

SEQ ID NO: 17532 - protein, 39 aa, Artificial Sequence
  GFR-binding peptide
  MOD_RES (37)..(37): Xaa is C or S
ELHEELRSMEGILKPKKRVYEMIQVTINSHHVRSPQXKV

SEQ ID NO: 17533 - protein, 42 aa, Artificial Sequence
  GFR-binding peptide
  MOD_RES (2)..(39): Xaa is C or S
  MOD_RES (15)..(16)..(17)..(18)..(19): Xaa is A or G
  MOD_RES (20)..(21)..(22)..(23): Xaa is A or G or is absent
KXALHDELTVTAKKXXXXXXXXXIKRVQVPRLQVQTPRXQVN

SEQ ID NO: 17534 - protein, 45 aa, Artificial Sequence
  GFR-binding peptide
  MOD_RES (2)..(4)..(41): Xaa is C or S
  MOD_RES (17)..(18)..(19)..(20)..(21): Xaa is A or G
  MOD_RES (22)..(23)..(24)..(25): Xaa is A or G or is absent
AXAXELHEELRSMEGLXXXXXXXXXMIQVTINSHHVRSPQXKVSS

SEQ ID NO: 17535 - protein, 36 aa, Artificial Sequence
  GFR-binding peptide
  MOD_RES (33)..(33): Xaa is C or S
NHQLFVQVEKHQGQHPKIRVKAMKVSREETPVXELG

SEQ ID NO: 17536 - protein, 39 aa, Artificial Sequence
  GFR-binding peptide
  MOD_RES (1)..(35): Xaa is C or S
XQSHEELSMEGLHQGQHPKIRMIQMTINSQGTPVXELGE

SEQ ID NO: 17537 - protein, 37 aa, Artificial Sequence
  GFR-binding peptide
  MOD_RES (36)..(36): Xaa is C or S
LHDELTVTAKKFIPKKRVIEIKRVQVPRLQVQTPRXQ

SEQ ID NO: 17538 - protein, 37 aa, Artificial Sequence
  GFR-binding peptide
  MOD_RES (1)..(1): Xaa is C or S
XALHDELTVTAKKFIPKKRVIEIKRVQVPRLQVQTPR

SEQ ID NO: 17539 - protein, 35 aa, Artificial Sequence
  GFR-binding peptide
  MOD_RES (2)..(2): Xaa is C or S
  MOD_RES (14)..(15)..(16)..(17)..(18): Xaa is A or G
  MOD_RES (19)..(20)..(21)..(22): Xaa is A or G or is absent
EXKNHQLFSMEGLXXXXXXXXXMIQMTINSEETPV

SEQ ID NO: 17540 - protein, 37 aa, Artificial Sequence
  GFR-binding peptide
  MOD_RES (1)..(3)..(37): Xaa is C or S
XEXKNHQLFVQVEKHQGQHPKIRVKAMKVSREETPVX

SEQ ID NO: 17541 - protein, 34 aa, Artificial Sequence
  GFR-binding peptide
  MOD_RES (12)..(13)..(14)..(15)..(16): Xaa is A or G
  MOD_RES (17)..(18)..(19)..(20): Xaa is A or G or is absent
LHEELRSMEGIXXXXXXXXXMIQVTINSHHVRSP

SEQ ID NO: 17542 - protein, 39 aa, Artificial Sequence
  GFR-binding peptide
  MOD_RES (33)..(33): Xaa is C or S
NHQLFSMEGLHQGQHPKIRMIQMTINSEETPVXELGEDN

SEQ ID NO: 17543 - protein, 36 aa, Artificial Sequence
  GFR-binding peptide
  MOD_RES (2)..(36): Xaa is C or S
EXQSHEELSMEGIHQGQHPKIRMIQMTINSQGTPVX

SEQ ID NO: 17544 - protein, 41 aa, Artificial Sequence
  GFR-binding peptide
  MOD_RES (1)..(35): Xaa is C or S
XKNHQLFSMEGLHQGQHPKIRMIQMTINSEETPVXELGEDN

SEQ ID NO: 17545 - protein, 36 aa, Artificial Sequence
  GFR-binding peptide
  MOD_RES (33)..(33): Xaa is C or S
NHQLFVTAKKHQGQHPKIRIKRMQVPREETPVXELG

SEQ ID NO: 17546 - protein, 41 aa, Artificial Sequence
  GFR-binding peptide
  MOD_RES (1)..(35): Xaa is C or S
  MOD_RES (13)..(14)..(15)..(16)..(17): Xaa is A or G
  MOD_RES (18)..(19)..(20)..(21): Xaa is A or G or is absent
XQSHEELSMEGIXXXXXXXXXMIQMTINSQGTPVXELGEDN

SEQ ID NO: 17547 - protein, 35 aa, Artificial Sequence
  GFR-binding peptide
  MOD_RES (2)..(2): Xaa is C or S
  MOD_RES (14)..(15)..(16)..(17)..(18): Xaa is A or G
  MOD_RES (19)..(20)..(21)..(22): Xaa is A or G or is absent
EXQSHEELVQVEKXXXXXXXXXVKAMKVSRQGTPV

SEQ ID NO: 17548 - protein, 36 aa, Artificial Sequence
  GFR-binding peptide
  MOD_RES (33)..(33): Xaa is C or S
  MOD_RES (11)..(12)..(13)..(14)..(15): Xaa is A or G
  MOD_RES (16)..(17)..(18)..(19): Xaa is A or G or is absent
NHQLFSMEGLXXXXXXXXXMIQMTINSEETPVXELG

SEQ ID NO: 17549 - protein, 42 aa, Artificial Sequence
  GFR-binding peptide
  MOD_RES (2)..(39): Xaa is C or S
  MOD_RES (15)..(16)..(17)..(18)..(19): Xaa is A or G
  MOD_RES (20)..(21)..(22)..(23): Xaa is A or G or is absent
AXELHEELRSMEGIXXXXXXXXXMIQVTINSHHVRSPQXKVS

SEQ ID NO: 17550 - protein, 41 aa, Artificial Sequence
  GFR-binding peptide
  MOD_RES (37)..(37): Xaa is C or S
  MOD_RES (13)..(14)..(15)..(16)..(17): Xaa is A or G
  MOD_RES (18)..(19)..(20)..(21): Xaa is A or G or is absent
ELHEELRSMEGIXXXXXXXXXMIQVTINSHHVRSPQXKVSS

SEQ ID NO: 17551 - protein, 39 aa, Artificial Sequence
  GFR-binding peptide
  MOD_RES (33)..(33): Xaa is C or S
SHEELSMEGLHQGQHPKIRMIQMTINSQGTPVXELGEDN

SEQ ID NO: 17552 - protein, 40 aa, Artificial Sequence
  GFR-binding peptide
  MOD_RES (2)..(39): Xaa is C or S
  MOD_RES (15)..(16)..(17)..(18)..(19): Xaa is A or G
  MOD_RES (20)..(21)..(22)..(23): Xaa is A or G or is absent
AXELHEELRSMEGIXXXXXXXXXMIQVTINSHHVRSPQXK

SEQ ID NO: 17553 - protein, 43 aa, Artificial Sequence
  GFR-binding peptide
  MOD_RES (2)..(39): Xaa is C or S
AXELHEELRVTAKKLKPKKRVYEIKRVQVPRHHVRSPQXKVSS

SEQ ID NO: 17554 - protein, 37 aa, Artificial Sequence
  GFR-binding peptide
  MOD_RES (34)..(34): Xaa is C or S
KNHQLFVTAKKHQGQHPKIRIKRMQVPREETPVXELG

SEQ ID NO: 17555 - protein, 37 aa, Artificial Sequence
  GFR-binding peptide
  MOD_RES (1)..(3)..(37): Xaa is C or S
XEXQSHEELVTAKKHQGQHPKIRIKRMQVPRQGTPVX

SEQ ID NO: 17556 - protein, 38 aa, Artificial Sequence
  GFR-binding peptide
  MOD_RES (2)..(2): Xaa is C or S
KXALHDELTSMEGIFIPKKRVIEMIQVTINSLQVQTPR

SEQ ID NO: 17557 - protein, 41 aa, Artificial Sequence
  GFR-binding peptide
  MOD_RES (2)..(4)..(41): Xaa is C or S
AXAXELHEELRSMEGILKPKKRVYEMIQVTINSHHVRSPQX

SEQ ID NO: 17558 - protein, 41 aa, Artificial Sequence
  GFR-binding peptide
  MOD_RES (37)..(37): Xaa is C or S
ALHDELTVTAKKFIPKKRVIEIKRVQVPRLQVQTPRXQVNR

SEQ ID NO: 17559 - protein, 37 aa, Artificial Sequence
  GFR-binding peptide
  MOD_RES (2)..(4): Xaa is C or S
RXEXKNHQLFSMEGLHQGQHPKIRMIQMTINSEETPV

SEQ ID NO: 17560 - protein, 39 aa, Artificial Sequence
  GFR-binding peptide
  MOD_RES (2)..(4): Xaa is C or S
AXAXELHEELRSMEGLLKPKKRVYEMIQVTINSHHVRSP

SEQ ID NO: 17561 - protein, 35 aa, Artificial Sequence
  GFR-binding peptide
  MOD_RES (1)..(35): Xaa is C or S
  MOD_RES (13)..(14)..(15)..(16)..(17): Xaa is A or G
  MOD_RES (18)..(19)..(20)..(21): Xaa is A or G or is absent
XQSHEELVQVEKXXXXXXXXXVKAMKVSRQGTPVX

SEQ ID NO: 17562 - protein, 44 aa, Artificial Sequence
  GFR-binding peptide
  MOD_RES (2)..(4)..(38): Xaa is C or S
RXEXQSHEELVTAKKHQGQHPKIRIKRMQVPRQGTPVXELGEDN

SEQ ID NO: 17563 - protein, 41 aa, Artificial Sequence
  GFR-binding peptide
  MOD_RES (2)..(4)..(38): Xaa is C or S
RXEXKNHQLFSMEGLHQGQHPKIRMIQMTINSEETPVXELG

SEQ ID NO: 17564 - protein, 39 aa, Artificial Sequence
  GFR-binding peptide
  MOD_RES (2)..(4)..(38): Xaa is C or S
  MOD_RES (16)..(17)..(18)..(19)..(20): Xaa is A or G
  MOD_RES (21)..(22)..(23)..(24): Xaa is A or G or is absent
RXEXKNHQLFVTAKKXXXXXXXXXIKRMQVPREETPVXE

SEQ ID NO: 17565 - protein, 36 aa, Artificial Sequence
  GFR-binding peptide
  MOD_RES (2)..(2): Xaa is C or S
  MOD_RES (15)..(16)..(17)..(18)..(19): Xaa is A or G
  MOD_RES (20)..(21)..(22)..(23): Xaa is A or G or is absent
AXELHEELRVQVEKXXXXXXXXXVKAVKVSRHHVRS

SEQ ID NO: 17566 - protein, 41 aa, Artificial Sequence
  GFR-binding peptide
  MOD_RES (2)..(39): Xaa is C or S
  MOD_RES (15)..(16)..(17)..(18)..(19): Xaa is A or G
  MOD_RES (20)..(21)..(22)..(23): Xaa is A or G or is absent
AXELHEELRSMEGLXXXXXXXXXMIQVTINSHHVRSPQXKV

SEQ ID NO: 17567 - protein, 38 aa, Artificial Sequence
  GFR-binding peptide
  MOD_RES (2)..(36): Xaa is C or S
  MOD_RES (14)..(15)..(16)..(17)..(18): Xaa is A or G
  MOD_RES (19)..(20)..(21)..(22): Xaa is A or G or is absent
EXQSHEELSMEGLXXXXXXXXXMIQMTINSQGTPVXEL

SEQ ID NO: 17568 - protein, 35 aa, Artificial Sequence
  GFR-binding peptide
  MOD_RES (1)..(35): Xaa is C or S
XQSHEELVQVEKHQGQHPKIRVKAMKVSRQGTPVX

SEQ ID NO: 17569 - protein, 37 aa, Artificial Sequence
  GFR-binding peptide
  MOD_RES (1)..(1): Xaa is C or S
XELHEELRVTAKKLKPKKRVYEIKRVQVPRHHVRSPQ

SEQ ID NO: 17570 - protein, 45 aa, Artificial Sequence
  GFR-binding peptide
  MOD_RES (2)..(4)..(41): Xaa is C or S
EXKXALHDELTVTAKKFIPKKRVIEIKRVQVPRLQVQTPRXQVNR

SEQ ID NO: 17571 - protein, 44 aa, Artificial Sequence
  GFR-binding peptide
  MOD_RES (1)..(3)..(40): Xaa is C or S
  MOD_RES (16)..(17)..(18)..(19)..(20): Xaa is A or G
  MOD_RES (21)..(22)..(23)..(24): Xaa is A or G or is absent
XAXELHEELRSMEGLXXXXXXXXXMIQVTINSHHVRSPQXKVSS

SEQ ID NO: 17572 - protein, 40 aa, Artificial Sequence
  GFR-binding peptide
  MOD_RES (1)..(38): Xaa is C or S
  MOD_RES (14)..(15)..(16)..(17)..(18): Xaa is A or G
  MOD_RES (19)..(20)..(21)..(22): Xaa is A or G or is absent
XALHDELTVTAKKXXXXXXXXXIKRVQVPRLQVQTPRXQV

SEQ ID NO: 17573 - protein, 40 aa, Artificial Sequence
  GFR-binding peptide
  MOD_RES (1)..(3)..(40): Xaa is C or S
XAXELHEELRVTAKKLKPKKRVYEIKRVQVPRHHVRSPQX

SEQ ID NO: 17574 - protein, 37 aa, Artificial Sequence
  GFR-binding peptide
  MOD_RES (35)..(35): Xaa is C or S
  MOD_RES (11)..(12)..(13)..(14)..(15): Xaa is A or G
  MOD_RES (16)..(17)..(18)..(19): Xaa is A or G or is absent
HEELRSMEGIXXXXXXXXXMIQVTINSHHVRSPQXKV

SEQ ID NO: 17575 - protein, 36 aa, Artificial Sequence
  GFR-binding peptide
  MOD_RES (34)..(34): Xaa is C or S
  MOD_RES (12)..(13)..(14)..(15)..(16): Xaa is A or G
  MOD_RES (17)..(18)..(19)..(20): Xaa is A or G or is absent
KNHQLFVTAKKXXXXXXXXXIKRMQVPREETPVXEL

SEQ ID NO: 17576 - protein, 33 aa, Artificial Sequence
  GFR-binding peptide
  MOD_RES (33)..(33): Xaa is C or S
  MOD_RES (11)..(12)..(13)..(14)..(15): Xaa is A or G
  MOD_RES (16)..(17)..(18)..(19): Xaa is A or G or is absent
SHEELVQVEKXXXXXXXXXVKAMKVSRQGTPVX

SEQ ID NO: 17577 - protein, 45 aa, Artificial Sequence
  GFR-binding peptide
  MOD_RES (2)..(4)..(41): Xaa is C or S
  MOD_RES (17)..(18)..(19)..(20)..(21): Xaa is A or G
  MOD_RES (22)..(23)..(24)..(25): Xaa is A or G or is absent
AXAXELHEELRVTAKKXXXXXXXXXIKRVQVPRHHVRSPQXKVSS

SEQ ID NO: 17578 - protein, 44 aa, Artificial Sequence
  GFR-binding peptide
  MOD_RES (1)..(3)..(40): Xaa is C or S
  MOD_RES (16)..(17)..(18)..(19)..(20): Xaa is A or G
  MOD_RES (21)..(22)..(23)..(24): Xaa is A or G or is absent
XAXELHEELRSMEGIXXXXXXXXXMIQVTINSHHVRSPQXKVSS

SEQ ID NO: 17579 - protein, 37 aa, Artificial Sequence
  GFR-binding peptide
  MOD_RES (34)..(34): Xaa is C or S
  MOD_RES (12)..(13)..(14)..(15)..(16): Xaa is A or G
  MOD_RES (17)..(18)..(19)..(20): Xaa is A or G or is absent
KNHQLFSMEGLXXXXXXXXXMIQMTINSEETPVXELG

SEQ ID NO: 17580 - protein, 38 aa, Artificial Sequence
  GFR-binding peptide
  MOD_RES (2)..(4)..(38): Xaa is C or S
RXEXQSHEELSMEGLHQGQHPKIRMIQMTINSQGTPVX

SEQ ID NO: 17581 - protein, 38 aa, Artificial Sequence
  GFR-binding peptide
  MOD_RES (2)..(2): Xaa is C or S
  MOD_RES (15)..(16)..(17)..(18)..(19): Xaa is A or G
  MOD_RES (20)..(21)..(22)..(23): Xaa is A or G or is absent
KXALHDELTVTAKKXXXXXXXXXIKRVQVPRLQVQTPR

SEQ ID NO: 17582 - protein, 37 aa, Artificial Sequence
  GFR-binding peptide
  MOD_RES (36)..(36): Xaa is C or S
  MOD_RES (12)..(13)..(14)..(15)..(16): Xaa is A or G
  MOD_RES (17)..(18)..(19)..(20): Xaa is A or G or is absent
LHEELRVTAKKXXXXXXXXXIKRVQVPRHHVRSPQXK

SEQ ID NO: 17583 - protein, 39 aa, Artificial Sequence
  GFR-binding peptide
  MOD_RES (1)..(3): Xaa is C or S
XKXALHDELTSMEGLFIPKKRVIEMIQVTINSLQVQTPR

SEQ ID NO: 17584 - protein, 38 aa, Artificial Sequence
  GFR-binding peptide
  MOD_RES (37)..(37): Xaa is C or S
  MOD_RES (13)..(14)..(15)..(16)..(17): Xaa is A or G
  MOD_RES (18)..(19)..(20)..(21): Xaa is A or G or is absent
ELHEELRVQVEKXXXXXXXXXVKAVKVSRHHVRSPQXK

SEQ ID NO: 17585 - protein, 38 aa, Artificial Sequence
  GFR-binding peptide
  MOD_RES (35)..(35): Xaa is C or S
HDELTVQVEKFIPKKRVIEVKAVKVSRLQVQTPRXQVN

SEQ ID NO: 17586 - protein, 43 aa, Artificial Sequence
  GFR-binding peptide
  MOD_RES (1)..(3)..(37): Xaa is C or S
XEXKNHQLFSMEGIHQGQHPKIRMIQMTINSEETPVXELGEDN

SEQ ID NO: 17587 - protein, 38 aa, Artificial Sequence
  GFR-binding peptide
  MOD_RES (1)..(35): Xaa is C or S
  MOD_RES (13)..(14)..(15)..(16)..(17): Xaa is A or G
  MOD_RES (18)..(19)..(20)..(21): Xaa is A or G or is absent
XQSHEELSMEGLXXXXXXXXXMIQMTINSQGTPVXELG

SEQ ID NO: 17588 - protein, 37 aa, Artificial Sequence
  GFR-binding peptide
  MOD_RES (33)..(33): Xaa is C or S
NHQLFSMEGLHQGQHPKIRMIQMTINSEETPVXELGE

SEQ ID NO: 17589 - protein, 40 aa, Artificial Sequence
  GFR-binding peptide
  MOD_RES (2)..(4)..(38): Xaa is C or S
RXEXKNHQLFVQVEKHQGQHPKIRVKAMKVSREETPVXEL

SEQ ID NO: 17590 - protein, 38 aa, Artificial Sequence
  GFR-binding peptide
  MOD_RES (2)..(2): Xaa is C or S
  MOD_RES (15)..(16)..(17)..(18)..(19): Xaa is A or G
  MOD_RES (20)..(21)..(22)..(23): Xaa is A or G or is absent
KXALHDELTSMEGLXXXXXXXXXMIQVTINSLQVQTPR

SEQ ID NO: 17591 - protein, 35 aa, Artificial Sequence
  GFR-binding peptide
  MOD_RES (1)..(1): Xaa is C or S
  MOD_RES (14)..(15)..(16)..(17)..(18): Xaa is A or G
  MOD_RES (19)..(20)..(21)..(22): Xaa is A or G or is absent
XALHDELTSMEGIXXXXXXXXXMIQVTINSLQVQT

SEQ ID NO: 17592 - protein, 41 aa, Artificial Sequence
  GFR-binding peptide
  MOD_RES (1)..(38): Xaa is C or S
  MOD_RES (14)..(15)..(16)..(17)..(18): Xaa is A or G
  MOD_RES (19)..(20)..(21)..(22): Xaa is A or G or is absent
XELHEELRVQVEKXXXXXXXXXVKAVKVSRHHVRSPQXKVS

SEQ ID NO: 17593 - protein, 36 aa, Artificial Sequence
  GFR-binding peptide
  MOD_RES (1)..(1): Xaa is C or S
XALHDELTVQVEKFIPKKRVIEVKAVKVSRLQVQTP

SEQ ID NO: 17594 - protein, 40 aa, Artificial Sequence
  GFR-binding peptide
  MOD_RES (2)..(36): Xaa is C or S
  MOD_RES (14)..(15)..(16)..(17)..(18): Xaa is A or G
  MOD_RES (19)..(20)..(21)..(22): Xaa is A or G or is absent
EXKNHQLFVQVEKXXXXXXXXXVKAMKVSREETPVXELGE

SEQ ID NO: 17595 - protein, 39 aa, Artificial Sequence
  GFR-binding peptide
  MOD_RES (2)..(4): Xaa is C or S
AXAXELHEELRVTAKKLKPKKRVYEIKRVQVPRHHVRSP

SEQ ID NO: 17596 - protein, 35 aa, Artificial Sequence
  GFR-binding peptide
  MOD_RES (1)..(1): Xaa is C or S
XELHEELRVQVEKLKPKKRVYEVKAVKVSRHHVRS

SEQ ID NO: 17597 - protein, 41 aa, Artificial Sequence
  GFR-binding peptide
  MOD_RES (37)..(37): Xaa is C or S
ALHDELTSMEGLFIPKKRVIEMIQVTINSLQVQTPRXQVNR

SEQ ID NO: 17598 - protein, 42 aa, Artificial Sequence
  GFR-binding peptide
  MOD_RES (2)..(4)..(38): Xaa is C or S
RXEXKNHQLFVQVEKHQGQHPKIRVKAMKVSREETPVXELGE

SEQ ID NO: 17599 - protein, 39 aa, Artificial Sequence
  GFR-binding peptide
  MOD_RES (1)..(38): Xaa is C or S
XALHDELTVQVEKFIPKKRVIEVKAVKVSRLQVQTPRXQ

SEQ ID NO: 17600 - protein, 38 aa, Artificial Sequence
  GFR-binding peptide
  MOD_RES (1)..(35): Xaa is C or S
XQSHEELSMEGLHQGQHPKIRMIQMTINSQGTPVXELG

SEQ ID NO: 17601 - protein, 36 aa, Artificial Sequence
  GFR-binding peptide
  MOD_RES (2)..(2): Xaa is C or S
  MOD_RES (15)..(16)..(17)..(18)..(19): Xaa is A or G
  MOD_RES (20)..(21)..(22)..(23): Xaa is A or G or is absent
KXALHDELTSMEGLXXXXXXXXXMIQVTINSLQVQT

SEQ ID NO: 17602 - protein, 36 aa, Artificial Sequence
  GFR-binding peptide
  MOD_RES (2)..(2): Xaa is C or S
KXALHDELTSMEGIFIPKKRVIEMIQVTINSLQVQT

SEQ ID NO: 17603 - protein, 32 aa, Artificial Sequence
  GFR-binding peptide
  MOD_RES (11)..(12)..(13)..(14)..(15): Xaa is A or G
  MOD_RES (16)..(17)..(18)..(19): Xaa is A or G or is absent
HDELTSMEGLXXXXXXXXXMIQVTINSLQVQT

SEQ ID NO: 17604 - protein, 39 aa, Artificial Sequence
  GFR-binding peptide
  MOD_RES (2)..(39): Xaa is C or S
  MOD_RES (15)..(16)..(17)..(18)..(19): Xaa is A or G
  MOD_RES (20)..(21)..(22)..(23): Xaa is A or G or is absent
AXELHEELRSMEGIXXXXXXXXXMIQVTINSHHVRSPQX

SEQ ID NO: 17605 - protein, 43 aa, Artificial Sequence
  GFR-binding peptide
  MOD_RES (1)..(3)..(37): Xaa is C or S
XEXKNHQLFVTAKKHQGQHPKIRIKRMQVPREETPVXELGEDN

SEQ ID NO: 17606 - protein, 38 aa, Artificial Sequence
  GFR-binding peptide
  MOD_RES (35)..(35): Xaa is C or S
HEELRSMEGILKPKKRVYEMIQVTINSHHVRSPQXKVS

SEQ ID NO: 17607 - protein, 40 aa, Artificial Sequence
  GFR-binding peptide
  MOD_RES (36)..(36): Xaa is C or S
  MOD_RES (12)..(13)..(14)..(15)..(16): Xaa is A or G
  MOD_RES (17)..(18)..(19)..(20): Xaa is A or G or is absent
LHDELTSMEGLXXXXXXXXXMIQVTINSLQVQTPRXQVNR

SEQ ID NO: 17608 - protein, 32 aa, Artificial Sequence
  GFR-binding peptide
HEELRSMEGILKPKKRVYEMIQVTINSHHVRS

SEQ ID NO: 17609 - protein, 40 aa, Artificial Sequence
  GFR-binding peptide
  MOD_RES (2)..(36): Xaa is C or S
  MOD_RES (14)..(15)..(16)..(17)..(18): Xaa is A or G
  MOD_RES (19)..(20)..(21)..(22): Xaa is A or G or is absent
EXQSHEELSMEGIXXXXXXXXXMIQMTINSQGTPVXELGE

SEQ ID NO: 17610 - protein, 39 aa, Artificial Sequence
  GFR-binding peptide
  MOD_RES (33)..(33): Xaa is C or S
SHEELSMEGIHQGQHPKIRMIQMTINSQGTPVXELGEDN

SEQ ID NO: 17611 - protein, 42 aa, Artificial Sequence
  GFR-binding peptide
  MOD_RES (2)..(4)..(38): Xaa is C or S
  MOD_RES (16)..(17)..(18)..(19)..(20): Xaa is A or G
  MOD_RES (21)..(22)..(23)..(24): Xaa is A or G or is absent
RXEXKNHQLFSMEGIXXXXXXXXXMIQMTINSEETPVXELGE

SEQ ID NO: 17612 - protein, 37 aa, Artificial Sequence
  GFR-binding peptide
  MOD_RES (2)..(36): Xaa is C or S
EXQSHEELVTAKKHQGQHPKIRIKRMQVPRQGTPVXE

SEQ ID NO: 17613 - protein, 37 aa, Artificial Sequence
  GFR-binding peptide
  MOD_RES (36)..(36): Xaa is C or S
  MOD_RES (12)..(13)..(14)..(15)..(16): Xaa is A or G
  MOD_RES (17)..(18)..(19)..(20): Xaa is A or G or is absent
LHDELTVQVEKXXXXXXXXXVKAVKVSRLQVQTPRXQ

SEQ ID NO: 17614 - protein, 36 aa, Artificial Sequence
  GFR-binding peptide
  MOD_RES (33)..(33): Xaa is C or S
  MOD_RES (11)..(12)..(13)..(14)..(15): Xaa is A or G
  MOD_RES (16)..(17)..(18)..(19): Xaa is A or G or is absent
NHQLFVQVEKXXXXXXXXXVKAMKVSREETPVXELG

SEQ ID NO: 17615 - protein, 40 aa, Artificial Sequence
  GFR-binding peptide
  MOD_RES (36)..(36): Xaa is C or S
  MOD_RES (12)..(13)..(14)..(15)..(16): Xaa is A or G
  MOD_RES (17)..(18)..(19)..(20): Xaa is A or G or is absent
LHEELRVQVEKXXXXXXXXXVKAVKVSRHHVRSPQXKVSS

SEQ ID NO: 17616 - protein, 37 aa, Artificial Sequence
  GFR-binding peptide
  MOD_RES (33)..(33): Xaa is C or S
NHQLFSMEGIHQGQHPKIRMIQMTINSEETPVXELGE

SEQ ID NO: 17617 - protein, 40 aa, Artificial Sequence
  GFR-binding peptide
  MOD_RES (37)..(37): Xaa is C or S
  MOD_RES (13)..(14)..(15)..(16)..(17): Xaa is A or G
  MOD_RES (18)..(19)..(20)..(21): Xaa is A or G or is absent
ALHDELTVTAKKXXXXXXXXXIKRVQVPRLQVQTPRXQVN

SEQ ID NO: 17618 - protein, 36 aa, Artificial Sequence
  GFR-binding peptide
  MOD_RES (1)..(1): Xaa is C or S
  MOD_RES (14)..(15)..(16)..(17)..(18): Xaa is A or G
  MOD_RES (19)..(20)..(21)..(22): Xaa is A or G or is absent
XELHEELRSMEGIXXXXXXXXXMIQVTINSHHVRSP

SEQ ID NO: 17619 - protein, 41 aa, Artificial Sequence
  GFR-binding peptide
  MOD_RES (1)..(3)..(40): Xaa is C or S
XKXALHDELTVQVEKFIPKKRVIEVKAVKVSRLQVQTPRXQ

SEQ ID NO: 17620 - protein, 39 aa, Artificial Sequence
  GFR-binding peptide
  MOD_RES (1)..(38): Xaa is C or S
  MOD_RES (14)..(15)..(16)..(17)..(18): Xaa is A or G
  MOD_RES (19)..(20)..(21)..(22): Xaa is A or G or is absent
XALHDELTSMEGLXXXXXXXXXMIQVTINSLQVQTPRXQ

SEQ ID NO: 17621 - protein, 38 aa, Artificial Sequence
  GFR-binding peptide
  MOD_RES (2)..(36): Xaa is C or S
  MOD_RES (14)..(15)..(16)..(17)..(18): Xaa is A or G
  MOD_RES (19)..(20)..(21)..(22): Xaa is A or G or is absent
EXKNHQLFSMEGLXXXXXXXXXMIQMTINSEETPVXEL

SEQ ID NO: 17622 - protein, 41 aa, Artificial Sequence
  GFR-binding peptide
  MOD_RES (1)..(35): Xaa is C or S
XQSHEELSMEGIHQGQHPKIRMIQMTINSQGTPVXELGEDN

SEQ ID NO: 17623 - protein, 38 aa, Artificial Sequence
  GFR-binding peptide
  MOD_RES (2)..(4): Xaa is C or S
EXKXALHDELTVQVEKFIPKKRVIEVKAVKVSRLQVQT

SEQ ID NO: 17624 - protein, 41 aa, Artificial Sequence
  GFR-binding peptide
  MOD_RES (2)..(36): Xaa is C or S
  MOD_RES (14)..(15)..(16)..(17)..(18): Xaa is A or G
  MOD_RES (19)..(20)..(21)..(22): Xaa is A or G or is absent
EXQSHEELSMEGIXXXXXXXXXMIQMTINSQGTPVXELGED

SEQ ID NO: 17625 - protein, 39 aa, Artificial Sequence
  GFR-binding peptide
  MOD_RES (1)..(35): Xaa is C or S
  MOD_RES (13)..(14)..(15)..(16)..(17): Xaa is A or G
  MOD_RES (18)..(19)..(20)..(21): Xaa is A or G or is absent
XQSHEELSMEGIXXXXXXXXXMIQMTINSQGTPVXELGE

SEQ ID NO: 17626 - protein, 37 aa, Artificial Sequence
  GFR-binding peptide
  MOD_RES (35)..(35): Xaa is C or S
  MOD_RES (11)..(12)..(13)..(14)..(15): Xaa is A or G
  MOD_RES (16)..(17)..(18)..(19): Xaa is A or G or is absent
HEELRSMEGLXXXXXXXXXMIQVTINSHHVRSPQXKV

SEQ ID NO: 17627 - protein, 43 aa, Artificial Sequence
  GFR-binding peptide
  MOD_RES (2)..(39): Xaa is C or S
  MOD_RES (15)..(16)..(17)..(18)..(19): Xaa is A or G
  MOD_RES (20)..(21)..(22)..(23): Xaa is A or G or is absent
KXALHDELTVQVEKXXXXXXXXXVKAVKVSRLQVQTPRXQVNR

SEQ ID NO: 17628 - protein, 37 aa, Artificial Sequence
  GFR-binding peptide
  MOD_RES (1)..(3): Xaa is C or S
XKXALHDELTSMEGIFIPKKRVIEMIQVTINSLQVQT

SEQ ID NO: 17629 - protein, 37 aa, Artificial Sequence
  GFR-binding peptide
  MOD_RES (33)..(33): Xaa is C or S
SHEELSMEGIHQGQHPKIRMIQMTINSQGTPVXELGE

SEQ ID NO: 17630 - protein, 40 aa, Artificial Sequence
  GFR-binding peptide
  MOD_RES (2)..(4)..(38): Xaa is C or S
RXEXQSHEELSMEGLHQGQHPKIRMIQMTINSQGTPVXEL

SEQ ID NO: 17631 - protein, 34 aa, Artificial Sequence
  GFR-binding peptide
  MOD_RES (13)..(14)..(15)..(16)..(17): Xaa is A or G
  MOD_RES (18)..(19)..(20)..(21): Xaa is A or G or is absent
ALHDELTSMEGLXXXXXXXXXMIQVTINSLQVQT

SEQ ID NO: 17632 - protein, 39 aa, Artificial Sequence
  GFR-binding peptide
  MOD_RES (2)..(36): Xaa is C or S
EXQSHEELSMEGLHQGQHPKIRMIQMTINSQGTPVXELG

SEQ ID NO: 17633 - protein, 38 aa, Artificial Sequence
  GFR-binding peptide
  MOD_RES (2)..(2): Xaa is C or S
  MOD_RES (15)..(16)..(17)..(18)..(19): Xaa is A or G
  MOD_RES (20)..(21)..(22)..(23): Xaa is A or G or is absent
AXELHEELRVQVEKXXXXXXXXXVKAVKVSRHHVRSPQ

SEQ ID NO: 17634 - protein, 41 aa, Artificial Sequence
  GFR-binding peptide
  MOD_RES (1)..(35): Xaa is C or S
XQSHEELVTAKKHQGQHPKIRIKRMQVPRQGTPVXELGEDN

SEQ ID NO: 17635 - protein, 41 aa, Artificial Sequence
  GFR-binding peptide
  MOD_RES (2)..(4)..(41): Xaa is C or S
  MOD_RES (17)..(18)..(19)..(20)..(21): Xaa is A or G
  MOD_RES (22)..(23)..(24)..(25): Xaa is A or G or is absent
AXAXELHEELRVQVEKXXXXXXXXXVKAVKVSRHHVRSPQX

SEQ ID NO: 17636 - protein, 43 aa, Artificial Sequence
  GFR-binding peptide
  MOD_RES (2)..(4)..(38): Xaa is C or S
RXEXKNHQLFSMEGLHQGQHPKIRMIQMTINSEETPVXELGED

SEQ ID NO: 17637 - protein, 36 aa, Artificial Sequence
  GFR-binding peptide
  MOD_RES (2)..(2): Xaa is C or S
KXALHDELTSMEGLFIPKKRVIEMIQVTINSLQVQT

SEQ ID NO: 17638 - protein, 43 aa, Artificial Sequence
  GFR-binding peptide
  MOD_RES (2)..(4)..(38): Xaa is C or S
RXEXKNHQLFSMEGIHQGQHPKIRMIQMTINSEETPVXELGED

SEQ ID NO: 17639 - protein, 36 aa, Artificial Sequence
  GFR-binding peptide
  MOD_RES (34)..(34): Xaa is C or S
KNHQLFVQVEKHQGQHPKIRVKAMKVSREETPVXEL

SEQ ID NO: 17640 - protein, 33 aa, Artificial Sequence
  GFR-binding peptide
  MOD_RES (33)..(33): Xaa is C or S
SHEELVQVEKHQGQHPKIRVKAMKVSRQGTPVX

SEQ ID NO: 17641 - protein, 39 aa, Artificial Sequence
  GFR-binding peptide
  MOD_RES (36)..(36): Xaa is C or S
  MOD_RES (12)..(13)..(14)..(15)..(16): Xaa is A or G
  MOD_RES (17)..(18)..(19)..(20): Xaa is A or G or is absent
LHEELRSMEGLXXXXXXXXXMIQVTINSHHVRSPQXKVS

SEQ ID NO: 17642 - protein, 39 aa, Artificial Sequence
  GFR-binding peptide
  MOD_RES (1)..(3): Xaa is C or S
  MOD_RES (16)..(17)..(18)..(19)..(20): Xaa is A or G
  MOD_RES (21)..(22)..(23)..(24): Xaa is A or G or is absent
XAXELHEELRSMEGIXXXXXXXXXMIQVTINSHHVRSPQ

SEQ ID NO: 17643 - protein, 32 aa, Artificial Sequence
  GFR-binding peptide
HDELTSMEGLFIPKKRVIEMIQVTINSLQVQT

SEQ ID NO: 17644 - protein, 45 aa, Artificial Sequence
  GFR-binding peptide
  MOD_RES (2)..(4)..(41): Xaa is C or S
  MOD_RES (17)..(18)..(19)..(20)..(21): Xaa is A or G
  MOD_RES (22)..(23)..(24)..(25): Xaa is A or G or is absent
AXAXELHEELRVQVEKXXXXXXXXXVKAVKVSRHHVRSPQXKVSS

SEQ ID NO: 17645 - protein, 41 aa, Artificial Sequence
  GFR-binding peptide
  MOD_RES (1)..(3)..(40): Xaa is C or S
  MOD_RES (16)..(17)..(18)..(19)..(20): Xaa is A or G
  MOD_RES (21)..(22)..(23)..(24): Xaa is A or G or is absent
XAXELHEELRSMEGIXXXXXXXXXMIQVTINSHHVRSPQXK

SEQ ID NO: 17646 - protein, 35 aa, Artificial Sequence
  GFR-binding peptide
  MOD_RES (13)..(14)..(15)..(16)..(17): Xaa is A or G
  MOD_RES (18)..(19)..(20)..(21): Xaa is A or G or is absent
ALHDELTSMEGLXXXXXXXXXMIQVTINSLQVQTP

SEQ ID NO: 17647 - protein, 38 aa, Artificial Sequence
  GFR-binding peptide
  MOD_RES (37)..(37): Xaa is C or S
ELHEELRSMEGILKPKKRVYEMIQVTINSHHVRSPQXK

SEQ ID NO: 17648 - protein, 39 aa, Artificial Sequence
  GFR-binding peptide
  MOD_RES (2)..(36): Xaa is C or S
  MOD_RES (14)..(15)..(16)..(17)..(18): Xaa is A or G
  MOD_RES (19)..(20)..(21)..(22): Xaa is A or G or is absent
EXQSHEELSMEGIXXXXXXXXXMIQMTINSQGTPVXELG

SEQ ID NO: 17649 - protein, 39 aa, Artificial Sequence
  GFR-binding peptide
  MOD_RES (1)..(35): Xaa is C or S
XQSHEELSMEGIHQGQHPKIRMIQMTINSQGTPVXELGE

SEQ ID NO: 17650 - protein, 33 aa, Artificial Sequence
  GFR-binding peptide
  MOD_RES (33)..(33): Xaa is C or S
SHEELVTAKKHQGQHPKIRIKRMQVPRQGTPVX

SEQ ID NO: 17651 - protein, 33 aa, Artificial Sequence
  GFR-binding peptide
  MOD_RES (33)..(33): Xaa is C or S
  MOD_RES (11)..(12)..(13)..(14)..(15): Xaa is A or G
  MOD_RES (16)..(17)..(18)..(19): Xaa is A or G or is absent
SHEELSMEGLXXXXXXXXXMIQMTINSQGTPVX

SEQ ID NO: 17652 - protein, 41 aa, Artificial Sequence
  GFR-binding peptide
  MOD_RES (1)..(35): Xaa is C or S
  MOD_RES (13)..(14)..(15)..(16)..(17): Xaa is A or G
  MOD_RES (18)..(19)..(20)..(21): Xaa is A or G or is absent
XQSHEELVTAKKXXXXXXXXXIKRMQVPRQGTPVXELGEDN

SEQ ID NO: 17653 - protein, 32 aa, Artificial Sequence
  GFR-binding peptide
  MOD_RES (11)..(12)..(13)..(14)..(15): Xaa is A or G
  MOD_RES (16)..(17)..(18)..(19): Xaa is A or G or is absent
NHQLFSMEGIXXXXXXXXXMIQMTINSEETPV

SEQ ID NO: 17654 - protein, 43 aa, Artificial Sequence
  GFR-binding peptide
  MOD_RES (2)..(4)..(41): Xaa is C or S
  MOD_RES (17)..(18)..(19)..(20)..(21): Xaa is A or G
  MOD_RES (22)..(23)..(24)..(25): Xaa is A or G or is absent
EXKXALHDELTVQVEKXXXXXXXXXVKAVKVSRLQVQTPRXQV

SEQ ID NO: 17655 - protein, 42 aa, Artificial Sequence
  GFR-binding peptide
  MOD_RES (2)..(4)..(38): Xaa is C or S
  MOD_RES (16)..(17)..(18)..(19)..(20): Xaa is A or G
  MOD_RES (21)..(22)..(23)..(24): Xaa is A or G or is absent
RXEXKNHQLFVTAKKXXXXXXXXXIKRMQVPREETPVXELGE

SEQ ID NO: 17656 - protein, 39 aa, Artificial Sequence
  GFR-binding peptide
  MOD_RES (35)..(35): Xaa is C or S
  MOD_RES (11)..(12)..(13)..(14)..(15): Xaa is A or G
  MOD_RES (16)..(17)..(18)..(19): Xaa is A or G or is absent
HEELRSMEGIXXXXXXXXXMIQVTINSHHVRSPQXKVSS

SEQ ID NO: 17657 - protein, 37 aa, Artificial Sequence
  GFR-binding peptide
  MOD_RES (1)..(3): Xaa is C or S
XKXALHDELTSMEGLFIPKKRVIEMIQVTINSLQVQT

SEQ ID NO: 17658 - protein, 35 aa, Artificial Sequence
  GFR-binding peptide
  MOD_RES (2)..(2): Xaa is C or S
EXQSHEELVTAKKHQGQHPKIRIKRMQVPRQGTPV

SEQ ID NO: 17659 - protein, 36 aa, Artificial Sequence
  GFR-binding peptide
  MOD_RES (2)..(2): Xaa is C or S
  MOD_RES (15)..(16)..(17)..(18)..(19): Xaa is A or G
  MOD_RES (20)..(21)..(22)..(23): Xaa is A or G or is absent
KXALHDELTVTAKKXXXXXXXXXIKRVQVPRLQVQT

SEQ ID NO: 17660 - protein, 35 aa, Artificial Sequence
  GFR-binding peptide
  MOD_RES (35)..(35): Xaa is C or S
  MOD_RES (11)..(12)..(13)..(14)..(15): Xaa is A or G
  MOD_RES (16)..(17)..(18)..(19): Xaa is A or G or is absent
HDELTSMEGLXXXXXXXXXMIQVTINSLQVQTPRX

SEQ ID NO: 17661 - protein, 42 aa, Artificial Sequence
  GFR-binding peptide
  MOD_RES (2)..(4)..(38): Xaa is C or S
  MOD_RES (16)..(17)..(18)..(19)..(20): Xaa is A or G
  MOD_RES (21)..(22)..(23)..(24): Xaa is A or G or is absent
RXEXKNHQLFVQVEKXXXXXXXXXVKAMKVSREETPVXELGE

SEQ ID NO: 17662 - protein, 35 aa, Artificial Sequence
  GFR-binding peptide
  MOD_RES (35)..(35): Xaa is C or S
  MOD_RES (11)..(12)..(13)..(14)..(15): Xaa is A or G
  MOD_RES (16)..(17)..(18)..(19): Xaa is A or G or is absent
HDELTSMEGIXXXXXXXXXMIQVTINSLQVQTPRX

SEQ ID NO: 17663 - protein, 32 aa, Artificial Sequence
  GFR-binding peptide
NHQLFVQVEKHQGQHPKIRVKAMKVSREETPV

SEQ ID NO: 17664 - protein, 38 aa, Artificial Sequence
  GFR-binding peptide
  MOD_RES (1)..(35): Xaa is C or S
  MOD_RES (13)..(14)..(15)..(16)..(17): Xaa is A or G
  MOD_RES (18)..(19)..(20)..(21): Xaa is A or G or is absent
XQSHEELVQVEKXXXXXXXXXVKAMKVSRQGTPVXELG

SEQ ID NO: 17665 - protein, 38 aa, Artificial Sequence
  GFR-binding peptide
  MOD_RES (1)..(3)..(37): Xaa is C or S
XEXKNHQLFSMEGLHQGQHPKIRMIQMTINSEETPVXE

SEQ ID NO: 17666 - protein, 41 aa, Artificial Sequence
  GFR-binding peptide
  MOD_RES (2)..(4)..(41): Xaa is C or S
EXKXALHDELTVQVEKFIPKKRVIEVKAVKVSRLQVQTPRX

SEQ ID NO: 17667 - protein, 42 aa, Artificial Sequence
  GFR-binding peptide
  MOD_RES (1)..(3)..(37): Xaa is C or S
XEXQSHEELVQVEKHQGQHPKIRVKAMKVSRQGTPVXELGED

SEQ ID NO: 17668 - protein, 32 aa, Artificial Sequence
  GFR-binding peptide
  MOD_RES (11)..(12)..(13)..(14)..(15): Xaa is A or G
  MOD_RES (16)..(17)..(18)..(19): Xaa is A or G or is absent
HDELTVTAKKXXXXXXXXXIKRVQVPRLQVQT

SEQ ID NO: 17669 - protein, 33 aa, Artificial Sequence
  GFR-binding peptide
LHEELRVTAKKLKPKKRVYEIKRVQVPRHHVRS

SEQ ID NO: 17670 - protein, 42 aa, Artificial Sequence
  GFR-binding peptide
  MOD_RES (2)..(4)..(41): Xaa is C or S
AXAXELHEELRVTAKKLKPKKRVYEIKRVQVPRHHVRSPQXK

SEQ ID NO: 17671 - protein, 45 aa, Artificial Sequence
  GFR-binding peptide
  MOD_RES (2)..(4)..(41): Xaa is C or S
  MOD_RES (17)..(18)..(19)..(20)..(21): Xaa is A or G
  MOD_RES (22)..(23)..(24)..(25): Xaa is A or G or is absent
EXKXALHDELTSMEGLXXXXXXXXXMIQVTINSLQVQTPRXQVNR

SEQ ID NO: 17672 - protein, 32 aa, Artificial Sequence
  GFR-binding peptide
HEELRSMEGLLKPKKRVYEMIQVTINSHHVRS

SEQ ID NO: 17673 - protein, 39 aa, Artificial Sequence
  GFR-binding peptide
  MOD_RES (34)..(34): Xaa is C or S
KNHQLFVQVEKHQGQHPKIRVKAMKVSREETPVXELGED

SEQ ID NO: 17674 - protein, 39 aa, Artificial Sequence
  GFR-binding peptide
  MOD_RES (37)..(37): Xaa is C or S
  MOD_RES (13)..(14)..(15)..(16)..(17): Xaa is A or G
  MOD_RES (18)..(19)..(20)..(21): Xaa is A or G or is absent
ELHEELRVQVEKXXXXXXXXXVKAVKVSRHHVRSPQXKV

SEQ ID NO: 17675 - protein, 32 aa, Artificial Sequence
  GFR-binding peptide
HDELTSMEGIFIPKKRVIEMIQVTINSLQVQT

SEQ ID NO: 17676 - protein, 37 aa, Artificial Sequence
  GFR-binding peptide
  MOD_RES (37)..(37): Xaa is C or S
  MOD_RES (13)..(14)..(15)..(16)..(17): Xaa is A or G
  MOD_RES (18)..(19)..(20)..(21): Xaa is A or G or is absent
ALHDELTSMEGIXXXXXXXXXMIQVTINSLQVQTPRX

SEQ ID NO: 17677 - protein, 35 aa, Artificial Sequence
  GFR-binding peptide
LHDELTSMEGLFIPKKRVIEMIQVTINSLQVQTPR

SEQ ID NO: 17678 - protein, 36 aa, Artificial Sequence
  GFR-binding peptide
ALHDELTVTAKKFIPKKRVIEIKRVQVPRLQVQTPR

SEQ ID NO: 17679 - protein, 36 aa, Artificial Sequence
  GFR-binding peptide
  MOD_RES (34)..(34): Xaa is C or S
QSHEELSMEGLHQGQHPKIRMIQMTINSQGTPVXEL

SEQ ID NO: 17680 - protein, 40 aa, Artificial Sequence
  GFR-binding peptide
  MOD_RES (2)..(39): Xaa is C or S
  MOD_RES (15)..(16)..(17)..(18)..(19): Xaa is A or G
  MOD_RES (20)..(21)..(22)..(23): Xaa is A or G or is absent
AXELHEELRVQVEKXXXXXXXXXVKAVKVSRHHVRSPQXK

SEQ ID NO: 17681 - protein, 37 aa, Artificial Sequence
  GFR-binding peptide
  MOD_RES (2)..(4): Xaa is C or S
  MOD_RES (16)..(17)..(18)..(19)..(20): Xaa is A or G
  MOD_RES (21)..(22)..(23)..(24): Xaa is A or G or is absent
RXEXQSHEELVQVEKXXXXXXXXXVKAMKVSRQGTPV

SEQ ID NO: 17682 - protein, 41 aa, Artificial Sequence
  GFR-binding peptide
  MOD_RES (2)..(4)..(41): Xaa is C or S
  MOD_RES (17)..(18)..(19)..(20)..(21): Xaa is A or G
  MOD_RES (22)..(23)..(24)..(25): Xaa is A or G or is absent
AXAXELHEELRSMEGLXXXXXXXXXMIQVTINSHHVRSPQX

SEQ ID NO: 17683 - protein, 43 aa, Artificial Sequence
  GFR-binding peptide
  MOD_RES (2)..(4)..(38): Xaa is C or S
  MOD_RES (16)..(17)..(18)..(19)..(20): Xaa is A or G
  MOD_RES (21)..(22)..(23)..(24): Xaa is A or G or is absent
RXEXKNHQLFSMEGIXXXXXXXXXMIQMTINSEETPVXELGED

SEQ ID NO: 17684 - protein, 40 aa, Artificial Sequence
  GFR-binding peptide
  MOD_RES (2)..(39): Xaa is C or S
KXALHDELTSMEGIFIPKKRVIEMIQVTINSLQVQTPRXQ

SEQ ID NO: 17685 - protein, 32 aa, Artificial Sequence
  GFR-binding peptide
  MOD_RES (11)..(12)..(13)..(14)..(15): Xaa is A or G
  MOD_RES (16)..(17)..(18)..(19): Xaa is A or G or is absent
NHQLFSMEGLXXXXXXXXXMIQMTINSEETPV

SEQ ID NO: 17686 - protein, 35 aa, Artificial Sequence
  GFR-binding peptide
  MOD_RES (13)..(14)..(15)..(16)..(17): Xaa is A or G
  MOD_RES (18)..(19)..(20)..(21): Xaa is A or G or is absent
ELHEELRSMEGIXXXXXXXXXMIQVTINSHHVRSP

SEQ ID NO: 17687 - protein, 37 aa, Artificial Sequence
  GFR-binding peptide
  MOD_RES (2)..(4): Xaa is C or S
RXEXQSHEELSMEGIHQGQHPKIRMIQMTINSQGTPV

SEQ ID NO: 17688 - protein, 34 aa, Artificial Sequence
  GFR-binding peptide
  MOD_RES (34)..(34): Xaa is C or S
QSHEELVQVEKHQGQHPKIRVKAMKVSRQGTPVX

SEQ ID NO: 17689 - protein, 39 aa, Artificial Sequence
  GFR-binding peptide
  MOD_RES (2)..(4): Xaa is C or S
AXAXELHEELRVQVEKLKPKKRVYEVKAVKVSRHHVRSP

SEQ ID NO: 17690 - protein, 38 aa, Artificial Sequence
  GFR-binding peptide
  MOD_RES (1)..(3): Xaa is C or S
  MOD_RES (16)..(17)..(18)..(19)..(20): Xaa is A or G
  MOD_RES (21)..(22)..(23)..(24): Xaa is A or G or is absent
XKXALHDELTSMEGLXXXXXXXXXMIQVTINSLQVQTP

SEQ ID NO: 17691 - protein, 38 aa, Artificial Sequence
  GFR-binding peptide
  MOD_RES (2)..(4): Xaa is C or S
EXKXALHDELTVTAKKFIPKKRVIEIKRVQVPRLQVQT

SEQ ID NO: 17692 - protein, 34 aa, Artificial Sequence
  GFR-binding peptide
  MOD_RES (12)..(13)..(14)..(15)..(16): Xaa is A or G
  MOD_RES (17)..(18)..(19)..(20): Xaa is A or G or is absent
LHEELRVQVEKXXXXXXXXXVKAVKVSRHHVRSP

SEQ ID NO: 17693 - protein, 37 aa, Artificial Sequence
  GFR-binding peptide
  MOD_RES (2)..(36): Xaa is C or S
  MOD_RES (14)..(15)..(16)..(17)..(18): Xaa is A or G
  MOD_RES (19)..(20)..(21)..(22): Xaa is A or G or is absent
EXKNHQLFSMEGLXXXXXXXXXMIQMTINSEETPVXE

SEQ ID NO: 17694 - protein, 43 aa, Artificial Sequence
  GFR-binding peptide
  MOD_RES (2)..(39): Xaa is C or S
  MOD_RES (15)..(16)..(17)..(18)..(19): Xaa is A or G
  MOD_RES (20)..(21)..(22)..(23): Xaa is A or G or is absent
AXELHEELRSMEGLXXXXXXXXXMIQVTINSHHVRSPQXKVSS

SEQ ID NO: 17695 - protein, 33 aa, Artificial Sequence
  GFR-binding peptide
  MOD_RES (33)..(33): Xaa is C or S
NHQLFVTAKKHQGQHPKIRIKRMQVPREETPVX

SEQ ID NO: 17696 - protein, 42 aa, Artificial Sequence
  GFR-binding peptide
  MOD_RES (2)..(4)..(41): Xaa is C or S
  MOD_RES (17)..(18)..(19)..(20)..(21): Xaa is A or G
  MOD_RES (22)..(23)..(24)..(25): Xaa is A or G or is absent
EXKXALHDELTSMEGLXXXXXXXXXMIQVTINSLQVQTPRXQ

SEQ ID NO: 17697 - protein, 41 aa, Artificial Sequence
  GFR-binding peptide
  MOD_RES (2)..(4)..(38): Xaa is C or S
RXEXQSHEELVQVEKHQGQHPKIRVKAMKVSRQGTPVXELG

SEQ ID NO: 17698 - protein, 39 aa, Artificial Sequence
  GFR-binding peptide
  MOD_RES (2)..(36): Xaa is C or S
  MOD_RES (14)..(15)..(16)..(17)..(18): Xaa is A or G
  MOD_RES (19)..(20)..(21)..(22): Xaa is A or G or is absent
EXQSHEELSMEGLXXXXXXXXXMIQMTINSQGTPVXELG

SEQ ID NO: 17699 - protein, 38 aa, Artificial Sequence
  GFR-binding peptide
  MOD_RES (2)..(4): Xaa is C or S
  MOD_RES (17)..(18)..(19)..(20)..(21): Xaa is A or G
  MOD_RES (22)..(23)..(24)..(25): Xaa is A or G or is absent
EXKXALHDELTSMEGIXXXXXXXXXMIQVTINSLQVQT

SEQ ID NO: 17700 - protein, 41 aa, Artificial Sequence
  GFR-binding peptide
  MOD_RES (1)..(35): Xaa is C or S
XKNHQLFVQVEKHQGQHPKIRVKAMKVSREETPVXELGEDN

SEQ ID NO: 17701 - protein, 41 aa, Artificial Sequence
  GFR-binding peptide
  MOD_RES (1)..(35): Xaa is C or S
  MOD_RES (13)..(14)..(15)..(16)..(17): Xaa is A or G
  MOD_RES (18)..(19)..(20)..(21): Xaa is A or G or is absent
XKNHQLFVQVEKXXXXXXXXXVKAMKVSREETPVXELGEDN

SEQ ID NO: 17702 - protein, 39 aa, Artificial Sequence
  GFR-binding peptide
  MOD_RES (2)..(4): Xaa is C or S
EXKXALHDELTSMEGIFIPKKRVIEMIQVTINSLQVQTP

SEQ ID NO: 17703 - protein, 39 aa, Artificial Sequence
  GFR-binding peptide
  MOD_RES (2)..(4)..(38): Xaa is C or S
  MOD_RES (16)..(17)..(18)..(19)..(20): Xaa is A or G
  MOD_RES (21)..(22)..(23)..(24): Xaa is A or G or is absent
RXEXQSHEELSMEGLXXXXXXXXXMIQMTINSQGTPVXE

SEQ ID NO: 17704 - protein, 40 aa, Artificial Sequence
  GFR-binding peptide
  MOD_RES (2)..(4): Xaa is C or S
  MOD_RES (17)..(18)..(19)..(20)..(21): Xaa is A or G
  MOD_RES (22)..(23)..(24)..(25): Xaa is A or G or is absent
AXAXELHEELRVQVEKXXXXXXXXXVKAVKVSRHHVRSPQ

SEQ ID NO: 17705 - protein, 34 aa, Artificial Sequence
  GFR-binding peptide
  MOD_RES (1)..(1): Xaa is C or S
  MOD_RES (13)..(14)..(15)..(16)..(17): Xaa is A or G
  MOD_RES (18)..(19)..(20)..(21): Xaa is A or G or is absent
XKNHQLFVTAKKXXXXXXXXXIKRMQVPREETPV

SEQ ID NO: 17706 - protein, 37 aa, Artificial Sequence
  GFR-binding peptide
  MOD_RES (36)..(36): Xaa is C or S
  MOD_RES (12)..(13)..(14)..(15)..(16): Xaa is A or G
  MOD_RES (17)..(18)..(19)..(20): Xaa is A or G or is absent
LHDELTVTAKKXXXXXXXXXIKRVQVPRLQVQTPRXQ

SEQ ID NO: 17707 - protein, 40 aa, Artificial Sequence
  GFR-binding peptide
  MOD_RES (1)..(3)..(37): Xaa is C or S
XEXQSHEELVQVEKHQGQHPKIRVKAMKVSRQGTPVXELG

SEQ ID NO: 17708 - protein, 39 aa, Artificial Sequence
  GFR-binding peptide
  MOD_RES (1)..(3)..(37): Xaa is C or S
  MOD_RES (15)..(16)..(17)..(18)..(19): Xaa is A or G
  MOD_RES (20)..(21)..(22)..(23): Xaa is A or G or is absent
XEXKNHQLFSMEGIXXXXXXXXXMIQMTINSEETPVXEL

SEQ ID NO: 17709 - protein, 38 aa, Artificial Sequence
  GFR-binding peptide
  MOD_RES (2)..(2): Xaa is C or S
KXALHDELTVTAKKFIPKKRVIEIKRVQVPRLQVQTPR

SEQ ID NO: 17710 - protein, 42 aa, Artificial Sequence
  GFR-binding peptide
  MOD_RES (2)..(39): Xaa is C or S
  MOD_RES (15)..(16)..(17)..(18)..(19): Xaa is A or G
  MOD_RES (20)..(21)..(22)..(23): Xaa is A or G or is absent
AXELHEELRVTAKKXXXXXXXXXIKRVQVPRHHVRSPQXKVS

SEQ ID NO: 17711 - protein, 37 aa, Artificial Sequence
  GFR-binding peptide
  MOD_RES (36)..(36): Xaa is C or S
  MOD_RES (12)..(13)..(14)..(15)..(16): Xaa is A or G
  MOD_RES (17)..(18)..(19)..(20): Xaa is A or G or is absent
LHDELTSMEGIXXXXXXXXXMIQVTINSLQVQTPRXQ

SEQ ID NO: 17712 - protein, 32 aa, Artificial Sequence
  GFR-binding peptide
  MOD_RES (11)..(12)..(13)..(14)..(15): Xaa is A or G
  MOD_RES (16)..(17)..(18)..(19): Xaa is A or G or is absent
SHEELVQVEKXXXXXXXXXVKAMKVSRQGTPV

SEQ ID NO: 17713 - protein, 32 aa, Artificial Sequence
  GFR-binding peptide
  MOD_RES (11)..(12)..(13)..(14)..(15): Xaa is A or G
  MOD_RES (16)..(17)..(18)..(19): Xaa is A or G or is absent
NHQLFVTAKKXXXXXXXXXIKRMQVPREETPV

SEQ ID NO: 17714 - protein, 35 aa, Artificial Sequence
  GFR-binding peptide
  MOD_RES (12)..(13)..(14)..(15)..(16): Xaa is A or G
  MOD_RES (17)..(18)..(19)..(20): Xaa is A or G or is absent
LHEELRSMEGLXXXXXXXXXMIQVTINSHHVRSPQ

SEQ ID NO: 17715 - protein, 36 aa, Artificial Sequence
  GFR-binding peptide
  MOD_RES (33)..(33): Xaa is C or S
  MOD_RES (11)..(12)..(13)..(14)..(15): Xaa is A or G
  MOD_RES (16)..(17)..(18)..(19): Xaa is A or G or is absent
NHQLFSMEGIXXXXXXXXXMIQMTINSEETPVXELG

SEQ ID NO: 17716 - protein, 35 aa, Artificial Sequence
  GFR-binding peptide
  MOD_RES (34)..(34): Xaa is C or S
QSHEELSMEGLHQGQHPKIRMIQMTINSQGTPVXE

SEQ ID NO: 17717 - protein, 41 aa, Artificial Sequence
  GFR-binding peptide
  MOD_RES (1)..(3)..(37): Xaa is C or S
XEXQSHEELVQVEKHQGQHPKIRVKAMKVSRQGTPVXELGE

SEQ ID NO: 17718 - protein, 36 aa, Artificial Sequence
  GFR-binding peptide
  MOD_RES (34)..(34): Xaa is C or S
  MOD_RES (12)..(13)..(14)..(15)..(16): Xaa is A or G
  MOD_RES (17)..(18)..(19)..(20): Xaa is A or G or is absent
QSHEELVQVEKXXXXXXXXXVKAMKVSRQGTPVXEL

SEQ ID NO: 17719 - protein, 36 aa, Artificial Sequence
  GFR-binding peptide
  MOD_RES (36)..(36): Xaa is C or S
LHDELTSMEGLFIPKKRVIEMIQVTINSLQVQTPRX

SEQ ID NO: 17720 - protein, 41 aa, Artificial Sequence
  GFR-binding peptide
  MOD_RES (2)..(36): Xaa is C or S
  MOD_RES (14)..(15)..(16)..(17)..(18): Xaa is A or G
  MOD_RES (19)..(20)..(21)..(22): Xaa is A or G or is absent
EXQSHEELSMEGLXXXXXXXXXMIQMTINSQGTPVXELGED

SEQ ID NO: 17721 - protein, 34 aa, Artificial Sequence
  GFR-binding peptide
  MOD_RES (11)..(12)..(13)..(14)..(15): Xaa is A or G
  MOD_RES (16)..(17)..(18)..(19): Xaa is A or G or is absent
HEELRVQVEKXXXXXXXXXVKAVKVSRHHVRSPQ

SEQ ID NO: 17722 - protein, 38 aa, Artificial Sequence
  GFR-binding peptide
  MOD_RES (2)..(4): Xaa is C or S
AXAXELHEELRSMEGLLKPKKRVYEMIQVTINSHHVRS

SEQ ID NO: 17723 - protein, 41 aa, Artificial Sequence
  GFR-binding peptide
  MOD_RES (1)..(38): Xaa is C or S
  MOD_RES (14)..(15)..(16)..(17)..(18): Xaa is A or G
  MOD_RES (19)..(20)..(21)..(22): Xaa is A or G or is absent
XALHDELTVQVEKXXXXXXXXXVKAVKVSRLQVQTPRXQVN

SEQ ID NO: 17724 - protein, 38 aa, Artificial Sequence
  GFR-binding peptide
  MOD_RES (1)..(38): Xaa is C or S
  MOD_RES (14)..(15)..(16)..(17)..(18): Xaa is A or G
  MOD_RES (19)..(20)..(21)..(22): Xaa is A or G or is absent
XALHDELTSMEGIXXXXXXXXXMIQVTINSLQVQTPRX

SEQ ID NO: 17725 - protein, 38 aa, Artificial Sequence
  GFR-binding peptide
  MOD_RES (35)..(35): Xaa is C or S
HEELRVQVEKLKPKKRVYEVKAVKVSRHHVRSPQXKVS

SEQ ID NO: 17726 - protein, 35 aa, Artificial Sequence
  GFR-binding peptide
  MOD_RES (34)..(34): Xaa is C or S
  MOD_RES (12)..(13)..(14)..(15)..(16): Xaa is A or G
  MOD_RES (17)..(18)..(19)..(20): Xaa is A or G or is absent
QSHEELVTAKKXXXXXXXXXIKRMQVPRQGTPVXE

SEQ ID NO: 17727 - protein, 33 aa, Artificial Sequence
  GFR-binding peptide
  MOD_RES (33)..(33): Xaa is C or S
  MOD_RES (11)..(12)..(13)..(14)..(15): Xaa is A or G
  MOD_RES (16)..(17)..(18)..(19): Xaa is A or G or is absent
SHEELVTAKKXXXXXXXXXIKRMQVPRQGTPVX

SEQ ID NO: 17728 - protein, 39 aa, Artificial Sequence
  GFR-binding peptide
  MOD_RES (2)..(39): Xaa is C or S
  MOD_RES (15)..(16)..(17)..(18)..(19): Xaa is A or G
  MOD_RES (20)..(21)..(22)..(23): Xaa is A or G or is absent
AXELHEELRSMEGLXXXXXXXXXMIQVTINSHHVRSPQX

SEQ ID NO: 17729 - protein, 35 aa, Artificial Sequence
  GFR-binding peptide
  MOD_RES (35)..(35): Xaa is C or S
HEELRVQVEKLKPKKRVYEVKAVKVSRHHVRSPQX

SEQ ID NO: 17730 - protein, 37 aa, Artificial Sequence
  GFR-binding peptide
  MOD_RES (2)..(4): Xaa is C or S
  MOD_RES (16)..(17)..(18)..(19)..(20): Xaa is A or G
  MOD_RES (21)..(22)..(23)..(24): Xaa is A or G or is absent
RXEXQSHEELVTAKKXXXXXXXXXIKRMQVPRQGTPV

SEQ ID NO: 17731 - protein, 33 aa, Artificial Sequence
  GFR-binding peptide
LHEELRSMEGILKPKKRVYEMIQVTINSHHVRS

SEQ ID NO: 17732 - protein, 43 aa, Artificial Sequence
  GFR-binding peptide
  MOD_RES (1)..(3)..(40): Xaa is C or S
  MOD_RES (16)..(17)..(18)..(19)..(20): Xaa is A or G
  MOD_RES (21)..(22)..(23)..(24): Xaa is A or G or is absent
XKXALHDELTSMEGLXXXXXXXXXMIQVTINSLQVQTPRXQVN

SEQ ID NO: 17733 - protein, 39 aa, Artificial Sequence
  GFR-binding peptide
  MOD_RES (1)..(35): Xaa is C or S
  MOD_RES (13)..(14)..(15)..(16)..(17): Xaa is A or G
  MOD_RES (18)..(19)..(20)..(21): Xaa is A or G or is absent
XQSHEELSMEGLXXXXXXXXXMIQMTINSQGTPVXELGE

SEQ ID NO: 17734 - protein, 41 aa, Artificial Sequence
  GFR-binding peptide
  MOD_RES (37)..(37): Xaa is C or S
  MOD_RES (13)..(14)..(15)..(16)..(17): Xaa is A or G
  MOD_RES (18)..(19)..(20)..(21): Xaa is A or G or is absent
ALHDELTVQVEKXXXXXXXXXVKAVKVSRLQVQTPRXQVNR

SEQ ID NO: 17735 - protein, 44 aa, Artificial Sequence
  GFR-binding peptide
  MOD_RES (2)..(4)..(38): Xaa is C or S
  MOD_RES (16)..(17)..(18)..(19)..(20): Xaa is A or G
  MOD_RES (21)..(22)..(23)..(24): Xaa is A or G or is absent
RXEXKNHQLFSMEGLXXXXXXXXXMIQMTINSEETPVXELGEDN

SEQ ID NO: 17736 - protein, 36 aa, Artificial Sequence
  GFR-binding peptide
  MOD_RES (2)..(36): Xaa is C or S
EXKNHQLFVQVEKHQGQHPKIRVKAMKVSREETPVX

SEQ ID NO: 17737 - protein, 35 aa, Artificial Sequence
  GFR-binding peptide
ALHDELTVQVEKFIPKKRVIEVKAVKVSRLQVQTP

SEQ ID NO: 17738 - protein, 38 aa, Artificial Sequence
  GFR-binding peptide
  MOD_RES (1)..(3)..(37): Xaa is C or S
  MOD_RES (15)..(16)..(17)..(18)..(19): Xaa is A or G
  MOD_RES (20)..(21)..(22)..(23): Xaa is A or G or is absent
XEXQSHEELVQVEKXXXXXXXXXVKAMKVSRQGTPVXE

SEQ ID NO: 17739 - protein, 36 aa, Artificial Sequence
  GFR-binding peptide
  MOD_RES (1)..(1): Xaa is C or S
  MOD_RES (14)..(15)..(16)..(17)..(18): Xaa is A or G
  MOD_RES (19)..(20)..(21)..(22): Xaa is A or G or is absent
XALHDELTSMEGLXXXXXXXXXMIQVTINSLQVQTP

SEQ ID NO: 17740 - protein, 35 aa, Artificial Sequence
  GFR-binding peptide
  MOD_RES (34)..(34): Xaa is C or S
  MOD_RES (12)..(13)..(14)..(15)..(16): Xaa is A or G
  MOD_RES (17)..(18)..(19)..(20): Xaa is A or G or is absent
QSHEELSMEGIXXXXXXXXXMIQMTINSQGTPVXE

SEQ ID NO: 17741 - protein, 36 aa, Artificial Sequence
  GFR-binding peptide
  MOD_RES (2)..(2): Xaa is C or S
AXELHEELRVQVEKLKPKKRVYEVKAVKVSRHHVRS

SEQ ID NO: 17742 - protein, 42 aa, Artificial Sequence
  GFR-binding peptide
  MOD_RES (1)..(3)..(40): Xaa is C or S
XAXELHEELRVQVEKLKPKKRVYEVKAVKVSRHHVRSPQXKV

SEQ ID NO: 17743 - protein, 38 aa, Artificial Sequence
  GFR-binding peptide
  MOD_RES (2)..(36): Xaa is C or S
  MOD_RES (14)..(15)..(16)..(17)..(18): Xaa is A or G
  MOD_RES (19)..(20)..(21)..(22): Xaa is A or G or is absent
EXQSHEELVTAKKXXXXXXXXXIKRMQVPRQGTPVXEL

SEQ ID NO: 17744 - protein, 36 aa, Artificial Sequence
  GFR-binding peptide
  MOD_RES (1)..(1): Xaa is C or S
  MOD_RES (14)..(15)..(16)..(17)..(18): Xaa is A or G
  MOD_RES (19)..(20)..(21)..(22): Xaa is A or G or is absent
XELHEELRVTAKKXXXXXXXXXIKRVQVPRHHVRSP

SEQ ID NO: 17745 - protein, 37 aa, Artificial Sequence
  GFR-binding peptide
  MOD_RES (34)..(34): Xaa is C or S
  MOD_RES (12)..(13)..(14)..(15)..(16): Xaa is A or G
  MOD_RES (17)..(18)..(19)..(20): Xaa is A or G or is absent
QSHEELVTAKKXXXXXXXXXIKRMQVPRQGTPVXELG

SEQ ID NO: 17746 - protein, 34 aa, Artificial Sequence
  GFR-binding peptide
ALHDELTVQVEKFIPKKRVIEVKAVKVSRLQVQT

SEQ ID NO: 17747 - protein, 38 aa, Artificial Sequence
  GFR-binding peptide
  MOD_RES (1)..(35): Xaa is C or S
XQSHEELVQVEKHQGQHPKIRVKAMKVSRQGTPVXELG

SEQ ID NO: 17748 - protein, 44 aa, Artificial Sequence
  GFR-binding peptide
  MOD_RES (2)..(4)..(41): Xaa is C or S
EXKXALHDELTVTAKKFIPKKRVIEIKRVQVPRLQVQTPRXQVN

SEQ ID NO: 17749 - protein, 33 aa, Artificial Sequence
  GFR-binding peptide
  MOD_RES (33)..(33): Xaa is C or S
  MOD_RES (11)..(12)..(13)..(14)..(15): Xaa is A or G
  MOD_RES (16)..(17)..(18)..(19): Xaa is A or G or is absent
NHQLFVQVEKXXXXXXXXXVKAMKVSREETPVX

SEQ ID NO: 17750 - protein, 39 aa, Artificial Sequence
  GFR-binding peptide
  MOD_RES (35)..(35): Xaa is C or S
  MOD_RES (11)..(12)..(13)..(14)..(15): Xaa is A or G
  MOD_RES (16)..(17)..(18)..(19): Xaa is A or G or is absent
HEELRVQVEKXXXXXXXXXVKAVKVSRHHVRSPQXKVSS

SEQ ID NO: 17751 - protein, 42 aa, Artificial Sequence
  GFR-binding peptide
  MOD_RES (1)..(3)..(40): Xaa is C or S
XAXELHEELRVTAKKLKPKKRVYEIKRVQVPRHHVRSPQXKV

SEQ ID NO: 17752 - protein, 36 aa, Artificial Sequence
  GFR-binding peptide
  MOD_RES (34)..(34): Xaa is C or S
  MOD_RES (12)..(13)..(14)..(15)..(16): Xaa is A or G
  MOD_RES (17)..(18)..(19)..(20): Xaa is A or G or is absent
QSHEELSMEGIXXXXXXXXXMIQMTINSQGTPVXEL

SEQ ID NO: 17753 - protein, 43 aa, Artificial Sequence
  GFR-binding peptide
  MOD_RES (2)..(4)..(41): Xaa is C or S
  MOD_RES (17)..(18)..(19)..(20)..(21): Xaa is A or G
  MOD_RES (22)..(23)..(24)..(25): Xaa is A or G or is absent
EXKXALHDELTSMEGLXXXXXXXXXMIQVTINSLQVQTPRXQV

SEQ ID NO: 17754 - protein, 42 aa, Artificial Sequence
  GFR-binding peptide
  MOD_RES (1)..(3)..(37): Xaa is C or S
XEXQSHEELVTAKKHQGQHPKIRIKRMQVPRQGTPVXELGED

SEQ ID NO: 17755 - protein, 37 aa, Artificial Sequence
  GFR-binding peptide
  MOD_RES (1)..(3)..(37): Xaa is C or S
XEXQSHEELSMEGLHQGQHPKIRMIQMTINSQGTPVX

SEQ ID NO: 17756 - protein, 41 aa, Artificial Sequence
  GFR-binding peptide
  MOD_RES (37)..(37): Xaa is C or S
ELHEELRVTAKKLKPKKRVYEIKRVQVPRHHVRSPQXKVSS

SEQ ID NO: 17757 - protein, 38 aa, Artificial Sequence
  GFR-binding peptide
  MOD_RES (1)..(3): Xaa is C or S
XKXALHDELTSMEGIFIPKKRVIEMIQVTINSLQVQTP

SEQ ID NO: 17758 - protein, 36 aa, Artificial Sequence
  GFR-binding peptide
  MOD_RES (33)..(33): Xaa is C or S
SHEELVQVEKHQGQHPKIRVKAMKVSRQGTPVXELG

SEQ ID NO: 17759 - protein, 37 aa, Artificial Sequence
  GFR-binding peptide
  MOD_RES (36)..(36): Xaa is C or S
LHDELTVQVEKFIPKKRVIEVKAVKVSRLQVQTPRXQ

SEQ ID NO: 17760 - protein, 41 aa, Artificial Sequence
  GFR-binding peptide
  MOD_RES (37)..(37): Xaa is C or S
  MOD_RES (13)..(14)..(15)..(16)..(17): Xaa is A or G
  MOD_RES (18)..(19)..(20)..(21): Xaa is A or G or is absent
ALHDELTSMEGLXXXXXXXXXMIQVTINSLQVQTPRXQVNR

SEQ ID NO: 17761 - protein, 39 aa, Artificial Sequence
  GFR-binding peptide
  MOD_RES (1)..(3): Xaa is C or S
  MOD_RES (16)..(17)..(18)..(19)..(20): Xaa is A or G
  MOD_RES (21)..(22)..(23)..(24): Xaa is A or G or is absent
XAXELHEELRVQVEKXXXXXXXXXVKAVKVSRHHVRSPQ

SEQ ID NO: 17762 - protein, 43 aa, Artificial Sequence
  GFR-binding peptide
  MOD_RES (1)..(3)..(40): Xaa is C or S
XKXALHDELTVQVEKFIPKKRVIEVKAVKVSRLQVQTPRXQVN

SEQ ID NO: 17763 - protein, 36 aa, Artificial Sequence
  GFR-binding peptide
  MOD_RES (33)..(33): Xaa is C or S
NHQLFSMEGIHQGQHPKIRMIQMTINSEETPVXELG

SEQ ID NO: 17764 - protein, 41 aa, Artificial Sequence
  GFR-binding peptide
  MOD_RES (1)..(3)..(40): Xaa is C or S
  MOD_RES (16)..(17)..(18)..(19)..(20): Xaa is A or G
  MOD_RES (21)..(22)..(23)..(24): Xaa is A or G or is absent
XAXELHEELRVQVEKXXXXXXXXXVKAVKVSRHHVRSPQXK

SEQ ID NO: 17765 - protein, 36 aa, Artificial Sequence
  GFR-binding peptide
  MOD_RES (34)..(34): Xaa is C or S
  MOD_RES (12)..(13)..(14)..(15)..(16): Xaa is A or G
  MOD_RES (17)..(18)..(19)..(20): Xaa is A or G or is absent
QSHEELVTAKKXXXXXXXXXIKRMQVPRQGTPVXEL

SEQ ID NO: 17766 - protein, 35 aa, Artificial Sequence
  GFR-binding peptide
  MOD_RES (2)..(2): Xaa is C or S
  MOD_RES (14)..(15)..(16)..(17)..(18): Xaa is A or G
  MOD_RES (19)..(20)..(21)..(22): Xaa is A or G or is absent
EXKNHQLFVTAKKXXXXXXXXXIKRMQVPREETPV

SEQ ID NO: 17767 - protein, 36 aa, Artificial Sequence
  GFR-binding peptide
  MOD_RES (2)..(36): Xaa is C or S
  MOD_RES (14)..(15)..(16)..(17)..(18): Xaa is A or G
  MOD_RES (19)..(20)..(21)..(22): Xaa is A or G or is absent
EXQSHEELSMEGIXXXXXXXXXMIQMTINSQGTPVX

SEQ ID NO: 17768 - protein, 39 aa, Artificial Sequence
  GFR-binding peptide
  MOD_RES (37)..(37): Xaa is C or S
ALHDELTSMEGIFIPKKRVIEMIQVTINSLQVQTPRXQV

SEQ ID NO: 17769 - protein, 41 aa, Artificial Sequence
  GFR-binding peptide
  MOD_RES (2)..(36): Xaa is C or S
EXKNHQLFVQVEKHQGQHPKIRVKAMKVSREETPVXELGED

SEQ ID NO: 17770 - protein, 38 aa, Artificial Sequence
  GFR-binding peptide
  MOD_RES (37)..(37): Xaa is C or S
  MOD_RES (13)..(14)..(15)..(16)..(17): Xaa is A or G
  MOD_RES (18)..(19)..(20)..(21): Xaa is A or G or is absent
ALHDELTVTAKKXXXXXXXXXIKRVQVPRLQVQTPRXQ

SEQ ID NO: 17771 - protein, 36 aa, Artificial Sequence
  GFR-binding peptide
  MOD_RES (33)..(33): Xaa is C or S
SHEELVTAKKHQGQHPKIRIKRMQVPRQGTPVXELG

SEQ ID NO: 17772 - protein, 36 aa, Artificial Sequence
  GFR-binding peptide
  MOD_RES (33)..(33): Xaa is C or S
  MOD_RES (11)..(12)..(13)..(14)..(15): Xaa is A or G
  MOD_RES (16)..(17)..(18)..(19): Xaa is A or G or is absent
SHEELSMEGLXXXXXXXXXMIQMTINSQGTPVXELG

SEQ ID NO: 17773 - protein, 35 aa, Artificial Sequence
  GFR-binding peptide
  MOD_RES (1)..(35): Xaa is C or S
  MOD_RES (13)..(14)..(15)..(16)..(17): Xaa is A or G
  MOD_RES (18)..(19)..(20)..(21): Xaa is A or G or is absent
XKNHQLFVTAKKXXXXXXXXXIKRMQVPREETPVX

SEQ ID NO: 17774 - protein, 40 aa, Artificial Sequence
  GFR-binding peptide
  MOD_RES (1)..(38): Xaa is C or S
  MOD_RES (14)..(15)..(16)..(17)..(18): Xaa is A or G
  MOD_RES (19)..(20)..(21)..(22): Xaa is A or G or is absent
XELHEELRVQVEKXXXXXXXXXVKAVKVSRHHVRSPQXKV

SEQ ID NO: 17775 - protein, 43 aa, Artificial Sequence
  GFR-binding peptide
  MOD_RES (1)..(3)..(40): Xaa is C or S
  MOD_RES (16)..(17)..(18)..(19)..(20): Xaa is A or G
  MOD_RES (21)..(22)..(23)..(24): Xaa is A or G or is absent
XAXELHEELRSMEGLXXXXXXXXXMIQVTINSHHVRSPQXKVS

SEQ ID NO: 17776 - protein, 38 aa, Artificial Sequence
  GFR-binding peptide
  MOD_RES (1)..(3)..(37): Xaa is C or S
XEXQSHEELVTAKKHQGQHPKIRIKRMQVPRQGTPVXE

SEQ ID NO: 17777 - protein, 34 aa, Artificial Sequence
  GFR-binding peptide
  MOD_RES (13)..(14)..(15)..(16)..(17): Xaa is A or G
  MOD_RES (18)..(19)..(20)..(21): Xaa is A or G or is absent
ELHEELRSMEGIXXXXXXXXXMIQVTINSHHVRS

SEQ ID NO: 17778 - protein, 34 aa, Artificial Sequence
  GFR-binding peptide
  MOD_RES (1)..(1): Xaa is C or S
XKNHQLFVTAKKHQGQHPKIRIKRMQVPREETPV

SEQ ID NO: 17779 - protein, 37 aa, Artificial Sequence
  GFR-binding peptide
  MOD_RES (36)..(36): Xaa is C or S
LHEELRVTAKKLKPKKRVYEIKRVQVPRHHVRSPQXK

SEQ ID NO: 17780 - protein, 39 aa, Artificial Sequence
  GFR-binding peptide
  MOD_RES (1)..(38): Xaa is C or S
XELHEELRVQVEKLKPKKRVYEVKAVKVSRHHVRSPQXK

SEQ ID NO: 17781 - protein, 36 aa, Artificial Sequence
  GFR-binding peptide
ELHEELRSMEGILKPKKRVYEMIQVTINSHHVRSPQ

SEQ ID NO: 17782 - protein, 35 aa, Artificial Sequence
  GFR-binding peptide
  MOD_RES (1)..(1): Xaa is C or S
  MOD_RES (14)..(15)..(16)..(17)..(18): Xaa is A or G
  MOD_RES (19)..(20)..(21)..(22): Xaa is A or G or is absent
XALHDELTVTAKKXXXXXXXXXIKRVQVPRLQVQT

SEQ ID NO: 17783 - protein, 44 aa, Artificial Sequence
  GFR-binding peptide
  MOD_RES (2)..(4)..(41): Xaa is C or S
EXKXALHDELTSMEGLFIPKKRVIEMIQVTINSLQVQTPRXQVN

SEQ ID NO: 17784 - protein, 36 aa, Artificial Sequence
  GFR-binding peptide
  MOD_RES (33)..(33): Xaa is C or S
SHEELSMEGIHQGQHPKIRMIQMTINSQGTPVXELG

SEQ ID NO: 17785 - protein, 40 aa, Artificial Sequence
  GFR-binding peptide
  MOD_RES (2)..(4)..(38): Xaa is C or S
RXEXKNHQLFVTAKKHQGQHPKIRIKRMQVPREETPVXEL

SEQ ID NO: 17786 - protein, 43 aa, Artificial Sequence
  GFR-binding peptide
  MOD_RES (1)..(3)..(37): Xaa is C or S
  MOD_RES (15)..(16)..(17)..(18)..(19): Xaa is A or G
  MOD_RES (20)..(21)..(22)..(23): Xaa is A or G or is absent
XEXKNHQLFVQVEKXXXXXXXXXVKAMKVSREETPVXELGEDN

SEQ ID NO: 17787 - protein, 38 aa, Artificial Sequence
  GFR-binding peptide
  MOD_RES (2)..(36): Xaa is C or S
EXQSHEELSMEGLHQGQHPKIRMIQMTINSQGTPVXEL

SEQ ID NO: 17788 - protein, 37 aa, Artificial Sequence
  GFR-binding peptide
  MOD_RES (36)..(36): Xaa is C or S
LHEELRSMEGILKPKKRVYEMIQVTINSHHVRSPQXK

SEQ ID NO: 17789 - protein, 37 aa, Artificial Sequence
  GFR-binding peptide
  MOD_RES (2)..(2): Xaa is C or S
KXALHDELTVQVEKFIPKKRVIEVKAVKVSRLQVQTP

SEQ ID NO: 17790 - protein, 34 aa, Artificial Sequence
  GFR-binding peptide
  MOD_RES (12)..(13)..(14)..(15)..(16): Xaa is A or G
  MOD_RES (17)..(18)..(19)..(20): Xaa is A or G or is absent
LHDELTSMEGLXXXXXXXXXMIQVTINSLQVQTP

SEQ ID NO: 17791 - protein, 44 aa, Artificial Sequence
  GFR-binding peptide
  MOD_RES (2)..(4)..(38): Xaa is C or S
RXEXQSHEELVQVEKHQGQHPKIRVKAMKVSRQGTPVXELGEDN

SEQ ID NO: 17792 - protein, 39 aa, Artificial Sequence
  GFR-binding peptide
  MOD_RES (1)..(3)..(37): Xaa is C or S
  MOD_RES (15)..(16)..(17)..(18)..(19): Xaa is A or G
  MOD_RES (20)..(21)..(22)..(23): Xaa is A or G or is absent
XEXKNHQLFVTAKKXXXXXXXXXIKRMQVPREETPVXEL

SEQ ID NO: 17793 - protein, 36 aa, Artificial Sequence
  GFR-binding peptide
  MOD_RES (36)..(36): Xaa is C or S
LHEELRSMEGLLKPKKRVYEMIQVTINSHHVRSPQX

SEQ ID NO: 17794 - protein, 35 aa, Artificial Sequence
  GFR-binding peptide
  MOD_RES (35)..(35): Xaa is C or S
HEELRSMEGLLKPKKRVYEMIQVTINSHHVRSPQX

SEQ ID NO: 17795 - protein, 35 aa, Artificial Sequence
  GFR-binding peptide
  MOD_RES (2)..(2): Xaa is C or S
  MOD_RES (14)..(15)..(16)..(17)..(18): Xaa is A or G
  MOD_RES (19)..(20)..(21)..(22): Xaa is A or G or is absent
EXKNHQLFSMEGIXXXXXXXXXMIQMTINSEETPV

SEQ ID NO: 17796 - protein, 36 aa, Artificial Sequence
  GFR-binding peptide
  MOD_RES (33)..(33): Xaa is C or S
  MOD_RES (11)..(12)..(13)..(14)..(15): Xaa is A or G
  MOD_RES (16)..(17)..(18)..(19): Xaa is A or G or is absent
SHEELSMEGIXXXXXXXXXMIQMTINSQGTPVXELG

SEQ ID NO: 17797 - protein, 40 aa, Artificial Sequence
  GFR-binding peptide
  MOD_RES (34)..(34): Xaa is C or S
  MOD_RES (12)..(13)..(14)..(15)..(16): Xaa is A or G
  MOD_RES (17)..(18)..(19)..(20): Xaa is A or G or is absent
KNHQLFSMEGIXXXXXXXXXMIQMTINSEETPVXELGEDN

SEQ ID NO: 17798 - protein, 42 aa, Artificial Sequence
  GFR-binding peptide
  MOD_RES (2)..(36): Xaa is C or S
  MOD_RES (14)..(15)..(16)..(17)..(18): Xaa is A or G
  MOD_RES (19)..(20)..(21)..(22): Xaa is A or G or is absent
EXQSHEELSMEGLXXXXXXXXXMIQMTINSQGTPVXELGEDN

SEQ ID NO: 17799 - protein, 37 aa, Artificial Sequence
  GFR-binding peptide
  MOD_RES (1)..(1): Xaa is C or S
XALHDELTSMEGIFIPKKRVIEMIQVTINSLQVQTPR

SEQ ID NO: 17800 - protein, 43 aa, Artificial Sequence
  GFR-binding peptide
  MOD_RES (2)..(4)..(41): Xaa is C or S
AXAXELHEELRSMEGLLKPKKRVYEMIQVTINSHHVRSPQXKV

SEQ ID NO: 17801 - protein, 41 aa, Artificial Sequence
  GFR-binding peptide
  MOD_RES (1)..(3)..(40): Xaa is C or S
XKXALHDELTVTAKKFIPKKRVIEIKRVQVPRLQVQTPRXQ

SEQ ID NO: 17802 - protein, 34 aa, Artificial Sequence
  GFR-binding peptide
ALHDELTSMEGLFIPKKRVIEMIQVTINSLQVQT

SEQ ID NO: 17803 - protein, 37 aa, Artificial Sequence
  GFR-binding peptide
  MOD_RES (34)..(34): Xaa is C or S
KNHQLFVQVEKHQGQHPKIRVKAMKVSREETPVXELG

SEQ ID NO: 17804 - protein, 37 aa, Artificial Sequence
  GFR-binding peptide
  MOD_RES (1)..(35): Xaa is C or S
XQSHEELVTAKKHQGQHPKIRIKRMQVPRQGTPVXEL

SEQ ID NO: 17805 - protein, 37 aa, Artificial Sequence
  GFR-binding peptide
  MOD_RES (2)..(4): Xaa is C or S
RXEXQSHEELVQVEKHQGQHPKIRVKAMKVSRQGTPV

SEQ ID NO: 17806 - protein, 40 aa, Artificial Sequence
  GFR-binding peptide
  MOD_RES (1)..(38): Xaa is C or S
  MOD_RES (14)..(15)..(16)..(17)..(18): Xaa is A or G
  MOD_RES (19)..(20)..(21)..(22): Xaa is A or G or is absent
XALHDELTSMEGIXXXXXXXXXMIQVTINSLQVQTPRXQV

SEQ ID NO: 17807 - protein, 42 aa, Artificial Sequence
  GFR-binding peptide
  MOD_RES (1)..(3)..(37): Xaa is C or S
XEXQSHEELSMEGIHQGQHPKIRMIQMTINSQGTPVXELGED

SEQ ID NO: 17808 - protein, 34 aa, Artificial Sequence
  GFR-binding peptide
LHEELRVQVEKLKPKKRVYEVKAVKVSRHHVRSP

SEQ ID NO: 17809 - protein, 39 aa, Artificial Sequence
  GFR-binding peptide
  MOD_RES (1)..(3): Xaa is C or S
XAXELHEELRSMEGLLKPKKRVYEMIQVTINSHHVRSPQ

SEQ ID NO: 17810 - protein, 35 aa, Artificial Sequence
  GFR-binding peptide
  MOD_RES (35)..(35): Xaa is C or S
HEELRSMEGILKPKKRVYEMIQVTINSHHVRSPQX

SEQ ID NO: 17811 - protein, 36 aa, Artificial Sequence
  GFR-binding peptide
  MOD_RES (33)..(33): Xaa is C or S
NHQLFSMEGLHQGQHPKIRMIQMTINSEETPVXELG

SEQ ID NO: 17812 - protein, 34 aa, Artificial Sequence
  GFR-binding peptide
  MOD_RES (11)..(12)..(13)..(14)..(15): Xaa is A or G
  MOD_RES (16)..(17)..(18)..(19): Xaa is A or G or is absent
HEELRSMEGIXXXXXXXXXMIQVTINSHHVRSPQ

SEQ ID NO: 17813 - protein, 38 aa, Artificial Sequence
  GFR-binding peptide
  MOD_RES (2)..(4)..(38): Xaa is C or S
RXEXKNHQLFVTAKKHQGQHPKIRIKRMQVPREETPVX

SEQ ID NO: 17814 - protein, 38 aa, Artificial Sequence
  GFR-binding peptide
  MOD_RES (2)..(36): Xaa is C or S
  MOD_RES (14)..(15)..(16)..(17)..(18): Xaa is A or G
  MOD_RES (19)..(20)..(21)..(22): Xaa is A or G or is absent
EXQSHEELSMEGIXXXXXXXXXMIQMTINSQGTPVXEL

SEQ ID NO: 17815 - protein, 43 aa, Artificial Sequence
  GFR-binding peptide
  MOD_RES (2)..(4)..(41): Xaa is C or S
AXAXELHEELRVTAKKLKPKKRVYEIKRVQVPRHHVRSPQXKV

SEQ ID NO: 17816 - protein, 42 aa, Artificial Sequence
  GFR-binding peptide
  MOD_RES (2)..(4)..(41): Xaa is C or S
  MOD_RES (17)..(18)..(19)..(20)..(21): Xaa is A or G
  MOD_RES (22)..(23)..(24)..(25): Xaa is A or G or is absent
EXKXALHDELTVTAKKXXXXXXXXXIKRVQVPRLQVQTPRXQ

SEQ ID NO: 17817 - protein, 38 aa, Artificial Sequence
  GFR-binding peptide
  MOD_RES (36)..(36): Xaa is C or S
LHDELTSMEGLFIPKKRVIEMIQVTINSLQVQTPRXQV

SEQ ID NO: 17818 - protein, 40 aa, Artificial Sequence
  GFR-binding peptide
  MOD_RES (2)..(4)..(38): Xaa is C or S
  MOD_RES (16)..(17)..(18)..(19)..(20): Xaa is A or G
  MOD_RES (21)..(22)..(23)..(24): Xaa is A or G or is absent
RXEXQSHEELSMEGLXXXXXXXXXMIQMTINSQGTPVXEL

SEQ ID NO: 17819 - protein, 35 aa, Artificial Sequence
  GFR-binding peptide
LHEELRSMEGLLKPKKRVYEMIQVTINSHHVRSPQ

SEQ ID NO: 17820 - protein, 42 aa, Artificial Sequence
  GFR-binding peptide
  MOD_RES (2)..(39): Xaa is C or S
AXELHEELRSMEGLLKPKKRVYEMIQVTINSHHVRSPQXKVS

SEQ ID NO: 17821 - protein, 42 aa, Artificial Sequence
  GFR-binding peptide
  MOD_RES (1)..(38): Xaa is C or S
  MOD_RES (14)..(15)..(16)..(17)..(18): Xaa is A or G
  MOD_RES (19)..(20)..(21)..(22): Xaa is A or G or is absent
XELHEELRVTAKKXXXXXXXXXIKRVQVPRHHVRSPQXKVSS

SEQ ID NO: 17822 - protein, 39 aa, Artificial Sequence
  GFR-binding peptide
  MOD_RES (2)..(39): Xaa is C or S
AXELHEELRVTAKKLKPKKRVYEIKRVQVPRHHVRSPQX

SEQ ID NO: 17823 - protein, 38 aa, Artificial Sequence
  GFR-binding peptide
  MOD_RES (1)..(38): Xaa is C or S
  MOD_RES (14)..(15)..(16)..(17)..(18): Xaa is A or G
  MOD_RES (19)..(20)..(21)..(22): Xaa is A or G or is absent
XELHEELRVQVEKXXXXXXXXXVKAVKVSRHHVRSPQX

SEQ ID NO: 17824 - protein, 43 aa, Artificial Sequence
  GFR-binding peptide
  MOD_RES (1)..(3)..(37): Xaa is C or S
  MOD_RES (15)..(16)..(17)..(18)..(19): Xaa is A or G
  MOD_RES (20)..(21)..(22)..(23): Xaa is A or G or is absent
XEXKNHQLFSMEGLXXXXXXXXXMIQMTINSEETPVXELGEDN

SEQ ID NO: 17825 - protein, 41 aa, Artificial Sequence
  GFR-binding peptide
  MOD_RES (2)..(4)..(41): Xaa is C or S
EXKXALHDELTSMEGIFIPKKRVIEMIQVTINSLQVQTPRX

SEQ ID NO: 17826 - protein, 44 aa, Artificial Sequence
  GFR-binding peptide
  MOD_RES (2)..(4)..(41): Xaa is C or S
  MOD_RES (17)..(18)..(19)..(20)..(21): Xaa is A or G
  MOD_RES (22)..(23)..(24)..(25): Xaa is A or G or is absent
EXKXALHDELTSMEGIXXXXXXXXXMIQVTINSLQVQTPRXQVN

SEQ ID NO: 17827 - protein, 40 aa, Artificial Sequence
  GFR-binding peptide
  MOD_RES (2)..(36): Xaa is C or S
  MOD_RES (14)..(15)..(16)..(17)..(18): Xaa is A or G
  MOD_RES (19)..(20)..(21)..(22): Xaa is A or G or is absent
EXQSHEELSMEGLXXXXXXXXXMIQMTINSQGTPVXELGE

SEQ ID NO: 17828 - protein, 39 aa, Artificial Sequence
  GFR-binding peptide
  MOD_RES (2)..(39): Xaa is C or S
AXELHEELRSMEGLLKPKKRVYEMIQVTINSHHVRSPQX

SEQ ID NO: 17829 - protein, 38 aa, Artificial Sequence
  GFR-binding peptide
  MOD_RES (1)..(38): Xaa is C or S
  MOD_RES (14)..(15)..(16)..(17)..(18): Xaa is A or G
  MOD_RES (19)..(20)..(21)..(22): Xaa is A or G or is absent
XALHDELTVTAKKXXXXXXXXXIKRVQVPRLQVQTPRX

SEQ ID NO: 17830 - protein, 42 aa, Artificial Sequence
  GFR-binding peptide
  MOD_RES (2)..(39): Xaa is C or S
AXELHEELRVTAKKLKPKKRVYEIKRVQVPRHHVRSPQXKVS

SEQ ID NO: 17831 - protein, 41 aa, Artificial Sequence
  GFR-binding peptide
  MOD_RES (2)..(4)..(38): Xaa is C or S
  MOD_RES (16)..(17)..(18)..(19)..(20): Xaa is A or G
  MOD_RES (21)..(22)..(23)..(24): Xaa is A or G or is absent
RXEXKNHQLFSMEGLXXXXXXXXXMIQMTINSEETPVXELG

SEQ ID NO: 17832 - protein, 42 aa, Artificial Sequence
  GFR-binding peptide
  MOD_RES (2)..(4)..(38): Xaa is C or S
RXEXKNHQLFSMEGIHQGQHPKIRMIQMTINSEETPVXELGE

SEQ ID NO: 17833 - protein, 38 aa, Artificial Sequence
  GFR-binding peptide
  MOD_RES (2)..(4)..(38): Xaa is C or S
  MOD_RES (16)..(17)..(18)..(19)..(20): Xaa is A or G
  MOD_RES (21)..(22)..(23)..(24): Xaa is A or G or is absent
RXEXQSHEELSMEGLXXXXXXXXXMIQMTINSQGTPVX

SEQ ID NO: 17834 - protein, 37 aa, Artificial Sequence
  GFR-binding peptide
  MOD_RES (1)..(1): Xaa is C or S
XELHEELRSMEGILKPKKRVYEMIQVTINSHHVRSPQ

SEQ ID NO: 17835 - protein, 36 aa, Artificial Sequence
  GFR-binding peptide
  MOD_RES (33)..(33): Xaa is C or S
SHEELSMEGLHQGQHPKIRMIQMTINSQGTPVXELG

SEQ ID NO: 17836 - protein, 39 aa, Artificial Sequence
  GFR-binding peptide
  MOD_RES (34)..(34): Xaa is C or S
  MOD_RES (12)..(13)..(14)..(15)..(16): Xaa is A or G
  MOD_RES (17)..(18)..(19)..(20): Xaa is A or G or is absent
QSHEELVTAKKXXXXXXXXXIKRMQVPRQGTPVXELGED

SEQ ID NO: 17837 - protein, 39 aa, Artificial Sequence
  GFR-binding peptide
  MOD_RES (2)..(4)..(38): Xaa is C or S
RXEXKNHQLFVTAKKHQGQHPKIRIKRMQVPREETPVXE

SEQ ID NO: 17838 - protein, 41 aa, Artificial Sequence
  GFR-binding peptide
  MOD_RES (1)..(3)..(40): Xaa is C or S
XAXELHEELRSMEGLLKPKKRVYEMIQVTINSHHVRSPQXK

SEQ ID NO: 17839 - protein, 34 aa, Artificial Sequence
  GFR-binding peptide
  MOD_RES (11)..(12)..(13)..(14)..(15): Xaa is A or G
  MOD_RES (16)..(17)..(18)..(19): Xaa is A or G or is absent
HEELRSMEGLXXXXXXXXXMIQVTINSHHVRSPQ

SEQ ID NO: 17840 - protein, 37 aa, Artificial Sequence
  GFR-binding peptide
  MOD_RES (2)..(36): Xaa is C or S
  MOD_RES (14)..(15)..(16)..(17)..(18): Xaa is A or G
  MOD_RES (19)..(20)..(21)..(22): Xaa is A or G or is absent
EXQSHEELVTAKKXXXXXXXXXIKRMQVPRQGTPVXE

SEQ ID NO: 17841 - protein, 44 aa, Artificial Sequence
  GFR-binding peptide
  MOD_RES (2)..(4)..(38): Xaa is C or S
  MOD_RES (16)..(17)..(18)..(19)..(20): Xaa is A or G
  MOD_RES (21)..(22)..(23)..(24): Xaa is A or G or is absent
RXEXQSHEELVTAKKXXXXXXXXXIKRMQVPRQGTPVXELGEDN

SEQ ID NO: 17842 - protein, 40 aa, Artificial Sequence
  GFR-binding peptide
  MOD_RES (1)..(3)..(40): Xaa is C or S
  MOD_RES (16)..(17)..(18)..(19)..(20): Xaa is A or G
  MOD_RES (21)..(22)..(23)..(24): Xaa is A or G or is absent
XAXELHEELRSMEGLXXXXXXXXXMIQVTINSHHVRSPQX

SEQ ID NO: 17843 - protein, 40 aa, Artificial Sequence
  GFR-binding peptide
  MOD_RES (37)..(37): Xaa is C or S
ALHDELTVTAKKFIPKKRVIEIKRVQVPRLQVQTPRXQVN

SEQ ID NO: 17844 - protein, 39 aa, Artificial Sequence
  GFR-binding peptide
  MOD_RES (34)..(34): Xaa is C or S
  MOD_RES (12)..(13)..(14)..(15)..(16): Xaa is A or G
  MOD_RES (17)..(18)..(19)..(20): Xaa is A or G or is absent
QSHEELSMEGIXXXXXXXXXMIQMTINSQGTPVXELGED

SEQ ID NO: 17845 - protein, 37 aa, Artificial Sequence
  GFR-binding peptide
  MOD_RES (2)..(4): Xaa is C or S
  MOD_RES (16)..(17)..(18)..(19)..(20): Xaa is A or G
  MOD_RES (21)..(22)..(23)..(24): Xaa is A or G or is absent
RXEXKNHQLFSMEGLXXXXXXXXXMIQMTINSEETPV

SEQ ID NO: 17846 - protein, 34 aa, Artificial Sequence
  GFR-binding peptide
  MOD_RES (13)..(14)..(15)..(16)..(17): Xaa is A or G
  MOD_RES (18)..(19)..(20)..(21): Xaa is A or G or is absent
ALHDELTVQVEKXXXXXXXXXVKAVKVSRLQVQT

SEQ ID NO: 17847 - protein, 36 aa, Artificial Sequence
  GFR-binding peptide
  MOD_RES (13)..(14)..(15)..(16)..(17): Xaa is A or G
  MOD_RES (18)..(19)..(20)..(21): Xaa is A or G or is absent
ALHDELTVTAKKXXXXXXXXXIKRVQVPRLQVQTPR

SEQ ID NO: 17848 - protein, 34 aa, Artificial Sequence
  GFR-binding peptide
  MOD_RES (34)..(34): Xaa is C or S
  MOD_RES (12)..(13)..(14)..(15)..(16): Xaa is A or G
  MOD_RES (17)..(18)..(19)..(20): Xaa is A or G or is absent
KNHQLFSMEGIXXXXXXXXXMIQMTINSEETPVX

SEQ ID NO: 17849 - protein, 40 aa, Artificial Sequence
  GFR-binding peptide
  MOD_RES (1)..(3)..(40): Xaa is C or S
  MOD_RES (16)..(17)..(18)..(19)..(20): Xaa is A or G
  MOD_RES (21)..(22)..(23)..(24): Xaa is A or G or is absent
XKXALHDELTVQVEKXXXXXXXXXVKAVKVSRLQVQTPRX

SEQ ID NO: 17850 - protein, 38 aa, Artificial Sequence
  GFR-binding peptide
  MOD_RES (34)..(34): Xaa is C or S
KNHQLFSMEGIHQGQHPKIRMIQMTINSEETPVXELGE

SEQ ID NO: 17851 - protein, 37 aa, Artificial Sequence
  GFR-binding peptide
  MOD_RES (34)..(34): Xaa is C or S
QSHEELSMEGLHQGQHPKIRMIQMTINSQGTPVXELG

SEQ ID NO: 17852 - protein, 35 aa, Artificial Sequence
  GFR-binding peptide
ALHDELTSMEGLFIPKKRVIEMIQVTINSLQVQTP

SEQ ID NO: 17853 - protein, 36 aa, Artificial Sequence
  GFR-binding peptide
  MOD_RES (13)..(14)..(15)..(16)..(17): Xaa is A or G
  MOD_RES (18)..(19)..(20)..(21): Xaa is A or G or is absent
ALHDELTSMEGLXXXXXXXXXMIQVTINSLQVQTPR

SEQ ID NO: 17854 - protein, 32 aa, Artificial Sequence
  GFR-binding peptide
HDELTVTAKKFIPKKRVIEIKRVQVPRLQVQT

SEQ ID NO: 17855 - protein, 38 aa, Artificial Sequence
  GFR-binding peptide
  MOD_RES (1)..(3): Xaa is C or S
  MOD_RES (16)..(17)..(18)..(19)..(20): Xaa is A or G
  MOD_RES (21)..(22)..(23)..(24): Xaa is A or G or is absent
XAXELHEELRSMEGLXXXXXXXXXMIQVTINSHHVRSP

SEQ ID NO: 17856 - protein, 40 aa, Artificial Sequence
  GFR-binding peptide
  MOD_RES (34)..(34): Xaa is C or S
QSHEELSMEGLHQGQHPKIRMIQMTINSQGTPVXELGEDN

SEQ ID NO: 17857 - protein, 41 aa, Artificial Sequence
  GFR-binding peptide
  MOD_RES (1)..(3)..(40): Xaa is C or S
  MOD_RES (16)..(17)..(18)..(19)..(20): Xaa is A or G
  MOD_RES (21)..(22)..(23)..(24): Xaa is A or G or is absent
XKXALHDELTSMEGLXXXXXXXXXMIQVTINSLQVQTPRXQ

SEQ ID NO: 17858 - protein, 39 aa, Artificial Sequence
  GFR-binding peptide
  MOD_RES (36)..(36): Xaa is C or S
  MOD_RES (12)..(13)..(14)..(15)..(16): Xaa is A or G
  MOD_RES (17)..(18)..(19)..(20): Xaa is A or G or is absent
LHDELTSMEGIXXXXXXXXXMIQVTINSLQVQTPRXQVN

SEQ ID NO: 17859 - protein, 41 aa, Artificial Sequence
  GFR-binding peptide
  MOD_RES (1)..(3)..(37): Xaa is C or S
XEXKNHQLFVTAKKHQGQHPKIRIKRMQVPREETPVXELGE

SEQ ID NO: 17860 - protein, 36 aa, Artificial Sequence
  GFR-binding peptide
  MOD_RES (2)..(36): Xaa is C or S
  MOD_RES (14)..(15)..(16)..(17)..(18): Xaa is A or G
  MOD_RES (19)..(20)..(21)..(22): Xaa is A or G or is absent
EXKNHQLFVTAKKXXXXXXXXXIKRMQVPREETPVX

SEQ ID NO: 17861 - protein, 35 aa, Artificial Sequence
  GFR-binding peptide
  MOD_RES (1)..(35): Xaa is C or S
XQSHEELSMEGLHQGQHPKIRMIQMTINSQGTPVX

SEQ ID NO: 17862 - protein, 32 aa, Artificial Sequence
  GFR-binding peptide
SHEELVQVEKHQGQHPKIRVKAMKVSRQGTPV

SEQ ID NO: 17863 - protein, 42 aa, Artificial Sequence
  GFR-binding peptide
  MOD_RES (1)..(38): Xaa is C or S
XALHDELTVTAKKFIPKKRVIEIKRVQVPRLQVQTPRXQVNR

SEQ ID NO: 17864 - protein, 36 aa, Artificial Sequence
  GFR-binding peptide
  MOD_RES (34)..(34): Xaa is C or S
KNHQLFSMEGLHQGQHPKIRMIQMTINSEETPVXEL

SEQ ID NO: 17865 - protein, 35 aa, Artificial Sequence
  GFR-binding peptide
  MOD_RES (34)..(34): Xaa is C or S
QSHEELSMEGIHQGQHPKIRMIQMTINSQGTPVXE

SEQ ID NO: 17866 - protein, 33 aa, Artificial Sequence
  GFR-binding peptide
  MOD_RES (12)..(13)..(14)..(15)..(16): Xaa is A or G
  MOD_RES (17)..(18)..(19)..(20): Xaa is A or G or is absent
LHEELRVTAKKXXXXXXXXXIKRVQVPRHHVRS

SEQ ID NO: 17867 - protein, 35 aa, Artificial Sequence
  GFR-binding peptide
  MOD_RES (33)..(33): Xaa is C or S
  MOD_RES (11)..(12)..(13)..(14)..(15): Xaa is A or G
  MOD_RES (16)..(17)..(18)..(19): Xaa is A or G or is absent
NHQLFSMEGLXXXXXXXXXMIQMTINSEETPVXEL

SEQ ID NO: 17868 - protein, 40 aa, Artificial Sequence
  GFR-binding peptide
  MOD_RES (1)..(3)..(40): Xaa is C or S
  MOD_RES (16)..(17)..(18)..(19)..(20): Xaa is A or G
  MOD_RES (21)..(22)..(23)..(24): Xaa is A or G or is absent
XKXALHDELTVTAKKXXXXXXXXXIKRVQVPRLQVQTPRX

SEQ ID NO: 17869 - protein, 37 aa, Artificial Sequence
  GFR-binding peptide
  MOD_RES (1)..(3): Xaa is C or S
XAXELHEELRVQVEKLKPKKRVYEVKAVKVSRHHVRS

SEQ ID NO: 17870 - protein, 37 aa, Artificial Sequence
  GFR-binding peptide
  MOD_RES (33)..(33): Xaa is C or S
  MOD_RES (11)..(12)..(13)..(14)..(15): Xaa is A or G
  MOD_RES (16)..(17)..(18)..(19): Xaa is A or G or is absent
SHEELSMEGIXXXXXXXXXMIQMTINSQGTPVXELGE

SEQ ID NO: 17871 - protein, 43 aa, Artificial Sequence
  GFR-binding peptide
  MOD_RES (2)..(4)..(38): Xaa is C or S
RXEXQSHEELVTAKKHQGQHPKIRIKRMQVPRQGTPVXELGED

SEQ ID NO: 17872 - protein, 38 aa, Artificial Sequence
  GFR-binding peptide
  MOD_RES (33)..(33): Xaa is C or S
  MOD_RES (11)..(12)..(13)..(14)..(15): Xaa is A or G
  MOD_RES (16)..(17)..(18)..(19): Xaa is A or G or is absent
SHEELSMEGLXXXXXXXXXMIQMTINSQGTPVXELGED

SEQ ID NO: 17873 - protein, 33 aa, Artificial Sequence
  GFR-binding peptide
LHDELTSMEGLFIPKKRVIEMIQVTINSLQVQT

SEQ ID NO: 17874 - protein, 42 aa, Artificial Sequence
  GFR-binding peptide
  MOD_RES (1)..(38): Xaa is C or S
XELHEELRSMEGILKPKKRVYEMIQVTINSHHVRSPQXKVSS

SEQ ID NO: 17875 - protein, 40 aa, Artificial Sequence
  GFR-binding peptide
  MOD_RES (36)..(36): Xaa is C or S
LHEELRVTAKKLKPKKRVYEIKRVQVPRHHVRSPQXKVSS

SEQ ID NO: 17876 - protein, 38 aa, Artificial Sequence
  GFR-binding peptide
  MOD_RES (2)..(4)..(38): Xaa is C or S
  MOD_RES (16)..(17)..(18)..(19)..(20): Xaa is A or G
  MOD_RES (21)..(22)..(23)..(24): Xaa is A or G or is absent
RXEXKNHQLFVTAKKXXXXXXXXXIKRMQVPREETPVX

SEQ ID NO: 17877 - protein, 35 aa, Artificial Sequence
  GFR-binding peptide
ELHEELRVTAKKLKPKKRVYEIKRVQVPRHHVRSP

SEQ ID NO: 17878 - protein, 36 aa, Artificial Sequence
  GFR-binding peptide
  MOD_RES (35)..(35): Xaa is C or S
HDELTVQVEKFIPKKRVIEVKAVKVSRLQVQTPRXQ

SEQ ID NO: 17879 - protein, 38 aa, Artificial Sequence
  GFR-binding peptide
  MOD_RES (2)..(4)..(38): Xaa is C or S
  MOD_RES (16)..(17)..(18)..(19)..(20): Xaa is A or G
  MOD_RES (21)..(22)..(23)..(24): Xaa is A or G or is absent
RXEXKNHQLFVQVEKXXXXXXXXXVKAMKVSREETPVX

SEQ ID NO: 17880 - protein, 41 aa, Artificial Sequence
  GFR-binding peptide
  MOD_RES (1)..(38): Xaa is C or S
XELHEELRSMEGLLKPKKRVYEMIQVTINSHHVRSPQXKVS

SEQ ID NO: 17881 - protein, 33 aa, Artificial Sequence
  GFR-binding peptide
  MOD_RES (33)..(33): Xaa is C or S
  MOD_RES (11)..(12)..(13)..(14)..(15): Xaa is A or G
  MOD_RES (16)..(17)..(18)..(19): Xaa is A or G or is absent
NHQLFSMEGLXXXXXXXXXMIQMTINSEETPVX

SEQ ID NO: 17882 - protein, 35 aa, Artificial Sequence
  GFR-binding peptide
LHDELTSMEGIFIPKKRVIEMIQVTINSLQVQTPR

SEQ ID NO: 17883 - protein, 38 aa, Artificial Sequence
  GFR-binding peptide
  MOD_RES (1)..(35): Xaa is C or S
  MOD_RES (13)..(14)..(15)..(16)..(17): Xaa is A or G
  MOD_RES (18)..(19)..(20)..(21): Xaa is A or G or is absent
XKNHQLFSMEGLXXXXXXXXXMIQMTINSEETPVXELG

SEQ ID NO: 17884 - protein, 39 aa, Artificial Sequence
  GFR-binding peptide
  MOD_RES (1)..(3)..(37): Xaa is C or S
XEXQSHEELSMEGIHQGQHPKIRMIQMTINSQGTPVXEL

SEQ ID NO: 17885 - protein, 33 aa, Artificial Sequence
  GFR-binding peptide
HEELRSMEGILKPKKRVYEMIQVTINSHHVRSP

SEQ ID NO: 17886 - protein, 37 aa, Artificial Sequence
  GFR-binding peptide
  MOD_RES (1)..(3): Xaa is C or S
XAXELHEELRVTAKKLKPKKRVYEIKRVQVPRHHVRS

SEQ ID NO: 17887 - protein, 34 aa, Artificial Sequence
  GFR-binding peptide
  MOD_RES (33)..(33): Xaa is C or S
  MOD_RES (11)..(12)..(13)..(14)..(15): Xaa is A or G
  MOD_RES (16)..(17)..(18)..(19): Xaa is A or G or is absent
NHQLFSMEGIXXXXXXXXXMIQMTINSEETPVXE

SEQ ID NO: 17888 - protein, 39 aa, Artificial Sequence
  GFR-binding peptide
  MOD_RES (2)..(39): Xaa is C or S
  MOD_RES (15)..(16)..(17)..(18)..(19): Xaa is A or G
  MOD_RES (20)..(21)..(22)..(23): Xaa is A or G or is absent
KXALHDELTVQVEKXXXXXXXXXVKAVKVSRLQVQTPRX

SEQ ID NO: 17889 - protein, 37 aa, Artificial Sequence
  GFR-binding peptide
  MOD_RES (2)..(2): Xaa is C or S
  MOD_RES (15)..(16)..(17)..(18)..(19): Xaa is A or G
  MOD_RES (20)..(21)..(22)..(23): Xaa is A or G or is absent
KXALHDELTVQVEKXXXXXXXXXVKAVKVSRLQVQTP

SEQ ID NO: 17890 - protein, 39 aa, Artificial Sequence
  GFR-binding peptide
  MOD_RES (1)..(38): Xaa is C or S
XELHEELRVTAKKLKPKKRVYEIKRVQVPRHHVRSPQXK

SEQ ID NO: 17891 - protein, 38 aa, Artificial Sequence
  GFR-binding peptide
  MOD_RES (2)..(36): Xaa is C or S
EXKNHQLFSMEGLHQGQHPKIRMIQMTINSEETPVXEL

SEQ ID NO: 17892 - protein, 36 aa, Artificial Sequence
  GFR-binding peptide
  MOD_RES (1)..(3): Xaa is C or S
XEXKNHQLFSMEGIHQGQHPKIRMIQMTINSEETPV

SEQ ID NO: 17893 - protein, 37 aa, Artificial Sequence
  GFR-binding peptide
  MOD_RES (1)..(3): Xaa is C or S
XKXALHDELTVQVEKFIPKKRVIEVKAVKVSRLQVQT

SEQ ID NO: 17894 - protein, 43 aa, Artificial Sequence
  GFR-binding peptide
  MOD_RES (2)..(4)..(38): Xaa is C or S
RXEXQSHEELVQVEKHQGQHPKIRVKAMKVSRQGTPVXELGED

SEQ ID NO: 17895 - protein, 37 aa, Artificial Sequence
  GFR-binding peptide
  MOD_RES (37)..(37): Xaa is C or S
ELHEELRSMEGILKPKKRVYEMIQVTINSHHVRSPQX

SEQ ID NO: 17896 - protein, 33 aa, Artificial Sequence
  GFR-binding peptide
  MOD_RES (12)..(13)..(14)..(15)..(16): Xaa is A or G
  MOD_RES (17)..(18)..(19)..(20): Xaa is A or G or is absent
KNHQLFVQVEKXXXXXXXXXVKAMKVSREETPV

SEQ ID NO: 17897 - protein, 37 aa, Artificial Sequence
  GFR-binding peptide
  MOD_RES (1)..(3)..(37): Xaa is C or S
  MOD_RES (15)..(16)..(17)..(18)..(19): Xaa is A or G
  MOD_RES (20)..(21)..(22)..(23): Xaa is A or G or is absent
XEXKNHQLFSMEGLXXXXXXXXXMIQMTINSEETPVX

SEQ ID NO: 17898 - protein, 42 aa, Artificial Sequence
  GFR-binding peptide
  MOD_RES (1)..(38): Xaa is C or S
  MOD_RES (14)..(15)..(16)..(17)..(18): Xaa is A or G
  MOD_RES (19)..(20)..(21)..(22): Xaa is A or G or is absent
XALHDELTVTAKKXXXXXXXXXIKRVQVPRLQVQTPRXQVNR

SEQ ID NO: 17899 - protein, 43 aa, Artificial Sequence
  GFR-binding peptide
  MOD_RES (1)..(3)..(37): Xaa is C or S
XEXQSHEELSMEGLHQGQHPKIRMIQMTINSQGTPVXELGEDN

SEQ ID NO: 17900 - protein, 39 aa, Artificial Sequence
  GFR-binding peptide
  MOD_RES (33)..(33): Xaa is C or S
  MOD_RES (11)..(12)..(13)..(14)..(15): Xaa is A or G
  MOD_RES (16)..(17)..(18)..(19): Xaa is A or G or is absent
NHQLFVQVEKXXXXXXXXXVKAMKVSREETPVXELGEDN

SEQ ID NO: 17901 - protein, 38 aa, Artificial Sequence
  GFR-binding peptide
  MOD_RES (1)..(38): Xaa is C or S
XALHDELTVQVEKFIPKKRVIEVKAVKVSRLQVQTPRX

SEQ ID NO: 17902 - protein, 35 aa, Artificial Sequence
  GFR-binding peptide
ALHDELTVTAKKFIPKKRVIEIKRVQVPRLQVQTP

SEQ ID NO: 17903 - protein, 37 aa, Artificial Sequence
  GFR-binding peptide
  MOD_RES (2)..(4): Xaa is C or S
  MOD_RES (16)..(17)..(18)..(19)..(20): Xaa is A or G
  MOD_RES (21)..(22)..(23)..(24): Xaa is A or G or is absent
RXEXQSHEELSMEGLXXXXXXXXXMIQMTINSQGTPV

SEQ ID NO: 17904 - protein, 32 aa, Artificial Sequence
  GFR-binding peptide
  MOD_RES (11)..(12)..(13)..(14)..(15): Xaa is A or G
  MOD_RES (16)..(17)..(18)..(19): Xaa is A or G or is absent
NHQLFVQVEKXXXXXXXXXVKAMKVSREETPV

SEQ ID NO: 17905 - protein, 43 aa, Artificial Sequence
  GFR-binding peptide
  MOD_RES (2)..(39): Xaa is C or S
KXALHDELTSMEGIFIPKKRVIEMIQVTINSLQVQTPRXQVNR

SEQ ID NO: 17906 - protein, 38 aa, Artificial Sequence
  GFR-binding peptide
  MOD_RES (36)..(36): Xaa is C or S
LHDELTVQVEKFIPKKRVIEVKAVKVSRLQVQTPRXQV

SEQ ID NO: 17907 - protein, 42 aa, Artificial Sequence
  GFR-binding peptide
  MOD_RES (1)..(38): Xaa is C or S
  MOD_RES (14)..(15)..(16)..(17)..(18): Xaa is A or G
  MOD_RES (19)..(20)..(21)..(22): Xaa is A or G or is absent
XALHDELTSMEGLXXXXXXXXXMIQVTINSLQVQTPRXQVNR

SEQ ID NO: 17908 - protein, 34 aa, Artificial Sequence
  GFR-binding peptide
LHDELTSMEGLFIPKKRVIEMIQVTINSLQVQTP

SEQ ID NO: 17909 - protein, 38 aa, Artificial Sequence
  GFR-binding peptide
  MOD_RES (37)..(37): Xaa is C or S
  MOD_RES (13)..(14)..(15)..(16)..(17): Xaa is A or G
  MOD_RES (18)..(19)..(20)..(21): Xaa is A or G or is absent
ELHEELRSMEGIXXXXXXXXXMIQVTINSHHVRSPQXK

SEQ ID NO: 17910 - protein, 35 aa, Artificial Sequence
  GFR-binding peptide
  MOD_RES (1)..(35): Xaa is C or S
  MOD_RES (13)..(14)..(15)..(16)..(17): Xaa is A or G
  MOD_RES (18)..(19)..(20)..(21): Xaa is A or G or is absent
XQSHEELSMEGIXXXXXXXXXMIQMTINSQGTPVX

SEQ ID NO: 17911 - protein, 44 aa, Artificial Sequence
  GFR-binding peptide
  MOD_RES (2)..(4)..(41): Xaa is C or S
  MOD_RES (17)..(18)..(19)..(20)..(21): Xaa is A or G
  MOD_RES (22)..(23)..(24)..(25): Xaa is A or G or is absent
EXKXALHDELTVQVEKXXXXXXXXXVKAVKVSRLQVQTPRXQVN

SEQ ID NO: 17912 - protein, 39 aa, Artificial Sequence
  GFR-binding peptide
  MOD_RES (35)..(35): Xaa is C or S
  MOD_RES (11)..(12)..(13)..(14)..(15): Xaa is A or G
  MOD_RES (16)..(17)..(18)..(19): Xaa is A or G or is absent
HDELTVQVEKXXXXXXXXXVKAVKVSRLQVQTPRXQVNR

SEQ ID NO: 17913 - protein, 40 aa, Artificial Sequence
  GFR-binding peptide
  MOD_RES (34)..(34): Xaa is C or S
  MOD_RES (12)..(13)..(14)..(15)..(16): Xaa is A or G
  MOD_RES (17)..(18)..(19)..(20): Xaa is A or G or is absent
KNHQLFVTAKKXXXXXXXXXIKRMQVPREETPVXELGEDN

SEQ ID NO: 17914 - protein, 34 aa, Artificial Sequence
  GFR-binding peptide
  MOD_RES (12)..(13)..(14)..(15)..(16): Xaa is A or G
  MOD_RES (17)..(18)..(19)..(20): Xaa is A or G or is absent
LHEELRVTAKKXXXXXXXXXIKRVQVPRHHVRSP

SEQ ID NO: 17915 - protein, 39 aa, Artificial Sequence
  GFR-binding peptide
  MOD_RES (33)..(33): Xaa is C or S
SHEELVQVEKHQGQHPKIRVKAMKVSRQGTPVXELGEDN

SEQ ID NO: 17916 - protein, 42 aa, Artificial Sequence
  GFR-binding peptide
  MOD_RES (2)..(39): Xaa is C or S
  MOD_RES (15)..(16)..(17)..(18)..(19): Xaa is A or G
  MOD_RES (20)..(21)..(22)..(23): Xaa is A or G or is absent
KXALHDELTVQVEKXXXXXXXXXVKAVKVSRLQVQTPRXQVN

SEQ ID NO: 17917 - protein, 33 aa, Artificial Sequence
  GFR-binding peptide
  MOD_RES (33)..(33): Xaa is C or S
SHEELSMEGLHQGQHPKIRMIQMTINSQGTPVX

SEQ ID NO: 17918 - protein, 44 aa, Artificial Sequence
  GFR-binding peptide
  MOD_RES (1)..(3)..(40): Xaa is C or S
XAXELHEELRVQVEKLKPKKRVYEVKAVKVSRHHVRSPQXKVSS

SEQ ID NO: 17919 - protein, 32 aa, Artificial Sequence
  GFR-binding peptide
  MOD_RES (11)..(12)..(13)..(14)..(15): Xaa is A or G
  MOD_RES (16)..(17)..(18)..(19): Xaa is A or G or is absent
HEELRSMEGLXXXXXXXXXMIQVTINSHHVRS

SEQ ID NO: 17920 - protein, 40 aa, Artificial Sequence
  GFR-binding peptide
  MOD_RES (2)..(36): Xaa is C or S
EXKNHQLFVTAKKHQGQHPKIRIKRMQVPREETPVXELGE

SEQ ID NO: 17921 - protein, 39 aa, Artificial Sequence
  GFR-binding peptide
  MOD_RES (1)..(3)..(37): Xaa is C or S
XEXKNHQLFVTAKKHQGQHPKIRIKRMQVPREETPVXEL

SEQ ID NO: 17922 - protein, 37 aa, Artificial Sequence
  GFR-binding peptide
  MOD_RES (2)..(2): Xaa is C or S
  MOD_RES (15)..(16)..(17)..(18)..(19): Xaa is A or G
  MOD_RES (20)..(21)..(22)..(23): Xaa is A or G or is absent
AXELHEELRVTAKKXXXXXXXXXIKRVQVPRHHVRSP

SEQ ID NO: 17923 - protein, 33 aa, Artificial Sequence
  GFR-binding peptide
  MOD_RES (12)..(13)..(14)..(15)..(16): Xaa is A or G
  MOD_RES (17)..(18)..(19)..(20): Xaa is A or G or is absent
QSHEELSMEGLXXXXXXXXXMIQMTINSQGTPV

SEQ ID NO: 17924 - protein, 37 aa, Artificial Sequence
  GFR-binding peptide
  MOD_RES (33)..(33): Xaa is C or S
  MOD_RES (11)..(12)..(13)..(14)..(15): Xaa is A or G
  MOD_RES (16)..(17)..(18)..(19): Xaa is A or G or is absent
NHQLFSMEGLXXXXXXXXXMIQMTINSEETPVXELGE

SEQ ID NO: 17925 - protein, 41 aa, Artificial Sequence
  GFR-binding peptide
  MOD_RES (2)..(4)..(41): Xaa is C or S
  MOD_RES (17)..(18)..(19)..(20)..(21): Xaa is A or G
  MOD_RES (22)..(23)..(24)..(25): Xaa is A or G or is absent
EXKXALHDELTVQVEKXXXXXXXXXVKAVKVSRLQVQTPRX

SEQ ID NO: 17926 - protein, 38 aa, Artificial Sequence
  GFR-binding peptide
  MOD_RES (2)..(2): Xaa is C or S
  MOD_RES (15)..(16)..(17)..(18)..(19): Xaa is A or G
  MOD_RES (20)..(21)..(22)..(23): Xaa is A or G or is absent
KXALHDELTVQVEKXXXXXXXXXVKAVKVSRLQVQTPR

SEQ ID NO: 17927 - protein, 38 aa, Artificial Sequence
  GFR-binding peptide
  MOD_RES (1)..(3): Xaa is C or S
  MOD_RES (16)..(17)..(18)..(19)..(20): Xaa is A or G
  MOD_RES (21)..(22)..(23)..(24): Xaa is A or G or is absent
XKXALHDELTVQVEKXXXXXXXXXVKAVKVSRLQVQTP

SEQ ID NO: 17928 - protein, 33 aa, Artificial Sequence
  GFR-binding peptide
LHEELRVQVEKLKPKKRVYEVKAVKVSRHHVRS

SEQ ID NO: 17929 - protein, 41 aa, Artificial Sequence
  GFR-binding peptide
  MOD_RES (1)..(38): Xaa is C or S
  MOD_RES (14)..(15)..(16)..(17)..(18): Xaa is A or G
  MOD_RES (19)..(20)..(21)..(22): Xaa is A or G or is absent
XALHDELTVTAKKXXXXXXXXXIKRVQVPRLQVQTPRXQVN

SEQ ID NO: 17930 - protein, 37 aa, Artificial Sequence
  GFR-binding peptide
  MOD_RES (34)..(34): Xaa is C or S
  MOD_RES (12)..(13)..(14)..(15)..(16): Xaa is A or G
  MOD_RES (17)..(18)..(19)..(20): Xaa is A or G or is absent
KNHQLFVTAKKXXXXXXXXXIKRMQVPREETPVXELG

SEQ ID NO: 17931 - protein, 40 aa, Artificial Sequence
  GFR-binding peptide
  MOD_RES (2)..(36): Xaa is C or S
EXKNHQLFSMEGLHQGQHPKIRMIQMTINSEETPVXELGE

SEQ ID NO: 17932 - protein, 36 aa, Artificial Sequence
  GFR-binding peptide
  MOD_RES (1)..(1): Xaa is C or S
XELHEELRVQVEKLKPKKRVYEVKAVKVSRHHVRSP

SEQ ID NO: 17933 - protein, 40 aa, Artificial Sequence
  GFR-binding peptide
  MOD_RES (37)..(37): Xaa is C or S
  MOD_RES (13)..(14)..(15)..(16)..(17): Xaa is A or G
  MOD_RES (18)..(19)..(20)..(21): Xaa is A or G or is absent
ELHEELRSMEGIXXXXXXXXXMIQVTINSHHVRSPQXKVS

SEQ ID NO: 17934 - protein, 39 aa, Artificial Sequence
  GFR-binding peptide
  MOD_RES (1)..(3)..(37): Xaa is C or S
XEXKNHQLFVQVEKHQGQHPKIRVKAMKVSREETPVXEL

SEQ ID NO: 17935 - protein, 39 aa, Artificial Sequence
  GFR-binding peptide
  MOD_RES (2)..(4)..(38): Xaa is C or S
RXEXQSHEELSMEGLHQGQHPKIRMIQMTINSQGTPVXE

SEQ ID NO: 17936 - protein, 38 aa, Artificial Sequence
  GFR-binding peptide
  MOD_RES (33)..(33): Xaa is C or S
NHQLFVTAKKHQGQHPKIRIKRMQVPREETPVXELGED

SEQ ID NO: 17937 - protein, 39 aa, Artificial Sequence
  GFR-binding peptide
  MOD_RES (37)..(37): Xaa is C or S
  MOD_RES (13)..(14)..(15)..(16)..(17): Xaa is A or G
  MOD_RES (18)..(19)..(20)..(21): Xaa is A or G or is absent
ELHEELRSMEGLXXXXXXXXXMIQVTINSHHVRSPQXKV

SEQ ID NO: 17938 - protein, 43 aa, Artificial Sequence
  GFR-binding peptide
  MOD_RES (2)..(4)..(38): Xaa is C or S
  MOD_RES (16)..(17)..(18)..(19)..(20): Xaa is A or G
  MOD_RES (21)..(22)..(23)..(24): Xaa is A or G or is absent
RXEXQSHEELSMEGIXXXXXXXXXMIQMTINSQGTPVXELGED

SEQ ID NO: 17939 - protein, 41 aa, Artificial Sequence
  GFR-binding peptide
  MOD_RES (2)..(36): Xaa is C or S
EXQSHEELVTAKKHQGQHPKIRIKRMQVPRQGTPVXELGED

SEQ ID NO: 17940 - protein, 34 aa, Artificial Sequence
  GFR-binding peptide
  MOD_RES (11)..(12)..(13)..(14)..(15): Xaa is A or G
  MOD_RES (16)..(17)..(18)..(19): Xaa is A or G or is absent
HEELRVTAKKXXXXXXXXXIKRVQVPRHHVRSPQ

SEQ ID NO: 17941 - protein, 41 aa, Artificial Sequence
  GFR-binding peptide
  MOD_RES (2)..(4)..(41): Xaa is C or S
  MOD_RES (17)..(18)..(19)..(20)..(21): Xaa is A or G
  MOD_RES (22)..(23)..(24)..(25): Xaa is A or G or is absent
AXAXELHEELRVTAKKXXXXXXXXXIKRVQVPRHHVRSPQX

SEQ ID NO: 17942 - protein, 36 aa, Artificial Sequence
  GFR-binding peptide
  MOD_RES (1)..(3): Xaa is C or S
XEXQSHEELVQVEKHQGQHPKIRVKAMKVSRQGTPV

SEQ ID NO: 17943 - protein, 40 aa, Artificial Sequence
  GFR-binding peptide
  MOD_RES (2)..(39): Xaa is C or S
  MOD_RES (15)..(16)..(17)..(18)..(19): Xaa is A or G
  MOD_RES (20)..(21)..(22)..(23): Xaa is A or G or is absent
KXALHDELTSMEGIXXXXXXXXXMIQVTINSLQVQTPRXQ

SEQ ID NO: 17944 - protein, 40 aa, Artificial Sequence
  GFR-binding peptide
  MOD_RES (1)..(38): Xaa is C or S
  MOD_RES (14)..(15)..(16)..(17)..(18): Xaa is A or G
  MOD_RES (19)..(20)..(21)..(22): Xaa is A or G or is absent
XELHEELRVTAKKXXXXXXXXXIKRVQVPRHHVRSPQXKV

SEQ ID NO: 17945 - protein, 39 aa, Artificial Sequence
  GFR-binding peptide
  MOD_RES (36)..(36): Xaa is C or S
  MOD_RES (12)..(13)..(14)..(15)..(16): Xaa is A or G
  MOD_RES (17)..(18)..(19)..(20): Xaa is A or G or is absent
LHEELRVTAKKXXXXXXXXXIKRVQVPRHHVRSPQXKVS

SEQ ID NO: 17946 - protein, 32 aa, Artificial Sequence
  GFR-binding peptide
  MOD_RES (11)..(12)..(13)..(14)..(15): Xaa is A or G
  MOD_RES (16)..(17)..(18)..(19): Xaa is A or G or is absent
HDELTVQVEKXXXXXXXXXVKAVKVSRLQVQT

SEQ ID NO: 17947 - protein, 37 aa, Artificial Sequence
  GFR-binding peptide
  MOD_RES (36)..(36): Xaa is C or S
LHDELTSMEGIFIPKKRVIEMIQVTINSLQVQTPRXQ

SEQ ID NO: 17948 - protein, 40 aa, Artificial Sequence
  GFR-binding peptide
  MOD_RES (37)..(37): Xaa is C or S
  MOD_RES (13)..(14)..(15)..(16)..(17): Xaa is A or G
  MOD_RES (18)..(19)..(20)..(21): Xaa is A or G or is absent
ALHDELTVQVEKXXXXXXXXXVKAVKVSRLQVQTPRXQVN

SEQ ID NO: 17949 - protein, 40 aa, Artificial Sequence
  GFR-binding peptide
  MOD_RES (1)..(3)..(37): Xaa is C or S
  MOD_RES (15)..(16)..(17)..(18)..(19): Xaa is A or G
  MOD_RES (20)..(21)..(22)..(23): Xaa is A or G or is absent
XEXQSHEELVQVEKXXXXXXXXXVKAMKVSRQGTPVXELG

SEQ ID NO: 17950 - protein, 38 aa, Artificial Sequence
  GFR-binding peptide
  MOD_RES (37)..(37): Xaa is C or S
ALHDELTSMEGLFIPKKRVIEMIQVTINSLQVQTPRXQ

SEQ ID NO: 17951 - protein, 42 aa, Artificial Sequence
  GFR-binding peptide
  MOD_RES (2)..(39): Xaa is C or S
KXALHDELTVQVEKFIPKKRVIEVKAVKVSRLQVQTPRXQVN

SEQ ID NO: 17952 - protein, 40 aa, Artificial Sequence
  GFR-binding peptide
  MOD_RES (2)..(36): Xaa is C or S
EXKNHQLFVQVEKHQGQHPKIRVKAMKVSREETPVXELGE

SEQ ID NO: 17953 - protein, 36 aa, Artificial Sequence
  GFR-binding peptide
  MOD_RES (1)..(1): Xaa is C or S
XELHEELRSMEGLLKPKKRVYEMIQVTINSHHVRSP

SEQ ID NO: 17954 - protein, 42 aa, Artificial Sequence
  GFR-binding peptide
  MOD_RES (2)..(4)..(41): Xaa is C or S
EXKXALHDELTVQVEKFIPKKRVIEVKAVKVSRLQVQTPRXQ

SEQ ID NO: 17955 - protein, 40 aa, Artificial Sequence
  GFR-binding peptide
  MOD_RES (1)..(35): Xaa is C or S
  MOD_RES (13)..(14)..(15)..(16)..(17): Xaa is A or G
  MOD_RES (18)..(19)..(20)..(21): Xaa is A or G or is absent
XQSHEELSMEGIXXXXXXXXXMIQMTINSQGTPVXELGED

SEQ ID NO: 17956 - protein, 34 aa, Artificial Sequence
  GFR-binding peptide
  MOD_RES (34)..(34): Xaa is C or S
QSHEELVTAKKHQGQHPKIRIKRMQVPRQGTPVX

SEQ ID NO: 17957 - protein, 39 aa, Artificial Sequence
  GFR-binding peptide
  MOD_RES (2)..(4): Xaa is C or S
  MOD_RES (17)..(18)..(19)..(20)..(21): Xaa is A or G
  MOD_RES (22)..(23)..(24)..(25): Xaa is A or G or is absent
AXAXELHEELRVTAKKXXXXXXXXXIKRVQVPRHHVRSP

SEQ ID NO: 17958 - protein, 36 aa, Artificial Sequence
  GFR-binding peptide
  MOD_RES (13)..(14)..(15)..(16)..(17): Xaa is A or G
  MOD_RES (18)..(19)..(20)..(21): Xaa is A or G or is absent
ELHEELRSMEGLXXXXXXXXXMIQVTINSHHVRSPQ

SEQ ID NO: 17959 - protein, 39 aa, Artificial Sequence
  GFR-binding peptide
  MOD_RES (1)..(35): Xaa is C or S
  MOD_RES (13)..(14)..(15)..(16)..(17): Xaa is A or G
  MOD_RES (18)..(19)..(20)..(21): Xaa is A or G or is absent
XKNHQLFSMEGLXXXXXXXXXMIQMTINSEETPVXELGE

SEQ ID NO: 17960 - protein, 44 aa, Artificial Sequence
  GFR-binding peptide
  MOD_RES (1)..(3)..(40): Xaa is C or S
  MOD_RES (16)..(17)..(18)..(19)..(20): Xaa is A or G
  MOD_RES (21)..(22)..(23)..(24): Xaa is A or G or is absent
XKXALHDELTSMEGIXXXXXXXXXMIQVTINSLQVQTPRXQVNR

SEQ ID NO: 17961 - protein, 44 aa, Artificial Sequence
  GFR-binding peptide
  MOD_RES (1)..(3)..(40): Xaa is C or S
XAXELHEELRVTAKKLKPKKRVYEIKRVQVPRHHVRSPQXKVSS

SEQ ID NO: 17962 - protein, 38 aa, Artificial Sequence
  GFR-binding peptide
  MOD_RES (2)..(4): Xaa is C or S
  MOD_RES (17)..(18)..(19)..(20)..(21): Xaa is A or G
  MOD_RES (22)..(23)..(24)..(25): Xaa is A or G or is absent
EXKXALHDELTVTAKKXXXXXXXXXIKRVQVPRLQVQT

SEQ ID NO: 17963 - protein, 37 aa, Artificial Sequence
  GFR-binding peptide
  MOD_RES (34)..(34): Xaa is C or S
  MOD_RES (12)..(13)..(14)..(15)..(16): Xaa is A or G
  MOD_RES (17)..(18)..(19)..(20): Xaa is A or G or is absent
QSHEELSMEGIXXXXXXXXXMIQMTINSQGTPVXELG

SEQ ID NO: 17964 - protein, 38 aa, Artificial Sequence
  GFR-binding peptide
  MOD_RES (1)..(3): Xaa is C or S
  MOD_RES (16)..(17)..(18)..(19)..(20): Xaa is A or G
  MOD_RES (21)..(22)..(23)..(24): Xaa is A or G or is absent
XKXALHDELTVTAKKXXXXXXXXXIKRVQVPRLQVQTP

SEQ ID NO: 17965 - protein, 41 aa, Artificial Sequence
  GFR-binding peptide
  MOD_RES (37)..(37): Xaa is C or S
ELHEELRSMEGILKPKKRVYEMIQVTINSHHVRSPQXKVSS

SEQ ID NO: 17966 - protein, 34 aa, Artificial Sequence
  GFR-binding peptide
  MOD_RES (33)..(33): Xaa is C or S
NHQLFSMEGLHQGQHPKIRMIQMTINSEETPVXE

SEQ ID NO: 17967 - protein, 37 aa, Artificial Sequence
  GFR-binding peptide
  MOD_RES (36)..(36): Xaa is C or S
  MOD_RES (12)..(13)..(14)..(15)..(16): Xaa is A or G
  MOD_RES (17)..(18)..(19)..(20): Xaa is A or G or is absent
LHEELRSMEGIXXXXXXXXXMIQVTINSHHVRSPQXK

SEQ ID NO: 17968 - protein, 39 aa, Artificial Sequence
  GFR-binding peptide
  MOD_RES (35)..(35): Xaa is C or S
HEELRVTAKKLKPKKRVYEIKRVQVPRHHVRSPQXKVSS

SEQ ID NO: 17969 - protein, 42 aa, Artificial Sequence
  GFR-binding peptide
  MOD_RES (1)..(38): Xaa is C or S
XALHDELTSMEGLFIPKKRVIEMIQVTINSLQVQTPRXQVNR

SEQ ID NO: 17970 - protein, 36 aa, Artificial Sequence
  GFR-binding peptide
  MOD_RES (1)..(3): Xaa is C or S
  MOD_RES (15)..(16)..(17)..(18)..(19): Xaa is A or G
  MOD_RES (20)..(21)..(22)..(23): Xaa is A or G or is absent
XEXKNHQLFVTAKKXXXXXXXXXIKRMQVPREETPV

SEQ ID NO: 17971 - protein, 35 aa, Artificial Sequence
  GFR-binding peptide
  MOD_RES (2)..(2): Xaa is C or S
EXKNHQLFSMEGIHQGQHPKIRMIQMTINSEETPV

SEQ ID NO: 17972 - protein, 36 aa, Artificial Sequence
  GFR-binding peptide
  MOD_RES (34)..(34): Xaa is C or S
  MOD_RES (12)..(13)..(14)..(15)..(16): Xaa is A or G
  MOD_RES (17)..(18)..(19)..(20): Xaa is A or G or is absent
KNHQLFSMEGIXXXXXXXXXMIQMTINSEETPVXEL

SEQ ID NO: 17973 - protein, 38 aa, Artificial Sequence
  GFR-binding peptide
  MOD_RES (35)..(35): Xaa is C or S
HDELTVTAKKFIPKKRVIEIKRVQVPRLQVQTPRXQVN

SEQ ID NO: 17974 - protein, 38 aa, Artificial Sequence
  GFR-binding peptide
  MOD_RES (34)..(34): Xaa is C or S
  MOD_RES (12)..(13)..(14)..(15)..(16): Xaa is A or G
  MOD_RES (17)..(18)..(19)..(20): Xaa is A or G or is absent
QSHEELVQVEKXXXXXXXXXVKAMKVSRQGTPVXELGE

SEQ ID NO: 17975 - protein, 39 aa, Artificial Sequence
  GFR-binding peptide
  MOD_RES (1)..(38): Xaa is C or S
XELHEELRSMEGLLKPKKRVYEMIQVTINSHHVRSPQXK

SEQ ID NO: 17976 - protein, 43 aa, Artificial Sequence
  GFR-binding peptide
  MOD_RES (1)..(3)..(40): Xaa is C or S
XKXALHDELTVTAKKFIPKKRVIEIKRVQVPRLQVQTPRXQVN

SEQ ID NO: 17977 - protein, 43 aa, Artificial Sequence
  GFR-binding peptide
  MOD_RES (1)..(3)..(40): Xaa is C or S
XAXELHEELRVTAKKLKPKKRVYEIKRVQVPRHHVRSPQXKVS

SEQ ID NO: 17978 - protein, 41 aa, Artificial Sequence
  GFR-binding peptide
  MOD_RES (1)..(3)..(40): Xaa is C or S
  MOD_RES (16)..(17)..(18)..(19)..(20): Xaa is A or G
  MOD_RES (21)..(22)..(23)..(24): Xaa is A or G or is absent
XAXELHEELRVTAKKXXXXXXXXXIKRVQVPRHHVRSPQXK

SEQ ID NO: 17979 - protein, 34 aa, Artificial Sequence
  GFR-binding peptide
  MOD_RES (1)..(1): Xaa is C or S
XQSHEELVTAKKHQGQHPKIRIKRMQVPRQGTPV

SEQ ID NO: 17980 - protein, 41 aa, Artificial Sequence
  GFR-binding peptide
  MOD_RES (2)..(36): Xaa is C or S
  MOD_RES (14)..(15)..(16)..(17)..(18): Xaa is A or G
  MOD_RES (19)..(20)..(21)..(22): Xaa is A or G or is absent
EXKNHQLFVQVEKXXXXXXXXXVKAMKVSREETPVXELGED

SEQ ID NO: 17981 - protein, 37 aa, Artificial Sequence
  GFR-binding peptide
  MOD_RES (35)..(35): Xaa is C or S
  MOD_RES (11)..(12)..(13)..(14)..(15): Xaa is A or G
  MOD_RES (16)..(17)..(18)..(19): Xaa is A or G or is absent
HEELRVQVEKXXXXXXXXXVKAVKVSRHHVRSPQXKV

SEQ ID NO: 17982 - protein, 36 aa, Artificial Sequence
  GFR-binding peptide
  MOD_RES (1)..(35): Xaa is C or S
XKNHQLFSMEGIHQGQHPKIRMIQMTINSEETPVXE

SEQ ID NO: 17983 - protein, 41 aa, Artificial Sequence
  GFR-binding peptide
  MOD_RES (1)..(38): Xaa is C or S
XALHDELTVTAKKFIPKKRVIEIKRVQVPRLQVQTPRXQVN

SEQ ID NO: 17984 - protein, 43 aa, Artificial Sequence
  GFR-binding peptide
  MOD_RES (1)..(3)..(37): Xaa is C or S
  MOD_RES (15)..(16)..(17)..(18)..(19): Xaa is A or G
  MOD_RES (20)..(21)..(22)..(23): Xaa is A or G or is absent
XEXQSHEELSMEGIXXXXXXXXXMIQMTINSQGTPVXELGEDN

SEQ ID NO: 17985 - protein, 41 aa, Artificial Sequence
  GFR-binding peptide
  MOD_RES (1)..(3)..(37): Xaa is C or S
XEXKNHQLFVQVEKHQGQHPKIRVKAMKVSREETPVXELGE

SEQ ID NO: 17986 - protein, 36 aa, Artificial Sequence
  GFR-binding peptide
  MOD_RES (35)..(35): Xaa is C or S
HEELRVQVEKLKPKKRVYEVKAVKVSRHHVRSPQXK

SEQ ID NO: 17987 - protein, 39 aa, Artificial Sequence
  GFR-binding peptide
  MOD_RES (34)..(34): Xaa is C or S
QSHEELVTAKKHQGQHPKIRIKRMQVPRQGTPVXELGED

SEQ ID NO: 17988 - protein, 39 aa, Artificial Sequence
  GFR-binding peptide
  MOD_RES (34)..(34): Xaa is C or S
KNHQLFSMEGLHQGQHPKIRMIQMTINSEETPVXELGED

SEQ ID NO: 17989 - protein, 37 aa, Artificial Sequence
  GFR-binding peptide
  MOD_RES (35)..(35): Xaa is C or S
  MOD_RES (11)..(12)..(13)..(14)..(15): Xaa is A or G
  MOD_RES (16)..(17)..(18)..(19): Xaa is A or G or is absent
HEELRVTAKKXXXXXXXXXIKRVQVPRHHVRSPQXKV

SEQ ID NO: 17990 - protein, 39 aa, Artificial Sequence
  GFR-binding peptide
  MOD_RES (2)..(39): Xaa is C or S
  MOD_RES (15)..(16)..(17)..(18)..(19): Xaa is A or G
  MOD_RES (20)..(21)..(22)..(23): Xaa is A or G or is absent
AXELHEELRVTAKKXXXXXXXXXIKRVQVPRHHVRSPQX

SEQ ID NO: 17991 - protein, 40 aa, Artificial Sequence
  GFR-binding peptide
  MOD_RES (1)..(35): Xaa is C or S
  MOD_RES (13)..(14)..(15)..(16)..(17): Xaa is A or G
  MOD_RES (18)..(19)..(20)..(21): Xaa is A or G or is absent
XKNHQLFVQVEKXXXXXXXXXVKAMKVSREETPVXELGED

SEQ ID NO: 17992 - protein, 39 aa, Artificial Sequence
  GFR-binding peptide
  MOD_RES (36)..(36): Xaa is C or S
LHEELRVQVEKLKPKKRVYEVKAVKVSRHHVRSPQXKVS

SEQ ID NO: 17993 - protein, 43 aa, Artificial Sequence
  GFR-binding peptide
  MOD_RES (2)..(4)..(41): Xaa is C or S
  MOD_RES (17)..(18)..(19)..(20)..(21): Xaa is A or G
  MOD_RES (22)..(23)..(24)..(25): Xaa is A or G or is absent
EXKXALHDELTVTAKKXXXXXXXXXIKRVQVPRLQVQTPRXQV

SEQ ID NO: 17994 - protein, 37 aa, Artificial Sequence
  GFR-binding peptide
  MOD_RES (36)..(36): Xaa is C or S
LHEELRSMEGLLKPKKRVYEMIQVTINSHHVRSPQXK

SEQ ID NO: 17995 - protein, 41 aa, Artificial Sequence
  GFR-binding peptide
  MOD_RES (1)..(35): Xaa is C or S
XQSHEELVQVEKHQGQHPKIRVKAMKVSRQGTPVXELGEDN

SEQ ID NO: 17996 - protein, 41 aa, Artificial Sequence
  GFR-binding peptide
  MOD_RES (2)..(36): Xaa is C or S
EXQSHEELSMEGLHQGQHPKIRMIQMTINSQGTPVXELGED

SEQ ID NO: 17997 - protein, 44 aa, Artificial Sequence
  GFR-binding peptide
  MOD_RES (1)..(3)..(40): Xaa is C or S
XKXALHDELTVQVEKFIPKKRVIEVKAVKVSRLQVQTPRXQVNR

SEQ ID NO: 17998 - protein, 42 aa, Artificial Sequence
  GFR-binding peptide
  MOD_RES (1)..(38): Xaa is C or S
  MOD_RES (14)..(15)..(16)..(17)..(18): Xaa is A or G
  MOD_RES (19)..(20)..(21)..(22): Xaa is A or G or is absent
XALHDELTVQVEKXXXXXXXXXVKAVKVSRLQVQTPRXQVNR

SEQ ID NO: 17999 - protein, 38 aa, Artificial Sequence
  GFR-binding peptide
  MOD_RES (36)..(36): Xaa is C or S
LHEELRSMEGILKPKKRVYEMIQVTINSHHVRSPQXKV

SEQ ID NO: 18000 - protein, 38 aa, Artificial Sequence
  GFR-binding peptide
  MOD_RES (2)..(4): Xaa is C or S
  MOD_RES (17)..(18)..(19)..(20)..(21): Xaa is A or G
  MOD_RES (22)..(23)..(24)..(25): Xaa is A or G or is absent
AXAXELHEELRVTAKKXXXXXXXXXIKRVQVPRHHVRS

SEQ ID NO: 18001 - protein, 40 aa, Artificial Sequence
  GFR-binding peptide
  MOD_RES (1)..(38): Xaa is C or S
  MOD_RES (14)..(15)..(16)..(17)..(18): Xaa is A or G
  MOD_RES (19)..(20)..(21)..(22): Xaa is A or G or is absent
XELHEELRSMEGLXXXXXXXXXMIQVTINSHHVRSPQXKV

SEQ ID NO: 18002 - protein, 34 aa, Artificial Sequence
  GFR-binding peptide
ELHEELRSMEGILKPKKRVYEMIQVTINSHHVRS

SEQ ID NO: 18003 - protein, 35 aa, Artificial Sequence
  GFR-binding peptide
  MOD_RES (34)..(34): Xaa is C or S
  MOD_RES (12)..(13)..(14)..(15)..(16): Xaa is A or G
  MOD_RES (17)..(18)..(19)..(20): Xaa is A or G or is absent
QSHEELVQVEKXXXXXXXXXVKAMKVSRQGTPVXE

SEQ ID NO: 18004 - protein, 37 aa, Artificial Sequence
  GFR-binding peptide
  MOD_RES (2)..(4): Xaa is C or S
RXEXKNHQLFVTAKKHQGQHPKIRIKRMQVPREETPV

SEQ ID NO: 18005 - protein, 37 aa, Artificial Sequence
  GFR-binding peptide
  MOD_RES (2)..(4): Xaa is C or S
  MOD_RES (16)..(17)..(18)..(19)..(20): Xaa is A or G
  MOD_RES (21)..(22)..(23)..(24): Xaa is A or G or is absent
RXEXKNHQLFVQVEKXXXXXXXXXVKAMKVSREETPV

SEQ ID NO: 18006 - protein, 35 aa, Artificial Sequence
  GFR-binding peptide
  MOD_RES (35)..(35): Xaa is C or S
  MOD_RES (11)..(12)..(13)..(14)..(15): Xaa is A or G
  MOD_RES (16)..(17)..(18)..(19): Xaa is A or G or is absent
HEELRVTAKKXXXXXXXXXIKRVQVPRHHVRSPQX

SEQ ID NO: 18007 - protein, 36 aa, Artificial Sequence
  GFR-binding peptide
  MOD_RES (2)..(2): Xaa is C or S
  MOD_RES (15)..(16)..(17)..(18)..(19): Xaa is A or G
  MOD_RES (20)..(21)..(22)..(23): Xaa is A or G or is absent
KXALHDELTSMEGIXXXXXXXXXMIQVTINSLQVQT

SEQ ID NO: 18008 - protein, 38 aa, Artificial Sequence
  GFR-binding peptide
  MOD_RES (36)..(36): Xaa is C or S
  MOD_RES (12)..(13)..(14)..(15)..(16): Xaa is A or G
  MOD_RES (17)..(18)..(19)..(20): Xaa is A or G or is absent
LHEELRVQVEKXXXXXXXXXVKAVKVSRHHVRSPQXKV

SEQ ID NO: 18009 - protein, 41 aa, Artificial Sequence
  GFR-binding peptide
  MOD_RES (1)..(3)..(40): Xaa is C or S
XAXELHEELRVQVEKLKPKKRVYEVKAVKVSRHHVRSPQXK

SEQ ID NO: 18010 - protein, 34 aa, Artificial Sequence
  GFR-binding peptide
  MOD_RES (12)..(13)..(14)..(15)..(16): Xaa is A or G
  MOD_RES (17)..(18)..(19)..(20): Xaa is A or G or is absent
LHDELTVTAKKXXXXXXXXXIKRVQVPRLQVQTP

SEQ ID NO: 18011 - protein, 35 aa, Artificial Sequence
  GFR-binding peptide
  MOD_RES (35)..(35): Xaa is C or S
  MOD_RES (11)..(12)..(13)..(14)..(15): Xaa is A or G
  MOD_RES (16)..(17)..(18)..(19): Xaa is A or G or is absent
HEELRVQVEKXXXXXXXXXVKAVKVSRHHVRSPQX

SEQ ID NO: 18012 - protein, 38 aa, Artificial Sequence
  GFR-binding peptide
  MOD_RES (1)..(38): Xaa is C or S
XALHDELTVTAKKFIPKKRVIEIKRVQVPRLQVQTPRX

SEQ ID NO: 18013 - protein, 38 aa, Artificial Sequence
  GFR-binding peptide
  MOD_RES (1)..(35): Xaa is C or S
XKNHQLFSMEGIHQGQHPKIRMIQMTINSEETPVXELG

SEQ ID NO: 18014 - protein, 33 aa, Artificial Sequence
  GFR-binding peptide
HDELTVQVEKFIPKKRVIEVKAVKVSRLQVQTP

SEQ ID NO: 18015 - protein, 42 aa, Artificial Sequence
  GFR-binding peptide
  MOD_RES (1)..(3)..(40): Xaa is C or S
  MOD_RES (16)..(17)..(18)..(19)..(20): Xaa is A or G
  MOD_RES (21)..(22)..(23)..(24): Xaa is A or G or is absent
XKXALHDELTVTAKKXXXXXXXXXIKRVQVPRLQVQTPRXQV

SEQ ID NO: 18016 - protein, 41 aa, Artificial Sequence
  GFR-binding peptide
  MOD_RES (2)..(4)..(41): Xaa is C or S
AXAXELHEELRVQVEKLKPKKRVYEVKAVKVSRHHVRSPQX

SEQ ID NO: 18017 - protein, 41 aa, Artificial Sequence
  GFR-binding peptide
  MOD_RES (1)..(38): Xaa is C or S
XELHEELRVQVEKLKPKKRVYEVKAVKVSRHHVRSPQXKVS

SEQ ID NO: 18018 - protein, 38 aa, Artificial Sequence
  GFR-binding peptide
  MOD_RES (1)..(38): Xaa is C or S
  MOD_RES (14)..(15)..(16)..(17)..(18): Xaa is A or G
  MOD_RES (19)..(20)..(21)..(22): Xaa is A or G or is absent
XALHDELTVQVEKXXXXXXXXXVKAVKVSRLQVQTPRX

SEQ ID NO: 18019 - protein, 42 aa, Artificial Sequence
  GFR-binding peptide
  MOD_RES (2)..(39): Xaa is C or S
AXELHEELRVQVEKLKPKKRVYEVKAVKVSRHHVRSPQXKVS

SEQ ID NO: 18020 - protein, 36 aa, Artificial Sequence
  GFR-binding peptide
  MOD_RES (33)..(33): Xaa is C or S
  MOD_RES (11)..(12)..(13)..(14)..(15): Xaa is A or G
  MOD_RES (16)..(17)..(18)..(19): Xaa is A or G or is absent
NHQLFVTAKKXXXXXXXXXIKRMQVPREETPVXELG

SEQ ID NO: 18021 - protein, 40 aa, Artificial Sequence
  GFR-binding peptide
  MOD_RES (2)..(4): Xaa is C or S
EXKXALHDELTSMEGIFIPKKRVIEMIQVTINSLQVQTPR

SEQ ID NO: 18022 - protein, 39 aa, Artificial Sequence
  GFR-binding peptide
  MOD_RES (2)..(4)..(38): Xaa is C or S
  MOD_RES (16)..(17)..(18)..(19)..(20): Xaa is A or G
  MOD_RES (21)..(22)..(23)..(24): Xaa is A or G or is absent
RXEXKNHQLFSMEGIXXXXXXXXXMIQMTINSEETPVXE

SEQ ID NO: 18023 - protein, 42 aa, Artificial Sequence
  GFR-binding peptide
  MOD_RES (2)..(4)..(41): Xaa is C or S
  MOD_RES (17)..(18)..(19)..(20)..(21): Xaa is A or G
  MOD_RES (22)..(23)..(24)..(25): Xaa is A or G or is absent
AXAXELHEELRSMEGLXXXXXXXXXMIQVTINSHHVRSPQXK

SEQ ID NO: 18024 - protein, 45 aa, Artificial Sequence
  GFR-binding peptide
  MOD_RES (2)..(4)..(41): Xaa is C or S
AXAXELHEELRSMEGLLKPKKRVYEMIQVTINSHHVRSPQXKVSS

SEQ ID NO: 18025 - protein, 34 aa, Artificial Sequence
  GFR-binding peptide
  MOD_RES (1)..(1): Xaa is C or S
XQSHEELVQVEKHQGQHPKIRVKAMKVSRQGTPV

SEQ ID NO: 18026 - protein, 41 aa, Artificial Sequence
  GFR-binding peptide
  MOD_RES (2)..(4)..(38): Xaa is C or S
  MOD_RES (16)..(17)..(18)..(19)..(20): Xaa is A or G
  MOD_RES (21)..(22)..(23)..(24): Xaa is A or G or is absent
RXEXKNHQLFVQVEKXXXXXXXXXVKAMKVSREETPVXELG

SEQ ID NO: 18027 - protein, 35 aa, Artificial Sequence
  GFR-binding peptide
  MOD_RES (2)..(2): Xaa is C or S
EXQSHEELSMEGLHQGQHPKIRMIQMTINSQGTPV

SEQ ID NO: 18028 - protein, 38 aa, Artificial Sequence
  GFR-binding peptide
  MOD_RES (2)..(36): Xaa is C or S
EXQSHEELSMEGIHQGQHPKIRMIQMTINSQGTPVXEL

SEQ ID NO: 18029 - protein, 38 aa, Artificial Sequence
  GFR-binding peptide
  MOD_RES (2)..(4)..(38): Xaa is C or S
RXEXKNHQLFVQVEKHQGQHPKIRVKAMKVSREETPVX

SEQ ID NO: 18030 - protein, 37 aa, Artificial Sequence
  GFR-binding peptide
  MOD_RES (2)..(2): Xaa is C or S
AXELHEELRVQVEKLKPKKRVYEVKAVKVSRHHVRSP

SEQ ID NO: 18031 - protein, 35 aa, Artificial Sequence
  GFR-binding peptide
  MOD_RES (1)..(1): Xaa is C or S
  MOD_RES (14)..(15)..(16)..(17)..(18): Xaa is A or G
  MOD_RES (19)..(20)..(21)..(22): Xaa is A or G or is absent
XELHEELRVQVEKXXXXXXXXXVKAVKVSRHHVRS

SEQ ID NO: 18032 - protein, 40 aa, Artificial Sequence
  GFR-binding peptide
  MOD_RES (2)..(4): Xaa is C or S
  MOD_RES (17)..(18)..(19)..(20)..(21): Xaa is A or G
  MOD_RES (22)..(23)..(24)..(25): Xaa is A or G or is absent
AXAXELHEELRSMEGIXXXXXXXXXMIQVTINSHHVRSPQ

SEQ ID NO: 18033 - protein, 35 aa, Artificial Sequence
  GFR-binding peptide
  MOD_RES (35)..(35): Xaa is C or S
HDELTSMEGLFIPKKRVIEMIQVTINSLQVQTPRX

SEQ ID NO: 18034 - protein, 40 aa, Artificial Sequence
  GFR-binding peptide
  MOD_RES (1)..(3)..(37): Xaa is C or S
XEXKNHQLFSMEGLHQGQHPKIRMIQMTINSEETPVXELG

SEQ ID NO: 18035 - protein, 38 aa, Artificial Sequence
  GFR-binding peptide
  MOD_RES (2)..(36): Xaa is C or S
EXKNHQLFVQVEKHQGQHPKIRVKAMKVSREETPVXEL

SEQ ID NO: 18036 - protein, 39 aa, Artificial Sequence
  GFR-binding peptide
  MOD_RES (34)..(34): Xaa is C or S
QSHEELSMEGLHQGQHPKIRMIQMTINSQGTPVXELGED

SEQ ID NO: 18037 - protein, 43 aa, Artificial Sequence
  GFR-binding peptide
  MOD_RES (1)..(3)..(37): Xaa is C or S
  MOD_RES (15)..(16)..(17)..(18)..(19): Xaa is A or G
  MOD_RES (20)..(21)..(22)..(23): Xaa is A or G or is absent
XEXKNHQLFVTAKKXXXXXXXXXIKRMQVPREETPVXELGEDN

SEQ ID NO: 18038 - protein, 37 aa, Artificial Sequence
  GFR-binding peptide
  MOD_RES (1)..(3): Xaa is C or S
XKXALHDELTVTAKKFIPKKRVIEIKRVQVPRLQVQT

SEQ ID NO: 18039 - protein, 33 aa, Artificial Sequence
  GFR-binding peptide
  MOD_RES (33)..(33): Xaa is C or S
  MOD_RES (11)..(12)..(13)..(14)..(15): Xaa is A or G
  MOD_RES (16)..(17)..(18)..(19): Xaa is A or G or is absent
SHEELSMEGIXXXXXXXXXMIQMTINSQGTPVX

SEQ ID NO: 18040 - protein, 33 aa, Artificial Sequence
  GFR-binding peptide
HDELTSMEGLFIPKKRVIEMIQVTINSLQVQTP

SEQ ID NO: 18041 - protein, 39 aa, Artificial Sequence
  GFR-binding peptide
  MOD_RES (37)..(37): Xaa is C or S
  MOD_RES (13)..(14)..(15)..(16)..(17): Xaa is A or G
  MOD_RES (18)..(19)..(20)..(21): Xaa is A or G or is absent
ALHDELTVQVEKXXXXXXXXXVKAVKVSRLQVQTPRXQV

SEQ ID NO: 18042 - protein, 38 aa, Artificial Sequence
  GFR-binding peptide
  MOD_RES (36)..(36): Xaa is C or S
  MOD_RES (12)..(13)..(14)..(15)..(16): Xaa is A or G
  MOD_RES (17)..(18)..(19)..(20): Xaa is A or G or is absent
LHDELTSMEGLXXXXXXXXXMIQVTINSLQVQTPRXQV

SEQ ID NO: 18043 - protein, 39 aa, Artificial Sequence
  GFR-binding peptide
  MOD_RES (2)..(4)..(38): Xaa is C or S
RXEXKNHQLFVQVEKHQGQHPKIRVKAMKVSREETPVXE

SEQ ID NO: 18044 - protein, 40 aa, Artificial Sequence
  GFR-binding peptide
  MOD_RES (2)..(39): Xaa is C or S
AXELHEELRSMEGILKPKKRVYEMIQVTINSHHVRSPQXK

SEQ ID NO: 18045 - protein, 36 aa, Artificial Sequence
  GFR-binding peptide
  MOD_RES (1)..(3): Xaa is C or S
XEXQSHEELVTAKKHQGQHPKIRIKRMQVPRQGTPV

SEQ ID NO: 18046 - protein, 37 aa, Artificial Sequence
  GFR-binding peptide
  MOD_RES (33)..(33): Xaa is C or S
SHEELSMEGLHQGQHPKIRMIQMTINSQGTPVXELGE

SEQ ID NO: 18047 - protein, 35 aa, Artificial Sequence
  GFR-binding peptide
ELHEELRSMEGLLKPKKRVYEMIQVTINSHHVRSP

SEQ ID NO: 18048 - protein, 38 aa, Artificial Sequence
  GFR-binding peptide
  MOD_RES (35)..(35): Xaa is C or S
  MOD_RES (11)..(12)..(13)..(14)..(15): Xaa is A or G
  MOD_RES (16)..(17)..(18)..(19): Xaa is A or G or is absent
HDELTVQVEKXXXXXXXXXVKAVKVSRLQVQTPRXQVN

SEQ ID NO: 18049 - protein, 38 aa, Artificial Sequence
  GFR-binding peptide
  MOD_RES (37)..(37): Xaa is C or S
ALHDELTVTAKKFIPKKRVIEIKRVQVPRLQVQTPRXQ

SEQ ID NO: 18050 - protein, 36 aa, Artificial Sequence
  GFR-binding peptide
  MOD_RES (35)..(35): Xaa is C or S
  MOD_RES (11)..(12)..(13)..(14)..(15): Xaa is A or G
  MOD_RES (16)..(17)..(18)..(19): Xaa is A or G or is absent
HDELTSMEGLXXXXXXXXXMIQVTINSLQVQTPRXQ

SEQ ID NO: 18051 - protein, 39 aa, Artificial Sequence
  GFR-binding peptide
  MOD_RES (37)..(37): Xaa is C or S
  MOD_RES (13)..(14)..(15)..(16)..(17): Xaa is A or G
  MOD_RES (18)..(19)..(20)..(21): Xaa is A or G or is absent
ELHEELRVTAKKXXXXXXXXXIKRVQVPRHHVRSPQXKV

SEQ ID NO: 18052 - protein, 39 aa, Artificial Sequence
  GFR-binding peptide
  MOD_RES (1)..(35): Xaa is C or S
  MOD_RES (13)..(14)..(15)..(16)..(17): Xaa is A or G
  MOD_RES (18)..(19)..(20)..(21): Xaa is A or G or is absent
XQSHEELVTAKKXXXXXXXXXIKRMQVPRQGTPVXELGE

SEQ ID NO: 18053 - protein, 44 aa, Artificial Sequence
  GFR-binding peptide
  MOD_RES (2)..(4)..(38): Xaa is C or S
  MOD_RES (16)..(17)..(18)..(19)..(20): Xaa is A or G
  MOD_RES (21)..(22)..(23)..(24): Xaa is A or G or is absent
RXEXQSHEELVQVEKXXXXXXXXXVKAMKVSRQGTPVXELGEDN

SEQ ID NO: 18054 - protein, 42 aa, Artificial Sequence
  GFR-binding peptide
  MOD_RES (2)..(36): Xaa is C or S
  MOD_RES (14)..(15)..(16)..(17)..(18): Xaa is A or G
  MOD_RES (19)..(20)..(21)..(22): Xaa is A or G or is absent
EXQSHEELVQVEKXXXXXXXXXVKAMKVSRQGTPVXELGEDN

SEQ ID NO: 18055 - protein, 39 aa, Artificial Sequence
  GFR-binding peptide
  MOD_RES (1)..(38): Xaa is C or S
  MOD_RES (14)..(15)..(16)..(17)..(18): Xaa is A or G
  MOD_RES (19)..(20)..(21)..(22): Xaa is A or G or is absent
XALHDELTVTAKKXXXXXXXXXIKRVQVPRLQVQTPRXQ

SEQ ID NO: 18056 - protein, 32 aa, Artificial Sequence
  GFR-binding peptide
SHEELVTAKKHQGQHPKIRIKRMQVPRQGTPV

SEQ ID NO: 18057 - protein, 44 aa, Artificial Sequence
  GFR-binding peptide
  MOD_RES (2)..(4)..(41): Xaa is C or S
AXAXELHEELRVTAKKLKPKKRVYEIKRVQVPRHHVRSPQXKVS

SEQ ID NO: 18058 - protein, 36 aa, Artificial Sequence
  GFR-binding peptide
  MOD_RES (1)..(35): Xaa is C or S
  MOD_RES (13)..(14)..(15)..(16)..(17): Xaa is A or G
  MOD_RES (18)..(19)..(20)..(21): Xaa is A or G or is absent
XKNHQLFSMEGLXXXXXXXXXMIQMTINSEETPVXE

SEQ ID NO: 18059 - protein, 33 aa, Artificial Sequence
  GFR-binding peptide
  MOD_RES (12)..(13)..(14)..(15)..(16): Xaa is A or G
  MOD_RES (17)..(18)..(19)..(20): Xaa is A or G or is absent
LHDELTVTAKKXXXXXXXXXIKRVQVPRLQVQT

SEQ ID NO: 18060 - protein, 38 aa, Artificial Sequence
  GFR-binding peptide
  MOD_RES (1)..(3)..(37): Xaa is C or S
  MOD_RES (15)..(16)..(17)..(18)..(19): Xaa is A or G
  MOD_RES (20)..(21)..(22)..(23): Xaa is A or G or is absent
XEXKNHQLFSMEGLXXXXXXXXXMIQMTINSEETPVXE

SEQ ID NO: 18061 - protein, 36 aa, Artificial Sequence
  GFR-binding peptide
  MOD_RES (13)..(14)..(15)..(16)..(17): Xaa is A or G
  MOD_RES (18)..(19)..(20)..(21): Xaa is A or G or is absent
ELHEELRVTAKKXXXXXXXXXIKRVQVPRHHVRSPQ

SEQ ID NO: 18062 - protein, 33 aa, Artificial Sequence
  GFR-binding peptide
  MOD_RES (11)..(12)..(13)..(14)..(15): Xaa is A or G
  MOD_RES (16)..(17)..(18)..(19): Xaa is A or G or is absent
HDELTSMEGLXXXXXXXXXMIQVTINSLQVQTP

SEQ ID NO: 18063 - protein, 38 aa, Artificial Sequence
  GFR-binding peptide
  MOD_RES (1)..(38): Xaa is C or S
XALHDELTSMEGLFIPKKRVIEMIQVTINSLQVQTPRX

SEQ ID NO: 18064 - protein, 42 aa, Artificial Sequence
  GFR-binding peptide
  MOD_RES (1)..(3)..(40): Xaa is C or S
XKXALHDELTSMEGLFIPKKRVIEMIQVTINSLQVQTPRXQV

SEQ ID NO: 18065 - protein, 40 aa, Artificial Sequence
  GFR-binding peptide
  MOD_RES (1)..(35): Xaa is C or S
XKNHQLFSMEGLHQGQHPKIRMIQMTINSEETPVXELGED

SEQ ID NO: 18066 - protein, 37 aa, Artificial Sequence
  GFR-binding peptide
  MOD_RES (2)..(36): Xaa is C or S
  MOD_RES (14)..(15)..(16)..(17)..(18): Xaa is A or G
  MOD_RES (19)..(20)..(21)..(22): Xaa is A or G or is absent
EXQSHEELVQVEKXXXXXXXXXVKAMKVSRQGTPVXE

SEQ ID NO: 18067 - protein, 36 aa, Artificial Sequence
  GFR-binding peptide
  MOD_RES (2)..(2): Xaa is C or S
KXALHDELTVTAKKFIPKKRVIEIKRVQVPRLQVQT

SEQ ID NO: 18068 - protein, 42 aa, Artificial Sequence
  GFR-binding peptide
  MOD_RES (2)..(4)..(41): Xaa is C or S
  MOD_RES (17)..(18)..(19)..(20)..(21): Xaa is A or G
  MOD_RES (22)..(23)..(24)..(25): Xaa is A or G or is absent
AXAXELHEELRVTAKKXXXXXXXXXIKRVQVPRHHVRSPQXK

SEQ ID NO: 18069 - protein, 38 aa, Artificial Sequence
  GFR-binding peptide
  MOD_RES (35)..(35): Xaa is C or S
  MOD_RES (11)..(12)..(13)..(14)..(15): Xaa is A or G
  MOD_RES (16)..(17)..(18)..(19): Xaa is A or G or is absent
HDELTVTAKKXXXXXXXXXIKRVQVPRLQVQTPRXQVN

SEQ ID NO: 18070 - protein, 37 aa, Artificial Sequence
  GFR-binding peptide
  MOD_RES (1)..(35): Xaa is C or S
XKNHQLFVQVEKHQGQHPKIRVKAMKVSREETPVXEL

SEQ ID NO: 18071 - protein, 40 aa, Artificial Sequence
  GFR-binding peptide
  MOD_RES (2)..(4)..(38): Xaa is C or S
  MOD_RES (16)..(17)..(18)..(19)..(20): Xaa is A or G
  MOD_RES (21)..(22)..(23)..(24): Xaa is A or G or is absent
RXEXQSHEELVQVEKXXXXXXXXXVKAMKVSRQGTPVXEL

SEQ ID NO: 18072 - protein, 37 aa, Artificial Sequence
  GFR-binding peptide
  MOD_RES (33)..(33): Xaa is C or S
  MOD_RES (11)..(12)..(13)..(14)..(15): Xaa is A or G
  MOD_RES (16)..(17)..(18)..(19): Xaa is A or G or is absent
NHQLFVQVEKXXXXXXXXXVKAMKVSREETPVXELGE

SEQ ID NO: 18073 - protein, 35 aa, Artificial Sequence
  GFR-binding peptide
  MOD_RES (34)..(34): Xaa is C or S
KNHQLFSMEGIHQGQHPKIRMIQMTINSEETPVXE

SEQ ID NO: 18074 - protein, 41 aa, Artificial Sequence
  GFR-binding peptide
  MOD_RES (1)..(38): Xaa is C or S
XALHDELTVQVEKFIPKKRVIEVKAVKVSRLQVQTPRXQVN

SEQ ID NO: 18075 - protein, 43 aa, Artificial Sequence
  GFR-binding peptide
  MOD_RES (2)..(4)..(41): Xaa is C or S
EXKXALHDELTVTAKKFIPKKRVIEIKRVQVPRLQVQTPRXQV

SEQ ID NO: 18076 - protein, 39 aa, Artificial Sequence
  GFR-binding peptide
  MOD_RES (33)..(33): Xaa is C or S
  MOD_RES (11)..(12)..(13)..(14)..(15): Xaa is A or G
  MOD_RES (16)..(17)..(18)..(19): Xaa is A or G or is absent
NHQLFVTAKKXXXXXXXXXIKRMQVPREETPVXELGEDN

SEQ ID NO: 18077 - protein, 40 aa, Artificial Sequence
  GFR-binding peptide
  MOD_RES (1)..(3)..(37): Xaa is C or S
XEXKNHQLFVQVEKHQGQHPKIRVKAMKVSREETPVXELG

SEQ ID NO: 18078 - protein, 39 aa, Artificial Sequence
  GFR-binding peptide
  MOD_RES (1)..(35): Xaa is C or S
  MOD_RES (13)..(14)..(15)..(16)..(17): Xaa is A or G
  MOD_RES (18)..(19)..(20)..(21): Xaa is A or G or is absent
XQSHEELVQVEKXXXXXXXXXVKAMKVSRQGTPVXELGE

SEQ ID NO: 18079 - protein, 43 aa, Artificial Sequence
  GFR-binding peptide
  MOD_RES (2)..(4)..(38): Xaa is C or S
  MOD_RES (16)..(17)..(18)..(19)..(20): Xaa is A or G
  MOD_RES (21)..(22)..(23)..(24): Xaa is A or G or is absent
RXEXKNHQLFSMEGLXXXXXXXXXMIQMTINSEETPVXELGED

SEQ ID NO: 18080 - protein, 37 aa, Artificial Sequence
  GFR-binding peptide
  MOD_RES (2)..(4): Xaa is C or S
RXEXQSHEELSMEGLHQGQHPKIRMIQMTINSQGTPV

SEQ ID NO: 18081 - protein, 35 aa, Artificial Sequence
  GFR-binding peptide
  MOD_RES (1)..(35): Xaa is C or S
XQSHEELVTAKKHQGQHPKIRIKRMQVPRQGTPVX

SEQ ID NO: 18082 - protein, 38 aa, Artificial Sequence
  GFR-binding peptide
  MOD_RES (2)..(2): Xaa is C or S
KXALHDELTVQVEKFIPKKRVIEVKAVKVSRLQVQTPR

SEQ ID NO: 18083 - protein, 40 aa, Artificial Sequence
  GFR-binding peptide
  MOD_RES (2)..(39): Xaa is C or S
  MOD_RES (15)..(16)..(17)..(18)..(19): Xaa is A or G
  MOD_RES (20)..(21)..(22)..(23): Xaa is A or G or is absent
KXALHDELTSMEGLXXXXXXXXXMIQVTINSLQVQTPRXQ

SEQ ID NO: 18084 - protein, 39 aa, Artificial Sequence
  GFR-binding peptide
  MOD_RES (33)..(33): Xaa is C or S
  MOD_RES (11)..(12)..(13)..(14)..(15): Xaa is A or G
  MOD_RES (16)..(17)..(18)..(19): Xaa is A or G or is absent
SHEELSMEGIXXXXXXXXXMIQMTINSQGTPVXELGEDN

SEQ ID NO: 18085 - protein, 40 aa, Artificial Sequence
  GFR-binding peptide
  MOD_RES (2)..(4): Xaa is C or S
  MOD_RES (17)..(18)..(19)..(20)..(21): Xaa is A or G
  MOD_RES (22)..(23)..(24)..(25): Xaa is A or G or is absent
EXKXALHDELTSMEGIXXXXXXXXXMIQVTINSLQVQTPR

SEQ ID NO: 18086 - protein, 38 aa, Artificial Sequence
  GFR-binding peptide
  MOD_RES (1)..(3): Xaa is C or S
XAXELHEELRSMEGLLKPKKRVYEMIQVTINSHHVRSP

SEQ ID NO: 18087 - protein, 39 aa, Artificial Sequence
  GFR-binding peptide
  MOD_RES (34)..(34): Xaa is C or S
  MOD_RES (12)..(13)..(14)..(15)..(16): Xaa is A or G
  MOD_RES (17)..(18)..(19)..(20): Xaa is A or G or is absent
KNHQLFVTAKKXXXXXXXXXIKRMQVPREETPVXELGED

SEQ ID NO: 18088 - protein, 42 aa, Artificial Sequence
  GFR-binding peptide
  MOD_RES (1)..(3)..(37): Xaa is C or S
  MOD_RES (15)..(16)..(17)..(18)..(19): Xaa is A or G
  MOD_RES (20)..(21)..(22)..(23): Xaa is A or G or is absent
XEXQSHEELSMEGLXXXXXXXXXMIQMTINSQGTPVXELGED

SEQ ID NO: 18089 - protein, 34 aa, Artificial Sequence
  GFR-binding peptide
  MOD_RES (33)..(33): Xaa is C or S
NHQLFVQVEKHQGQHPKIRVKAMKVSREETPVXE

SEQ ID NO: 18090 - protein, 38 aa, Artificial Sequence
  GFR-binding peptide
  MOD_RES (1)..(3): Xaa is C or S
  MOD_RES (16)..(17)..(18)..(19)..(20): Xaa is A or G
  MOD_RES (21)..(22)..(23)..(24): Xaa is A or G or is absent
XKXALHDELTSMEGIXXXXXXXXXMIQVTINSLQVQTP

SEQ ID NO: 18091 - protein, 35 aa, Artificial Sequence
  GFR-binding peptide
  MOD_RES (2)..(2): Xaa is C or S
  MOD_RES (14)..(15)..(16)..(17)..(18): Xaa is A or G
  MOD_RES (19)..(20)..(21)..(22): Xaa is A or G or is absent
EXQSHEELVTAKKXXXXXXXXXIKRMQVPRQGTPV

SEQ ID NO: 18092 - protein, 36 aa, Artificial Sequence
  GFR-binding peptide
ELHEELRVTAKKLKPKKRVYEIKRVQVPRHHVRSPQ

SEQ ID NO: 18093 - protein, 36 aa, Artificial Sequence
  GFR-binding peptide
  MOD_RES (1)..(1): Xaa is C or S
XELHEELRVTAKKLKPKKRVYEIKRVQVPRHHVRSP

SEQ ID NO: 18094 - protein, 38 aa, Artificial Sequence
  GFR-binding peptide
  MOD_RES (1)..(35): Xaa is C or S
  MOD_RES (13)..(14)..(15)..(16)..(17): Xaa is A or G
  MOD_RES (18)..(19)..(20)..(21): Xaa is A or G or is absent
XKNHQLFVTAKKXXXXXXXXXIKRMQVPREETPVXELG

SEQ ID NO: 18095 - protein, 33 aa, Artificial Sequence
  GFR-binding peptide
HEELRVTAKKLKPKKRVYEIKRVQVPRHHVRSP

SEQ ID NO: 18096 - protein, 39 aa, Artificial Sequence
  GFR-binding peptide
  MOD_RES (34)..(34): Xaa is C or S
  MOD_RES (12)..(13)..(14)..(15)..(16): Xaa is A or G
  MOD_RES (17)..(18)..(19)..(20): Xaa is A or G or is absent
KNHQLFSMEGIXXXXXXXXXMIQMTINSEETPVXELGED

SEQ ID NO: 18097 - protein, 35 aa, Artificial Sequence
  GFR-binding peptide
  MOD_RES (33)..(33): Xaa is C or S
SHEELVQVEKHQGQHPKIRVKAMKVSRQGTPVXEL

SEQ ID NO: 18098 - protein, 32 aa, Artificial Sequence
  GFR-binding peptide
  MOD_RES (11)..(12)..(13)..(14)..(15): Xaa is A or G
  MOD_RES (16)..(17)..(18)..(19): Xaa is A or G or is absent
SHEELSMEGIXXXXXXXXXMIQMTINSQGTPV

SEQ ID NO: 18099 - protein, 36 aa, Artificial Sequence
  GFR-binding peptide
  MOD_RES (35)..(35): Xaa is C or S
HDELTVTAKKFIPKKRVIEIKRVQVPRLQVQTPRXQ

SEQ ID NO: 18100 - protein, 34 aa, Artificial Sequence
  GFR-binding peptide
  MOD_RES (34)..(34): Xaa is C or S
KNHQLFVTAKKHQGQHPKIRIKRMQVPREETPVX

SEQ ID NO: 18101 - protein, 35 aa, Artificial Sequence
  GFR-binding peptide
  MOD_RES (1)..(1): Xaa is C or S
  MOD_RES (14)..(15)..(16)..(17)..(18): Xaa is A or G
  MOD_RES (19)..(20)..(21)..(22): Xaa is A or G or is absent
XELHEELRVTAKKXXXXXXXXXIKRVQVPRHHVRS

SEQ ID NO: 18102 - protein, 36 aa, Artificial Sequence
  GFR-binding peptide
ALHDELTSMEGLFIPKKRVIEMIQVTINSLQVQTPR

SEQ ID NO: 18103 - protein, 44 aa, Artificial Sequence
  GFR-binding peptide
  MOD_RES (2)..(4)..(41): Xaa is C or S
EXKXALHDELTVQVEKFIPKKRVIEVKAVKVSRLQVQTPRXQVN

SEQ ID NO: 18104 - protein, 37 aa, Artificial Sequence
  GFR-binding peptide
  MOD_RES (33)..(33): Xaa is C or S
  MOD_RES (11)..(12)..(13)..(14)..(15): Xaa is A or G
  MOD_RES (16)..(17)..(18)..(19): Xaa is A or G or is absent
SHEELVTAKKXXXXXXXXXIKRMQVPRQGTPVXELGE

SEQ ID NO: 18105 - protein, 43 aa, Artificial Sequence
  GFR-binding peptide
  MOD_RES (2)..(39): Xaa is C or S
  MOD_RES (15)..(16)..(17)..(18)..(19): Xaa is A or G
  MOD_RES (20)..(21)..(22)..(23): Xaa is A or G or is absent
KXALHDELTSMEGIXXXXXXXXXMIQVTINSLQVQTPRXQVNR

SEQ ID NO: 18106 - protein, 36 aa, Artificial Sequence
  GFR-binding peptide
  MOD_RES (1)..(35): Xaa is C or S
  MOD_RES (13)..(14)..(15)..(16)..(17): Xaa is A or G
  MOD_RES (18)..(19)..(20)..(21): Xaa is A or G or is absent
XQSHEELVQVEKXXXXXXXXXVKAMKVSRQGTPVXE

SEQ ID NO: 18107 - protein, 44 aa, Artificial Sequence
  GFR-binding peptide
  MOD_RES (2)..(4)..(41): Xaa is C or S
AXAXELHEELRSMEGLLKPKKRVYEMIQVTINSHHVRSPQXKVS

SEQ ID NO: 18108 - protein, 40 aa, Artificial Sequence
  GFR-binding peptide
  MOD_RES (37)..(37): Xaa is C or S
ALHDELTVQVEKFIPKKRVIEVKAVKVSRLQVQTPRXQVN

SEQ ID NO: 18109 - protein, 37 aa, Artificial Sequence
  GFR-binding peptide
  MOD_RES (1)..(35): Xaa is C or S
  MOD_RES (13)..(14)..(15)..(16)..(17): Xaa is A or G
  MOD_RES (18)..(19)..(20)..(21): Xaa is A or G or is absent
XQSHEELSMEGLXXXXXXXXXMIQMTINSQGTPVXEL

SEQ ID NO: 18110 - protein, 38 aa, Artificial Sequence
  GFR-binding peptide
  MOD_RES (36)..(36): Xaa is C or S
  MOD_RES (12)..(13)..(14)..(15)..(16): Xaa is A or G
  MOD_RES (17)..(18)..(19)..(20): Xaa is A or G or is absent
LHDELTVQVEKXXXXXXXXXVKAVKVSRLQVQTPRXQV

SEQ ID NO: 18111 - protein, 38 aa, Artificial Sequence
  GFR-binding peptide
  MOD_RES (1)..(3)..(37): Xaa is C or S
XEXQSHEELSMEGLHQGQHPKIRMIQMTINSQGTPVXE

SEQ ID NO: 18112 - protein, 36 aa, Artificial Sequence
  GFR-binding peptide
  MOD_RES (1)..(3): Xaa is C or S
  MOD_RES (15)..(16)..(17)..(18)..(19): Xaa is A or G
  MOD_RES (20)..(21)..(22)..(23): Xaa is A or G or is absent
XEXKNHQLFVQVEKXXXXXXXXXVKAMKVSREETPV

SEQ ID NO: 18113 - protein, 41 aa, Artificial Sequence
  GFR-binding peptide
  MOD_RES (2)..(39): Xaa is C or S
AXELHEELRVTAKKLKPKKRVYEIKRVQVPRHHVRSPQXKV

SEQ ID NO: 18114 - protein, 39 aa, Artificial Sequence
  GFR-binding peptide
  MOD_RES (1)..(38): Xaa is C or S
XALHDELTVTAKKFIPKKRVIEIKRVQVPRLQVQTPRXQ

SEQ ID NO: 18115 - protein, 36 aa, Artificial Sequence
  GFR-binding peptide
  MOD_RES (35)..(35): Xaa is C or S
  MOD_RES (11)..(12)..(13)..(14)..(15): Xaa is A or G
  MOD_RES (16)..(17)..(18)..(19): Xaa is A or G or is absent
HEELRSMEGIXXXXXXXXXMIQVTINSHHVRSPQXK

SEQ ID NO: 18116 - protein, 41 aa, Artificial Sequence
  GFR-binding peptide
  MOD_RES (2)..(4)..(41): Xaa is C or S
AXAXELHEELRSMEGLLKPKKRVYEMIQVTINSHHVRSPQX

SEQ ID NO: 18117 - protein, 44 aa, Artificial Sequence
  GFR-binding peptide
  MOD_RES (1)..(3)..(40): Xaa is C or S
  MOD_RES (16)..(17)..(18)..(19)..(20): Xaa is A or G
  MOD_RES (21)..(22)..(23)..(24): Xaa is A or G or is absent
XAXELHEELRVTAKKXXXXXXXXXIKRVQVPRHHVRSPQXKVSS

SEQ ID NO: 18118 - protein, 39 aa, Artificial Sequence
  GFR-binding peptide
  MOD_RES (2)..(36): Xaa is C or S
  MOD_RES (14)..(15)..(16)..(17)..(18): Xaa is A or G
  MOD_RES (19)..(20)..(21)..(22): Xaa is A or G or is absent
EXQSHEELVTAKKXXXXXXXXXIKRMQVPRQGTPVXELG

SEQ ID NO: 18119 - protein, 38 aa, Artificial Sequence
  GFR-binding peptide
  MOD_RES (33)..(33): Xaa is C or S
NHQLFVQVEKHQGQHPKIRVKAMKVSREETPVXELGED

SEQ ID NO: 18120 - protein, 39 aa, Artificial Sequence
  GFR-binding peptide
  MOD_RES (33)..(33): Xaa is C or S
SHEELVTAKKHQGQHPKIRIKRMQVPRQGTPVXELGEDN

SEQ ID NO: 18121 - protein, 43 aa, Artificial Sequence
  GFR-binding peptide
  MOD_RES (2)..(4)..(41): Xaa is C or S
AXAXELHEELRVQVEKLKPKKRVYEVKAVKVSRHHVRSPQXKV

SEQ ID NO: 18122 - protein, 38 aa, Artificial Sequence
  GFR-binding peptide
  MOD_RES (2)..(4)..(38): Xaa is C or S
  MOD_RES (16)..(17)..(18)..(19)..(20): Xaa is A or G
  MOD_RES (21)..(22)..(23)..(24): Xaa is A or G or is absent
RXEXKNHQLFSMEGIXXXXXXXXXMIQMTINSEETPVX

SEQ ID NO: 18123 - protein, 34 aa, Artificial Sequence
  GFR-binding peptide
  MOD_RES (33)..(33): Xaa is C or S
SHEELVTAKKHQGQHPKIRIKRMQVPRQGTPVXE

SEQ ID NO: 18124 - protein, 44 aa, Artificial Sequence
  GFR-binding peptide
  MOD_RES (2)..(4)..(41): Xaa is C or S
  MOD_RES (17)..(18)..(19)..(20)..(21): Xaa is A or G
  MOD_RES (22)..(23)..(24)..(25): Xaa is A or G or is absent
AXAXELHEELRSMEGIXXXXXXXXXMIQVTINSHHVRSPQXKVS

SEQ ID NO: 18125 - protein, 45 aa, Artificial Sequence
  GFR-binding peptide
  MOD_RES (2)..(4)..(41): Xaa is C or S
AXAXELHEELRVQVEKLKPKKRVYEVKAVKVSRHHVRSPQXKVSS

SEQ ID NO: 18126 - protein, 35 aa, Artificial Sequence
  GFR-binding peptide
  MOD_RES (33)..(33): Xaa is C or S
  MOD_RES (11)..(12)..(13)..(14)..(15): Xaa is A or G
  MOD_RES (16)..(17)..(18)..(19): Xaa is A or G or is absent
SHEELVTAKKXXXXXXXXXIKRMQVPRQGTPVXEL

SEQ ID NO: 18127 - protein, 37 aa, Artificial Sequence
  GFR-binding peptide
  MOD_RES (1)..(3): Xaa is C or S
XAXELHEELRSMEGILKPKKRVYEMIQVTINSHHVRS

SEQ ID NO: 18128 - protein, 40 aa, Artificial Sequence
  GFR-binding peptide
  MOD_RES (2)..(4)..(38): Xaa is C or S
  MOD_RES (16)..(17)..(18)..(19)..(20): Xaa is A or G
  MOD_RES (21)..(22)..(23)..(24): Xaa is A or G or is absent
RXEXKNHQLFSMEGIXXXXXXXXXMIQMTINSEETPVXEL

SEQ ID NO: 18129 - protein, 36 aa, Artificial Sequence
  GFR-binding peptide
  MOD_RES (1)..(1): Xaa is C or S
  MOD_RES (14)..(15)..(16)..(17)..(18): Xaa is A or G
  MOD_RES (19)..(20)..(21)..(22): Xaa is A or G or is absent
XALHDELTVTAKKXXXXXXXXXIKRVQVPRLQVQTP

SEQ ID NO: 18130 - protein, 44 aa, Artificial Sequence
  GFR-binding peptide
  MOD_RES (2)..(4)..(38): Xaa is C or S
  MOD_RES (16)..(17)..(18)..(19)..(20): Xaa is A or G
  MOD_RES (21)..(22)..(23)..(24): Xaa is A or G or is absent
RXEXKNHQLFSMEGIXXXXXXXXXMIQMTINSEETPVXELGEDN

SEQ ID NO: 18131 - protein, 40 aa, Artificial Sequence
  GFR-binding peptide
  MOD_RES (2)..(39): Xaa is C or S
KXALHDELTVTAKKFIPKKRVIEIKRVQVPRLQVQTPRXQ

SEQ ID NO: 18132 - protein, 36 aa, Artificial Sequence
  GFR-binding peptide
  MOD_RES (2)..(36): Xaa is C or S
  MOD_RES (14)..(15)..(16)..(17)..(18): Xaa is A or G
  MOD_RES (19)..(20)..(21)..(22): Xaa is A or G or is absent
EXKNHQLFVQVEKXXXXXXXXXVKAMKVSREETPVX

SEQ ID NO: 18133 - protein, 40 aa, Artificial Sequence
  GFR-binding peptide
  MOD_RES (34)..(34): Xaa is C or S
KNHQLFSMEGLHQGQHPKIRMIQMTINSEETPVXELGEDN

SEQ ID NO: 18134 - protein, 37 aa, Artificial Sequence
  GFR-binding peptide
  MOD_RES (33)..(33): Xaa is C or S
SHEELVQVEKHQGQHPKIRVKAMKVSRQGTPVXELGE

SEQ ID NO: 18135 - protein, 40 aa, Artificial Sequence
  GFR-binding peptide
  MOD_RES (2)..(36): Xaa is C or S
EXQSHEELSMEGIHQGQHPKIRMIQMTINSQGTPVXELGE

SEQ ID NO: 18136 - protein, 41 aa, Artificial Sequence
  GFR-binding peptide
  MOD_RES (2)..(36): Xaa is C or S
EXQSHEELVQVEKHQGQHPKIRVKAMKVSRQGTPVXELGED

SEQ ID NO: 18137 - protein, 41 aa, Artificial Sequence
  GFR-binding peptide
  MOD_RES (1)..(38): Xaa is C or S
XALHDELTSMEGLFIPKKRVIEMIQVTINSLQVQTPRXQVN

SEQ ID NO: 18138 - protein, 43 aa, Artificial Sequence
  GFR-binding peptide
  MOD_RES (1)..(3)..(40): Xaa is C or S
  MOD_RES (16)..(17)..(18)..(19)..(20): Xaa is A or G
  MOD_RES (21)..(22)..(23)..(24): Xaa is A or G or is absent
XKXALHDELTSMEGIXXXXXXXXXMIQVTINSLQVQTPRXQVN

SEQ ID NO: 18139 - protein, 41 aa, Artificial Sequence
  GFR-binding peptide
  MOD_RES (1)..(38): Xaa is C or S
  MOD_RES (14)..(15)..(16)..(17)..(18): Xaa is A or G
  MOD_RES (19)..(20)..(21)..(22): Xaa is A or G or is absent
XALHDELTSMEGLXXXXXXXXXMIQVTINSLQVQTPRXQVN

SEQ ID NO: 18140 - protein, 43 aa, Artificial Sequence
  GFR-binding peptide
  MOD_RES (2)..(4)..(38): Xaa is C or S
  MOD_RES (16)..(17)..(18)..(19)..(20): Xaa is A or G
  MOD_RES (21)..(22)..(23)..(24): Xaa is A or G or is absent
RXEXQSHEELVQVEKXXXXXXXXXVKAMKVSRQGTPVXELGED

SEQ ID NO: 18141 - protein, 32 aa, Artificial Sequence
  GFR-binding peptide
SHEELSMEGLHQGQHPKIRMIQMTINSQGTPV

SEQ ID NO: 18142 - protein, 36 aa, Artificial Sequence
  GFR-binding peptide
  MOD_RES (36)..(36): Xaa is C or S
  MOD_RES (12)..(13)..(14)..(15)..(16): Xaa is A or G
  MOD_RES (17)..(18)..(19)..(20): Xaa is A or G or is absent
LHDELTVQVEKXXXXXXXXXVKAVKVSRLQVQTPRX

SEQ ID NO: 18143 - protein, 33 aa, Artificial Sequence
  GFR-binding peptide
  MOD_RES (11)..(12)..(13)..(14)..(15): Xaa is A or G
  MOD_RES (16)..(17)..(18)..(19): Xaa is A or G or is absent
HEELRSMEGLXXXXXXXXXMIQVTINSHHVRSP

SEQ ID NO: 18144 - protein, 38 aa, Artificial Sequence
  GFR-binding peptide
  MOD_RES (34)..(34): Xaa is C or S
  MOD_RES (12)..(13)..(14)..(15)..(16): Xaa is A or G
  MOD_RES (17)..(18)..(19)..(20): Xaa is A or G or is absent
KNHQLFVQVEKXXXXXXXXXVKAMKVSREETPVXELGE

SEQ ID NO: 18145 - protein, 44 aa, Artificial Sequence
  GFR-binding peptide
  MOD_RES (2)..(4)..(38): Xaa is C or S
RXEXKNHQLFSMEGIHQGQHPKIRMIQMTINSEETPVXELGEDN

SEQ ID NO: 18146 - protein, 36 aa, Artificial Sequence
  GFR-binding peptide
  MOD_RES (1)..(1): Xaa is C or S
XALHDELTSMEGLFIPKKRVIEMIQVTINSLQVQTP

SEQ ID NO: 18147 - protein, 40 aa, Artificial Sequence
  GFR-binding peptide
  MOD_RES (1)..(35): Xaa is C or S
  MOD_RES (13)..(14)..(15)..(16)..(17): Xaa is A or G
  MOD_RES (18)..(19)..(20)..(21): Xaa is A or G or is absent
XKNHQLFSMEGIXXXXXXXXXMIQMTINSEETPVXELGED

SEQ ID NO: 18148 - protein, 42 aa, Artificial Sequence
  GFR-binding peptide
  MOD_RES (2)..(36): Xaa is C or S
EXQSHEELSMEGIHQGQHPKIRMIQMTINSQGTPVXELGEDN

SEQ ID NO: 18149 - protein, 40 aa, Artificial Sequence
  GFR-binding peptide
  MOD_RES (36)..(36): Xaa is C or S
  MOD_RES (12)..(13)..(14)..(15)..(16): Xaa is A or G
  MOD_RES (17)..(18)..(19)..(20): Xaa is A or G or is absent
LHDELTVQVEKXXXXXXXXXVKAVKVSRLQVQTPRXQVNR

SEQ ID NO: 18150 - protein, 39 aa, Artificial Sequence
  GFR-binding peptide
  MOD_RES (1)..(3): Xaa is C or S
  MOD_RES (16)..(17)..(18)..(19)..(20): Xaa is A or G
  MOD_RES (21)..(22)..(23)..(24): Xaa is A or G or is absent
XKXALHDELTSMEGLXXXXXXXXXMIQVTINSLQVQTPR

SEQ ID NO: 18151 - protein, 38 aa, Artificial Sequence
  GFR-binding peptide
  MOD_RES (1)..(3): Xaa is C or S
XKXALHDELTSMEGLFIPKKRVIEMIQVTINSLQVQTP

SEQ ID NO: 18152 - protein, 39 aa, Artificial Sequence
  GFR-binding peptide
  MOD_RES (1)..(3)..(37): Xaa is C or S
  MOD_RES (15)..(16)..(17)..(18)..(19): Xaa is A or G
  MOD_RES (20)..(21)..(22)..(23): Xaa is A or G or is absent
XEXQSHEELVTAKKXXXXXXXXXIKRMQVPRQGTPVXEL

SEQ ID NO: 18153 - protein, 43 aa, Artificial Sequence
  GFR-binding peptide
  MOD_RES (2)..(4)..(38): Xaa is C or S
  MOD_RES (16)..(17)..(18)..(19)..(20): Xaa is A or G
  MOD_RES (21)..(22)..(23)..(24): Xaa is A or G or is absent
RXEXQSHEELVTAKKXXXXXXXXXIKRMQVPRQGTPVXELGED

SEQ ID NO: 18154 - protein, 40 aa, Artificial Sequence
  GFR-binding peptide
  MOD_RES (1)..(3)..(40): Xaa is C or S
  MOD_RES (16)..(17)..(18)..(19)..(20): Xaa is A or G
  MOD_RES (21)..(22)..(23)..(24): Xaa is A or G or is absent
XKXALHDELTSMEGIXXXXXXXXXMIQVTINSLQVQTPRX

SEQ ID NO: 18155 - protein, 44 aa, Artificial Sequence
  GFR-binding peptide
  MOD_RES (1)..(3)..(40): Xaa is C or S
  MOD_RES (16)..(17)..(18)..(19)..(20): Xaa is A or G
  MOD_RES (21)..(22)..(23)..(24): Xaa is A or G or is absent
XAXELHEELRVQVEKXXXXXXXXXVKAVKVSRHHVRSPQXKVSS

SEQ ID NO: 18156 - protein, 38 aa, Artificial Sequence
  GFR-binding peptide
  MOD_RES (33)..(33): Xaa is C or S
  MOD_RES (11)..(12)..(13)..(14)..(15): Xaa is A or G
  MOD_RES (16)..(17)..(18)..(19): Xaa is A or G or is absent
SHEELVQVEKXXXXXXXXXVKAMKVSRQGTPVXELGED

SEQ ID NO: 18157 - protein, 36 aa, Artificial Sequence
  GFR-binding peptide
  MOD_RES (1)..(35): Xaa is C or S
  MOD_RES (13)..(14)..(15)..(16)..(17): Xaa is A or G
  MOD_RES (18)..(19)..(20)..(21): Xaa is A or G or is absent
XKNHQLFVTAKKXXXXXXXXXIKRMQVPREETPVXE

SEQ ID NO: 18158 - protein, 40 aa, Artificial Sequence
  GFR-binding peptide
  MOD_RES (1)..(3)..(37): Xaa is C or S
XEXQSHEELSMEGIHQGQHPKIRMIQMTINSQGTPVXELG

SEQ ID NO: 18159 - protein, 33 aa, Artificial Sequence
  GFR-binding peptide
  MOD_RES (12)..(13)..(14)..(15)..(16): Xaa is A or G
  MOD_RES (17)..(18)..(19)..(20): Xaa is A or G or is absent
LHDELTSMEGLXXXXXXXXXMIQVTINSLQVQT

SEQ ID NO: 18160 - protein, 43 aa, Artificial Sequence
  GFR-binding peptide
  MOD_RES (2)..(4)..(38): Xaa is C or S
RXEXQSHEELSMEGIHQGQHPKIRMIQMTINSQGTPVXELGED

SEQ ID NO: 18161 - protein, 40 aa, Artificial Sequence
  GFR-binding peptide
  MOD_RES (34)..(34): Xaa is C or S
  MOD_RES (12)..(13)..(14)..(15)..(16): Xaa is A or G
  MOD_RES (17)..(18)..(19)..(20): Xaa is A or G or is absent
QSHEELVTAKKXXXXXXXXXIKRMQVPRQGTPVXELGEDN

SEQ ID NO: 18162 - protein, 37 aa, Artificial Sequence
  GFR-binding peptide
  MOD_RES (36)..(36): Xaa is C or S
LHEELRVQVEKLKPKKRVYEVKAVKVSRHHVRSPQXK

SEQ ID NO: 18163 - protein, 40 aa, Artificial Sequence
  GFR-binding peptide
  MOD_RES (34)..(34): Xaa is C or S
  MOD_RES (12)..(13)..(14)..(15)..(16): Xaa is A or G
  MOD_RES (17)..(18)..(19)..(20): Xaa is A or G or is absent
QSHEELSMEGIXXXXXXXXXMIQMTINSQGTPVXELGEDN

SEQ ID NO: 18164 - protein, 37 aa, Artificial Sequence
  GFR-binding peptide
  MOD_RES (2)..(36): Xaa is C or S
  MOD_RES (14)..(15)..(16)..(17)..(18): Xaa is A or G
  MOD_RES (19)..(20)..(21)..(22): Xaa is A or G or is absent
EXKNHQLFSMEGIXXXXXXXXXMIQMTINSEETPVXE

SEQ ID NO: 18165 - protein, 41 aa, Artificial Sequence
  GFR-binding peptide
  MOD_RES (1)..(35): Xaa is C or S
  MOD_RES (13)..(14)..(15)..(16)..(17): Xaa is A or G
  MOD_RES (18)..(19)..(20)..(21): Xaa is A or G or is absent
XQSHEELSMEGLXXXXXXXXXMIQMTINSQGTPVXELGEDN

SEQ ID NO: 18166 - protein, 43 aa, Artificial Sequence
  GFR-binding peptide
  MOD_RES (1)..(3)..(40): Xaa is C or S
XAXELHEELRVQVEKLKPKKRVYEVKAVKVSRHHVRSPQXKVS

SEQ ID NO: 18167 - protein, 38 aa, Artificial Sequence
  GFR-binding peptide
  MOD_RES (35)..(35): Xaa is C or S
HDELTSMEGIFIPKKRVIEMIQVTINSLQVQTPRXQVN

SEQ ID NO: 18168 - protein, 37 aa, Artificial Sequence
  GFR-binding peptide
  MOD_RES (1)..(1): Xaa is C or S
  MOD_RES (14)..(15)..(16)..(17)..(18): Xaa is A or G
  MOD_RES (19)..(20)..(21)..(22): Xaa is A or G or is absent
XALHDELTVTAKKXXXXXXXXXIKRVQVPRLQVQTPR

SEQ ID NO: 18169 - protein, 36 aa, Artificial Sequence
  GFR-binding peptide
  MOD_RES (1)..(35): Xaa is C or S
  MOD_RES (13)..(14)..(15)..(16)..(17): Xaa is A or G
  MOD_RES (18)..(19)..(20)..(21): Xaa is A or G or is absent
XQSHEELVTAKKXXXXXXXXXIKRMQVPRQGTPVXE

SEQ ID NO: 18170 - protein, 36 aa, Artificial Sequence
  GFR-binding peptide
  MOD_RES (2)..(36): Xaa is C or S
  MOD_RES (14)..(15)..(16)..(17)..(18): Xaa is A or G
  MOD_RES (19)..(20)..(21)..(22): Xaa is A or G or is absent
EXKNHQLFSMEGLXXXXXXXXXMIQMTINSEETPVX

SEQ ID NO: 18171 - protein, 35 aa, Artificial Sequence
  GFR-binding peptide
  MOD_RES (1)..(1): Xaa is C or S
XELHEELRSMEGLLKPKKRVYEMIQVTINSHHVRS

SEQ ID NO: 18172 - protein, 40 aa, Artificial Sequence
  GFR-binding peptide
  MOD_RES (2)..(4)..(38): Xaa is C or S
RXEXKNHQLFSMEGIHQGQHPKIRMIQMTINSEETPVXEL

SEQ ID NO: 18173 - protein, 41 aa, Artificial Sequence
  GFR-binding peptide
  MOD_RES (1)..(3)..(37): Xaa is C or S
XEXQSHEELSMEGIHQGQHPKIRMIQMTINSQGTPVXELGE

SEQ ID NO: 18174 - protein, 38 aa, Artificial Sequence
  GFR-binding peptide
  MOD_RES (2)..(4): Xaa is C or S
  MOD_RES (17)..(18)..(19)..(20)..(21): Xaa is A or G
  MOD_RES (22)..(23)..(24)..(25): Xaa is A or G or is absent
EXKXALHDELTSMEGLXXXXXXXXXMIQVTINSLQVQT

SEQ ID NO: 18175 - protein, 39 aa, Artificial Sequence
  GFR-binding peptide
  MOD_RES (35)..(35): Xaa is C or S
HDELTSMEGIFIPKKRVIEMIQVTINSLQVQTPRXQVNR

SEQ ID NO: 18176 - protein, 40 aa, Artificial Sequence
  GFR-binding peptide
  MOD_RES (2)..(39): Xaa is C or S
KXALHDELTSMEGLFIPKKRVIEMIQVTINSLQVQTPRXQ

SEQ ID NO: 18177 - protein, 38 aa, Artificial Sequence
  GFR-binding peptide
  MOD_RES (2)..(2): Xaa is C or S
AXELHEELRSMEGILKPKKRVYEMIQVTINSHHVRSPQ

SEQ ID NO: 18178 - protein, 38 aa, Artificial Sequence
  GFR-binding peptide
  MOD_RES (1)..(3)..(37): Xaa is C or S
  MOD_RES (15)..(16)..(17)..(18)..(19): Xaa is A or G
  MOD_RES (20)..(21)..(22)..(23): Xaa is A or G or is absent
XEXQSHEELSMEGIXXXXXXXXXMIQMTINSQGTPVXE

SEQ ID NO: 18179 - protein, 39 aa, Artificial Sequence
  GFR-binding peptide
  MOD_RES (1)..(38): Xaa is C or S
  MOD_RES (14)..(15)..(16)..(17)..(18): Xaa is A or G
  MOD_RES (19)..(20)..(21)..(22): Xaa is A or G or is absent
XALHDELTVQVEKXXXXXXXXXVKAVKVSRLQVQTPRXQ

SEQ ID NO: 18180 - protein, 39 aa, Artificial Sequence
  GFR-binding peptide
  MOD_RES (2)..(4)..(38): Xaa is C or S
RXEXKNHQLFSMEGIHQGQHPKIRMIQMTINSEETPVXE

SEQ ID NO: 18181 - protein, 35 aa, Artificial Sequence
  GFR-binding peptide
  MOD_RES (1)..(35): Xaa is C or S
  MOD_RES (13)..(14)..(15)..(16)..(17): Xaa is A or G
  MOD_RES (18)..(19)..(20)..(21): Xaa is A or G or is absent
XKNHQLFSMEGIXXXXXXXXXMIQMTINSEETPVX

SEQ ID NO: 18182 - protein, 40 aa, Artificial Sequence
  GFR-binding peptide
  MOD_RES (37)..(37): Xaa is C or S
ELHEELRVQVEKLKPKKRVYEVKAVKVSRHHVRSPQXKVS

SEQ ID NO: 18183 - protein, 39 aa, Artificial Sequence
  GFR-binding peptide
  MOD_RES (35)..(35): Xaa is C or S
HEELRSMEGILKPKKRVYEMIQVTINSHHVRSPQXKVSS

SEQ ID NO: 18184 - protein, 42 aa, Artificial Sequence
  GFR-binding peptide
  MOD_RES (1)..(3)..(37): Xaa is C or S
XEXKNHQLFSMEGIHQGQHPKIRMIQMTINSEETPVXELGED

SEQ ID NO: 18185 - protein, 39 aa, Artificial Sequence
  GFR-binding peptide
  MOD_RES (35)..(35): Xaa is C or S
HDELTVTAKKFIPKKRVIEIKRVQVPRLQVQTPRXQVNR

SEQ ID NO: 18186 - protein, 40 aa, Artificial Sequence
  GFR-binding peptide
  MOD_RES (36)..(36): Xaa is C or S
LHEELRSMEGLLKPKKRVYEMIQVTINSHHVRSPQXKVSS

SEQ ID NO: 18187 - protein, 40 aa, Artificial Sequence
  GFR-binding peptide
  MOD_RES (1)..(3)..(40): Xaa is C or S
XKXALHDELTSMEGLFIPKKRVIEMIQVTINSLQVQTPRX

SEQ ID NO: 18188 - protein, 38 aa, Artificial Sequence
  GFR-binding peptide
  MOD_RES (1)..(38): Xaa is C or S
  MOD_RES (14)..(15)..(16)..(17)..(18): Xaa is A or G
  MOD_RES (19)..(20)..(21)..(22): Xaa is A or G or is absent
XALHDELTSMEGLXXXXXXXXXMIQVTINSLQVQTPRX

SEQ ID NO: 18189 - protein, 41 aa, Artificial Sequence
  GFR-binding peptide
  MOD_RES (2)..(4)..(41): Xaa is C or S
EXKXALHDELTSMEGLFIPKKRVIEMIQVTINSLQVQTPRX

SEQ ID NO: 18190 - protein, 37 aa, Artificial Sequence
  GFR-binding peptide
  MOD_RES (1)..(3)..(37): Xaa is C or S
  MOD_RES (15)..(16)..(17)..(18)..(19): Xaa is A or G
  MOD_RES (20)..(21)..(22)..(23): Xaa is A or G or is absent
XEXQSHEELSMEGIXXXXXXXXXMIQMTINSQGTPVX

SEQ ID NO: 18191 - protein, 42 aa, Artificial Sequence
  GFR-binding peptide
  MOD_RES (2)..(4)..(38): Xaa is C or S
  MOD_RES (16)..(17)..(18)..(19)..(20): Xaa is A or G
  MOD_RES (21)..(22)..(23)..(24): Xaa is A or G or is absent
RXEXQSHEELSMEGLXXXXXXXXXMIQMTINSQGTPVXELGE

SEQ ID NO: 18192 - protein, 37 aa, Artificial Sequence
  GFR-binding peptide
  MOD_RES (37)..(37): Xaa is C or S
ALHDELTSMEGLFIPKKRVIEMIQVTINSLQVQTPRX

SEQ ID NO: 18193 - protein, 33 aa, Artificial Sequence
  GFR-binding peptide
  MOD_RES (12)..(13)..(14)..(15)..(16): Xaa is A or G
  MOD_RES (17)..(18)..(19)..(20): Xaa is A or G or is absent
KNHQLFSMEGLXXXXXXXXXMIQMTINSEETPV

SEQ ID NO: 18194 - protein, 42 aa, Artificial Sequence
  GFR-binding peptide
  MOD_RES (2)..(36): Xaa is C or S
EXKNHQLFVTAKKHQGQHPKIRIKRMQVPREETPVXELGEDN

SEQ ID NO: 18195 - protein, 39 aa, Artificial Sequence
  GFR-binding peptide
  MOD_RES (2)..(4): Xaa is C or S
  MOD_RES (17)..(18)..(19)..(20)..(21): Xaa is A or G
  MOD_RES (22)..(23)..(24)..(25): Xaa is A or G or is absent
AXAXELHEELRSMEGLXXXXXXXXXMIQVTINSHHVRSP

SEQ ID NO: 18196 - protein, 36 aa, Artificial Sequence
  GFR-binding peptide
  MOD_RES (2)..(2): Xaa is C or S
AXELHEELRSMEGILKPKKRVYEMIQVTINSHHVRS

SEQ ID NO: 18197 - protein, 33 aa, Artificial Sequence
  GFR-binding peptide
  MOD_RES (12)..(13)..(14)..(15)..(16): Xaa is A or G
  MOD_RES (17)..(18)..(19)..(20): Xaa is A or G or is absent
LHEELRSMEGLXXXXXXXXXMIQVTINSHHVRS

SEQ ID NO: 18198 - protein, 42 aa, Artificial Sequence
  GFR-binding peptide
  MOD_RES (2)..(4)..(41): Xaa is C or S
EXKXALHDELTVTAKKFIPKKRVIEIKRVQVPRLQVQTPRXQ

SEQ ID NO: 18199 - protein, 37 aa, Artificial Sequence
  GFR-binding peptide
  MOD_RES (34)..(34): Xaa is C or S
  MOD_RES (12)..(13)..(14)..(15)..(16): Xaa is A or G
  MOD_RES (17)..(18)..(19)..(20): Xaa is A or G or is absent
KNHQLFSMEGIXXXXXXXXXMIQMTINSEETPVXELG

SEQ ID NO: 18200 - protein, 42 aa, Artificial Sequence
  GFR-binding peptide
  MOD_RES (2)..(4)..(41): Xaa is C or S
AXAXELHEELRVQVEKLKPKKRVYEVKAVKVSRHHVRSPQXK

SEQ ID NO: 18201 - protein, 44 aa, Artificial Sequence
  GFR-binding peptide
  MOD_RES (2)..(4)..(41): Xaa is C or S
  MOD_RES (17)..(18)..(19)..(20)..(21): Xaa is A or G
  MOD_RES (22)..(23)..(24)..(25): Xaa is A or G or is absent
EXKXALHDELTVTAKKXXXXXXXXXIKRVQVPRLQVQTPRXQVN

SEQ ID NO: 18202 - protein, 38 aa, Artificial Sequence
  GFR-binding peptide
  MOD_RES (37)..(37): Xaa is C or S
  MOD_RES (13)..(14)..(15)..(16)..(17): Xaa is A or G
  MOD_RES (18)..(19)..(20)..(21): Xaa is A or G or is absent
ALHDELTSMEGLXXXXXXXXXMIQVTINSLQVQTPRXQ

SEQ ID NO: 18203 - protein, 41 aa, Artificial Sequence
  GFR-binding peptide
  MOD_RES (2)..(4)..(41): Xaa is C or S
EXKXALHDELTVTAKKFIPKKRVIEIKRVQVPRLQVQTPRX

SEQ ID NO: 18204 - protein, 41 aa, Artificial Sequence
  GFR-binding peptide
  MOD_RES (1)..(3)..(40): Xaa is C or S
XKXALHDELTSMEGIFIPKKRVIEMIQVTINSLQVQTPRXQ

SEQ ID NO: 18205 - protein, 39 aa, Artificial Sequence
  GFR-binding peptide
  MOD_RES (1)..(38): Xaa is C or S
  MOD_RES (14)..(15)..(16)..(17)..(18): Xaa is A or G
  MOD_RES (19)..(20)..(21)..(22): Xaa is A or G or is absent
XELHEELRVQVEKXXXXXXXXXVKAVKVSRHHVRSPQXK

SEQ ID NO: 18206 - protein, 34 aa, Artificial Sequence
  GFR-binding peptide
  MOD_RES (1)..(1): Xaa is C or S
XKNHQLFSMEGLHQGQHPKIRMIQMTINSEETPV

SEQ ID NO: 18207 - protein, 39 aa, Artificial Sequence
  GFR-binding peptide
  MOD_RES (35)..(35): Xaa is C or S
HDELTVQVEKFIPKKRVIEVKAVKVSRLQVQTPRXQVNR

SEQ ID NO: 18208 - protein, 33 aa, Artificial Sequence
  GFR-binding peptide
KNHQLFSMEGIHQGQHPKIRMIQMTINSEETPV

SEQ ID NO: 18209 - protein, 42 aa, Artificial Sequence
  GFR-binding peptide
  MOD_RES (1)..(3)..(37): Xaa is C or S
  MOD_RES (15)..(16)..(17)..(18)..(19): Xaa is A or G
  MOD_RES (20)..(21)..(22)..(23): Xaa is A or G or is absent
XEXQSHEELSMEGIXXXXXXXXXMIQMTINSQGTPVXELGED

SEQ ID NO: 18210 - protein, 39 aa, Artificial Sequence
  GFR-binding peptide
  MOD_RES (2)..(4): Xaa is C or S
EXKXALHDELTSMEGLFIPKKRVIEMIQVTINSLQVQTP

SEQ ID NO: 18211 - protein, 34 aa, Artificial Sequence
  GFR-binding peptide
HDELTVQVEKFIPKKRVIEVKAVKVSRLQVQTPR

SEQ ID NO: 18212 - protein, 38 aa, Artificial Sequence
  GFR-binding peptide
  MOD_RES (33)..(33): Xaa is C or S
  MOD_RES (11)..(12)..(13)..(14)..(15): Xaa is A or G
  MOD_RES (16)..(17)..(18)..(19): Xaa is A or G or is absent
NHQLFSMEGIXXXXXXXXXMIQMTINSEETPVXELGED

SEQ ID NO: 18213 - protein, 42 aa, Artificial Sequence
  GFR-binding peptide
  MOD_RES (2)..(4)..(41): Xaa is C or S
  MOD_RES (17)..(18)..(19)..(20)..(21): Xaa is A or G
  MOD_RES (22)..(23)..(24)..(25): Xaa is A or G or is absent
EXKXALHDELTVQVEKXXXXXXXXXVKAVKVSRLQVQTPRXQ

SEQ ID NO: 18214 - protein, 44 aa, Artificial Sequence
  GFR-binding peptide
  MOD_RES (1)..(3)..(40): Xaa is C or S
XKXALHDELTVTAKKFIPKKRVIEIKRVQVPRLQVQTPRXQVNR

SEQ ID NO: 18215 - protein, 40 aa, Artificial Sequence
  GFR-binding peptide
  MOD_RES (1)..(3)..(40): Xaa is C or S
XAXELHEELRVQVEKLKPKKRVYEVKAVKVSRHHVRSPQX

SEQ ID NO: 18216 - protein, 34 aa, Artificial Sequence
  GFR-binding peptide
  MOD_RES (34)..(34): Xaa is C or S
KNHQLFSMEGLHQGQHPKIRMIQMTINSEETPVX

SEQ ID NO: 18217 - protein, 36 aa, Artificial Sequence
  GFR-binding peptide
  MOD_RES (1)..(3): Xaa is C or S
XEXQSHEELSMEGLHQGQHPKIRMIQMTINSQGTPV

SEQ ID NO: 18218 - protein, 38 aa, Artificial Sequence
  GFR-binding peptide
  MOD_RES (1)..(38): Xaa is C or S
XELHEELRSMEGILKPKKRVYEMIQVTINSHHVRSPQX

SEQ ID NO: 18219 - protein, 38 aa, Artificial Sequence
  GFR-binding peptide
  MOD_RES (1)..(35): Xaa is C or S
XQSHEELSMEGIHQGQHPKIRMIQMTINSQGTPVXELG

SEQ ID NO: 18220 - protein, 38 aa, Artificial Sequence
  GFR-binding peptide
  MOD_RES (37)..(37): Xaa is C or S
ELHEELRVQVEKLKPKKRVYEVKAVKVSRHHVRSPQXK

SEQ ID NO: 18221 - protein, 40 aa, Artificial Sequence
  GFR-binding peptide
  MOD_RES (1)..(3)..(37): Xaa is C or S
  MOD_RES (15)..(16)..(17)..(18)..(19): Xaa is A or G
  MOD_RES (20)..(21)..(22)..(23): Xaa is A or G or is absent
XEXKNHQLFSMEGIXXXXXXXXXMIQMTINSEETPVXELG

SEQ ID NO: 18222 - protein, 39 aa, Artificial Sequence
  GFR-binding peptide
  MOD_RES (2)..(39): Xaa is C or S
KXALHDELTVQVEKFIPKKRVIEVKAVKVSRLQVQTPRX

SEQ ID NO: 18223 - protein, 37 aa, Artificial Sequence
  GFR-binding peptide
  MOD_RES (34)..(34): Xaa is C or S
QSHEELVQVEKHQGQHPKIRVKAMKVSRQGTPVXELG

SEQ ID NO: 18224 - protein, 34 aa, Artificial Sequence
  GFR-binding peptide
  MOD_RES (33)..(33): Xaa is C or S
SHEELSMEGIHQGQHPKIRMIQMTINSQGTPVXE

SEQ ID NO: 18225 - protein, 42 aa, Artificial Sequence
  GFR-binding peptide
  MOD_RES (2)..(4)..(38): Xaa is C or S
RXEXKNHQLFVTAKKHQGQHPKIRIKRMQVPREETPVXELGE

SEQ ID NO: 18226 - protein, 39 aa, Artificial Sequence
  GFR-binding peptide
  MOD_RES (2)..(4): Xaa is C or S
EXKXALHDELTVTAKKFIPKKRVIEIKRVQVPRLQVQTP

SEQ ID NO: 18227 - protein, 36 aa, Artificial Sequence
  GFR-binding peptide
  MOD_RES (35)..(35): Xaa is C or S
  MOD_RES (11)..(12)..(13)..(14)..(15): Xaa is A or G
  MOD_RES (16)..(17)..(18)..(19): Xaa is A or G or is absent
HEELRVTAKKXXXXXXXXXIKRVQVPRHHVRSPQXK

SEQ ID NO: 18228 - protein, 40 aa, Artificial Sequence
  GFR-binding peptide
  MOD_RES (1)..(35): Xaa is C or S
XQSHEELSMEGLHQGQHPKIRMIQMTINSQGTPVXELGED

SEQ ID NO: 18229 - protein, 40 aa, Artificial Sequence
  GFR-binding peptide
  MOD_RES (36)..(36): Xaa is C or S
  MOD_RES (12)..(13)..(14)..(15)..(16): Xaa is A or G
  MOD_RES (17)..(18)..(19)..(20): Xaa is A or G or is absent
LHEELRSMEGIXXXXXXXXXMIQVTINSHHVRSPQXKVSS

SEQ ID NO: 18230 - protein, 39 aa, Artificial Sequence
  GFR-binding peptide
  MOD_RES (33)..(33): Xaa is C or S
  MOD_RES (11)..(12)..(13)..(14)..(15): Xaa is A or G
  MOD_RES (16)..(17)..(18)..(19): Xaa is A or G or is absent
NHQLFSMEGLXXXXXXXXXMIQMTINSEETPVXELGEDN

SEQ ID NO: 18231 - protein, 41 aa, Artificial Sequence
  GFR-binding peptide
  MOD_RES (1)..(3)..(40): Xaa is C or S
XAXELHEELRSMEGILKPKKRVYEMIQVTINSHHVRSPQXK

SEQ ID NO: 18232 - protein, 37 aa, Artificial Sequence
  GFR-binding peptide
  MOD_RES (1)..(35): Xaa is C or S
XQSHEELSMEGIHQGQHPKIRMIQMTINSQGTPVXEL

SEQ ID NO: 18233 - protein, 35 aa, Artificial Sequence
  GFR-binding peptide
  MOD_RES (1)..(35): Xaa is C or S
XKNHQLFSMEGLHQGQHPKIRMIQMTINSEETPVX

SEQ ID NO: 18234 - protein, 35 aa, Artificial Sequence
  GFR-binding peptide
  MOD_RES (33)..(33): Xaa is C or S
SHEELSMEGLHQGQHPKIRMIQMTINSQGTPVXEL

SEQ ID NO: 18235 - protein, 35 aa, Artificial Sequence
  GFR-binding peptide
  MOD_RES (33)..(33): Xaa is C or S
  MOD_RES (11)..(12)..(13)..(14)..(15): Xaa is A or G
  MOD_RES (16)..(17)..(18)..(19): Xaa is A or G or is absent
SHEELSMEGIXXXXXXXXXMIQMTINSQGTPVXEL

SEQ ID NO: 18236 - protein, 39 aa, Artificial Sequence
  GFR-binding peptide
  MOD_RES (2)..(36): Xaa is C or S
EXQSHEELSMEGIHQGQHPKIRMIQMTINSQGTPVXELG

SEQ ID NO: 18237 - protein, 34 aa, Artificial Sequence
  GFR-binding peptide
  MOD_RES (1)..(1): Xaa is C or S
  MOD_RES (13)..(14)..(15)..(16)..(17): Xaa is A or G
  MOD_RES (18)..(19)..(20)..(21): Xaa is A or G or is absent
XKNHQLFSMEGIXXXXXXXXXMIQMTINSEETPV

SEQ ID NO: 18238 - protein, 41 aa, Artificial Sequence
  GFR-binding peptide
  MOD_RES (1)..(35): Xaa is C or S
  MOD_RES (13)..(14)..(15)..(16)..(17): Xaa is A or G
  MOD_RES (18)..(19)..(20)..(21): Xaa is A or G or is absent
XKNHQLFSMEGIXXXXXXXXXMIQMTINSEETPVXELGEDN

SEQ ID NO: 18239 - protein, 37 aa, Artificial Sequence
  GFR-binding peptide
  MOD_RES (2)..(36): Xaa is C or S
  MOD_RES (14)..(15)..(16)..(17)..(18): Xaa is A or G
  MOD_RES (19)..(20)..(21)..(22): Xaa is A or G or is absent
EXQSHEELSMEGLXXXXXXXXXMIQMTINSQGTPVXE

SEQ ID NO: 18240 - protein, 38 aa, Artificial Sequence
  GFR-binding peptide
  MOD_RES (1)..(3)..(37): Xaa is C or S
XEXKNHQLFVTAKKHQGQHPKIRIKRMQVPREETPVXE

SEQ ID NO: 18241 - protein, 43 aa, Artificial Sequence
  GFR-binding peptide
  MOD_RES (2)..(39): Xaa is C or S
  MOD_RES (15)..(16)..(17)..(18)..(19): Xaa is A or G
  MOD_RES (20)..(21)..(22)..(23): Xaa is A or G or is absent
AXELHEELRSMEGIXXXXXXXXXMIQVTINSHHVRSPQXKVSS

SEQ ID NO: 18242 - protein, 38 aa, Artificial Sequence
  GFR-binding peptide
  MOD_RES (33)..(33): Xaa is C or S
NHQLFSMEGIHQGQHPKIRMIQMTINSEETPVXELGED

SEQ ID NO: 18243 - protein, 42 aa, Artificial Sequence
  GFR-binding peptide
  MOD_RES (1)..(3)..(40): Xaa is C or S
  MOD_RES (16)..(17)..(18)..(19)..(20): Xaa is A or G
  MOD_RES (21)..(22)..(23)..(24): Xaa is A or G or is absent
XKXALHDELTVQVEKXXXXXXXXXVKAVKVSRLQVQTPRXQV

SEQ ID NO: 18244 - protein, 42 aa, Artificial Sequence
  GFR-binding peptide
  MOD_RES (1)..(38): Xaa is C or S
XALHDELTVQVEKFIPKKRVIEVKAVKVSRLQVQTPRXQVNR

SEQ ID NO: 18245 - protein, 45 aa, Artificial Sequence
  GFR-binding peptide
  MOD_RES (2)..(4)..(41): Xaa is C or S
  MOD_RES (17)..(18)..(19)..(20)..(21): Xaa is A or G
  MOD_RES (22)..(23)..(24)..(25): Xaa is A or G or is absent
EXKXALHDELTSMEGIXXXXXXXXXMIQVTINSLQVQTPRXQVNR

SEQ ID NO: 18246 - protein, 37 aa, Artificial Sequence
  GFR-binding peptide
  MOD_RES (1)..(1): Xaa is C or S
  MOD_RES (14)..(15)..(16)..(17)..(18): Xaa is A or G
  MOD_RES (19)..(20)..(21)..(22): Xaa is A or G or is absent
XELHEELRSMEGIXXXXXXXXXMIQVTINSHHVRSPQ

SEQ ID NO: 18247 - protein, 41 aa, Artificial Sequence
  GFR-binding peptide
  MOD_RES (2)..(36): Xaa is C or S
  MOD_RES (14)..(15)..(16)..(17)..(18): Xaa is A or G
  MOD_RES (19)..(20)..(21)..(22): Xaa is A or G or is absent
EXKNHQLFSMEGLXXXXXXXXXMIQMTINSEETPVXELGED

SEQ ID NO: 18248 - protein, 42 aa, Artificial Sequence
  GFR-binding peptide
  MOD_RES (2)..(4)..(38): Xaa is C or S
RXEXKNHQLFSMEGLHQGQHPKIRMIQMTINSEETPVXELGE

SEQ ID NO: 18249 - protein, 41 aa, Artificial Sequence
  GFR-binding peptide
  MOD_RES (1)..(3)..(37): Xaa is C or S
  MOD_RES (15)..(16)..(17)..(18)..(19): Xaa is A or G
  MOD_RES (20)..(21)..(22)..(23): Xaa is A or G or is absent
XEXKNHQLFSMEGIXXXXXXXXXMIQMTINSEETPVXELGE

SEQ ID NO: 18250 - protein, 41 aa, Artificial Sequence
  GFR-binding peptide
  MOD_RES (2)..(39): Xaa is C or S
  MOD_RES (15)..(16)..(17)..(18)..(19): Xaa is A or G
  MOD_RES (20)..(21)..(22)..(23): Xaa is A or G or is absent
KXALHDELTVTAKKXXXXXXXXXIKRVQVPRLQVQTPRXQV

SEQ ID NO: 18251 - protein, 39 aa, Artificial Sequence
  GFR-binding peptide
  MOD_RES (37)..(37): Xaa is C or S
ELHEELRSMEGLLKPKKRVYEMIQVTINSHHVRSPQXKV

SEQ ID NO: 18252 - protein, 35 aa, Artificial Sequence
  GFR-binding peptide
  MOD_RES (13)..(14)..(15)..(16)..(17): Xaa is A or G
  MOD_RES (18)..(19)..(20)..(21): Xaa is A or G or is absent
ELHEELRVTAKKXXXXXXXXXIKRVQVPRHHVRSP

SEQ ID NO: 18253 - protein, 41 aa, Artificial Sequence
  GFR-binding peptide
  MOD_RES (2)..(4)..(38): Xaa is C or S
  MOD_RES (16)..(17)..(18)..(19)..(20): Xaa is A or G
  MOD_RES (21)..(22)..(23)..(24): Xaa is A or G or is absent
RXEXKNHQLFSMEGIXXXXXXXXXMIQMTINSEETPVXELG

SEQ ID NO: 18254 - protein, 39 aa, Artificial Sequence
  GFR-binding peptide
  MOD_RES (1)..(35): Xaa is C or S
  MOD_RES (13)..(14)..(15)..(16)..(17): Xaa is A or G
  MOD_RES (18)..(19)..(20)..(21): Xaa is A or G or is absent
XKNHQLFVTAKKXXXXXXXXXIKRMQVPREETPVXELGE

SEQ ID NO: 18255 - protein, 38 aa, Artificial Sequence
  GFR-binding peptide
  MOD_RES (2)..(4): Xaa is C or S
AXAXELHEELRVQVEKLKPKKRVYEVKAVKVSRHHVRS

SEQ ID NO: 18256 - protein, 36 aa, Artificial Sequence
  GFR-binding peptide
  MOD_RES (34)..(34): Xaa is C or S
KNHQLFVTAKKHQGQHPKIRIKRMQVPREETPVXEL

SEQ ID NO: 18257 - protein, 34 aa, Artificial Sequence
  GFR-binding peptide
HDELTSMEGLFIPKKRVIEMIQVTINSLQVQTPR

SEQ ID NO: 18258 - protein, 42 aa, Artificial Sequence
  GFR-binding peptide
  MOD_RES (2)..(36): Xaa is C or S
  MOD_RES (14)..(15)..(16)..(17)..(18): Xaa is A or G
  MOD_RES (19)..(20)..(21)..(22): Xaa is A or G or is absent
EXQSHEELVTAKKXXXXXXXXXIKRMQVPRQGTPVXELGEDN

SEQ ID NO: 18259 - protein, 36 aa, Artificial Sequence
  GFR-binding peptide
  MOD_RES (2)..(36): Xaa is C or S
EXQSHEELVTAKKHQGQHPKIRIKRMQVPRQGTPVX

SEQ ID NO: 18260 - protein, 40 aa, Artificial Sequence
  GFR-binding peptide
  MOD_RES (37)..(37): Xaa is C or S
ALHDELTSMEGIFIPKKRVIEMIQVTINSLQVQTPRXQVN

SEQ ID NO: 18261 - protein, 42 aa, Artificial Sequence
  GFR-binding peptide
  MOD_RES (2)..(4)..(41): Xaa is C or S
EXKXALHDELTSMEGLFIPKKRVIEMIQVTINSLQVQTPRXQ

SEQ ID NO: 18262 - protein, 35 aa, Artificial Sequence
  GFR-binding peptide
  MOD_RES (1)..(1): Xaa is C or S
XALHDELTSMEGIFIPKKRVIEMIQVTINSLQVQT

SEQ ID NO: 18263 - protein, 38 aa, Artificial Sequence
  GFR-binding peptide
  MOD_RES (34)..(34): Xaa is C or S
KNHQLFVTAKKHQGQHPKIRIKRMQVPREETPVXELGE

SEQ ID NO: 18264 - protein, 41 aa, Artificial Sequence
  GFR-binding peptide
  MOD_RES (2)..(39): Xaa is C or S
KXALHDELTVTAKKFIPKKRVIEIKRVQVPRLQVQTPRXQV

SEQ ID NO: 18265 - protein, 35 aa, Artificial Sequence
  GFR-binding peptide
  MOD_RES (2)..(2): Xaa is C or S
EXQSHEELVQVEKHQGQHPKIRVKAMKVSRQGTPV

SEQ ID NO: 18266 - protein, 39 aa, Artificial Sequence
  GFR-binding peptide
  MOD_RES (2)..(4): Xaa is C or S
  MOD_RES (17)..(18)..(19)..(20)..(21): Xaa is A or G
  MOD_RES (22)..(23)..(24)..(25): Xaa is A or G or is absent
EXKXALHDELTVQVEKXXXXXXXXXVKAVKVSRLQVQTP

SEQ ID NO: 18267 - protein, 44 aa, Artificial Sequence
  GFR-binding peptide
  MOD_RES (2)..(4)..(41): Xaa is C or S
  MOD_RES (17)..(18)..(19)..(20)..(21): Xaa is A or G
  MOD_RES (22)..(23)..(24)..(25): Xaa is A or G or is absent
EXKXALHDELTSMEGLXXXXXXXXXMIQVTINSLQVQTPRXQVN

SEQ ID NO: 18268 - protein, 34 aa, Artificial Sequence
  GFR-binding peptide
LHDELTVTAKKFIPKKRVIEIKRVQVPRLQVQTP

SEQ ID NO: 18269 - protein, 37 aa, Artificial Sequence
  GFR-binding peptide
  MOD_RES (33)..(33): Xaa is C or S
  MOD_RES (11)..(12)..(13)..(14)..(15): Xaa is A or G
  MOD_RES (16)..(17)..(18)..(19): Xaa is A or G or is absent
NHQLFVTAKKXXXXXXXXXIKRMQVPREETPVXELGE

SEQ ID NO: 18270 - protein, 39 aa, Artificial Sequence
  GFR-binding peptide
  MOD_RES (2)..(4)..(38): Xaa is C or S
  MOD_RES (16)..(17)..(18)..(19)..(20): Xaa is A or G
  MOD_RES (21)..(22)..(23)..(24): Xaa is A or G or is absent
RXEXKNHQLFVQVEKXXXXXXXXXVKAMKVSREETPVXE

SEQ ID NO: 18271 - protein, 40 aa, Artificial Sequence
  GFR-binding peptide
  MOD_RES (34)..(34): Xaa is C or S
KNHQLFVQVEKHQGQHPKIRVKAMKVSREETPVXELGEDN

SEQ ID NO: 18272 - protein, 37 aa, Artificial Sequence
  GFR-binding peptide
  MOD_RES (2)..(4): Xaa is C or S
  MOD_RES (16)..(17)..(18)..(19)..(20): Xaa is A or G
  MOD_RES (21)..(22)..(23)..(24): Xaa is A or G or is absent
RXEXKNHQLFSMEGIXXXXXXXXXMIQMTINSEETPV

SEQ ID NO: 18273 - protein, 35 aa, Artificial Sequence
  GFR-binding peptide
  MOD_RES (34)..(34): Xaa is C or S
KNHQLFVTAKKHQGQHPKIRIKRMQVPREETPVXE

SEQ ID NO: 18274 - protein, 41 aa, Artificial Sequence
  GFR-binding peptide
  MOD_RES (2)..(39): Xaa is C or S
  MOD_RES (15)..(16)..(17)..(18)..(19): Xaa is A or G
  MOD_RES (20)..(21)..(22)..(23): Xaa is A or G or is absent
KXALHDELTSMEGLXXXXXXXXXMIQVTINSLQVQTPRXQV

SEQ ID NO: 18275 - protein, 38 aa, Artificial Sequence
  GFR-binding peptide
  MOD_RES (1)..(35): Xaa is C or S
XKNHQLFVQVEKHQGQHPKIRVKAMKVSREETPVXELG

SEQ ID NO: 18276 - protein, 38 aa, Artificial Sequence
  GFR-binding peptide
  MOD_RES (35)..(35): Xaa is C or S
  MOD_RES (11)..(12)..(13)..(14)..(15): Xaa is A or G
  MOD_RES (16)..(17)..(18)..(19): Xaa is A or G or is absent
HEELRSMEGIXXXXXXXXXMIQVTINSHHVRSPQXKVS

SEQ ID NO: 18277 - protein, 38 aa, Artificial Sequence
  GFR-binding peptide
  MOD_RES (2)..(4): Xaa is C or S
  MOD_RES (17)..(18)..(19)..(20)..(21): Xaa is A or G
  MOD_RES (22)..(23)..(24)..(25): Xaa is A or G or is absent
AXAXELHEELRVQVEKXXXXXXXXXVKAVKVSRHHVRS

SEQ ID NO: 18278 - protein, 35 aa, Artificial Sequence
  GFR-binding peptide
  MOD_RES (35)..(35): Xaa is C or S
HDELTVQVEKFIPKKRVIEVKAVKVSRLQVQTPRX

SEQ ID NO: 18279 - protein, 37 aa, Artificial Sequence
  GFR-binding peptide
  MOD_RES (2)..(2): Xaa is C or S
  MOD_RES (15)..(16)..(17)..(18)..(19): Xaa is A or G
  MOD_RES (20)..(21)..(22)..(23): Xaa is A or G or is absent
AXELHEELRSMEGIXXXXXXXXXMIQVTINSHHVRSP

SEQ ID NO: 18280 - protein, 39 aa, Artificial Sequence
  GFR-binding peptide
  MOD_RES (33)..(33): Xaa is C or S
  MOD_RES (11)..(12)..(13)..(14)..(15): Xaa is A or G
  MOD_RES (16)..(17)..(18)..(19): Xaa is A or G or is absent
SHEELVTAKKXXXXXXXXXIKRMQVPRQGTPVXELGEDN

SEQ ID NO: 18281 - protein, 36 aa, Artificial Sequence
  GFR-binding peptide
  MOD_RES (2)..(36): Xaa is C or S
EXQSHEELVQVEKHQGQHPKIRVKAMKVSRQGTPVX

SEQ ID NO: 18282 - protein, 35 aa, Artificial Sequence
  GFR-binding peptide
  MOD_RES (34)..(34): Xaa is C or S
QSHEELVTAKKHQGQHPKIRIKRMQVPRQGTPVXE

SEQ ID NO: 18283 - protein, 38 aa, Artificial Sequence
  GFR-binding peptide
  MOD_RES (34)..(34): Xaa is C or S
  MOD_RES (12)..(13)..(14)..(15)..(16): Xaa is A or G
  MOD_RES (17)..(18)..(19)..(20): Xaa is A or G or is absent
KNHQLFSMEGLXXXXXXXXXMIQMTINSEETPVXELGE

SEQ ID NO: 18284 - protein, 36 aa, Artificial Sequence
  GFR-binding peptide
  MOD_RES (2)..(2): Xaa is C or S
AXELHEELRSMEGLLKPKKRVYEMIQVTINSHHVRS

SEQ ID NO: 18285 - protein, 41 aa, Artificial Sequence
  GFR-binding peptide
  MOD_RES (37)..(37): Xaa is C or S
  MOD_RES (13)..(14)..(15)..(16)..(17): Xaa is A or G
  MOD_RES (18)..(19)..(20)..(21): Xaa is A or G or is absent
ELHEELRSMEGLXXXXXXXXXMIQVTINSHHVRSPQXKVSS

SEQ ID NO: 18286 - protein, 39 aa, Artificial Sequence
  GFR-binding peptide
  MOD_RES (37)..(37): Xaa is C or S
  MOD_RES (13)..(14)..(15)..(16)..(17): Xaa is A or G
  MOD_RES (18)..(19)..(20)..(21): Xaa is A or G or is absent
ALHDELTSMEGLXXXXXXXXXMIQVTINSLQVQTPRXQV

SEQ ID NO: 18287 - protein, 41 aa, Artificial Sequence
  GFR-binding peptide
  MOD_RES (2)..(4)..(38): Xaa is C or S
RXEXQSHEELSMEGLHQGQHPKIRMIQMTINSQGTPVXELG

SEQ ID NO: 18288 - protein, 38 aa, Artificial Sequence
  GFR-binding peptide
  MOD_RES (36)..(36): Xaa is C or S
  MOD_RES (12)..(13)..(14)..(15)..(16): Xaa is A or G
  MOD_RES (17)..(18)..(19)..(20): Xaa is A or G or is absent
LHEELRSMEGLXXXXXXXXXMIQVTINSHHVRSPQXKV

SEQ ID NO: 18289 - protein, 38 aa, Artificial Sequence
  GFR-binding peptide
  MOD_RES (37)..(37): Xaa is C or S
  MOD_RES (13)..(14)..(15)..(16)..(17): Xaa is A or G
  MOD_RES (18)..(19)..(20)..(21): Xaa is A or G or is absent
ALHDELTSMEGIXXXXXXXXXMIQVTINSLQVQTPRXQ

SEQ ID NO: 18290 - protein, 35 aa, Artificial Sequence
  GFR-binding peptide
  MOD_RES (33)..(33): Xaa is C or S
SHEELVTAKKHQGQHPKIRIKRMQVPRQGTPVXEL

SEQ ID NO: 18291 - protein, 41 aa, Artificial Sequence
  GFR-binding peptide
  MOD_RES (37)..(37): Xaa is C or S
ALHDELTSMEGIFIPKKRVIEMIQVTINSLQVQTPRXQVNR

SEQ ID NO: 18292 - protein, 38 aa, Artificial Sequence
  GFR-binding peptide
  MOD_RES (1)..(3): Xaa is C or S
XKXALHDELTVTAKKFIPKKRVIEIKRVQVPRLQVQTP

SEQ ID NO: 18293 - protein, 35 aa, Artificial Sequence
  GFR-binding peptide
  MOD_RES (34)..(34): Xaa is C or S
  MOD_RES (12)..(13)..(14)..(15)..(16): Xaa is A or G
  MOD_RES (17)..(18)..(19)..(20): Xaa is A or G or is absent
QSHEELSMEGLXXXXXXXXXMIQMTINSQGTPVXE

SEQ ID NO: 18294 - protein, 32 aa, Artificial Sequence
  GFR-binding peptide
  MOD_RES (11)..(12)..(13)..(14)..(15): Xaa is A or G
  MOD_RES (16)..(17)..(18)..(19): Xaa is A or G or is absent
HEELRVTAKKXXXXXXXXXIKRVQVPRHHVRS

SEQ ID NO: 18295 - protein, 36 aa, Artificial Sequence
  GFR-binding peptide
  MOD_RES (36)..(36): Xaa is C or S
LHDELTVQVEKFIPKKRVIEVKAVKVSRLQVQTPRX

SEQ ID NO: 18296 - protein, 36 aa, Artificial Sequence
  GFR-binding peptide
  MOD_RES (2)..(2): Xaa is C or S
  MOD_RES (15)..(16)..(17)..(18)..(19): Xaa is A or G
  MOD_RES (20)..(21)..(22)..(23): Xaa is A or G or is absent
AXELHEELRSMEGIXXXXXXXXXMIQVTINSHHVRS

SEQ ID NO: 18297 - protein, 44 aa, Artificial Sequence
  GFR-binding peptide
  MOD_RES (2)..(4)..(41): Xaa is C or S
  MOD_RES (17)..(18)..(19)..(20)..(21): Xaa is A or G
  MOD_RES (22)..(23)..(24)..(25): Xaa is A or G or is absent
AXAXELHEELRVTAKKXXXXXXXXXIKRVQVPRHHVRSPQXKVS

SEQ ID NO: 18298 - protein, 44 aa, Artificial Sequence
  GFR-binding peptide
  MOD_RES (2)..(4)..(38): Xaa is C or S
  MOD_RES (16)..(17)..(18)..(19)..(20): Xaa is A or G
  MOD_RES (21)..(22)..(23)..(24): Xaa is A or G or is absent
RXEXQSHEELSMEGLXXXXXXXXXMIQMTINSQGTPVXELGEDN

SEQ ID NO: 18299 - protein, 39 aa, Artificial Sequence
  GFR-binding peptide
  MOD_RES (2)..(4)..(38): Xaa is C or S
  MOD_RES (16)..(17)..(18)..(19)..(20): Xaa is A or G
  MOD_RES (21)..(22)..(23)..(24): Xaa is A or G or is absent
RXEXQSHEELVTAKKXXXXXXXXXIKRMQVPRQGTPVXE

SEQ ID NO: 18300 - protein, 42 aa, Artificial Sequence
  GFR-binding peptide
  MOD_RES (1)..(3)..(40): Xaa is C or S
XAXELHEELRSMEGLLKPKKRVYEMIQVTINSHHVRSPQXKV

SEQ ID NO: 18301 - protein, 39 aa, Artificial Sequence
  GFR-binding peptide
  MOD_RES (36)..(36): Xaa is C or S
  MOD_RES (12)..(13)..(14)..(15)..(16): Xaa is A or G
  MOD_RES (17)..(18)..(19)..(20): Xaa is A or G or is absent
LHDELTVTAKKXXXXXXXXXIKRVQVPRLQVQTPRXQVN

SEQ ID NO: 18302 - protein, 34 aa, Artificial Sequence
  GFR-binding peptide
  MOD_RES (33)..(33): Xaa is C or S
  MOD_RES (11)..(12)..(13)..(14)..(15): Xaa is A or G
  MOD_RES (16)..(17)..(18)..(19): Xaa is A or G or is absent
NHQLFVQVEKXXXXXXXXXVKAMKVSREETPVXE

SEQ ID NO: 18303 - protein, 35 aa, Artificial Sequence
  GFR-binding peptide
  MOD_RES (12)..(13)..(14)..(15)..(16): Xaa is A or G
  MOD_RES (17)..(18)..(19)..(20): Xaa is A or G or is absent
LHEELRVQVEKXXXXXXXXXVKAVKVSRHHVRSPQ

SEQ ID NO: 18304 - protein, 43 aa, Artificial Sequence
  GFR-binding peptide
  MOD_RES (2)..(4)..(41): Xaa is C or S
  MOD_RES (17)..(18)..(19)..(20)..(21): Xaa is A or G
  MOD_RES (22)..(23)..(24)..(25): Xaa is A or G or is absent
AXAXELHEELRVTAKKXXXXXXXXXIKRVQVPRHHVRSPQXKV

SEQ ID NO: 18305 - protein, 40 aa, Artificial Sequence
  GFR-binding peptide
  MOD_RES (2)..(36): Xaa is C or S
  MOD_RES (14)..(15)..(16)..(17)..(18): Xaa is A or G
  MOD_RES (19)..(20)..(21)..(22): Xaa is A or G or is absent
EXKNHQLFSMEGIXXXXXXXXXMIQMTINSEETPVXELGE

SEQ ID NO: 18306 - protein, 36 aa, Artificial Sequence
  GFR-binding peptide
  MOD_RES (35)..(35): Xaa is C or S
HDELTSMEGIFIPKKRVIEMIQVTINSLQVQTPRXQ

SEQ ID NO: 18307 - protein, 40 aa, Artificial Sequence
  GFR-binding peptide
  MOD_RES (2)..(36): Xaa is C or S
  MOD_RES (14)..(15)..(16)..(17)..(18): Xaa is A or G
  MOD_RES (19)..(20)..(21)..(22): Xaa is A or G or is absent
EXKNHQLFVTAKKXXXXXXXXXIKRMQVPREETPVXELGE

SEQ ID NO: 18308 - protein, 35 aa, Artificial Sequence
  GFR-binding peptide
  MOD_RES (2)..(2): Xaa is C or S
  MOD_RES (14)..(15)..(16)..(17)..(18): Xaa is A or G
  MOD_RES (19)..(20)..(21)..(22): Xaa is A or G or is absent
EXKNHQLFVQVEKXXXXXXXXXVKAMKVSREETPV

SEQ ID NO: 18309 - protein, 40 aa, Artificial Sequence
  GFR-binding peptide
  MOD_RES (2)..(36): Xaa is C or S
  MOD_RES (14)..(15)..(16)..(17)..(18): Xaa is A or G
  MOD_RES (19)..(20)..(21)..(22): Xaa is A or G or is absent
EXQSHEELVQVEKXXXXXXXXXVKAMKVSRQGTPVXELGE

SEQ ID NO: 18310 - protein, 39 aa, Artificial Sequence
  GFR-binding peptide
  MOD_RES (1)..(3): Xaa is C or S
  MOD_RES (16)..(17)..(18)..(19)..(20): Xaa is A or G
  MOD_RES (21)..(22)..(23)..(24): Xaa is A or G or is absent
XKXALHDELTVQVEKXXXXXXXXXVKAVKVSRLQVQTPR

SEQ ID NO: 18311 - protein, 41 aa, Artificial Sequence
  GFR-binding peptide
  MOD_RES (37)..(37): Xaa is C or S
ELHEELRVQVEKLKPKKRVYEVKAVKVSRHHVRSPQXKVSS

SEQ ID NO: 18312 - protein, 36 aa, Artificial Sequence
  GFR-binding peptide
  MOD_RES (13)..(14)..(15)..(16)..(17): Xaa is A or G
  MOD_RES (18)..(19)..(20)..(21): Xaa is A or G or is absent
ELHEELRVQVEKXXXXXXXXXVKAVKVSRHHVRSPQ

SEQ ID NO: 18313 - protein, 36 aa, Artificial Sequence
  GFR-binding peptide
  MOD_RES (1)..(35): Xaa is C or S
  MOD_RES (13)..(14)..(15)..(16)..(17): Xaa is A or G
  MOD_RES (18)..(19)..(20)..(21): Xaa is A or G or is absent
XKNHQLFVQVEKXXXXXXXXXVKAMKVSREETPVXE

SEQ ID NO: 18314 - protein, 39 aa, Artificial Sequence
  GFR-binding peptide
  MOD_RES (34)..(34): Xaa is C or S
QSHEELVQVEKHQGQHPKIRVKAMKVSRQGTPVXELGED

SEQ ID NO: 18315 - protein, 38 aa, Artificial Sequence
  GFR-binding peptide
  MOD_RES (2)..(4)..(38): Xaa is C or S
RXEXKNHQLFSMEGLHQGQHPKIRMIQMTINSEETPVX

SEQ ID NO: 18316 - protein, 34 aa, Artificial Sequence
  GFR-binding peptide
  MOD_RES (34)..(34): Xaa is C or S
  MOD_RES (12)..(13)..(14)..(15)..(16): Xaa is A or G
  MOD_RES (17)..(18)..(19)..(20): Xaa is A or G or is absent
KNHQLFVTAKKXXXXXXXXXIKRMQVPREETPVX

SEQ ID NO: 18317 - protein, 35 aa, Artificial Sequence
  GFR-binding peptide
  MOD_RES (12)..(13)..(14)..(15)..(16): Xaa is A or G
  MOD_RES (17)..(18)..(19)..(20): Xaa is A or G or is absent
LHDELTVQVEKXXXXXXXXXVKAVKVSRLQVQTPR

SEQ ID NO: 18318 - protein, 40 aa, Artificial Sequence
  GFR-binding peptide
  MOD_RES (2)..(39): Xaa is C or S
  MOD_RES (15)..(16)..(17)..(18)..(19): Xaa is A or G
  MOD_RES (20)..(21)..(22)..(23): Xaa is A or G or is absent
AXELHEELRSMEGLXXXXXXXXXMIQVTINSHHVRSPQXK

SEQ ID NO: 18319 - protein, 44 aa, Artificial Sequence
  GFR-binding peptide
  MOD_RES (2)..(4)..(38): Xaa is C or S
RXEXKNHQLFVQVEKHQGQHPKIRVKAMKVSREETPVXELGEDN

SEQ ID NO: 18320 - protein, 36 aa, Artificial Sequence
  GFR-binding peptide
  MOD_RES (36)..(36): Xaa is C or S
LHEELRVTAKKLKPKKRVYEIKRVQVPRHHVRSPQX

SEQ ID NO: 18321 - protein, 39 aa, Artificial Sequence
  GFR-binding peptide
  MOD_RES (1)..(3): Xaa is C or S
  MOD_RES (16)..(17)..(18)..(19)..(20): Xaa is A or G
  MOD_RES (21)..(22)..(23)..(24): Xaa is A or G or is absent
XKXALHDELTVTAKKXXXXXXXXXIKRVQVPRLQVQTPR

SEQ ID NO: 18322 - protein, 42 aa, Artificial Sequence
  GFR-binding peptide
  MOD_RES (2)..(4)..(38): Xaa is C or S
RXEXQSHEELSMEGLHQGQHPKIRMIQMTINSQGTPVXELGE

SEQ ID NO: 18323 - protein, 39 aa, Artificial Sequence
  GFR-binding peptide
  MOD_RES (2)..(36): Xaa is C or S
EXKNHQLFSMEGLHQGQHPKIRMIQMTINSEETPVXELG

SEQ ID NO: 18324 - protein, 43 aa, Artificial Sequence
  GFR-binding peptide
  MOD_RES (2)..(4)..(41): Xaa is C or S
EXKXALHDELTSMEGIFIPKKRVIEMIQVTINSLQVQTPRXQV

SEQ ID NO: 18325 - protein, 36 aa, Artificial Sequence
  GFR-binding peptide
  MOD_RES (1)..(35): Xaa is C or S
XQSHEELSMEGIHQGQHPKIRMIQMTINSQGTPVXE

SEQ ID NO: 18326 - protein, 42 aa, Artificial Sequence
  GFR-binding peptide
  MOD_RES (2)..(4)..(38): Xaa is C or S
RXEXQSHEELSMEGIHQGQHPKIRMIQMTINSQGTPVXELGE

SEQ ID NO: 18327 - protein, 41 aa, Artificial Sequence
  GFR-binding peptide
  MOD_RES (1)..(38): Xaa is C or S
  MOD_RES (14)..(15)..(16)..(17)..(18): Xaa is A or G
  MOD_RES (19)..(20)..(21)..(22): Xaa is A or G or is absent
XELHEELRSMEGIXXXXXXXXXMIQVTINSHHVRSPQXKVS

SEQ ID NO: 18328 - protein, 43 aa, Artificial Sequence
  GFR-binding peptide
  MOD_RES (1)..(3)..(40): Xaa is C or S
  MOD_RES (16)..(17)..(18)..(19)..(20): Xaa is A or G
  MOD_RES (21)..(22)..(23)..(24): Xaa is A or G or is absent
XKXALHDELTVTAKKXXXXXXXXXIKRVQVPRLQVQTPRXQVN

SEQ ID NO: 18329 - protein, 34 aa, Artificial Sequence
  GFR-binding peptide
  MOD_RES (33)..(33): Xaa is C or S
  MOD_RES (11)..(12)..(13)..(14)..(15): Xaa is A or G
  MOD_RES (16)..(17)..(18)..(19): Xaa is A or G or is absent
SHEELSMEGLXXXXXXXXXMIQMTINSQGTPVXE

SEQ ID NO: 18330 - protein, 40 aa, Artificial Sequence
  GFR-binding peptide
  MOD_RES (2)..(36): Xaa is C or S
  MOD_RES (14)..(15)..(16)..(17)..(18): Xaa is A or G
  MOD_RES (19)..(20)..(21)..(22): Xaa is A or G or is absent
EXKNHQLFSMEGLXXXXXXXXXMIQMTINSEETPVXELGE

SEQ ID NO: 18331 - protein, 44 aa, Artificial Sequence
  GFR-binding peptide
  MOD_RES (2)..(4)..(38): Xaa is C or S
RXEXKNHQLFVTAKKHQGQHPKIRIKRMQVPREETPVXELGEDN

SEQ ID NO: 18332 - protein, 39 aa, Artificial Sequence
  GFR-binding peptide
  MOD_RES (2)..(39): Xaa is C or S
  MOD_RES (15)..(16)..(17)..(18)..(19): Xaa is A or G
  MOD_RES (20)..(21)..(22)..(23): Xaa is A or G or is absent
KXALHDELTVTAKKXXXXXXXXXIKRVQVPRLQVQTPRX

SEQ ID NO: 18333 - protein, 37 aa, Artificial Sequence
  GFR-binding peptide
  MOD_RES (2)..(2): Xaa is C or S
KXALHDELTSMEGLFIPKKRVIEMIQVTINSLQVQTP

SEQ ID NO: 18334 - protein, 36 aa, Artificial Sequence
  GFR-binding peptide
  MOD_RES (1)..(1): Xaa is C or S
  MOD_RES (14)..(15)..(16)..(17)..(18): Xaa is A or G
  MOD_RES (19)..(20)..(21)..(22): Xaa is A or G or is absent
XELHEELRVQVEKXXXXXXXXXVKAVKVSRHHVRSP

SEQ ID NO: 18335 - protein, 38 aa, Artificial Sequence
  GFR-binding peptide
  MOD_RES (2)..(36): Xaa is C or S
  MOD_RES (14)..(15)..(16)..(17)..(18): Xaa is A or G
  MOD_RES (19)..(20)..(21)..(22): Xaa is A or G or is absent
EXQSHEELVQVEKXXXXXXXXXVKAMKVSRQGTPVXEL

SEQ ID NO: 18336 - protein, 43 aa, Artificial Sequence
  GFR-binding peptide
  MOD_RES (1)..(3)..(40): Xaa is C or S
  MOD_RES (16)..(17)..(18)..(19)..(20): Xaa is A or G
  MOD_RES (21)..(22)..(23)..(24): Xaa is A or G or is absent
XKXALHDELTVQVEKXXXXXXXXXVKAVKVSRLQVQTPRXQVN

SEQ ID NO: 18337 - protein, 38 aa, Artificial Sequence
  GFR-binding peptide
  MOD_RES (1)..(35): Xaa is C or S
  MOD_RES (13)..(14)..(15)..(16)..(17): Xaa is A or G
  MOD_RES (18)..(19)..(20)..(21): Xaa is A or G or is absent
XKNHQLFVQVEKXXXXXXXXXVKAMKVSREETPVXELG

SEQ ID NO: 18338 - protein, 38 aa, Artificial Sequence
  GFR-binding peptide
  MOD_RES (2)..(36): Xaa is C or S
  MOD_RES (14)..(15)..(16)..(17)..(18): Xaa is A or G
  MOD_RES (19)..(20)..(21)..(22): Xaa is A or G or is absent
EXKNHQLFSMEGIXXXXXXXXXMIQMTINSEETPVXEL

SEQ ID NO: 18339 - protein, 34 aa, Artificial Sequence
  GFR-binding peptide
  MOD_RES (33)..(33): Xaa is C or S
SHEELVQVEKHQGQHPKIRVKAMKVSRQGTPVXE

SEQ ID NO: 18340 - protein, 39 aa, Artificial Sequence
  GFR-binding peptide
  MOD_RES (2)..(39): Xaa is C or S
KXALHDELTSMEGLFIPKKRVIEMIQVTINSLQVQTPRX

SEQ ID NO: 18341 - protein, 38 aa, Artificial Sequence
  GFR-binding peptide
  MOD_RES (35)..(35): Xaa is C or S
  MOD_RES (11)..(12)..(13)..(14)..(15): Xaa is A or G
  MOD_RES (16)..(17)..(18)..(19): Xaa is A or G or is absent
HDELTSMEGLXXXXXXXXXMIQVTINSLQVQTPRXQVN

SEQ ID NO: 18342 - protein, 38 aa, Artificial Sequence
  GFR-binding peptide
  MOD_RES (1)..(3): Xaa is C or S
XAXELHEELRVQVEKLKPKKRVYEVKAVKVSRHHVRSP

SEQ ID NO: 18343 - protein, 36 aa, Artificial Sequence
  GFR-binding peptide
  MOD_RES (35)..(35): Xaa is C or S
  MOD_RES (11)..(12)..(13)..(14)..(15): Xaa is A or G
  MOD_RES (16)..(17)..(18)..(19): Xaa is A or G or is absent
HDELTVTAKKXXXXXXXXXIKRVQVPRLQVQTPRXQ

SEQ ID NO: 18344 - protein, 34 aa, Artificial Sequence
  GFR-binding peptide
  MOD_RES (13)..(14)..(15)..(16)..(17): Xaa is A or G
  MOD_RES (18)..(19)..(20)..(21): Xaa is A or G or is absent
ALHDELTSMEGIXXXXXXXXXMIQVTINSLQVQT

SEQ ID NO: 18345 - protein, 42 aa, Artificial Sequence
  GFR-binding peptide
  MOD_RES (1)..(3)..(37): Xaa is C or S
  MOD_RES (15)..(16)..(17)..(18)..(19): Xaa is A or G
  MOD_RES (20)..(21)..(22)..(23): Xaa is A or G or is absent
XEXKNHQLFVQVEKXXXXXXXXXVKAMKVSREETPVXELGED

SEQ ID NO: 18346 - protein, 38 aa, Artificial Sequence
  GFR-binding peptide
  MOD_RES (34)..(34): Xaa is C or S
QSHEELVQVEKHQGQHPKIRVKAMKVSRQGTPVXELGE

SEQ ID NO: 18347 - protein, 35 aa, Artificial Sequence
  GFR-binding peptide
LHDELTVTAKKFIPKKRVIEIKRVQVPRLQVQTPR

SEQ ID NO: 18348 - protein, 37 aa, Artificial Sequence
  GFR-binding peptide
  MOD_RES (1)..(1): Xaa is C or S
XELHEELRVQVEKLKPKKRVYEVKAVKVSRHHVRSPQ

SEQ ID NO: 18349 - protein, 40 aa, Artificial Sequence
  GFR-binding peptide
  MOD_RES (2)..(39): Xaa is C or S
  MOD_RES (15)..(16)..(17)..(18)..(19): Xaa is A or G
  MOD_RES (20)..(21)..(22)..(23): Xaa is A or G or is absent
KXALHDELTVTAKKXXXXXXXXXIKRVQVPRLQVQTPRXQ

SEQ ID NO: 18350 - protein, 42 aa, Artificial Sequence
  GFR-binding peptide
  MOD_RES (1)..(3)..(40): Xaa is C or S
  MOD_RES (16)..(17)..(18)..(19)..(20): Xaa is A or G
  MOD_RES (21)..(22)..(23)..(24): Xaa is A or G or is absent
XAXELHEELRVTAKKXXXXXXXXXIKRVQVPRHHVRSPQXKV

SEQ ID NO: 18351 - protein, 44 aa, Artificial Sequence
  GFR-binding peptide
  MOD_RES (1)..(3)..(40): Xaa is C or S
  MOD_RES (16)..(17)..(18)..(19)..(20): Xaa is A or G
  MOD_RES (21)..(22)..(23)..(24): Xaa is A or G or is absent
XKXALHDELTVTAKKXXXXXXXXXIKRVQVPRLQVQTPRXQVNR

SEQ ID NO: 18352 - protein, 41 aa, Artificial Sequence
  GFR-binding peptide
  MOD_RES (1)..(38): Xaa is C or S
  MOD_RES (14)..(15)..(16)..(17)..(18): Xaa is A or G
  MOD_RES (19)..(20)..(21)..(22): Xaa is A or G or is absent
XELHEELRSMEGLXXXXXXXXXMIQVTINSHHVRSPQXKVS

SEQ ID NO: 18353 - protein, 37 aa, Artificial Sequence
  GFR-binding peptide
  MOD_RES (1)..(3): Xaa is C or S
  MOD_RES (16)..(17)..(18)..(19)..(20): Xaa is A or G
  MOD_RES (21)..(22)..(23)..(24): Xaa is A or G or is absent
XAXELHEELRSMEGIXXXXXXXXXMIQVTINSHHVRS

SEQ ID NO: 18354 - protein, 38 aa, Artificial Sequence
  GFR-binding peptide
  MOD_RES (33)..(33): Xaa is C or S
  MOD_RES (11)..(12)..(13)..(14)..(15): Xaa is A or G
  MOD_RES (16)..(17)..(18)..(19): Xaa is A or G or is absent
SHEELVTAKKXXXXXXXXXIKRMQVPRQGTPVXELGED

SEQ ID NO: 18355 - protein, 43 aa, Artificial Sequence
  GFR-binding peptide
  MOD_RES (1)..(3)..(40): Xaa is C or S
XKXALHDELTSMEGLFIPKKRVIEMIQVTINSLQVQTPRXQVN

SEQ ID NO: 18356 - protein, 39 aa, Artificial Sequence
  GFR-binding peptide
  MOD_RES (2)..(4)..(38): Xaa is C or S
  MOD_RES (16)..(17)..(18)..(19)..(20): Xaa is A or G
  MOD_RES (21)..(22)..(23)..(24): Xaa is A or G or is absent
RXEXQSHEELVQVEKXXXXXXXXXVKAMKVSRQGTPVXE

SEQ ID NO: 18357 - protein, 35 aa, Artificial Sequence
  GFR-binding peptide
  MOD_RES (33)..(33): Xaa is C or S
  MOD_RES (11)..(12)..(13)..(14)..(15): Xaa is A or G
  MOD_RES (16)..(17)..(18)..(19): Xaa is A or G or is absent
SHEELVQVEKXXXXXXXXXVKAMKVSRQGTPVXEL

SEQ ID NO: 18358 - protein, 37 aa, Artificial Sequence
  GFR-binding peptide
  MOD_RES (1)..(3)..(37): Xaa is C or S
  MOD_RES (15)..(16)..(17)..(18)..(19): Xaa is A or G
  MOD_RES (20)..(21)..(22)..(23): Xaa is A or G or is absent
XEXKNHQLFSMEGIXXXXXXXXXMIQMTINSEETPVX

SEQ ID NO: 18359 - protein, 34 aa, Artificial Sequence
  GFR-binding peptide
  MOD_RES (34)..(34): Xaa is C or S
KNHQLFVQVEKHQGQHPKIRVKAMKVSREETPVX

SEQ ID NO: 18360 - protein, 39 aa, Artificial Sequence
  GFR-binding peptide
  MOD_RES (37)..(37): Xaa is C or S
ELHEELRVTAKKLKPKKRVYEIKRVQVPRHHVRSPQXKV

SEQ ID NO: 18361 - protein, 40 aa, Artificial Sequence
  GFR-binding peptide
  MOD_RES (1)..(38): Xaa is C or S
XELHEELRVQVEKLKPKKRVYEVKAVKVSRHHVRSPQXKV

SEQ ID NO: 18362 - protein, 37 aa, Artificial Sequence
  GFR-binding peptide
  MOD_RES (35)..(35): Xaa is C or S
  MOD_RES (11)..(12)..(13)..(14)..(15): Xaa is A or G
  MOD_RES (16)..(17)..(18)..(19): Xaa is A or G or is absent
HDELTSMEGLXXXXXXXXXMIQVTINSLQVQTPRXQV

SEQ ID NO: 18363 - protein, 35 aa, Artificial Sequence
  GFR-binding peptide
  MOD_RES (34)..(34): Xaa is C or S
KNHQLFSMEGLHQGQHPKIRMIQMTINSEETPVXE

SEQ ID NO: 18364 - protein, 38 aa, Artificial Sequence
  GFR-binding peptide
  MOD_RES (35)..(35): Xaa is C or S
  MOD_RES (11)..(12)..(13)..(14)..(15): Xaa is A or G
  MOD_RES (16)..(17)..(18)..(19): Xaa is A or G or is absent
HDELTSMEGIXXXXXXXXXMIQVTINSLQVQTPRXQVN

SEQ ID NO: 18365 - protein, 42 aa, Artificial Sequence
  GFR-binding peptide
  MOD_RES (1)..(3)..(40): Xaa is C or S
  MOD_RES (16)..(17)..(18)..(19)..(20): Xaa is A or G
  MOD_RES (21)..(22)..(23)..(24): Xaa is A or G or is absent
XAXELHEELRVQVEKXXXXXXXXXVKAVKVSRHHVRSPQXKV

SEQ ID NO: 18366 - protein, 37 aa, Artificial Sequence
  GFR-binding peptide
  MOD_RES (1)..(1): Xaa is C or S
XALHDELTVQVEKFIPKKRVIEVKAVKVSRLQVQTPR

SEQ ID NO: 18367 - protein, 36 aa, Artificial Sequence
  GFR-binding peptide
  MOD_RES (2)..(36): Xaa is C or S
EXKNHQLFVTAKKHQGQHPKIRIKRMQVPREETPVX

SEQ ID NO: 18368 - protein, 39 aa, Artificial Sequence
  GFR-binding peptide
  MOD_RES (2)..(39): Xaa is C or S
  MOD_RES (15)..(16)..(17)..(18)..(19): Xaa is A or G
  MOD_RES (20)..(21)..(22)..(23): Xaa is A or G or is absent
AXELHEELRVQVEKXXXXXXXXXVKAVKVSRHHVRSPQX

SEQ ID NO: 18369 - protein, 35 aa, Artificial Sequence
  GFR-binding peptide
  MOD_RES (34)..(34): Xaa is C or S
  MOD_RES (12)..(13)..(14)..(15)..(16): Xaa is A or G
  MOD_RES (17)..(18)..(19)..(20): Xaa is A or G or is absent
KNHQLFVQVEKXXXXXXXXXVKAMKVSREETPVXE

SEQ ID NO: 18370 - protein, 39 aa, Artificial Sequence
  GFR-binding peptide
  MOD_RES (36)..(36): Xaa is C or S
  MOD_RES (12)..(13)..(14)..(15)..(16): Xaa is A or G
  MOD_RES (17)..(18)..(19)..(20): Xaa is A or G or is absent
LHEELRSMEGIXXXXXXXXXMIQVTINSHHVRSPQXKVS

SEQ ID NO: 18371 - protein, 40 aa, Artificial Sequence
  GFR-binding peptide
  MOD_RES (2)..(4): Xaa is C or S
AXAXELHEELRSMEGLLKPKKRVYEMIQVTINSHHVRSPQ

SEQ ID NO: 18372 - protein, 40 aa, Artificial Sequence
  GFR-binding peptide
  MOD_RES (1)..(38): Xaa is C or S
XELHEELRVTAKKLKPKKRVYEIKRVQVPRHHVRSPQXKV

SEQ ID NO: 18373 - protein, 36 aa, Artificial Sequence
  GFR-binding peptide
  MOD_RES (35)..(35): Xaa is C or S
HEELRVTAKKLKPKKRVYEIKRVQVPRHHVRSPQXK

SEQ ID NO: 18374 - protein, 35 aa, Artificial Sequence
  GFR-binding peptide
LHEELRSMEGILKPKKRVYEMIQVTINSHHVRSPQ

SEQ ID NO: 18375 - protein, 39 aa, Artificial Sequence
  GFR-binding peptide
  MOD_RES (34)..(34): Xaa is C or S
QSHEELSMEGIHQGQHPKIRMIQMTINSQGTPVXELGED

SEQ ID NO: 18376 - protein, 38 aa, Artificial Sequence
  GFR-binding peptide
  MOD_RES (2)..(4): Xaa is C or S
  MOD_RES (17)..(18)..(19)..(20)..(21): Xaa is A or G
  MOD_RES (22)..(23)..(24)..(25): Xaa is A or G or is absent
AXAXELHEELRSMEGLXXXXXXXXXMIQVTINSHHVRS

SEQ ID NO: 18377 - protein, 43 aa, Artificial Sequence
  GFR-binding peptide
  MOD_RES (1)..(3)..(37): Xaa is C or S
XEXQSHEELVTAKKHQGQHPKIRIKRMQVPRQGTPVXELGEDN

SEQ ID NO: 18378 - protein, 40 aa, Artificial Sequence
  GFR-binding peptide
  MOD_RES (1)..(3)..(40): Xaa is C or S
XAXELHEELRSMEGLLKPKKRVYEMIQVTINSHHVRSPQX

SEQ ID NO: 18379 - protein, 40 aa, Artificial Sequence
  GFR-binding peptide
  MOD_RES (1)..(3)..(40): Xaa is C or S
XAXELHEELRSMEGILKPKKRVYEMIQVTINSHHVRSPQX

SEQ ID NO: 18380 - protein, 44 aa, Artificial Sequence
  GFR-binding peptide
  MOD_RES (2)..(4)..(38): Xaa is C or S
  MOD_RES (16)..(17)..(18)..(19)..(20): Xaa is A or G
  MOD_RES (21)..(22)..(23)..(24): Xaa is A or G or is absent
RXEXKNHQLFVTAKKXXXXXXXXXIKRMQVPREETPVXELGEDN

SEQ ID NO: 18381 - protein, 37 aa, Artificial Sequence
  GFR-binding peptide
  MOD_RES (1)..(3)..(37): Xaa is C or S
XEXKNHQLFSMEGIHQGQHPKIRMIQMTINSEETPVX

SEQ ID NO: 18382 - protein, 37 aa, Artificial Sequence
  GFR-binding peptide
  MOD_RES (37)..(37): Xaa is C or S
ALHDELTVTAKKFIPKKRVIEIKRVQVPRLQVQTPRX

SEQ ID NO: 18383 - protein, 33 aa, Artificial Sequence
  GFR-binding peptide
HDELTVTAKKFIPKKRVIEIKRVQVPRLQVQTP

SEQ ID NO: 18384 - protein, 33 aa, Artificial Sequence
  GFR-binding peptide
HDELTSMEGIFIPKKRVIEMIQVTINSLQVQTP

SEQ ID NO: 18385 - protein, 36 aa, Artificial Sequence
  GFR-binding peptide
  MOD_RES (36)..(36): Xaa is C or S
LHDELTSMEGIFIPKKRVIEMIQVTINSLQVQTPRX

SEQ ID NO: 18386 - protein, 37 aa, Artificial Sequence
  GFR-binding peptide
  MOD_RES (2)..(36): Xaa is C or S
EXKNHQLFSMEGIHQGQHPKIRMIQMTINSEETPVXE

SEQ ID NO: 18387 - protein, 34 aa, Artificial Sequence
  GFR-binding peptide
  MOD_RES (13)..(14)..(15)..(16)..(17): Xaa is A or G
  MOD_RES (18)..(19)..(20)..(21): Xaa is A or G or is absent
ELHEELRVQVEKXXXXXXXXXVKAVKVSRHHVRS

SEQ ID NO: 18388 - protein, 33 aa, Artificial Sequence
  GFR-binding peptide
LHDELTVQVEKFIPKKRVIEVKAVKVSRLQVQT

SEQ ID NO: 18389 - protein, 34 aa, Artificial Sequence
  GFR-binding peptide
LHEELRSMEGLLKPKKRVYEMIQVTINSHHVRSP

SEQ ID NO: 18390 - protein, 44 aa, Artificial Sequence
  GFR-binding peptide
  MOD_RES (2)..(4)..(41): Xaa is C or S
AXAXELHEELRVQVEKLKPKKRVYEVKAVKVSRHHVRSPQXKVS

SEQ ID NO: 18391 - protein, 40 aa, Artificial Sequence
  GFR-binding peptide
  MOD_RES (37)..(37): Xaa is C or S
ELHEELRSMEGILKPKKRVYEMIQVTINSHHVRSPQXKVS

SEQ ID NO: 18392 - protein, 35 aa, Artificial Sequence
  GFR-binding peptide
  MOD_RES (13)..(14)..(15)..(16)..(17): Xaa is A or G
  MOD_RES (18)..(19)..(20)..(21): Xaa is A or G or is absent
ALHDELTSMEGIXXXXXXXXXMIQVTINSLQVQTP

SEQ ID NO: 18393 - protein, 34 aa, Artificial Sequence
  GFR-binding peptide
  MOD_RES (1)..(1): Xaa is C or S
XQSHEELSMEGLHQGQHPKIRMIQMTINSQGTPV

SEQ ID NO: 18394 - protein, 43 aa, Artificial Sequence
  GFR-binding peptide
  MOD_RES (1)..(3)..(40): Xaa is C or S
  MOD_RES (16)..(17)..(18)..(19)..(20): Xaa is A or G
  MOD_RES (21)..(22)..(23)..(24): Xaa is A or G or is absent
XAXELHEELRVQVEKXXXXXXXXXVKAVKVSRHHVRSPQXKVS

SEQ ID NO: 18395 - protein, 41 aa, Artificial Sequence
  GFR-binding peptide
  MOD_RES (1)..(3)..(37): Xaa is C or S
  MOD_RES (15)..(16)..(17)..(18)..(19): Xaa is A or G
  MOD_RES (20)..(21)..(22)..(23): Xaa is A or G or is absent
XEXKNHQLFVQVEKXXXXXXXXXVKAMKVSREETPVXELGE

SEQ ID NO: 18396 - protein, 34 aa, Artificial Sequence
  GFR-binding peptide
  MOD_RES (1)..(1): Xaa is C or S
XQSHEELSMEGIHQGQHPKIRMIQMTINSQGTPV

SEQ ID NO: 18397 - protein, 36 aa, Artificial Sequence
  GFR-binding peptide
  MOD_RES (35)..(35): Xaa is C or S
HEELRSMEGILKPKKRVYEMIQVTINSHHVRSPQXK

SEQ ID NO: 18398 - protein, 37 aa, Artificial Sequence
  GFR-binding peptide
  MOD_RES (2)..(4): Xaa is C or S
RXEXKNHQLFSMEGIHQGQHPKIRMIQMTINSEETPV

SEQ ID NO: 18399 - protein, 40 aa, Artificial Sequence
  GFR-binding peptide
  MOD_RES (34)..(34): Xaa is C or S
KNHQLFVTAKKHQGQHPKIRIKRMQVPREETPVXELGEDN

SEQ ID NO: 18400 - protein, 35 aa, Artificial Sequence
  GFR-binding peptide
ELHEELRVQVEKLKPKKRVYEVKAVKVSRHHVRSP

SEQ ID NO: 18401 - protein, 39 aa, Artificial Sequence
  GFR-binding peptide
  MOD_RES (35)..(35): Xaa is C or S
HEELRVQVEKLKPKKRVYEVKAVKVSRHHVRSPQXKVSS

SEQ ID NO: 18402 - protein, 42 aa, Artificial Sequence
  GFR-binding peptide
  MOD_RES (1)..(3)..(40): Xaa is C or S
XKXALHDELTVTAKKFIPKKRVIEIKRVQVPRLQVQTPRXQV

SEQ ID NO: 18403 - protein, 37 aa, Artificial Sequence
  GFR-binding peptide
  MOD_RES (2)..(2): Xaa is C or S
  MOD_RES (15)..(16)..(17)..(18)..(19): Xaa is A or G
  MOD_RES (20)..(21)..(22)..(23): Xaa is A or G or is absent
AXELHEELRVQVEKXXXXXXXXXVKAVKVSRHHVRSP

SEQ ID NO: 18404 - protein, 36 aa, Artificial Sequence
  GFR-binding peptide
ALHDELTVQVEKFIPKKRVIEVKAVKVSRLQVQTPR

SEQ ID NO: 18405 - protein, 37 aa, Artificial Sequence
  GFR-binding peptide
  MOD_RES (1)..(1): Xaa is C or S
  MOD_RES (14)..(15)..(16)..(17)..(18): Xaa is A or G
  MOD_RES (19)..(20)..(21)..(22): Xaa is A or G or is absent
XALHDELTSMEGIXXXXXXXXXMIQVTINSLQVQTPR

SEQ ID NO: 18406 - protein, 34 aa, Artificial Sequence
  GFR-binding peptide
  MOD_RES (1)..(1): Xaa is C or S
  MOD_RES (13)..(14)..(15)..(16)..(17): Xaa is A or G
  MOD_RES (18)..(19)..(20)..(21): Xaa is A or G or is absent
XQSHEELSMEGLXXXXXXXXXMIQMTINSQGTPV

SEQ ID NO: 18407 - protein, 34 aa, Artificial Sequence
  GFR-binding peptide
  MOD_RES (12)..(13)..(14)..(15)..(16): Xaa is A or G
  MOD_RES (17)..(18)..(19)..(20): Xaa is A or G or is absent
LHDELTSMEGIXXXXXXXXXMIQVTINSLQVQTP

SEQ ID NO: 18408 - protein, 35 aa, Artificial Sequence
  GFR-binding peptide
  MOD_RES (33)..(33): Xaa is C or S
  MOD_RES (11)..(12)..(13)..(14)..(15): Xaa is A or G
  MOD_RES (16)..(17)..(18)..(19): Xaa is A or G or is absent
NHQLFVTAKKXXXXXXXXXIKRMQVPREETPVXEL

SEQ ID NO: 18409 - protein, 40 aa, Artificial Sequence
  GFR-binding peptide
  MOD_RES (2)..(39): Xaa is C or S
AXELHEELRSMEGLLKPKKRVYEMIQVTINSHHVRSPQXK

SEQ ID NO: 18410 - protein, 34 aa, Artificial Sequence
  GFR-binding peptide
  MOD_RES (13)..(14)..(15)..(16)..(17): Xaa is A or G
  MOD_RES (18)..(19)..(20)..(21): Xaa is A or G or is absent
ALHDELTVTAKKXXXXXXXXXIKRVQVPRLQVQT

SEQ ID NO: 18411 - protein, 38 aa, Artificial Sequence
  GFR-binding peptide
  MOD_RES (36)..(36): Xaa is C or S
  MOD_RES (12)..(13)..(14)..(15)..(16): Xaa is A or G
  MOD_RES (17)..(18)..(19)..(20): Xaa is A or G or is absent
LHDELTVTAKKXXXXXXXXXIKRVQVPRLQVQTPRXQV

SEQ ID NO: 18412 - protein, 38 aa, Artificial Sequence
  GFR-binding peptide
  MOD_RES (36)..(36): Xaa is C or S
LHEELRVTAKKLKPKKRVYEIKRVQVPRHHVRSPQXKV

SEQ ID NO: 18413 - protein, 40 aa, Artificial Sequence
  GFR-binding peptide
  MOD_RES (2)..(4): Xaa is C or S
  MOD_RES (17)..(18)..(19)..(20)..(21): Xaa is A or G
  MOD_RES (22)..(23)..(24)..(25): Xaa is A or G or is absent
EXKXALHDELTVTAKKXXXXXXXXXIKRVQVPRLQVQTPR

SEQ ID NO: 18414 - protein, 44 aa, Artificial Sequence
  GFR-binding peptide
  MOD_RES (1)..(3)..(40): Xaa is C or S
  MOD_RES (16)..(17)..(18)..(19)..(20): Xaa is A or G
  MOD_RES (21)..(22)..(23)..(24): Xaa is A or G or is absent
XKXALHDELTVQVEKXXXXXXXXXVKAVKVSRLQVQTPRXQVNR

SEQ ID NO: 18415 - protein, 38 aa, Artificial Sequence
  GFR-binding peptide
  MOD_RES (2)..(4)..(38): Xaa is C or S
RXEXQSHEELSMEGIHQGQHPKIRMIQMTINSQGTPVX

SEQ ID NO: 18416 - protein, 43 aa, Artificial Sequence
  GFR-binding peptide
  MOD_RES (1)..(3)..(40): Xaa is C or S
XAXELHEELRSMEGILKPKKRVYEMIQVTINSHHVRSPQXKVS

SEQ ID NO: 18417 - protein, 40 aa, Artificial Sequence
  GFR-binding peptide
  MOD_RES (2)..(39): Xaa is C or S
AXELHEELRVTAKKLKPKKRVYEIKRVQVPRHHVRSPQXK

SEQ ID NO: 18418 - protein, 43 aa, Artificial Sequence
  GFR-binding peptide
  MOD_RES (1)..(3)..(40): Xaa is C or S
XAXELHEELRSMEGLLKPKKRVYEMIQVTINSHHVRSPQXKVS

SEQ ID NO: 18419 - protein, 34 aa, Artificial Sequence
  GFR-binding peptide
  MOD_RES (1)..(1): Xaa is C or S
  MOD_RES (13)..(14)..(15)..(16)..(17): Xaa is A or G
  MOD_RES (18)..(19)..(20)..(21): Xaa is A or G or is absent
XQSHEELSMEGIXXXXXXXXXMIQMTINSQGTPV

SEQ ID NO: 18420 - protein, 39 aa, Artificial Sequence
  GFR-binding peptide
  MOD_RES (2)..(36): Xaa is C or S
EXKNHQLFSMEGIHQGQHPKIRMIQMTINSEETPVXELG

SEQ ID NO: 18421 - protein, 37 aa, Artificial Sequence
  GFR-binding peptide
  MOD_RES (1)..(3)..(37): Xaa is C or S
  MOD_RES (15)..(16)..(17)..(18)..(19): Xaa is A or G
  MOD_RES (20)..(21)..(22)..(23): Xaa is A or G or is absent
XEXQSHEELVTAKKXXXXXXXXXIKRMQVPRQGTPVX

SEQ ID NO: 18422 - protein, 43 aa, Artificial Sequence
  GFR-binding peptide
  MOD_RES (2)..(4)..(41): Xaa is C or S
EXKXALHDELTVQVEKFIPKKRVIEVKAVKVSRLQVQTPRXQV

SEQ ID NO: 18423 - protein, 38 aa, Artificial Sequence
  GFR-binding peptide
  MOD_RES (33)..(33): Xaa is C or S
  MOD_RES (11)..(12)..(13)..(14)..(15): Xaa is A or G
  MOD_RES (16)..(17)..(18)..(19): Xaa is A or G or is absent
NHQLFVTAKKXXXXXXXXXIKRMQVPREETPVXELGED

SEQ ID NO: 18424 - protein, 40 aa, Artificial Sequence
  GFR-binding peptide
  MOD_RES (34)..(34): Xaa is C or S
  MOD_RES (12)..(13)..(14)..(15)..(16): Xaa is A or G
  MOD_RES (17)..(18)..(19)..(20): Xaa is A or G or is absent
KNHQLFSMEGLXXXXXXXXXMIQMTINSEETPVXELGEDN

SEQ ID NO: 18425 - protein, 40 aa, Artificial Sequence
  GFR-binding peptide
  MOD_RES (1)..(3)..(37): Xaa is C or S
  MOD_RES (15)..(16)..(17)..(18)..(19): Xaa is A or G
  MOD_RES (20)..(21)..(22)..(23): Xaa is A or G or is absent
XEXQSHEELSMEGLXXXXXXXXXMIQMTINSQGTPVXELG

SEQ ID NO: 18426 - protein, 41 aa, Artificial Sequence
  GFR-binding peptide
  MOD_RES (1)..(3)..(37): Xaa is C or S
  MOD_RES (15)..(16)..(17)..(18)..(19): Xaa is A or G
  MOD_RES (20)..(21)..(22)..(23): Xaa is A or G or is absent
XEXQSHEELVQVEKXXXXXXXXXVKAMKVSRQGTPVXELGE

SEQ ID NO: 18427 - protein, 41 aa, Artificial Sequence
  GFR-binding peptide
  MOD_RES (2)..(4)..(38): Xaa is C or S
RXEXKNHQLFVTAKKHQGQHPKIRIKRMQVPREETPVXELG

SEQ ID NO: 18428 - protein, 38 aa, Artificial Sequence
  GFR-binding peptide
  MOD_RES (1)..(3)..(37): Xaa is C or S
  MOD_RES (15)..(16)..(17)..(18)..(19): Xaa is A or G
  MOD_RES (20)..(21)..(22)..(23): Xaa is A or G or is absent
XEXKNHQLFVQVEKXXXXXXXXXVKAMKVSREETPVXE

SEQ ID NO: 18429 - protein, 35 aa, Artificial Sequence
  GFR-binding peptide
  MOD_RES (35)..(35): Xaa is C or S
  MOD_RES (11)..(12)..(13)..(14)..(15): Xaa is A or G
  MOD_RES (16)..(17)..(18)..(19): Xaa is A or G or is absent
HEELRSMEGIXXXXXXXXXMIQVTINSHHVRSPQX

SEQ ID NO: 18430 - protein, 37 aa, Artificial Sequence
  GFR-binding peptide
  MOD_RES (2)..(2): Xaa is C or S
  MOD_RES (15)..(16)..(17)..(18)..(19): Xaa is A or G
  MOD_RES (20)..(21)..(22)..(23): Xaa is A or G or is absent
KXALHDELTVTAKKXXXXXXXXXIKRVQVPRLQVQTP

SEQ ID NO: 18431 - protein, 36 aa, Artificial Sequence
  GFR-binding peptide
  MOD_RES (2)..(36): Xaa is C or S
EXKNHQLFSMEGLHQGQHPKIRMIQMTINSEETPVX

SEQ ID NO: 18432 - protein, 36 aa, Artificial Sequence
  GFR-binding peptide
  MOD_RES (34)..(34): Xaa is C or S
QSHEELVQVEKHQGQHPKIRVKAMKVSRQGTPVXEL

SEQ ID NO: 18433 - protein, 39 aa, Artificial Sequence
  GFR-binding peptide
  MOD_RES (2)..(36): Xaa is C or S
EXKNHQLFVTAKKHQGQHPKIRIKRMQVPREETPVXELG

SEQ ID NO: 18434 - protein, 37 aa, Artificial Sequence
  GFR-binding peptide
  MOD_RES (37)..(37): Xaa is C or S
  MOD_RES (13)..(14)..(15)..(16)..(17): Xaa is A or G
  MOD_RES (18)..(19)..(20)..(21): Xaa is A or G or is absent
ALHDELTSMEGLXXXXXXXXXMIQVTINSLQVQTPRX

SEQ ID NO: 18435 - protein, 35 aa, Artificial Sequence
  GFR-binding peptide
  MOD_RES (33)..(33): Xaa is C or S
  MOD_RES (11)..(12)..(13)..(14)..(15): Xaa is A or G
  MOD_RES (16)..(17)..(18)..(19): Xaa is A or G or is absent
NHQLFVQVEKXXXXXXXXXVKAMKVSREETPVXEL

SEQ ID NO: 18436 - protein, 37 aa, Artificial Sequence
  GFR-binding peptide
  MOD_RES (35)..(35): Xaa is C or S
HDELTVQVEKFIPKKRVIEVKAVKVSRLQVQTPRXQV

SEQ ID NO: 18437 - protein, 33 aa, Artificial Sequence
  GFR-binding peptide
  MOD_RES (12)..(13)..(14)..(15)..(16): Xaa is A or G
  MOD_RES (17)..(18)..(19)..(20): Xaa is A or G or is absent
LHDELTSMEGIXXXXXXXXXMIQVTINSLQVQT

SEQ ID NO: 18438 - protein, 40 aa, Artificial Sequence
  GFR-binding peptide
  MOD_RES (37)..(37): Xaa is C or S
  MOD_RES (13)..(14)..(15)..(16)..(17): Xaa is A or G
  MOD_RES (18)..(19)..(20)..(21): Xaa is A or G or is absent
ALHDELTSMEGIXXXXXXXXXMIQVTINSLQVQTPRXQVN

SEQ ID NO: 18439 - protein, 40 aa, Artificial Sequence
  GFR-binding peptide
  MOD_RES (2)..(4)..(38): Xaa is C or S
RXEXQSHEELVTAKKHQGQHPKIRIKRMQVPRQGTPVXEL

SEQ ID NO: 18440 - protein, 41 aa, Artificial Sequence
  GFR-binding peptide
  MOD_RES (1)..(3)..(37): Xaa is C or S
XEXKNHQLFSMEGLHQGQHPKIRMIQMTINSEETPVXELGE

SEQ ID NO: 18441 - protein, 40 aa, Artificial Sequence
  GFR-binding peptide
  MOD_RES (1)..(3)..(40): Xaa is C or S
  MOD_RES (16)..(17)..(18)..(19)..(20): Xaa is A or G
  MOD_RES (21)..(22)..(23)..(24): Xaa is A or G or is absent
XAXELHEELRVQVEKXXXXXXXXXVKAVKVSRHHVRSPQX

SEQ ID NO: 18442 - protein, 40 aa, Artificial Sequence
  GFR-binding peptide
  MOD_RES (37)..(37): Xaa is C or S
  MOD_RES (13)..(14)..(15)..(16)..(17): Xaa is A or G
  MOD_RES (18)..(19)..(20)..(21): Xaa is A or G or is absent
ELHEELRVQVEKXXXXXXXXXVKAVKVSRHHVRSPQXKVS

SEQ ID NO: 18443 - protein, 38 aa, Artificial Sequence
  GFR-binding peptide
  MOD_RES (2)..(36): Xaa is C or S
  MOD_RES (14)..(15)..(16)..(17)..(18): Xaa is A or G
  MOD_RES (19)..(20)..(21)..(22): Xaa is A or G or is absent
EXKNHQLFVTAKKXXXXXXXXXIKRMQVPREETPVXEL

SEQ ID NO: 18444 - protein, 38 aa, Artificial Sequence
  GFR-binding peptide
  MOD_RES (1)..(38): Xaa is C or S
  MOD_RES (14)..(15)..(16)..(17)..(18): Xaa is A or G
  MOD_RES (19)..(20)..(21)..(22): Xaa is A or G or is absent
XELHEELRVTAKKXXXXXXXXXIKRVQVPRHHVRSPQX

SEQ ID NO: 18445 - protein, 36 aa, Artificial Sequence
  GFR-binding peptide
  MOD_RES (1)..(35): Xaa is C or S
XKNHQLFVQVEKHQGQHPKIRVKAMKVSREETPVXE

SEQ ID NO: 18446 - protein, 35 aa, Artificial Sequence
  GFR-binding peptide
  MOD_RES (13)..(14)..(15)..(16)..(17): Xaa is A or G
  MOD_RES (18)..(19)..(20)..(21): Xaa is A or G or is absent
ELHEELRVQVEKXXXXXXXXXVKAVKVSRHHVRSP

SEQ ID NO: 18447 - protein, 37 aa, Artificial Sequence
  GFR-binding peptide
  MOD_RES (37)..(37): Xaa is C or S
  MOD_RES (13)..(14)..(15)..(16)..(17): Xaa is A or G
  MOD_RES (18)..(19)..(20)..(21): Xaa is A or G or is absent
ALHDELTVQVEKXXXXXXXXXVKAVKVSRLQVQTPRX

SEQ ID NO: 18448 - protein, 40 aa, Artificial Sequence
  GFR-binding peptide
  MOD_RES (1)..(3)..(40): Xaa is C or S
XKXALHDELTVQVEKFIPKKRVIEVKAVKVSRLQVQTPRX

SEQ ID NO: 18449 - protein, 40 aa, Artificial Sequence
  GFR-binding peptide
  MOD_RES (36)..(36): Xaa is C or S
LHEELRSMEGILKPKKRVYEMIQVTINSHHVRSPQXKVSS

SEQ ID NO: 18450 - protein, 37 aa, Artificial Sequence
  GFR-binding peptide
  MOD_RES (34)..(34): Xaa is C or S
QSHEELVTAKKHQGQHPKIRIKRMQVPRQGTPVXELG

SEQ ID NO: 18451 - protein, 40 aa, Artificial Sequence
  GFR-binding peptide
  MOD_RES (34)..(34): Xaa is C or S
QSHEELVTAKKHQGQHPKIRIKRMQVPRQGTPVXELGEDN

SEQ ID NO: 18452 - protein, 37 aa, Artificial Sequence
  GFR-binding peptide
  MOD_RES (1)..(3)..(37): Xaa is C or S
XEXKNHQLFVTAKKHQGQHPKIRIKRMQVPREETPVX

SEQ ID NO: 18453 - protein, 42 aa, Artificial Sequence
  GFR-binding peptide
  MOD_RES (2)..(4)..(38): Xaa is C or S
  MOD_RES (16)..(17)..(18)..(19)..(20): Xaa is A or G
  MOD_RES (21)..(22)..(23)..(24): Xaa is A or G or is absent
RXEXKNHQLFSMEGLXXXXXXXXXMIQMTINSEETPVXELGE

SEQ ID NO: 18454 - protein, 34 aa, Artificial Sequence
  GFR-binding peptide
  MOD_RES (33)..(33): Xaa is C or S
NHQLFVTAKKHQGQHPKIRIKRMQVPREETPVXE

SEQ ID NO: 18455 - protein, 35 aa, Artificial Sequence
  GFR-binding peptide
  MOD_RES (35)..(35): Xaa is C or S
  MOD_RES (11)..(12)..(13)..(14)..(15): Xaa is A or G
  MOD_RES (16)..(17)..(18)..(19): Xaa is A or G or is absent
HEELRSMEGLXXXXXXXXXMIQVTINSHHVRSPQX

SEQ ID NO: 18456 - protein, 38 aa, Artificial Sequence
  GFR-binding peptide
  MOD_RES (1)..(38): Xaa is C or S
  MOD_RES (14)..(15)..(16)..(17)..(18): Xaa is A or G
  MOD_RES (19)..(20)..(21)..(22): Xaa is A or G or is absent
XELHEELRSMEGLXXXXXXXXXMIQVTINSHHVRSPQX

SEQ ID NO: 18457 - protein, 42 aa, Artificial Sequence
  GFR-binding peptide
  MOD_RES (2)..(4)..(41): Xaa is C or S
AXAXELHEELRSMEGILKPKKRVYEMIQVTINSHHVRSPQXK

SEQ ID NO: 18458 - protein, 34 aa, Artificial Sequence
  GFR-binding peptide
LHDELTVQVEKFIPKKRVIEVKAVKVSRLQVQTP

SEQ ID NO: 18459 - protein, 41 aa, Artificial Sequence
  GFR-binding peptide
  MOD_RES (2)..(4)..(41): Xaa is C or S
AXAXELHEELRVTAKKLKPKKRVYEIKRVQVPRHHVRSPQX

SEQ ID NO: 18460 - protein, 34 aa, Artificial Sequence
  GFR-binding peptide
  MOD_RES (34)..(34): Xaa is C or S
  MOD_RES (12)..(13)..(14)..(15)..(16): Xaa is A or G
  MOD_RES (17)..(18)..(19)..(20): Xaa is A or G or is absent
QSHEELSMEGIXXXXXXXXXMIQMTINSQGTPVX

SEQ ID NO: 18461 - protein, 37 aa, Artificial Sequence
  GFR-binding peptide
  MOD_RES (1)..(3)..(37): Xaa is C or S
  MOD_RES (15)..(16)..(17)..(18)..(19): Xaa is A or G
  MOD_RES (20)..(21)..(22)..(23): Xaa is A or G or is absent
XEXKNHQLFVTAKKXXXXXXXXXIKRMQVPREETPVX

SEQ ID NO: 18462 - protein, 40 aa, Artificial Sequence
  GFR-binding peptide
  MOD_RES (2)..(4)..(38): Xaa is C or S
RXEXQSHEELSMEGIHQGQHPKIRMIQMTINSQGTPVXEL

SEQ ID NO: 18463 - protein, 41 aa, Artificial Sequence
  GFR-binding peptide
  MOD_RES (2)..(39): Xaa is C or S
  MOD_RES (15)..(16)..(17)..(18)..(19): Xaa is A or G
  MOD_RES (20)..(21)..(22)..(23): Xaa is A or G or is absent
AXELHEELRSMEGIXXXXXXXXXMIQVTINSHHVRSPQXKV

SEQ ID NO: 18464 - protein, 42 aa, Artificial Sequence
  GFR-binding peptide
  MOD_RES (1)..(3)..(40): Xaa is C or S
  MOD_RES (16)..(17)..(18)..(19)..(20): Xaa is A or G
  MOD_RES (21)..(22)..(23)..(24): Xaa is A or G or is absent
XKXALHDELTSMEGIXXXXXXXXXMIQVTINSLQVQTPRXQV

SEQ ID NO: 18465 - protein, 42 aa, Artificial Sequence
  GFR-binding peptide
  MOD_RES (1)..(3)..(40): Xaa is C or S
  MOD_RES (16)..(17)..(18)..(19)..(20): Xaa is A or G
  MOD_RES (21)..(22)..(23)..(24): Xaa is A or G or is absent
XKXALHDELTSMEGLXXXXXXXXXMIQVTINSLQVQTPRXQV

SEQ ID NO: 18466 - protein, 40 aa, Artificial Sequence
  GFR-binding peptide
  MOD_RES (1)..(35): Xaa is C or S
  MOD_RES (13)..(14)..(15)..(16)..(17): Xaa is A or G
  MOD_RES (18)..(19)..(20)..(21): Xaa is A or G or is absent
XKNHQLFSMEGLXXXXXXXXXMIQMTINSEETPVXELGED

SEQ ID NO: 18467 - protein, 41 aa, Artificial Sequence
  GFR-binding peptide
  MOD_RES (2)..(4)..(38): Xaa is C or S
RXEXKNHQLFSMEGIHQGQHPKIRMIQMTINSEETPVXELG

SEQ ID NO: 18468 - protein, 38 aa, Artificial Sequence
  GFR-binding peptide
  MOD_RES (2)..(4): Xaa is C or S
  MOD_RES (17)..(18)..(19)..(20)..(21): Xaa is A or G
  MOD_RES (22)..(23)..(24)..(25): Xaa is A or G or is absent
AXAXELHEELRSMEGIXXXXXXXXXMIQVTINSHHVRS

SEQ ID NO: 18469 - protein, 38 aa, Artificial Sequence
  GFR-binding peptide
  MOD_RES (37)..(37): Xaa is C or S
ELHEELRVTAKKLKPKKRVYEIKRVQVPRHHVRSPQXK

SEQ ID NO: 18470 - protein, 41 aa, Artificial Sequence
  GFR-binding peptide
  MOD_RES (1)..(3)..(40): Xaa is C or S
  MOD_RES (16)..(17)..(18)..(19)..(20): Xaa is A or G
  MOD_RES (21)..(22)..(23)..(24): Xaa is A or G or is absent
XAXELHEELRSMEGLXXXXXXXXXMIQVTINSHHVRSPQXK

SEQ ID NO: 18471 - protein, 39 aa, Artificial Sequence
  GFR-binding peptide
  MOD_RES (1)..(3): Xaa is C or S
  MOD_RES (16)..(17)..(18)..(19)..(20): Xaa is A or G
  MOD_RES (21)..(22)..(23)..(24): Xaa is A or G or is absent
XAXELHEELRSMEGLXXXXXXXXXMIQVTINSHHVRSPQ

SEQ ID NO: 18472 - protein, 41 aa, Artificial Sequence
  GFR-binding peptide
  MOD_RES (1)..(3)..(37): Xaa is C or S
  MOD_RES (15)..(16)..(17)..(18)..(19): Xaa is A or G
  MOD_RES (20)..(21)..(22)..(23): Xaa is A or G or is absent
XEXKNHQLFSMEGLXXXXXXXXXMIQMTINSEETPVXELGE

SEQ ID NO: 18473 - protein, 33 aa, Artificial Sequence
  GFR-binding peptide
  MOD_RES (12)..(13)..(14)..(15)..(16): Xaa is A or G
  MOD_RES (17)..(18)..(19)..(20): Xaa is A or G or is absent
QSHEELVQVEKXXXXXXXXXVKAMKVSRQGTPV

SEQ ID NO: 18474 - protein, 42 aa, Artificial Sequence
  GFR-binding peptide
  MOD_RES (2)..(36): Xaa is C or S
EXKNHQLFSMEGIHQGQHPKIRMIQMTINSEETPVXELGEDN

SEQ ID NO: 18475 - protein, 40 aa, Artificial Sequence
  GFR-binding peptide
  MOD_RES (34)..(34): Xaa is C or S
  MOD_RES (12)..(13)..(14)..(15)..(16): Xaa is A or G
  MOD_RES (17)..(18)..(19)..(20): Xaa is A or G or is absent
QSHEELSMEGLXXXXXXXXXMIQMTINSQGTPVXELGEDN

SEQ ID NO: 18476 - protein, 37 aa, Artificial Sequence
  GFR-binding peptide
  MOD_RES (1)..(3): Xaa is C or S
  MOD_RES (16)..(17)..(18)..(19)..(20): Xaa is A or G
  MOD_RES (21)..(22)..(23)..(24): Xaa is A or G or is absent
XKXALHDELTVTAKKXXXXXXXXXIKRVQVPRLQVQT

SEQ ID NO: 18477 - protein, 40 aa, Artificial Sequence
  GFR-binding peptide
  MOD_RES (1)..(38): Xaa is C or S
XALHDELTSMEGIFIPKKRVIEMIQVTINSLQVQTPRXQV

SEQ ID NO: 18478 - protein, 44 aa, Artificial Sequence
  GFR-binding peptide
  MOD_RES (2)..(4)..(38): Xaa is C or S
RXEXQSHEELSMEGLHQGQHPKIRMIQMTINSQGTPVXELGEDN

SEQ ID NO: 18479 - protein, 42 aa, Artificial Sequence
  GFR-binding peptide
  MOD_RES (1)..(38): Xaa is C or S
  MOD_RES (14)..(15)..(16)..(17)..(18): Xaa is A or G
  MOD_RES (19)..(20)..(21)..(22): Xaa is A or G or is absent
XELHEELRVQVEKXXXXXXXXXVKAVKVSRHHVRSPQXKVSS

SEQ ID NO: 18480 - protein, 39 aa, Artificial Sequence
  GFR-binding peptide
  MOD_RES (2)..(39): Xaa is C or S
AXELHEELRVQVEKLKPKKRVYEVKAVKVSRHHVRSPQX

SEQ ID NO: 18481 - protein, 37 aa, Artificial Sequence
  GFR-binding peptide
  MOD_RES (34)..(34): Xaa is C or S
  MOD_RES (12)..(13)..(14)..(15)..(16): Xaa is A or G
  MOD_RES (17)..(18)..(19)..(20): Xaa is A or G or is absent
QSHEELSMEGLXXXXXXXXXMIQMTINSQGTPVXELG

SEQ ID NO: 18482 - protein, 39 aa, Artificial Sequence
  GFR-binding peptide
  MOD_RES (1)..(38): Xaa is C or S
  MOD_RES (14)..(15)..(16)..(17)..(18): Xaa is A or G
  MOD_RES (19)..(20)..(21)..(22): Xaa is A or G or is absent
XELHEELRSMEGLXXXXXXXXXMIQVTINSHHVRSPQXK

SEQ ID NO: 18483 - protein, 33 aa, Artificial Sequence
  GFR-binding peptide
LHEELRSMEGLLKPKKRVYEMIQVTINSHHVRS

SEQ ID NO: 18484 - protein, 40 aa, Artificial Sequence
  GFR-binding peptide
  MOD_RES (36)..(36): Xaa is C or S
LHDELTSMEGIFIPKKRVIEMIQVTINSLQVQTPRXQVNR

SEQ ID NO: 18485 - protein, 36 aa, Artificial Sequence
  GFR-binding peptide
  MOD_RES (1)..(1): Xaa is C or S
XALHDELTSMEGIFIPKKRVIEMIQVTINSLQVQTP

SEQ ID NO: 18486 - protein, 43 aa, Artificial Sequence
  GFR-binding peptide
  MOD_RES (2)..(4)..(38): Xaa is C or S
RXEXQSHEELSMEGLHQGQHPKIRMIQMTINSQGTPVXELGED

SEQ ID NO: 18487 - protein, 43 aa, Artificial Sequence
  GFR-binding peptide
  MOD_RES (1)..(3)..(37): Xaa is C or S
XEXQSHEELVQVEKHQGQHPKIRVKAMKVSRQGTPVXELGEDN

SEQ ID NO: 18488 - protein, 42 aa, Artificial Sequence
  GFR-binding peptide
  MOD_RES (1)..(3)..(40): Xaa is C or S
  MOD_RES (16)..(17)..(18)..(19)..(20): Xaa is A or G
  MOD_RES (21)..(22)..(23)..(24): Xaa is A or G or is absent
XAXELHEELRSMEGIXXXXXXXXXMIQVTINSHHVRSPQXKV

SEQ ID NO: 18489 - protein, 40 aa, Artificial Sequence
  GFR-binding peptide
  MOD_RES (1)..(35): Xaa is C or S
  MOD_RES (13)..(14)..(15)..(16)..(17): Xaa is A or G
  MOD_RES (18)..(19)..(20)..(21): Xaa is A or G or is absent
XQSHEELVTAKKXXXXXXXXXIKRMQVPRQGTPVXELGED

SEQ ID NO: 18490 - protein, 37 aa, Artificial Sequence
  GFR-binding peptide
  MOD_RES (2)..(2): Xaa is C or S
KXALHDELTVTAKKFIPKKRVIEIKRVQVPRLQVQTP

SEQ ID NO: 18491 - protein, 38 aa, Artificial Sequence
  GFR-binding peptide
  MOD_RES (35)..(35): Xaa is C or S
  MOD_RES (11)..(12)..(13)..(14)..(15): Xaa is A or G
  MOD_RES (16)..(17)..(18)..(19): Xaa is A or G or is absent
HEELRVTAKKXXXXXXXXXIKRVQVPRHHVRSPQXKVS

SEQ ID NO: 18492 - protein, 37 aa, Artificial Sequence
  GFR-binding peptide
  MOD_RES (34)..(34): Xaa is C or S
  MOD_RES (12)..(13)..(14)..(15)..(16): Xaa is A or G
  MOD_RES (17)..(18)..(19)..(20): Xaa is A or G or is absent
KNHQLFVQVEKXXXXXXXXXVKAMKVSREETPVXELG

SEQ ID NO: 18493 - protein, 43 aa, Artificial Sequence
  GFR-binding peptide
  MOD_RES (2)..(39): Xaa is C or S
  MOD_RES (15)..(16)..(17)..(18)..(19): Xaa is A or G
  MOD_RES (20)..(21)..(22)..(23): Xaa is A or G or is absent
KXALHDELTVTAKKXXXXXXXXXIKRVQVPRLQVQTPRXQVNR

SEQ ID NO: 18494 - protein, 37 aa, Artificial Sequence
  GFR-binding peptide
  MOD_RES (1)..(3): Xaa is C or S
  MOD_RES (16)..(17)..(18)..(19)..(20): Xaa is A or G
  MOD_RES (21)..(22)..(23)..(24): Xaa is A or G or is absent
XAXELHEELRVQVEKXXXXXXXXXVKAVKVSRHHVRS

SEQ ID NO: 18495 - protein, 37 aa, Artificial Sequence
  GFR-binding peptide
  MOD_RES (1)..(3): Xaa is C or S
  MOD_RES (16)..(17)..(18)..(19)..(20): Xaa is A or G
  MOD_RES (21)..(22)..(23)..(24): Xaa is A or G or is absent
XAXELHEELRVTAKKXXXXXXXXXIKRVQVPRHHVRS

SEQ ID NO: 18496 - protein, 32 aa, Artificial Sequence
  GFR-binding peptide
  MOD_RES (11)..(12)..(13)..(14)..(15): Xaa is A or G
  MOD_RES (16)..(17)..(18)..(19): Xaa is A or G or is absent
HEELRSMEGIXXXXXXXXXMIQVTINSHHVRS

SEQ ID NO: 18497 - protein, 41 aa, Artificial Sequence
  GFR-binding peptide
  MOD_RES (37)..(37): Xaa is C or S
  MOD_RES (13)..(14)..(15)..(16)..(17): Xaa is A or G
  MOD_RES (18)..(19)..(20)..(21): Xaa is A or G or is absent
ALHDELTSMEGIXXXXXXXXXMIQVTINSLQVQTPRXQVNR

SEQ ID NO: 18498 - protein, 37 aa, Artificial Sequence
  GFR-binding peptide
  MOD_RES (1)..(3): Xaa is C or S
  MOD_RES (16)..(17)..(18)..(19)..(20): Xaa is A or G
  MOD_RES (21)..(22)..(23)..(24): Xaa is A or G or is absent
XKXALHDELTSMEGIXXXXXXXXXMIQVTINSLQVQT

SEQ ID NO: 18499 - protein, 33 aa, Artificial Sequence
  GFR-binding peptide
QSHEELSMEGLHQGQHPKIRMIQMTINSQGTPV

SEQ ID NO: 18500 - protein, 38 aa, Artificial Sequence
  GFR-binding peptide
  MOD_RES (36)..(36): Xaa is C or S
LHDELTVTAKKFIPKKRVIEIKRVQVPRLQVQTPRXQV

SEQ ID NO: 18501 - protein, 36 aa, Artificial Sequence
  GFR-binding peptide
  MOD_RES (1)..(3): Xaa is C or S
  MOD_RES (15)..(16)..(17)..(18)..(19): Xaa is A or G
  MOD_RES (20)..(21)..(22)..(23): Xaa is A or G or is absent
XEXQSHEELSMEGIXXXXXXXXXMIQMTINSQGTPV

SEQ ID NO: 18502 - protein, 38 aa, Artificial Sequence
  GFR-binding peptide
  MOD_RES (1)..(3): Xaa is C or S
XAXELHEELRSMEGILKPKKRVYEMIQVTINSHHVRSP

SEQ ID NO: 18503 - protein, 40 aa, Artificial Sequence
  GFR-binding peptide
  MOD_RES (1)..(3)..(37): Xaa is C or S
  MOD_RES (15)..(16)..(17)..(18)..(19): Xaa is A or G
  MOD_RES (20)..(21)..(22)..(23): Xaa is A or G or is absent
XEXKNHQLFSMEGLXXXXXXXXXMIQMTINSEETPVXELG

SEQ ID NO: 18504 - protein, 35 aa, Artificial Sequence
  GFR-binding peptide
  MOD_RES (13)..(14)..(15)..(16)..(17): Xaa is A or G
  MOD_RES (18)..(19)..(20)..(21): Xaa is A or G or is absent
ALHDELTVTAKKXXXXXXXXXIKRVQVPRLQVQTP

SEQ ID NO: 18505 - protein, 41 aa, Artificial Sequence
  GFR-binding peptide
  MOD_RES (2)..(36): Xaa is C or S
  MOD_RES (14)..(15)..(16)..(17)..(18): Xaa is A or G
  MOD_RES (19)..(20)..(21)..(22): Xaa is A or G or is absent
EXKNHQLFSMEGIXXXXXXXXXMIQMTINSEETPVXELGED

SEQ ID NO: 18506 - protein, 37 aa, Artificial Sequence
  GFR-binding peptide
  MOD_RES (35)..(35): Xaa is C or S
HDELTSMEGLFIPKKRVIEMIQVTINSLQVQTPRXQV

SEQ ID NO: 18507 - protein, 40 aa, Artificial Sequence
  GFR-binding peptide
  MOD_RES (2)..(4): Xaa is C or S
EXKXALHDELTVTAKKFIPKKRVIEIKRVQVPRLQVQTPR

SEQ ID NO: 18508 - protein, 34 aa, Artificial Sequence
  GFR-binding peptide
  MOD_RES (12)..(13)..(14)..(15)..(16): Xaa is A or G
  MOD_RES (17)..(18)..(19)..(20): Xaa is A or G or is absent
LHDELTVQVEKXXXXXXXXXVKAVKVSRLQVQTP

SEQ ID NO: 18509 - protein, 35 aa, Artificial Sequence
  GFR-binding peptide
  MOD_RES (12)..(13)..(14)..(15)..(16): Xaa is A or G
  MOD_RES (17)..(18)..(19)..(20): Xaa is A or G or is absent
LHDELTVTAKKXXXXXXXXXIKRVQVPRLQVQTPR

SEQ ID NO: 18510 - protein, 38 aa, Artificial Sequence
  GFR-binding peptide
  MOD_RES (34)..(34): Xaa is C or S
  MOD_RES (12)..(13)..(14)..(15)..(16): Xaa is A or G
  MOD_RES (17)..(18)..(19)..(20): Xaa is A or G or is absent
QSHEELSMEGLXXXXXXXXXMIQMTINSQGTPVXELGE

SEQ ID NO: 18511 - protein, 39 aa, Artificial Sequence
  GFR-binding peptide
  MOD_RES (2)..(4): Xaa is C or S
  MOD_RES (17)..(18)..(19)..(20)..(21): Xaa is A or G
  MOD_RES (22)..(23)..(24)..(25): Xaa is A or G or is absent
AXAXELHEELRVQVEKXXXXXXXXXVKAVKVSRHHVRSP

SEQ ID NO: 18512 - protein, 35 aa, Artificial Sequence
  GFR-binding peptide
  MOD_RES (1)..(1): Xaa is C or S
XELHEELRSMEGILKPKKRVYEMIQVTINSHHVRS

SEQ ID NO: 18513 - protein, 38 aa, Artificial Sequence
  GFR-binding peptide
  MOD_RES (36)..(36): Xaa is C or S
LHDELTSMEGIFIPKKRVIEMIQVTINSLQVQTPRXQV

SEQ ID NO: 18514 - protein, 34 aa, Artificial Sequence
  GFR-binding peptide
  MOD_RES (33)..(33): Xaa is C or S
  MOD_RES (11)..(12)..(13)..(14)..(15): Xaa is A or G
  MOD_RES (16)..(17)..(18)..(19): Xaa is A or G or is absent
NHQLFVTAKKXXXXXXXXXIKRMQVPREETPVXE

SEQ ID NO: 18515 - protein, 33 aa, Artificial Sequence
  GFR-binding peptide
LHDELTVTAKKFIPKKRVIEIKRVQVPRLQVQT

SEQ ID NO: 18516 - protein, 42 aa, Artificial Sequence
  GFR-binding peptide
  MOD_RES (1)..(3)..(37): Xaa is C or S
  MOD_RES (15)..(16)..(17)..(18)..(19): Xaa is A or G
  MOD_RES (20)..(21)..(22)..(23): Xaa is A or G or is absent
XEXKNHQLFVTAKKXXXXXXXXXIKRMQVPREETPVXELGED

SEQ ID NO: 18517 - protein, 42 aa, Artificial Sequence
  GFR-binding peptide
  MOD_RES (2)..(39): Xaa is C or S
KXALHDELTSMEGIFIPKKRVIEMIQVTINSLQVQTPRXQVN

SEQ ID NO: 18518 - protein, 38 aa, Artificial Sequence
  GFR-binding peptide
  MOD_RES (34)..(34): Xaa is C or S
QSHEELSMEGIHQGQHPKIRMIQMTINSQGTPVXELGE

SEQ ID NO: 18519 - protein, 38 aa, Artificial Sequence
  GFR-binding peptide
  MOD_RES (1)..(3): Xaa is C or S
  MOD_RES (16)..(17)..(18)..(19)..(20): Xaa is A or G
  MOD_RES (21)..(22)..(23)..(24): Xaa is A or G or is absent
XAXELHEELRVTAKKXXXXXXXXXIKRVQVPRHHVRSP

SEQ ID NO: 18520 - protein, 36 aa, Artificial Sequence
  GFR-binding peptide
  MOD_RES (1)..(1): Xaa is C or S
XELHEELRSMEGILKPKKRVYEMIQVTINSHHVRSP

SEQ ID NO: 18521 - protein, 35 aa, Artificial Sequence
  GFR-binding peptide
  MOD_RES (1)..(1): Xaa is C or S
XELHEELRVTAKKLKPKKRVYEIKRVQVPRHHVRS

SEQ ID NO: 18522 - protein, 38 aa, Artificial Sequence
  GFR-binding peptide
  MOD_RES (34)..(34): Xaa is C or S
QSHEELVTAKKHQGQHPKIRIKRMQVPRQGTPVXELGE

SEQ ID NO: 18523 - protein, 36 aa, Artificial Sequence
  GFR-binding peptide
  MOD_RES (1)..(1): Xaa is C or S
XALHDELTVTAKKFIPKKRVIEIKRVQVPRLQVQTP

SEQ ID NO: 18524 - protein, 36 aa, Artificial Sequence
  GFR-binding peptide
  MOD_RES (35)..(35): Xaa is C or S
HDELTSMEGLFIPKKRVIEMIQVTINSLQVQTPRXQ

SEQ ID NO: 18525 - protein, 37 aa, Artificial Sequence
  GFR-binding peptide
  MOD_RES (2)..(2): Xaa is C or S
  MOD_RES (15)..(16)..(17)..(18)..(19): Xaa is A or G
  MOD_RES (20)..(21)..(22)..(23): Xaa is A or G or is absent
KXALHDELTSMEGLXXXXXXXXXMIQVTINSLQVQTP

SEQ ID NO: 18526 - protein, 33 aa, Artificial Sequence
  GFR-binding peptide
LHDELTSMEGIFIPKKRVIEMIQVTINSLQVQT

SEQ ID NO: 18527 - protein, 34 aa, Artificial Sequence
  GFR-binding peptide
ALHDELTSMEGIFIPKKRVIEMIQVTINSLQVQT

SEQ ID NO: 18528 - protein, 37 aa, Artificial Sequence
  GFR-binding peptide
  MOD_RES (1)..(35): Xaa is C or S
XKNHQLFVTAKKHQGQHPKIRIKRMQVPREETPVXEL

SEQ ID NO: 18529 - protein, 36 aa, Artificial Sequence
  GFR-binding peptide
  MOD_RES (35)..(35): Xaa is C or S
HEELRSMEGLLKPKKRVYEMIQVTINSHHVRSPQXK

SEQ ID NO: 18530 - protein, 37 aa, Artificial Sequence
  GFR-binding peptide
  MOD_RES (1)..(35): Xaa is C or S
  MOD_RES (13)..(14)..(15)..(16)..(17): Xaa is A or G
  MOD_RES (18)..(19)..(20)..(21): Xaa is A or G or is absent
XKNHQLFVTAKKXXXXXXXXXIKRMQVPREETPVXEL

SEQ ID NO: 18531 - protein, 35 aa, Artificial Sequence
  GFR-binding peptide
  MOD_RES (35)..(35): Xaa is C or S
HDELTVTAKKFIPKKRVIEIKRVQVPRLQVQTPRX

SEQ ID NO: 18532 - protein, 38 aa, Artificial Sequence
  GFR-binding peptide
  MOD_RES (37)..(37): Xaa is C or S
ALHDELTVQVEKFIPKKRVIEVKAVKVSRLQVQTPRXQ

SEQ ID NO: 18533 - protein, 38 aa, Artificial Sequence
  GFR-binding peptide
  MOD_RES (35)..(35): Xaa is C or S
  MOD_RES (11)..(12)..(13)..(14)..(15): Xaa is A or G
  MOD_RES (16)..(17)..(18)..(19): Xaa is A or G or is absent
HEELRSMEGLXXXXXXXXXMIQVTINSHHVRSPQXKVS

SEQ ID NO: 18534 - protein, 36 aa, Artificial Sequence
  GFR-binding peptide
  MOD_RES (1)..(3): Xaa is C or S
  MOD_RES (15)..(16)..(17)..(18)..(19): Xaa is A or G
  MOD_RES (20)..(21)..(22)..(23): Xaa is A or G or is absent
XEXQSHEELVQVEKXXXXXXXXXVKAMKVSRQGTPV

SEQ ID NO: 18535 - protein, 36 aa, Artificial Sequence
  GFR-binding peptide
  MOD_RES (36)..(36): Xaa is C or S
  MOD_RES (12)..(13)..(14)..(15)..(16): Xaa is A or G
  MOD_RES (17)..(18)..(19)..(20): Xaa is A or G or is absent
LHDELTVTAKKXXXXXXXXXIKRVQVPRLQVQTPRX

SEQ ID NO: 18536 - protein, 40 aa, Artificial Sequence
  GFR-binding peptide
  MOD_RES (1)..(35): Xaa is C or S
XKNHQLFVQVEKHQGQHPKIRVKAMKVSREETPVXELGED

SEQ ID NO: 18537 - protein, 38 aa, Artificial Sequence
  GFR-binding peptide
  MOD_RES (2)..(4)..(38): Xaa is C or S
  MOD_RES (16)..(17)..(18)..(19)..(20): Xaa is A or G
  MOD_RES (21)..(22)..(23)..(24): Xaa is A or G or is absent
RXEXKNHQLFSMEGLXXXXXXXXXMIQMTINSEETPVX

SEQ ID NO: 18538 - protein, 37 aa, Artificial Sequence
  GFR-binding peptide
  MOD_RES (1)..(3)..(37): Xaa is C or S
  MOD_RES (15)..(16)..(17)..(18)..(19): Xaa is A or G
  MOD_RES (20)..(21)..(22)..(23): Xaa is A or G or is absent
XEXKNHQLFVQVEKXXXXXXXXXVKAMKVSREETPVX

SEQ ID NO: 18539 - protein, 40 aa, Artificial Sequence
  GFR-binding peptide
  MOD_RES (1)..(35): Xaa is C or S
XQSHEELVTAKKHQGQHPKIRIKRMQVPRQGTPVXELGED

SEQ ID NO: 18540 - protein, 37 aa, Artificial Sequence
  GFR-binding peptide
  MOD_RES (35)..(35): Xaa is C or S
HEELRVQVEKLKPKKRVYEVKAVKVSRHHVRSPQXKV

SEQ ID NO: 18541 - protein, 36 aa, Artificial Sequence
  GFR-binding peptide
  MOD_RES (35)..(35): Xaa is C or S
  MOD_RES (11)..(12)..(13)..(14)..(15): Xaa is A or G
  MOD_RES (16)..(17)..(18)..(19): Xaa is A or G or is absent
HDELTVQVEKXXXXXXXXXVKAVKVSRLQVQTPRXQ

SEQ ID NO: 18542 - protein, 40 aa, Artificial Sequence
  GFR-binding peptide
  MOD_RES (2)..(4)..(38): Xaa is C or S
  MOD_RES (16)..(17)..(18)..(19)..(20): Xaa is A or G
  MOD_RES (21)..(22)..(23)..(24): Xaa is A or G or is absent
RXEXKNHQLFSMEGLXXXXXXXXXMIQMTINSEETPVXEL

SEQ ID NO: 18543 - protein, 40 aa, Artificial Sequence
  GFR-binding peptide
  MOD_RES (1)..(38): Xaa is C or S
  MOD_RES (14)..(15)..(16)..(17)..(18): Xaa is A or G
  MOD_RES (19)..(20)..(21)..(22): Xaa is A or G or is absent
XALHDELTVQVEKXXXXXXXXXVKAVKVSRLQVQTPRXQV

SEQ ID NO: 18544 - protein, 41 aa, Artificial Sequence
  GFR-binding peptide
  MOD_RES (2)..(4)..(38): Xaa is C or S
  MOD_RES (16)..(17)..(18)..(19)..(20): Xaa is A or G
  MOD_RES (21)..(22)..(23)..(24): Xaa is A or G or is absent
RXEXQSHEELSMEGLXXXXXXXXXMIQMTINSQGTPVXELG

SEQ ID NO: 18545 - protein, 34 aa, Artificial Sequence
  GFR-binding peptide
  MOD_RES (11)..(12)..(13)..(14)..(15): Xaa is A or G
  MOD_RES (16)..(17)..(18)..(19): Xaa is A or G or is absent
HDELTVQVEKXXXXXXXXXVKAVKVSRLQVQTPR

SEQ ID NO: 18546 - protein, 41 aa, Artificial Sequence
  GFR-binding peptide
  MOD_RES (2)..(36): Xaa is C or S
EXKNHQLFSMEGLHQGQHPKIRMIQMTINSEETPVXELGED

SEQ ID NO: 18547 - protein, 40 aa, Artificial Sequence
  GFR-binding peptide
  MOD_RES (2)..(4): Xaa is C or S
AXAXELHEELRVTAKKLKPKKRVYEIKRVQVPRHHVRSPQ

SEQ ID NO: 18548 - protein, 36 aa, Artificial Sequence
  GFR-binding peptide
  MOD_RES (2)..(2): Xaa is C or S
AXELHEELRVTAKKLKPKKRVYEIKRVQVPRHHVRS

SEQ ID NO: 18549 - protein, 36 aa, Artificial Sequence
  GFR-binding peptide
  MOD_RES (36)..(36): Xaa is C or S
  MOD_RES (12)..(13)..(14)..(15)..(16): Xaa is A or G
  MOD_RES (17)..(18)..(19)..(20): Xaa is A or G or is absent
LHDELTSMEGIXXXXXXXXXMIQVTINSLQVQTPRX

SEQ ID NO: 18550 - protein, 37 aa, Artificial Sequence
  GFR-binding peptide
  MOD_RES (1)..(3): Xaa is C or S
XAXELHEELRSMEGLLKPKKRVYEMIQVTINSHHVRS

SEQ ID NO: 18551 - protein, 33 aa, Artificial Sequence
  GFR-binding peptide
KNHQLFVQVEKHQGQHPKIRVKAMKVSREETPV

SEQ ID NO: 18552 - protein, 34 aa, Artificial Sequence
  GFR-binding peptide
ELHEELRVQVEKLKPKKRVYEVKAVKVSRHHVRS

SEQ ID NO: 18553 - protein, 43 aa, Artificial Sequence
  GFR-binding peptide
  MOD_RES (1)..(3)..(37): Xaa is C or S
XEXQSHEELSMEGIHQGQHPKIRMIQMTINSQGTPVXELGEDN

SEQ ID NO: 18554 - protein, 45 aa, Artificial Sequence
  GFR-binding peptide
  MOD_RES (2)..(4)..(41): Xaa is C or S
EXKXALHDELTSMEGIFIPKKRVIEMIQVTINSLQVQTPRXQVNR

SEQ ID NO: 18555 - protein, 38 aa, Artificial Sequence
  GFR-binding peptide
  MOD_RES (1)..(38): Xaa is C or S
  MOD_RES (14)..(15)..(16)..(17)..(18): Xaa is A or G
  MOD_RES (19)..(20)..(21)..(22): Xaa is A or G or is absent
XELHEELRSMEGIXXXXXXXXXMIQVTINSHHVRSPQX

SEQ ID NO: 18556 - protein, 36 aa, Artificial Sequence
  GFR-binding peptide
  MOD_RES (1)..(1): Xaa is C or S
  MOD_RES (14)..(15)..(16)..(17)..(18): Xaa is A or G
  MOD_RES (19)..(20)..(21)..(22): Xaa is A or G or is absent
XALHDELTVQVEKXXXXXXXXXVKAVKVSRLQVQTP

SEQ ID NO: 18557 - protein, 39 aa, Artificial Sequence
  GFR-binding peptide
  MOD_RES (2)..(36): Xaa is C or S
  MOD_RES (14)..(15)..(16)..(17)..(18): Xaa is A or G
  MOD_RES (19)..(20)..(21)..(22): Xaa is A or G or is absent
EXQSHEELVQVEKXXXXXXXXXVKAMKVSRQGTPVXELG

SEQ ID NO: 18558 - protein, 36 aa, Artificial Sequence
  GFR-binding peptide
  MOD_RES (36)..(36): Xaa is C or S
LHEELRVQVEKLKPKKRVYEVKAVKVSRHHVRSPQX

SEQ ID NO: 18559 - protein, 34 aa, Artificial Sequence
  GFR-binding peptide
HEELRSMEGLLKPKKRVYEMIQVTINSHHVRSPQ

SEQ ID NO: 18560 - protein, 37 aa, Artificial Sequence
  GFR-binding peptide
  MOD_RES (34)..(34): Xaa is C or S
KNHQLFSMEGLHQGQHPKIRMIQMTINSEETPVXELG

SEQ ID NO: 18561 - protein, 41 aa, Artificial Sequence
  GFR-binding peptide
  MOD_RES (37)..(37): Xaa is C or S
  MOD_RES (13)..(14)..(15)..(16)..(17): Xaa is A or G
  MOD_RES (18)..(19)..(20)..(21): Xaa is A or G or is absent
ELHEELRVQVEKXXXXXXXXXVKAVKVSRHHVRSPQXKVSS

SEQ ID NO: 18562 - protein, 42 aa, Artificial Sequence
  GFR-binding peptide
  MOD_RES (2)..(4)..(41): Xaa is C or S
  MOD_RES (17)..(18)..(19)..(20)..(21): Xaa is A or G
  MOD_RES (22)..(23)..(24)..(25): Xaa is A or G or is absent
AXAXELHEELRVQVEKXXXXXXXXXVKAVKVSRHHVRSPQXK

SEQ ID NO: 18563 - protein, 42 aa, Artificial Sequence
  GFR-binding peptide
  MOD_RES (1)..(3)..(37): Xaa is C or S
  MOD_RES (15)..(16)..(17)..(18)..(19): Xaa is A or G
  MOD_RES (20)..(21)..(22)..(23): Xaa is A or G or is absent
XEXKNHQLFSMEGIXXXXXXXXXMIQMTINSEETPVXELGED

SEQ ID NO: 18564 - protein, 39 aa, Artificial Sequence
  GFR-binding peptide
  MOD_RES (2)..(4)..(38): Xaa is C or S
RXEXQSHEELVQVEKHQGQHPKIRVKAMKVSRQGTPVXE

SEQ ID NO: 18565 - protein, 34 aa, Artificial Sequence
  GFR-binding peptide
  MOD_RES (13)..(14)..(15)..(16)..(17): Xaa is A or G
  MOD_RES (18)..(19)..(20)..(21): Xaa is A or G or is absent
ELHEELRSMEGLXXXXXXXXXMIQVTINSHHVRS

SEQ ID NO: 18566 - protein, 44 aa, Artificial Sequence
  GFR-binding peptide
  MOD_RES (2)..(4)..(41): Xaa is C or S
  MOD_RES (17)..(18)..(19)..(20)..(21): Xaa is A or G
  MOD_RES (22)..(23)..(24)..(25): Xaa is A or G or is absent
AXAXELHEELRSMEGLXXXXXXXXXMIQVTINSHHVRSPQXKVS

SEQ ID NO: 18567 - protein, 40 aa, Artificial Sequence
  GFR-binding peptide
  MOD_RES (1)..(38): Xaa is C or S
XALHDELTVTAKKFIPKKRVIEIKRVQVPRLQVQTPRXQV

SEQ ID NO: 18568 - protein, 42 aa, Artificial Sequence
  GFR-binding peptide
  MOD_RES (1)..(3)..(37): Xaa is C or S
  MOD_RES (15)..(16)..(17)..(18)..(19): Xaa is A or G
  MOD_RES (20)..(21)..(22)..(23): Xaa is A or G or is absent
XEXKNHQLFSMEGLXXXXXXXXXMIQMTINSEETPVXELGED

SEQ ID NO: 18569 - protein, 42 aa, Artificial Sequence
  GFR-binding peptide
  MOD_RES (2)..(36): Xaa is C or S
  MOD_RES (14)..(15)..(16)..(17)..(18): Xaa is A or G
  MOD_RES (19)..(20)..(21)..(22): Xaa is A or G or is absent
EXKNHQLFVTAKKXXXXXXXXXIKRMQVPREETPVXELGEDN

SEQ ID NO: 18570 - protein, 41 aa, Artificial Sequence
  GFR-binding peptide
  MOD_RES (2)..(36): Xaa is C or S
EXKNHQLFSMEGIHQGQHPKIRMIQMTINSEETPVXELGED

SEQ ID NO: 18571 - protein, 41 aa, Artificial Sequence
  GFR-binding peptide
  MOD_RES (2)..(36): Xaa is C or S
  MOD_RES (14)..(15)..(16)..(17)..(18): Xaa is A or G
  MOD_RES (19)..(20)..(21)..(22): Xaa is A or G or is absent
EXQSHEELVQVEKXXXXXXXXXVKAMKVSRQGTPVXELGED

SEQ ID NO: 18572 - protein, 35 aa, Artificial Sequence
  GFR-binding peptide
  MOD_RES (12)..(13)..(14)..(15)..(16): Xaa is A or G
  MOD_RES (17)..(18)..(19)..(20): Xaa is A or G or is absent
LHDELTSMEGIXXXXXXXXXMIQVTINSLQVQTPR

SEQ ID NO: 18573 - protein, 39 aa, Artificial Sequence
  GFR-binding peptide
  MOD_RES (1)..(3): Xaa is C or S
  MOD_RES (16)..(17)..(18)..(19)..(20): Xaa is A or G
  MOD_RES (21)..(22)..(23)..(24): Xaa is A or G or is absent
XKXALHDELTSMEGIXXXXXXXXXMIQVTINSLQVQTPR

SEQ ID NO: 18574 - protein, 39 aa, Artificial Sequence
  GFR-binding peptide
  MOD_RES (2)..(39): Xaa is C or S
KXALHDELTSMEGIFIPKKRVIEMIQVTINSLQVQTPRX

SEQ ID NO: 18575 - protein, 41 aa, Artificial Sequence
  GFR-binding peptide
  MOD_RES (2)..(39): Xaa is C or S
AXELHEELRSMEGILKPKKRVYEMIQVTINSHHVRSPQXKV

SEQ ID NO: 18576 - protein, 35 aa, Artificial Sequence
  GFR-binding peptide
LHEELRVQVEKLKPKKRVYEVKAVKVSRHHVRSPQ

SEQ ID NO: 18577 - protein, 39 aa, Artificial Sequence
  GFR-binding peptide
  MOD_RES (34)..(34): Xaa is C or S
  MOD_RES (12)..(13)..(14)..(15)..(16): Xaa is A or G
  MOD_RES (17)..(18)..(19)..(20): Xaa is A or G or is absent
QSHEELSMEGLXXXXXXXXXMIQMTINSQGTPVXELGED

SEQ ID NO: 18578 - protein, 39 aa, Artificial Sequence
  GFR-binding peptide
  MOD_RES (1)..(3)..(37): Xaa is C or S
XEXKNHQLFSMEGLHQGQHPKIRMIQMTINSEETPVXEL

SEQ ID NO: 18579 - protein, 39 aa, Artificial Sequence
  GFR-binding peptide
  MOD_RES (2)..(36): Xaa is C or S
  MOD_RES (14)..(15)..(16)..(17)..(18): Xaa is A or G
  MOD_RES (19)..(20)..(21)..(22): Xaa is A or G or is absent
EXKNHQLFSMEGIXXXXXXXXXMIQMTINSEETPVXELG

SEQ ID NO: 18580 - protein, 38 aa, Artificial Sequence
  GFR-binding peptide
  MOD_RES (2)..(2): Xaa is C or S
AXELHEELRSMEGLLKPKKRVYEMIQVTINSHHVRSPQ

SEQ ID NO: 18581 - protein, 35 aa, Artificial Sequence
  GFR-binding peptide
  MOD_RES (13)..(14)..(15)..(16)..(17): Xaa is A or G
  MOD_RES (18)..(19)..(20)..(21): Xaa is A or G or is absent
ELHEELRSMEGLXXXXXXXXXMIQVTINSHHVRSP

SEQ ID NO: 18582 - protein, 39 aa, Artificial Sequence
  GFR-binding peptide
  MOD_RES (2)..(4)..(38): Xaa is C or S
RXEXQSHEELVTAKKHQGQHPKIRIKRMQVPRQGTPVXE

SEQ ID NO: 18583 - protein, 40 aa, Artificial Sequence
  GFR-binding peptide
  MOD_RES (1)..(3)..(40): Xaa is C or S
  MOD_RES (16)..(17)..(18)..(19)..(20): Xaa is A or G
  MOD_RES (21)..(22)..(23)..(24): Xaa is A or G or is absent
XKXALHDELTSMEGLXXXXXXXXXMIQVTINSLQVQTPRX

SEQ ID NO: 18584 - protein, 39 aa, Artificial Sequence
  GFR-binding peptide
  MOD_RES (2)..(4): Xaa is C or S
  MOD_RES (17)..(18)..(19)..(20)..(21): Xaa is A or G
  MOD_RES (22)..(23)..(24)..(25): Xaa is A or G or is absent
EXKXALHDELTSMEGLXXXXXXXXXMIQVTINSLQVQTP

SEQ ID NO: 18585 - protein, 39 aa, Artificial Sequence
  GFR-binding peptide
  MOD_RES (35)..(35): Xaa is C or S
  MOD_RES (11)..(12)..(13)..(14)..(15): Xaa is A or G
  MOD_RES (16)..(17)..(18)..(19): Xaa is A or G or is absent
HDELTVTAKKXXXXXXXXXIKRVQVPRLQVQTPRXQVNR

SEQ ID NO: 18586 - protein, 36 aa, Artificial Sequence
  GFR-binding peptide
ELHEELRVQVEKLKPKKRVYEVKAVKVSRHHVRSPQ

SEQ ID NO: 18587 - protein, 40 aa, Artificial Sequence
  GFR-binding peptide
  MOD_RES (1)..(3)..(37): Xaa is C or S
XEXKNHQLFVTAKKHQGQHPKIRIKRMQVPREETPVXELG

SEQ ID NO: 18588 - protein, 34 aa, Artificial Sequence
  GFR-binding peptide
HEELRVTAKKLKPKKRVYEIKRVQVPRHHVRSPQ

SEQ ID NO: 18589 - protein, 38 aa, Artificial Sequence
  GFR-binding peptide
  MOD_RES (2)..(4)..(38): Xaa is C or S
  MOD_RES (16)..(17)..(18)..(19)..(20): Xaa is A or G
  MOD_RES (21)..(22)..(23)..(24): Xaa is A or G or is absent
RXEXQSHEELVTAKKXXXXXXXXXIKRMQVPRQGTPVX

SEQ ID NO: 18590 - protein, 34 aa, Artificial Sequence
  GFR-binding peptide
  MOD_RES (12)..(13)..(14)..(15)..(16): Xaa is A or G
  MOD_RES (17)..(18)..(19)..(20): Xaa is A or G or is absent
LHEELRSMEGLXXXXXXXXXMIQVTINSHHVRSP

SEQ ID NO: 18591 - protein, 39 aa, Artificial Sequence
  GFR-binding peptide
  MOD_RES (1)..(38): Xaa is C or S
XALHDELTSMEGLFIPKKRVIEMIQVTINSLQVQTPRXQ

SEQ ID NO: 18592 - protein, 42 aa, Artificial Sequence
  GFR-binding peptide
  MOD_RES (1)..(38): Xaa is C or S
XELHEELRSMEGLLKPKKRVYEMIQVTINSHHVRSPQXKVSS

SEQ ID NO: 18593 - protein, 38 aa, Artificial Sequence
  GFR-binding peptide
  MOD_RES (1)..(35): Xaa is C or S
XQSHEELVTAKKHQGQHPKIRIKRMQVPRQGTPVXELG

SEQ ID NO: 18594 - protein, 42 aa, Artificial Sequence
  GFR-binding peptide
  MOD_RES (1)..(3)..(40): Xaa is C or S
XKXALHDELTVQVEKFIPKKRVIEVKAVKVSRLQVQTPRXQV

SEQ ID NO: 18595 - protein, 41 aa, Artificial Sequence
  GFR-binding peptide
  MOD_RES (1)..(35): Xaa is C or S
XKNHQLFVTAKKHQGQHPKIRIKRMQVPREETPVXELGEDN

SEQ ID NO: 18596 - protein, 40 aa, Artificial Sequence
  GFR-binding peptide
  MOD_RES (36)..(36): Xaa is C or S
  MOD_RES (12)..(13)..(14)..(15)..(16): Xaa is A or G
  MOD_RES (17)..(18)..(19)..(20): Xaa is A or G or is absent
LHDELTVTAKKXXXXXXXXXIKRVQVPRLQVQTPRXQVNR

SEQ ID NO: 18597 - protein, 39 aa, Artificial Sequence
  GFR-binding peptide
  MOD_RES (36)..(36): Xaa is C or S
  MOD_RES (12)..(13)..(14)..(15)..(16): Xaa is A or G
  MOD_RES (17)..(18)..(19)..(20): Xaa is A or G or is absent
LHEELRVQVEKXXXXXXXXXVKAVKVSRHHVRSPQXKVS

SEQ ID NO: 18598 - protein, 33 aa, Artificial Sequence
  GFR-binding peptide
  MOD_RES (12)..(13)..(14)..(15)..(16): Xaa is A or G
  MOD_RES (17)..(18)..(19)..(20): Xaa is A or G or is absent
QSHEELSMEGIXXXXXXXXXMIQMTINSQGTPV

SEQ ID NO: 18599 - protein, 36 aa, Artificial Sequence
  GFR-binding peptide
  MOD_RES (1)..(35): Xaa is C or S
  MOD_RES (13)..(14)..(15)..(16)..(17): Xaa is A or G
  MOD_RES (18)..(19)..(20)..(21): Xaa is A or G or is absent
XQSHEELSMEGLXXXXXXXXXMIQMTINSQGTPVXE

SEQ ID NO: 18600 - protein, 40 aa, Artificial Sequence
  GFR-binding peptide
  MOD_RES (2)..(4)..(38): Xaa is C or S
RXEXKNHQLFSMEGLHQGQHPKIRMIQMTINSEETPVXEL

SEQ ID NO: 18601 - protein, 42 aa, Artificial Sequence
  GFR-binding peptide
  MOD_RES (2)..(4)..(38): Xaa is C or S
  MOD_RES (16)..(17)..(18)..(19)..(20): Xaa is A or G
  MOD_RES (21)..(22)..(23)..(24): Xaa is A or G or is absent
RXEXQSHEELSMEGIXXXXXXXXXMIQMTINSQGTPVXELGE

SEQ ID NO: 18602 - protein, 34 aa, Artificial Sequence
  GFR-binding peptide
  MOD_RES (11)..(12)..(13)..(14)..(15): Xaa is A or G
  MOD_RES (16)..(17)..(18)..(19): Xaa is A or G or is absent
HDELTSMEGLXXXXXXXXXMIQVTINSLQVQTPR

SEQ ID NO: 18603 - protein, 35 aa, Artificial Sequence
  GFR-binding peptide
  MOD_RES (12)..(13)..(14)..(15)..(16): Xaa is A or G
  MOD_RES (17)..(18)..(19)..(20): Xaa is A or G or is absent
LHEELRSMEGIXXXXXXXXXMIQVTINSHHVRSPQ

SEQ ID NO: 18604 - protein, 43 aa, Artificial Sequence
  GFR-binding peptide
  MOD_RES (2)..(4)..(41): Xaa is C or S
  MOD_RES (17)..(18)..(19)..(20)..(21): Xaa is A or G
  MOD_RES (22)..(23)..(24)..(25): Xaa is A or G or is absent
AXAXELHEELRSMEGIXXXXXXXXXMIQVTINSHHVRSPQXKV

SEQ ID NO: 18605 - protein, 35 aa, Artificial Sequence
  GFR-binding peptide
  MOD_RES (1)..(35): Xaa is C or S
XKNHQLFVQVEKHQGQHPKIRVKAMKVSREETPVX

SEQ ID NO: 18606 - protein, 39 aa, Artificial Sequence
  GFR-binding peptide
  MOD_RES (2)..(4)..(38): Xaa is C or S
RXEXKNHQLFSMEGLHQGQHPKIRMIQMTINSEETPVXE

SEQ ID NO: 18607 - protein, 36 aa, Artificial Sequence
  GFR-binding peptide
  MOD_RES (1)..(35): Xaa is C or S
  MOD_RES (13)..(14)..(15)..(16)..(17): Xaa is A or G
  MOD_RES (18)..(19)..(20)..(21): Xaa is A or G or is absent
XQSHEELSMEGIXXXXXXXXXMIQMTINSQGTPVXE

SEQ ID NO: 18608 - protein, 43 aa, Artificial Sequence
  GFR-binding peptide
  MOD_RES (2)..(39): Xaa is C or S
KXALHDELTVTAKKFIPKKRVIEIKRVQVPRLQVQTPRXQVNR

SEQ ID NO: 18609 - protein, 41 aa, Artificial Sequence
  GFR-binding peptide
  MOD_RES (1)..(3)..(40): Xaa is C or S
XAXELHEELRVTAKKLKPKKRVYEIKRVQVPRHHVRSPQXK

SEQ ID NO: 18610 - protein, 37 aa, Artificial Sequence
  GFR-binding peptide
  MOD_RES (2)..(4): Xaa is C or S
RXEXKNHQLFVQVEKHQGQHPKIRVKAMKVSREETPV

SEQ ID NO: 18611 - protein, 37 aa, Artificial Sequence
  GFR-binding peptide
  MOD_RES (2)..(36): Xaa is C or S
EXKNHQLFVTAKKHQGQHPKIRIKRMQVPREETPVXE

SEQ ID NO: 18612 - protein, 39 aa, Artificial Sequence
  GFR-binding peptide
  MOD_RES (1)..(3)..(37): Xaa is C or S
  MOD_RES (15)..(16)..(17)..(18)..(19): Xaa is A or G
  MOD_RES (20)..(21)..(22)..(23): Xaa is A or G or is absent
XEXQSHEELSMEGLXXXXXXXXXMIQMTINSQGTPVXEL

SEQ ID NO: 18613 - protein, 40 aa, Artificial Sequence
  GFR-binding peptide
  MOD_RES (1)..(3)..(40): Xaa is C or S
XKXALHDELTSMEGIFIPKKRVIEMIQVTINSLQVQTPRX

SEQ ID NO: 18614 - protein, 33 aa, Artificial Sequence
  GFR-binding peptide
  MOD_RES (12)..(13)..(14)..(15)..(16): Xaa is A or G
  MOD_RES (17)..(18)..(19)..(20): Xaa is A or G or is absent
QSHEELVTAKKXXXXXXXXXIKRMQVPRQGTPV

SEQ ID NO: 18615 - protein, 44 aa, Artificial Sequence
  GFR-binding peptide
  MOD_RES (1)..(3)..(40): Xaa is C or S
XAXELHEELRSMEGILKPKKRVYEMIQVTINSHHVRSPQXKVSS

SEQ ID NO: 18616 - protein, 42 aa, Artificial Sequence
  GFR-binding peptide
  MOD_RES (2)..(36): Xaa is C or S
  MOD_RES (14)..(15)..(16)..(17)..(18): Xaa is A or G
  MOD_RES (19)..(20)..(21)..(22): Xaa is A or G or is absent
EXKNHQLFSMEGIXXXXXXXXXMIQMTINSEETPVXELGEDN

SEQ ID NO: 18617 - protein, 37 aa, Artificial Sequence
  GFR-binding peptide
  MOD_RES (35)..(35): Xaa is C or S
HEELRSMEGLLKPKKRVYEMIQVTINSHHVRSPQXKV

SEQ ID NO: 18618 - protein, 39 aa, Artificial Sequence
  GFR-binding peptide
  MOD_RES (2)..(4): Xaa is C or S
  MOD_RES (17)..(18)..(19)..(20)..(21): Xaa is A or G
  MOD_RES (22)..(23)..(24)..(25): Xaa is A or G or is absent
EXKXALHDELTVTAKKXXXXXXXXXIKRVQVPRLQVQTP

SEQ ID NO: 18619 - protein, 37 aa, Artificial Sequence
  GFR-binding peptide
  MOD_RES (35)..(35): Xaa is C or S
HEELRSMEGILKPKKRVYEMIQVTINSHHVRSPQXKV

SEQ ID NO: 18620 - protein, 36 aa, Artificial Sequence
  GFR-binding peptide
  MOD_RES (2)..(2): Xaa is C or S
  MOD_RES (15)..(16)..(17)..(18)..(19): Xaa is A or G
  MOD_RES (20)..(21)..(22)..(23): Xaa is A or G or is absent
AXELHEELRSMEGLXXXXXXXXXMIQVTINSHHVRS

SEQ ID NO: 18621 - protein, 41 aa, Artificial Sequence
  GFR-binding peptide
  MOD_RES (1)..(3)..(40): Xaa is C or S
XKXALHDELTSMEGLFIPKKRVIEMIQVTINSLQVQTPRXQ

SEQ ID NO: 18622 - protein, 37 aa, Artificial Sequence
  GFR-binding peptide
  MOD_RES (2)..(36): Xaa is C or S
EXQSHEELVQVEKHQGQHPKIRVKAMKVSRQGTPVXE

SEQ ID NO: 18623 - protein, 43 aa, Artificial Sequence
  GFR-binding peptide
  MOD_RES (2)..(4)..(41): Xaa is C or S
  MOD_RES (17)..(18)..(19)..(20)..(21): Xaa is A or G
  MOD_RES (22)..(23)..(24)..(25): Xaa is A or G or is absent
AXAXELHEELRVQVEKXXXXXXXXXVKAVKVSRHHVRSPQXKV

SEQ ID NO: 18624 - protein, 40 aa, Artificial Sequence
  GFR-binding peptide
  MOD_RES (1)..(3)..(37): Xaa is C or S
XEXKNHQLFSMEGIHQGQHPKIRMIQMTINSEETPVXELG

SEQ ID NO: 18625 - protein, 41 aa, Artificial Sequence
  GFR-binding peptide
  MOD_RES (2)..(39): Xaa is C or S
KXALHDELTSMEGIFIPKKRVIEMIQVTINSLQVQTPRXQV

SEQ ID NO: 18626 - protein, 41 aa, Artificial Sequence
  GFR-binding peptide
  MOD_RES (2)..(4)..(38): Xaa is C or S
RXEXKNHQLFVQVEKHQGQHPKIRVKAMKVSREETPVXELG

SEQ ID NO: 18627 - protein, 37 aa, Artificial Sequence
  GFR-binding peptide
  MOD_RES (36)..(36): Xaa is C or S
  MOD_RES (12)..(13)..(14)..(15)..(16): Xaa is A or G
  MOD_RES (17)..(18)..(19)..(20): Xaa is A or G or is absent
LHDELTSMEGLXXXXXXXXXMIQVTINSLQVQTPRXQ

SEQ ID NO: 18628 - protein, 40 aa, Artificial Sequence
  GFR-binding peptide
  MOD_RES (2)..(4)..(38): Xaa is C or S
RXEXQSHEELVQVEKHQGQHPKIRVKAMKVSRQGTPVXEL

SEQ ID NO: 18629 - protein, 39 aa, Artificial Sequence
  GFR-binding peptide
  MOD_RES (1)..(3): Xaa is C or S
XAXELHEELRVTAKKLKPKKRVYEIKRVQVPRHHVRSPQ

SEQ ID NO: 18630 - protein, 38 aa, Artificial Sequence
  GFR-binding peptide
  MOD_RES (1)..(35): Xaa is C or S
XKNHQLFSMEGLHQGQHPKIRMIQMTINSEETPVXELG

SEQ ID NO: 18631 - protein, 39 aa, Artificial Sequence
  GFR-binding peptide
  MOD_RES (37)..(37): Xaa is C or S
ALHDELTVQVEKFIPKKRVIEVKAVKVSRLQVQTPRXQV

SEQ ID NO: 18632 - protein, 40 aa, Artificial Sequence
  GFR-binding peptide
  MOD_RES (34)..(34): Xaa is C or S
QSHEELVQVEKHQGQHPKIRVKAMKVSRQGTPVXELGEDN

SEQ ID NO: 18633 - protein, 34 aa, Artificial Sequence
  GFR-binding peptide
HEELRVQVEKLKPKKRVYEVKAVKVSRHHVRSPQ

SEQ ID NO: 18634 - protein, 38 aa, Artificial Sequence
  GFR-binding peptide
  MOD_RES (1)..(3)..(37): Xaa is C or S
  MOD_RES (15)..(16)..(17)..(18)..(19): Xaa is A or G
  MOD_RES (20)..(21)..(22)..(23): Xaa is A or G or is absent
XEXKNHQLFSMEGIXXXXXXXXXMIQMTINSEETPVXE

SEQ ID NO: 18635 - protein, 39 aa, Artificial Sequence
  GFR-binding peptide
  MOD_RES (1)..(3)..(37): Xaa is C or S
  MOD_RES (15)..(16)..(17)..(18)..(19): Xaa is A or G
  MOD_RES (20)..(21)..(22)..(23): Xaa is A or G or is absent
XEXQSHEELVQVEKXXXXXXXXXVKAMKVSRQGTPVXEL

SEQ ID NO: 18636 - protein, 36 aa, Artificial Sequence
  GFR-binding peptide
  MOD_RES (1)..(3): Xaa is C or S
  MOD_RES (15)..(16)..(17)..(18)..(19): Xaa is A or G
  MOD_RES (20)..(21)..(22)..(23): Xaa is A or G or is absent
XEXQSHEELSMEGLXXXXXXXXXMIQMTINSQGTPV

SEQ ID NO: 18637 - protein, 41 aa, Artificial Sequence
  GFR-binding peptide
  MOD_RES (1)..(3)..(37): Xaa is C or S
  MOD_RES (15)..(16)..(17)..(18)..(19): Xaa is A or G
  MOD_RES (20)..(21)..(22)..(23): Xaa is A or G or is absent
XEXQSHEELSMEGIXXXXXXXXXMIQMTINSQGTPVXELGE

SEQ ID NO: 18638 - protein, 35 aa, Artificial Sequence
  GFR-binding peptide
  MOD_RES (12)..(13)..(14)..(15)..(16): Xaa is A or G
  MOD_RES (17)..(18)..(19)..(20): Xaa is A or G or is absent
LHEELRVTAKKXXXXXXXXXIKRVQVPRHHVRSPQ

SEQ ID NO: 18639 - protein, 41 aa, Artificial Sequence
  GFR-binding peptide
  MOD_RES (2)..(39): Xaa is C or S
  MOD_RES (15)..(16)..(17)..(18)..(19): Xaa is A or G
  MOD_RES (20)..(21)..(22)..(23): Xaa is A or G or is absent
AXELHEELRVQVEKXXXXXXXXXVKAVKVSRHHVRSPQXKV

SEQ ID NO: 18640 - protein, 43 aa, Artificial Sequence
  GFR-binding peptide
  MOD_RES (1)..(3)..(40): Xaa is C or S
  MOD_RES (16)..(17)..(18)..(19)..(20): Xaa is A or G
  MOD_RES (21)..(22)..(23)..(24): Xaa is A or G or is absent
XAXELHEELRVTAKKXXXXXXXXXIKRVQVPRHHVRSPQXKVS

SEQ ID NO: 18641 - protein, 39 aa, Artificial Sequence
  GFR-binding peptide
  MOD_RES (2)..(4): Xaa is C or S
  MOD_RES (17)..(18)..(19)..(20)..(21): Xaa is A or G
  MOD_RES (22)..(23)..(24)..(25): Xaa is A or G or is absent
AXAXELHEELRSMEGIXXXXXXXXXMIQVTINSHHVRSP

SEQ ID NO: 18642 - protein, 35 aa, Artificial Sequence
  GFR-binding peptide
ALHDELTSMEGIFIPKKRVIEMIQVTINSLQVQTP

SEQ ID NO: 18643 - protein, 40 aa, Artificial Sequence
  GFR-binding peptide
  MOD_RES (36)..(36): Xaa is C or S
  MOD_RES (12)..(13)..(14)..(15)..(16): Xaa is A or G
  MOD_RES (17)..(18)..(19)..(20): Xaa is A or G or is absent
LHDELTSMEGIXXXXXXXXXMIQVTINSLQVQTPRXQVNR

SEQ ID NO: 18644 - protein, 38 aa, Artificial Sequence
  GFR-binding peptide
  MOD_RES (2)..(36): Xaa is C or S
EXKNHQLFVTAKKHQGQHPKIRIKRMQVPREETPVXEL

SEQ ID NO: 18645 - protein, 43 aa, Artificial Sequence
  GFR-binding peptide
  MOD_RES (2)..(39): Xaa is C or S
  MOD_RES (15)..(16)..(17)..(18)..(19): Xaa is A or G
  MOD_RES (20)..(21)..(22)..(23): Xaa is A or G or is absent
KXALHDELTSMEGLXXXXXXXXXMIQVTINSLQVQTPRXQVNR

SEQ ID NO: 18646 - protein, 41 aa, Artificial Sequence
  GFR-binding peptide
  MOD_RES (1)..(38): Xaa is C or S
  MOD_RES (14)..(15)..(16)..(17)..(18): Xaa is A or G
  MOD_RES (19)..(20)..(21)..(22): Xaa is A or G or is absent
XALHDELTSMEGIXXXXXXXXXMIQVTINSLQVQTPRXQVN

SEQ ID NO: 18647 - protein, 41 aa, Artificial Sequence
  GFR-binding peptide
  MOD_RES (2)..(4)..(41): Xaa is C or S
  MOD_RES (17)..(18)..(19)..(20)..(21): Xaa is A or G
  MOD_RES (22)..(23)..(24)..(25): Xaa is A or G or is absent
EXKXALHDELTVTAKKXXXXXXXXXIKRVQVPRLQVQTPRX

SEQ ID NO: 18648 - protein, 38 aa, Artificial Sequence
  GFR-binding peptide
  MOD_RES (2)..(2): Xaa is C or S
  MOD_RES (15)..(16)..(17)..(18)..(19): Xaa is A or G
  MOD_RES (20)..(21)..(22)..(23): Xaa is A or G or is absent
AXELHEELRSMEGLXXXXXXXXXMIQVTINSHHVRSPQ

SEQ ID NO: 18649 - protein, 34 aa, Artificial Sequence
  GFR-binding peptide
  MOD_RES (34)..(34): Xaa is C or S
  MOD_RES (12)..(13)..(14)..(15)..(16): Xaa is A or G
  MOD_RES (17)..(18)..(19)..(20): Xaa is A or G or is absent
QSHEELVQVEKXXXXXXXXXVKAMKVSRQGTPVX

SEQ ID NO: 18650 - protein, 41 aa, Artificial Sequence
  GFR-binding peptide
  MOD_RES (2)..(4)..(38): Xaa is C or S
  MOD_RES (16)..(17)..(18)..(19)..(20): Xaa is A or G
  MOD_RES (21)..(22)..(23)..(24): Xaa is A or G or is absent
RXEXKNHQLFVTAKKXXXXXXXXXIKRMQVPREETPVXELG

SEQ ID NO: 18651 - protein, 41 aa, Artificial Sequence
  GFR-binding peptide
  MOD_RES (2)..(39): Xaa is C or S
  MOD_RES (15)..(16)..(17)..(18)..(19): Xaa is A or G
  MOD_RES (20)..(21)..(22)..(23): Xaa is A or G or is absent
KXALHDELTSMEGIXXXXXXXXXMIQVTINSLQVQTPRXQV

SEQ ID NO: 18652 - protein, 35 aa, Artificial Sequence
  GFR-binding peptide
  MOD_RES (1)..(35): Xaa is C or S
  MOD_RES (13)..(14)..(15)..(16)..(17): Xaa is A or G
  MOD_RES (18)..(19)..(20)..(21): Xaa is A or G or is absent
XKNHQLFVQVEKXXXXXXXXXVKAMKVSREETPVX

SEQ ID NO: 18653 - protein, 39 aa, Artificial Sequence
  GFR-binding peptide
  MOD_RES (36)..(36): Xaa is C or S
LHDELTSMEGIFIPKKRVIEMIQVTINSLQVQTPRXQVN

SEQ ID NO: 18654 - protein, 38 aa, Artificial Sequence
  GFR-binding peptide
  MOD_RES (1)..(35): Xaa is C or S
  MOD_RES (13)..(14)..(15)..(16)..(17): Xaa is A or G
  MOD_RES (18)..(19)..(20)..(21): Xaa is A or G or is absent
XQSHEELVTAKKXXXXXXXXXIKRMQVPRQGTPVXELG

SEQ ID NO: 18655 - protein, 40 aa, Artificial Sequence
  GFR-binding peptide
  MOD_RES (36)..(36): Xaa is C or S
LHDELTVQVEKFIPKKRVIEVKAVKVSRLQVQTPRXQVNR

SEQ ID NO: 18656 - protein, 37 aa, Artificial Sequence
  GFR-binding peptide
  MOD_RES (2)..(2): Xaa is C or S
AXELHEELRSMEGILKPKKRVYEMIQVTINSHHVRSP

SEQ ID NO: 18657 - protein, 42 aa, Artificial Sequence
  GFR-binding peptide
  MOD_RES (2)..(36): Xaa is C or S
EXKNHQLFSMEGLHQGQHPKIRMIQMTINSEETPVXELGEDN

SEQ ID NO: 18658 - protein, 41 aa, Artificial Sequence
  GFR-binding peptide
  MOD_RES (2)..(4)..(41): Xaa is C or S
  MOD_RES (17)..(18)..(19)..(20)..(21): Xaa is A or G
  MOD_RES (22)..(23)..(24)..(25): Xaa is A or G or is absent
EXKXALHDELTSMEGLXXXXXXXXXMIQVTINSLQVQTPRX

SEQ ID NO: 18659 - protein, 36 aa, Artificial Sequence
  GFR-binding peptide
  MOD_RES (1)..(3): Xaa is C or S
XEXKNHQLFSMEGLHQGQHPKIRMIQMTINSEETPV

SEQ ID NO: 18660 - protein, 37 aa, Artificial Sequence
  GFR-binding peptide
  MOD_RES (37)..(37): Xaa is C or S
  MOD_RES (13)..(14)..(15)..(16)..(17): Xaa is A or G
  MOD_RES (18)..(19)..(20)..(21): Xaa is A or G or is absent
ELHEELRSMEGIXXXXXXXXXMIQVTINSHHVRSPQX

SEQ ID NO: 18661 - protein, 41 aa, Artificial Sequence
  GFR-binding peptide
  MOD_RES (1)..(38): Xaa is C or S
XELHEELRVTAKKLKPKKRVYEIKRVQVPRHHVRSPQXKVS

SEQ ID NO: 18662 - protein, 41 aa, Artificial Sequence
  GFR-binding peptide
  MOD_RES (1)..(3)..(37): Xaa is C or S
XEXKNHQLFSMEGIHQGQHPKIRMIQMTINSEETPVXELGE

SEQ ID NO: 18663 - protein, 36 aa, Artificial Sequence
  GFR-binding peptide
  MOD_RES (34)..(34): Xaa is C or S
QSHEELVTAKKHQGQHPKIRIKRMQVPRQGTPVXEL

SEQ ID NO: 18664 - protein, 36 aa, Artificial Sequence
  GFR-binding peptide
  MOD_RES (1)..(35): Xaa is C or S
XQSHEELSMEGLHQGQHPKIRMIQMTINSQGTPVXE

SEQ ID NO: 18665 - protein, 40 aa, Artificial Sequence
  GFR-binding peptide
  MOD_RES (1)..(3)..(40): Xaa is C or S
  MOD_RES (16)..(17)..(18)..(19)..(20): Xaa is A or G
  MOD_RES (21)..(22)..(23)..(24): Xaa is A or G or is absent
XAXELHEELRVTAKKXXXXXXXXXIKRVQVPRHHVRSPQX

SEQ ID NO: 18666 - protein, 43 aa, Artificial Sequence
  GFR-binding peptide
  MOD_RES (2)..(39): Xaa is C or S
KXALHDELTSMEGLFIPKKRVIEMIQVTINSLQVQTPRXQVNR

SEQ ID NO: 18667 - protein, 37 aa, Artificial Sequence
  GFR-binding peptide
  MOD_RES (2)..(4): Xaa is C or S
  MOD_RES (16)..(17)..(18)..(19)..(20): Xaa is A or G
  MOD_RES (21)..(22)..(23)..(24): Xaa is A or G or is absent
RXEXKNHQLFVTAKKXXXXXXXXXIKRMQVPREETPV

SEQ ID NO: 18668 - protein, 39 aa, Artificial Sequence
  GFR-binding peptide
  MOD_RES (36)..(36): Xaa is C or S
LHDELTVTAKKFIPKKRVIEIKRVQVPRLQVQTPRXQVN

SEQ ID NO: 18669 - protein, 32 aa, Artificial Sequence
  GFR-binding peptide
  MOD_RES (11)..(12)..(13)..(14)..(15): Xaa is A or G
  MOD_RES (16)..(17)..(18)..(19): Xaa is A or G or is absent
HEELRVQVEKXXXXXXXXXVKAVKVSRHHVRS

SEQ ID NO: 18670 - protein, 37 aa, Artificial Sequence
  GFR-binding peptide
  MOD_RES (1)..(3): Xaa is C or S
  MOD_RES (16)..(17)..(18)..(19)..(20): Xaa is A or G
  MOD_RES (21)..(22)..(23)..(24): Xaa is A or G or is absent
XKXALHDELTVQVEKXXXXXXXXXVKAVKVSRLQVQT

SEQ ID NO: 18671 - protein, 40 aa, Artificial Sequence
  GFR-binding peptide
  MOD_RES (1)..(3)..(37): Xaa is C or S
  MOD_RES (15)..(16)..(17)..(18)..(19): Xaa is A or G
  MOD_RES (20)..(21)..(22)..(23): Xaa is A or G or is absent
XEXQSHEELVTAKKXXXXXXXXXIKRMQVPRQGTPVXELG

SEQ ID NO: 18672 - protein, 39 aa, Artificial Sequence
  GFR-binding peptide
  MOD_RES (35)..(35): Xaa is C or S
  MOD_RES (11)..(12)..(13)..(14)..(15): Xaa is A or G
  MOD_RES (16)..(17)..(18)..(19): Xaa is A or G or is absent
HDELTSMEGIXXXXXXXXXMIQVTINSLQVQTPRXQVNR

SEQ ID NO: 18673 - protein, 34 aa, Artificial Sequence
  GFR-binding peptide
  MOD_RES (1)..(1): Xaa is C or S
  MOD_RES (13)..(14)..(15)..(16)..(17): Xaa is A or G
  MOD_RES (18)..(19)..(20)..(21): Xaa is A or G or is absent
XKNHQLFVQVEKXXXXXXXXXVKAMKVSREETPV

SEQ ID NO: 18674 - protein, 36 aa, Artificial Sequence
  GFR-binding peptide
  MOD_RES (34)..(34): Xaa is C or S
QSHEELSMEGIHQGQHPKIRMIQMTINSQGTPVXEL

SEQ ID NO: 18675 - protein, 37 aa, Artificial Sequence
  GFR-binding peptide
  MOD_RES (1)..(1): Xaa is C or S
  MOD_RES (14)..(15)..(16)..(17)..(18): Xaa is A or G
  MOD_RES (19)..(20)..(21)..(22): Xaa is A or G or is absent
XALHDELTSMEGLXXXXXXXXXMIQVTINSLQVQTPR

SEQ ID NO: 18676 - protein, 39 aa, Artificial Sequence
  GFR-binding peptide
  MOD_RES (35)..(35): Xaa is C or S
  MOD_RES (11)..(12)..(13)..(14)..(15): Xaa is A or G
  MOD_RES (16)..(17)..(18)..(19): Xaa is A or G or is absent
HDELTSMEGLXXXXXXXXXMIQVTINSLQVQTPRXQVNR

SEQ ID NO: 18677 - protein, 36 aa, Artificial Sequence
  GFR-binding peptide
  MOD_RES (2)..(36): Xaa is C or S
EXKNHQLFSMEGIHQGQHPKIRMIQMTINSEETPVX

SEQ ID NO: 18678 - protein, 38 aa, Artificial Sequence
  GFR-binding peptide
  MOD_RES (1)..(3)..(37): Xaa is C or S
  MOD_RES (15)..(16)..(17)..(18)..(19): Xaa is A or G
  MOD_RES (20)..(21)..(22)..(23): Xaa is A or G or is absent
XEXKNHQLFVTAKKXXXXXXXXXIKRMQVPREETPVXE

SEQ ID NO: 18679 - protein, 39 aa, Artificial Sequence
  GFR-binding peptide
  MOD_RES (1)..(35): Xaa is C or S
XKNHQLFSMEGIHQGQHPKIRMIQMTINSEETPVXELGE

SEQ ID NO: 18680 - protein, 36 aa, Artificial Sequence
  GFR-binding peptide
ELHEELRSMEGLLKPKKRVYEMIQVTINSHHVRSPQ

SEQ ID NO: 18681 - protein, 39 aa, Artificial Sequence
  GFR-binding peptide
  MOD_RES (2)..(36): Xaa is C or S
  MOD_RES (14)..(15)..(16)..(17)..(18): Xaa is A or G
  MOD_RES (19)..(20)..(21)..(22): Xaa is A or G or is absent
EXKNHQLFVTAKKXXXXXXXXXIKRMQVPREETPVXELG

SEQ ID NO: 18682 - protein, 36 aa, Artificial Sequence
  GFR-binding peptide
  MOD_RES (36)..(36): Xaa is C or S
  MOD_RES (12)..(13)..(14)..(15)..(16): Xaa is A or G
  MOD_RES (17)..(18)..(19)..(20): Xaa is A or G or is absent
LHEELRVTAKKXXXXXXXXXIKRVQVPRHHVRSPQX

SEQ ID NO: 18683 - protein, 42 aa, Artificial Sequence
  GFR-binding peptide
  MOD_RES (2)..(4)..(41): Xaa is C or S
EXKXALHDELTSMEGIFIPKKRVIEMIQVTINSLQVQTPRXQ

SEQ ID NO: 18684 - protein, 41 aa, Artificial Sequence
  GFR-binding peptide
  MOD_RES (2)..(36): Xaa is C or S
  MOD_RES (14)..(15)..(16)..(17)..(18): Xaa is A or G
  MOD_RES (19)..(20)..(21)..(22): Xaa is A or G or is absent
EXKNHQLFVTAKKXXXXXXXXXIKRMQVPREETPVXELGED

SEQ ID NO: 18685 - protein, 34 aa, Artificial Sequence
  GFR-binding peptide
  MOD_RES (11)..(12)..(13)..(14)..(15): Xaa is A or G
  MOD_RES (16)..(17)..(18)..(19): Xaa is A or G or is absent
HDELTSMEGIXXXXXXXXXMIQVTINSLQVQTPR

SEQ ID NO: 18686 - protein, 34 aa, Artificial Sequence
  GFR-binding peptide
  MOD_RES (1)..(1): Xaa is C or S
XKNHQLFVQVEKHQGQHPKIRVKAMKVSREETPV

SEQ ID NO: 18687 - protein, 36 aa, Artificial Sequence
  GFR-binding peptide
  MOD_RES (36)..(36): Xaa is C or S
  MOD_RES (12)..(13)..(14)..(15)..(16): Xaa is A or G
  MOD_RES (17)..(18)..(19)..(20): Xaa is A or G or is absent
LHEELRSMEGIXXXXXXXXXMIQVTINSHHVRSPQX

SEQ ID NO: 18688 - protein, 41 aa, Artificial Sequence
  GFR-binding peptide
  MOD_RES (1)..(3)..(37): Xaa is C or S
  MOD_RES (15)..(16)..(17)..(18)..(19): Xaa is A or G
  MOD_RES (20)..(21)..(22)..(23): Xaa is A or G or is absent
XEXQSHEELVTAKKXXXXXXXXXIKRMQVPRQGTPVXELGE

SEQ ID NO: 18689 - protein, 36 aa, Artificial Sequence
  GFR-binding peptide
  MOD_RES (34)..(34): Xaa is C or S
  MOD_RES (12)..(13)..(14)..(15)..(16): Xaa is A or G
  MOD_RES (17)..(18)..(19)..(20): Xaa is A or G or is absent
QSHEELSMEGLXXXXXXXXXMIQMTINSQGTPVXEL

SEQ ID NO: 18690 - protein, 39 aa, Artificial Sequence
  GFR-binding peptide
  MOD_RES (37)..(37): Xaa is C or S
ALHDELTSMEGLFIPKKRVIEMIQVTINSLQVQTPRXQV

SEQ ID NO: 18691 - protein, 40 aa, Artificial Sequence
  GFR-binding peptide
  MOD_RES (1)..(38): Xaa is C or S
  MOD_RES (14)..(15)..(16)..(17)..(18): Xaa is A or G
  MOD_RES (19)..(20)..(21)..(22): Xaa is A or G or is absent
XELHEELRSMEGIXXXXXXXXXMIQVTINSHHVRSPQXKV

SEQ ID NO: 18692 - protein, 35 aa, Artificial Sequence
  GFR-binding peptide
  MOD_RES (1)..(1): Xaa is C or S
  MOD_RES (14)..(15)..(16)..(17)..(18): Xaa is A or G
  MOD_RES (19)..(20)..(21)..(22): Xaa is A or G or is absent
XELHEELRSMEGLXXXXXXXXXMIQVTINSHHVRS

SEQ ID NO: 18693 - protein, 34 aa, Artificial Sequence
  GFR-binding peptide
  MOD_RES (34)..(34): Xaa is C or S
QSHEELSMEGLHQGQHPKIRMIQMTINSQGTPVX

SEQ ID NO: 18694 - protein, 37 aa, Artificial Sequence
  GFR-binding peptide
  MOD_RES (1)..(35): Xaa is C or S
XQSHEELVQVEKHQGQHPKIRVKAMKVSRQGTPVXEL

SEQ ID NO: 18695 - protein, 41 aa, Artificial Sequence
  GFR-binding peptide
  MOD_RES (1)..(35): Xaa is C or S
  MOD_RES (13)..(14)..(15)..(16)..(17): Xaa is A or G
  MOD_RES (18)..(19)..(20)..(21): Xaa is A or G or is absent
XKNHQLFVTAKKXXXXXXXXXIKRMQVPREETPVXELGEDN

SEQ ID NO: 18696 - protein, 43 aa, Artificial Sequence
  GFR-binding peptide
  MOD_RES (2)..(39): Xaa is C or S
AXELHEELRVQVEKLKPKKRVYEVKAVKVSRHHVRSPQXKVSS

SEQ ID NO: 18697 - protein, 37 aa, Artificial Sequence
  GFR-binding peptide
  MOD_RES (1)..(35): Xaa is C or S
  MOD_RES (13)..(14)..(15)..(16)..(17): Xaa is A or G
  MOD_RES (18)..(19)..(20)..(21): Xaa is A or G or is absent
XQSHEELVQVEKXXXXXXXXXVKAMKVSRQGTPVXEL

SEQ ID NO: 18698 - protein, 35 aa, Artificial Sequence
  GFR-binding peptide
  MOD_RES (2)..(2): Xaa is C or S
  MOD_RES (14)..(15)..(16)..(17)..(18): Xaa is A or G
  MOD_RES (19)..(20)..(21)..(22): Xaa is A or G or is absent
EXQSHEELSMEGLXXXXXXXXXMIQMTINSQGTPV

SEQ ID NO: 18699 - protein, 39 aa, Artificial Sequence
  GFR-binding peptide
  MOD_RES (1)..(35): Xaa is C or S
  MOD_RES (13)..(14)..(15)..(16)..(17): Xaa is A or G
  MOD_RES (18)..(19)..(20)..(21): Xaa is A or G or is absent
XKNHQLFSMEGIXXXXXXXXXMIQMTINSEETPVXELGE

SEQ ID NO: 18700 - protein, 38 aa, Artificial Sequence
  GFR-binding peptide
  MOD_RES (35)..(35): Xaa is C or S
  MOD_RES (11)..(12)..(13)..(14)..(15): Xaa is A or G
  MOD_RES (16)..(17)..(18)..(19): Xaa is A or G or is absent
HEELRVQVEKXXXXXXXXXVKAVKVSRHHVRSPQXKVS

SEQ ID NO: 18701 - protein, 40 aa, Artificial Sequence
  GFR-binding peptide
  MOD_RES (2)..(4)..(38): Xaa is C or S
  MOD_RES (16)..(17)..(18)..(19)..(20): Xaa is A or G
  MOD_RES (21)..(22)..(23)..(24): Xaa is A or G or is absent
RXEXQSHEELVTAKKXXXXXXXXXIKRMQVPRQGTPVXEL

SEQ ID NO: 18702 - protein, 38 aa, Artificial Sequence
  GFR-binding peptide
  MOD_RES (2)..(2): Xaa is C or S
  MOD_RES (15)..(16)..(17)..(18)..(19): Xaa is A or G
  MOD_RES (20)..(21)..(22)..(23): Xaa is A or G or is absent
AXELHEELRVTAKKXXXXXXXXXIKRVQVPRHHVRSPQ

SEQ ID NO: 18703 - protein, 42 aa, Artificial Sequence
  GFR-binding peptide
  MOD_RES (7)..(41): Xaa is C or S
  MOD_RES (21)..(22)..(23)..(24)..(25): Xaa is A or G
  MOD_RES (26)..(27)..(28)..(29): Xaa is A or G or is absent
NDEGLEXVPTEERSVKMAKVXXXXXXXXXKEVQVFLQHNKXE

SEQ ID NO: 18704 - protein, 37 aa, Artificial Sequence
  GFR-binding peptide
  MOD_RES (37)..(37): Xaa is C or S
  MOD_RES (16)..(17)..(18)..(19)..(20): Xaa is A or G
  MOD_RES (21)..(22)..(23)..(24): Xaa is A or G or is absent
QPSRVHHSNITVQIMXXXXXXXXXLGEMSRLEEHLEX

SEQ ID NO: 18705 - protein, 36 aa, Artificial Sequence
  GFR-binding peptide
  MOD_RES (34)..(36): Xaa is C or S
VPTGQSNITMQIMRIKPHQGQHIGEMSLEEHSQXEX

SEQ ID NO: 18706 - protein, 40 aa, Artificial Sequence
  GFR-binding peptide
  MOD_RES (6)..(40): Xaa is C or S
  MOD_RES (20)..(21)..(22)..(23)..(24): Xaa is A or G
  MOD_RES (25)..(26)..(27)..(28): Xaa is A or G or is absent
DEGLEXVPTGQSNITMQIMXXXXXXXXXLGEMSLEEHSQX

SEQ ID NO: 18707 - protein, 43 aa, Artificial Sequence
  GFR-binding peptide
  MOD_RES (7)..(41)..(43): Xaa is C or S
NDEGLEXVPTEESNITMQIMRIKPHQGQHLGEMSFLQHNKXEX

SEQ ID NO: 18708 - protein, 35 aa, Artificial Sequence
  GFR-binding peptide
  MOD_RES (1)..(35): Xaa is C or S
XVPTGQSNITMQIMRIKPHQGQHIGEMSLEEHSQX

SEQ ID NO: 18709 - protein, 42 aa, Artificial Sequence
  GFR-binding peptide
  MOD_RES (2)..(39)..(41): Xaa is C or S
  MOD_RES (18)..(19)..(20)..(21)..(22): Xaa is A or G
  MOD_RES (23)..(24)..(25)..(26): Xaa is A or G or is absent
KXQPSRVHHSNITVQIMXXXXXXXXXIGEMSRLEEHLEXAXA

SEQ ID NO: 18710 - protein, 38 aa, Artificial Sequence
  GFR-binding peptide
  MOD_RES (36)..(38): Xaa is C or S
  MOD_RES (15)..(16)..(17)..(18)..(19): Xaa is A or G
  MOD_RES (20)..(21)..(22)..(23): Xaa is A or G or is absent
PSRVHHSNITVQIMXXXXXXXXXIGEMSRLEEHLEXAX

SEQ ID NO: 18711 - protein, 41 aa, Artificial Sequence
  GFR-binding peptide
  MOD_RES (2)..(39)..(41): Xaa is C or S
  MOD_RES (18)..(19)..(20)..(21)..(22): Xaa is A or G
  MOD_RES (23)..(24)..(25)..(26): Xaa is A or G or is absent
QXRPTQVQLSNITVQIMXXXXXXXXXIGEMSTLEDHLAXKX

SEQ ID NO: 18712 - protein, 39 aa, Artificial Sequence
  GFR-binding peptide
  MOD_RES (4)..(38): Xaa is C or S
  MOD_RES (18)..(19)..(20)..(21)..(22): Xaa is A or G
  MOD_RES (23)..(24)..(25)..(26): Xaa is A or G or is absent
GLEXVPTEERSVKMAKVXXXXXXXXXKEVQVFLQHNKXE

SEQ ID NO: 18713 - protein, 32 aa, Artificial Sequence
  GFR-binding peptide
VPTEERPVQMRKIRIKPHQGQHKKATVFLQHN

SEQ ID NO: 18714 - protein, 42 aa, Artificial Sequence
  GFR-binding peptide
  MOD_RES (5)..(42): Xaa is C or S
SSVKXQPSRVHHRPVQVRKIEYVRKKPKLKKATVRLEEHLEX

SEQ ID NO: 18715 - protein, 34 aa, Artificial Sequence
  GFR-binding peptide
  MOD_RES (2)..(2): Xaa is C or S
  MOD_RES (16)..(17)..(18)..(19)..(20): Xaa is A or G
  MOD_RES (21)..(22)..(23)..(24): Xaa is A or G or is absent
EXVPTGQRPVQMRKIXXXXXXXXXKKATVLEEHS

SEQ ID NO: 18716 - protein, 35 aa, Artificial Sequence
  GFR-binding peptide
  MOD_RES (1)..(1): Xaa is C or S
  MOD_RES (17)..(18)..(19)..(20)..(21): Xaa is A or G
  MOD_RES (22)..(23)..(24)..(25): Xaa is A or G or is absent
XRPTQVQLRPVQVRKIXXXXXXXXXKKATVTLEDH

SEQ ID NO: 18717 - protein, 36 aa, Artificial Sequence
  GFR-binding peptide
  MOD_RES (2)..(2): Xaa is C or S
  MOD_RES (18)..(19)..(20)..(21)..(22): Xaa is A or G
  MOD_RES (23)..(24)..(25)..(26): Xaa is A or G or is absent
KXQPSRVHHSNITVQIMXXXXXXXXXLGEMSRLEEH

SEQ ID NO: 18718 - protein, 43 aa, Artificial Sequence
  GFR-binding peptide
  MOD_RES (7)..(41)..(43): Xaa is C or S
  MOD_RES (21)..(22)..(23)..(24)..(25): Xaa is A or G
  MOD_RES (26)..(27)..(28)..(29): Xaa is A or G or is absent
NDEGLEXVPTGQRSVKMAKVXXXXXXXXXKEVQVLEEHSQXEX

SEQ ID NO: 18719 - protein, 40 aa, Artificial Sequence
  GFR-binding peptide
  MOD_RES (7)..(7): Xaa is C or S
  MOD_RES (21)..(22)..(23)..(24)..(25): Xaa is A or G
  MOD_RES (26)..(27)..(28)..(29): Xaa is A or G or is absent
NDEGLEXVPTGQRSVKMAKVXXXXXXXXXKEVQVLEEHSQ

SEQ ID NO: 18720 - protein, 38 aa, Artificial Sequence
  GFR-binding peptide
  MOD_RES (2)..(2): Xaa is C or S
  MOD_RES (18)..(19)..(20)..(21)..(22): Xaa is A or G
  MOD_RES (23)..(24)..(25)..(26): Xaa is A or G or is absent
QXRPTQVQLRSVKVAKVXXXXXXXXXKEVQVTLEDHLA

SEQ ID NO: 18721 - protein, 41 aa, Artificial Sequence
  GFR-binding peptide
  MOD_RES (4)..(38)..(40): Xaa is C or S
  MOD_RES (18)..(19)..(20)..(21)..(22): Xaa is A or G
  MOD_RES (23)..(24)..(25)..(26): Xaa is A or G or is absent
GLEXVPTGQRSVKMAKVXXXXXXXXXKEVQVLEEHSQXEXR

SEQ ID NO: 18722 - protein, 36 aa, Artificial Sequence
  GFR-binding peptide
  MOD_RES (1)..(35): Xaa is C or S
  MOD_RES (15)..(16)..(17)..(18)..(19): Xaa is A or G
  MOD_RES (20)..(21)..(22)..(23): Xaa is A or G or is absent
XVPTGQRSVKMAKVXXXXXXXXXKEVQVLEEHSQXE

SEQ ID NO: 18723 - protein, 36 aa, Artificial Sequence
  GFR-binding peptide
  MOD_RES (1)..(35): Xaa is C or S
  MOD_RES (15)..(16)..(17)..(18)..(19): Xaa is A or G
  MOD_RES (20)..(21)..(22)..(23): Xaa is A or G or is absent
XVPTEESNITMQIMXXXXXXXXXIGEMSFLQHNKXE

SEQ ID NO: 18724 - protein, 35 aa, Artificial Sequence
  GFR-binding peptide
  MOD_RES (34)..(34): Xaa is C or S
VPTEESNITMQIMRIKPHQGQHLGEMSFLQHNKXE

SEQ ID NO: 18725 - protein, 39 aa, Artificial Sequence
  GFR-binding peptide
  MOD_RES (2)..(39): Xaa is C or S
KXQPSRVHHSNITVQIMEYVRKKPKLIGEMSRLEEHLEX

SEQ ID NO: 18726 - protein, 38 aa, Artificial Sequence
  GFR-binding peptide
  MOD_RES (4)..(38): Xaa is C or S
  MOD_RES (18)..(19)..(20)..(21)..(22): Xaa is A or G
  MOD_RES (23)..(24)..(25)..(26): Xaa is A or G or is absent
GLEXVPTEESNITMQIMXXXXXXXXXIGEMSFLQHNKX

SEQ ID NO: 18727 - protein, 36 aa, Artificial Sequence
  GFR-binding peptide
  MOD_RES (34)..(36): Xaa is C or S
VPTEERSVKMAKVRIKPHQGQHKEVQVFLQHNKXEX

SEQ ID NO: 18728 - protein, 40 aa, Artificial Sequence
  GFR-binding peptide
  MOD_RES (2)..(39): Xaa is C or S
  MOD_RES (18)..(19)..(20)..(21)..(22): Xaa is A or G
  MOD_RES (23)..(24)..(25)..(26): Xaa is A or G or is absent
QXRPTQVQLRSVKVAKVXXXXXXXXXKEVQVTLEDHLAXK

SEQ ID NO: 18729 - protein, 37 aa, Artificial Sequence
  GFR-binding peptide
  MOD_RES (4)..(4): Xaa is C or S
  MOD_RES (18)..(19)..(20)..(21)..(22): Xaa is A or G
  MOD_RES (23)..(24)..(25)..(26): Xaa is A or G or is absent
GLEXVPTGQRSVKMAKVXXXXXXXXXKEVQVLEEHSQ

SEQ ID NO: 18730 - protein, 37 aa, Artificial Sequence
  GFR-binding peptide
  MOD_RES (2)..(2): Xaa is C or S
  MOD_RES (18)..(19)..(20)..(21)..(22): Xaa is A or G
  MOD_RES (23)..(24)..(25)..(26): Xaa is A or G or is absent
KXQPSRVHHRSVKVAKVXXXXXXXXXKEVQVRLEEHL

SEQ ID NO: 18731 - protein, 40 aa, Artificial Sequence
  GFR-binding peptide
  MOD_RES (37)..(39): Xaa is C or S
  MOD_RES (16)..(17)..(18)..(19)..(20): Xaa is A or G
  MOD_RES (21)..(22)..(23)..(24): Xaa is A or G or is absent
RPTQVQLRSVKVAKVXXXXXXXXXKEVQVTLEDHLAXKXE

SEQ ID NO: 18732 - protein, 37 aa, Artificial Sequence
  GFR-binding peptide
  MOD_RES (1)..(1): Xaa is C or S
XRPTQVQLRSVKVAKVEIVRKKPIFKEVQVTLEDHLA

SEQ ID NO: 18733 - protein, 42 aa, Artificial Sequence
  GFR-binding peptide
  MOD_RES (5)..(42): Xaa is C or S
  MOD_RES (21)..(22)..(23)..(24)..(25): Xaa is A or G
  MOD_RES (26)..(27)..(28)..(29): Xaa is A or G or is absent
RNVQXRPTQVQLSNITVQIMXXXXXXXXXIGEMSTLEDHLAX

SEQ ID NO: 18734 - protein, 36 aa, Artificial Sequence
  GFR-binding peptide
  MOD_RES (35)..(35): Xaa is C or S
  MOD_RES (14)..(15)..(16)..(17)..(18): Xaa is A or G
  MOD_RES (19)..(20)..(21)..(22): Xaa is A or G or is absent
SRVHHRPVQVRKIXXXXXXXXXKKATVRLEEHLEXA

SEQ ID NO: 18735 - protein, 36 aa, Artificial Sequence
  GFR-binding peptide
  MOD_RES (1)..(1): Xaa is C or S
XQPSRVHHSNITVQIMEYVRKKPKLIGEMSRLEEHL

SEQ ID NO: 18736 - protein, 45 aa, Artificial Sequence
  GFR-binding peptide
  MOD_RES (5)..(42)..(44): Xaa is C or S
SSVKXQPSRVHHSNITVQIMEYVRKKPKLIGEMSRLEEHLEXAXA

SEQ ID NO: 18737 - protein, 34 aa, Artificial Sequence
  GFR-binding peptide
SRVHHRPVQVRKIEYVRKKPKLKKATVRLEEHLE

SEQ ID NO: 18738 - protein, 37 aa, Artificial Sequence
  GFR-binding peptide
  MOD_RES (34)..(36): Xaa is C or S
VPTGQRPVQMRKIRIKPHQGQHKKATVLEEHSQXEXR

SEQ ID NO: 18739 - protein, 35 aa, Artificial Sequence
  GFR-binding peptide
  MOD_RES (1)..(1): Xaa is C or S
XRPTQVQLSNITVQIMEIVRKKPIFIGEMSTLEDH

SEQ ID NO: 18740 - protein, 37 aa, Artificial Sequence
  GFR-binding peptide
  MOD_RES (37)..(37): Xaa is C or S
  MOD_RES (16)..(17)..(18)..(19)..(20): Xaa is A or G
  MOD_RES (21)..(22)..(23)..(24): Xaa is A or G or is absent
QPSRVHHRSVKVAKVXXXXXXXXXKEVQVRLEEHLEX

SEQ ID NO: 18741 - protein, 34 aa, Artificial Sequence
  GFR-binding peptide
  MOD_RES (34)..(34): Xaa is C or S
  MOD_RES (14)..(15)..(16)..(17)..(18): Xaa is A or G
  MOD_RES (19)..(20)..(21)..(22): Xaa is A or G or is absent
VPTEESNITMQIMXXXXXXXXXLGEMSFLQHNKX

SEQ ID NO: 18742 - protein, 33 aa, Artificial Sequence
  GFR-binding peptide
VPTEESNITMQIMRIKPHQGQHLGEMSFLQHNK

SEQ ID NO: 18743 - protein, 44 aa, Artificial Sequence
  GFR-binding peptide
  MOD_RES (4)..(41)..(43): Xaa is C or S
NVQXRPTQVQLSNITVQIMEIVRKKPIFIGEMSTLEDHLAXKXE

SEQ ID NO: 18744 - protein, 40 aa, Artificial Sequence
  GFR-binding peptide
  MOD_RES (4)..(38)..(40): Xaa is C or S
  MOD_RES (18)..(19)..(20)..(21)..(22): Xaa is A or G
  MOD_RES (23)..(24)..(25)..(26): Xaa is A or G or is absent
GLEXVPTEERSVKMAKVXXXXXXXXXKEVQVFLQHNKXEX

SEQ ID NO: 18745 - protein, 39 aa, Artificial Sequence
  GFR-binding peptide
  MOD_RES (4)..(38): Xaa is C or S
  MOD_RES (18)..(19)..(20)..(21)..(22): Xaa is A or G
  MOD_RES (23)..(24)..(25)..(26): Xaa is A or G or is absent
GLEXVPTEESNITMQIMXXXXXXXXXLGEMSFLQHNKXE

SEQ ID NO: 18746 - protein, 38 aa, Artificial Sequence
  GFR-binding peptide
  MOD_RES (2)..(36)..(38): Xaa is C or S
  MOD_RES (16)..(17)..(18)..(19)..(20): Xaa is A or G
  MOD_RES (21)..(22)..(23)..(24): Xaa is A or G or is absent
EXVPTGQSNITMQIMXXXXXXXXXLGEMSLEEHSQXEX

SEQ ID NO: 18747 - protein, 41 aa, Artificial Sequence
  GFR-binding peptide
  MOD_RES (7)..(41): Xaa is C or S
  MOD_RES (21)..(22)..(23)..(24)..(25): Xaa is A or G
  MOD_RES (26)..(27)..(28)..(29): Xaa is A or G or is absent
NDEGLEXVPTGQRSVKMAKVXXXXXXXXXKEVQVLEEHSQX

SEQ ID NO: 18748 - protein, 42 aa, Artificial Sequence
  GFR-binding peptide
  MOD_RES (4)..(41): Xaa is C or S
  MOD_RES (20)..(21)..(22)..(23)..(24): Xaa is A or G
  MOD_RES (25)..(26)..(27)..(28): Xaa is A or G or is absent
NVQXRPTQVQLSNITVQIMXXXXXXXXXIGEMSTLEDHLAXK

SEQ ID NO: 18749 - protein, 36 aa, Artificial Sequence
  GFR-binding peptide
  MOD_RES (4)..(4): Xaa is C or S
  MOD_RES (18)..(19)..(20)..(21)..(22): Xaa is A or G
  MOD_RES (23)..(24)..(25)..(26): Xaa is A or G or is absent
GLEXVPTGQRSVKMAKVXXXXXXXXXKEVQVLEEHS

SEQ ID NO: 18750 - protein, 38 aa, Artificial Sequence
  GFR-binding peptide
  MOD_RES (3)..(37): Xaa is C or S
LEXVPTGQRSVKMAKVRIKPHQGQHKEVQVLEEHSQXE

SEQ ID NO: 18751 - protein, 38 aa, Artificial Sequence
  GFR-binding peptide
  MOD_RES (37)..(37): Xaa is C or S
QPSRVHHRPVQVRKIEYVRKKPKLKKATVRLEEHLEXA

SEQ ID NO: 18752 - protein, 40 aa, Artificial Sequence
  GFR-binding peptide
  MOD_RES (6)..(40): Xaa is C or S
DEGLEXVPTGQSNITMQIMRIKPHQGQHIGEMSLEEHSQX

SEQ ID NO: 18753 - protein, 37 aa, Artificial Sequence
  GFR-binding peptide
  MOD_RES (34)..(36): Xaa is C or S
  MOD_RES (14)..(15)..(16)..(17)..(18): Xaa is A or G
  MOD_RES (19)..(20)..(21)..(22): Xaa is A or G or is absent
VPTGQSNITMQIMXXXXXXXXXIGEMSLEEHSQXEXR

SEQ ID NO: 18754 - protein, 39 aa, Artificial Sequence
  GFR-binding peptide
  MOD_RES (5)..(5): Xaa is C or S
  MOD_RES (21)..(22)..(23)..(24)..(25): Xaa is A or G
  MOD_RES (26)..(27)..(28)..(29): Xaa is A or G or is absent
SSVKXQPSRVHHRPVQVRKIXXXXXXXXXKKATVRLEEH

SEQ ID NO: 18755 - protein, 37 aa, Artificial Sequence
  GFR-binding peptide
  MOD_RES (3)..(3): Xaa is C or S
VQXRPTQVQLSNITVQIMEIVRKKPIFIGEMSTLEDH

SEQ ID NO: 18756 - protein, 43 aa, Artificial Sequence
  GFR-binding peptide
  MOD_RES (5)..(42): Xaa is C or S
  MOD_RES (21)..(22)..(23)..(24)..(25): Xaa is A or G
  MOD_RES (26)..(27)..(28)..(29): Xaa is A or G or is absent
SSVKXQPSRVHHRSVKVAKVXXXXXXXXXKEVQVRLEEHLEXA

SEQ ID NO: 18757 - protein, 42 aa, Artificial Sequence
  GFR-binding peptide
  MOD_RES (6)..(40)..(42): Xaa is C or S
DEGLEXVPTEERPVQMRKIRIKPHQGQHKKATVFLQHNKXEX

SEQ ID NO: 18758 - protein, 41 aa, Artificial Sequence
  GFR-binding peptide
  MOD_RES (4)..(41): Xaa is C or S
SVKXQPSRVHHSNITVQIMEYVRKKPKLIGEMSRLEEHLEX

SEQ ID NO: 18759 - protein, 35 aa, Artificial Sequence
  GFR-binding peptide
  MOD_RES (15)..(16)..(17)..(18)..(19): Xaa is A or G
  MOD_RES (20)..(21)..(22)..(23): Xaa is A or G or is absent
PTQVQLRSVKVAKVXXXXXXXXXKEVQVTLEDHLA

SEQ ID NO: 18760 - protein, 38 aa, Artificial Sequence
  GFR-binding peptide
  MOD_RES (4)..(4): Xaa is C or S
SVKXQPSRVHHRPVQVRKIEYVRKKPKLKKATVRLEEH

SEQ ID NO: 18761 - protein, 37 aa, Artificial Sequence
  GFR-binding peptide
  MOD_RES (5)..(5): Xaa is C or S
EGLEXVPTEERSVKMAKVRIKPHQGQHKEVQVFLQHN

SEQ ID NO: 18762 - protein, 38 aa, Artificial Sequence
  GFR-binding peptide
  MOD_RES (1)..(35)..(37): Xaa is C or S
XVPTGQRPVQMRKIRIKPHQGQHKKATVLEEHSQXEXR

SEQ ID NO: 18763 - protein, 40 aa, Artificial Sequence
  GFR-binding peptide
  MOD_RES (4)..(38)..(40): Xaa is C or S
  MOD_RES (18)..(19)..(20)..(21)..(22): Xaa is A or G
  MOD_RES (23)..(24)..(25)..(26): Xaa is A or G or is absent
GLEXVPTGQSNITMQIMXXXXXXXXXIGEMSLEEHSQXEX

SEQ ID NO: 18764 - protein, 43 aa, Artificial Sequence
  GFR-binding peptide
  MOD_RES (6)..(40)..(42): Xaa is C or S
  MOD_RES (20)..(21)..(22)..(23)..(24): Xaa is A or G
  MOD_RES (25)..(26)..(27)..(28): Xaa is A or G or is absent
DEGLEXVPTGQSNITMQIMXXXXXXXXXLGEMSLEEHSQXEXR

SEQ ID NO: 18765 - protein, 35 aa, Artificial Sequence
  GFR-binding peptide
  MOD_RES (1)..(1): Xaa is C or S
XQPSRVHHRPVQVRKIEYVRKKPKLKKATVRLEEH

SEQ ID NO: 18766 - protein, 39 aa, Artificial Sequence
  GFR-binding peptide
  MOD_RES (2)..(36)..(38): Xaa is C or S
EXVPTGQSNITMQIMRIKPHQGQHIGEMSLEEHSQXEXR

SEQ ID NO: 18767 - protein, 35 aa, Artificial Sequence
  GFR-binding peptide
  MOD_RES (3)..(3): Xaa is C or S
LEXVPTEERSVKMAKVRIKPHQGQHKEVQVFLQHN

SEQ ID NO: 18768 - protein, 40 aa, Artificial Sequence
  GFR-binding peptide
  MOD_RES (4)..(4): Xaa is C or S
  MOD_RES (20)..(21)..(22)..(23)..(24): Xaa is A or G
  MOD_RES (25)..(26)..(27)..(28): Xaa is A or G or is absent
SVKXQPSRVHHRPVQVRKIXXXXXXXXXKKATVRLEEHLE

SEQ ID NO: 18769 - protein, 34 aa, Artificial Sequence
  GFR-binding peptide
  MOD_RES (1)..(1): Xaa is C or S
  MOD_RES (15)..(16)..(17)..(18)..(19): Xaa is A or G
  MOD_RES (20)..(21)..(22)..(23): Xaa is A or G or is absent
XVPTGQSNITMQIMXXXXXXXXXLGEMSLEEHSQ

SEQ ID NO: 18770 - protein, 40 aa, Artificial Sequence
  GFR-binding peptide
  MOD_RES (4)..(4): Xaa is C or S
NVQXRPTQVQLSNITVQIMEIVRKKPIFLGEMSTLEDHLA

SEQ ID NO: 18771 - protein, 38 aa, Artificial Sequence
  GFR-binding peptide
  MOD_RES (1)..(35)..(37): Xaa is C or S
XVPTGQRSVKMAKVRIKPHQGQHKEVQVLEEHSQXEXR

SEQ ID NO: 18772 - protein, 42 aa, Artificial Sequence
  GFR-binding peptide
  MOD_RES (7)..(41): Xaa is C or S
  MOD_RES (21)..(22)..(23)..(24)..(25): Xaa is A or G
  MOD_RES (26)..(27)..(28)..(29): Xaa is A or G or is absent
NDEGLEXVPTEESNITMQIMXXXXXXXXXLGEMSFLQHNKXE

SEQ ID NO: 18773 - protein, 45 aa, Artificial Sequence
  GFR-binding peptide
  MOD_RES (5)..(42)..(44): Xaa is C or S
RNVQXRPTQVQLSNITVQIMEIVRKKPIFLGEMSTLEDHLAXKXE

SEQ ID NO: 18774 - protein, 42 aa, Artificial Sequence
  GFR-binding peptide
  MOD_RES (5)..(39)..(41): Xaa is C or S
  MOD_RES (19)..(20)..(21)..(22)..(23): Xaa is A or G
  MOD_RES (24)..(25)..(26)..(27): Xaa is A or G or is absent
EGLEXVPTGQRSVKMAKVXXXXXXXXXKEVQVLEEHSQXEXR

SEQ ID NO: 18775 - protein, 39 aa, Artificial Sequence
  GFR-binding peptide
  MOD_RES (5)..(39): Xaa is C or S
EGLEXVPTEESNITMQIMRIKPHQGQHLGEMSFLQHNKX

SEQ ID NO: 18776 - protein, 36 aa, Artificial Sequence
  GFR-binding peptide
  MOD_RES (2)..(36): Xaa is C or S
  MOD_RES (16)..(17)..(18)..(19)..(20): Xaa is A or G
  MOD_RES (21)..(22)..(23)..(24): Xaa is A or G or is absent
EXVPTEESNITMQIMXXXXXXXXXIGEMSFLQHNKX

SEQ ID NO: 18777 - protein, 42 aa, Artificial Sequence
  GFR-binding peptide
  MOD_RES (5)..(42): Xaa is C or S
RNVQXRPTQVQLSNITVQIMEIVRKKPIFIGEMSTLEDHLAX

SEQ ID NO: 18778 - protein, 37 aa, Artificial Sequence
  GFR-binding peptide
  MOD_RES (2)..(36): Xaa is C or S
  MOD_RES (16)..(17)..(18)..(19)..(20): Xaa is A or G
  MOD_RES (21)..(22)..(23)..(24): Xaa is A or G or is absent
EXVPTGQSNITMQIMXXXXXXXXXIGEMSLEEHSQXE

SEQ ID NO: 18779 - protein, 41 aa, Artificial Sequence
  GFR-binding peptide
  MOD_RES (4)..(38)..(40): Xaa is C or S
  MOD_RES (18)..(19)..(20)..(21)..(22): Xaa is A or G
  MOD_RES (23)..(24)..(25)..(26): Xaa is A or G or is absent
GLEXVPTGQRPVQMRKIXXXXXXXXXKKATVLEEHSQXEXR

SEQ ID NO: 18780 - protein, 35 aa, Artificial Sequence
  GFR-binding peptide
  MOD_RES (2)..(2): Xaa is C or S
  MOD_RES (16)..(17)..(18)..(19)..(20): Xaa is A or G
  MOD_RES (21)..(22)..(23)..(24): Xaa is A or G or is absent
EXVPTEERPVQMRKIXXXXXXXXXKKATVFLQHNK

SEQ ID NO: 18781 - protein, 38 aa, Artificial Sequence
  GFR-binding peptide
  MOD_RES (5)..(5): Xaa is C or S
  MOD_RES (19)..(20)..(21)..(22)..(23): Xaa is A or G
  MOD_RES (24)..(25)..(26)..(27): Xaa is A or G or is absent
EGLEXVPTGQSNITMQIMXXXXXXXXXIGEMSLEEHSQ

SEQ ID NO: 18782 - protein, 37 aa, Artificial Sequence
  GFR-binding peptide
  MOD_RES (1)..(35)..(37): Xaa is C or S
  MOD_RES (15)..(16)..(17)..(18)..(19): Xaa is A or G
  MOD_RES (20)..(21)..(22)..(23): Xaa is A or G or is absent
XVPTGQSNITMQIMXXXXXXXXXLGEMSLEEHSQXEX

SEQ ID NO: 18783 - protein, 39 aa, Artificial Sequence
  GFR-binding peptide
  MOD_RES (36)..(38): Xaa is C or S
  MOD_RES (15)..(16)..(17)..(18)..(19): Xaa is A or G
  MOD_RES (20)..(21)..(22)..(23): Xaa is A or G or is absent
PTQVQLSNITVQIMXXXXXXXXXIGEMSTLEDHLAXKXE

SEQ ID NO: 18784 - protein, 33 aa, Artificial Sequence
  GFR-binding peptide
VPTGQRPVQMRKIRIKPHQGQHKKATVLEEHSQ

SEQ ID NO: 18785 - protein, 36 aa, Artificial Sequence
  GFR-binding peptide
  MOD_RES (3)..(3): Xaa is C or S
  MOD_RES (17)..(18)..(19)..(20)..(21): Xaa is A or G
  MOD_RES (22)..(23)..(24)..(25): Xaa is A or G or is absent
LEXVPTEERSVKMAKVXXXXXXXXXKEVQVFLQHNK

SEQ ID NO: 18786 - protein, 40 aa, Artificial Sequence
  GFR-binding peptide
  MOD_RES (5)..(5): Xaa is C or S
RNVQXRPTQVQLSNITVQIMEIVRKKPIFLGEMSTLEDHL

SEQ ID NO: 18787 - protein, 35 aa, Artificial Sequence
  GFR-binding peptide
RPTQVQLRSVKVAKVEIVRKKPIFKEVQVTLEDHL

SEQ ID NO: 18788 - protein, 39 aa, Artificial Sequence
  GFR-binding peptide
  MOD_RES (3)..(37)..(39): Xaa is C or S
LEXVPTGQRPVQMRKIRIKPHQGQHKKATVLEEHSQXEX

SEQ ID NO: 18789 - protein, 41 aa, Artificial Sequence
  GFR-binding peptide
  MOD_RES (5)..(5): Xaa is C or S
RNVQXRPTQVQLRSVKVAKVEIVRKKPIFKEVQVTLEDHLA

SEQ ID NO: 18790 - protein, 35 aa, Artificial Sequence
  GFR-binding peptide
  MOD_RES (34)..(34): Xaa is C or S
VPTEERSVKMAKVRIKPHQGQHKEVQVFLQHNKXE

SEQ ID NO: 18791 - protein, 37 aa, Artificial Sequence
  GFR-binding peptide
  MOD_RES (2)..(36): Xaa is C or S
  MOD_RES (16)..(17)..(18)..(19)..(20): Xaa is A or G
  MOD_RES (21)..(22)..(23)..(24): Xaa is A or G or is absent
EXVPTEERPVQMRKIXXXXXXXXXKKATVFLQHNKXE

SEQ ID NO: 18792 - protein, 38 aa, Artificial Sequence
  GFR-binding peptide
  MOD_RES (2)..(2): Xaa is C or S
  MOD_RES (18)..(19)..(20)..(21)..(22): Xaa is A or G
  MOD_RES (23)..(24)..(25)..(26): Xaa is A or G or is absent
KXQPSRVHHRPVQVRKIXXXXXXXXXKKATVRLEEHLE

SEQ ID NO: 18793 - protein, 39 aa, Artificial Sequence
  GFR-binding peptide
  MOD_RES (1)..(38): Xaa is C or S
  MOD_RES (17)..(18)..(19)..(20)..(21): Xaa is A or G
  MOD_RES (22)..(23)..(24)..(25): Xaa is A or G or is absent
XRPTQVQLSNITVQIMXXXXXXXXXIGEMSTLEDHLAXK

SEQ ID NO: 18794 - protein, 34 aa, Artificial Sequence
  GFR-binding peptide
  MOD_RES (16)..(17)..(18)..(19)..(20): Xaa is A or G
  MOD_RES (21)..(22)..(23)..(24): Xaa is A or G or is absent
RPTQVQLRPVQVRKIXXXXXXXXXKKATVTLEDH

SEQ ID NO: 18795 - protein, 44 aa, Artificial Sequence
  GFR-binding peptide
  MOD_RES (5)..(42)..(44): Xaa is C or S
  MOD_RES (21)..(22)..(23)..(24)..(25): Xaa is A or G
  MOD_RES (26)..(27)..(28)..(29): Xaa is A or G or is absent
RNVQXRPTQVQLSNITVQIMXXXXXXXXXLGEMSTLEDHLAXKX

SEQ ID NO: 18796 - protein, 42 aa, Artificial Sequence
  GFR-binding peptide
  MOD_RES (5)..(39)..(41): Xaa is C or S
  MOD_RES (19)..(20)..(21)..(22)..(23): Xaa is A or G
  MOD_RES (24)..(25)..(26)..(27): Xaa is A or G or is absent
EGLEXVPTGQRPVQMRKIXXXXXXXXXKKATVLEEHSQXEXR

SEQ ID NO: 18797 - protein, 41 aa, Artificial Sequence
  GFR-binding peptide
  MOD_RES (4)..(41): Xaa is C or S
NVQXRPTQVQLSNITVQIMEIVRKKPIFIGEMSTLEDHLAX

SEQ ID NO: 18798 - protein, 38 aa, Artificial Sequence
  GFR-binding peptide
  MOD_RES (6)..(6): Xaa is C or S
  MOD_RES (20)..(21)..(22)..(23)..(24): Xaa is A or G
  MOD_RES (25)..(26)..(27)..(28): Xaa is A or G or is absent
DEGLEXVPTEERSVKMAKVXXXXXXXXXKEVQVFLQHN

SEQ ID NO: 18799 - protein, 40 aa, Artificial Sequence
  GFR-binding peptide
  MOD_RES (37)..(39): Xaa is C or S
  MOD_RES (16)..(17)..(18)..(19)..(20): Xaa is A or G
  MOD_RES (21)..(22)..(23)..(24): Xaa is A or G or is absent
QPSRVHHSNITVQIMXXXXXXXXXLGEMSRLEEHLEXAXA

SEQ ID NO: 18800 - protein, 36 aa, Artificial Sequence
  GFR-binding peptide
  MOD_RES (16)..(17)..(18)..(19)..(20): Xaa is A or G
  MOD_RES (21)..(22)..(23)..(24): Xaa is A or G or is absent
RPTQVQLSNITVQIMXXXXXXXXXIGEMSTLEDHLA

SEQ ID NO: 18801 - protein, 36 aa, Artificial Sequence
  GFR-binding peptide
  MOD_RES (2)..(36): Xaa is C or S
EXVPTEERPVQMRKIRIKPHQGQHKKATVFLQHNKX

SEQ ID NO: 18802 - protein, 37 aa, Artificial Sequence
  GFR-binding peptide
  MOD_RES (1)..(1): Xaa is C or S
XQPSRVHHRPVQVRKIEYVRKKPKLKKATVRLEEHLE

SEQ ID NO: 18803 - protein, 40 aa, Artificial Sequence
  GFR-binding peptide
  MOD_RES (3)..(40): Xaa is C or S
VQXRPTQVQLRSVKVAKVEIVRKKPIFKEVQVTLEDHLAX

SEQ ID NO: 18804 - protein, 45 aa, Artificial Sequence
  GFR-binding peptide
  MOD_RES (5)..(42)..(44): Xaa is C or S
  MOD_RES (21)..(22)..(23)..(24)..(25): Xaa is A or G
  MOD_RES (26)..(27)..(28)..(29): Xaa is A or G or is absent
RNVQXRPTQVQLRSVKVAKVXXXXXXXXXKEVQVTLEDHLAXKXE

SEQ ID NO: 18805 - protein, 43 aa, Artificial Sequence
  GFR-binding peptide
  MOD_RES (6)..(40)..(42): Xaa is C or S
DEGLEXVPTEERPVQMRKIRIKPHQGQHKKATVFLQHNKXEXR

SEQ ID NO: 18806 - protein, 39 aa, Artificial Sequence
  GFR-binding peptide
  MOD_RES (37)..(39): Xaa is C or S
  MOD_RES (16)..(17)..(18)..(19)..(20): Xaa is A or G
  MOD_RES (21)..(22)..(23)..(24): Xaa is A or G or is absent
QPSRVHHRPVQVRKIXXXXXXXXXKKATVRLEEHLEXAX

SEQ ID NO: 18807 - protein, 33 aa, Artificial Sequence
  GFR-binding peptide
  MOD_RES (15)..(16)..(17)..(18)..(19): Xaa is A or G
  MOD_RES (20)..(21)..(22)..(23): Xaa is A or G or is absent
PTQVQLSNITVQIMXXXXXXXXXIGEMSTLEDH

SEQ ID NO: 18808 - protein, 40 aa, Artificial Sequence
  GFR-binding peptide
  MOD_RES (2)..(39): Xaa is C or S
QXRPTQVQLRSVKVAKVEIVRKKPIFKEVQVTLEDHLAXK

SEQ ID NO: 18809 - protein, 35 aa, Artificial Sequence
  GFR-binding peptide
  MOD_RES (2)..(2): Xaa is C or S
EXVPTEERSVKMAKVRIKPHQGQHKEVQVFLQHNK

SEQ ID NO: 18810 - protein, 37 aa, Artificial Sequence
  GFR-binding peptide
  MOD_RES (1)..(1): Xaa is C or S
XQPSRVHHSNITVQIMEYVRKKPKLLGEMSRLEEHLE

SEQ ID NO: 18811 - protein, 40 aa, Artificial Sequence
  GFR-binding peptide
  MOD_RES (37)..(39): Xaa is C or S
  MOD_RES (16)..(17)..(18)..(19)..(20): Xaa is A or G
  MOD_RES (21)..(22)..(23)..(24): Xaa is A or G or is absent
RPTQVQLSNITVQIMXXXXXXXXXLGEMSTLEDHLAXKXE

SEQ ID NO: 18812 - protein, 35 aa, Artificial Sequence
  GFR-binding peptide
QPSRVHHRPVQVRKIEYVRKKPKLKKATVRLEEHL

SEQ ID NO: 18813 - protein, 36 aa, Artificial Sequence
  GFR-binding peptide
  MOD_RES (2)..(36): Xaa is C or S
EXVPTEESNITMQIMRIKPHQGQHLGEMSFLQHNKX

SEQ ID NO: 18814 - protein, 38 aa, Artificial Sequence
  GFR-binding peptide
  MOD_RES (3)..(3): Xaa is C or S
  MOD_RES (19)..(20)..(21)..(22)..(23): Xaa is A or G
  MOD_RES (24)..(25)..(26)..(27): Xaa is A or G or is absent
VQXRPTQVQLSNITVQIMXXXXXXXXXIGEMSTLEDHL

SEQ ID NO: 18815 - protein, 40 aa, Artificial Sequence
  GFR-binding peptide
  MOD_RES (37)..(39): Xaa is C or S
  MOD_RES (16)..(17)..(18)..(19)..(20): Xaa is A or G
  MOD_RES (21)..(22)..(23)..(24): Xaa is A or G or is absent
QPSRVHHRPVQVRKIXXXXXXXXXKKATVRLEEHLEXAXA

SEQ ID NO: 18816 - protein, 36 aa, Artificial Sequence
  GFR-binding peptide
  MOD_RES (1)..(35): Xaa is C or S
  MOD_RES (15)..(16)..(17)..(18)..(19): Xaa is A or G
  MOD_RES (20)..(21)..(22)..(23): Xaa is A or G or is absent
XVPTGQRPVQMRKIXXXXXXXXXKKATVLEEHSQXE

SEQ ID NO: 18817 - protein, 44 aa, Artificial Sequence
  GFR-binding peptide
  MOD_RES (4)..(41)..(43): Xaa is C or S
SVKXQPSRVHHSNITVQIMEYVRKKPKLIGEMSRLEEHLEXAXA

SEQ ID NO: 18818 - protein, 43 aa, Artificial Sequence
  GFR-binding peptide
  MOD_RES (5)..(42): Xaa is C or S
SSVKXQPSRVHHSNITVQIMEYVRKKPKLIGEMSRLEEHLEXA

SEQ ID NO: 18819 - protein, 34 aa, Artificial Sequence
  GFR-binding peptide
  MOD_RES (34)..(34): Xaa is C or S
  MOD_RES (14)..(15)..(16)..(17)..(18): Xaa is A or G
  MOD_RES (19)..(20)..(21)..(22): Xaa is A or G or is absent
VPTGQRPVQMRKIXXXXXXXXXKKATVLEEHSQX

SEQ ID NO: 18820 - protein, 38 aa, Artificial Sequence
  GFR-binding peptide
  MOD_RES (5)..(5): Xaa is C or S
EGLEXVPTEERSVKMAKVRIKPHQGQHKEVQVFLQHNK

SEQ ID NO: 18821 - protein, 35 aa, Artificial Sequence
  GFR-binding peptide
PSRVHHSNITVQIMEYVRKKPKLIGEMSRLEEHLE

SEQ ID NO: 18822 - protein, 36 aa, Artificial Sequence
  GFR-binding peptide
  MOD_RES (34)..(36): Xaa is C or S
  MOD_RES (14)..(15)..(16)..(17)..(18): Xaa is A or G
  MOD_RES (19)..(20)..(21)..(22): Xaa is A or G or is absent
VPTEESNITMQIMXXXXXXXXXIGEMSFLQHNKXEX

SEQ ID NO: 18823 - protein, 38 aa, Artificial Sequence
  GFR-binding peptide
  MOD_RES (4)..(38): Xaa is C or S
GLEXVPTEERPVQMRKIRIKPHQGQHKKATVFLQHNKX

SEQ ID NO: 18824 - protein, 37 aa, Artificial Sequence
  GFR-binding peptide
  MOD_RES (3)..(3): Xaa is C or S
VKXQPSRVHHRPVQVRKIEYVRKKPKLKKATVRLEEH

SEQ ID NO: 18825 - protein, 37 aa, Artificial Sequence
  GFR-binding peptide
  MOD_RES (37)..(37): Xaa is C or S
  MOD_RES (16)..(17)..(18)..(19)..(20): Xaa is A or G
  MOD_RES (21)..(22)..(23)..(24): Xaa is A or G or is absent
QPSRVHHRPVQVRKIXXXXXXXXXKKATVRLEEHLEX

SEQ ID NO: 18826 - protein, 39 aa, Artificial Sequence
  GFR-binding peptide
  MOD_RES (2)..(36)..(38): Xaa is C or S
  MOD_RES (16)..(17)..(18)..(19)..(20): Xaa is A or G
  MOD_RES (21)..(22)..(23)..(24): Xaa is A or G or is absent
EXVPTEESNITMQIMXXXXXXXXXLGEMSFLQHNKXEXR

SEQ ID NO: 18827 - protein, 34 aa, Artificial Sequence
  GFR-binding peptide
QPSRVHHSNITVQIMEYVRKKPKLIGEMSRLEEH

SEQ ID NO: 18828 - protein, 38 aa, Artificial Sequence
  GFR-binding peptide
  MOD_RES (1)..(35)..(37): Xaa is C or S
  MOD_RES (15)..(16)..(17)..(18)..(19): Xaa is A or G
  MOD_RES (20)..(21)..(22)..(23): Xaa is A or G or is absent
XVPTGQRSVKMAKVXXXXXXXXXKEVQVLEEHSQXEXR

SEQ ID NO: 18829 - protein, 39 aa, Artificial Sequence
  GFR-binding peptide
  MOD_RES (4)..(38): Xaa is C or S
GLEXVPTGQRPVQMRKIRIKPHQGQHKKATVLEEHSQXE

SEQ ID NO: 18830 - protein, 40 aa, Artificial Sequence
  GFR-binding peptide
  MOD_RES (4)..(4): Xaa is C or S
  MOD_RES (20)..(21)..(22)..(23)..(24): Xaa is A or G
  MOD_RES (25)..(26)..(27)..(28): Xaa is A or G or is absent
SVKXQPSRVHHSNITVQIMXXXXXXXXXLGEMSRLEEHLE

SEQ ID NO: 18831 - protein, 36 aa, Artificial Sequence
  GFR-binding peptide
  MOD_RES (4)..(4): Xaa is C or S
  MOD_RES (18)..(19)..(20)..(21)..(22): Xaa is A or G
  MOD_RES (23)..(24)..(25)..(26): Xaa is A or G or is absent
GLEXVPTGQRPVQMRKIXXXXXXXXXKKATVLEEHS

SEQ ID NO: 18832 - protein, 36 aa, Artificial Sequence
  GFR-binding peptide
  MOD_RES (34)..(36): Xaa is C or S
  MOD_RES (14)..(15)..(16)..(17)..(18): Xaa is A or G
  MOD_RES (19)..(20)..(21)..(22): Xaa is A or G or is absent
VPTGQRPVQMRKIXXXXXXXXXKKATVLEEHSQXEX

SEQ ID NO: 18833 - protein, 40 aa, Artificial Sequence
  GFR-binding peptide
  MOD_RES (7)..(7): Xaa is C or S
NDEGLEXVPTGQSNITMQIMRIKPHQGQHIGEMSLEEHSQ

SEQ ID NO: 18834 - protein, 36 aa, Artificial Sequence
  GFR-binding peptide
  MOD_RES (36)..(36): Xaa is C or S
  MOD_RES (15)..(16)..(17)..(18)..(19): Xaa is A or G
  MOD_RES (20)..(21)..(22)..(23): Xaa is A or G or is absent
PTQVQLSNITVQIMXXXXXXXXXIGEMSTLEDHLAX

SEQ ID NO: 18835 - protein, 35 aa, Artificial Sequence
  GFR-binding peptide
  MOD_RES (1)..(35): Xaa is C or S
  MOD_RES (15)..(16)..(17)..(18)..(19): Xaa is A or G
  MOD_RES (20)..(21)..(22)..(23): Xaa is A or G or is absent
XVPTGQSNITMQIMXXXXXXXXXLGEMSLEEHSQX

SEQ ID NO: 18836 - protein, 41 aa, Artificial Sequence
  GFR-binding peptide
  MOD_RES (3)..(40): Xaa is C or S
  MOD_RES (19)..(20)..(21)..(22)..(23): Xaa is A or G
  MOD_RES (24)..(25)..(26)..(27): Xaa is A or G or is absent
VQXRPTQVQLRSVKVAKVXXXXXXXXXKEVQVTLEDHLAXK

SEQ ID NO: 18837 - protein, 40 aa, Artificial Sequence
  GFR-binding peptide
  MOD_RES (2)..(39): Xaa is C or S
  MOD_RES (18)..(19)..(20)..(21)..(22): Xaa is A or G
  MOD_RES (23)..(24)..(25)..(26): Xaa is A or G or is absent
KXQPSRVHHRPVQVRKIXXXXXXXXXKKATVRLEEHLEXA

SEQ ID NO: 18838 - protein, 43 aa, Artificial Sequence
  GFR-binding peptide
  MOD_RES (5)..(42): Xaa is C or S
RNVQXRPTQVQLRSVKVAKVEIVRKKPIFKEVQVTLEDHLAXK

SEQ ID NO: 18839 - protein, 39 aa, Artificial Sequence
  GFR-binding peptide
  MOD_RES (5)..(39): Xaa is C or S
EGLEXVPTGQRSVKMAKVRIKPHQGQHKEVQVLEEHSQX

SEQ ID NO: 18840 - protein, 35 aa, Artificial Sequence
  GFR-binding peptide
  MOD_RES (35)..(35): Xaa is C or S
  MOD_RES (14)..(15)..(16)..(17)..(18): Xaa is A or G
  MOD_RES (19)..(20)..(21)..(22): Xaa is A or G or is absent
TQVQLRSVKVAKVXXXXXXXXXKEVQVTLEDHLAX

SEQ ID NO: 18841 - protein, 38 aa, Artificial Sequence
  GFR-binding peptide
  MOD_RES (1)..(38): Xaa is C or S
XQPSRVHHRPVQVRKIEYVRKKPKLKKATVRLEEHLEX

SEQ ID NO: 18842 - protein, 37 aa, Artificial Sequence
  GFR-binding peptide
  MOD_RES (4)..(4): Xaa is C or S
GLEXVPTGQSNITMQIMRIKPHQGQHIGEMSLEEHSQ

SEQ ID NO: 18843 - protein, 34 aa, Artificial Sequence
  GFR-binding peptide
  MOD_RES (1)..(1): Xaa is C or S
  MOD_RES (15)..(16)..(17)..(18)..(19): Xaa is A or G
  MOD_RES (20)..(21)..(22)..(23): Xaa is A or G or is absent
XVPTEESNITMQIMXXXXXXXXXLGEMSFLQHNK

SEQ ID NO: 18844 - protein, 41 aa, Artificial Sequence
  GFR-binding peptide
  MOD_RES (3)..(40): Xaa is C or S
  MOD_RES (19)..(20)..(21)..(22)..(23): Xaa is A or G
  MOD_RES (24)..(25)..(26)..(27): Xaa is A or G or is absent
VKXQPSRVHHRPVQVRKIXXXXXXXXXKKATVRLEEHLEXA

SEQ ID NO: 18845 - protein, 36 aa, Artificial Sequence
  GFR-binding peptide
  MOD_RES (1)..(1): Xaa is C or S
  MOD_RES (17)..(18)..(19)..(20)..(21): Xaa is A or G
  MOD_RES (22)..(23)..(24)..(25): Xaa is A or G or is absent
XQPSRVHHRSVKVAKVXXXXXXXXXKEVQVRLEEHL

SEQ ID NO: 18846 - protein, 35 aa, Artificial Sequence
  GFR-binding peptide
  MOD_RES (35)..(35): Xaa is C or S
TQVQLSNITVQIMEIVRKKPIFLGEMSTLEDHLAX

SEQ ID NO: 18847 - protein, 43 aa, Artificial Sequence
  GFR-binding peptide
  MOD_RES (7)..(41)..(43): Xaa is C or S
  MOD_RES (21)..(22)..(23)..(24)..(25): Xaa is A or G
  MOD_RES (26)..(27)..(28)..(29): Xaa is A or G or is absent
NDEGLEXVPTEESNITMQIMXXXXXXXXXIGEMSFLQHNKXEX

SEQ ID NO: 18848 - protein, 33 aa, Artificial Sequence
  GFR-binding peptide
  MOD_RES (1)..(1): Xaa is C or S
XVPTEERSVKMAKVRIKPHQGQHKEVQVFLQHN

SEQ ID NO: 18849 - protein, 37 aa, Artificial Sequence
  GFR-binding peptide
  MOD_RES (1)..(1): Xaa is C or S
  MOD_RES (17)..(18)..(19)..(20)..(21): Xaa is A or G
  MOD_RES (22)..(23)..(24)..(25): Xaa is A or G or is absent
XQPSRVHHRSVKVAKVXXXXXXXXXKEVQVRLEEHLE

SEQ ID NO: 18850 - protein, 34 aa, Artificial Sequence
  GFR-binding peptide
  MOD_RES (2)..(2): Xaa is C or S
  MOD_RES (16)..(17)..(18)..(19)..(20): Xaa is A or G
  MOD_RES (21)..(22)..(23)..(24): Xaa is A or G or is absent
EXVPTEESNITMQIMXXXXXXXXXLGEMSFLQHN

SEQ ID NO: 18851 - protein, 41 aa, Artificial Sequence
  GFR-binding peptide
  MOD_RES (6)..(40): Xaa is C or S
DEGLEXVPTEERPVQMRKIRIKPHQGQHKKATVFLQHNKXE

SEQ ID NO: 18852 - protein, 34 aa, Artificial Sequence
  GFR-binding peptide
SRVHHSNITVQIMEYVRKKPKLLGEMSRLEEHLE

SEQ ID NO: 18853 - protein, 43 aa, Artificial Sequence
  GFR-binding peptide
  MOD_RES (5)..(42): Xaa is C or S
SSVKXQPSRVHHSNITVQIMEYVRKKPKLLGEMSRLEEHLEXA

SEQ ID NO: 18854 - protein, 42 aa, Artificial Sequence
  GFR-binding peptide
  MOD_RES (7)..(41): Xaa is C or S
NDEGLEXVPTGQRPVQMRKIRIKPHQGQHKKATVLEEHSQXE

SEQ ID NO: 18855 - protein, 38 aa, Artificial Sequence
  GFR-binding peptide
  MOD_RES (2)..(2): Xaa is C or S
  MOD_RES (18)..(19)..(20)..(21)..(22): Xaa is A or G
  MOD_RES (23)..(24)..(25)..(26): Xaa is A or G or is absent
KXQPSRVHHSNITVQIMXXXXXXXXXLGEMSRLEEHLE

SEQ ID NO: 18856 - protein, 43 aa, Artificial Sequence
  GFR-binding peptide
  MOD_RES (6)..(40)..(42): Xaa is C or S
  MOD_RES (20)..(21)..(22)..(23)..(24): Xaa is A or G
  MOD_RES (25)..(26)..(27)..(28): Xaa is A or G or is absent
DEGLEXVPTEERSVKMAKVXXXXXXXXXKEVQVFLQHNKXEXR

SEQ ID NO: 18857 - protein, 44 aa, Artificial Sequence
  GFR-binding peptide
  MOD_RES (4)..(41)..(43): Xaa is C or S
  MOD_RES (20)..(21)..(22)..(23)..(24): Xaa is A or G
  MOD_RES (25)..(26)..(27)..(28): Xaa is A or G or is absent
SVKXQPSRVHHRSVKVAKVXXXXXXXXXKEVQVRLEEHLEXAXA

SEQ ID NO: 18858 - protein, 36 aa, Artificial Sequence
  GFR-binding peptide
  MOD_RES (34)..(36): Xaa is C or S
VPTEERPVQMRKIRIKPHQGQHKKATVFLQHNKXEX

SEQ ID NO: 18859 - protein, 38 aa, Artificial Sequence
  GFR-binding peptide
  MOD_RES (2)..(2): Xaa is C or S
QXRPTQVQLSNITVQIMEIVRKKPIFIGEMSTLEDHLA

SEQ ID NO: 18860 - protein, 32 aa, Artificial Sequence
  GFR-binding peptide
  MOD_RES (14)..(15)..(16)..(17)..(18): Xaa is A or G
  MOD_RES (19)..(20)..(21)..(22): Xaa is A or G or is absent
VPTGQSNITMQIMXXXXXXXXXLGEMSLEEHS

SEQ ID NO: 18861 - protein, 37 aa, Artificial Sequence
  GFR-binding peptide
  MOD_RES (2)..(2): Xaa is C or S
QXRPTQVQLSNITVQIMEIVRKKPIFLGEMSTLEDHL

SEQ ID NO: 18862 - protein, 43 aa, Artificial Sequence
  GFR-binding peptide
  MOD_RES (7)..(41)..(43): Xaa is C or S
  MOD_RES (21)..(22)..(23)..(24)..(25): Xaa is A or G
  MOD_RES (26)..(27)..(28)..(29): Xaa is A or G or is absent
NDEGLEXVPTGQRPVQMRKIXXXXXXXXXKKATVLEEHSQXEX

SEQ ID NO: 18863 - protein, 35 aa, Artificial Sequence
  GFR-binding peptide
  MOD_RES (16)..(17)..(18)..(19)..(20): Xaa is A or G
  MOD_RES (21)..(22)..(23)..(24): Xaa is A or G or is absent
RPTQVQLSNITVQIMXXXXXXXXXLGEMSTLEDHL

SEQ ID NO: 18864 - protein, 38 aa, Artificial Sequence
  GFR-binding peptide
  MOD_RES (37)..(37): Xaa is C or S
  MOD_RES (16)..(17)..(18)..(19)..(20): Xaa is A or G
  MOD_RES (21)..(22)..(23)..(24): Xaa is A or G or is absent
RPTQVQLSNITVQIMXXXXXXXXXIGEMSTLEDHLAXK

SEQ ID NO: 18865 - protein, 37 aa, Artificial Sequence
  GFR-binding peptide
  MOD_RES (3)..(3): Xaa is C or S
  MOD_RES (19)..(20)..(21)..(22)..(23): Xaa is A or G
  MOD_RES (24)..(25)..(26)..(27): Xaa is A or G or is absent
VQXRPTQVQLRSVKVAKVXXXXXXXXXKEVQVTLEDH

SEQ ID NO: 18866 - protein, 38 aa, Artificial Sequence
  GFR-binding peptide
  MOD_RES (1)..(38): Xaa is C or S
XQPSRVHHSNITVQIMEYVRKKPKLLGEMSRLEEHLEX

SEQ ID NO: 18867 - protein, 37 aa, Artificial Sequence
  GFR-binding peptide
  MOD_RES (3)..(3): Xaa is C or S
  MOD_RES (19)..(20)..(21)..(22)..(23): Xaa is A or G
  MOD_RES (24)..(25)..(26)..(27): Xaa is A or G or is absent
VQXRPTQVQLRPVQVRKIXXXXXXXXXKKATVTLEDH

SEQ ID NO: 18868 - protein, 33 aa, Artificial Sequence
  GFR-binding peptide
PSRVHHSNITVQIMEYVRKKPKLLGEMSRLEEH

SEQ ID NO: 18869 - protein, 33 aa, Artificial Sequence
  GFR-binding peptide
  MOD_RES (1)..(1): Xaa is C or S
  MOD_RES (15)..(16)..(17)..(18)..(19): Xaa is A or G
  MOD_RES (20)..(21)..(22)..(23): Xaa is A or G or is absent
XVPTEESNITMQIMXXXXXXXXXIGEMSFLQHN

SEQ ID NO: 18870 - protein, 41 aa, Artificial Sequence
  GFR-binding peptide
  MOD_RES (3)..(40): Xaa is C or S
VQXRPTQVQLRSVKVAKVEIVRKKPIFKEVQVTLEDHLAXK

SEQ ID NO: 18871 - protein, 34 aa, Artificial Sequence
  GFR-binding peptide
  MOD_RES (2)..(2): Xaa is C or S
  MOD_RES (16)..(17)..(18)..(19)..(20): Xaa is A or G
  MOD_RES (21)..(22)..(23)..(24): Xaa is A or G or is absent
EXVPTGQRSVKMAKVXXXXXXXXXKEVQVLEEHS

SEQ ID NO: 18872 - protein, 36 aa, Artificial Sequence
  GFR-binding peptide
  MOD_RES (1)..(35): Xaa is C or S
  MOD_RES (15)..(16)..(17)..(18)..(19): Xaa is A or G
  MOD_RES (20)..(21)..(22)..(23): Xaa is A or G or is absent
XVPTGQSNITMQIMXXXXXXXXXLGEMSLEEHSQXE

SEQ ID NO: 18873 - protein, 36 aa, Artificial Sequence
  GFR-binding peptide
  MOD_RES (16)..(17)..(18)..(19)..(20): Xaa is A or G
  MOD_RES (21)..(22)..(23)..(24): Xaa is A or G or is absent
QPSRVHHSNITVQIMXXXXXXXXXIGEMSRLEEHLE

SEQ ID NO: 18874 - protein, 40 aa, Artificial Sequence
  GFR-binding peptide
  MOD_RES (5)..(39): Xaa is C or S
EGLEXVPTGQRPVQMRKIRIKPHQGQHKKATVLEEHSQXE

SEQ ID NO: 18875 - protein, 42 aa, Artificial Sequence
  GFR-binding peptide
  MOD_RES (3)..(40)..(42): Xaa is C or S
VQXRPTQVQLSNITVQIMEIVRKKPIFIGEMSTLEDHLAXKX

SEQ ID NO: 18876 - protein, 40 aa, Artificial Sequence
  GFR-binding peptide
  MOD_RES (37)..(39): Xaa is C or S
RPTQVQLSNITVQIMEIVRKKPIFLGEMSTLEDHLAXKXE

SEQ ID NO: 18877 - protein, 39 aa, Artificial Sequence
  GFR-binding peptide
  MOD_RES (6)..(6): Xaa is C or S
  MOD_RES (20)..(21)..(22)..(23)..(24): Xaa is A or G
  MOD_RES (25)..(26)..(27)..(28): Xaa is A or G or is absent
DEGLEXVPTEERSVKMAKVXXXXXXXXXKEVQVFLQHNK

SEQ ID NO: 18878 - protein, 37 aa, Artificial Sequence
  GFR-binding peptide
  MOD_RES (3)..(37): Xaa is C or S
  MOD_RES (17)..(18)..(19)..(20)..(21): Xaa is A or G
  MOD_RES (22)..(23)..(24)..(25): Xaa is A or G or is absent
LEXVPTEERSVKMAKVXXXXXXXXXKEVQVFLQHNKX

SEQ ID NO: 18879 - protein, 39 aa, Artificial Sequence
  GFR-binding peptide
  MOD_RES (3)..(3): Xaa is C or S
  MOD_RES (19)..(20)..(21)..(22)..(23): Xaa is A or G
  MOD_RES (24)..(25)..(26)..(27): Xaa is A or G or is absent
VKXQPSRVHHSNITVQIMXXXXXXXXXIGEMSRLEEHLE

SEQ ID NO: 18880 - protein, 34 aa, Artificial Sequence
  GFR-binding peptide
  MOD_RES (34)..(34): Xaa is C or S
  MOD_RES (14)..(15)..(16)..(17)..(18): Xaa is A or G
  MOD_RES (19)..(20)..(21)..(22): Xaa is A or G or is absent
VPTGQRSVKMAKVXXXXXXXXXKEVQVLEEHSQX

SEQ ID NO: 18881 - protein, 39 aa, Artificial Sequence
  GFR-binding peptide
  MOD_RES (5)..(39): Xaa is C or S
EGLEXVPTGQRPVQMRKIRIKPHQGQHKKATVLEEHSQX

SEQ ID NO: 18882 - protein, 39 aa, Artificial Sequence
  GFR-binding peptide
  MOD_RES (4)..(4): Xaa is C or S
NVQXRPTQVQLRSVKVAKVEIVRKKPIFKEVQVTLEDHL

SEQ ID NO: 18883 - protein, 34 aa, Artificial Sequence
  GFR-binding peptide
  MOD_RES (2)..(2): Xaa is C or S
  MOD_RES (16)..(17)..(18)..(19)..(20): Xaa is A or G
  MOD_RES (21)..(22)..(23)..(24): Xaa is A or G or is absent
EXVPTGQSNITMQIMXXXXXXXXXIGEMSLEEHS

SEQ ID NO: 18884 - protein, 37 aa, Artificial Sequence
  GFR-binding peptide
  MOD_RES (2)..(36): Xaa is C or S
EXVPTEERSVKMAKVRIKPHQGQHKEVQVFLQHNKXE

SEQ ID NO: 18885 - protein, 42 aa, Artificial Sequence
  GFR-binding peptide
  MOD_RES (3)..(40)..(42): Xaa is C or S
  MOD_RES (19)..(20)..(21)..(22)..(23): Xaa is A or G
  MOD_RES (24)..(25)..(26)..(27): Xaa is A or G or is absent
VKXQPSRVHHSNITVQIMXXXXXXXXXLGEMSRLEEHLEXAX

SEQ ID NO: 18886 - protein, 39 aa, Artificial Sequence
  GFR-binding peptide
  MOD_RES (3)..(37)..(39): Xaa is C or S
  MOD_RES (17)..(18)..(19)..(20)..(21): Xaa is A or G
  MOD_RES (22)..(23)..(24)..(25): Xaa is A or G or is absent
LEXVPTGQSNITMQIMXXXXXXXXXIGEMSLEEHSQXEX

SEQ ID NO: 18887 - protein, 37 aa, Artificial Sequence
  GFR-binding peptide
  MOD_RES (2)..(36): Xaa is C or S
  MOD_RES (16)..(17)..(18)..(19)..(20): Xaa is A or G
  MOD_RES (21)..(22)..(23)..(24): Xaa is A or G or is absent
EXVPTEERSVKMAKVXXXXXXXXXKEVQVFLQHNKXE

SEQ ID NO: 18888 - protein, 35 aa, Artificial Sequence
  GFR-binding peptide
  MOD_RES (3)..(3): Xaa is C or S
LEXVPTGQSNITMQIMRIKPHQGQHIGEMSLEEHS

SEQ ID NO: 18889 - protein, 35 aa, Artificial Sequence
  GFR-binding peptide
  MOD_RES (3)..(3): Xaa is C or S
  MOD_RES (17)..(18)..(19)..(20)..(21): Xaa is A or G
  MOD_RES (22)..(23)..(24)..(25): Xaa is A or G or is absent
LEXVPTGQSNITMQIMXXXXXXXXXLGEMSLEEHS

SEQ ID NO: 18890 - protein, 37 aa, Artificial Sequence
  GFR-binding peptide
  MOD_RES (1)..(35)..(37): Xaa is C or S
XVPTEESNITMQIMRIKPHQGQHLGEMSFLQHNKXEX

SEQ ID NO: 18891 - protein, 39 aa, Artificial Sequence
  GFR-binding peptide
  MOD_RES (7)..(7): Xaa is C or S
  MOD_RES (21)..(22)..(23)..(24)..(25): Xaa is A or G
  MOD_RES (26)..(27)..(28)..(29): Xaa is A or G or is absent
NDEGLEXVPTGQRSVKMAKVXXXXXXXXXKEVQVLEEHS

SEQ ID NO: 18892 - protein, 40 aa, Artificial Sequence
  GFR-binding peptide
  MOD_RES (7)..(7): Xaa is C or S
  MOD_RES (21)..(22)..(23)..(24)..(25): Xaa is A or G
  MOD_RES (26)..(27)..(28)..(29): Xaa is A or G or is absent
NDEGLEXVPTEERSVKMAKVXXXXXXXXXKEVQVFLQHNK

SEQ ID NO: 18893 - protein, 34 aa, Artificial Sequence
  GFR-binding peptide
PTQVQLSNITVQIMEIVRKKPIFIGEMSTLEDHL

SEQ ID NO: 18894 - protein, 37 aa, Artificial Sequence
  GFR-binding peptide
  MOD_RES (3)..(37): Xaa is C or S
  MOD_RES (17)..(18)..(19)..(20)..(21): Xaa is A or G
  MOD_RES (22)..(23)..(24)..(25): Xaa is A or G or is absent
LEXVPTGQSNITMQIMXXXXXXXXXIGEMSLEEHSQX

SEQ ID NO: 18895 - protein, 40 aa, Artificial Sequence
  GFR-binding peptide
  MOD_RES (4)..(4): Xaa is C or S
SVKXQPSRVHHRPVQVRKIEYVRKKPKLKKATVRLEEHLE

SEQ ID NO: 18896 - protein, 34 aa, Artificial Sequence
  GFR-binding peptide
  MOD_RES (1)..(1): Xaa is C or S
  MOD_RES (15)..(16)..(17)..(18)..(19): Xaa is A or G
  MOD_RES (20)..(21)..(22)..(23): Xaa is A or G or is absent
XVPTGQRPVQMRKIXXXXXXXXXKKATVLEEHSQ

SEQ ID NO: 18897 - protein, 39 aa, Artificial Sequence
  GFR-binding peptide
  MOD_RES (1)..(38): Xaa is C or S
  MOD_RES (17)..(18)..(19)..(20)..(21): Xaa is A or G
  MOD_RES (22)..(23)..(24)..(25): Xaa is A or G or is absent
XRPTQVQLSNITVQIMXXXXXXXXXLGEMSTLEDHLAXK

SEQ ID NO: 18898 - protein, 40 aa, Artificial Sequence
  GFR-binding peptide
  MOD_RES (4)..(4): Xaa is C or S
SVKXQPSRVHHSNITVQIMEYVRKKPKLLGEMSRLEEHLE

SEQ ID NO: 18899 - protein, 37 aa, Artificial Sequence
  GFR-binding peptide
  MOD_RES (35)..(37): Xaa is C or S
  MOD_RES (14)..(15)..(16)..(17)..(18): Xaa is A or G
  MOD_RES (19)..(20)..(21)..(22): Xaa is A or G or is absent
TQVQLSNITVQIMXXXXXXXXXLGEMSTLEDHLAXKX

SEQ ID NO: 18900 - protein, 35 aa, Artificial Sequence
  GFR-binding peptide
  MOD_RES (34)..(34): Xaa is C or S
VPTGQSNITMQIMRIKPHQGQHIGEMSLEEHSQXE

SEQ ID NO: 18901 - protein, 40 aa, Artificial Sequence
  GFR-binding peptide
  MOD_RES (3)..(40): Xaa is C or S
  MOD_RES (19)..(20)..(21)..(22)..(23): Xaa is A or G
  MOD_RES (24)..(25)..(26)..(27): Xaa is A or G or is absent
VQXRPTQVQLSNITVQIMXXXXXXXXXLGEMSTLEDHLAX

SEQ ID NO: 18902 - protein, 34 aa, Artificial Sequence
  GFR-binding peptide
  MOD_RES (14)..(15)..(16)..(17)..(18): Xaa is A or G
  MOD_RES (19)..(20)..(21)..(22): Xaa is A or G or is absent
SRVHHRPVQVRKIXXXXXXXXXKKATVRLEEHLE

SEQ ID NO: 18903 - protein, 39 aa, Artificial Sequence
  GFR-binding peptide
  MOD_RES (3)..(37)..(39): Xaa is C or S
  MOD_RES (17)..(18)..(19)..(20)..(21): Xaa is A or G
  MOD_RES (22)..(23)..(24)..(25): Xaa is A or G or is absent
LEXVPTEERSVKMAKVXXXXXXXXXKEVQVFLQHNKXEX

SEQ ID NO: 18904 - protein, 43 aa, Artificial Sequence
  GFR-binding peptide
  MOD_RES (3)..(40)..(42): Xaa is C or S
  MOD_RES (19)..(20)..(21)..(22)..(23): Xaa is A or G
  MOD_RES (24)..(25)..(26)..(27): Xaa is A or G or is absent
VKXQPSRVHHSNITVQIMXXXXXXXXXLGEMSRLEEHLEXAXA

SEQ ID NO: 18905 - protein, 41 aa, Artificial Sequence
  GFR-binding peptide
  MOD_RES (5)..(39)..(41): Xaa is C or S
  MOD_RES (19)..(20)..(21)..(22)..(23): Xaa is A or G
  MOD_RES (24)..(25)..(26)..(27): Xaa is A or G or is absent
EGLEXVPTGQSNITMQIMXXXXXXXXXLGEMSLEEHSQXEX

SEQ ID NO: 18906 - protein, 35 aa, Artificial Sequence
  GFR-binding peptide
  MOD_RES (1)..(1): Xaa is C or S
  MOD_RES (17)..(18)..(19)..(20)..(21): Xaa is A or G
  MOD_RES (22)..(23)..(24)..(25): Xaa is A or G or is absent
XRPTQVQLRSVKVAKVXXXXXXXXXKEVQVTLEDH

SEQ ID NO: 18907 - protein, 38 aa, Artificial Sequence
  GFR-binding peptide
  MOD_RES (35)..(37): Xaa is C or S
SRVHHSNITVQIMEYVRKKPKLIGEMSRLEEHLEXAXA

SEQ ID NO: 18908 - protein, 35 aa, Artificial Sequence
  GFR-binding peptide
  MOD_RES (2)..(2): Xaa is C or S
  MOD_RES (16)..(17)..(18)..(19)..(20): Xaa is A or G
  MOD_RES (21)..(22)..(23)..(24): Xaa is A or G or is absent
EXVPTEESNITMQIMXXXXXXXXXLGEMSFLQHNK

SEQ ID NO: 18909 - protein, 37 aa, Artificial Sequence
  GFR-binding peptide
  MOD_RES (1)..(35)..(37): Xaa is C or S
  MOD_RES (15)..(16)..(17)..(18)..(19): Xaa is A or G
  MOD_RES (20)..(21)..(22)..(23): Xaa is A or G or is absent
XVPTGQRSVKMAKVXXXXXXXXXKEVQVLEEHSQXEX

SEQ ID NO: 18910 - protein, 42 aa, Artificial Sequence
  GFR-binding peptide
  MOD_RES (5)..(39)..(41): Xaa is C or S
EGLEXVPTGQRPVQMRKIRIKPHQGQHKKATVLEEHSQXEXR

SEQ ID NO: 18911 - protein, 41 aa, Artificial Sequence
  GFR-binding peptide
  MOD_RES (2)..(39)..(41): Xaa is C or S
  MOD_RES (18)..(19)..(20)..(21)..(22): Xaa is A or G
  MOD_RES (23)..(24)..(25)..(26): Xaa is A or G or is absent
QXRPTQVQLRSVKVAKVXXXXXXXXXKEVQVTLEDHLAXKX

SEQ ID NO: 18912 - protein, 38 aa, Artificial Sequence
  GFR-binding peptide
  MOD_RES (37)..(37): Xaa is C or S
  MOD_RES (16)..(17)..(18)..(19)..(20): Xaa is A or G
  MOD_RES (21)..(22)..(23)..(24): Xaa is A or G or is absent
QPSRVHHSNITVQIMXXXXXXXXXIGEMSRLEEHLEXA

SEQ ID NO: 18913 - protein, 36 aa, Artificial Sequence
  GFR-binding peptide
  MOD_RES (2)..(2): Xaa is C or S
  MOD_RES (18)..(19)..(20)..(21)..(22): Xaa is A or G
  MOD_RES (23)..(24)..(25)..(26): Xaa is A or G or is absent
QXRPTQVQLSNITVQIMXXXXXXXXXIGEMSTLEDH

SEQ ID NO: 18914 - protein, 33 aa, Artificial Sequence
  GFR-binding peptide
  MOD_RES (1)..(1): Xaa is C or S
XVPTEESNITMQIMRIKPHQGQHLGEMSFLQHN

SEQ ID NO: 18915 - protein, 39 aa, Artificial Sequence
  GFR-binding peptide
  MOD_RES (4)..(4): Xaa is C or S
SVKXQPSRVHHSNITVQIMEYVRKKPKLIGEMSRLEEHL

SEQ ID NO: 18916 - protein, 39 aa, Artificial Sequence
  GFR-binding peptide
  MOD_RES (2)..(39): Xaa is C or S
  MOD_RES (18)..(19)..(20)..(21)..(22): Xaa is A or G
  MOD_RES (23)..(24)..(25)..(26): Xaa is A or G or is absent
QXRPTQVQLSNITVQIMXXXXXXXXXIGEMSTLEDHLAX

SEQ ID NO: 18917 - protein, 41 aa, Artificial Sequence
  GFR-binding peptide
  MOD_RES (4)..(38)..(40): Xaa is C or S
GLEXVPTGQRPVQMRKIRIKPHQGQHKKATVLEEHSQXEXR

SEQ ID NO: 18918 - protein, 33 aa, Artificial Sequence
  GFR-binding peptide
  MOD_RES (14)..(15)..(16)..(17)..(18): Xaa is A or G
  MOD_RES (19)..(20)..(21)..(22): Xaa is A or G or is absent
TQVQLRSVKVAKVXXXXXXXXXKEVQVTLEDHL

SEQ ID NO: 18919 - protein, 38 aa, Artificial Sequence
  GFR-binding peptide
  MOD_RES (6)..(6): Xaa is C or S
DEGLEXVPTGQRPVQMRKIRIKPHQGQHKKATVLEEHS

SEQ ID NO: 18920 - protein, 43 aa, Artificial Sequence
  GFR-binding peptide
  MOD_RES (7)..(41)..(43): Xaa is C or S
  MOD_RES (21)..(22)..(23)..(24)..(25): Xaa is A or G
  MOD_RES (26)..(27)..(28)..(29): Xaa is A or G or is absent
NDEGLEXVPTGQSNITMQIMXXXXXXXXXLGEMSLEEHSQXEX

SEQ ID NO: 18921 - protein, 41 aa, Artificial Sequence
  GFR-binding peptide
  MOD_RES (2)..(39)..(41): Xaa is C or S
  MOD_RES (18)..(19)..(20)..(21)..(22): Xaa is A or G
  MOD_RES (23)..(24)..(25)..(26): Xaa is A or G or is absent
QXRPTQVQLRPVQVRKIXXXXXXXXXKKATVTLEDHLAXKX

SEQ ID NO: 18922 - protein, 39 aa, Artificial Sequence
  GFR-binding peptide
  MOD_RES (2)..(39): Xaa is C or S
QXRPTQVQLSNITVQIMEIVRKKPIFIGEMSTLEDHLAX

SEQ ID NO: 18923 - protein, 39 aa, Artificial Sequence
  GFR-binding peptide
  MOD_RES (6)..(6): Xaa is C or S
  MOD_RES (20)..(21)..(22)..(23)..(24): Xaa is A or G
  MOD_RES (25)..(26)..(27)..(28): Xaa is A or G or is absent
DEGLEXVPTGQRSVKMAKVXXXXXXXXXKEVQVLEEHSQ

SEQ ID NO: 18924 - protein, 39 aa, Artificial Sequence
  GFR-binding peptide
  MOD_RES (4)..(4): Xaa is C or S
SVKXQPSRVHHRPVQVRKIEYVRKKPKLKKATVRLEEHL

SEQ ID NO: 18925 - protein, 38 aa, Artificial Sequence
  GFR-binding peptide
  MOD_RES (36)..(38): Xaa is C or S
  MOD_RES (15)..(16)..(17)..(18)..(19): Xaa is A or G
  MOD_RES (20)..(21)..(22)..(23): Xaa is A or G or is absent
PSRVHHRSVKVAKVXXXXXXXXXKEVQVRLEEHLEXAX

SEQ ID NO: 18926 - protein, 35 aa, Artificial Sequence
  GFR-binding peptide
  MOD_RES (34)..(34): Xaa is C or S
  MOD_RES (14)..(15)..(16)..(17)..(18): Xaa is A or G
  MOD_RES (19)..(20)..(21)..(22): Xaa is A or G or is absent
VPTGQSNITMQIMXXXXXXXXXIGEMSLEEHSQXE

SEQ ID NO: 18927 - protein, 40 aa, Artificial Sequence
  GFR-binding peptide
  MOD_RES (5)..(39): Xaa is C or S
  MOD_RES (19)..(20)..(21)..(22)..(23): Xaa is A or G
  MOD_RES (24)..(25)..(26)..(27): Xaa is A or G or is absent
EGLEXVPTGQRPVQMRKIXXXXXXXXXKKATVLEEHSQXE

SEQ ID NO: 18928 - protein, 42 aa, Artificial Sequence
  GFR-binding peptide
  MOD_RES (5)..(39)..(41): Xaa is C or S
EGLEXVPTGQRSVKMAKVRIKPHQGQHKEVQVLEEHSQXEXR

SEQ ID NO: 18929 - protein, 41 aa, Artificial Sequence
  GFR-binding peptide
  MOD_RES (5)..(39)..(41): Xaa is C or S
  MOD_RES (19)..(20)..(21)..(22)..(23): Xaa is A or G
  MOD_RES (24)..(25)..(26)..(27): Xaa is A or G or is absent
EGLEXVPTEERPVQMRKIXXXXXXXXXKKATVFLQHNKXEX

SEQ ID NO: 18930 - protein, 42 aa, Artificial Sequence
  GFR-binding peptide
  MOD_RES (4)..(41): Xaa is C or S
SVKXQPSRVHHSNITVQIMEYVRKKPKLIGEMSRLEEHLEXA

SEQ ID NO: 18931 - protein, 43 aa, Artificial Sequence
  GFR-binding peptide
  MOD_RES (7)..(41)..(43): Xaa is C or S
NDEGLEXVPTEERSVKMAKVRIKPHQGQHKEVQVFLQHNKXEX

SEQ ID NO: 18932 - protein, 35 aa, Artificial Sequence
  GFR-binding peptide
  MOD_RES (35)..(35): Xaa is C or S
  MOD_RES (14)..(15)..(16)..(17)..(18): Xaa is A or G
  MOD_RES (19)..(20)..(21)..(22): Xaa is A or G or is absent
SRVHHSNITVQIMXXXXXXXXXIGEMSRLEEHLEX

SEQ ID NO: 18933 - protein, 34 aa, Artificial Sequence
  GFR-binding peptide
PSRVHHRPVQVRKIEYVRKKPKLKKATVRLEEHL

SEQ ID NO: 18934 - protein, 39 aa, Artificial Sequence
  GFR-binding peptide
  MOD_RES (2)..(36)..(38): Xaa is C or S
  MOD_RES (16)..(17)..(18)..(19)..(20): Xaa is A or G
  MOD_RES (21)..(22)..(23)..(24): Xaa is A or G or is absent
EXVPTGQSNITMQIMXXXXXXXXXIGEMSLEEHSQXEXR

SEQ ID NO: 18935 - protein, 38 aa, Artificial Sequence
  GFR-binding peptide
  MOD_RES (3)..(3): Xaa is C or S
VKXQPSRVHHSNITVQIMEYVRKKPKLLGEMSRLEEHL

SEQ ID NO: 18936 - protein, 40 aa, Artificial Sequence
  GFR-binding peptide
  MOD_RES (4)..(4): Xaa is C or S
  MOD_RES (20)..(21)..(22)..(23)..(24): Xaa is A or G
  MOD_RES (25)..(26)..(27)..(28): Xaa is A or G or is absent
NVQXRPTQVQLSNITVQIMXXXXXXXXXLGEMSTLEDHLA

SEQ ID NO: 18937 - protein, 34 aa, Artificial Sequence
  GFR-binding peptide
PSRVHHSNITVQIMEYVRKKPKLIGEMSRLEEHL

SEQ ID NO: 18938 - protein, 33 aa, Artificial Sequence
  GFR-binding peptide
  MOD_RES (14)..(15)..(16)..(17)..(18): Xaa is A or G
  MOD_RES (19)..(20)..(21)..(22): Xaa is A or G or is absent
SRVHHRSVKVAKVXXXXXXXXXKEVQVRLEEHL

SEQ ID NO: 18939 - protein, 38 aa, Artificial Sequence
  GFR-binding peptide
  MOD_RES (5)..(5): Xaa is C or S
  MOD_RES (19)..(20)..(21)..(22)..(23): Xaa is A or G
  MOD_RES (24)..(25)..(26)..(27): Xaa is A or G or is absent
EGLEXVPTEESNITMQIMXXXXXXXXXIGEMSFLQHNK

SEQ ID NO: 18940 - protein, 33 aa, Artificial Sequence
  GFR-binding peptide
  MOD_RES (14)..(15)..(16)..(17)..(18): Xaa is A or G
  MOD_RES (19)..(20)..(21)..(22): Xaa is A or G or is absent
VPTEERPVQMRKIXXXXXXXXXKKATVFLQHNK

SEQ ID NO: 18941 - protein, 39 aa, Artificial Sequence
  GFR-binding peptide
  MOD_RES (4)..(4): Xaa is C or S
  MOD_RES (20)..(21)..(22)..(23)..(24): Xaa is A or G
  MOD_RES (25)..(26)..(27)..(28): Xaa is A or G or is absent
NVQXRPTQVQLSNITVQIMXXXXXXXXXLGEMSTLEDHL

SEQ ID NO: 18942 - protein, 41 aa, Artificial Sequence
  GFR-binding peptide
  MOD_RES (4)..(38)..(40): Xaa is C or S
  MOD_RES (18)..(19)..(20)..(21)..(22): Xaa is A or G
  MOD_RES (23)..(24)..(25)..(26): Xaa is A or G or is absent
GLEXVPTGQSNITMQIMXXXXXXXXXIGEMSLEEHSQXEXR

SEQ ID NO: 18943 - protein, 38 aa, Artificial Sequence
  GFR-binding peptide
  MOD_RES (4)..(4): Xaa is C or S
NVQXRPTQVQLSNITVQIMEIVRKKPIFLGEMSTLEDH

SEQ ID NO: 18944 - protein, 35 aa, Artificial Sequence
  GFR-binding peptide
  MOD_RES (2)..(2): Xaa is C or S
EXVPTGQRSVKMAKVRIKPHQGQHKEVQVLEEHSQ

SEQ ID NO: 18945 - protein, 37 aa, Artificial Sequence
  GFR-binding peptide
  MOD_RES (3)..(3): Xaa is C or S
  MOD_RES (19)..(20)..(21)..(22)..(23): Xaa is A or G
  MOD_RES (24)..(25)..(26)..(27): Xaa is A or G or is absent
VQXRPTQVQLSNITVQIMXXXXXXXXXIGEMSTLEDH

SEQ ID NO: 18946 - protein, 37 aa, Artificial Sequence
  GFR-binding peptide
  MOD_RES (2)..(2): Xaa is C or S
  MOD_RES (18)..(19)..(20)..(21)..(22): Xaa is A or G
  MOD_RES (23)..(24)..(25)..(26): Xaa is A or G or is absent
KXQPSRVHHSNITVQIMXXXXXXXXXLGEMSRLEEHL

SEQ ID NO: 18947 - protein, 36 aa, Artificial Sequence
  GFR-binding peptide
  MOD_RES (2)..(36): Xaa is C or S
EXVPTGQRPVQMRKIRIKPHQGQHKKATVLEEHSQX

SEQ ID NO: 18948 - protein, 42 aa, Artificial Sequence
  GFR-binding peptide
  MOD_RES (6)..(40)..(42): Xaa is C or S
DEGLEXVPTEERSVKMAKVRIKPHQGQHKEVQVFLQHNKXEX

SEQ ID NO: 18949 - protein, 38 aa, Artificial Sequence
  GFR-binding peptide
  MOD_RES (3)..(37): Xaa is C or S
LEXVPTGQRPVQMRKIRIKPHQGQHKKATVLEEHSQXE

SEQ ID NO: 18950 - protein, 33 aa, Artificial Sequence
  GFR-binding peptide
  MOD_RES (14)..(15)..(16)..(17)..(18): Xaa is A or G
  MOD_RES (19)..(20)..(21)..(22): Xaa is A or G or is absent
VPTEESNITMQIMXXXXXXXXXIGEMSFLQHNK

SEQ ID NO: 18951 - protein, 37 aa, Artificial Sequence
  GFR-binding peptide
  MOD_RES (5)..(5): Xaa is C or S
EGLEXVPTEERPVQMRKIRIKPHQGQHKKATVFLQHN

SEQ ID NO: 18952 - protein, 35 aa, Artificial Sequence
  GFR-binding peptide
  MOD_RES (1)..(35): Xaa is C or S
  MOD_RES (15)..(16)..(17)..(18)..(19): Xaa is A or G
  MOD_RES (20)..(21)..(22)..(23): Xaa is A or G or is absent
XVPTGQRPVQMRKIXXXXXXXXXKKATVLEEHSQX

SEQ ID NO: 18953 - protein, 38 aa, Artificial Sequence
  GFR-binding peptide
  MOD_RES (6)..(6): Xaa is C or S
  MOD_RES (20)..(21)..(22)..(23)..(24): Xaa is A or G
  MOD_RES (25)..(26)..(27)..(28): Xaa is A or G or is absent
DEGLEXVPTEESNITMQIMXXXXXXXXXLGEMSFLQHN

SEQ ID NO: 18954 - protein, 35 aa, Artificial Sequence
  GFR-binding peptide
  MOD_RES (3)..(3): Xaa is C or S
LEXVPTEERPVQMRKIRIKPHQGQHKKATVFLQHN

SEQ ID NO: 18955 - protein, 37 aa, Artificial Sequence
  GFR-binding peptide
  MOD_RES (5)..(5): Xaa is C or S
  MOD_RES (19)..(20)..(21)..(22)..(23): Xaa is A or G
  MOD_RES (24)..(25)..(26)..(27): Xaa is A or G or is absent
EGLEXVPTGQSNITMQIMXXXXXXXXXLGEMSLEEHS

SEQ ID NO: 18956 - protein, 42 aa, Artificial Sequence
  GFR-binding peptide
  MOD_RES (7)..(41): Xaa is C or S
  MOD_RES (21)..(22)..(23)..(24)..(25): Xaa is A or G
  MOD_RES (26)..(27)..(28)..(29): Xaa is A or G or is absent
NDEGLEXVPTGQSNITMQIMXXXXXXXXXIGEMSLEEHSQXE

SEQ ID NO: 18957 - protein, 42 aa, Artificial Sequence
  GFR-binding peptide
  MOD_RES (6)..(40)..(42): Xaa is C or S
  MOD_RES (20)..(21)..(22)..(23)..(24): Xaa is A or G
  MOD_RES (25)..(26)..(27)..(28): Xaa is A or G or is absent
DEGLEXVPTGQRPVQMRKIXXXXXXXXXKKATVLEEHSQXEX

SEQ ID NO: 18958 - protein, 37 aa, Artificial Sequence
  GFR-binding peptide
  MOD_RES (36)..(36): Xaa is C or S
  MOD_RES (15)..(16)..(17)..(18)..(19): Xaa is A or G
  MOD_RES (20)..(21)..(22)..(23): Xaa is A or G or is absent
PTQVQLSNITVQIMXXXXXXXXXIGEMSTLEDHLAXK

SEQ ID NO: 18959 - protein, 33 aa, Artificial Sequence
  GFR-binding peptide
  MOD_RES (15)..(16)..(17)..(18)..(19): Xaa is A or G
  MOD_RES (20)..(21)..(22)..(23): Xaa is A or G or is absent
PSRVHHSNITVQIMXXXXXXXXXIGEMSRLEEH

SEQ ID NO: 18960 - protein, 33 aa, Artificial Sequence
  GFR-binding peptide
  MOD_RES (15)..(16)..(17)..(18)..(19): Xaa is A or G
  MOD_RES (20)..(21)..(22)..(23): Xaa is A or G or is absent
PTQVQLRPVQVRKIXXXXXXXXXKKATVTLEDH

SEQ ID NO: 18961 - protein, 43 aa, Artificial Sequence
  GFR-binding peptide
  MOD_RES (3)..(40)..(42): Xaa is C or S
  MOD_RES (19)..(20)..(21)..(22)..(23): Xaa is A or G
  MOD_RES (24)..(25)..(26)..(27): Xaa is A or G or is absent
VQXRPTQVQLSNITVQIMXXXXXXXXXIGEMSTLEDHLAXKXE

SEQ ID NO: 18962 - protein, 40 aa, Artificial Sequence
  GFR-binding peptide
  MOD_RES (37)..(39): Xaa is C or S
RPTQVQLRSVKVAKVEIVRKKPIFKEVQVTLEDHLAXKXE

SEQ ID NO: 18963 - protein, 37 aa, Artificial Sequence
  GFR-binding peptide
  MOD_RES (36)..(36): Xaa is C or S
PTQVQLSNITVQIMEIVRKKPIFIGEMSTLEDHLAXK

SEQ ID NO: 18964 - protein, 38 aa, Artificial Sequence
  GFR-binding peptide
  MOD_RES (2)..(2): Xaa is C or S
KXQPSRVHHSNITVQIMEYVRKKPKLLGEMSRLEEHLE

SEQ ID NO: 18965 - protein, 38 aa, Artificial Sequence
  GFR-binding peptide
  MOD_RES (5)..(5): Xaa is C or S
  MOD_RES (19)..(20)..(21)..(22)..(23): Xaa is A or G
  MOD_RES (24)..(25)..(26)..(27): Xaa is A or G or is absent
EGLEXVPTEERPVQMRKIXXXXXXXXXKKATVFLQHNK

SEQ ID NO: 18966 - protein, 33 aa, Artificial Sequence
  GFR-binding peptide
  MOD_RES (1)..(1): Xaa is C or S
XVPTGQSNITMQIMRIKPHQGQHIGEMSLEEHS

SEQ ID NO: 18967 - protein, 35 aa, Artificial Sequence
  GFR-binding peptide
  MOD_RES (34)..(34): Xaa is C or S
VPTEERPVQMRKIRIKPHQGQHKKATVFLQHNKXE

SEQ ID NO: 18968 - protein, 41 aa, Artificial Sequence
  GFR-binding peptide
  MOD_RES (7)..(41): Xaa is C or S
  MOD_RES (21)..(22)..(23)..(24)..(25): Xaa is A or G
  MOD_RES (26)..(27)..(28)..(29): Xaa is A or G or is absent
NDEGLEXVPTEESNITMQIMXXXXXXXXXLGEMSFLQHNKX

SEQ ID NO: 18969 - protein, 39 aa, Artificial Sequence
  GFR-binding peptide
  MOD_RES (5)..(5): Xaa is C or S
SSVKXQPSRVHHSNITVQIMEYVRKKPKLLGEMSRLEEH

SEQ ID NO: 18970 - protein, 42 aa, Artificial Sequence
  GFR-binding peptide
  MOD_RES (4)..(41): Xaa is C or S
  MOD_RES (20)..(21)..(22)..(23)..(24): Xaa is A or G
  MOD_RES (25)..(26)..(27)..(28): Xaa is A or G or is absent
SVKXQPSRVHHRSVKVAKVXXXXXXXXXKEVQVRLEEHLEXA

SEQ ID NO: 18971 - protein, 37 aa, Artificial Sequence
  GFR-binding peptide
  MOD_RES (36)..(36): Xaa is C or S
  MOD_RES (15)..(16)..(17)..(18)..(19): Xaa is A or G
  MOD_RES (20)..(21)..(22)..(23): Xaa is A or G or is absent
PSRVHHSNITVQIMXXXXXXXXXLGEMSRLEEHLEXA

SEQ ID NO: 18972 - protein, 42 aa, Artificial Sequence
  GFR-binding peptide
  MOD_RES (4)..(41): Xaa is C or S
NVQXRPTQVQLSNITVQIMEIVRKKPIFLGEMSTLEDHLAXK

SEQ ID NO: 18973 - protein, 38 aa, Artificial Sequence
  GFR-binding peptide
  MOD_RES (5)..(5): Xaa is C or S
EGLEXVPTEESNITMQIMRIKPHQGQHLGEMSFLQHNK

SEQ ID NO: 18974 - protein, 42 aa, Artificial Sequence
  GFR-binding peptide
  MOD_RES (4)..(41): Xaa is C or S
  MOD_RES (20)..(21)..(22)..(23)..(24): Xaa is A or G
  MOD_RES (25)..(26)..(27)..(28): Xaa is A or G or is absent
NVQXRPTQVQLSNITVQIMXXXXXXXXXLGEMSTLEDHLAXK

SEQ ID NO: 18975 - protein, 37 aa, Artificial Sequence
  GFR-binding peptide
  MOD_RES (5)..(5): Xaa is C or S
  MOD_RES (19)..(20)..(21)..(22)..(23): Xaa is A or G
  MOD_RES (24)..(25)..(26)..(27): Xaa is A or G or is absent
EGLEXVPTEESNITMQIMXXXXXXXXXIGEMSFLQHN

SEQ ID NO: 18976 - protein, 41 aa, Artificial Sequence
  GFR-binding peptide
  MOD_RES (1)..(38)..(40): Xaa is C or S
  MOD_RES (17)..(18)..(19)..(20)..(21): Xaa is A or G
  MOD_RES (22)..(23)..(24)..(25): Xaa is A or G or is absent
XRPTQVQLSNITVQIMXXXXXXXXXIGEMSTLEDHLAXKXE

SEQ ID NO: 18977 - protein, 39 aa, Artificial Sequence
  GFR-binding peptide
  MOD_RES (37)..(39): Xaa is C or S
RPTQVQLRSVKVAKVEIVRKKPIFKEVQVTLEDHLAXKX

SEQ ID NO: 18978 - protein, 39 aa, Artificial Sequence
  GFR-binding peptide
  MOD_RES (3)..(3): Xaa is C or S
  MOD_RES (19)..(20)..(21)..(22)..(23): Xaa is A or G
  MOD_RES (24)..(25)..(26)..(27): Xaa is A or G or is absent
VQXRPTQVQLSNITVQIMXXXXXXXXXIGEMSTLEDHLA

SEQ ID NO: 18979 - protein, 42 aa, Artificial Sequence
  GFR-binding peptide
  MOD_RES (2)..(39)..(41): Xaa is C or S
  MOD_RES (18)..(19)..(20)..(21)..(22): Xaa is A or G
  MOD_RES (23)..(24)..(25)..(26): Xaa is A or G or is absent
QXRPTQVQLSNITVQIMXXXXXXXXXIGEMSTLEDHLAXKXE

SEQ ID NO: 18980 - protein, 38 aa, Artificial Sequence
  GFR-binding peptide
  MOD_RES (1)..(38): Xaa is C or S
XRPTQVQLSNITVQIMEIVRKKPIFIGEMSTLEDHLAX

SEQ ID NO: 18981 - protein, 40 aa, Artificial Sequence
  GFR-binding peptide
  MOD_RES (5)..(5): Xaa is C or S
  MOD_RES (21)..(22)..(23)..(24)..(25): Xaa is A or G
  MOD_RES (26)..(27)..(28)..(29): Xaa is A or G or is absent
SSVKXQPSRVHHSNITVQIMXXXXXXXXXLGEMSRLEEHL

SEQ ID NO: 18982 - protein, 42 aa, Artificial Sequence
  GFR-binding peptide
  MOD_RES (5)..(42): Xaa is C or S
  MOD_RES (21)..(22)..(23)..(24)..(25): Xaa is A or G
  MOD_RES (26)..(27)..(28)..(29): Xaa is A or G or is absent
SSVKXQPSRVHHSNITVQIMXXXXXXXXXLGEMSRLEEHLEX

SEQ ID NO: 18983 - protein, 39 aa, Artificial Sequence
  GFR-binding peptide
  MOD_RES (3)..(37)..(39): Xaa is C or S
LEXVPTGQRSVKMAKVRIKPHQGQHKEVQVLEEHSQXEX

SEQ ID NO: 18984 - protein, 41 aa, Artificial Sequence
  GFR-binding peptide
  MOD_RES (5)..(5): Xaa is C or S
  MOD_RES (21)..(22)..(23)..(24)..(25): Xaa is A or G
  MOD_RES (26)..(27)..(28)..(29): Xaa is A or G or is absent
RNVQXRPTQVQLRPVQVRKIXXXXXXXXXKKATVTLEDHLA

SEQ ID NO: 18985 - protein, 35 aa, Artificial Sequence
  GFR-binding peptide
  MOD_RES (1)..(35): Xaa is C or S
  MOD_RES (15)..(16)..(17)..(18)..(19): Xaa is A or G
  MOD_RES (20)..(21)..(22)..(23): Xaa is A or G or is absent
XVPTEESNITMQIMXXXXXXXXXLGEMSFLQHNKX

SEQ ID NO: 18986 - protein, 34 aa, Artificial Sequence
  GFR-binding peptide
  MOD_RES (1)..(1): Xaa is C or S
  MOD_RES (15)..(16)..(17)..(18)..(19): Xaa is A or G
  MOD_RES (20)..(21)..(22)..(23): Xaa is A or G or is absent
XVPTEERSVKMAKVXXXXXXXXXKEVQVFLQHNK

SEQ ID NO: 18987 - protein, 37 aa, Artificial Sequence
  GFR-binding peptide
  MOD_RES (1)..(1): Xaa is C or S
  MOD_RES (17)..(18)..(19)..(20)..(21): Xaa is A or G
  MOD_RES (22)..(23)..(24)..(25): Xaa is A or G or is absent
XRPTQVQLRPVQVRKIXXXXXXXXXKKATVTLEDHLA

SEQ ID NO: 18988 - protein, 36 aa, Artificial Sequence
  GFR-binding peptide
RPTQVQLSNITVQIMEIVRKKPIFIGEMSTLEDHLA

SEQ ID NO: 18989 - protein, 41 aa, Artificial Sequence
  GFR-binding peptide
  MOD_RES (1)..(38)..(40): Xaa is C or S
  MOD_RES (17)..(18)..(19)..(20)..(21): Xaa is A or G
  MOD_RES (22)..(23)..(24)..(25): Xaa is A or G or is absent
XQPSRVHHSNITVQIMXXXXXXXXXIGEMSRLEEHLEXAXA

SEQ ID NO: 18990 - protein, 35 aa, Artificial Sequence
  GFR-binding peptide
  MOD_RES (35)..(35): Xaa is C or S
TQVQLRSVKVAKVEIVRKKPIFKEVQVTLEDHLAX

SEQ ID NO: 18991 - protein, 36 aa, Artificial Sequence
  GFR-binding peptide
  MOD_RES (36)..(36): Xaa is C or S
  MOD_RES (15)..(16)..(17)..(18)..(19): Xaa is A or G
  MOD_RES (20)..(21)..(22)..(23): Xaa is A or G or is absent
PSRVHHSNITVQIMXXXXXXXXXLGEMSRLEEHLEX

SEQ ID NO: 18992 - protein, 44 aa, Artificial Sequence
  GFR-binding peptide
  MOD_RES (5)..(42)..(44): Xaa is C or S
SSVKXQPSRVHHSNITVQIMEYVRKKPKLLGEMSRLEEHLEXAX

SEQ ID NO: 18993 - protein, 44 aa, Artificial Sequence
  GFR-binding peptide
  MOD_RES (7)..(41)..(43): Xaa is C or S
  MOD_RES (21)..(22)..(23)..(24)..(25): Xaa is A or G
  MOD_RES (26)..(27)..(28)..(29): Xaa is A or G or is absent
NDEGLEXVPTEERSVKMAKVXXXXXXXXXKEVQVFLQHNKXEXR

SEQ ID NO: 18994 - protein, 40 aa, Artificial Sequence
  GFR-binding peptide
  MOD_RES (3)..(37)..(39): Xaa is C or S
  MOD_RES (17)..(18)..(19)..(20)..(21): Xaa is A or G
  MOD_RES (22)..(23)..(24)..(25): Xaa is A or G or is absent
LEXVPTEERSVKMAKVXXXXXXXXXKEVQVFLQHNKXEXR

SEQ ID NO: 18995 - protein, 42 aa, Artificial Sequence
  GFR-binding peptide
  MOD_RES (7)..(41): Xaa is C or S
NDEGLEXVPTGQRSVKMAKVRIKPHQGQHKEVQVLEEHSQXE

SEQ ID NO: 18996 - protein, 34 aa, Artificial Sequence
  GFR-binding peptide
RPTQVQLSNITVQIMEIVRKKPIFIGEMSTLEDH

SEQ ID NO: 18997 - protein, 36 aa, Artificial Sequence
  GFR-binding peptide
  MOD_RES (2)..(36): Xaa is C or S
EXVPTGQRSVKMAKVRIKPHQGQHKEVQVLEEHSQX

SEQ ID NO: 18998 - protein, 39 aa, Artificial Sequence
  GFR-binding peptide
  MOD_RES (4)..(38): Xaa is C or S
GLEXVPTGQRSVKMAKVRIKPHQGQHKEVQVLEEHSQXE

SEQ ID NO: 18999 - protein, 36 aa, Artificial Sequence
  GFR-binding peptide
  MOD_RES (2)..(2): Xaa is C or S
  MOD_RES (18)..(19)..(20)..(21)..(22): Xaa is A or G
  MOD_RES (23)..(24)..(25)..(26): Xaa is A or G or is absent
KXQPSRVHHRSVKVAKVXXXXXXXXXKEVQVRLEEH

SEQ ID NO: 19000 - protein, 39 aa, Artificial Sequence
  GFR-binding peptide
  MOD_RES (7)..(7): Xaa is C or S
  MOD_RES (21)..(22)..(23)..(24)..(25): Xaa is A or G
  MOD_RES (26)..(27)..(28)..(29): Xaa is A or G or is absent
NDEGLEXVPTGQSNITMQIMXXXXXXXXXLGEMSLEEHS

SEQ ID NO: 19001 - protein, 38 aa, Artificial Sequence
  GFR-binding peptide
  MOD_RES (4)..(38): Xaa is C or S
  MOD_RES (18)..(19)..(20)..(21)..(22): Xaa is A or G
  MOD_RES (23)..(24)..(25)..(26): Xaa is A or G or is absent
GLEXVPTGQSNITMQIMXXXXXXXXXIGEMSLEEHSQX

SEQ ID NO: 19002 - protein, 41 aa, Artificial Sequence
  GFR-binding peptide
  MOD_RES (4)..(41): Xaa is C or S
  MOD_RES (20)..(21)..(22)..(23)..(24): Xaa is A or G
  MOD_RES (25)..(26)..(27)..(28): Xaa is A or G or is absent
SVKXQPSRVHHRPVQVRKIXXXXXXXXXKKATVRLEEHLEX

SEQ ID NO: 19003 - protein, 35 aa, Artificial Sequence
  GFR-binding peptide
  MOD_RES (3)..(3): Xaa is C or S
  MOD_RES (17)..(18)..(19)..(20)..(21): Xaa is A or G
  MOD_RES (22)..(23)..(24)..(25): Xaa is A or G or is absent
LEXVPTEESNITMQIMXXXXXXXXXIGEMSFLQHN

SEQ ID NO: 19004 - protein, 43 aa, Artificial Sequence
  GFR-binding peptide
  MOD_RES (6)..(40)..(42): Xaa is C or S
DEGLEXVPTEERSVKMAKVRIKPHQGQHKEVQVFLQHNKXEXR

SEQ ID NO: 19005 - protein, 40 aa, Artificial Sequence
  GFR-binding peptide
  MOD_RES (3)..(40): Xaa is C or S
VQXRPTQVQLSNITVQIMEIVRKKPIFLGEMSTLEDHLAX

SEQ ID NO: 19006 - protein, 33 aa, Artificial Sequence
  GFR-binding peptide
VPTEERPVQMRKIRIKPHQGQHKKATVFLQHNK

SEQ ID NO: 19007 - protein, 39 aa, Artificial Sequence
  GFR-binding peptide
  MOD_RES (4)..(4): Xaa is C or S
  MOD_RES (20)..(21)..(22)..(23)..(24): Xaa is A or G
  MOD_RES (25)..(26)..(27)..(28): Xaa is A or G or is absent
NVQXRPTQVQLRSVKVAKVXXXXXXXXXKEVQVTLEDHL

SEQ ID NO: 19008 - protein, 36 aa, Artificial Sequence
  GFR-binding peptide
  MOD_RES (35)..(35): Xaa is C or S
TQVQLRSVKVAKVEIVRKKPIFKEVQVTLEDHLAXK

SEQ ID NO: 19009 - protein, 38 aa, Artificial Sequence
  GFR-binding peptide
  MOD_RES (3)..(3): Xaa is C or S
  MOD_RES (19)..(20)..(21)..(22)..(23): Xaa is A or G
  MOD_RES (24)..(25)..(26)..(27): Xaa is A or G or is absent
VKXQPSRVHHSNITVQIMXXXXXXXXXIGEMSRLEEHL

SEQ ID NO: 19010 - protein, 40 aa, Artificial Sequence
  GFR-binding peptide
  MOD_RES (4)..(38)..(40): Xaa is C or S
GLEXVPTGQRPVQMRKIRIKPHQGQHKKATVLEEHSQXEX

SEQ ID NO: 19011 - protein, 40 aa, Artificial Sequence
  GFR-binding peptide
  MOD_RES (5)..(39): Xaa is C or S
EGLEXVPTGQRSVKMAKVRIKPHQGQHKEVQVLEEHSQXE

SEQ ID NO: 19012 - protein, 36 aa, Artificial Sequence
  GFR-binding peptide
  MOD_RES (34)..(36): Xaa is C or S
  MOD_RES (14)..(15)..(16)..(17)..(18): Xaa is A or G
  MOD_RES (19)..(20)..(21)..(22): Xaa is A or G or is absent
VPTEESNITMQIMXXXXXXXXXLGEMSFLQHNKXEX

SEQ ID NO: 19013 - protein, 36 aa, Artificial Sequence
  GFR-binding peptide
  MOD_RES (3)..(3): Xaa is C or S
  MOD_RES (17)..(18)..(19)..(20)..(21): Xaa is A or G
  MOD_RES (22)..(23)..(24)..(25): Xaa is A or G or is absent
LEXVPTEESNITMQIMXXXXXXXXXLGEMSFLQHNK

SEQ ID NO: 19014 - protein, 39 aa, Artificial Sequence
  GFR-binding peptide
  MOD_RES (7)..(7): Xaa is C or S
NDEGLEXVPTEERPVQMRKIRIKPHQGQHKKATVFLQHN

SEQ ID NO: 19015 - protein, 33 aa, Artificial Sequence
  GFR-binding peptide
  MOD_RES (15)..(16)..(17)..(18)..(19): Xaa is A or G
  MOD_RES (20)..(21)..(22)..(23): Xaa is A or G or is absent
PSRVHHRSVKVAKVXXXXXXXXXKEVQVRLEEH

SEQ ID NO: 19016 - protein, 41 aa, Artificial Sequence
  GFR-binding peptide
  MOD_RES (5)..(5): Xaa is C or S
SSVKXQPSRVHHSNITVQIMEYVRKKPKLLGEMSRLEEHLE

SEQ ID NO: 19017 - protein, 37 aa, Artificial Sequence
  GFR-binding peptide
  MOD_RES (2)..(36): Xaa is C or S
EXVPTEESNITMQIMRIKPHQGQHLGEMSFLQHNKXE

SEQ ID NO: 19018 - protein, 38 aa, Artificial Sequence
  GFR-binding peptide
  MOD_RES (3)..(3): Xaa is C or S
  MOD_RES (19)..(20)..(21)..(22)..(23): Xaa is A or G
  MOD_RES (24)..(25)..(26)..(27): Xaa is A or G or is absent
VKXQPSRVHHRPVQVRKIXXXXXXXXXKKATVRLEEHL

SEQ ID NO: 19019 - protein, 39 aa, Artificial Sequence
  GFR-binding peptide
  MOD_RES (7)..(7): Xaa is C or S
NDEGLEXVPTEERSVKMAKVRIKPHQGQHKEVQVFLQHN

SEQ ID NO: 19020 - protein, 39 aa, Artificial Sequence
  GFR-binding peptide
  MOD_RES (37)..(39): Xaa is C or S
QPSRVHHSNITVQIMEYVRKKPKLIGEMSRLEEHLEXAX

SEQ ID NO: 19021 - protein, 37 aa, Artificial Sequence
  GFR-binding peptide
  MOD_RES (1)..(1): Xaa is C or S
  MOD_RES (17)..(18)..(19)..(20)..(21): Xaa is A or G
  MOD_RES (22)..(23)..(24)..(25): Xaa is A or G or is absent
XQPSRVHHRPVQVRKIXXXXXXXXXKKATVRLEEHLE

SEQ ID NO: 19022 - protein, 38 aa, Artificial Sequence
  GFR-binding peptide
  MOD_RES (6)..(6): Xaa is C or S
DEGLEXVPTGQRSVKMAKVRIKPHQGQHKEVQVLEEHS

SEQ ID NO: 19023 - protein, 40 aa, Artificial Sequence
  GFR-binding peptide
  MOD_RES (3)..(37)..(39): Xaa is C or S
  MOD_RES (17)..(18)..(19)..(20)..(21): Xaa is A or G
  MOD_RES (22)..(23)..(24)..(25): Xaa is A or G or is absent
LEXVPTGQSNITMQIMXXXXXXXXXIGEMSLEEHSQXEXR

SEQ ID NO: 19024 - protein, 33 aa, Artificial Sequence
  GFR-binding peptide
  MOD_RES (15)..(16)..(17)..(18)..(19): Xaa is A or G
  MOD_RES (20)..(21)..(22)..(23): Xaa is A or G or is absent
PSRVHHRPVQVRKIXXXXXXXXXKKATVRLEEH

SEQ ID NO: 19025 - protein, 43 aa, Artificial Sequence
  GFR-binding peptide
  MOD_RES (4)..(41)..(43): Xaa is C or S
  MOD_RES (20)..(21)..(22)..(23)..(24): Xaa is A or G
  MOD_RES (25)..(26)..(27)..(28): Xaa is A or G or is absent
SVKXQPSRVHHSNITVQIMXXXXXXXXXIGEMSRLEEHLEXAX

SEQ ID NO: 19026 - protein, 37 aa, Artificial Sequence
  GFR-binding peptide
  MOD_RES (36)..(36): Xaa is C or S
PSRVHHRPVQVRKIEYVRKKPKLKKATVRLEEHLEXA

SEQ ID NO: 19027 - protein, 38 aa, Artificial Sequence
  GFR-binding peptide
  MOD_RES (3)..(37): Xaa is C or S
  MOD_RES (17)..(18)..(19)..(20)..(21): Xaa is A or G
  MOD_RES (22)..(23)..(24)..(25): Xaa is A or G or is absent
LEXVPTEERSVKMAKVXXXXXXXXXKEVQVFLQHNKXE

SEQ ID NO: 19028 - protein, 36 aa, Artificial Sequence
  GFR-binding peptide
  MOD_RES (16)..(17)..(18)..(19)..(20): Xaa is A or G
  MOD_RES (21)..(22)..(23)..(24): Xaa is A or G or is absent
RPTQVQLRSVKVAKVXXXXXXXXXKEVQVTLEDHLA

SEQ ID NO: 19029 - protein, 38 aa, Artificial Sequence
  GFR-binding peptide
  MOD_RES (2)..(36)..(38): Xaa is C or S
  MOD_RES (16)..(17)..(18)..(19)..(20): Xaa is A or G
  MOD_RES (21)..(22)..(23)..(24): Xaa is A or G or is absent
EXVPTGQRPVQMRKIXXXXXXXXXKKATVLEEHSQXEX

SEQ ID NO: 19030 - protein, 36 aa, Artificial Sequence
  GFR-binding peptide
  MOD_RES (35)..(35): Xaa is C or S
  MOD_RES (14)..(15)..(16)..(17)..(18): Xaa is A or G
  MOD_RES (19)..(20)..(21)..(22): Xaa is A or G or is absent
TQVQLRSVKVAKVXXXXXXXXXKEVQVTLEDHLAXK

SEQ ID NO: 19031 - protein, 43 aa, Artificial Sequence
  GFR-binding peptide
  MOD_RES (3)..(40)..(42): Xaa is C or S
VKXQPSRVHHSNITVQIMEYVRKKPKLIGEMSRLEEHLEXAXA

SEQ ID NO: 19032 - protein, 37 aa, Artificial Sequence
  GFR-binding peptide
  MOD_RES (36)..(36): Xaa is C or S
PSRVHHSNITVQIMEYVRKKPKLLGEMSRLEEHLEXA

SEQ ID NO: 19033 - protein, 40 aa, Artificial Sequence
  GFR-binding peptide
  MOD_RES (3)..(40): Xaa is C or S
VKXQPSRVHHSNITVQIMEYVRKKPKLIGEMSRLEEHLEX

SEQ ID NO: 19034 - protein, 38 aa, Artificial Sequence
  GFR-binding peptide
  MOD_RES (1)..(35)..(37): Xaa is C or S
  MOD_RES (15)..(16)..(17)..(18)..(19): Xaa is A or G
  MOD_RES (20)..(21)..(22)..(23): Xaa is A or G or is absent
XVPTGQSNITMQIMXXXXXXXXXIGEMSLEEHSQXEXR

SEQ ID NO: 19035 - protein, 38 aa, Artificial Sequence
  GFR-binding peptide
  MOD_RES (6)..(6): Xaa is C or S
  MOD_RES (20)..(21)..(22)..(23)..(24): Xaa is A or G
  MOD_RES (25)..(26)..(27)..(28): Xaa is A or G or is absent
DEGLEXVPTGQSNITMQIMXXXXXXXXXIGEMSLEEHS

SEQ ID NO: 19036 - protein, 40 aa, Artificial Sequence
  GFR-binding peptide
  MOD_RES (4)..(38)..(40): Xaa is C or S
  MOD_RES (18)..(19)..(20)..(21)..(22): Xaa is A or G
  MOD_RES (23)..(24)..(25)..(26): Xaa is A or G or is absent
GLEXVPTEERPVQMRKIXXXXXXXXXKKATVFLQHNKXEX

SEQ ID NO: 19037 - protein, 43 aa, Artificial Sequence
  GFR-binding peptide
  MOD_RES (6)..(40)..(42): Xaa is C or S
  MOD_RES (20)..(21)..(22)..(23)..(24): Xaa is A or G
  MOD_RES (25)..(26)..(27)..(28): Xaa is A or G or is absent
DEGLEXVPTEERPVQMRKIXXXXXXXXXKKATVFLQHNKXEXR

SEQ ID NO: 19038 - protein, 35 aa, Artificial Sequence
  GFR-binding peptide
  MOD_RES (35)..(35): Xaa is C or S
  MOD_RES (14)..(15)..(16)..(17)..(18): Xaa is A or G
  MOD_RES (19)..(20)..(21)..(22): Xaa is A or G or is absent
TQVQLSNITVQIMXXXXXXXXXLGEMSTLEDHLAX

SEQ ID NO: 19039 - protein, 39 aa, Artificial Sequence
  GFR-binding peptide
  MOD_RES (5)..(5): Xaa is C or S
RNVQXRPTQVQLSNITVQIMEIVRKKPIFLGEMSTLEDH

SEQ ID NO: 19040 - protein, 41 aa, Artificial Sequence
  GFR-binding peptide
  MOD_RES (6)..(40): Xaa is C or S
DEGLEXVPTGQSNITMQIMRIKPHQGQHIGEMSLEEHSQXE

SEQ ID NO: 19041 - protein, 38 aa, Artificial Sequence
  GFR-binding peptide
  MOD_RES (6)..(6): Xaa is C or S
DEGLEXVPTEESNITMQIMRIKPHQGQHLGEMSFLQHN

SEQ ID NO: 19042 - protein, 40 aa, Artificial Sequence
  GFR-binding peptide
  MOD_RES (5)..(5): Xaa is C or S
  MOD_RES (21)..(22)..(23)..(24)..(25): Xaa is A or G
  MOD_RES (26)..(27)..(28)..(29): Xaa is A or G or is absent
SSVKXQPSRVHHRPVQVRKIXXXXXXXXXKKATVRLEEHL

SEQ ID NO: 19043 - protein, 40 aa, Artificial Sequence
  GFR-binding peptide
  MOD_RES (1)..(38)..(40): Xaa is C or S
  MOD_RES (17)..(18)..(19)..(20)..(21): Xaa is A or G
  MOD_RES (22)..(23)..(24)..(25): Xaa is A or G or is absent
XQPSRVHHSNITVQIMXXXXXXXXXIGEMSRLEEHLEXAX

SEQ ID NO: 19044 - protein, 35 aa, Artificial Sequence
  GFR-binding peptide
  MOD_RES (3)..(3): Xaa is C or S
LEXVPTEESNITMQIMRIKPHQGQHLGEMSFLQHN

SEQ ID NO: 19045 - protein, 39 aa, Artificial Sequence
  GFR-binding peptide
  MOD_RES (5)..(39): Xaa is C or S
EGLEXVPTEERPVQMRKIRIKPHQGQHKKATVFLQHNKX

SEQ ID NO: 19046 - protein, 41 aa, Artificial Sequence
  GFR-binding peptide
  MOD_RES (5)..(39)..(41): Xaa is C or S
EGLEXVPTGQRPVQMRKIRIKPHQGQHKKATVLEEHSQXEX

SEQ ID NO: 19047 - protein, 37 aa, Artificial Sequence
  GFR-binding peptide
  MOD_RES (1)..(1): Xaa is C or S
XRPTQVQLSNITVQIMEIVRKKPIFIGEMSTLEDHLA

SEQ ID NO: 19048 - protein, 42 aa, Artificial Sequence
  GFR-binding peptide
  MOD_RES (6)..(40)..(42): Xaa is C or S
DEGLEXVPTEESNITMQIMRIKPHQGQHLGEMSFLQHNKXEX

SEQ ID NO: 19049 - protein, 38 aa, Artificial Sequence
  GFR-binding peptide
  MOD_RES (4)..(4): Xaa is C or S
SVKXQPSRVHHSNITVQIMEYVRKKPKLLGEMSRLEEH

SEQ ID NO: 19050 - protein, 38 aa, Artificial Sequence
  GFR-binding peptide
  MOD_RES (36)..(38): Xaa is C or S
PTQVQLRSVKVAKVEIVRKKPIFKEVQVTLEDHLAXKX

SEQ ID NO: 19051 - protein, 39 aa, Artificial Sequence
  GFR-binding peptide
  MOD_RES (7)..(7): Xaa is C or S
  MOD_RES (21)..(22)..(23)..(24)..(25): Xaa is A or G
  MOD_RES (26)..(27)..(28)..(29): Xaa is A or G or is absent
NDEGLEXVPTEESNITMQIMXXXXXXXXXIGEMSFLQHN

SEQ ID NO: 19052 - protein, 41 aa, Artificial Sequence
  GFR-binding peptide
  MOD_RES (3)..(40): Xaa is C or S
VQXRPTQVQLSNITVQIMEIVRKKPIFLGEMSTLEDHLAXK

SEQ ID NO: 19053 - protein, 40 aa, Artificial Sequence
  GFR-binding peptide
  MOD_RES (37)..(39): Xaa is C or S
QPSRVHHSNITVQIMEYVRKKPKLIGEMSRLEEHLEXAXA

SEQ ID NO: 19054 - protein, 37 aa, Artificial Sequence
  GFR-binding peptide
  MOD_RES (37)..(37): Xaa is C or S
QPSRVHHSNITVQIMEYVRKKPKLLGEMSRLEEHLEX

SEQ ID NO: 19055 - protein, 40 aa, Artificial Sequence
  GFR-binding peptide
  MOD_RES (6)..(40): Xaa is C or S
DEGLEXVPTEERPVQMRKIRIKPHQGQHKKATVFLQHNKX

SEQ ID NO: 19056 - protein, 39 aa, Artificial Sequence
  GFR-binding peptide
  MOD_RES (3)..(3): Xaa is C or S
  MOD_RES (19)..(20)..(21)..(22)..(23): Xaa is A or G
  MOD_RES (24)..(25)..(26)..(27): Xaa is A or G or is absent
VQXRPTQVQLRPVQVRKIXXXXXXXXXKKATVTLEDHLA

SEQ ID NO: 19057 - protein, 36 aa, Artificial Sequence
  GFR-binding peptide
  MOD_RES (1)..(1): Xaa is C or S
  MOD_RES (17)..(18)..(19)..(20)..(21): Xaa is A or G
  MOD_RES (22)..(23)..(24)..(25): Xaa is A or G or is absent
XRPTQVQLSNITVQIMXXXXXXXXXLGEMSTLEDHL

SEQ ID NO: 19058 - protein, 38 aa, Artificial Sequence
  GFR-binding peptide
  MOD_RES (2)..(36)..(38): Xaa is C or S
EXVPTGQRSVKMAKVRIKPHQGQHKEVQVLEEHSQXEX

SEQ ID NO: 19059 - protein, 32 aa, Artificial Sequence
  GFR-binding peptide
  MOD_RES (14)..(15)..(16)..(17)..(18): Xaa is A or G
  MOD_RES (19)..(20)..(21)..(22): Xaa is A or G or is absent
TQVQLSNITVQIMXXXXXXXXXIGEMSTLEDH

SEQ ID NO: 19060 - protein, 41 aa, Artificial Sequence
  GFR-binding peptide
  MOD_RES (4)..(38)..(40): Xaa is C or S
GLEXVPTGQSNITMQIMRIKPHQGQHIGEMSLEEHSQXEXR

SEQ ID NO: 19061 - protein, 42 aa, Artificial Sequence
  GFR-binding peptide
  MOD_RES (3)..(40)..(42): Xaa is C or S
VKXQPSRVHHSNITVQIMEYVRKKPKLIGEMSRLEEHLEXAX

SEQ ID NO: 19062 - protein, 39 aa, Artificial Sequence
  GFR-binding peptide
  MOD_RES (5)..(5): Xaa is C or S
  MOD_RES (21)..(22)..(23)..(24)..(25): Xaa is A or G
  MOD_RES (26)..(27)..(28)..(29): Xaa is A or G or is absent
SSVKXQPSRVHHSNITVQIMXXXXXXXXXLGEMSRLEEH

SEQ ID NO: 19063 - protein, 41 aa, Artificial Sequence
  GFR-binding peptide
  MOD_RES (5)..(5): Xaa is C or S
  MOD_RES (21)..(22)..(23)..(24)..(25): Xaa is A or G
  MOD_RES (26)..(27)..(28)..(29): Xaa is A or G or is absent
SSVKXQPSRVHHRPVQVRKIXXXXXXXXXKKATVRLEEHLE

SEQ ID NO: 19064 - protein, 37 aa, Artificial Sequence
  GFR-binding peptide
  MOD_RES (1)..(35)..(37): Xaa is C or S
XVPTGQRSVKMAKVRIKPHQGQHKEVQVLEEHSQXEX

SEQ ID NO: 19065 - protein, 39 aa, Artificial Sequence
  GFR-binding peptide
  MOD_RES (4)..(4): Xaa is C or S
NVQXRPTQVQLSNITVQIMEIVRKKPIFLGEMSTLEDHL

SEQ ID NO: 19066 - protein, 45 aa, Artificial Sequence
  GFR-binding peptide
  MOD_RES (5)..(42)..(44): Xaa is C or S
  MOD_RES (21)..(22)..(23)..(24)..(25): Xaa is A or G
  MOD_RES (26)..(27)..(28)..(29): Xaa is A or G or is absent
RNVQXRPTQVQLRPVQVRKIXXXXXXXXXKKATVTLEDHLAXKXE

SEQ ID NO: 19067 - protein, 38 aa, Artificial Sequence
  GFR-binding peptide
  MOD_RES (35)..(37): Xaa is C or S
  MOD_RES (14)..(15)..(16)..(17)..(18): Xaa is A or G
  MOD_RES (19)..(20)..(21)..(22): Xaa is A or G or is absent
TQVQLRSVKVAKVXXXXXXXXXKEVQVTLEDHLAXKXE

SEQ ID NO: 19068 - protein, 42 aa, Artificial Sequence
  GFR-binding peptide
  MOD_RES (2)..(39)..(41): Xaa is C or S
KXQPSRVHHSNITVQIMEYVRKKPKLLGEMSRLEEHLEXAXA

SEQ ID NO: 19069 - protein, 44 aa, Artificial Sequence
  GFR-binding peptide
  MOD_RES (7)..(41)..(43): Xaa is C or S
  MOD_RES (21)..(22)..(23)..(24)..(25): Xaa is A or G
  MOD_RES (26)..(27)..(28)..(29): Xaa is A or G or is absent
NDEGLEXVPTGQSNITMQIMXXXXXXXXXIGEMSLEEHSQXEXR

SEQ ID NO: 19070 - protein, 42 aa, Artificial Sequence
  GFR-binding peptide
  MOD_RES (4)..(41): Xaa is C or S
  MOD_RES (20)..(21)..(22)..(23)..(24): Xaa is A or G
  MOD_RES (25)..(26)..(27)..(28): Xaa is A or G or is absent
SVKXQPSRVHHSNITVQIMXXXXXXXXXLGEMSRLEEHLEXA

SEQ ID NO: 19071 - protein, 42 aa, Artificial Sequence
  GFR-binding peptide
  MOD_RES (7)..(41): Xaa is C or S
NDEGLEXVPTEERSVKMAKVRIKPHQGQHKEVQVFLQHNKXE

SEQ ID NO: 19072 - protein, 37 aa, Artificial Sequence
  GFR-binding peptide
  MOD_RES (3)..(37): Xaa is C or S
  MOD_RES (17)..(18)..(19)..(20)..(21): Xaa is A or G
  MOD_RES (22)..(23)..(24)..(25): Xaa is A or G or is absent
LEXVPTEESNITMQIMXXXXXXXXXIGEMSFLQHNKX

SEQ ID NO: 19073 - protein, 37 aa, Artificial Sequence
  GFR-binding peptide
  MOD_RES (37)..(37): Xaa is C or S
RPTQVQLSNITVQIMEIVRKKPIFLGEMSTLEDHLAX

SEQ ID NO: 19074 - protein, 37 aa, Artificial Sequence
  GFR-binding peptide
  MOD_RES (3)..(37): Xaa is C or S
  MOD_RES (17)..(18)..(19)..(20)..(21): Xaa is A or G
  MOD_RES (22)..(23)..(24)..(25): Xaa is A or G or is absent
LEXVPTEESNITMQIMXXXXXXXXXLGEMSFLQHNKX

SEQ ID NO: 19075 - protein, 38 aa, Artificial Sequence
  GFR-binding peptide
  MOD_RES (36)..(38): Xaa is C or S
PSRVHHRPVQVRKIEYVRKKPKLKKATVRLEEHLEXAX

SEQ ID NO: 19076 - protein, 38 aa, Artificial Sequence
  GFR-binding peptide
  MOD_RES (6)..(6): Xaa is C or S
DEGLEXVPTGQSNITMQIMRIKPHQGQHIGEMSLEEHS

SEQ ID NO: 19077 - protein, 39 aa, Artificial Sequence
  GFR-binding peptide
  MOD_RES (2)..(39): Xaa is C or S
  MOD_RES (18)..(19)..(20)..(21)..(22): Xaa is A or G
  MOD_RES (23)..(24)..(25)..(26): Xaa is A or G or is absent
KXQPSRVHHRPVQVRKIXXXXXXXXXKKATVRLEEHLEX

SEQ ID NO: 19078 - protein, 40 aa, Artificial Sequence
  GFR-binding peptide
  MOD_RES (6)..(40): Xaa is C or S
DEGLEXVPTGQRSVKMAKVRIKPHQGQHKEVQVLEEHSQX

SEQ ID NO: 19079 - protein, 39 aa, Artificial Sequence
  GFR-binding peptide
  MOD_RES (5)..(39): Xaa is C or S
  MOD_RES (19)..(20)..(21)..(22)..(23): Xaa is A or G
  MOD_RES (24)..(25)..(26)..(27): Xaa is A or G or is absent
EGLEXVPTEERSVKMAKVXXXXXXXXXKEVQVFLQHNKX

SEQ ID NO: 19080 - protein, 42 aa, Artificial Sequence
  GFR-binding peptide
  MOD_RES (6)..(40)..(42): Xaa is C or S
  MOD_RES (20)..(21)..(22)..(23)..(24): Xaa is A or G
  MOD_RES (25)..(26)..(27)..(28): Xaa is A or G or is absent
DEGLEXVPTGQRSVKMAKVXXXXXXXXXKEVQVLEEHSQXEX

SEQ ID NO: 19081 - protein, 39 aa, Artificial Sequence
  GFR-binding peptide
  MOD_RES (36)..(38): Xaa is C or S
PTQVQLRSVKVAKVEIVRKKPIFKEVQVTLEDHLAXKXE

SEQ ID NO: 19082 - protein, 39 aa, Artificial Sequence
  GFR-binding peptide
  MOD_RES (1)..(38): Xaa is C or S
XQPSRVHHSNITVQIMEYVRKKPKLIGEMSRLEEHLEXA

SEQ ID NO: 19083 - protein, 37 aa, Artificial Sequence
  GFR-binding peptide
  MOD_RES (3)..(37): Xaa is C or S
LEXVPTEESNITMQIMRIKPHQGQHLGEMSFLQHNKX

SEQ ID NO: 19084 - protein, 43 aa, Artificial Sequence
  GFR-binding peptide
  MOD_RES (3)..(40)..(42): Xaa is C or S
VQXRPTQVQLSNITVQIMEIVRKKPIFLGEMSTLEDHLAXKXE

SEQ ID NO: 19085 - protein, 37 aa, Artificial Sequence
  GFR-binding peptide
  MOD_RES (37)..(37): Xaa is C or S
  MOD_RES (16)..(17)..(18)..(19)..(20): Xaa is A or G
  MOD_RES (21)..(22)..(23)..(24): Xaa is A or G or is absent
RPTQVQLRSVKVAKVXXXXXXXXXKEVQVTLEDHLAX

SEQ ID NO: 19086 - protein, 33 aa, Artificial Sequence
  GFR-binding peptide
  MOD_RES (14)..(15)..(16)..(17)..(18): Xaa is A or G
  MOD_RES (19)..(20)..(21)..(22): Xaa is A or G or is absent
SRVHHSNITVQIMXXXXXXXXXIGEMSRLEEHL

SEQ ID NO: 19087 - protein, 37 aa, Artificial Sequence
  GFR-binding peptide
  MOD_RES (5)..(5): Xaa is C or S
  MOD_RES (19)..(20)..(21)..(22)..(23): Xaa is A or G
  MOD_RES (24)..(25)..(26)..(27): Xaa is A or G or is absent
EGLEXVPTGQRSVKMAKVXXXXXXXXXKEVQVLEEHS

SEQ ID NO: 19088 - protein, 39 aa, Artificial Sequence
  GFR-binding peptide
  MOD_RES (5)..(39): Xaa is C or S
EGLEXVPTEERSVKMAKVRIKPHQGQHKEVQVFLQHNKX

SEQ ID NO: 19089 - protein, 39 aa, Artificial Sequence
  GFR-binding peptide
  MOD_RES (4)..(4): Xaa is C or S
SVKXQPSRVHHSNITVQIMEYVRKKPKLLGEMSRLEEHL

SEQ ID NO: 19090 - protein, 39 aa, Artificial Sequence
  GFR-binding peptide
  MOD_RES (2)..(39): Xaa is C or S
  MOD_RES (18)..(19)..(20)..(21)..(22): Xaa is A or G
  MOD_RES (23)..(24)..(25)..(26): Xaa is A or G or is absent
KXQPSRVHHSNITVQIMXXXXXXXXXIGEMSRLEEHLEX

SEQ ID NO: 19091 - protein, 37 aa, Artificial Sequence
  GFR-binding peptide
  MOD_RES (3)..(37): Xaa is C or S
  MOD_RES (17)..(18)..(19)..(20)..(21): Xaa is A or G
  MOD_RES (22)..(23)..(24)..(25): Xaa is A or G or is absent
LEXVPTGQRPVQMRKIXXXXXXXXXKKATVLEEHSQX

SEQ ID NO: 19092 - protein, 38 aa, Artificial Sequence
  GFR-binding peptide
  MOD_RES (2)..(36)..(38): Xaa is C or S
EXVPTEERSVKMAKVRIKPHQGQHKEVQVFLQHNKXEX

SEQ ID NO: 19093 - protein, 38 aa, Artificial Sequence
  GFR-binding peptide
  MOD_RES (37)..(37): Xaa is C or S
RPTQVQLSNITVQIMEIVRKKPIFLGEMSTLEDHLAXK

SEQ ID NO: 19094 - protein, 39 aa, Artificial Sequence
  GFR-binding peptide
  MOD_RES (4)..(38): Xaa is C or S
GLEXVPTEERSVKMAKVRIKPHQGQHKEVQVFLQHNKXE

SEQ ID NO: 19095 - protein, 38 aa, Artificial Sequence
  GFR-binding peptide
  MOD_RES (35)..(37): Xaa is C or S
SRVHHRPVQVRKIEYVRKKPKLKKATVRLEEHLEXAXA

SEQ ID NO: 19096 - protein, 40 aa, Artificial Sequence
  GFR-binding peptide
  MOD_RES (3)..(40): Xaa is C or S
VKXQPSRVHHSNITVQIMEYVRKKPKLLGEMSRLEEHLEX

SEQ ID NO: 19097 - protein, 37 aa, Artificial Sequence
  GFR-binding peptide
  MOD_RES (1)..(35)..(37): Xaa is C or S
XVPTGQSNITMQIMRIKPHQGQHIGEMSLEEHSQXEX

SEQ ID NO: 19098 - protein, 39 aa, Artificial Sequence
  GFR-binding peptide
  MOD_RES (6)..(6): Xaa is C or S
DEGLEXVPTEERPVQMRKIRIKPHQGQHKKATVFLQHNK

SEQ ID NO: 19099 - protein, 41 aa, Artificial Sequence
  GFR-binding peptide
  MOD_RES (6)..(40): Xaa is C or S
  MOD_RES (20)..(21)..(22)..(23)..(24): Xaa is A or G
  MOD_RES (25)..(26)..(27)..(28): Xaa is A or G or is absent
DEGLEXVPTGQRPVQMRKIXXXXXXXXXKKATVLEEHSQXE

SEQ ID NO: 19100 - protein, 41 aa, Artificial Sequence
  GFR-binding peptide
  MOD_RES (3)..(40): Xaa is C or S
VKXQPSRVHHSNITVQIMEYVRKKPKLLGEMSRLEEHLEXA

SEQ ID NO: 19101 - protein, 39 aa, Artificial Sequence
  GFR-binding peptide
  MOD_RES (3)..(37)..(39): Xaa is C or S
  MOD_RES (17)..(18)..(19)..(20)..(21): Xaa is A or G
  MOD_RES (22)..(23)..(24)..(25): Xaa is A or G or is absent
LEXVPTEESNITMQIMXXXXXXXXXLGEMSFLQHNKXEX

SEQ ID NO: 19102 - protein, 42 aa, Artificial Sequence
  GFR-binding peptide
  MOD_RES (5)..(42): Xaa is C or S
  MOD_RES (21)..(22)..(23)..(24)..(25): Xaa is A or G
  MOD_RES (26)..(27)..(28)..(29): Xaa is A or G or is absent
SSVKXQPSRVHHSNITVQIMXXXXXXXXXIGEMSRLEEHLEX

SEQ ID NO: 19103 - protein, 39 aa, Artificial Sequence
  GFR-binding peptide
  MOD_RES (37)..(39): Xaa is C or S
RPTQVQLSNITVQIMEIVRKKPIFIGEMSTLEDHLAXKX

SEQ ID NO: 19104 - protein, 43 aa, Artificial Sequence
  GFR-binding peptide
  MOD_RES (4)..(41)..(43): Xaa is C or S
NVQXRPTQVQLSNITVQIMEIVRKKPIFIGEMSTLEDHLAXKX

SEQ ID NO: 19105 - protein, 33 aa, Artificial Sequence
  GFR-binding peptide
VPTGQRSVKMAKVRIKPHQGQHKEVQVLEEHSQ

SEQ ID NO: 19106 - protein, 39 aa, Artificial Sequence
  GFR-binding peptide
  MOD_RES (6)..(6): Xaa is C or S
  MOD_RES (20)..(21)..(22)..(23)..(24): Xaa is A or G
  MOD_RES (25)..(26)..(27)..(28): Xaa is A or G or is absent
DEGLEXVPTEESNITMQIMXXXXXXXXXLGEMSFLQHNK

SEQ ID NO: 19107 - protein, 44 aa, Artificial Sequence
  GFR-binding peptide
  MOD_RES (5)..(42)..(44): Xaa is C or S
RNVQXRPTQVQLSNITVQIMEIVRKKPIFIGEMSTLEDHLAXKX

SEQ ID NO: 19108 - protein, 44 aa, Artificial Sequence
  GFR-binding peptide
  MOD_RES (5)..(42)..(44): Xaa is C or S
RNVQXRPTQVQLSNITVQIMEIVRKKPIFLGEMSTLEDHLAXKX

SEQ ID NO: 19109 - protein, 38 aa, Artificial Sequence
  GFR-binding peptide
  MOD_RES (35)..(37): Xaa is C or S
TQVQLSNITVQIMEIVRKKPIFLGEMSTLEDHLAXKXE

SEQ ID NO: 19110 - protein, 38 aa, Artificial Sequence
  GFR-binding peptide
  MOD_RES (5)..(5): Xaa is C or S
  MOD_RES (19)..(20)..(21)..(22)..(23): Xaa is A or G
  MOD_RES (24)..(25)..(26)..(27): Xaa is A or G or is absent
EGLEXVPTGQRPVQMRKIXXXXXXXXXKKATVLEEHSQ

SEQ ID NO: 19111 - protein, 35 aa, Artificial Sequence
  GFR-binding peptide
  MOD_RES (2)..(2): Xaa is C or S
  MOD_RES (16)..(17)..(18)..(19)..(20): Xaa is A or G
  MOD_RES (21)..(22)..(23)..(24): Xaa is A or G or is absent
EXVPTEESNITMQIMXXXXXXXXXIGEMSFLQHNK

SEQ ID NO: 19112 - protein, 32 aa, Artificial Sequence
  GFR-binding peptide
  MOD_RES (14)..(15)..(16)..(17)..(18): Xaa is A or G
  MOD_RES (19)..(20)..(21)..(22): Xaa is A or G or is absent
VPTGQRPVQMRKIXXXXXXXXXKKATVLEEHS

SEQ ID NO: 19113 - protein, 40 aa, Artificial Sequence
  GFR-binding peptide
  MOD_RES (6)..(40): Xaa is C or S
  MOD_RES (20)..(21)..(22)..(23)..(24): Xaa is A or G
  MOD_RES (25)..(26)..(27)..(28): Xaa is A or G or is absent
DEGLEXVPTEERPVQMRKIXXXXXXXXXKKATVFLQHNKX

SEQ ID NO: 19114 - protein, 33 aa, Artificial Sequence
  GFR-binding peptide
VPTGQSNITMQIMRIKPHQGQHIGEMSLEEHSQ

SEQ ID NO: 19115 - protein, 35 aa, Artificial Sequence
  GFR-binding peptide
  MOD_RES (1)..(35): Xaa is C or S
XVPTEERPVQMRKIRIKPHQGQHKKATVFLQHNKX

SEQ ID NO: 19116 - protein, 40 aa, Artificial Sequence
  GFR-binding peptide
  MOD_RES (6)..(40): Xaa is C or S
  MOD_RES (20)..(21)..(22)..(23)..(24): Xaa is A or G
  MOD_RES (25)..(26)..(27)..(28): Xaa is A or G or is absent
DEGLEXVPTGQRSVKMAKVXXXXXXXXXKEVQVLEEHSQX

SEQ ID NO: 19117 - protein, 39 aa, Artificial Sequence
  GFR-binding peptide
  MOD_RES (36)..(38): Xaa is C or S
PSRVHHSNITVQIMEYVRKKPKLIGEMSRLEEHLEXAXA

SEQ ID NO: 19118 - protein, 43 aa, Artificial Sequence
  GFR-binding peptide
  MOD_RES (5)..(42): Xaa is C or S
  MOD_RES (21)..(22)..(23)..(24)..(25): Xaa is A or G
  MOD_RES (26)..(27)..(28)..(29): Xaa is A or G or is absent
SSVKXQPSRVHHRPVQVRKIXXXXXXXXXKKATVRLEEHLEXA

SEQ ID NO: 19119 - protein, 37 aa, Artificial Sequence
  GFR-binding peptide
  MOD_RES (2)..(36): Xaa is C or S
EXVPTGQSNITMQIMRIKPHQGQHIGEMSLEEHSQXE

SEQ ID NO: 19120 - protein, 36 aa, Artificial Sequence
  GFR-binding peptide
  MOD_RES (1)..(1): Xaa is C or S
  MOD_RES (17)..(18)..(19)..(20)..(21): Xaa is A or G
  MOD_RES (22)..(23)..(24)..(25): Xaa is A or G or is absent
XQPSRVHHSNITVQIMXXXXXXXXXLGEMSRLEEHL

SEQ ID NO: 19121 - protein, 33 aa, Artificial Sequence
  GFR-binding peptide
  MOD_RES (1)..(1): Xaa is C or S
  MOD_RES (15)..(16)..(17)..(18)..(19): Xaa is A or G
  MOD_RES (20)..(21)..(22)..(23): Xaa is A or G or is absent
XVPTEERPVQMRKIXXXXXXXXXKKATVFLQHN

SEQ ID NO: 19122 - protein, 34 aa, Artificial Sequence
  GFR-binding peptide
  MOD_RES (1)..(1): Xaa is C or S
XVPTGQSNITMQIMRIKPHQGQHIGEMSLEEHSQ

SEQ ID NO: 19123 - protein, 33 aa, Artificial Sequence
  GFR-binding peptide
  MOD_RES (15)..(16)..(17)..(18)..(19): Xaa is A or G
  MOD_RES (20)..(21)..(22)..(23): Xaa is A or G or is absent
PTQVQLRSVKVAKVXXXXXXXXXKEVQVTLEDH

SEQ ID NO: 19124 - protein, 37 aa, Artificial Sequence
  GFR-binding peptide
  MOD_RES (1)..(1): Xaa is C or S
  MOD_RES (17)..(18)..(19)..(20)..(21): Xaa is A or G
  MOD_RES (22)..(23)..(24)..(25): Xaa is A or G or is absent
XQPSRVHHSNITVQIMXXXXXXXXXLGEMSRLEEHLE

SEQ ID NO: 19125 - protein, 37 aa, Artificial Sequence
  GFR-binding peptide
  MOD_RES (5)..(5): Xaa is C or S
EGLEXVPTGQRPVQMRKIRIKPHQGQHKKATVLEEHS

SEQ ID NO: 19126 - protein, 40 aa, Artificial Sequence
  GFR-binding peptide
  MOD_RES (3)..(37)..(39): Xaa is C or S
  MOD_RES (17)..(18)..(19)..(20)..(21): Xaa is A or G
  MOD_RES (22)..(23)..(24)..(25): Xaa is A or G or is absent
LEXVPTEERPVQMRKIXXXXXXXXXKKATVFLQHNKXEXR

SEQ ID NO: 19127 - protein, 38 aa, Artificial Sequence
  GFR-binding peptide
  MOD_RES (35)..(37): Xaa is C or S
TQVQLSNITVQIMEIVRKKPIFIGEMSTLEDHLAXKXE

SEQ ID NO: 19128 - protein, 37 aa, Artificial Sequence
  GFR-binding peptide
  MOD_RES (35)..(37): Xaa is C or S
  MOD_RES (14)..(15)..(16)..(17)..(18): Xaa is A or G
  MOD_RES (19)..(20)..(21)..(22): Xaa is A or G or is absent
SRVHHSNITVQIMXXXXXXXXXLGEMSRLEEHLEXAX

SEQ ID NO: 19129 - protein, 45 aa, Artificial Sequence
  GFR-binding peptide
  MOD_RES (5)..(42)..(44): Xaa is C or S
  MOD_RES (21)..(22)..(23)..(24)..(25): Xaa is A or G
  MOD_RES (26)..(27)..(28)..(29): Xaa is A or G or is absent
SSVKXQPSRVHHSNITVQIMXXXXXXXXXIGEMSRLEEHLEXAXA

SEQ ID NO: 19130 - protein, 38 aa, Artificial Sequence
  GFR-binding peptide
  MOD_RES (2)..(36)..(38): Xaa is C or S
EXVPTGQSNITMQIMRIKPHQGQHIGEMSLEEHSQXEX

SEQ ID NO: 19131 - protein, 39 aa, Artificial Sequence
  GFR-binding peptide
  MOD_RES (3)..(3): Xaa is C or S
VKXQPSRVHHSNITVQIMEYVRKKPKLIGEMSRLEEHLE

SEQ ID NO: 19132 - protein, 42 aa, Artificial Sequence
  GFR-binding peptide
  MOD_RES (4)..(41): Xaa is C or S
  MOD_RES (20)..(21)..(22)..(23)..(24): Xaa is A or G
  MOD_RES (25)..(26)..(27)..(28): Xaa is A or G or is absent
NVQXRPTQVQLRPVQVRKIXXXXXXXXXKKATVTLEDHLAXK

SEQ ID NO: 19133 - protein, 45 aa, Artificial Sequence
  GFR-binding peptide
  MOD_RES (5)..(42)..(44): Xaa is C or S
  MOD_RES (21)..(22)..(23)..(24)..(25): Xaa is A or G
  MOD_RES (26)..(27)..(28)..(29): Xaa is A or G or is absent
SSVKXQPSRVHHSNITVQIMXXXXXXXXXLGEMSRLEEHLEXAXA

SEQ ID NO: 19134 - protein, 36 aa, Artificial Sequence
  GFR-binding peptide
  MOD_RES (4)..(4): Xaa is C or S
GLEXVPTEERSVKMAKVRIKPHQGQHKEVQVFLQHN

SEQ ID NO: 19135 - protein, 35 aa, Artificial Sequence
  GFR-binding peptide
  MOD_RES (34)..(34): Xaa is C or S
  MOD_RES (14)..(15)..(16)..(17)..(18): Xaa is A or G
  MOD_RES (19)..(20)..(21)..(22): Xaa is A or G or is absent
VPTEESNITMQIMXXXXXXXXXLGEMSFLQHNKXE

SEQ ID NO: 19136 - protein, 37 aa, Artificial Sequence
  GFR-binding peptide
  MOD_RES (1)..(35)..(37): Xaa is C or S
XVPTEERSVKMAKVRIKPHQGQHKEVQVFLQHNKXEX

SEQ ID NO: 19137 - protein, 34 aa, Artificial Sequence
  GFR-binding peptide
  MOD_RES (15)..(16)..(17)..(18)..(19): Xaa is A or G
  MOD_RES (20)..(21)..(22)..(23): Xaa is A or G or is absent
PSRVHHSNITVQIMXXXXXXXXXIGEMSRLEEHL

SEQ ID NO: 19138 - protein, 39 aa, Artificial Sequence
  GFR-binding peptide
  MOD_RES (7)..(7): Xaa is C or S
NDEGLEXVPTEESNITMQIMRIKPHQGQHLGEMSFLQHN

SEQ ID NO: 19139 - protein, 36 aa, Artificial Sequence
  GFR-binding peptide
  MOD_RES (1)..(35): Xaa is C or S
XVPTGQSNITMQIMRIKPHQGQHIGEMSLEEHSQXE

SEQ ID NO: 19140 - protein, 41 aa, Artificial Sequence
  GFR-binding peptide
  MOD_RES (7)..(41): Xaa is C or S
NDEGLEXVPTEESNITMQIMRIKPHQGQHLGEMSFLQHNKX

SEQ ID NO: 19141 - protein, 36 aa, Artificial Sequence
  GFR-binding peptide
  MOD_RES (4)..(4): Xaa is C or S
GLEXVPTEERPVQMRKIRIKPHQGQHKKATVFLQHN

SEQ ID NO: 19142 - protein, 41 aa, Artificial Sequence
  GFR-binding peptide
  MOD_RES (7)..(41): Xaa is C or S
  MOD_RES (21)..(22)..(23)..(24)..(25): Xaa is A or G
  MOD_RES (26)..(27)..(28)..(29): Xaa is A or G or is absent
NDEGLEXVPTGQSNITMQIMXXXXXXXXXIGEMSLEEHSQX

SEQ ID NO: 19143 - protein, 35 aa, Artificial Sequence
  GFR-binding peptide
  MOD_RES (34)..(34): Xaa is C or S
  MOD_RES (14)..(15)..(16)..(17)..(18): Xaa is A or G
  MOD_RES (19)..(20)..(21)..(22): Xaa is A or G or is absent
VPTGQRSVKMAKVXXXXXXXXXKEVQVLEEHSQXE

SEQ ID NO: 19144 - protein, 36 aa, Artificial Sequence
  GFR-binding peptide
  MOD_RES (4)..(4): Xaa is C or S
  MOD_RES (18)..(19)..(20)..(21)..(22): Xaa is A or G
  MOD_RES (23)..(24)..(25)..(26): Xaa is A or G or is absent
GLEXVPTEESNITMQIMXXXXXXXXXLGEMSFLQHN

SEQ ID NO: 19145 - protein, 42 aa, Artificial Sequence
  GFR-binding peptide
  MOD_RES (4)..(41): Xaa is C or S
  MOD_RES (20)..(21)..(22)..(23)..(24): Xaa is A or G
  MOD_RES (25)..(26)..(27)..(28): Xaa is A or G or is absent
SVKXQPSRVHHSNITVQIMXXXXXXXXXIGEMSRLEEHLEXA

SEQ ID NO: 19146 - protein, 41 aa, Artificial Sequence
  GFR-binding peptide
  MOD_RES (5)..(5): Xaa is C or S
  MOD_RES (21)..(22)..(23)..(24)..(25): Xaa is A or G
  MOD_RES (26)..(27)..(28)..(29): Xaa is A or G or is absent
SSVKXQPSRVHHSNITVQIMXXXXXXXXXIGEMSRLEEHLE

SEQ ID NO: 19147 - protein, 40 aa, Artificial Sequence
  GFR-binding peptide
  MOD_RES (2)..(39): Xaa is C or S
  MOD_RES (18)..(19)..(20)..(21)..(22): Xaa is A or G
  MOD_RES (23)..(24)..(25)..(26): Xaa is A or G or is absent
KXQPSRVHHSNITVQIMXXXXXXXXXIGEMSRLEEHLEXA

SEQ ID NO: 19148 - protein, 43 aa, Artificial Sequence
  GFR-binding peptide
  MOD_RES (5)..(42): Xaa is C or S
SSVKXQPSRVHHRPVQVRKIEYVRKKPKLKKATVRLEEHLEXA

SEQ ID NO: 19149 - protein, 37 aa, Artificial Sequence
  GFR-binding peptide
  MOD_RES (4)..(4): Xaa is C or S
GLEXVPTEERPVQMRKIRIKPHQGQHKKATVFLQHNK

SEQ ID NO: 19150 - protein, 37 aa, Artificial Sequence
  GFR-binding peptide
  MOD_RES (1)..(35)..(37): Xaa is C or S
XVPTGQRPVQMRKIRIKPHQGQHKKATVLEEHSQXEX

SEQ ID NO: 19151 - protein, 38 aa, Artificial Sequence
  GFR-binding peptide
  MOD_RES (37)..(37): Xaa is C or S
RPTQVQLSNITVQIMEIVRKKPIFIGEMSTLEDHLAXK

SEQ ID NO: 19152 - protein, 41 aa, Artificial Sequence
  GFR-binding peptide
  MOD_RES (1)..(38)..(40): Xaa is C or S
XQPSRVHHSNITVQIMEYVRKKPKLIGEMSRLEEHLEXAXA

SEQ ID NO: 19153 - protein, 37 aa, Artificial Sequence
  GFR-binding peptide
  MOD_RES (34)..(36): Xaa is C or S
VPTEESNITMQIMRIKPHQGQHLGEMSFLQHNKXEXR

SEQ ID NO: 19154 - protein, 39 aa, Artificial Sequence
  GFR-binding peptide
  MOD_RES (36)..(38): Xaa is C or S
PSRVHHSNITVQIMEYVRKKPKLLGEMSRLEEHLEXAXA

SEQ ID NO: 19155 - protein, 35 aa, Artificial Sequence
  GFR-binding peptide
  MOD_RES (1)..(35): Xaa is C or S
  MOD_RES (15)..(16)..(17)..(18)..(19): Xaa is A or G
  MOD_RES (20)..(21)..(22)..(23): Xaa is A or G or is absent
XVPTGQRSVKMAKVXXXXXXXXXKEVQVLEEHSQX

SEQ ID NO: 19156 - protein, 44 aa, Artificial Sequence
  GFR-binding peptide
  MOD_RES (7)..(41)..(43): Xaa is C or S
NDEGLEXVPTGQRPVQMRKIRIKPHQGQHKKATVLEEHSQXEXR

SEQ ID NO: 19157 - protein, 41 aa, Artificial Sequence
  GFR-binding peptide
  MOD_RES (4)..(38)..(40): Xaa is C or S
GLEXVPTEESNITMQIMRIKPHQGQHLGEMSFLQHNKXEXR

SEQ ID NO: 19158 - protein, 39 aa, Artificial Sequence
  GFR-binding peptide
  MOD_RES (2)..(36)..(38): Xaa is C or S
  MOD_RES (16)..(17)..(18)..(19)..(20): Xaa is A or G
  MOD_RES (21)..(22)..(23)..(24): Xaa is A or G or is absent
EXVPTEERPVQMRKIXXXXXXXXXKKATVFLQHNKXEXR

SEQ ID NO: 19159 - protein, 36 aa, Artificial Sequence
  GFR-binding peptide
  MOD_RES (35)..(35): Xaa is C or S
  MOD_RES (14)..(15)..(16)..(17)..(18): Xaa is A or G
  MOD_RES (19)..(20)..(21)..(22): Xaa is A or G or is absent
SRVHHRSVKVAKVXXXXXXXXXKEVQVRLEEHLEXA

SEQ ID NO: 19160 - protein, 41 aa, Artificial Sequence
  GFR-binding peptide
  MOD_RES (3)..(40): Xaa is C or S
  MOD_RES (19)..(20)..(21)..(22)..(23): Xaa is A or G
  MOD_RES (24)..(25)..(26)..(27): Xaa is A or G or is absent
VKXQPSRVHHSNITVQIMXXXXXXXXXLGEMSRLEEHLEXA

SEQ ID NO: 19161 - protein, 38 aa, Artificial Sequence
  GFR-binding peptide
  MOD_RES (3)..(37): Xaa is C or S
  MOD_RES (17)..(18)..(19)..(20)..(21): Xaa is A or G
  MOD_RES (22)..(23)..(24)..(25): Xaa is A or G or is absent
LEXVPTGQSNITMQIMXXXXXXXXXLGEMSLEEHSQXE

SEQ ID NO: 19162 - protein, 35 aa, Artificial Sequence
  GFR-binding peptide
  MOD_RES (1)..(35): Xaa is C or S
XVPTGQRSVKMAKVRIKPHQGQHKEVQVLEEHSQX

SEQ ID NO: 19163 - protein, 37 aa, Artificial Sequence
  GFR-binding peptide
  MOD_RES (37)..(37): Xaa is C or S
QPSRVHHRPVQVRKIEYVRKKPKLKKATVRLEEHLEX

SEQ ID NO: 19164 - protein, 44 aa, Artificial Sequence
  GFR-binding peptide
  MOD_RES (5)..(42)..(44): Xaa is C or S
  MOD_RES (21)..(22)..(23)..(24)..(25): Xaa is A or G
  MOD_RES (26)..(27)..(28)..(29): Xaa is A or G or is absent
SSVKXQPSRVHHSNITVQIMXXXXXXXXXLGEMSRLEEHLEXAX

SEQ ID NO: 19165 - protein, 40 aa, Artificial Sequence
  GFR-binding peptide
  MOD_RES (3)..(40): Xaa is C or S
  MOD_RES (19)..(20)..(21)..(22)..(23): Xaa is A or G
  MOD_RES (24)..(25)..(26)..(27): Xaa is A or G or is absent
VQXRPTQVQLRPVQVRKIXXXXXXXXXKKATVTLEDHLAX

SEQ ID NO: 19166 - protein, 40 aa, Artificial Sequence
  GFR-binding peptide
  MOD_RES (1)..(38)..(40): Xaa is C or S
XQPSRVHHRPVQVRKIEYVRKKPKLKKATVRLEEHLEXAX

SEQ ID NO: 19167 - protein, 37 aa, Artificial Sequence
  GFR-binding peptide
  MOD_RES (3)..(3): Xaa is C or S
  MOD_RES (19)..(20)..(21)..(22)..(23): Xaa is A or G
  MOD_RES (24)..(25)..(26)..(27): Xaa is A or G or is absent
VKXQPSRVHHSNITVQIMXXXXXXXXXIGEMSRLEEH

SEQ ID NO: 19168 - protein, 36 aa, Artificial Sequence
  GFR-binding peptide
  MOD_RES (3)..(3): Xaa is C or S
  MOD_RES (17)..(18)..(19)..(20)..(21): Xaa is A or G
  MOD_RES (22)..(23)..(24)..(25): Xaa is A or G or is absent
LEXVPTEERPVQMRKIXXXXXXXXXKKATVFLQHNK

SEQ ID NO: 19169 - protein, 33 aa, Artificial Sequence
  GFR-binding peptide
  MOD_RES (1)..(1): Xaa is C or S
  MOD_RES (15)..(16)..(17)..(18)..(19): Xaa is A or G
  MOD_RES (20)..(21)..(22)..(23): Xaa is A or G or is absent
XVPTGQRSVKMAKVXXXXXXXXXKEVQVLEEHS

SEQ ID NO: 19170 - protein, 45 aa, Artificial Sequence
  GFR-binding peptide
  MOD_RES (5)..(42)..(44): Xaa is C or S
  MOD_RES (21)..(22)..(23)..(24)..(25): Xaa is A or G
  MOD_RES (26)..(27)..(28)..(29): Xaa is A or G or is absent
SSVKXQPSRVHHRPVQVRKIXXXXXXXXXKKATVRLEEHLEXAXA

SEQ ID NO: 19171 - protein, 44 aa, Artificial Sequence
  GFR-binding peptide
  MOD_RES (5)..(42)..(44): Xaa is C or S
  MOD_RES (21)..(22)..(23)..(24)..(25): Xaa is A or G
  MOD_RES (26)..(27)..(28)..(29): Xaa is A or G or is absent
SSVKXQPSRVHHSNITVQIMXXXXXXXXXIGEMSRLEEHLEXAX

SEQ ID NO: 19172 - protein, 37 aa, Artificial Sequence
  GFR-binding peptide
  MOD_RES (4)..(4): Xaa is C or S
  MOD_RES (18)..(19)..(20)..(21)..(22): Xaa is A or G
  MOD_RES (23)..(24)..(25)..(26): Xaa is A or G or is absent
GLEXVPTEESNITMQIMXXXXXXXXXLGEMSFLQHNK

SEQ ID NO: 19173 - protein, 38 aa, Artificial Sequence
  GFR-binding peptide
  MOD_RES (37)..(37): Xaa is C or S
  MOD_RES (16)..(17)..(18)..(19)..(20): Xaa is A or G
  MOD_RES (21)..(22)..(23)..(24): Xaa is A or G or is absent
RPTQVQLRPVQVRKIXXXXXXXXXKKATVTLEDHLAXK

SEQ ID NO: 19174 - protein, 37 aa, Artificial Sequence
  GFR-binding peptide
  MOD_RES (2)..(2): Xaa is C or S
  MOD_RES (18)..(19)..(20)..(21)..(22): Xaa is A or G
  MOD_RES (23)..(24)..(25)..(26): Xaa is A or G or is absent
KXQPSRVHHRPVQVRKIXXXXXXXXXKKATVRLEEHL

SEQ ID NO: 19175 - protein, 39 aa, Artificial Sequence
  GFR-binding peptide
  MOD_RES (37)..(39): Xaa is C or S
RPTQVQLSNITVQIMEIVRKKPIFLGEMSTLEDHLAXKX

SEQ ID NO: 19176 - protein, 38 aa, Artificial Sequence
  GFR-binding peptide
  MOD_RES (2)..(2): Xaa is C or S
  MOD_RES (18)..(19)..(20)..(21)..(22): Xaa is A or G
  MOD_RES (23)..(24)..(25)..(26): Xaa is A or G or is absent
KXQPSRVHHRSVKVAKVXXXXXXXXXKEVQVRLEEHLE

SEQ ID NO: 19177 - protein, 38 aa, Artificial Sequence
  GFR-binding peptide
  MOD_RES (4)..(4): Xaa is C or S
NVQXRPTQVQLRSVKVAKVEIVRKKPIFKEVQVTLEDH

SEQ ID NO: 19178 - protein, 38 aa, Artificial Sequence
  GFR-binding peptide
  MOD_RES (4)..(38): Xaa is C or S
  MOD_RES (18)..(19)..(20)..(21)..(22): Xaa is A or G
  MOD_RES (23)..(24)..(25)..(26): Xaa is A or G or is absent
GLEXVPTGQSNITMQIMXXXXXXXXXLGEMSLEEHSQX

SEQ ID NO: 19179 - protein, 37 aa, Artificial Sequence
  GFR-binding peptide
  MOD_RES (5)..(5): Xaa is C or S
EGLEXVPTEESNITMQIMRIKPHQGQHLGEMSFLQHN

SEQ ID NO: 19180 - protein, 40 aa, Artificial Sequence
  GFR-binding peptide
  MOD_RES (3)..(37)..(39): Xaa is C or S
LEXVPTEERSVKMAKVRIKPHQGQHKEVQVFLQHNKXEXR

SEQ ID NO: 19181 - protein, 38 aa, Artificial Sequence
  GFR-binding peptide
  MOD_RES (37)..(37): Xaa is C or S
  MOD_RES (16)..(17)..(18)..(19)..(20): Xaa is A or G
  MOD_RES (21)..(22)..(23)..(24): Xaa is A or G or is absent
RPTQVQLSNITVQIMXXXXXXXXXLGEMSTLEDHLAXK

SEQ ID NO: 19182 - protein, 35 aa, Artificial Sequence
  GFR-binding peptide
  MOD_RES (35)..(35): Xaa is C or S
  MOD_RES (14)..(15)..(16)..(17)..(18): Xaa is A or G
  MOD_RES (19)..(20)..(21)..(22): Xaa is A or G or is absent
TQVQLSNITVQIMXXXXXXXXXIGEMSTLEDHLAX

SEQ ID NO: 19183 - protein, 41 aa, Artificial Sequence
  GFR-binding peptide
  MOD_RES (4)..(41): Xaa is C or S
  MOD_RES (20)..(21)..(22)..(23)..(24): Xaa is A or G
  MOD_RES (25)..(26)..(27)..(28): Xaa is A or G or is absent
SVKXQPSRVHHRSVKVAKVXXXXXXXXXKEVQVRLEEHLEX

SEQ ID NO: 19184 - protein, 36 aa, Artificial Sequence
  GFR-binding peptide
  MOD_RES (36)..(36): Xaa is C or S
PTQVQLRSVKVAKVEIVRKKPIFKEVQVTLEDHLAX

SEQ ID NO: 19185 - protein, 40 aa, Artificial Sequence
  GFR-binding peptide
  MOD_RES (5)..(39): Xaa is C or S
  MOD_RES (19)..(20)..(21)..(22)..(23): Xaa is A or G
  MOD_RES (24)..(25)..(26)..(27): Xaa is A or G or is absent
EGLEXVPTEERSVKMAKVXXXXXXXXXKEVQVFLQHNKXE

SEQ ID NO: 19186 - protein, 39 aa, Artificial Sequence
  GFR-binding peptide
  MOD_RES (36)..(38): Xaa is C or S
PSRVHHRPVQVRKIEYVRKKPKLKKATVRLEEHLEXAXA

SEQ ID NO: 19187 - protein, 41 aa, Artificial Sequence
  GFR-binding peptide
  MOD_RES (5)..(5): Xaa is C or S
RNVQXRPTQVQLSNITVQIMEIVRKKPIFLGEMSTLEDHLA

SEQ ID NO: 19188 - protein, 42 aa, Artificial Sequence
  GFR-binding peptide
  MOD_RES (5)..(39)..(41): Xaa is C or S
EGLEXVPTEERSVKMAKVRIKPHQGQHKEVQVFLQHNKXEXR

SEQ ID NO: 19189 - protein, 39 aa, Artificial Sequence
  GFR-binding peptide
  MOD_RES (2)..(39): Xaa is C or S
QXRPTQVQLRSVKVAKVEIVRKKPIFKEVQVTLEDHLAX

SEQ ID NO: 19190 - protein, 36 aa, Artificial Sequence
  GFR-binding peptide
  MOD_RES (35)..(35): Xaa is C or S
  MOD_RES (14)..(15)..(16)..(17)..(18): Xaa is A or G
  MOD_RES (19)..(20)..(21)..(22): Xaa is A or G or is absent
TQVQLSNITVQIMXXXXXXXXXLGEMSTLEDHLAXK

SEQ ID NO: 19191 - protein, 36 aa, Artificial Sequence
  GFR-binding peptide
  MOD_RES (35)..(35): Xaa is C or S
TQVQLSNITVQIMEIVRKKPIFIGEMSTLEDHLAXK

SEQ ID NO: 19192 - protein, 32 aa, Artificial Sequence
  GFR-binding peptide
  MOD_RES (14)..(15)..(16)..(17)..(18): Xaa is A or G
  MOD_RES (19)..(20)..(21)..(22): Xaa is A or G or is absent
TQVQLSNITVQIMXXXXXXXXXLGEMSTLEDH

SEQ ID NO: 19193 - protein, 39 aa, Artificial Sequence
  GFR-binding peptide
  MOD_RES (1)..(38): Xaa is C or S
  MOD_RES (17)..(18)..(19)..(20)..(21): Xaa is A or G
  MOD_RES (22)..(23)..(24)..(25): Xaa is A or G or is absent
XQPSRVHHSNITVQIMXXXXXXXXXIGEMSRLEEHLEXA

SEQ ID NO: 19194 - protein, 43 aa, Artificial Sequence
  GFR-binding peptide
  MOD_RES (7)..(41)..(43): Xaa is C or S
NDEGLEXVPTEERPVQMRKIRIKPHQGQHKKATVFLQHNKXEX

SEQ ID NO: 19195 - protein, 38 aa, Artificial Sequence
  GFR-binding peptide
  MOD_RES (4)..(4): Xaa is C or S
SVKXQPSRVHHSNITVQIMEYVRKKPKLIGEMSRLEEH

SEQ ID NO: 19196 - protein, 40 aa, Artificial Sequence
  GFR-binding peptide
  MOD_RES (5)..(5): Xaa is C or S
  MOD_RES (21)..(22)..(23)..(24)..(25): Xaa is A or G
  MOD_RES (26)..(27)..(28)..(29): Xaa is A or G or is absent
RNVQXRPTQVQLSNITVQIMXXXXXXXXXLGEMSTLEDHL

SEQ ID NO: 19197 - protein, 32 aa, Artificial Sequence
  GFR-binding peptide
SRVHHSNITVQIMEYVRKKPKLIGEMSRLEEH

SEQ ID NO: 19198 - protein, 40 aa, Artificial Sequence
  GFR-binding peptide
  MOD_RES (5)..(39): Xaa is C or S
  MOD_RES (19)..(20)..(21)..(22)..(23): Xaa is A or G
  MOD_RES (24)..(25)..(26)..(27): Xaa is A or G or is absent
EGLEXVPTGQSNITMQIMXXXXXXXXXIGEMSLEEHSQXE

SEQ ID NO: 19199 - protein, 39 aa, Artificial Sequence
  GFR-binding peptide
  MOD_RES (7)..(7): Xaa is C or S
NDEGLEXVPTGQSNITMQIMRIKPHQGQHIGEMSLEEHS

SEQ ID NO: 19200 - protein, 42 aa, Artificial Sequence
  GFR-binding peptide
  MOD_RES (5)..(39)..(41): Xaa is C or S
  MOD_RES (19)..(20)..(21)..(22)..(23): Xaa is A or G
  MOD_RES (24)..(25)..(26)..(27): Xaa is A or G or is absent
EGLEXVPTEESNITMQIMXXXXXXXXXIGEMSFLQHNKXEXR

SEQ ID NO: 19201 - protein, 37 aa, Artificial Sequence
  GFR-binding peptide
  MOD_RES (2)..(36): Xaa is C or S
EXVPTGQRPVQMRKIRIKPHQGQHKKATVLEEHSQXE

SEQ ID NO: 19202 - protein, 37 aa, Artificial Sequence
  GFR-binding peptide
  MOD_RES (2)..(2): Xaa is C or S
  MOD_RES (18)..(19)..(20)..(21)..(22): Xaa is A or G
  MOD_RES (23)..(24)..(25)..(26): Xaa is A or G or is absent
QXRPTQVQLRSVKVAKVXXXXXXXXXKEVQVTLEDHL

SEQ ID NO: 19203 - protein, 36 aa, Artificial Sequence
  GFR-binding peptide
  MOD_RES (4)..(4): Xaa is C or S
  MOD_RES (18)..(19)..(20)..(21)..(22): Xaa is A or G
  MOD_RES (23)..(24)..(25)..(26): Xaa is A or G or is absent
GLEXVPTEERSVKMAKVXXXXXXXXXKEVQVFLQHN

SEQ ID NO: 19204 - protein, 40 aa, Artificial Sequence
  GFR-binding peptide
  MOD_RES (5)..(5): Xaa is C or S
  MOD_RES (21)..(22)..(23)..(24)..(25): Xaa is A or G
  MOD_RES (26)..(27)..(28)..(29): Xaa is A or G or is absent
SSVKXQPSRVHHRSVKVAKVXXXXXXXXXKEVQVRLEEHL

SEQ ID NO: 19205 - protein, 40 aa, Artificial Sequence
  GFR-binding peptide
  MOD_RES (4)..(4): Xaa is C or S
  MOD_RES (20)..(21)..(22)..(23)..(24): Xaa is A or G
  MOD_RES (25)..(26)..(27)..(28): Xaa is A or G or is absent
NVQXRPTQVQLRPVQVRKIXXXXXXXXXKKATVTLEDHLA

SEQ ID NO: 19206 - protein, 36 aa, Artificial Sequence
  GFR-binding peptide
  MOD_RES (36)..(36): Xaa is C or S
  MOD_RES (15)..(16)..(17)..(18)..(19): Xaa is A or G
  MOD_RES (20)..(21)..(22)..(23): Xaa is A or G or is absent
PSRVHHSNITVQIMXXXXXXXXXIGEMSRLEEHLEX

SEQ ID NO: 19207 - protein, 41 aa, Artificial Sequence
  GFR-binding peptide
  MOD_RES (2)..(39)..(41): Xaa is C or S
QXRPTQVQLRSVKVAKVEIVRKKPIFKEVQVTLEDHLAXKX

SEQ ID NO: 19208 - protein, 39 aa, Artificial Sequence
  GFR-binding peptide
  MOD_RES (2)..(39): Xaa is C or S
  MOD_RES (18)..(19)..(20)..(21)..(22): Xaa is A or G
  MOD_RES (23)..(24)..(25)..(26): Xaa is A or G or is absent
QXRPTQVQLSNITVQIMXXXXXXXXXLGEMSTLEDHLAX

SEQ ID NO: 19209 - protein, 38 aa, Artificial Sequence
  GFR-binding peptide
  MOD_RES (3)..(37): Xaa is C or S
  MOD_RES (17)..(18)..(19)..(20)..(21): Xaa is A or G
  MOD_RES (22)..(23)..(24)..(25): Xaa is A or G or is absent
LEXVPTEESNITMQIMXXXXXXXXXLGEMSFLQHNKXE

SEQ ID NO: 19210 - protein, 41 aa, Artificial Sequence
  GFR-binding peptide
  MOD_RES (7)..(41): Xaa is C or S
NDEGLEXVPTGQSNITMQIMRIKPHQGQHIGEMSLEEHSQX

SEQ ID NO: 19211 - protein, 38 aa, Artificial Sequence
  GFR-binding peptide
  MOD_RES (35)..(37): Xaa is C or S
TQVQLRSVKVAKVEIVRKKPIFKEVQVTLEDHLAXKXE

SEQ ID NO: 19212 - protein, 41 aa, Artificial Sequence
  GFR-binding peptide
  MOD_RES (6)..(40): Xaa is C or S
  MOD_RES (20)..(21)..(22)..(23)..(24): Xaa is A or G
  MOD_RES (25)..(26)..(27)..(28): Xaa is A or G or is absent
DEGLEXVPTGQSNITMQIMXXXXXXXXXIGEMSLEEHSQXE

SEQ ID NO: 19213 - protein, 39 aa, Artificial Sequence
  GFR-binding peptide
  MOD_RES (5)..(39): Xaa is C or S
  MOD_RES (19)..(20)..(21)..(22)..(23): Xaa is A or G
  MOD_RES (24)..(25)..(26)..(27): Xaa is A or G or is absent
EGLEXVPTGQSNITMQIMXXXXXXXXXIGEMSLEEHSQX

SEQ ID NO: 19214 - protein, 37 aa, Artificial Sequence
  GFR-binding peptide
  MOD_RES (3)..(3): Xaa is C or S
  MOD_RES (19)..(20)..(21)..(22)..(23): Xaa is A or G
  MOD_RES (24)..(25)..(26)..(27): Xaa is A or G or is absent
VKXQPSRVHHSNITVQIMXXXXXXXXXLGEMSRLEEH

SEQ ID NO: 19215 - protein, 43 aa, Artificial Sequence
  GFR-binding peptide
  MOD_RES (5)..(42): Xaa is C or S
  MOD_RES (21)..(22)..(23)..(24)..(25): Xaa is A or G
  MOD_RES (26)..(27)..(28)..(29): Xaa is A or G or is absent
RNVQXRPTQVQLRSVKVAKVXXXXXXXXXKEVQVTLEDHLAXK

SEQ ID NO: 19216 - protein, 37 aa, Artificial Sequence
  GFR-binding peptide
  MOD_RES (35)..(37): Xaa is C or S
TQVQLSNITVQIMEIVRKKPIFIGEMSTLEDHLAXKX

SEQ ID NO: 19217 - protein, 37 aa, Artificial Sequence
  GFR-binding peptide
  MOD_RES (5)..(5): Xaa is C or S
EGLEXVPTGQSNITMQIMRIKPHQGQHIGEMSLEEHS

SEQ ID NO: 19218 - protein, 34 aa, Artificial Sequence
  GFR-binding peptide
  MOD_RES (14)..(15)..(16)..(17)..(18): Xaa is A or G
  MOD_RES (19)..(20)..(21)..(22): Xaa is A or G or is absent
TQVQLSNITVQIMXXXXXXXXXLGEMSTLEDHLA

SEQ ID NO: 19219 - protein, 38 aa, Artificial Sequence
  GFR-binding peptide
  MOD_RES (37)..(37): Xaa is C or S
  MOD_RES (16)..(17)..(18)..(19)..(20): Xaa is A or G
  MOD_RES (21)..(22)..(23)..(24): Xaa is A or G or is absent
QPSRVHHRSVKVAKVXXXXXXXXXKEVQVRLEEHLEXA

SEQ ID NO: 19220 - protein, 41 aa, Artificial Sequence
  GFR-binding peptide
  MOD_RES (7)..(41): Xaa is C or S
NDEGLEXVPTGQRPVQMRKIRIKPHQGQHKKATVLEEHSQX

SEQ ID NO: 19221 - protein, 41 aa, Artificial Sequence
  GFR-binding peptide
  MOD_RES (1)..(38)..(40): Xaa is C or S
  MOD_RES (17)..(18)..(19)..(20)..(21): Xaa is A or G
  MOD_RES (22)..(23)..(24)..(25): Xaa is A or G or is absent
XQPSRVHHRSVKVAKVXXXXXXXXXKEVQVRLEEHLEXAXA

SEQ ID NO: 19222 - protein, 43 aa, Artificial Sequence
  GFR-binding peptide
  MOD_RES (6)..(40)..(42): Xaa is C or S
DEGLEXVPTEESNITMQIMRIKPHQGQHLGEMSFLQHNKXEXR

SEQ ID NO: 19223 - protein, 36 aa, Artificial Sequence
  GFR-binding peptide
  MOD_RES (35)..(35): Xaa is C or S
TQVQLSNITVQIMEIVRKKPIFLGEMSTLEDHLAXK

SEQ ID NO: 19224 - protein, 36 aa, Artificial Sequence
  GFR-binding peptide
  MOD_RES (3)..(3): Xaa is C or S
LEXVPTEERSVKMAKVRIKPHQGQHKEVQVFLQHNK

SEQ ID NO: 19225 - protein, 33 aa, Artificial Sequence
  GFR-binding peptide
  MOD_RES (1)..(1): Xaa is C or S
XVPTGQRSVKMAKVRIKPHQGQHKEVQVLEEHS

SEQ ID NO: 19226 - protein, 39 aa, Artificial Sequence
  GFR-binding peptide
  MOD_RES (4)..(4): Xaa is C or S
  MOD_RES (20)..(21)..(22)..(23)..(24): Xaa is A or G
  MOD_RES (25)..(26)..(27)..(28): Xaa is A or G or is absent
SVKXQPSRVHHSNITVQIMXXXXXXXXXLGEMSRLEEHL

SEQ ID NO: 19227 - protein, 39 aa, Artificial Sequence
  GFR-binding peptide
  MOD_RES (37)..(39): Xaa is C or S
  MOD_RES (16)..(17)..(18)..(19)..(20): Xaa is A or G
  MOD_RES (21)..(22)..(23)..(24): Xaa is A or G or is absent
QPSRVHHSNITVQIMXXXXXXXXXIGEMSRLEEHLEXAX

SEQ ID NO: 19228 - protein, 32 aa, Artificial Sequence
  GFR-binding peptide
TQVQLSNITVQIMEIVRKKPIFLGEMSTLEDH

SEQ ID NO: 19229 - protein, 45 aa, Artificial Sequence
  GFR-binding peptide
  MOD_RES (5)..(42)..(44): Xaa is C or S
  MOD_RES (21)..(22)..(23)..(24)..(25): Xaa is A or G
  MOD_RES (26)..(27)..(28)..(29): Xaa is A or G or is absent
SSVKXQPSRVHHRSVKVAKVXXXXXXXXXKEVQVRLEEHLEXAXA

SEQ ID NO: 19230 - protein, 41 aa, Artificial Sequence
  GFR-binding peptide
  MOD_RES (2)..(39)..(41): Xaa is C or S
  MOD_RES (18)..(19)..(20)..(21)..(22): Xaa is A or G
  MOD_RES (23)..(24)..(25)..(26): Xaa is A or G or is absent
KXQPSRVHHSNITVQIMXXXXXXXXXIGEMSRLEEHLEXAX

SEQ ID NO: 19231 - protein, 35 aa, Artificial Sequence
  GFR-binding peptide
  MOD_RES (15)..(16)..(17)..(18)..(19): Xaa is A or G
  MOD_RES (20)..(21)..(22)..(23): Xaa is A or G or is absent
PTQVQLSNITVQIMXXXXXXXXXLGEMSTLEDHLA

SEQ ID NO: 19232 - protein, 38 aa, Artificial Sequence
  GFR-binding peptide
  MOD_RES (2)..(2): Xaa is C or S
KXQPSRVHHSNITVQIMEYVRKKPKLIGEMSRLEEHLE

SEQ ID NO: 19233 - protein, 39 aa, Artificial Sequence
  GFR-binding peptide
  MOD_RES (4)..(38): Xaa is C or S
  MOD_RES (18)..(19)..(20)..(21)..(22): Xaa is A or G
  MOD_RES (23)..(24)..(25)..(26): Xaa is A or G or is absent
GLEXVPTGQSNITMQIMXXXXXXXXXIGEMSLEEHSQXE

SEQ ID NO: 19234 - protein, 39 aa, Artificial Sequence
  GFR-binding peptide
  MOD_RES (5)..(39): Xaa is C or S
EGLEXVPTGQSNITMQIMRIKPHQGQHIGEMSLEEHSQX

SEQ ID NO: 19235 - protein, 33 aa, Artificial Sequence
  GFR-binding peptide
  MOD_RES (1)..(1): Xaa is C or S
XVPTGQRPVQMRKIRIKPHQGQHKKATVLEEHS

SEQ ID NO: 19236 - protein, 33 aa, Artificial Sequence
  GFR-binding peptide
  MOD_RES (1)..(1): Xaa is C or S
  MOD_RES (15)..(16)..(17)..(18)..(19): Xaa is A or G
  MOD_RES (20)..(21)..(22)..(23): Xaa is A or G or is absent
XVPTGQSNITMQIMXXXXXXXXXLGEMSLEEHS

SEQ ID NO: 19237 - protein, 41 aa, Artificial Sequence
  GFR-binding peptide
  MOD_RES (7)..(41): Xaa is C or S
  MOD_RES (21)..(22)..(23)..(24)..(25): Xaa is A or G
  MOD_RES (26)..(27)..(28)..(29): Xaa is A or G or is absent
NDEGLEXVPTGQRPVQMRKIXXXXXXXXXKKATVLEEHSQX

SEQ ID NO: 19238 - protein, 32 aa, Artificial Sequence
  GFR-binding peptide
  MOD_RES (14)..(15)..(16)..(17)..(18): Xaa is A or G
  MOD_RES (19)..(20)..(21)..(22): Xaa is A or G or is absent
VPTEESNITMQIMXXXXXXXXXIGEMSFLQHN

SEQ ID NO: 19239 - protein, 43 aa, Artificial Sequence
  GFR-binding peptide
  MOD_RES (3)..(40)..(42): Xaa is C or S
  MOD_RES (19)..(20)..(21)..(22)..(23): Xaa is A or G
  MOD_RES (24)..(25)..(26)..(27): Xaa is A or G or is absent
VQXRPTQVQLRSVKVAKVXXXXXXXXXKEVQVTLEDHLAXKXE

SEQ ID NO: 19240 - protein, 42 aa, Artificial Sequence
  GFR-binding peptide
  MOD_RES (5)..(39)..(41): Xaa is C or S
  MOD_RES (19)..(20)..(21)..(22)..(23): Xaa is A or G
  MOD_RES (24)..(25)..(26)..(27): Xaa is A or G or is absent
EGLEXVPTEERPVQMRKIXXXXXXXXXKKATVFLQHNKXEXR

SEQ ID NO: 19241 - protein, 39 aa, Artificial Sequence
  GFR-binding peptide
  MOD_RES (5)..(5): Xaa is C or S
  MOD_RES (21)..(22)..(23)..(24)..(25): Xaa is A or G
  MOD_RES (26)..(27)..(28)..(29): Xaa is A or G or is absent
SSVKXQPSRVHHSNITVQIMXXXXXXXXXIGEMSRLEEH

SEQ ID NO: 19242 - protein, 37 aa, Artificial Sequence
  GFR-binding peptide
  MOD_RES (35)..(37): Xaa is C or S
TQVQLSNITVQIMEIVRKKPIFLGEMSTLEDHLAXKX

SEQ ID NO: 19243 - protein, 35 aa, Artificial Sequence
  GFR-binding peptide
  MOD_RES (34)..(34): Xaa is C or S
VPTGQRPVQMRKIRIKPHQGQHKKATVLEEHSQXE

SEQ ID NO: 19244 - protein, 36 aa, Artificial Sequence
  GFR-binding peptide
  MOD_RES (35)..(35): Xaa is C or S
  MOD_RES (14)..(15)..(16)..(17)..(18): Xaa is A or G
  MOD_RES (19)..(20)..(21)..(22): Xaa is A or G or is absent
TQVQLRPVQVRKIXXXXXXXXXKKATVTLEDHLAXK

SEQ ID NO: 19245 - protein, 35 aa, Artificial Sequence
  GFR-binding peptide
  MOD_RES (1)..(1): Xaa is C or S
  MOD_RES (17)..(18)..(19)..(20)..(21): Xaa is A or G
  MOD_RES (22)..(23)..(24)..(25): Xaa is A or G or is absent
XRPTQVQLSNITVQIMXXXXXXXXXLGEMSTLEDH

SEQ ID NO: 19246 - protein, 42 aa, Artificial Sequence
  GFR-binding peptide
  MOD_RES (5)..(39)..(41): Xaa is C or S
  MOD_RES (19)..(20)..(21)..(22)..(23): Xaa is A or G
  MOD_RES (24)..(25)..(26)..(27): Xaa is A or G or is absent
EGLEXVPTEERSVKMAKVXXXXXXXXXKEVQVFLQHNKXEXR

SEQ ID NO: 19247 - protein, 35 aa, Artificial Sequence
  GFR-binding peptide
  MOD_RES (1)..(1): Xaa is C or S
  MOD_RES (17)..(18)..(19)..(20)..(21): Xaa is A or G
  MOD_RES (22)..(23)..(24)..(25): Xaa is A or G or is absent
XRPTQVQLSNITVQIMXXXXXXXXXIGEMSTLEDH

SEQ ID NO: 19248 - protein, 32 aa, Artificial Sequence
  GFR-binding peptide
VPTEERSVKMAKVRIKPHQGQHKEVQVFLQHN

SEQ ID NO: 19249 - protein, 38 aa, Artificial Sequence
  GFR-binding peptide
  MOD_RES (4)..(38): Xaa is C or S
  MOD_RES (18)..(19)..(20)..(21)..(22): Xaa is A or G
  MOD_RES (23)..(24)..(25)..(26): Xaa is A or G or is absent
GLEXVPTGQRSVKMAKVXXXXXXXXXKEVQVLEEHSQX

SEQ ID NO: 19250 - protein, 38 aa, Artificial Sequence
  GFR-binding peptide
  MOD_RES (2)..(36)..(38): Xaa is C or S
EXVPTEESNITMQIMRIKPHQGQHLGEMSFLQHNKXEX

SEQ ID NO: 19251 - protein, 41 aa, Artificial Sequence
  GFR-binding peptide
  MOD_RES (1)..(38)..(40): Xaa is C or S
XRPTQVQLRSVKVAKVEIVRKKPIFKEVQVTLEDHLAXKXE

SEQ ID NO: 19252 - protein, 42 aa, Artificial Sequence
  GFR-binding peptide
  MOD_RES (6)..(40)..(42): Xaa is C or S
DEGLEXVPTGQRSVKMAKVRIKPHQGQHKEVQVLEEHSQXEX

SEQ ID NO: 19253 - protein, 32 aa, Artificial Sequence
  GFR-binding peptide
  MOD_RES (14)..(15)..(16)..(17)..(18): Xaa is A or G
  MOD_RES (19)..(20)..(21)..(22): Xaa is A or G or is absent
TQVQLRPVQVRKIXXXXXXXXXKKATVTLEDH

SEQ ID NO: 19254 - protein, 33 aa, Artificial Sequence
  GFR-binding peptide
SRVHHRPVQVRKIEYVRKKPKLKKATVRLEEHL

SEQ ID NO: 19255 - protein, 42 aa, Artificial Sequence
  GFR-binding peptide
  MOD_RES (2)..(39)..(41): Xaa is C or S
KXQPSRVHHRPVQVRKIEYVRKKPKLKKATVRLEEHLEXAXA

SEQ ID NO: 19256 - protein, 45 aa, Artificial Sequence
  GFR-binding peptide
  MOD_RES (5)..(42)..(44): Xaa is C or S
  MOD_RES (21)..(22)..(23)..(24)..(25): Xaa is A or G
  MOD_RES (26)..(27)..(28)..(29): Xaa is A or G or is absent
RNVQXRPTQVQLSNITVQIMXXXXXXXXXLGEMSTLEDHLAXKXE

SEQ ID NO: 19257 - protein, 32 aa, Artificial Sequence
  GFR-binding peptide
SRVHHSNITVQIMEYVRKKPKLLGEMSRLEEH

SEQ ID NO: 19258 - protein, 39 aa, Artificial Sequence
  GFR-binding peptide
  MOD_RES (6)..(6): Xaa is C or S
DEGLEXVPTEERSVKMAKVRIKPHQGQHKEVQVFLQHNK

SEQ ID NO: 19259 - protein, 39 aa, Artificial Sequence
  GFR-binding peptide
  MOD_RES (3)..(3): Xaa is C or S
  MOD_RES (19)..(20)..(21)..(22)..(23): Xaa is A or G
  MOD_RES (24)..(25)..(26)..(27): Xaa is A or G or is absent
VKXQPSRVHHRSVKVAKVXXXXXXXXXKEVQVRLEEHLE

SEQ ID NO: 19260 - protein, 32 aa, Artificial Sequence
  GFR-binding peptide
TQVQLSNITVQIMEIVRKKPIFIGEMSTLEDH

SEQ ID NO: 19261 - protein, 37 aa, Artificial Sequence
  GFR-binding peptide
  MOD_RES (1)..(1): Xaa is C or S
  MOD_RES (17)..(18)..(19)..(20)..(21): Xaa is A or G
  MOD_RES (22)..(23)..(24)..(25): Xaa is A or G or is absent
XRPTQVQLSNITVQIMXXXXXXXXXIGEMSTLEDHLA

SEQ ID NO: 19262 - protein, 35 aa, Artificial Sequence
  GFR-binding peptide
RPTQVQLSNITVQIMEIVRKKPIFLGEMSTLEDHL

SEQ ID NO: 19263 - protein, 40 aa, Artificial Sequence
  GFR-binding peptide
  MOD_RES (2)..(39): Xaa is C or S
  MOD_RES (18)..(19)..(20)..(21)..(22): Xaa is A or G
  MOD_RES (23)..(24)..(25)..(26): Xaa is A or G or is absent
KXQPSRVHHRSVKVAKVXXXXXXXXXKEVQVRLEEHLEXA

SEQ ID NO: 19264 - protein, 37 aa, Artificial Sequence
  GFR-binding peptide
  MOD_RES (34)..(36): Xaa is C or S
  MOD_RES (14)..(15)..(16)..(17)..(18): Xaa is A or G
  MOD_RES (19)..(20)..(21)..(22): Xaa is A or G or is absent
VPTGQRSVKMAKVXXXXXXXXXKEVQVLEEHSQXEXR

SEQ ID NO: 19265 - protein, 41 aa, Artificial Sequence
  GFR-binding peptide
  MOD_RES (1)..(38)..(40): Xaa is C or S
  MOD_RES (17)..(18)..(19)..(20)..(21): Xaa is A or G
  MOD_RES (22)..(23)..(24)..(25): Xaa is A or G or is absent
XQPSRVHHSNITVQIMXXXXXXXXXLGEMSRLEEHLEXAXA

SEQ ID NO: 19266 - protein, 43 aa, Artificial Sequence
  GFR-binding peptide
  MOD_RES (6)..(40)..(42): Xaa is C or S
  MOD_RES (20)..(21)..(22)..(23)..(24): Xaa is A or G
  MOD_RES (25)..(26)..(27)..(28): Xaa is A or G or is absent
DEGLEXVPTEESNITMQIMXXXXXXXXXIGEMSFLQHNKXEXR

SEQ ID NO: 19267 - protein, 40 aa, Artificial Sequence
  GFR-binding peptide
  MOD_RES (2)..(39): Xaa is C or S
QXRPTQVQLSNITVQIMEIVRKKPIFIGEMSTLEDHLAXK

SEQ ID NO: 19268 - protein, 32 aa, Artificial Sequence
  GFR-binding peptide
  MOD_RES (14)..(15)..(16)..(17)..(18): Xaa is A or G
  MOD_RES (19)..(20)..(21)..(22): Xaa is A or G or is absent
VPTEESNITMQIMXXXXXXXXXLGEMSFLQHN

SEQ ID NO: 19269 - protein, 35 aa, Artificial Sequence
  GFR-binding peptide
  MOD_RES (15)..(16)..(17)..(18)..(19): Xaa is A or G
  MOD_RES (20)..(21)..(22)..(23): Xaa is A or G or is absent
PSRVHHSNITVQIMXXXXXXXXXIGEMSRLEEHLE

SEQ ID NO: 19270 - protein, 37 aa, Artificial Sequence
  GFR-binding peptide
  MOD_RES (34)..(36): Xaa is C or S
VPTGQSNITMQIMRIKPHQGQHIGEMSLEEHSQXEXR

SEQ ID NO: 19271 - protein, 34 aa, Artificial Sequence
  GFR-binding peptide
  MOD_RES (1)..(1): Xaa is C or S
XVPTGQRSVKMAKVRIKPHQGQHKEVQVLEEHSQ

SEQ ID NO: 19272 - protein, 38 aa, Artificial Sequence
  GFR-binding peptide
  MOD_RES (36)..(38): Xaa is C or S
  MOD_RES (15)..(16)..(17)..(18)..(19): Xaa is A or G
  MOD_RES (20)..(21)..(22)..(23): Xaa is A or G or is absent
PTQVQLSNITVQIMXXXXXXXXXLGEMSTLEDHLAXKX

SEQ ID NO: 19273 - protein, 34 aa, Artificial Sequence
  GFR-binding peptide
  MOD_RES (15)..(16)..(17)..(18)..(19): Xaa is A or G
  MOD_RES (20)..(21)..(22)..(23): Xaa is A or G or is absent
PSRVHHRSVKVAKVXXXXXXXXXKEVQVRLEEHL

SEQ ID NO: 19274 - protein, 37 aa, Artificial Sequence
  GFR-binding peptide
  MOD_RES (2)..(36): Xaa is C or S
  MOD_RES (16)..(17)..(18)..(19)..(20): Xaa is A or G
  MOD_RES (21)..(22)..(23)..(24): Xaa is A or G or is absent
EXVPTEESNITMQIMXXXXXXXXXLGEMSFLQHNKXE

SEQ ID NO: 19275 - protein, 43 aa, Artificial Sequence
  GFR-binding peptide
  MOD_RES (5)..(42): Xaa is C or S
  MOD_RES (21)..(22)..(23)..(24)..(25): Xaa is A or G
  MOD_RES (26)..(27)..(28)..(29): Xaa is A or G or is absent
SSVKXQPSRVHHSNITVQIMXXXXXXXXXLGEMSRLEEHLEXA

SEQ ID NO: 19276 - protein, 33 aa, Artificial Sequence
  GFR-binding peptide
  MOD_RES (1)..(1): Xaa is C or S
XVPTEERPVQMRKIRIKPHQGQHKKATVFLQHN

SEQ ID NO: 19277 - protein, 42 aa, Artificial Sequence
  GFR-binding peptide
  MOD_RES (2)..(39)..(41): Xaa is C or S
  MOD_RES (18)..(19)..(20)..(21)..(22): Xaa is A or G
  MOD_RES (23)..(24)..(25)..(26): Xaa is A or G or is absent
QXRPTQVQLSNITVQIMXXXXXXXXXLGEMSTLEDHLAXKXE

SEQ ID NO: 19278 - protein, 41 aa, Artificial Sequence
  GFR-binding peptide
  MOD_RES (4)..(38)..(40): Xaa is C or S
GLEXVPTGQRSVKMAKVRIKPHQGQHKEVQVLEEHSQXEXR

SEQ ID NO: 19279 - protein, 39 aa, Artificial Sequence
  GFR-binding peptide
  MOD_RES (4)..(38): Xaa is C or S
  MOD_RES (18)..(19)..(20)..(21)..(22): Xaa is A or G
  MOD_RES (23)..(24)..(25)..(26): Xaa is A or G or is absent
GLEXVPTGQSNITMQIMXXXXXXXXXLGEMSLEEHSQXE

SEQ ID NO: 19280 - protein, 38 aa, Artificial Sequence
  GFR-binding peptide
  MOD_RES (35)..(37): Xaa is C or S
  MOD_RES (14)..(15)..(16)..(17)..(18): Xaa is A or G
  MOD_RES (19)..(20)..(21)..(22): Xaa is A or G or is absent
TQVQLSNITVQIMXXXXXXXXXIGEMSTLEDHLAXKXE

SEQ ID NO: 19281 - protein, 41 aa, Artificial Sequence
  GFR-binding peptide
  MOD_RES (7)..(41): Xaa is C or S
NDEGLEXVPTEERSVKMAKVRIKPHQGQHKEVQVFLQHNKX

SEQ ID NO: 19282 - protein, 41 aa, Artificial Sequence
  GFR-binding peptide
  MOD_RES (7)..(41): Xaa is C or S
  MOD_RES (21)..(22)..(23)..(24)..(25): Xaa is A or G
  MOD_RES (26)..(27)..(28)..(29): Xaa is A or G or is absent
NDEGLEXVPTEERSVKMAKVXXXXXXXXXKEVQVFLQHNKX

SEQ ID NO: 19283 - protein, 39 aa, Artificial Sequence
  GFR-binding peptide
  MOD_RES (36)..(38): Xaa is C or S
PTQVQLSNITVQIMEIVRKKPIFIGEMSTLEDHLAXKXE

SEQ ID NO: 19284 - protein, 39 aa, Artificial Sequence
  GFR-binding peptide
  MOD_RES (2)..(36)..(38): Xaa is C or S
  MOD_RES (16)..(17)..(18)..(19)..(20): Xaa is A or G
  MOD_RES (21)..(22)..(23)..(24): Xaa is A or G or is absent
EXVPTGQSNITMQIMXXXXXXXXXLGEMSLEEHSQXEXR

SEQ ID NO: 19285 - protein, 40 aa, Artificial Sequence
  GFR-binding peptide
  MOD_RES (37)..(39): Xaa is C or S
  MOD_RES (16)..(17)..(18)..(19)..(20): Xaa is A or G
  MOD_RES (21)..(22)..(23)..(24): Xaa is A or G or is absent
QPSRVHHRSVKVAKVXXXXXXXXXKEVQVRLEEHLEXAXA

SEQ ID NO: 19286 - protein, 34 aa, Artificial Sequence
  GFR-binding peptide
  MOD_RES (34)..(34): Xaa is C or S
  MOD_RES (14)..(15)..(16)..(17)..(18): Xaa is A or G
  MOD_RES (19)..(20)..(21)..(22): Xaa is A or G or is absent
VPTEERPVQMRKIXXXXXXXXXKKATVFLQHNKX

SEQ ID NO: 19287 - protein, 37 aa, Artificial Sequence
  GFR-binding peptide
  MOD_RES (2)..(2): Xaa is C or S
  MOD_RES (18)..(19)..(20)..(21)..(22): Xaa is A or G
  MOD_RES (23)..(24)..(25)..(26): Xaa is A or G or is absent
QXRPTQVQLRPVQVRKIXXXXXXXXXKKATVTLEDHL

SEQ ID NO: 19288 - protein, 40 aa, Artificial Sequence
  GFR-binding peptide
  MOD_RES (4)..(38)..(40): Xaa is C or S
GLEXVPTGQRSVKMAKVRIKPHQGQHKEVQVLEEHSQXEX

SEQ ID NO: 19289 - protein, 39 aa, Artificial Sequence
  GFR-binding peptide
  MOD_RES (3)..(37)..(39): Xaa is C or S
  MOD_RES (17)..(18)..(19)..(20)..(21): Xaa is A or G
  MOD_RES (22)..(23)..(24)..(25): Xaa is A or G or is absent
LEXVPTEESNITMQIMXXXXXXXXXIGEMSFLQHNKXEX

SEQ ID NO: 19290 - protein, 42 aa, Artificial Sequence
  GFR-binding peptide
  MOD_RES (4)..(41): Xaa is C or S
  MOD_RES (20)..(21)..(22)..(23)..(24): Xaa is A or G
  MOD_RES (25)..(26)..(27)..(28): Xaa is A or G or is absent
SVKXQPSRVHHRPVQVRKIXXXXXXXXXKKATVRLEEHLEXA

SEQ ID NO: 19291 - protein, 37 aa, Artificial Sequence
  GFR-binding peptide
  MOD_RES (2)..(2): Xaa is C or S
  MOD_RES (18)..(19)..(20)..(21)..(22): Xaa is A or G
  MOD_RES (23)..(24)..(25)..(26): Xaa is A or G or is absent
QXRPTQVQLSNITVQIMXXXXXXXXXIGEMSTLEDHL

SEQ ID NO: 19292 - protein, 32 aa, Artificial Sequence
  GFR-binding peptide
  MOD_RES (14)..(15)..(16)..(17)..(18): Xaa is A or G
  MOD_RES (19)..(20)..(21)..(22): Xaa is A or G or is absent
VPTGQRSVKMAKVXXXXXXXXXKEVQVLEEHS

SEQ ID NO: 19293 - protein, 32 aa, Artificial Sequence
  GFR-binding peptide
  MOD_RES (14)..(15)..(16)..(17)..(18): Xaa is A or G
  MOD_RES (19)..(20)..(21)..(22): Xaa is A or G or is absent
VPTEERPVQMRKIXXXXXXXXXKKATVFLQHN

SEQ ID NO: 19294 - protein, 35 aa, Artificial Sequence
  GFR-binding peptide
  MOD_RES (16)..(17)..(18)..(19)..(20): Xaa is A or G
  MOD_RES (21)..(22)..(23)..(24): Xaa is A or G or is absent
QPSRVHHSNITVQIMXXXXXXXXXLGEMSRLEEHL

SEQ ID NO: 19295 - protein, 36 aa, Artificial Sequence
  GFR-binding peptide
  MOD_RES (4)..(4): Xaa is C or S
  MOD_RES (18)..(19)..(20)..(21)..(22): Xaa is A or G
  MOD_RES (23)..(24)..(25)..(26): Xaa is A or G or is absent
GLEXVPTEESNITMQIMXXXXXXXXXIGEMSFLQHN

SEQ ID NO: 19296 - protein, 41 aa, Artificial Sequence
  GFR-binding peptide
  MOD_RES (5)..(39)..(41): Xaa is C or S
EGLEXVPTGQRSVKMAKVRIKPHQGQHKEVQVLEEHSQXEX

SEQ ID NO: 19297 - protein, 36 aa, Artificial Sequence
  GFR-binding peptide
  MOD_RES (3)..(3): Xaa is C or S
  MOD_RES (17)..(18)..(19)..(20)..(21): Xaa is A or G
  MOD_RES (22)..(23)..(24)..(25): Xaa is A or G or is absent
LEXVPTGQRSVKMAKVXXXXXXXXXKEVQVLEEHSQ

SEQ ID NO: 19298 - protein, 36 aa, Artificial Sequence
  GFR-binding peptide
  MOD_RES (1)..(1): Xaa is C or S
XRPTQVQLSNITVQIMEIVRKKPIFLGEMSTLEDHL

SEQ ID NO: 19299 - protein, 41 aa, Artificial Sequence
  GFR-binding peptide
  MOD_RES (6)..(40): Xaa is C or S
  MOD_RES (20)..(21)..(22)..(23)..(24): Xaa is A or G
  MOD_RES (25)..(26)..(27)..(28): Xaa is A or G or is absent
DEGLEXVPTGQSNITMQIMXXXXXXXXXLGEMSLEEHSQXE

SEQ ID NO: 19300 - protein, 34 aa, Artificial Sequence
  GFR-binding peptide
  MOD_RES (16)..(17)..(18)..(19)..(20): Xaa is A or G
  MOD_RES (21)..(22)..(23)..(24): Xaa is A or G or is absent
QPSRVHHRSVKVAKVXXXXXXXXXKEVQVRLEEH

SEQ ID NO: 19301 - protein, 38 aa, Artificial Sequence
  GFR-binding peptide
  MOD_RES (35)..(37): Xaa is C or S
SRVHHSNITVQIMEYVRKKPKLLGEMSRLEEHLEXAXA

SEQ ID NO: 19302 - protein, 41 aa, Artificial Sequence
  GFR-binding peptide
  MOD_RES (4)..(41): Xaa is C or S
  MOD_RES (20)..(21)..(22)..(23)..(24): Xaa is A or G
  MOD_RES (25)..(26)..(27)..(28): Xaa is A or G or is absent
NVQXRPTQVQLRSVKVAKVXXXXXXXXXKEVQVTLEDHLAX

SEQ ID NO: 19303 - protein, 38 aa, Artificial Sequence
  GFR-binding peptide
  MOD_RES (1)..(38): Xaa is C or S
  MOD_RES (17)..(18)..(19)..(20)..(21): Xaa is A or G
  MOD_RES (22)..(23)..(24)..(25): Xaa is A or G or is absent
XRPTQVQLSNITVQIMXXXXXXXXXIGEMSTLEDHLAX

SEQ ID NO: 19304 - protein, 35 aa, Artificial Sequence
  GFR-binding peptide
  MOD_RES (2)..(2): Xaa is C or S
  MOD_RES (16)..(17)..(18)..(19)..(20): Xaa is A or G
  MOD_RES (21)..(22)..(23)..(24): Xaa is A or G or is absent
EXVPTGQRPVQMRKIXXXXXXXXXKKATVLEEHSQ

SEQ ID NO: 19305 - protein, 33 aa, Artificial Sequence
  GFR-binding peptide
  MOD_RES (1)..(1): Xaa is C or S
  MOD_RES (15)..(16)..(17)..(18)..(19): Xaa is A or G
  MOD_RES (20)..(21)..(22)..(23): Xaa is A or G or is absent
XVPTGQRPVQMRKIXXXXXXXXXKKATVLEEHS

SEQ ID NO: 19306 - protein, 39 aa, Artificial Sequence
  GFR-binding peptide
  MOD_RES (1)..(38): Xaa is C or S
  MOD_RES (17)..(18)..(19)..(20)..(21): Xaa is A or G
  MOD_RES (22)..(23)..(24)..(25): Xaa is A or G or is absent
XQPSRVHHSNITVQIMXXXXXXXXXLGEMSRLEEHLEXA

SEQ ID NO: 19307 - protein, 37 aa, Artificial Sequence
  GFR-binding peptide
  MOD_RES (34)..(36): Xaa is C or S
  MOD_RES (14)..(15)..(16)..(17)..(18): Xaa is A or G
  MOD_RES (19)..(20)..(21)..(22): Xaa is A or G or is absent
VPTGQRPVQMRKIXXXXXXXXXKKATVLEEHSQXEXR

SEQ ID NO: 19308 - protein, 33 aa, Artificial Sequence
  GFR-binding peptide
SRVHHSNITVQIMEYVRKKPKLIGEMSRLEEHL

SEQ ID NO: 19309 - protein, 43 aa, Artificial Sequence
  GFR-binding peptide
  MOD_RES (4)..(41)..(43): Xaa is C or S
  MOD_RES (20)..(21)..(22)..(23)..(24): Xaa is A or G
  MOD_RES (25)..(26)..(27)..(28): Xaa is A or G or is absent
NVQXRPTQVQLSNITVQIMXXXXXXXXXLGEMSTLEDHLAXKX

SEQ ID NO: 19310 - protein, 39 aa, Artificial Sequence
  GFR-binding peptide
  MOD_RES (5)..(39): Xaa is C or S
  MOD_RES (19)..(20)..(21)..(22)..(23): Xaa is A or G
  MOD_RES (24)..(25)..(26)..(27): Xaa is A or G or is absent
EGLEXVPTGQSNITMQIMXXXXXXXXXLGEMSLEEHSQX

SEQ ID NO: 19311 - protein, 41 aa, Artificial Sequence
  GFR-binding peptide
  MOD_RES (5)..(5): Xaa is C or S
  MOD_RES (21)..(22)..(23)..(24)..(25): Xaa is A or G
  MOD_RES (26)..(27)..(28)..(29): Xaa is A or G or is absent
RNVQXRPTQVQLRSVKVAKVXXXXXXXXXKEVQVTLEDHLA

SEQ ID NO: 19312 - protein, 44 aa, Artificial Sequence
  GFR-binding peptide
  MOD_RES (7)..(41)..(43): Xaa is C or S
  MOD_RES (21)..(22)..(23)..(24)..(25): Xaa is A or G
  MOD_RES (26)..(27)..(28)..(29): Xaa is A or G or is absent
NDEGLEXVPTEESNITMQIMXXXXXXXXXLGEMSFLQHNKXEXR

SEQ ID NO: 19313 - protein, 36 aa, Artificial Sequence
  GFR-binding peptide
  MOD_RES (1)..(35): Xaa is C or S
XVPTEERSVKMAKVRIKPHQGQHKEVQVFLQHNKXE

SEQ ID NO: 19314 - protein, 35 aa, Artificial Sequence
  GFR-binding peptide
PTQVQLRSVKVAKVEIVRKKPIFKEVQVTLEDHLA

SEQ ID NO: 19315 - protein, 38 aa, Artificial Sequence
  GFR-binding peptide
  MOD_RES (2)..(36)..(38): Xaa is C or S
  MOD_RES (16)..(17)..(18)..(19)..(20): Xaa is A or G
  MOD_RES (21)..(22)..(23)..(24): Xaa is A or G or is absent
EXVPTGQRSVKMAKVXXXXXXXXXKEVQVLEEHSQXEX

SEQ ID NO: 19316 - protein, 36 aa, Artificial Sequence
  GFR-binding peptide
  MOD_RES (36)..(36): Xaa is C or S
  MOD_RES (15)..(16)..(17)..(18)..(19): Xaa is A or G
  MOD_RES (20)..(21)..(22)..(23): Xaa is A or G or is absent
PTQVQLSNITVQIMXXXXXXXXXLGEMSTLEDHLAX

SEQ ID NO: 19317 - protein, 35 aa, Artificial Sequence
  GFR-binding peptide
  MOD_RES (2)..(2): Xaa is C or S
  MOD_RES (16)..(17)..(18)..(19)..(20): Xaa is A or G
  MOD_RES (21)..(22)..(23)..(24): Xaa is A or G or is absent
EXVPTGQSNITMQIMXXXXXXXXXIGEMSLEEHSQ

SEQ ID NO: 19318 - protein, 38 aa, Artificial Sequence
  GFR-binding peptide
  MOD_RES (3)..(37): Xaa is C or S
  MOD_RES (17)..(18)..(19)..(20)..(21): Xaa is A or G
  MOD_RES (22)..(23)..(24)..(25): Xaa is A or G or is absent
LEXVPTGQRPVQMRKIXXXXXXXXXKKATVLEEHSQXE

SEQ ID NO: 19319 - protein, 36 aa, Artificial Sequence
  GFR-binding peptide
  MOD_RES (36)..(36): Xaa is C or S
  MOD_RES (15)..(16)..(17)..(18)..(19): Xaa is A or G
  MOD_RES (20)..(21)..(22)..(23): Xaa is A or G or is absent
PSRVHHRPVQVRKIXXXXXXXXXKKATVRLEEHLEX

SEQ ID NO: 19320 - protein, 37 aa, Artificial Sequence
  GFR-binding peptide
  MOD_RES (4)..(4): Xaa is C or S
  MOD_RES (18)..(19)..(20)..(21)..(22): Xaa is A or G
  MOD_RES (23)..(24)..(25)..(26): Xaa is A or G or is absent
GLEXVPTGQRPVQMRKIXXXXXXXXXKKATVLEEHSQ

SEQ ID NO: 19321 - protein, 34 aa, Artificial Sequence
  GFR-binding peptide
TQVQLRSVKVAKVEIVRKKPIFKEVQVTLEDHLA

SEQ ID NO: 19322 - protein, 38 aa, Artificial Sequence
  GFR-binding peptide
  MOD_RES (4)..(38): Xaa is C or S
GLEXVPTGQRSVKMAKVRIKPHQGQHKEVQVLEEHSQX

SEQ ID NO: 19323 - protein, 33 aa, Artificial Sequence
  GFR-binding peptide
  MOD_RES (1)..(1): Xaa is C or S
  MOD_RES (15)..(16)..(17)..(18)..(19): Xaa is A or G
  MOD_RES (20)..(21)..(22)..(23): Xaa is A or G or is absent
XVPTEERSVKMAKVXXXXXXXXXKEVQVFLQHN

SEQ ID NO: 19324 - protein, 39 aa, Artificial Sequence
  GFR-binding peptide
  MOD_RES (5)..(5): Xaa is C or S
  MOD_RES (21)..(22)..(23)..(24)..(25): Xaa is A or G
  MOD_RES (26)..(27)..(28)..(29): Xaa is A or G or is absent
SSVKXQPSRVHHRSVKVAKVXXXXXXXXXKEVQVRLEEH

SEQ ID NO: 19325 - protein, 42 aa, Artificial Sequence
  GFR-binding peptide
  MOD_RES (3)..(40)..(42): Xaa is C or S
VKXQPSRVHHRPVQVRKIEYVRKKPKLKKATVRLEEHLEXAX

SEQ ID NO: 19326 - protein, 36 aa, Artificial Sequence
  GFR-binding peptide
  MOD_RES (3)..(3): Xaa is C or S
  MOD_RES (17)..(18)..(19)..(20)..(21): Xaa is A or G
  MOD_RES (22)..(23)..(24)..(25): Xaa is A or G or is absent
LEXVPTGQSNITMQIMXXXXXXXXXIGEMSLEEHSQ

SEQ ID NO: 19327 - protein, 43 aa, Artificial Sequence
  GFR-binding peptide
  MOD_RES (3)..(40)..(42): Xaa is C or S
  MOD_RES (19)..(20)..(21)..(22)..(23): Xaa is A or G
  MOD_RES (24)..(25)..(26)..(27): Xaa is A or G or is absent
VQXRPTQVQLSNITVQIMXXXXXXXXXLGEMSTLEDHLAXKXE

SEQ ID NO: 19328 - protein, 42 aa, Artificial Sequence
  GFR-binding peptide
  MOD_RES (6)..(40)..(42): Xaa is C or S
DEGLEXVPTGQRPVQMRKIRIKPHQGQHKKATVLEEHSQXEX

SEQ ID NO: 19329 - protein, 41 aa, Artificial Sequence
  GFR-binding peptide
  MOD_RES (5)..(5): Xaa is C or S
SSVKXQPSRVHHRPVQVRKIEYVRKKPKLKKATVRLEEHLE

SEQ ID NO: 19330 - protein, 38 aa, Artificial Sequence
  GFR-binding peptide
  MOD_RES (36)..(38): Xaa is C or S
PTQVQLSNITVQIMEIVRKKPIFIGEMSTLEDHLAXKX

SEQ ID NO: 19331 - protein, 36 aa, Artificial Sequence
  GFR-binding peptide
  MOD_RES (4)..(4): Xaa is C or S
GLEXVPTGQRSVKMAKVRIKPHQGQHKEVQVLEEHS

SEQ ID NO: 19332 - protein, 37 aa, Artificial Sequence
  GFR-binding peptide
  MOD_RES (2)..(2): Xaa is C or S
QXRPTQVQLRSVKVAKVEIVRKKPIFKEVQVTLEDHL

SEQ ID NO: 19333 - protein, 41 aa, Artificial Sequence
  GFR-binding peptide
  MOD_RES (5)..(5): Xaa is C or S
  MOD_RES (21)..(22)..(23)..(24)..(25): Xaa is A or G
  MOD_RES (26)..(27)..(28)..(29): Xaa is A or G or is absent
RNVQXRPTQVQLSNITVQIMXXXXXXXXXLGEMSTLEDHLA

SEQ ID NO: 19334 - protein, 39 aa, Artificial Sequence
  GFR-binding peptide
  MOD_RES (37)..(39): Xaa is C or S
  MOD_RES (16)..(17)..(18)..(19)..(20): Xaa is A or G
  MOD_RES (21)..(22)..(23)..(24): Xaa is A or G or is absent
QPSRVHHRSVKVAKVXXXXXXXXXKEVQVRLEEHLEXAX

SEQ ID NO: 19335 - protein, 43 aa, Artificial Sequence
  GFR-binding peptide
  MOD_RES (4)..(41)..(43): Xaa is C or S
NVQXRPTQVQLRSVKVAKVEIVRKKPIFKEVQVTLEDHLAXKX

SEQ ID NO: 19336 - protein, 41 aa, Artificial Sequence
  GFR-binding peptide
  MOD_RES (2)..(39)..(41): Xaa is C or S
  MOD_RES (18)..(19)..(20)..(21)..(22): Xaa is A or G
  MOD_RES (23)..(24)..(25)..(26): Xaa is A or G or is absent
KXQPSRVHHRSVKVAKVXXXXXXXXXKEVQVRLEEHLEXAX

SEQ ID NO: 19337 - protein, 36 aa, Artificial Sequence
  GFR-binding peptide
  MOD_RES (3)..(3): Xaa is C or S
  MOD_RES (17)..(18)..(19)..(20)..(21): Xaa is A or G
  MOD_RES (22)..(23)..(24)..(25): Xaa is A or G or is absent
LEXVPTGQRPVQMRKIXXXXXXXXXKKATVLEEHSQ

SEQ ID NO: 19338 - protein, 35 aa, Artificial Sequence
  GFR-binding peptide
  MOD_RES (34)..(34): Xaa is C or S
  MOD_RES (14)..(15)..(16)..(17)..(18): Xaa is A or G
  MOD_RES (19)..(20)..(21)..(22): Xaa is A or G or is absent
VPTEERPVQMRKIXXXXXXXXXKKATVFLQHNKXE

SEQ ID NO: 19339 - protein, 36 aa, Artificial Sequence
  GFR-binding peptide
  MOD_RES (1)..(35): Xaa is C or S
  MOD_RES (15)..(16)..(17)..(18)..(19): Xaa is A or G
  MOD_RES (20)..(21)..(22)..(23): Xaa is A or G or is absent
XVPTGQSNITMQIMXXXXXXXXXIGEMSLEEHSQXE

SEQ ID NO: 19340 - protein, 39 aa, Artificial Sequence
  GFR-binding peptide
  MOD_RES (3)..(3): Xaa is C or S
VQXRPTQVQLSNITVQIMEIVRKKPIFIGEMSTLEDHLA

SEQ ID NO: 19341 - protein, 41 aa, Artificial Sequence
  GFR-binding peptide
  MOD_RES (6)..(40): Xaa is C or S
DEGLEXVPTEERSVKMAKVRIKPHQGQHKEVQVFLQHNKXE

SEQ ID NO: 19342 - protein, 38 aa, Artificial Sequence
  GFR-binding peptide
  MOD_RES (2)..(2): Xaa is C or S
  MOD_RES (18)..(19)..(20)..(21)..(22): Xaa is A or G
  MOD_RES (23)..(24)..(25)..(26): Xaa is A or G or is absent
QXRPTQVQLRPVQVRKIXXXXXXXXXKKATVTLEDHLA

SEQ ID NO: 19343 - protein, 36 aa, Artificial Sequence
  GFR-binding peptide
  MOD_RES (4)..(4): Xaa is C or S
GLEXVPTGQRPVQMRKIRIKPHQGQHKKATVLEEHS

SEQ ID NO: 19344 - protein, 36 aa, Artificial Sequence
  GFR-binding peptide
  MOD_RES (4)..(4): Xaa is C or S
  MOD_RES (18)..(19)..(20)..(21)..(22): Xaa is A or G
  MOD_RES (23)..(24)..(25)..(26): Xaa is A or G or is absent
GLEXVPTGQSNITMQIMXXXXXXXXXLGEMSLEEHS

SEQ ID NO: 19345 - protein, 35 aa, Artificial Sequence
  GFR-binding peptide
  MOD_RES (1)..(35): Xaa is C or S
  MOD_RES (15)..(16)..(17)..(18)..(19): Xaa is A or G
  MOD_RES (20)..(21)..(22)..(23): Xaa is A or G or is absent
XVPTEERPVQMRKIXXXXXXXXXKKATVFLQHNKX

SEQ ID NO: 19346 - protein, 40 aa, Artificial Sequence
  GFR-binding peptide
  MOD_RES (3)..(40): Xaa is C or S
  MOD_RES (19)..(20)..(21)..(22)..(23): Xaa is A or G
  MOD_RES (24)..(25)..(26)..(27): Xaa is A or G or is absent
VKXQPSRVHHRSVKVAKVXXXXXXXXXKEVQVRLEEHLEX

SEQ ID NO: 19347 - protein, 43 aa, Artificial Sequence
  GFR-binding peptide
  MOD_RES (4)..(41)..(43): Xaa is C or S
  MOD_RES (20)..(21)..(22)..(23)..(24): Xaa is A or G
  MOD_RES (25)..(26)..(27)..(28): Xaa is A or G or is absent
SVKXQPSRVHHSNITVQIMXXXXXXXXXLGEMSRLEEHLEXAX

SEQ ID NO: 19348 - protein, 38 aa, Artificial Sequence
  GFR-binding peptide
  MOD_RES (2)..(36)..(38): Xaa is C or S
EXVPTGQRPVQMRKIRIKPHQGQHKKATVLEEHSQXEX

SEQ ID NO: 19349 - protein, 34 aa, Artificial Sequence
  GFR-binding peptide
  MOD_RES (14)..(15)..(16)..(17)..(18): Xaa is A or G
  MOD_RES (19)..(20)..(21)..(22): Xaa is A or G or is absent
SRVHHSNITVQIMXXXXXXXXXIGEMSRLEEHLE

SEQ ID NO: 19350 - protein, 34 aa, Artificial Sequence
  GFR-binding peptide
  MOD_RES (34)..(34): Xaa is C or S
VPTEERPVQMRKIRIKPHQGQHKKATVFLQHNKX

SEQ ID NO: 19351 - protein, 37 aa, Artificial Sequence
  GFR-binding peptide
  MOD_RES (2)..(2): Xaa is C or S
KXQPSRVHHRPVQVRKIEYVRKKPKLKKATVRLEEHL

SEQ ID NO: 19352 - protein, 36 aa, Artificial Sequence
  GFR-binding peptide
QPSRVHHSNITVQIMEYVRKKPKLIGEMSRLEEHLE

SEQ ID NO: 19353 - protein, 35 aa, Artificial Sequence
  GFR-binding peptide
  MOD_RES (35)..(35): Xaa is C or S
  MOD_RES (14)..(15)..(16)..(17)..(18): Xaa is A or G
  MOD_RES (19)..(20)..(21)..(22): Xaa is A or G or is absent
TQVQLRPVQVRKIXXXXXXXXXKKATVTLEDHLAX

SEQ ID NO: 19354 - protein, 44 aa, Artificial Sequence
  GFR-binding peptide
  MOD_RES (4)..(41)..(43): Xaa is C or S
NVQXRPTQVQLSNITVQIMEIVRKKPIFLGEMSTLEDHLAXKXE

SEQ ID NO: 19355 - protein, 36 aa, Artificial Sequence
  GFR-binding peptide
  MOD_RES (4)..(4): Xaa is C or S
GLEXVPTGQSNITMQIMRIKPHQGQHIGEMSLEEHS

SEQ ID NO: 19356 - protein, 40 aa, Artificial Sequence
  GFR-binding peptide
  MOD_RES (3)..(37)..(39): Xaa is C or S
LEXVPTEERPVQMRKIRIKPHQGQHKKATVFLQHNKXEXR

SEQ ID NO: 19357 - protein, 43 aa, Artificial Sequence
  GFR-binding peptide
  MOD_RES (7)..(41)..(43): Xaa is C or S
  MOD_RES (21)..(22)..(23)..(24)..(25): Xaa is A or G
  MOD_RES (26)..(27)..(28)..(29): Xaa is A or G or is absent
NDEGLEXVPTEERSVKMAKVXXXXXXXXXKEVQVFLQHNKXEX

SEQ ID NO: 19358 - protein, 37 aa, Artificial Sequence
  GFR-binding peptide
  MOD_RES (2)..(2): Xaa is C or S
KXQPSRVHHSNITVQIMEYVRKKPKLIGEMSRLEEHL

SEQ ID NO: 19359 - protein, 37 aa, Artificial Sequence
  GFR-binding peptide
  MOD_RES (36)..(36): Xaa is C or S
PTQVQLRSVKVAKVEIVRKKPIFKEVQVTLEDHLAXK

SEQ ID NO: 19360 - protein, 34 aa, Artificial Sequence
  GFR-binding peptide
  MOD_RES (15)..(16)..(17)..(18)..(19): Xaa is A or G
  MOD_RES (20)..(21)..(22)..(23): Xaa is A or G or is absent
PTQVQLSNITVQIMXXXXXXXXXLGEMSTLEDHL

SEQ ID NO: 19361 - protein, 44 aa, Artificial Sequence
  GFR-binding peptide
  MOD_RES (7)..(41)..(43): Xaa is C or S
NDEGLEXVPTGQRSVKMAKVRIKPHQGQHKEVQVLEEHSQXEXR

SEQ ID NO: 19362 - protein, 39 aa, Artificial Sequence
  GFR-binding peptide
  MOD_RES (3)..(37)..(39): Xaa is C or S
  MOD_RES (17)..(18)..(19)..(20)..(21): Xaa is A or G
  MOD_RES (22)..(23)..(24)..(25): Xaa is A or G or is absent
LEXVPTEERPVQMRKIXXXXXXXXXKKATVFLQHNKXEX

SEQ ID NO: 19363 - protein, 36 aa, Artificial Sequence
  GFR-binding peptide
  MOD_RES (1)..(1): Xaa is C or S
XQPSRVHHSNITVQIMEYVRKKPKLLGEMSRLEEHL

SEQ ID NO: 19364 - protein, 35 aa, Artificial Sequence
  GFR-binding peptide
  MOD_RES (1)..(1): Xaa is C or S
XQPSRVHHSNITVQIMEYVRKKPKLLGEMSRLEEH

SEQ ID NO: 19365 - protein, 35 aa, Artificial Sequence
  GFR-binding peptide
  MOD_RES (34)..(34): Xaa is C or S
  MOD_RES (14)..(15)..(16)..(17)..(18): Xaa is A or G
  MOD_RES (19)..(20)..(21)..(22): Xaa is A or G or is absent
VPTEESNITMQIMXXXXXXXXXIGEMSFLQHNKXE

SEQ ID NO: 19366 - protein, 36 aa, Artificial Sequence
  GFR-binding peptide
  MOD_RES (4)..(4): Xaa is C or S
  MOD_RES (18)..(19)..(20)..(21)..(22): Xaa is A or G
  MOD_RES (23)..(24)..(25)..(26): Xaa is A or G or is absent
GLEXVPTGQSNITMQIMXXXXXXXXXIGEMSLEEHS

SEQ ID NO: 19367 - protein, 40 aa, Artificial Sequence
  GFR-binding peptide
  MOD_RES (7)..(7): Xaa is C or S
  MOD_RES (21)..(22)..(23)..(24)..(25): Xaa is A or G
  MOD_RES (26)..(27)..(28)..(29): Xaa is A or G or is absent
NDEGLEXVPTEESNITMQIMXXXXXXXXXIGEMSFLQHNK

SEQ ID NO: 19368 - protein, 42 aa, Artificial Sequence
  GFR-binding peptide
  MOD_RES (7)..(41): Xaa is C or S
  MOD_RES (21)..(22)..(23)..(24)..(25): Xaa is A or G
  MOD_RES (26)..(27)..(28)..(29): Xaa is A or G or is absent
NDEGLEXVPTGQSNITMQIMXXXXXXXXXLGEMSLEEHSQXE

SEQ ID NO: 19369 - protein, 37 aa, Artificial Sequence
  GFR-binding peptide
  MOD_RES (37)..(37): Xaa is C or S
RPTQVQLSNITVQIMEIVRKKPIFIGEMSTLEDHLAX

SEQ ID NO: 19370 - protein, 43 aa, Artificial Sequence
  GFR-binding peptide
  MOD_RES (3)..(40)..(42): Xaa is C or S
VKXQPSRVHHSNITVQIMEYVRKKPKLLGEMSRLEEHLEXAXA

SEQ ID NO: 19371 - protein, 34 aa, Artificial Sequence
  GFR-binding peptide
TQVQLSNITVQIMEIVRKKPIFLGEMSTLEDHLA

SEQ ID NO: 19372 - protein, 37 aa, Artificial Sequence
  GFR-binding peptide
  MOD_RES (4)..(4): Xaa is C or S
GLEXVPTEERSVKMAKVRIKPHQGQHKEVQVFLQHNK

SEQ ID NO: 19373 - protein, 37 aa, Artificial Sequence
  GFR-binding peptide
  MOD_RES (3)..(37): Xaa is C or S
LEXVPTGQRPVQMRKIRIKPHQGQHKKATVLEEHSQX

SEQ ID NO: 19374 - protein, 37 aa, Artificial Sequence
  GFR-binding peptide
  MOD_RES (34)..(36): Xaa is C or S
VPTGQRSVKMAKVRIKPHQGQHKEVQVLEEHSQXEXR

SEQ ID NO: 19375 - protein, 40 aa, Artificial Sequence
  GFR-binding peptide
  MOD_RES (3)..(40): Xaa is C or S
  MOD_RES (19)..(20)..(21)..(22)..(23): Xaa is A or G
  MOD_RES (24)..(25)..(26)..(27): Xaa is A or G or is absent
VQXRPTQVQLSNITVQIMXXXXXXXXXIGEMSTLEDHLAX

SEQ ID NO: 19376 - protein, 42 aa, Artificial Sequence
  GFR-binding peptide
  MOD_RES (6)..(40)..(42): Xaa is C or S
DEGLEXVPTGQSNITMQIMRIKPHQGQHIGEMSLEEHSQXEX

SEQ ID NO: 19377 - protein, 39 aa, Artificial Sequence
  GFR-binding peptide
  MOD_RES (37)..(39): Xaa is C or S
QPSRVHHSNITVQIMEYVRKKPKLLGEMSRLEEHLEXAX

SEQ ID NO: 19378 - protein, 35 aa, Artificial Sequence
  GFR-binding peptide
  MOD_RES (1)..(1): Xaa is C or S
XQPSRVHHSNITVQIMEYVRKKPKLIGEMSRLEEH

SEQ ID NO: 19379 - protein, 36 aa, Artificial Sequence
  GFR-binding peptide
  MOD_RES (4)..(4): Xaa is C or S
GLEXVPTEESNITMQIMRIKPHQGQHLGEMSFLQHN

SEQ ID NO: 19380 - protein, 34 aa, Artificial Sequence
  GFR-binding peptide
  MOD_RES (16)..(17)..(18)..(19)..(20): Xaa is A or G
  MOD_RES (21)..(22)..(23)..(24): Xaa is A or G or is absent
QPSRVHHSNITVQIMXXXXXXXXXIGEMSRLEEH

SEQ ID NO: 19381 - protein, 38 aa, Artificial Sequence
  GFR-binding peptide
  MOD_RES (1)..(35)..(37): Xaa is C or S
XVPTEERPVQMRKIRIKPHQGQHKKATVFLQHNKXEXR

SEQ ID NO: 19382 - protein, 38 aa, Artificial Sequence
  GFR-binding peptide
  MOD_RES (3)..(37): Xaa is C or S
  MOD_RES (17)..(18)..(19)..(20)..(21): Xaa is A or G
  MOD_RES (22)..(23)..(24)..(25): Xaa is A or G or is absent
LEXVPTGQSNITMQIMXXXXXXXXXIGEMSLEEHSQXE

SEQ ID NO: 19383 - protein, 43 aa, Artificial Sequence
  GFR-binding peptide
  MOD_RES (3)..(40)..(42): Xaa is C or S
VKXQPSRVHHRPVQVRKIEYVRKKPKLKKATVRLEEHLEXAXA

SEQ ID NO: 19384 - protein, 42 aa, Artificial Sequence
  GFR-binding peptide
  MOD_RES (2)..(39)..(41): Xaa is C or S
  MOD_RES (18)..(19)..(20)..(21)..(22): Xaa is A or G
  MOD_RES (23)..(24)..(25)..(26): Xaa is A or G or is absent
QXRPTQVQLRPVQVRKIXXXXXXXXXKKATVTLEDHLAXKXE

SEQ ID NO: 19385 - protein, 38 aa, Artificial Sequence
  GFR-binding peptide
  MOD_RES (3)..(3): Xaa is C or S
VQXRPTQVQLSNITVQIMEIVRKKPIFLGEMSTLEDHL

SEQ ID NO: 19386 - protein, 40 aa, Artificial Sequence
  GFR-binding peptide
  MOD_RES (3)..(37)..(39): Xaa is C or S
  MOD_RES (17)..(18)..(19)..(20)..(21): Xaa is A or G
  MOD_RES (22)..(23)..(24)..(25): Xaa is A or G or is absent
LEXVPTGQSNITMQIMXXXXXXXXXLGEMSLEEHSQXEXR

SEQ ID NO: 19387 - protein, 35 aa, Artificial Sequence
  GFR-binding peptide
QPSRVHHSNITVQIMEYVRKKPKLLGEMSRLEEHL

SEQ ID NO: 19388 - protein, 42 aa, Artificial Sequence
  GFR-binding peptide
  MOD_RES (4)..(41): Xaa is C or S
SVKXQPSRVHHSNITVQIMEYVRKKPKLLGEMSRLEEHLEXA

SEQ ID NO: 19389 - protein, 42 aa, Artificial Sequence
  GFR-binding peptide
  MOD_RES (5)..(42): Xaa is C or S
  MOD_RES (21)..(22)..(23)..(24)..(25): Xaa is A or G
  MOD_RES (26)..(27)..(28)..(29): Xaa is A or G or is absent
SSVKXQPSRVHHRPVQVRKIXXXXXXXXXKKATVRLEEHLEX

SEQ ID NO: 19390 - protein, 39 aa, Artificial Sequence
  GFR-binding peptide
  MOD_RES (1)..(38): Xaa is C or S
XQPSRVHHRPVQVRKIEYVRKKPKLKKATVRLEEHLEXA

SEQ ID NO: 19391 - protein, 38 aa, Artificial Sequence
  GFR-binding peptide
  MOD_RES (1)..(38): Xaa is C or S
  MOD_RES (17)..(18)..(19)..(20)..(21): Xaa is A or G
  MOD_RES (22)..(23)..(24)..(25): Xaa is A or G or is absent
XQPSRVHHRSVKVAKVXXXXXXXXXKEVQVRLEEHLEX

SEQ ID NO: 19392 - protein, 43 aa, Artificial Sequence
  GFR-binding peptide
  MOD_RES (7)..(41)..(43): Xaa is C or S
  MOD_RES (21)..(22)..(23)..(24)..(25): Xaa is A or G
  MOD_RES (26)..(27)..(28)..(29): Xaa is A or G or is absent
NDEGLEXVPTEESNITMQIMXXXXXXXXXLGEMSFLQHNKXEX

SEQ ID NO: 19393 - protein, 41 aa, Artificial Sequence
  GFR-binding peptide
  MOD_RES (1)..(38)..(40): Xaa is C or S
XRPTQVQLSNITVQIMEIVRKKPIFIGEMSTLEDHLAXKXE

SEQ ID NO: 19394 - protein, 44 aa, Artificial Sequence
  GFR-binding peptide
  MOD_RES (4)..(41)..(43): Xaa is C or S
  MOD_RES (20)..(21)..(22)..(23)..(24): Xaa is A or G
  MOD_RES (25)..(26)..(27)..(28): Xaa is A or G or is absent
NVQXRPTQVQLSNITVQIMXXXXXXXXXIGEMSTLEDHLAXKXE

SEQ ID NO: 19395 - protein, 40 aa, Artificial Sequence
  GFR-binding peptide
  MOD_RES (5)..(39): Xaa is C or S
  MOD_RES (19)..(20)..(21)..(22)..(23): Xaa is A or G
  MOD_RES (24)..(25)..(26)..(27): Xaa is A or G or is absent
EGLEXVPTGQSNITMQIMXXXXXXXXXLGEMSLEEHSQXE

SEQ ID NO: 19396 - protein, 39 aa, Artificial Sequence
  GFR-binding peptide
  MOD_RES (1)..(38): Xaa is C or S
XQPSRVHHSNITVQIMEYVRKKPKLLGEMSRLEEHLEXA

SEQ ID NO: 19397 - protein, 38 aa, Artificial Sequence
  GFR-binding peptide
  MOD_RES (1)..(38): Xaa is C or S
  MOD_RES (17)..(18)..(19)..(20)..(21): Xaa is A or G
  MOD_RES (22)..(23)..(24)..(25): Xaa is A or G or is absent
XRPTQVQLRPVQVRKIXXXXXXXXXKKATVTLEDHLAX

SEQ ID NO: 19398 - protein, 42 aa, Artificial Sequence
  GFR-binding peptide
  MOD_RES (4)..(41): Xaa is C or S
SVKXQPSRVHHRPVQVRKIEYVRKKPKLKKATVRLEEHLEXA

SEQ ID NO: 19399 - protein, 41 aa, Artificial Sequence
  GFR-binding peptide
  MOD_RES (4)..(38)..(40): Xaa is C or S
  MOD_RES (18)..(19)..(20)..(21)..(22): Xaa is A or G
  MOD_RES (23)..(24)..(25)..(26): Xaa is A or G or is absent
GLEXVPTEESNITMQIMXXXXXXXXXLGEMSFLQHNKXEXR

SEQ ID NO: 19400 - protein, 38 aa, Artificial Sequence
  GFR-binding peptide
  MOD_RES (1)..(35)..(37): Xaa is C or S
  MOD_RES (15)..(16)..(17)..(18)..(19): Xaa is A or G
  MOD_RES (20)..(21)..(22)..(23): Xaa is A or G or is absent
XVPTGQSNITMQIMXXXXXXXXXLGEMSLEEHSQXEXR

SEQ ID NO: 19401 - protein, 37 aa, Artificial Sequence
  GFR-binding peptide
  MOD_RES (37)..(37): Xaa is C or S
QPSRVHHSNITVQIMEYVRKKPKLIGEMSRLEEHLEX

SEQ ID NO: 19402 - protein, 39 aa, Artificial Sequence
  GFR-binding peptide
  MOD_RES (6)..(6): Xaa is C or S
  MOD_RES (20)..(21)..(22)..(23)..(24): Xaa is A or G
  MOD_RES (25)..(26)..(27)..(28): Xaa is A or G or is absent
DEGLEXVPTGQRPVQMRKIXXXXXXXXXKKATVLEEHSQ

SEQ ID NO: 19403 - protein, 39 aa, Artificial Sequence
  GFR-binding peptide
  MOD_RES (2)..(36)..(38): Xaa is C or S
EXVPTEERPVQMRKIRIKPHQGQHKKATVFLQHNKXEXR

SEQ ID NO: 19404 - protein, 41 aa, Artificial Sequence
  GFR-binding peptide
  MOD_RES (2)..(39)..(41): Xaa is C or S
KXQPSRVHHSNITVQIMEYVRKKPKLLGEMSRLEEHLEXAX

SEQ ID NO: 19405 - protein, 34 aa, Artificial Sequence
  GFR-binding peptide
  MOD_RES (16)..(17)..(18)..(19)..(20): Xaa is A or G
  MOD_RES (21)..(22)..(23)..(24): Xaa is A or G or is absent
QPSRVHHSNITVQIMXXXXXXXXXLGEMSRLEEH

SEQ ID NO: 19406 - protein, 37 aa, Artificial Sequence
  GFR-binding peptide
  MOD_RES (2)..(36): Xaa is C or S
  MOD_RES (16)..(17)..(18)..(19)..(20): Xaa is A or G
  MOD_RES (21)..(22)..(23)..(24): Xaa is A or G or is absent
EXVPTGQRPVQMRKIXXXXXXXXXKKATVLEEHSQXE

SEQ ID NO: 19407 - protein, 44 aa, Artificial Sequence
  GFR-binding peptide
  MOD_RES (7)..(41)..(43): Xaa is C or S
  MOD_RES (21)..(22)..(23)..(24)..(25): Xaa is A or G
  MOD_RES (26)..(27)..(28)..(29): Xaa is A or G or is absent
NDEGLEXVPTGQRPVQMRKIXXXXXXXXXKKATVLEEHSQXEXR

SEQ ID NO: 19408 - protein, 40 aa, Artificial Sequence
  GFR-binding peptide
  MOD_RES (1)..(38)..(40): Xaa is C or S
  MOD_RES (17)..(18)..(19)..(20)..(21): Xaa is A or G
  MOD_RES (22)..(23)..(24)..(25): Xaa is A or G or is absent
XQPSRVHHSNITVQIMXXXXXXXXXLGEMSRLEEHLEXAX

SEQ ID NO: 19409 - protein, 39 aa, Artificial Sequence
  GFR-binding peptide
  MOD_RES (6)..(6): Xaa is C or S
  MOD_RES (20)..(21)..(22)..(23)..(24): Xaa is A or G
  MOD_RES (25)..(26)..(27)..(28): Xaa is A or G or is absent
DEGLEXVPTGQSNITMQIMXXXXXXXXXIGEMSLEEHSQ

SEQ ID NO: 19410 - protein, 37 aa, Artificial Sequence
  GFR-binding peptide
  MOD_RES (34)..(36): Xaa is C or S
  MOD_RES (14)..(15)..(16)..(17)..(18): Xaa is A or G
  MOD_RES (19)..(20)..(21)..(22): Xaa is A or G or is absent
VPTEESNITMQIMXXXXXXXXXLGEMSFLQHNKXEXR

SEQ ID NO: 19411 - protein, 34 aa, Artificial Sequence
  GFR-binding peptide
  MOD_RES (14)..(15)..(16)..(17)..(18): Xaa is A or G
  MOD_RES (19)..(20)..(21)..(22): Xaa is A or G or is absent
TQVQLRSVKVAKVXXXXXXXXXKEVQVTLEDHLA

SEQ ID NO: 19412 - protein, 36 aa, Artificial Sequence
  GFR-binding peptide
  MOD_RES (16)..(17)..(18)..(19)..(20): Xaa is A or G
  MOD_RES (21)..(22)..(23)..(24): Xaa is A or G or is absent
RPTQVQLRPVQVRKIXXXXXXXXXKKATVTLEDHLA

SEQ ID NO: 19413 - protein, 34 aa, Artificial Sequence
  GFR-binding peptide
  MOD_RES (1)..(1): Xaa is C or S
  MOD_RES (15)..(16)..(17)..(18)..(19): Xaa is A or G
  MOD_RES (20)..(21)..(22)..(23): Xaa is A or G or is absent
XVPTEESNITMQIMXXXXXXXXXIGEMSFLQHNK

SEQ ID NO: 19414 - protein, 40 aa, Artificial Sequence
  GFR-binding peptide
  MOD_RES (1)..(38)..(40): Xaa is C or S
  MOD_RES (17)..(18)..(19)..(20)..(21): Xaa is A or G
  MOD_RES (22)..(23)..(24)..(25): Xaa is A or G or is absent
XRPTQVQLRSVKVAKVXXXXXXXXXKEVQVTLEDHLAXKX

SEQ ID NO: 19415 - protein, 35 aa, Artificial Sequence
  GFR-binding peptide
PTQVQLSNITVQIMEIVRKKPIFLGEMSTLEDHLA

SEQ ID NO: 19416 - protein, 36 aa, Artificial Sequence
  GFR-binding peptide
  MOD_RES (16)..(17)..(18)..(19)..(20): Xaa is A or G
  MOD_RES (21)..(22)..(23)..(24): Xaa is A or G or is absent
RPTQVQLSNITVQIMXXXXXXXXXLGEMSTLEDHLA

SEQ ID NO: 19417 - protein, 38 aa, Artificial Sequence
  GFR-binding peptide
  MOD_RES (36)..(38): Xaa is C or S
  MOD_RES (15)..(16)..(17)..(18)..(19): Xaa is A or G
  MOD_RES (20)..(21)..(22)..(23): Xaa is A or G or is absent
PSRVHHSNITVQIMXXXXXXXXXLGEMSRLEEHLEXAX

SEQ ID NO: 19418 - protein, 41 aa, Artificial Sequence
  GFR-binding peptide
  MOD_RES (2)..(39)..(41): Xaa is C or S
  MOD_RES (18)..(19)..(20)..(21)..(22): Xaa is A or G
  MOD_RES (23)..(24)..(25)..(26): Xaa is A or G or is absent
QXRPTQVQLSNITVQIMXXXXXXXXXLGEMSTLEDHLAXKX

SEQ ID NO: 19419 - protein, 39 aa, Artificial Sequence
  GFR-binding peptide
  MOD_RES (4)..(4): Xaa is C or S
  MOD_RES (20)..(21)..(22)..(23)..(24): Xaa is A or G
  MOD_RES (25)..(26)..(27)..(28): Xaa is A or G or is absent
NVQXRPTQVQLSNITVQIMXXXXXXXXXIGEMSTLEDHL

SEQ ID NO: 19420 - protein, 41 aa, Artificial Sequence
  GFR-binding peptide
  MOD_RES (5)..(39)..(41): Xaa is C or S
EGLEXVPTEERPVQMRKIRIKPHQGQHKKATVFLQHNKXEX

SEQ ID NO: 19421 - protein, 36 aa, Artificial Sequence
  GFR-binding peptide
  MOD_RES (1)..(35): Xaa is C or S
  MOD_RES (15)..(16)..(17)..(18)..(19): Xaa is A or G
  MOD_RES (20)..(21)..(22)..(23): Xaa is A or G or is absent
XVPTEERPVQMRKIXXXXXXXXXKKATVFLQHNKXE

SEQ ID NO: 19422 - protein, 32 aa, Artificial Sequence
  GFR-binding peptide
VPTGQRSVKMAKVRIKPHQGQHKEVQVLEEHS

SEQ ID NO: 19423 - protein, 36 aa, Artificial Sequence
  GFR-binding peptide
  MOD_RES (3)..(3): Xaa is C or S
LEXVPTEESNITMQIMRIKPHQGQHLGEMSFLQHNK

SEQ ID NO: 19424 - protein, 35 aa, Artificial Sequence
  GFR-binding peptide
  MOD_RES (2)..(2): Xaa is C or S
EXVPTGQSNITMQIMRIKPHQGQHIGEMSLEEHSQ

SEQ ID NO: 19425 - protein, 33 aa, Artificial Sequence
  GFR-binding peptide
  MOD_RES (14)..(15)..(16)..(17)..(18): Xaa is A or G
  MOD_RES (19)..(20)..(21)..(22): Xaa is A or G or is absent
SRVHHRPVQVRKIXXXXXXXXXKKATVRLEEHL

SEQ ID NO: 19426 - protein, 35 aa, Artificial Sequence
  GFR-binding peptide
  MOD_RES (3)..(3): Xaa is C or S
  MOD_RES (17)..(18)..(19)..(20)..(21): Xaa is A or G
  MOD_RES (22)..(23)..(24)..(25): Xaa is A or G or is absent
LEXVPTEESNITMQIMXXXXXXXXXLGEMSFLQHN

SEQ ID NO: 19427 - protein, 40 aa, Artificial Sequence
  GFR-binding peptide
  MOD_RES (1)..(38)..(40): Xaa is C or S
  MOD_RES (17)..(18)..(19)..(20)..(21): Xaa is A or G
  MOD_RES (22)..(23)..(24)..(25): Xaa is A or G or is absent
XRPTQVQLRPVQVRKIXXXXXXXXXKKATVTLEDHLAXKX

SEQ ID NO: 19428 - protein, 37 aa, Artificial Sequence
  GFR-binding peptide
  MOD_RES (5)..(5): Xaa is C or S
  MOD_RES (19)..(20)..(21)..(22)..(23): Xaa is A or G
  MOD_RES (24)..(25)..(26)..(27): Xaa is A or G or is absent
EGLEXVPTGQSNITMQIMXXXXXXXXXIGEMSLEEHS

SEQ ID NO: 19429 - protein, 43 aa, Artificial Sequence
  GFR-binding peptide
  MOD_RES (6)..(40)..(42): Xaa is C or S
DEGLEXVPTGQRPVQMRKIRIKPHQGQHKKATVLEEHSQXEXR

SEQ ID NO: 19430 - protein, 38 aa, Artificial Sequence
  GFR-binding peptide
  MOD_RES (6)..(6): Xaa is C or S
  MOD_RES (20)..(21)..(22)..(23)..(24): Xaa is A or G
  MOD_RES (25)..(26)..(27)..(28): Xaa is A or G or is absent
DEGLEXVPTGQSNITMQIMXXXXXXXXXLGEMSLEEHS

SEQ ID NO: 19431 - protein, 33 aa, Artificial Sequence
  GFR-binding peptide
TQVQLSNITVQIMEIVRKKPIFLGEMSTLEDHL

SEQ ID NO: 19432 - protein, 42 aa, Artificial Sequence
  GFR-binding peptide
  MOD_RES (5)..(42): Xaa is C or S
SSVKXQPSRVHHSNITVQIMEYVRKKPKLIGEMSRLEEHLEX

SEQ ID NO: 19433 - protein, 40 aa, Artificial Sequence
  GFR-binding peptide
  MOD_RES (5)..(5): Xaa is C or S
SSVKXQPSRVHHRPVQVRKIEYVRKKPKLKKATVRLEEHL

SEQ ID NO: 19434 - protein, 38 aa, Artificial Sequence
  GFR-binding peptide
  MOD_RES (1)..(35)..(37): Xaa is C or S
  MOD_RES (15)..(16)..(17)..(18)..(19): Xaa is A or G
  MOD_RES (20)..(21)..(22)..(23): Xaa is A or G or is absent
XVPTEERPVQMRKIXXXXXXXXXKKATVFLQHNKXEXR

SEQ ID NO: 19435 - protein, 35 aa, Artificial Sequence
  GFR-binding peptide
PSRVHHRPVQVRKIEYVRKKPKLKKATVRLEEHLE

SEQ ID NO: 19436 - protein, 36 aa, Artificial Sequence
  GFR-binding peptide
  MOD_RES (2)..(2): Xaa is C or S
QXRPTQVQLRSVKVAKVEIVRKKPIFKEVQVTLEDH

SEQ ID NO: 19437 - protein, 38 aa, Artificial Sequence
  GFR-binding peptide
  MOD_RES (1)..(35)..(37): Xaa is C or S
  MOD_RES (15)..(16)..(17)..(18)..(19): Xaa is A or G
  MOD_RES (20)..(21)..(22)..(23): Xaa is A or G or is absent
XVPTEERSVKMAKVXXXXXXXXXKEVQVFLQHNKXEXR

SEQ ID NO: 19438 - protein, 41 aa, Artificial Sequence
  GFR-binding peptide
  MOD_RES (4)..(41): Xaa is C or S
SVKXQPSRVHHSNITVQIMEYVRKKPKLLGEMSRLEEHLEX

SEQ ID NO: 19439 - protein, 33 aa, Artificial Sequence
  GFR-binding peptide
  MOD_RES (1)..(1): Xaa is C or S
  MOD_RES (15)..(16)..(17)..(18)..(19): Xaa is A or G
  MOD_RES (20)..(21)..(22)..(23): Xaa is A or G or is absent
XVPTEESNITMQIMXXXXXXXXXLGEMSFLQHN

SEQ ID NO: 19440 - protein, 35 aa, Artificial Sequence
  GFR-binding peptide
RPTQVQLSNITVQIMEIVRKKPIFIGEMSTLEDHL

SEQ ID NO: 19441 - protein, 38 aa, Artificial Sequence
  GFR-binding peptide
  MOD_RES (4)..(38): Xaa is C or S
  MOD_RES (18)..(19)..(20)..(21)..(22): Xaa is A or G
  MOD_RES (23)..(24)..(25)..(26): Xaa is A or G or is absent
GLEXVPTEESNITMQIMXXXXXXXXXLGEMSFLQHNKX

SEQ ID NO: 19442 - protein, 39 aa, Artificial Sequence
  GFR-binding peptide
  MOD_RES (3)..(37)..(39): Xaa is C or S
LEXVPTGQSNITMQIMRIKPHQGQHIGEMSLEEHSQXEX

SEQ ID NO: 19443 - protein, 33 aa, Artificial Sequence
  GFR-binding peptide
PSRVHHSNITVQIMEYVRKKPKLIGEMSRLEEH

SEQ ID NO: 19444 - protein, 37 aa, Artificial Sequence
  GFR-binding peptide
  MOD_RES (35)..(37): Xaa is C or S
SRVHHRPVQVRKIEYVRKKPKLKKATVRLEEHLEXAX

SEQ ID NO: 19445 - protein, 34 aa, Artificial Sequence
  GFR-binding peptide
  MOD_RES (2)..(2): Xaa is C or S
  MOD_RES (16)..(17)..(18)..(19)..(20): Xaa is A or G
  MOD_RES (21)..(22)..(23)..(24): Xaa is A or G or is absent
EXVPTEESNITMQIMXXXXXXXXXIGEMSFLQHN

SEQ ID NO: 19446 - protein, 39 aa, Artificial Sequence
  GFR-binding peptide
  MOD_RES (1)..(38): Xaa is C or S
  MOD_RES (17)..(18)..(19)..(20)..(21): Xaa is A or G
  MOD_RES (22)..(23)..(24)..(25): Xaa is A or G or is absent
XRPTQVQLRSVKVAKVXXXXXXXXXKEVQVTLEDHLAXK

SEQ ID NO: 19447 - protein, 37 aa, Artificial Sequence
  GFR-binding peptide
  MOD_RES (36)..(36): Xaa is C or S
  MOD_RES (15)..(16)..(17)..(18)..(19): Xaa is A or G
  MOD_RES (20)..(21)..(22)..(23): Xaa is A or G or is absent
PTQVQLRSVKVAKVXXXXXXXXXKEVQVTLEDHLAXK

SEQ ID NO: 19448 - protein, 39 aa, Artificial Sequence
  GFR-binding peptide
  MOD_RES (2)..(39): Xaa is C or S
KXQPSRVHHRPVQVRKIEYVRKKPKLKKATVRLEEHLEX

SEQ ID NO: 19449 - protein, 38 aa, Artificial Sequence
  GFR-binding peptide
  MOD_RES (3)..(37): Xaa is C or S
LEXVPTEESNITMQIMRIKPHQGQHLGEMSFLQHNKXE

SEQ ID NO: 19450 - protein, 37 aa, Artificial Sequence
  GFR-binding peptide
  MOD_RES (35)..(37): Xaa is C or S
TQVQLRSVKVAKVEIVRKKPIFKEVQVTLEDHLAXKX

SEQ ID NO: 19451 - protein, 43 aa, Artificial Sequence
  GFR-binding peptide
  MOD_RES (6)..(40)..(42): Xaa is C or S
DEGLEXVPTGQRSVKMAKVRIKPHQGQHKEVQVLEEHSQXEXR

SEQ ID NO: 19452 - protein, 37 aa, Artificial Sequence
  GFR-binding peptide
  MOD_RES (1)..(1): Xaa is C or S
XQPSRVHHSNITVQIMEYVRKKPKLIGEMSRLEEHLE

SEQ ID NO: 19453 - protein, 33 aa, Artificial Sequence
  GFR-binding peptide
  MOD_RES (14)..(15)..(16)..(17)..(18): Xaa is A or G
  MOD_RES (19)..(20)..(21)..(22): Xaa is A or G or is absent
VPTEERSVKMAKVXXXXXXXXXKEVQVFLQHNK

SEQ ID NO: 19454 - protein, 37 aa, Artificial Sequence
  GFR-binding peptide
  MOD_RES (1)..(35)..(37): Xaa is C or S
  MOD_RES (15)..(16)..(17)..(18)..(19): Xaa is A or G
  MOD_RES (20)..(21)..(22)..(23): Xaa is A or G or is absent
XVPTEESNITMQIMXXXXXXXXXLGEMSFLQHNKXEX

SEQ ID NO: 19455 - protein, 42 aa, Artificial Sequence
  GFR-binding peptide
  MOD_RES (5)..(42): Xaa is C or S
  MOD_RES (21)..(22)..(23)..(24)..(25): Xaa is A or G
  MOD_RES (26)..(27)..(28)..(29): Xaa is A or G or is absent
RNVQXRPTQVQLRPVQVRKIXXXXXXXXXKKATVTLEDHLAX

SEQ ID NO: 19456 - protein, 39 aa, Artificial Sequence
  GFR-binding peptide
  MOD_RES (7)..(7): Xaa is C or S
  MOD_RES (21)..(22)..(23)..(24)..(25): Xaa is A or G
  MOD_RES (26)..(27)..(28)..(29): Xaa is A or G or is absent
NDEGLEXVPTEERSVKMAKVXXXXXXXXXKEVQVFLQHN

SEQ ID NO: 19457 - protein, 38 aa, Artificial Sequence
  GFR-binding peptide
  MOD_RES (1)..(38): Xaa is C or S
XRPTQVQLRSVKVAKVEIVRKKPIFKEVQVTLEDHLAX

SEQ ID NO: 19458 - protein, 37 aa, Artificial Sequence
  GFR-binding peptide
  MOD_RES (34)..(36): Xaa is C or S
  MOD_RES (14)..(15)..(16)..(17)..(18): Xaa is A or G
  MOD_RES (19)..(20)..(21)..(22): Xaa is A or G or is absent
VPTGQSNITMQIMXXXXXXXXXLGEMSLEEHSQXEXR

SEQ ID NO: 19459 - protein, 32 aa, Artificial Sequence
  GFR-binding peptide
  MOD_RES (14)..(15)..(16)..(17)..(18): Xaa is A or G
  MOD_RES (19)..(20)..(21)..(22): Xaa is A or G or is absent
VPTEERSVKMAKVXXXXXXXXXKEVQVFLQHN

SEQ ID NO: 19460 - protein, 43 aa, Artificial Sequence
  GFR-binding peptide
  MOD_RES (5)..(42): Xaa is C or S
RNVQXRPTQVQLSNITVQIMEIVRKKPIFIGEMSTLEDHLAXK

SEQ ID NO: 19461 - protein, 38 aa, Artificial Sequence
  GFR-binding peptide
  MOD_RES (3)..(3): Xaa is C or S
VQXRPTQVQLRSVKVAKVEIVRKKPIFKEVQVTLEDHL

SEQ ID NO: 19462 - protein, 42 aa, Artificial Sequence
  GFR-binding peptide
  MOD_RES (5)..(42): Xaa is C or S
  MOD_RES (21)..(22)..(23)..(24)..(25): Xaa is A or G
  MOD_RES (26)..(27)..(28)..(29): Xaa is A or G or is absent
RNVQXRPTQVQLSNITVQIMXXXXXXXXXLGEMSTLEDHLAX

SEQ ID NO: 19463 - protein, 34 aa, Artificial Sequence
  GFR-binding peptide
PTQVQLSNITVQIMEIVRKKPIFLGEMSTLEDHL

SEQ ID NO: 19464 - protein, 38 aa, Artificial Sequence
  GFR-binding peptide
  MOD_RES (2)..(2): Xaa is C or S
  MOD_RES (18)..(19)..(20)..(21)..(22): Xaa is A or G
  MOD_RES (23)..(24)..(25)..(26): Xaa is A or G or is absent
KXQPSRVHHSNITVQIMXXXXXXXXXIGEMSRLEEHLE

SEQ ID NO: 19465 - protein, 35 aa, Artificial Sequence
  GFR-binding peptide
  MOD_RES (1)..(35): Xaa is C or S
  MOD_RES (15)..(16)..(17)..(18)..(19): Xaa is A or G
  MOD_RES (20)..(21)..(22)..(23): Xaa is A or G or is absent
XVPTGQSNITMQIMXXXXXXXXXIGEMSLEEHSQX

SEQ ID NO: 19466 - protein, 44 aa, Artificial Sequence
  GFR-binding peptide
  MOD_RES (4)..(41)..(43): Xaa is C or S
  MOD_RES (20)..(21)..(22)..(23)..(24): Xaa is A or G
  MOD_RES (25)..(26)..(27)..(28): Xaa is A or G or is absent
NVQXRPTQVQLRSVKVAKVXXXXXXXXXKEVQVTLEDHLAXKXE

SEQ ID NO: 19467 - protein, 39 aa, Artificial Sequence
  GFR-binding peptide
  MOD_RES (5)..(5): Xaa is C or S
  MOD_RES (21)..(22)..(23)..(24)..(25): Xaa is A or G
  MOD_RES (26)..(27)..(28)..(29): Xaa is A or G or is absent
RNVQXRPTQVQLRSVKVAKVXXXXXXXXXKEVQVTLEDH

SEQ ID NO: 19468 - protein, 40 aa, Artificial Sequence
  GFR-binding peptide
  MOD_RES (7)..(7): Xaa is C or S
  MOD_RES (21)..(22)..(23)..(24)..(25): Xaa is A or G
  MOD_RES (26)..(27)..(28)..(29): Xaa is A or G or is absent
NDEGLEXVPTEERPVQMRKIXXXXXXXXXKKATVFLQHNK

SEQ ID NO: 19469 - protein, 34 aa, Artificial Sequence
  GFR-binding peptide
  MOD_RES (15)..(16)..(17)..(18)..(19): Xaa is A or G
  MOD_RES (20)..(21)..(22)..(23): Xaa is A or G or is absent
PSRVHHRPVQVRKIXXXXXXXXXKKATVRLEEHL

SEQ ID NO: 19470 - protein, 39 aa, Artificial Sequence
  GFR-binding peptide
  MOD_RES (7)..(7): Xaa is C or S
NDEGLEXVPTGQRSVKMAKVRIKPHQGQHKEVQVLEEHS

SEQ ID NO: 19471 - protein, 42 aa, Artificial Sequence
  GFR-binding peptide
  MOD_RES (4)..(41): Xaa is C or S
  MOD_RES (20)..(21)..(22)..(23)..(24): Xaa is A or G
  MOD_RES (25)..(26)..(27)..(28): Xaa is A or G or is absent
NVQXRPTQVQLRSVKVAKVXXXXXXXXXKEVQVTLEDHLAXK

SEQ ID NO: 19472 - protein, 32 aa, Artificial Sequence
  GFR-binding peptide
  MOD_RES (14)..(15)..(16)..(17)..(18): Xaa is A or G
  MOD_RES (19)..(20)..(21)..(22): Xaa is A or G or is absent
SRVHHSNITVQIMXXXXXXXXXLGEMSRLEEH

SEQ ID NO: 19473 - protein, 40 aa, Artificial Sequence
  GFR-binding peptide
  MOD_RES (5)..(39): Xaa is C or S
EGLEXVPTEERPVQMRKIRIKPHQGQHKKATVFLQHNKXE

SEQ ID NO: 19474 - protein, 39 aa, Artificial Sequence
  GFR-binding peptide
  MOD_RES (3)..(37)..(39): Xaa is C or S
LEXVPTEERPVQMRKIRIKPHQGQHKKATVFLQHNKXEX

SEQ ID NO: 19475 - protein, 37 aa, Artificial Sequence
  GFR-binding peptide
  MOD_RES (36)..(36): Xaa is C or S
  MOD_RES (15)..(16)..(17)..(18)..(19): Xaa is A or G
  MOD_RES (20)..(21)..(22)..(23): Xaa is A or G or is absent
PSRVHHRPVQVRKIXXXXXXXXXKKATVRLEEHLEXA

SEQ ID NO: 19476 - protein, 33 aa, Artificial Sequence
  GFR-binding peptide
  MOD_RES (14)..(15)..(16)..(17)..(18): Xaa is A or G
  MOD_RES (19)..(20)..(21)..(22): Xaa is A or G or is absent
VPTGQSNITMQIMXXXXXXXXXLGEMSLEEHSQ

SEQ ID NO: 19477 - protein, 37 aa, Artificial Sequence
  GFR-binding peptide
  MOD_RES (5)..(5): Xaa is C or S
  MOD_RES (19)..(20)..(21)..(22)..(23): Xaa is A or G
  MOD_RES (24)..(25)..(26)..(27): Xaa is A or G or is absent
EGLEXVPTEESNITMQIMXXXXXXXXXLGEMSFLQHN

SEQ ID NO: 19478 - protein, 41 aa, Artificial Sequence
  GFR-binding peptide
  MOD_RES (1)..(38)..(40): Xaa is C or S
  MOD_RES (17)..(18)..(19)..(20)..(21): Xaa is A or G
  MOD_RES (22)..(23)..(24)..(25): Xaa is A or G or is absent
XRPTQVQLRSVKVAKVXXXXXXXXXKEVQVTLEDHLAXKXE

SEQ ID NO: 19479 - protein, 38 aa, Artificial Sequence
  GFR-binding peptide
  MOD_RES (37)..(37): Xaa is C or S
  MOD_RES (16)..(17)..(18)..(19)..(20): Xaa is A or G
  MOD_RES (21)..(22)..(23)..(24): Xaa is A or G or is absent
RPTQVQLRSVKVAKVXXXXXXXXXKEVQVTLEDHLAXK

SEQ ID NO: 19480 - protein, 38 aa, Artificial Sequence
  GFR-binding peptide
  MOD_RES (36)..(38): Xaa is C or S
  MOD_RES (15)..(16)..(17)..(18)..(19): Xaa is A or G
  MOD_RES (20)..(21)..(22)..(23): Xaa is A or G or is absent
PTQVQLRSVKVAKVXXXXXXXXXKEVQVTLEDHLAXKX

SEQ ID NO: 19481 - protein, 41 aa, Artificial Sequence
  GFR-binding peptide
  MOD_RES (4)..(41): Xaa is C or S
  MOD_RES (20)..(21)..(22)..(23)..(24): Xaa is A or G
  MOD_RES (25)..(26)..(27)..(28): Xaa is A or G or is absent
NVQXRPTQVQLRPVQVRKIXXXXXXXXXKKATVTLEDHLAX

SEQ ID NO: 19482 - protein, 37 aa, Artificial Sequence
  GFR-binding peptide
  MOD_RES (4)..(4): Xaa is C or S
  MOD_RES (18)..(19)..(20)..(21)..(22): Xaa is A or G
  MOD_RES (23)..(24)..(25)..(26): Xaa is A or G or is absent
GLEXVPTEERPVQMRKIXXXXXXXXXKKATVFLQHNK

SEQ ID NO: 19483 - protein, 40 aa, Artificial Sequence
  GFR-binding peptide
  MOD_RES (5)..(39): Xaa is C or S
EGLEXVPTEESNITMQIMRIKPHQGQHLGEMSFLQHNKXE

SEQ ID NO: 19484 - protein, 40 aa, Artificial Sequence
  GFR-binding peptide
  MOD_RES (4)..(4): Xaa is C or S
  MOD_RES (20)..(21)..(22)..(23)..(24): Xaa is A or G
  MOD_RES (25)..(26)..(27)..(28): Xaa is A or G or is absent
SVKXQPSRVHHSNITVQIMXXXXXXXXXIGEMSRLEEHLE

SEQ ID NO: 19485 - protein, 39 aa, Artificial Sequence
  GFR-binding peptide
  MOD_RES (3)..(37)..(39): Xaa is C or S
LEXVPTEERSVKMAKVRIKPHQGQHKEVQVFLQHNKXEX

SEQ ID NO: 19486 - protein, 38 aa, Artificial Sequence
  GFR-binding peptide
  MOD_RES (6)..(6): Xaa is C or S
DEGLEXVPTEERPVQMRKIRIKPHQGQHKKATVFLQHN

SEQ ID NO: 19487 - protein, 39 aa, Artificial Sequence
  GFR-binding peptide
  MOD_RES (3)..(3): Xaa is C or S
  MOD_RES (19)..(20)..(21)..(22)..(23): Xaa is A or G
  MOD_RES (24)..(25)..(26)..(27): Xaa is A or G or is absent
VKXQPSRVHHSNITVQIMXXXXXXXXXLGEMSRLEEHLE

SEQ ID NO: 19488 - protein, 43 aa, Artificial Sequence
  GFR-binding peptide
  MOD_RES (6)..(40)..(42): Xaa is C or S
  MOD_RES (20)..(21)..(22)..(23)..(24): Xaa is A or G
  MOD_RES (25)..(26)..(27)..(28): Xaa is A or G or is absent
DEGLEXVPTGQSNITMQIMXXXXXXXXXIGEMSLEEHSQXEXR

SEQ ID NO: 19489 - protein, 41 aa, Artificial Sequence
  GFR-binding peptide
  MOD_RES (6)..(40): Xaa is C or S
DEGLEXVPTGQRPVQMRKIRIKPHQGQHKKATVLEEHSQXE

SEQ ID NO: 19490 - protein, 34 aa, Artificial Sequence
  GFR-binding peptide
  MOD_RES (16)..(17)..(18)..(19)..(20): Xaa is A or G
  MOD_RES (21)..(22)..(23)..(24): Xaa is A or G or is absent
QPSRVHHRPVQVRKIXXXXXXXXXKKATVRLEEH

SEQ ID NO: 19491 - protein, 41 aa, Artificial Sequence
  GFR-binding peptide
  MOD_RES (1)..(38)..(40): Xaa is C or S
  MOD_RES (17)..(18)..(19)..(20)..(21): Xaa is A or G
  MOD_RES (22)..(23)..(24)..(25): Xaa is A or G or is absent
XQPSRVHHRPVQVRKIXXXXXXXXXKKATVRLEEHLEXAXA

SEQ ID NO: 19492 - protein, 36 aa, Artificial Sequence
  GFR-binding peptide
  MOD_RES (34)..(36): Xaa is C or S
VPTGQRSVKMAKVRIKPHQGQHKEVQVLEEHSQXEX

SEQ ID NO: 19493 - protein, 40 aa, Artificial Sequence
  GFR-binding peptide
  MOD_RES (2)..(39): Xaa is C or S
  MOD_RES (18)..(19)..(20)..(21)..(22): Xaa is A or G
  MOD_RES (23)..(24)..(25)..(26): Xaa is A or G or is absent
QXRPTQVQLSNITVQIMXXXXXXXXXIGEMSTLEDHLAXK

SEQ ID NO: 19494 - protein, 40 aa, Artificial Sequence
  GFR-binding peptide
  MOD_RES (3)..(40): Xaa is C or S
  MOD_RES (19)..(20)..(21)..(22)..(23): Xaa is A or G
  MOD_RES (24)..(25)..(26)..(27): Xaa is A or G or is absent
VKXQPSRVHHRPVQVRKIXXXXXXXXXKKATVRLEEHLEX

SEQ ID NO: 19495 - protein, 39 aa, Artificial Sequence
  GFR-binding peptide
  MOD_RES (4)..(4): Xaa is C or S
  MOD_RES (20)..(21)..(22)..(23)..(24): Xaa is A or G
  MOD_RES (25)..(26)..(27)..(28): Xaa is A or G or is absent
SVKXQPSRVHHRPVQVRKIXXXXXXXXXKKATVRLEEHL

SEQ ID NO: 19496 - protein, 32 aa, Artificial Sequence
  GFR-binding peptide
  MOD_RES (14)..(15)..(16)..(17)..(18): Xaa is A or G
  MOD_RES (19)..(20)..(21)..(22): Xaa is A or G or is absent
TQVQLRSVKVAKVXXXXXXXXXKEVQVTLEDH

SEQ ID NO: 19497 - protein, 37 aa, Artificial Sequence
  GFR-binding peptide
  MOD_RES (2)..(2): Xaa is C or S
QXRPTQVQLSNITVQIMEIVRKKPIFIGEMSTLEDHL

SEQ ID NO: 19498 - protein, 40 aa, Artificial Sequence
  GFR-binding peptide
  MOD_RES (4)..(4): Xaa is C or S
  MOD_RES (20)..(21)..(22)..(23)..(24): Xaa is A or G
  MOD_RES (25)..(26)..(27)..(28): Xaa is A or G or is absent
NVQXRPTQVQLRSVKVAKVXXXXXXXXXKEVQVTLEDHLA

SEQ ID NO: 19499 - protein, 40 aa, Artificial Sequence
  GFR-binding peptide
  MOD_RES (4)..(38)..(40): Xaa is C or S
  MOD_RES (18)..(19)..(20)..(21)..(22): Xaa is A or G
  MOD_RES (23)..(24)..(25)..(26): Xaa is A or G or is absent
GLEXVPTGQRSVKMAKVXXXXXXXXXKEVQVLEEHSQXEX

SEQ ID NO: 19500 - protein, 38 aa, Artificial Sequence
  GFR-binding peptide
  MOD_RES (2)..(2): Xaa is C or S
QXRPTQVQLSNITVQIMEIVRKKPIFLGEMSTLEDHLA

SEQ ID NO: 19501 - protein, 42 aa, Artificial Sequence
  GFR-binding peptide
  MOD_RES (4)..(41): Xaa is C or S
NVQXRPTQVQLRSVKVAKVEIVRKKPIFKEVQVTLEDHLAXK

SEQ ID NO: 19502 - protein, 40 aa, Artificial Sequence
  GFR-binding peptide
  MOD_RES (5)..(39): Xaa is C or S
EGLEXVPTEERSVKMAKVRIKPHQGQHKEVQVFLQHNKXE

SEQ ID NO: 19503 - protein, 36 aa, Artificial Sequence
  GFR-binding peptide
  MOD_RES (36)..(36): Xaa is C or S
PSRVHHSNITVQIMEYVRKKPKLLGEMSRLEEHLEX

SEQ ID NO: 19504 - protein, 42 aa, Artificial Sequence
  GFR-binding peptide
  MOD_RES (2)..(39)..(41): Xaa is C or S
QXRPTQVQLRSVKVAKVEIVRKKPIFKEVQVTLEDHLAXKXE

SEQ ID NO: 19505 - protein, 40 aa, Artificial Sequence
  GFR-binding peptide
  MOD_RES (6)..(40): Xaa is C or S
  MOD_RES (20)..(21)..(22)..(23)..(24): Xaa is A or G
  MOD_RES (25)..(26)..(27)..(28): Xaa is A or G or is absent
DEGLEXVPTGQSNITMQIMXXXXXXXXXIGEMSLEEHSQX

SEQ ID NO: 19506 - protein, 34 aa, Artificial Sequence
  GFR-binding peptide
  MOD_RES (1)..(1): Xaa is C or S
XVPTGQRPVQMRKIRIKPHQGQHKKATVLEEHSQ

SEQ ID NO: 19507 - protein, 39 aa, Artificial Sequence
  GFR-binding peptide
  MOD_RES (36)..(38): Xaa is C or S
  MOD_RES (15)..(16)..(17)..(18)..(19): Xaa is A or G
  MOD_RES (20)..(21)..(22)..(23): Xaa is A or G or is absent
PSRVHHRPVQVRKIXXXXXXXXXKKATVRLEEHLEXAXA

SEQ ID NO: 19508 - protein, 36 aa, Artificial Sequence
  GFR-binding peptide
  MOD_RES (16)..(17)..(18)..(19)..(20): Xaa is A or G
  MOD_RES (21)..(22)..(23)..(24): Xaa is A or G or is absent
QPSRVHHSNITVQIMXXXXXXXXXLGEMSRLEEHLE

SEQ ID NO: 19509 - protein, 39 aa, Artificial Sequence
  GFR-binding peptide
  MOD_RES (5)..(39): Xaa is C or S
  MOD_RES (19)..(20)..(21)..(22)..(23): Xaa is A or G
  MOD_RES (24)..(25)..(26)..(27): Xaa is A or G or is absent
EGLEXVPTEESNITMQIMXXXXXXXXXLGEMSFLQHNKX

SEQ ID NO: 19510 - protein, 44 aa, Artificial Sequence
  GFR-binding peptide
  MOD_RES (5)..(42)..(44): Xaa is C or S
  MOD_RES (21)..(22)..(23)..(24)..(25): Xaa is A or G
  MOD_RES (26)..(27)..(28)..(29): Xaa is A or G or is absent
RNVQXRPTQVQLSNITVQIMXXXXXXXXXIGEMSTLEDHLAXKX

SEQ ID NO: 19511 - protein, 44 aa, Artificial Sequence
  GFR-binding peptide
  MOD_RES (5)..(42)..(44): Xaa is C or S
SSVKXQPSRVHHRPVQVRKIEYVRKKPKLKKATVRLEEHLEXAX

SEQ ID NO: 19512 - protein, 38 aa, Artificial Sequence
  GFR-binding peptide
  MOD_RES (35)..(37): Xaa is C or S
  MOD_RES (14)..(15)..(16)..(17)..(18): Xaa is A or G
  MOD_RES (19)..(20)..(21)..(22): Xaa is A or G or is absent
TQVQLRPVQVRKIXXXXXXXXXKKATVTLEDHLAXKXE

SEQ ID NO: 19513 - protein, 37 aa, Artificial Sequence
  GFR-binding peptide
  MOD_RES (4)..(4): Xaa is C or S
  MOD_RES (18)..(19)..(20)..(21)..(22): Xaa is A or G
  MOD_RES (23)..(24)..(25)..(26): Xaa is A or G or is absent
GLEXVPTGQSNITMQIMXXXXXXXXXIGEMSLEEHSQ

SEQ ID NO: 19514 - protein, 38 aa, Artificial Sequence
  GFR-binding peptide
  MOD_RES (36)..(38): Xaa is C or S
  MOD_RES (15)..(16)..(17)..(18)..(19): Xaa is A or G
  MOD_RES (20)..(21)..(22)..(23): Xaa is A or G or is absent
PTQVQLRPVQVRKIXXXXXXXXXKKATVTLEDHLAXKX

SEQ ID NO: 19515 - protein, 41 aa, Artificial Sequence
  GFR-binding peptide
  MOD_RES (5)..(5): Xaa is C or S
SSVKXQPSRVHHSNITVQIMEYVRKKPKLIGEMSRLEEHLE

SEQ ID NO: 19516 - protein, 34 aa, Artificial Sequence
  GFR-binding peptide
  MOD_RES (2)..(2): Xaa is C or S
EXVPTEESNITMQIMRIKPHQGQHLGEMSFLQHN

SEQ ID NO: 19517 - protein, 37 aa, Artificial Sequence
  GFR-binding peptide
  MOD_RES (2)..(2): Xaa is C or S
  MOD_RES (18)..(19)..(20)..(21)..(22): Xaa is A or G
  MOD_RES (23)..(24)..(25)..(26): Xaa is A or G or is absent
KXQPSRVHHSNITVQIMXXXXXXXXXIGEMSRLEEHL

SEQ ID NO: 19518 - protein, 39 aa, Artificial Sequence
  GFR-binding peptide
  MOD_RES (5)..(5): Xaa is C or S
SSVKXQPSRVHHRPVQVRKIEYVRKKPKLKKATVRLEEH

SEQ ID NO: 19519 - protein, 42 aa, Artificial Sequence
  GFR-binding peptide
  MOD_RES (5)..(42): Xaa is C or S
RNVQXRPTQVQLSNITVQIMEIVRKKPIFLGEMSTLEDHLAX

SEQ ID NO: 19520 - protein, 36 aa, Artificial Sequence
  GFR-binding peptide
  MOD_RES (34)..(36): Xaa is C or S
  MOD_RES (14)..(15)..(16)..(17)..(18): Xaa is A or G
  MOD_RES (19)..(20)..(21)..(22): Xaa is A or G or is absent
VPTEERPVQMRKIXXXXXXXXXKKATVFLQHNKXEX

SEQ ID NO: 19521 - protein, 36 aa, Artificial Sequence
  GFR-binding peptide
  MOD_RES (3)..(3): Xaa is C or S
  MOD_RES (17)..(18)..(19)..(20)..(21): Xaa is A or G
  MOD_RES (22)..(23)..(24)..(25): Xaa is A or G or is absent
LEXVPTEESNITMQIMXXXXXXXXXIGEMSFLQHNK

SEQ ID NO: 19522 - protein, 38 aa, Artificial Sequence
  GFR-binding peptide
  MOD_RES (5)..(5): Xaa is C or S
  MOD_RES (19)..(20)..(21)..(22)..(23): Xaa is A or G
  MOD_RES (24)..(25)..(26)..(27): Xaa is A or G or is absent
EGLEXVPTGQRSVKMAKVXXXXXXXXXKEVQVLEEHSQ

SEQ ID NO: 19523 - protein, 39 aa, Artificial Sequence
  GFR-binding peptide
  MOD_RES (2)..(39): Xaa is C or S
KXQPSRVHHSNITVQIMEYVRKKPKLLGEMSRLEEHLEX

SEQ ID NO: 19524 - protein, 43 aa, Artificial Sequence
  GFR-binding peptide
  MOD_RES (4)..(41)..(43): Xaa is C or S
SVKXQPSRVHHRPVQVRKIEYVRKKPKLKKATVRLEEHLEXAX

SEQ ID NO: 19525 - protein, 41 aa, Artificial Sequence
  GFR-binding peptide
  MOD_RES (2)..(39)..(41): Xaa is C or S
  MOD_RES (18)..(19)..(20)..(21)..(22): Xaa is A or G
  MOD_RES (23)..(24)..(25)..(26): Xaa is A or G or is absent
KXQPSRVHHRPVQVRKIXXXXXXXXXKKATVRLEEHLEXAX

SEQ ID NO: 19526 - protein, 34 aa, Artificial Sequence
  GFR-binding peptide
  MOD_RES (34)..(34): Xaa is C or S
VPTGQRPVQMRKIRIKPHQGQHKKATVLEEHSQX

SEQ ID NO: 19527 - protein, 41 aa, Artificial Sequence
  GFR-binding peptide
  MOD_RES (6)..(40): Xaa is C or S
  MOD_RES (20)..(21)..(22)..(23)..(24): Xaa is A or G
  MOD_RES (25)..(26)..(27)..(28): Xaa is A or G or is absent
DEGLEXVPTEERSVKMAKVXXXXXXXXXKEVQVFLQHNKXE

SEQ ID NO: 19528 - protein, 37 aa, Artificial Sequence
  GFR-binding peptide
  MOD_RES (3)..(3): Xaa is C or S
  MOD_RES (19)..(20)..(21)..(22)..(23): Xaa is A or G
  MOD_RES (24)..(25)..(26)..(27): Xaa is A or G or is absent
VKXQPSRVHHRSVKVAKVXXXXXXXXXKEVQVRLEEH

SEQ ID NO: 19529 - protein, 43 aa, Artificial Sequence
  GFR-binding peptide
  MOD_RES (7)..(41)..(43): Xaa is C or S
  MOD_RES (21)..(22)..(23)..(24)..(25): Xaa is A or G
  MOD_RES (26)..(27)..(28)..(29): Xaa is A or G or is absent
NDEGLEXVPTGQSNITMQIMXXXXXXXXXIGEMSLEEHSQXEX

SEQ ID NO: 19530 - protein, 41 aa, Artificial Sequence
  GFR-binding peptide
  MOD_RES (5)..(39)..(41): Xaa is C or S
EGLEXVPTEERSVKMAKVRIKPHQGQHKEVQVFLQHNKXEX

SEQ ID NO: 19531 - protein, 39 aa, Artificial Sequence
  GFR-binding peptide
  MOD_RES (6)..(6): Xaa is C or S
DEGLEXVPTGQRPVQMRKIRIKPHQGQHKKATVLEEHSQ

SEQ ID NO: 19532 - protein, 39 aa, Artificial Sequence
  GFR-binding peptide
  MOD_RES (6)..(6): Xaa is C or S
DEGLEXVPTEESNITMQIMRIKPHQGQHLGEMSFLQHNK

SEQ ID NO: 19533 - protein, 37 aa, Artificial Sequence
  GFR-binding peptide
  MOD_RES (3)..(3): Xaa is C or S
  MOD_RES (19)..(20)..(21)..(22)..(23): Xaa is A or G
  MOD_RES (24)..(25)..(26)..(27): Xaa is A or G or is absent
VKXQPSRVHHRPVQVRKIXXXXXXXXXKKATVRLEEH

SEQ ID NO: 19534 - protein, 39 aa, Artificial Sequence
  GFR-binding peptide
  MOD_RES (1)..(38): Xaa is C or S
  MOD_RES (17)..(18)..(19)..(20)..(21): Xaa is A or G
  MOD_RES (22)..(23)..(24)..(25): Xaa is A or G or is absent
XQPSRVHHRPVQVRKIXXXXXXXXXKKATVRLEEHLEXA

SEQ ID NO: 19535 - protein, 40 aa, Artificial Sequence
  GFR-binding peptide
  MOD_RES (6)..(40): Xaa is C or S
  MOD_RES (20)..(21)..(22)..(23)..(24): Xaa is A or G
  MOD_RES (25)..(26)..(27)..(28): Xaa is A or G or is absent
DEGLEXVPTEERSVKMAKVXXXXXXXXXKEVQVFLQHNKX

SEQ ID NO: 19536 - protein, 43 aa, Artificial Sequence
  GFR-binding peptide
  MOD_RES (3)..(40)..(42): Xaa is C or S
  MOD_RES (19)..(20)..(21)..(22)..(23): Xaa is A or G
  MOD_RES (24)..(25)..(26)..(27): Xaa is A or G or is absent
VQXRPTQVQLRPVQVRKIXXXXXXXXXKKATVTLEDHLAXKXE

SEQ ID NO: 19537 - protein, 37 aa, Artificial Sequence
  GFR-binding peptide
  MOD_RES (2)..(2): Xaa is C or S
KXQPSRVHHSNITVQIMEYVRKKPKLLGEMSRLEEHL

SEQ ID NO: 19538 - protein, 41 aa, Artificial Sequence
  GFR-binding peptide
  MOD_RES (7)..(41): Xaa is C or S
NDEGLEXVPTGQRSVKMAKVRIKPHQGQHKEVQVLEEHSQX

SEQ ID NO: 19539 - protein, 44 aa, Artificial Sequence
  GFR-binding peptide
  MOD_RES (5)..(42)..(44): Xaa is C or S
RNVQXRPTQVQLRSVKVAKVEIVRKKPIFKEVQVTLEDHLAXKX

SEQ ID NO: 19540 - protein, 42 aa, Artificial Sequence
  GFR-binding peptide
  MOD_RES (5)..(42): Xaa is C or S
  MOD_RES (21)..(22)..(23)..(24)..(25): Xaa is A or G
  MOD_RES (26)..(27)..(28)..(29): Xaa is A or G or is absent
RNVQXRPTQVQLRSVKVAKVXXXXXXXXXKEVQVTLEDHLAX

SEQ ID NO: 19541 - protein, 38 aa, Artificial Sequence
  GFR-binding peptide
  MOD_RES (3)..(3): Xaa is C or S
VKXQPSRVHHSNITVQIMEYVRKKPKLIGEMSRLEEHL

SEQ ID NO: 19542 - protein, 38 aa, Artificial Sequence
  GFR-binding peptide
  MOD_RES (35)..(37): Xaa is C or S
  MOD_RES (14)..(15)..(16)..(17)..(18): Xaa is A or G
  MOD_RES (19)..(20)..(21)..(22): Xaa is A or G or is absent
SRVHHRPVQVRKIXXXXXXXXXKKATVRLEEHLEXAXA

SEQ ID NO: 19543 - protein, 40 aa, Artificial Sequence
  GFR-binding peptide
  MOD_RES (3)..(40): Xaa is C or S
  MOD_RES (19)..(20)..(21)..(22)..(23): Xaa is A or G
  MOD_RES (24)..(25)..(26)..(27): Xaa is A or G or is absent
VKXQPSRVHHSNITVQIMXXXXXXXXXLGEMSRLEEHLEX

SEQ ID NO: 19544 - protein, 34 aa, Artificial Sequence
  GFR-binding peptide
SRVHHSNITVQIMEYVRKKPKLIGEMSRLEEHLE

SEQ ID NO: 19545 - protein, 35 aa, Artificial Sequence
  GFR-binding peptide
  MOD_RES (2)..(2): Xaa is C or S
  MOD_RES (16)..(17)..(18)..(19)..(20): Xaa is A or G
  MOD_RES (21)..(22)..(23)..(24): Xaa is A or G or is absent
EXVPTGQRSVKMAKVXXXXXXXXXKEVQVLEEHSQ

SEQ ID NO: 19546 - protein, 37 aa, Artificial Sequence
  GFR-binding peptide
  MOD_RES (34)..(36): Xaa is C or S
VPTEERPVQMRKIRIKPHQGQHKKATVFLQHNKXEXR

SEQ ID NO: 19547 - protein, 37 aa, Artificial Sequence
  GFR-binding peptide
  MOD_RES (34)..(36): Xaa is C or S
  MOD_RES (14)..(15)..(16)..(17)..(18): Xaa is A or G
  MOD_RES (19)..(20)..(21)..(22): Xaa is A or G or is absent
VPTEERSVKMAKVXXXXXXXXXKEVQVFLQHNKXEXR

SEQ ID NO: 19548 - protein, 35 aa, Artificial Sequence
  GFR-binding peptide
  MOD_RES (1)..(1): Xaa is C or S
  MOD_RES (17)..(18)..(19)..(20)..(21): Xaa is A or G
  MOD_RES (22)..(23)..(24)..(25): Xaa is A or G or is absent
XQPSRVHHRPVQVRKIXXXXXXXXXKKATVRLEEH

SEQ ID NO: 19549 - protein, 36 aa, Artificial Sequence
  GFR-binding peptide
  MOD_RES (35)..(35): Xaa is C or S
  MOD_RES (14)..(15)..(16)..(17)..(18): Xaa is A or G
  MOD_RES (19)..(20)..(21)..(22): Xaa is A or G or is absent
TQVQLSNITVQIMXXXXXXXXXIGEMSTLEDHLAXK

SEQ ID NO: 19550 - protein, 38 aa, Artificial Sequence
  GFR-binding peptide
  MOD_RES (3)..(3): Xaa is C or S
  MOD_RES (19)..(20)..(21)..(22)..(23): Xaa is A or G
  MOD_RES (24)..(25)..(26)..(27): Xaa is A or G or is absent
VKXQPSRVHHRSVKVAKVXXXXXXXXXKEVQVRLEEHL

SEQ ID NO: 19551 - protein, 34 aa, Artificial Sequence
  GFR-binding peptide
  MOD_RES (15)..(16)..(17)..(18)..(19): Xaa is A or G
  MOD_RES (20)..(21)..(22)..(23): Xaa is A or G or is absent
PTQVQLRPVQVRKIXXXXXXXXXKKATVTLEDHL

SEQ ID NO: 19552 - protein, 35 aa, Artificial Sequence
  GFR-binding peptide
  MOD_RES (1)..(1): Xaa is C or S
  MOD_RES (17)..(18)..(19)..(20)..(21): Xaa is A or G
  MOD_RES (22)..(23)..(24)..(25): Xaa is A or G or is absent
XQPSRVHHRSVKVAKVXXXXXXXXXKEVQVRLEEH

SEQ ID NO: 19553 - protein, 33 aa, Artificial Sequence
  GFR-binding peptide
PTQVQLRSVKVAKVEIVRKKPIFKEVQVTLEDH

SEQ ID NO: 19554 - protein, 42 aa, Artificial Sequence
  GFR-binding peptide
  MOD_RES (3)..(40)..(42): Xaa is C or S
  MOD_RES (19)..(20)..(21)..(22)..(23): Xaa is A or G
  MOD_RES (24)..(25)..(26)..(27): Xaa is A or G or is absent
VQXRPTQVQLRPVQVRKIXXXXXXXXXKKATVTLEDHLAXKX

SEQ ID NO: 19555 - protein, 38 aa, Artificial Sequence
  GFR-binding peptide
  MOD_RES (1)..(38): Xaa is C or S
  MOD_RES (17)..(18)..(19)..(20)..(21): Xaa is A or G
  MOD_RES (22)..(23)..(24)..(25): Xaa is A or G or is absent
XRPTQVQLRSVKVAKVXXXXXXXXXKEVQVTLEDHLAX

SEQ ID NO: 19556 - protein, 36 aa, Artificial Sequence
  GFR-binding peptide
  MOD_RES (4)..(4): Xaa is C or S
  MOD_RES (18)..(19)..(20)..(21)..(22): Xaa is A or G
  MOD_RES (23)..(24)..(25)..(26): Xaa is A or G or is absent
GLEXVPTEERPVQMRKIXXXXXXXXXKKATVFLQHN

SEQ ID NO: 19557 - protein, 40 aa, Artificial Sequence
  GFR-binding peptide
  MOD_RES (37)..(39): Xaa is C or S
RPTQVQLSNITVQIMEIVRKKPIFIGEMSTLEDHLAXKXE

SEQ ID NO: 19558 - protein, 39 aa, Artificial Sequence
  GFR-binding peptide
  MOD_RES (2)..(36)..(38): Xaa is C or S
  MOD_RES (16)..(17)..(18)..(19)..(20): Xaa is A or G
  MOD_RES (21)..(22)..(23)..(24): Xaa is A or G or is absent
EXVPTEESNITMQIMXXXXXXXXXIGEMSFLQHNKXEXR

SEQ ID NO: 19559 - protein, 42 aa, Artificial Sequence
  GFR-binding peptide
  MOD_RES (2)..(39)..(41): Xaa is C or S
  MOD_RES (18)..(19)..(20)..(21)..(22): Xaa is A or G
  MOD_RES (23)..(24)..(25)..(26): Xaa is A or G or is absent
KXQPSRVHHSNITVQIMXXXXXXXXXLGEMSRLEEHLEXAXA

SEQ ID NO: 19560 - protein, 45 aa, Artificial Sequence
  GFR-binding peptide
  MOD_RES (5)..(42)..(44): Xaa is C or S
SSVKXQPSRVHHSNITVQIMEYVRKKPKLLGEMSRLEEHLEXAXA

SEQ ID NO: 19561 - protein, 34 aa, Artificial Sequence
  GFR-binding peptide
  MOD_RES (34)..(34): Xaa is C or S
VPTGQRSVKMAKVRIKPHQGQHKEVQVLEEHSQX

SEQ ID NO: 19562 - protein, 41 aa, Artificial Sequence
  GFR-binding peptide
  MOD_RES (4)..(38)..(40): Xaa is C or S
  MOD_RES (18)..(19)..(20)..(21)..(22): Xaa is A or G
  MOD_RES (23)..(24)..(25)..(26): Xaa is A or G or is absent
GLEXVPTEERSVKMAKVXXXXXXXXXKEVQVFLQHNKXEXR

SEQ ID NO: 19563 - protein, 38 aa, Artificial Sequence
  GFR-binding peptide
  MOD_RES (3)..(37): Xaa is C or S
LEXVPTGQSNITMQIMRIKPHQGQHIGEMSLEEHSQXE

SEQ ID NO: 19564 - protein, 38 aa, Artificial Sequence
  GFR-binding peptide
  MOD_RES (1)..(35)..(37): Xaa is C or S
XVPTEERSVKMAKVRIKPHQGQHKEVQVFLQHNKXEXR

SEQ ID NO: 19565 - protein, 35 aa, Artificial Sequence
  GFR-binding peptide
  MOD_RES (35)..(35): Xaa is C or S
  MOD_RES (14)..(15)..(16)..(17)..(18): Xaa is A or G
  MOD_RES (19)..(20)..(21)..(22): Xaa is A or G or is absent
SRVHHRSVKVAKVXXXXXXXXXKEVQVRLEEHLEX

SEQ ID NO: 19566 - protein, 40 aa, Artificial Sequence
  GFR-binding peptide
  MOD_RES (37)..(39): Xaa is C or S
  MOD_RES (16)..(17)..(18)..(19)..(20): Xaa is A or G
  MOD_RES (21)..(22)..(23)..(24): Xaa is A or G or is absent
QPSRVHHSNITVQIMXXXXXXXXXIGEMSRLEEHLEXAXA

SEQ ID NO: 19567 - protein, 35 aa, Artificial Sequence
  GFR-binding peptide
  MOD_RES (1)..(1): Xaa is C or S
XRPTQVQLSNITVQIMEIVRKKPIFLGEMSTLEDH

SEQ ID NO: 19568 - protein, 40 aa, Artificial Sequence
  GFR-binding peptide
  MOD_RES (4)..(38)..(40): Xaa is C or S
GLEXVPTEESNITMQIMRIKPHQGQHLGEMSFLQHNKXEX

SEQ ID NO: 19569 - protein, 38 aa, Artificial Sequence
  GFR-binding peptide
  MOD_RES (3)..(37): Xaa is C or S
LEXVPTEERSVKMAKVRIKPHQGQHKEVQVFLQHNKXE

SEQ ID NO: 19570 - protein, 43 aa, Artificial Sequence
  GFR-binding peptide
  MOD_RES (7)..(41)..(43): Xaa is C or S
  MOD_RES (21)..(22)..(23)..(24)..(25): Xaa is A or G
  MOD_RES (26)..(27)..(28)..(29): Xaa is A or G or is absent
NDEGLEXVPTEERPVQMRKIXXXXXXXXXKKATVFLQHNKXEX

SEQ ID NO: 19571 - protein, 33 aa, Artificial Sequence
  GFR-binding peptide
  MOD_RES (1)..(1): Xaa is C or S
  MOD_RES (15)..(16)..(17)..(18)..(19): Xaa is A or G
  MOD_RES (20)..(21)..(22)..(23): Xaa is A or G or is absent
XVPTGQSNITMQIMXXXXXXXXXIGEMSLEEHS

SEQ ID NO: 19572 - protein, 33 aa, Artificial Sequence
  GFR-binding peptide
PTQVQLSNITVQIMEIVRKKPIFLGEMSTLEDH

SEQ ID NO: 19573 - protein, 39 aa, Artificial Sequence
  GFR-binding peptide
  MOD_RES (3)..(3): Xaa is C or S
  MOD_RES (19)..(20)..(21)..(22)..(23): Xaa is A or G
  MOD_RES (24)..(25)..(26)..(27): Xaa is A or G or is absent
VQXRPTQVQLRSVKVAKVXXXXXXXXXKEVQVTLEDHLA

SEQ ID NO: 19574 - protein, 38 aa, Artificial Sequence
  GFR-binding peptide
  MOD_RES (3)..(3): Xaa is C or S
  MOD_RES (19)..(20)..(21)..(22)..(23): Xaa is A or G
  MOD_RES (24)..(25)..(26)..(27): Xaa is A or G or is absent
VQXRPTQVQLSNITVQIMXXXXXXXXXLGEMSTLEDHL

SEQ ID NO: 19575 - protein, 39 aa, Artificial Sequence
  GFR-binding peptide
  MOD_RES (2)..(36)..(38): Xaa is C or S
EXVPTEERSVKMAKVRIKPHQGQHKEVQVFLQHNKXEXR

SEQ ID NO: 19576 - protein, 40 aa, Artificial Sequence
  GFR-binding peptide
  MOD_RES (2)..(39): Xaa is C or S
KXQPSRVHHSNITVQIMEYVRKKPKLIGEMSRLEEHLEXA

SEQ ID NO: 19577 - protein, 36 aa, Artificial Sequence
  GFR-binding peptide
  MOD_RES (34)..(36): Xaa is C or S
VPTGQRPVQMRKIRIKPHQGQHKKATVLEEHSQXEX

SEQ ID NO: 19578 - protein, 35 aa, Artificial Sequence
  GFR-binding peptide
PSRVHHSNITVQIMEYVRKKPKLLGEMSRLEEHLE

SEQ ID NO: 19579 - protein, 38 aa, Artificial Sequence
  GFR-binding peptide
  MOD_RES (4)..(4): Xaa is C or S
  MOD_RES (20)..(21)..(22)..(23)..(24): Xaa is A or G
  MOD_RES (25)..(26)..(27)..(28): Xaa is A or G or is absent
NVQXRPTQVQLRSVKVAKVXXXXXXXXXKEVQVTLEDH

SEQ ID NO: 19580 - protein, 36 aa, Artificial Sequence
  GFR-binding peptide
  MOD_RES (2)..(2): Xaa is C or S
  MOD_RES (18)..(19)..(20)..(21)..(22): Xaa is A or G
  MOD_RES (23)..(24)..(25)..(26): Xaa is A or G or is absent
QXRPTQVQLSNITVQIMXXXXXXXXXLGEMSTLEDH

SEQ ID NO: 19581 - protein, 39 aa, Artificial Sequence
  GFR-binding peptide
  MOD_RES (3)..(3): Xaa is C or S
  MOD_RES (19)..(20)..(21)..(22)..(23): Xaa is A or G
  MOD_RES (24)..(25)..(26)..(27): Xaa is A or G or is absent
VKXQPSRVHHRPVQVRKIXXXXXXXXXKKATVRLEEHLE

SEQ ID NO: 19582 - protein, 39 aa, Artificial Sequence
  GFR-binding peptide
  MOD_RES (5)..(39): Xaa is C or S
  MOD_RES (19)..(20)..(21)..(22)..(23): Xaa is A or G
  MOD_RES (24)..(25)..(26)..(27): Xaa is A or G or is absent
EGLEXVPTGQRPVQMRKIXXXXXXXXXKKATVLEEHSQX

SEQ ID NO: 19583 - protein, 44 aa, Artificial Sequence
  GFR-binding peptide
  MOD_RES (7)..(41)..(43): Xaa is C or S
  MOD_RES (21)..(22)..(23)..(24)..(25): Xaa is A or G
  MOD_RES (26)..(27)..(28)..(29): Xaa is A or G or is absent
NDEGLEXVPTGQRSVKMAKVXXXXXXXXXKEVQVLEEHSQXEXR

SEQ ID NO: 19584 - protein, 42 aa, Artificial Sequence
  GFR-binding peptide
  MOD_RES (7)..(41): Xaa is C or S
  MOD_RES (21)..(22)..(23)..(24)..(25): Xaa is A or G
  MOD_RES (26)..(27)..(28)..(29): Xaa is A or G or is absent
NDEGLEXVPTGQRSVKMAKVXXXXXXXXXKEVQVLEEHSQXE

SEQ ID NO: 19585 - protein, 39 aa, Artificial Sequence
  GFR-binding peptide
  MOD_RES (2)..(39): Xaa is C or S
  MOD_RES (18)..(19)..(20)..(21)..(22): Xaa is A or G
  MOD_RES (23)..(24)..(25)..(26): Xaa is A or G or is absent
QXRPTQVQLRPVQVRKIXXXXXXXXXKKATVTLEDHLAX

SEQ ID NO: 19586 - protein, 32 aa, Artificial Sequence
  GFR-binding peptide
VPTGQRPVQMRKIRIKPHQGQHKKATVLEEHS

SEQ ID NO: 19587 - protein, 44 aa, Artificial Sequence
  GFR-binding peptide
  MOD_RES (4)..(41)..(43): Xaa is C or S
SVKXQPSRVHHRPVQVRKIEYVRKKPKLKKATVRLEEHLEXAXA

SEQ ID NO: 19588 - protein, 36 aa, Artificial Sequence
  GFR-binding peptide
  MOD_RES (2)..(36): Xaa is C or S
  MOD_RES (16)..(17)..(18)..(19)..(20): Xaa is A or G
  MOD_RES (21)..(22)..(23)..(24): Xaa is A or G or is absent
EXVPTEESNITMQIMXXXXXXXXXLGEMSFLQHNKX

SEQ ID NO: 19589 - protein, 33 aa, Artificial Sequence
  GFR-binding peptide
  MOD_RES (14)..(15)..(16)..(17)..(18): Xaa is A or G
  MOD_RES (19)..(20)..(21)..(22): Xaa is A or G or is absent
TQVQLRPVQVRKIXXXXXXXXXKKATVTLEDHL

SEQ ID NO: 19590 - protein, 38 aa, Artificial Sequence
  GFR-binding peptide
  MOD_RES (2)..(36)..(38): Xaa is C or S
  MOD_RES (16)..(17)..(18)..(19)..(20): Xaa is A or G
  MOD_RES (21)..(22)..(23)..(24): Xaa is A or G or is absent
EXVPTEESNITMQIMXXXXXXXXXLGEMSFLQHNKXEX

SEQ ID NO: 19591 - protein, 36 aa, Artificial Sequence
  GFR-binding peptide
  MOD_RES (16)..(17)..(18)..(19)..(20): Xaa is A or G
  MOD_RES (21)..(22)..(23)..(24): Xaa is A or G or is absent
QPSRVHHRPVQVRKIXXXXXXXXXKKATVRLEEHLE

SEQ ID NO: 19592 - protein, 33 aa, Artificial Sequence
  GFR-binding peptide
  MOD_RES (15)..(16)..(17)..(18)..(19): Xaa is A or G
  MOD_RES (20)..(21)..(22)..(23): Xaa is A or G or is absent
PTQVQLSNITVQIMXXXXXXXXXLGEMSTLEDH

SEQ ID NO: 19593 - protein, 38 aa, Artificial Sequence
  GFR-binding peptide
  MOD_RES (1)..(38): Xaa is C or S
XRPTQVQLSNITVQIMEIVRKKPIFLGEMSTLEDHLAX

SEQ ID NO: 19594 - protein, 42 aa, Artificial Sequence
  GFR-binding peptide
  MOD_RES (3)..(40)..(42): Xaa is C or S
VQXRPTQVQLSNITVQIMEIVRKKPIFLGEMSTLEDHLAXKX

SEQ ID NO: 19595 - protein, 40 aa, Artificial Sequence
  GFR-binding peptide
  MOD_RES (6)..(40): Xaa is C or S
DEGLEXVPTEESNITMQIMRIKPHQGQHLGEMSFLQHNKX

SEQ ID NO: 19596 - protein, 37 aa, Artificial Sequence
  GFR-binding peptide
  MOD_RES (2)..(36): Xaa is C or S
  MOD_RES (16)..(17)..(18)..(19)..(20): Xaa is A or G
  MOD_RES (21)..(22)..(23)..(24): Xaa is A or G or is absent
EXVPTGQRSVKMAKVXXXXXXXXXKEVQVLEEHSQXE

SEQ ID NO: 19597 - protein, 42 aa, Artificial Sequence
  GFR-binding peptide
  MOD_RES (2)..(39)..(41): Xaa is C or S
  MOD_RES (18)..(19)..(20)..(21)..(22): Xaa is A or G
  MOD_RES (23)..(24)..(25)..(26): Xaa is A or G or is absent
KXQPSRVHHRPVQVRKIXXXXXXXXXKKATVRLEEHLEXAXA

SEQ ID NO: 19598 - protein, 38 aa, Artificial Sequence
  GFR-binding peptide
  MOD_RES (4)..(4): Xaa is C or S
  MOD_RES (20)..(21)..(22)..(23)..(24): Xaa is A or G
  MOD_RES (25)..(26)..(27)..(28): Xaa is A or G or is absent
NVQXRPTQVQLRPVQVRKIXXXXXXXXXKKATVTLEDH

SEQ ID NO: 19599 - protein, 37 aa, Artificial Sequence
  GFR-binding peptide
  MOD_RES (3)..(37): Xaa is C or S
LEXVPTEERSVKMAKVRIKPHQGQHKEVQVFLQHNKX

SEQ ID NO: 19600 - protein, 40 aa, Artificial Sequence
  GFR-binding peptide
  MOD_RES (3)..(37)..(39): Xaa is C or S
  MOD_RES (17)..(18)..(19)..(20)..(21): Xaa is A or G
  MOD_RES (22)..(23)..(24)..(25): Xaa is A or G or is absent
LEXVPTGQRSVKMAKVXXXXXXXXXKEVQVLEEHSQXEXR

SEQ ID NO: 19601 - protein, 37 aa, Artificial Sequence
  GFR-binding peptide
  MOD_RES (5)..(5): Xaa is C or S
  MOD_RES (19)..(20)..(21)..(22)..(23): Xaa is A or G
  MOD_RES (24)..(25)..(26)..(27): Xaa is A or G or is absent
EGLEXVPTEERSVKMAKVXXXXXXXXXKEVQVFLQHN

SEQ ID NO: 19602 - protein, 41 aa, Artificial Sequence
  GFR-binding peptide
  MOD_RES (4)..(41): Xaa is C or S
NVQXRPTQVQLRSVKVAKVEIVRKKPIFKEVQVTLEDHLAX

SEQ ID NO: 19603 - protein, 39 aa, Artificial Sequence
  GFR-binding peptide
  MOD_RES (7)..(7): Xaa is C or S
  MOD_RES (21)..(22)..(23)..(24)..(25): Xaa is A or G
  MOD_RES (26)..(27)..(28)..(29): Xaa is A or G or is absent
NDEGLEXVPTEERPVQMRKIXXXXXXXXXKKATVFLQHN

SEQ ID NO: 19604 - protein, 40 aa, Artificial Sequence
  GFR-binding peptide
  MOD_RES (4)..(38)..(40): Xaa is C or S
GLEXVPTEERSVKMAKVRIKPHQGQHKEVQVFLQHNKXEX

SEQ ID NO: 19605 - protein, 39 aa, Artificial Sequence
  GFR-binding peptide
  MOD_RES (5)..(39): Xaa is C or S
  MOD_RES (19)..(20)..(21)..(22)..(23): Xaa is A or G
  MOD_RES (24)..(25)..(26)..(27): Xaa is A or G or is absent
EGLEXVPTGQRSVKMAKVXXXXXXXXXKEVQVLEEHSQX

SEQ ID NO: 19606 - protein, 43 aa, Artificial Sequence
  GFR-binding peptide
  MOD_RES (6)..(40)..(42): Xaa is C or S
  MOD_RES (20)..(21)..(22)..(23)..(24): Xaa is A or G
  MOD_RES (25)..(26)..(27)..(28): Xaa is A or G or is absent
DEGLEXVPTEESNITMQIMXXXXXXXXXLGEMSFLQHNKXEXR

SEQ ID NO: 19607 - protein, 35 aa, Artificial Sequence
  GFR-binding peptide
  MOD_RES (1)..(35): Xaa is C or S
XVPTGQRPVQMRKIRIKPHQGQHKKATVLEEHSQX

SEQ ID NO: 19608 - protein, 38 aa, Artificial Sequence
  GFR-binding peptide
  MOD_RES (37)..(37): Xaa is C or S
RPTQVQLRSVKVAKVEIVRKKPIFKEVQVTLEDHLAXK

SEQ ID NO: 19609 - protein, 40 aa, Artificial Sequence
  GFR-binding peptide
  MOD_RES (2)..(39): Xaa is C or S
  MOD_RES (18)..(19)..(20)..(21)..(22): Xaa is A or G
  MOD_RES (23)..(24)..(25)..(26): Xaa is A or G or is absent
QXRPTQVQLSNITVQIMXXXXXXXXXLGEMSTLEDHLAXK

SEQ ID NO: 19610 - protein, 39 aa, Artificial Sequence
  GFR-binding peptide
  MOD_RES (7)..(7): Xaa is C or S
  MOD_RES (21)..(22)..(23)..(24)..(25): Xaa is A or G
  MOD_RES (26)..(27)..(28)..(29): Xaa is A or G or is absent
NDEGLEXVPTGQSNITMQIMXXXXXXXXXIGEMSLEEHS

SEQ ID NO: 19611 - protein, 40 aa, Artificial Sequence
  GFR-binding peptide
  MOD_RES (37)..(39): Xaa is C or S
  MOD_RES (16)..(17)..(18)..(19)..(20): Xaa is A or G
  MOD_RES (21)..(22)..(23)..(24): Xaa is A or G or is absent
RPTQVQLSNITVQIMXXXXXXXXXIGEMSTLEDHLAXKXE

SEQ ID NO: 19612 - protein, 38 aa, Artificial Sequence
  GFR-binding peptide
  MOD_RES (36)..(38): Xaa is C or S
PSRVHHSNITVQIMEYVRKKPKLLGEMSRLEEHLEXAX

SEQ ID NO: 19613 - protein, 39 aa, Artificial Sequence
  GFR-binding peptide
  MOD_RES (6)..(6): Xaa is C or S
  MOD_RES (20)..(21)..(22)..(23)..(24): Xaa is A or G
  MOD_RES (25)..(26)..(27)..(28): Xaa is A or G or is absent
DEGLEXVPTEERPVQMRKIXXXXXXXXXKKATVFLQHNK

SEQ ID NO: 19614 - protein, 42 aa, Artificial Sequence
  GFR-binding peptide
  MOD_RES (6)..(40)..(42): Xaa is C or S
  MOD_RES (20)..(21)..(22)..(23)..(24): Xaa is A or G
  MOD_RES (25)..(26)..(27)..(28): Xaa is A or G or is absent
DEGLEXVPTGQSNITMQIMXXXXXXXXXLGEMSLEEHSQXEX

SEQ ID NO: 19615 - protein, 34 aa, Artificial Sequence
  GFR-binding peptide
  MOD_RES (2)..(2): Xaa is C or S
EXVPTEERSVKMAKVRIKPHQGQHKEVQVFLQHN

SEQ ID NO: 19616 - protein, 38 aa, Artificial Sequence
  GFR-binding peptide
  MOD_RES (36)..(38): Xaa is C or S
  MOD_RES (15)..(16)..(17)..(18)..(19): Xaa is A or G
  MOD_RES (20)..(21)..(22)..(23): Xaa is A or G or is absent
PTQVQLSNITVQIMXXXXXXXXXIGEMSTLEDHLAXKX

SEQ ID NO: 19617 - protein, 35 aa, Artificial Sequence
  GFR-binding peptide
  MOD_RES (34)..(34): Xaa is C or S
  MOD_RES (14)..(15)..(16)..(17)..(18): Xaa is A or G
  MOD_RES (19)..(20)..(21)..(22): Xaa is A or G or is absent
VPTGQRPVQMRKIXXXXXXXXXKKATVLEEHSQXE

SEQ ID NO: 19618 - protein, 36 aa, Artificial Sequence
  GFR-binding peptide
QPSRVHHRPVQVRKIEYVRKKPKLKKATVRLEEHLE

SEQ ID NO: 19619 - protein, 36 aa, Artificial Sequence
  GFR-binding peptide
  MOD_RES (36)..(36): Xaa is C or S
PSRVHHRPVQVRKIEYVRKKPKLKKATVRLEEHLEX

SEQ ID NO: 19620 - protein, 38 aa, Artificial Sequence
  GFR-binding peptide
  MOD_RES (4)..(38): Xaa is C or S
  MOD_RES (18)..(19)..(20)..(21)..(22): Xaa is A or G
  MOD_RES (23)..(24)..(25)..(26): Xaa is A or G or is absent
GLEXVPTEERPVQMRKIXXXXXXXXXKKATVFLQHNKX

SEQ ID NO: 19621 - protein, 33 aa, Artificial Sequence
  GFR-binding peptide
PSRVHHRPVQVRKIEYVRKKPKLKKATVRLEEH

SEQ ID NO: 19622 - protein, 39 aa, Artificial Sequence
  GFR-binding peptide
  MOD_RES (6)..(6): Xaa is C or S
  MOD_RES (20)..(21)..(22)..(23)..(24): Xaa is A or G
  MOD_RES (25)..(26)..(27)..(28): Xaa is A or G or is absent
DEGLEXVPTEESNITMQIMXXXXXXXXXIGEMSFLQHNK

SEQ ID NO: 19623 - protein, 35 aa, Artificial Sequence
  GFR-binding peptide
  MOD_RES (3)..(3): Xaa is C or S
LEXVPTGQRSVKMAKVRIKPHQGQHKEVQVLEEHS

SEQ ID NO: 19624 - protein, 32 aa, Artificial Sequence
  GFR-binding peptide
  MOD_RES (14)..(15)..(16)..(17)..(18): Xaa is A or G
  MOD_RES (19)..(20)..(21)..(22): Xaa is A or G or is absent
VPTGQSNITMQIMXXXXXXXXXIGEMSLEEHS

SEQ ID NO: 19625 - protein, 34 aa, Artificial Sequence
  GFR-binding peptide
  MOD_RES (1)..(1): Xaa is C or S
XVPTEERPVQMRKIRIKPHQGQHKKATVFLQHNK

SEQ ID NO: 19626 - protein, 35 aa, Artificial Sequence
  GFR-binding peptide
  MOD_RES (35)..(35): Xaa is C or S
  MOD_RES (14)..(15)..(16)..(17)..(18): Xaa is A or G
  MOD_RES (19)..(20)..(21)..(22): Xaa is A or G or is absent
SRVHHRPVQVRKIXXXXXXXXXKKATVRLEEHLEX

SEQ ID NO: 19627 - protein, 36 aa, Artificial Sequence
  GFR-binding peptide
RPTQVQLSNITVQIMEIVRKKPIFLGEMSTLEDHLA

SEQ ID NO: 19628 - protein, 44 aa, Artificial Sequence
  GFR-binding peptide
  MOD_RES (4)..(41)..(43): Xaa is C or S
NVQXRPTQVQLRSVKVAKVEIVRKKPIFKEVQVTLEDHLAXKXE

SEQ ID NO: 19629 - protein, 37 aa, Artificial Sequence
  GFR-binding peptide
  MOD_RES (5)..(5): Xaa is C or S
  MOD_RES (19)..(20)..(21)..(22)..(23): Xaa is A or G
  MOD_RES (24)..(25)..(26)..(27): Xaa is A or G or is absent
EGLEXVPTGQRPVQMRKIXXXXXXXXXKKATVLEEHS

SEQ ID NO: 19630 - protein, 43 aa, Artificial Sequence
  GFR-binding peptide
  MOD_RES (5)..(42): Xaa is C or S
  MOD_RES (21)..(22)..(23)..(24)..(25): Xaa is A or G
  MOD_RES (26)..(27)..(28)..(29): Xaa is A or G or is absent
RNVQXRPTQVQLSNITVQIMXXXXXXXXXIGEMSTLEDHLAXK

SEQ ID NO: 19631 - protein, 36 aa, Artificial Sequence
  GFR-binding peptide
  MOD_RES (2)..(36): Xaa is C or S
  MOD_RES (16)..(17)..(18)..(19)..(20): Xaa is A or G
  MOD_RES (21)..(22)..(23)..(24): Xaa is A or G or is absent
EXVPTGQRSVKMAKVXXXXXXXXXKEVQVLEEHSQX

SEQ ID NO: 19632 - protein, 44 aa, Artificial Sequence
  GFR-binding peptide
  MOD_RES (4)..(41)..(43): Xaa is C or S
SVKXQPSRVHHSNITVQIMEYVRKKPKLLGEMSRLEEHLEXAXA

SEQ ID NO: 19633 - protein, 40 aa, Artificial Sequence
  GFR-binding peptide
  MOD_RES (4)..(4): Xaa is C or S
NVQXRPTQVQLRSVKVAKVEIVRKKPIFKEVQVTLEDHLA

SEQ ID NO: 19634 - protein, 37 aa, Artificial Sequence
  GFR-binding peptide
  MOD_RES (3)..(37): Xaa is C or S
  MOD_RES (17)..(18)..(19)..(20)..(21): Xaa is A or G
  MOD_RES (22)..(23)..(24)..(25): Xaa is A or G or is absent
LEXVPTGQSNITMQIMXXXXXXXXXLGEMSLEEHSQX

SEQ ID NO: 19635 - protein, 38 aa, Artificial Sequence
  GFR-binding peptide
  MOD_RES (3)..(3): Xaa is C or S
  MOD_RES (19)..(20)..(21)..(22)..(23): Xaa is A or G
  MOD_RES (24)..(25)..(26)..(27): Xaa is A or G or is absent
VQXRPTQVQLRSVKVAKVXXXXXXXXXKEVQVTLEDHL

SEQ ID NO: 19636 - protein, 36 aa, Artificial Sequence
  GFR-binding peptide
  MOD_RES (34)..(36): Xaa is C or S
  MOD_RES (14)..(15)..(16)..(17)..(18): Xaa is A or G
  MOD_RES (19)..(20)..(21)..(22): Xaa is A or G or is absent
VPTEERSVKMAKVXXXXXXXXXKEVQVFLQHNKXEX

SEQ ID NO: 19637 - protein, 41 aa, Artificial Sequence
  GFR-binding peptide
  MOD_RES (3)..(40): Xaa is C or S
VKXQPSRVHHRPVQVRKIEYVRKKPKLKKATVRLEEHLEXA

SEQ ID NO: 19638 - protein, 36 aa, Artificial Sequence
  GFR-binding peptide
  MOD_RES (2)..(2): Xaa is C or S
  MOD_RES (18)..(19)..(20)..(21)..(22): Xaa is A or G
  MOD_RES (23)..(24)..(25)..(26): Xaa is A or G or is absent
KXQPSRVHHSNITVQIMXXXXXXXXXIGEMSRLEEH

SEQ ID NO: 19639 - protein, 41 aa, Artificial Sequence
  GFR-binding peptide
  MOD_RES (1)..(38)..(40): Xaa is C or S
XQPSRVHHSNITVQIMEYVRKKPKLLGEMSRLEEHLEXAXA

SEQ ID NO: 19640 - protein, 44 aa, Artificial Sequence
  GFR-binding peptide
  MOD_RES (5)..(42)..(44): Xaa is C or S
  MOD_RES (21)..(22)..(23)..(24)..(25): Xaa is A or G
  MOD_RES (26)..(27)..(28)..(29): Xaa is A or G or is absent
SSVKXQPSRVHHRPVQVRKIXXXXXXXXXKKATVRLEEHLEXAX

SEQ ID NO: 19641 - protein, 39 aa, Artificial Sequence
  GFR-binding peptide
  MOD_RES (4)..(38): Xaa is C or S
  MOD_RES (18)..(19)..(20)..(21)..(22): Xaa is A or G
  MOD_RES (23)..(24)..(25)..(26): Xaa is A or G or is absent
GLEXVPTGQRPVQMRKIXXXXXXXXXKKATVLEEHSQXE

SEQ ID NO: 19642 - protein, 38 aa, Artificial Sequence
  GFR-binding peptide
  MOD_RES (6)..(6): Xaa is C or S
DEGLEXVPTEERSVKMAKVRIKPHQGQHKEVQVFLQHN

SEQ ID NO: 19643 - protein, 39 aa, Artificial Sequence
  GFR-binding peptide
  MOD_RES (7)..(7): Xaa is C or S
NDEGLEXVPTGQRPVQMRKIRIKPHQGQHKKATVLEEHS

SEQ ID NO: 19644 - protein, 38 aa, Artificial Sequence
  GFR-binding peptide
  MOD_RES (1)..(35)..(37): Xaa is C or S
  MOD_RES (15)..(16)..(17)..(18)..(19): Xaa is A or G
  MOD_RES (20)..(21)..(22)..(23): Xaa is A or G or is absent
XVPTEESNITMQIMXXXXXXXXXIGEMSFLQHNKXEXR

SEQ ID NO: 19645 - protein, 34 aa, Artificial Sequence
  GFR-binding peptide
  MOD_RES (2)..(2): Xaa is C or S
EXVPTGQRPVQMRKIRIKPHQGQHKKATVLEEHS

SEQ ID NO: 19646 - protein, 44 aa, Artificial Sequence
  GFR-binding peptide
  MOD_RES (4)..(41)..(43): Xaa is C or S
  MOD_RES (20)..(21)..(22)..(23)..(24): Xaa is A or G
  MOD_RES (25)..(26)..(27)..(28): Xaa is A or G or is absent
SVKXQPSRVHHSNITVQIMXXXXXXXXXIGEMSRLEEHLEXAXA

SEQ ID NO: 19647 - protein, 35 aa, Artificial Sequence
  GFR-binding peptide
  MOD_RES (3)..(3): Xaa is C or S
  MOD_RES (17)..(18)..(19)..(20)..(21): Xaa is A or G
  MOD_RES (22)..(23)..(24)..(25): Xaa is A or G or is absent
LEXVPTGQRPVQMRKIXXXXXXXXXKKATVLEEHS

SEQ ID NO: 19648 - protein, 37 aa, Artificial Sequence
  GFR-binding peptide
  MOD_RES (35)..(37): Xaa is C or S
SRVHHSNITVQIMEYVRKKPKLIGEMSRLEEHLEXAX

SEQ ID NO: 19649 - protein, 40 aa, Artificial Sequence
  GFR-binding peptide
  MOD_RES (3)..(37)..(39): Xaa is C or S
  MOD_RES (17)..(18)..(19)..(20)..(21): Xaa is A or G
  MOD_RES (22)..(23)..(24)..(25): Xaa is A or G or is absent
LEXVPTEESNITMQIMXXXXXXXXXIGEMSFLQHNKXEXR

SEQ ID NO: 19650 - protein, 36 aa, Artificial Sequence
  GFR-binding peptide
  MOD_RES (36)..(36): Xaa is C or S
  MOD_RES (15)..(16)..(17)..(18)..(19): Xaa is A or G
  MOD_RES (20)..(21)..(22)..(23): Xaa is A or G or is absent
PTQVQLRPVQVRKIXXXXXXXXXKKATVTLEDHLAX

SEQ ID NO: 19651 - protein, 44 aa, Artificial Sequence
  GFR-binding peptide
  MOD_RES (7)..(41)..(43): Xaa is C or S
  MOD_RES (21)..(22)..(23)..(24)..(25): Xaa is A or G
  MOD_RES (26)..(27)..(28)..(29): Xaa is A or G or is absent
NDEGLEXVPTEESNITMQIMXXXXXXXXXIGEMSFLQHNKXEXR

SEQ ID NO: 19652 - protein, 36 aa, Artificial Sequence
  GFR-binding peptide
  MOD_RES (1)..(35): Xaa is C or S
  MOD_RES (15)..(16)..(17)..(18)..(19): Xaa is A or G
  MOD_RES (20)..(21)..(22)..(23): Xaa is A or G or is absent
XVPTEERSVKMAKVXXXXXXXXXKEVQVFLQHNKXE

SEQ ID NO: 19653 - protein, 40 aa, Artificial Sequence
  GFR-binding peptide
  MOD_RES (7)..(7): Xaa is C or S
NDEGLEXVPTEESNITMQIMRIKPHQGQHLGEMSFLQHNK

SEQ ID NO: 19654 - protein, 37 aa, Artificial Sequence
  GFR-binding peptide
  MOD_RES (5)..(5): Xaa is C or S
EGLEXVPTGQRSVKMAKVRIKPHQGQHKEVQVLEEHS

SEQ ID NO: 19655 - protein, 40 aa, Artificial Sequence
  GFR-binding peptide
  MOD_RES (5)..(39): Xaa is C or S
EGLEXVPTGQSNITMQIMRIKPHQGQHIGEMSLEEHSQXE

SEQ ID NO: 19656 - protein, 41 aa, Artificial Sequence
  GFR-binding peptide
  MOD_RES (6)..(40): Xaa is C or S
DEGLEXVPTGQRSVKMAKVRIKPHQGQHKEVQVLEEHSQXE

SEQ ID NO: 19657 - protein, 41 aa, Artificial Sequence
  GFR-binding peptide
  MOD_RES (4)..(41): Xaa is C or S
NVQXRPTQVQLSNITVQIMEIVRKKPIFLGEMSTLEDHLAX

SEQ ID NO: 19658 - protein, 43 aa, Artificial Sequence
  GFR-binding peptide
  MOD_RES (4)..(41)..(43): Xaa is C or S
  MOD_RES (20)..(21)..(22)..(23)..(24): Xaa is A or G
  MOD_RES (25)..(26)..(27)..(28): Xaa is A or G or is absent
NVQXRPTQVQLSNITVQIMXXXXXXXXXIGEMSTLEDHLAXKX

SEQ ID NO: 19659 - protein, 41 aa, Artificial Sequence
  GFR-binding peptide
  MOD_RES (4)..(41): Xaa is C or S
  MOD_RES (20)..(21)..(22)..(23)..(24): Xaa is A or G
  MOD_RES (25)..(26)..(27)..(28): Xaa is A or G or is absent
NVQXRPTQVQLSNITVQIMXXXXXXXXXLGEMSTLEDHLAX

SEQ ID NO: 19660 - protein, 43 aa, Artificial Sequence
  GFR-binding peptide
  MOD_RES (6)..(40)..(42): Xaa is C or S
  MOD_RES (20)..(21)..(22)..(23)..(24): Xaa is A or G
  MOD_RES (25)..(26)..(27)..(28): Xaa is A or G or is absent
DEGLEXVPTGQRSVKMAKVXXXXXXXXXKEVQVLEEHSQXEXR

SEQ ID NO: 19661 - protein, 36 aa, Artificial Sequence
  GFR-binding peptide
  MOD_RES (1)..(1): Xaa is C or S
  MOD_RES (17)..(18)..(19)..(20)..(21): Xaa is A or G
  MOD_RES (22)..(23)..(24)..(25): Xaa is A or G or is absent
XRPTQVQLRSVKVAKVXXXXXXXXXKEVQVTLEDHL

SEQ ID NO: 19662 - protein, 33 aa, Artificial Sequence
  GFR-binding peptide
  MOD_RES (15)..(16)..(17)..(18)..(19): Xaa is A or G
  MOD_RES (20)..(21)..(22)..(23): Xaa is A or G or is absent
PSRVHHSNITVQIMXXXXXXXXXLGEMSRLEEH

SEQ ID NO: 19663 - protein, 38 aa, Artificial Sequence
  GFR-binding peptide
  MOD_RES (5)..(5): Xaa is C or S
  MOD_RES (19)..(20)..(21)..(22)..(23): Xaa is A or G
  MOD_RES (24)..(25)..(26)..(27): Xaa is A or G or is absent
EGLEXVPTEERSVKMAKVXXXXXXXXXKEVQVFLQHNK

SEQ ID NO: 19664 - protein, 36 aa, Artificial Sequence
  GFR-binding peptide
  MOD_RES (36)..(36): Xaa is C or S
PTQVQLSNITVQIMEIVRKKPIFLGEMSTLEDHLAX

SEQ ID NO: 19665 - protein, 40 aa, Artificial Sequence
  GFR-binding peptide
  MOD_RES (6)..(40): Xaa is C or S
  MOD_RES (20)..(21)..(22)..(23)..(24): Xaa is A or G
  MOD_RES (25)..(26)..(27)..(28): Xaa is A or G or is absent
DEGLEXVPTEESNITMQIMXXXXXXXXXIGEMSFLQHNKX

SEQ ID NO: 19666 - protein, 42 aa, Artificial Sequence
  GFR-binding peptide
  MOD_RES (7)..(41): Xaa is C or S
NDEGLEXVPTGQSNITMQIMRIKPHQGQHIGEMSLEEHSQXE

SEQ ID NO: 19667 - protein, 40 aa, Artificial Sequence
  GFR-binding peptide
  MOD_RES (5)..(5): Xaa is C or S
  MOD_RES (21)..(22)..(23)..(24)..(25): Xaa is A or G
  MOD_RES (26)..(27)..(28)..(29): Xaa is A or G or is absent
RNVQXRPTQVQLRSVKVAKVXXXXXXXXXKEVQVTLEDHL

SEQ ID NO: 19668 - protein, 39 aa, Artificial Sequence
  GFR-binding peptide
  MOD_RES (37)..(39): Xaa is C or S
  MOD_RES (16)..(17)..(18)..(19)..(20): Xaa is A or G
  MOD_RES (21)..(22)..(23)..(24): Xaa is A or G or is absent
RPTQVQLSNITVQIMXXXXXXXXXLGEMSTLEDHLAXKX

SEQ ID NO: 19669 - protein, 38 aa, Artificial Sequence
  GFR-binding peptide
  MOD_RES (36)..(38): Xaa is C or S
PTQVQLSNITVQIMEIVRKKPIFLGEMSTLEDHLAXKX

SEQ ID NO: 19670 - protein, 39 aa, Artificial Sequence
  GFR-binding peptide
  MOD_RES (3)..(37)..(39): Xaa is C or S
  MOD_RES (17)..(18)..(19)..(20)..(21): Xaa is A or G
  MOD_RES (22)..(23)..(24)..(25): Xaa is A or G or is absent
LEXVPTGQRPVQMRKIXXXXXXXXXKKATVLEEHSQXEX

SEQ ID NO: 19671 - protein, 43 aa, Artificial Sequence
  GFR-binding peptide
  MOD_RES (6)..(40)..(42): Xaa is C or S
  MOD_RES (20)..(21)..(22)..(23)..(24): Xaa is A or G
  MOD_RES (25)..(26)..(27)..(28): Xaa is A or G or is absent
DEGLEXVPTGQRPVQMRKIXXXXXXXXXKKATVLEEHSQXEXR

SEQ ID NO: 19672 - protein, 40 aa, Artificial Sequence
  GFR-binding peptide
  MOD_RES (1)..(38)..(40): Xaa is C or S
  MOD_RES (17)..(18)..(19)..(20)..(21): Xaa is A or G
  MOD_RES (22)..(23)..(24)..(25): Xaa is A or G or is absent
XRPTQVQLSNITVQIMXXXXXXXXXIGEMSTLEDHLAXKX

SEQ ID NO: 19673 - protein, 44 aa, Artificial Sequence
  GFR-binding peptide
  MOD_RES (5)..(42)..(44): Xaa is C or S
  MOD_RES (21)..(22)..(23)..(24)..(25): Xaa is A or G
  MOD_RES (26)..(27)..(28)..(29): Xaa is A or G or is absent
SSVKXQPSRVHHRSVKVAKVXXXXXXXXXKEVQVRLEEHLEXAX

SEQ ID NO: 19674 - protein, 38 aa, Artificial Sequence
  GFR-binding peptide
  MOD_RES (6)..(6): Xaa is C or S
  MOD_RES (20)..(21)..(22)..(23)..(24): Xaa is A or G
  MOD_RES (25)..(26)..(27)..(28): Xaa is A or G or is absent
DEGLEXVPTGQRSVKMAKVXXXXXXXXXKEVQVLEEHS

SEQ ID NO: 19675 - protein, 36 aa, Artificial Sequence
  GFR-binding peptide
  MOD_RES (2)..(36): Xaa is C or S
  MOD_RES (16)..(17)..(18)..(19)..(20): Xaa is A or G
  MOD_RES (21)..(22)..(23)..(24): Xaa is A or G or is absent
EXVPTEERPVQMRKIXXXXXXXXXKKATVFLQHNKX

SEQ ID NO: 19676 - protein, 40 aa, Artificial Sequence
  GFR-binding peptide
  MOD_RES (4)..(38)..(40): Xaa is C or S
GLEXVPTGQSNITMQIMRIKPHQGQHIGEMSLEEHSQXEX

SEQ ID NO: 19677 - protein, 33 aa, Artificial Sequence
  GFR-binding peptide
  MOD_RES (14)..(15)..(16)..(17)..(18): Xaa is A or G
  MOD_RES (19)..(20)..(21)..(22): Xaa is A or G or is absent
TQVQLSNITVQIMXXXXXXXXXLGEMSTLEDHL

SEQ ID NO: 19678 - protein, 43 aa, Artificial Sequence
  GFR-binding peptide
  MOD_RES (6)..(40)..(42): Xaa is C or S
DEGLEXVPTGQSNITMQIMRIKPHQGQHIGEMSLEEHSQXEXR

SEQ ID NO: 19679 - protein, 40 aa, Artificial Sequence
  GFR-binding peptide
  MOD_RES (7)..(7): Xaa is C or S
  MOD_RES (21)..(22)..(23)..(24)..(25): Xaa is A or G
  MOD_RES (26)..(27)..(28)..(29): Xaa is A or G or is absent
NDEGLEXVPTGQRPVQMRKIXXXXXXXXXKKATVLEEHSQ

SEQ ID NO: 19680 - protein, 40 aa, Artificial Sequence
  GFR-binding peptide
  MOD_RES (7)..(7): Xaa is C or S
  MOD_RES (21)..(22)..(23)..(24)..(25): Xaa is A or G
  MOD_RES (26)..(27)..(28)..(29): Xaa is A or G or is absent
NDEGLEXVPTGQSNITMQIMXXXXXXXXXIGEMSLEEHSQ

SEQ ID NO: 19681 - protein, 37 aa, Artificial Sequence
  GFR-binding peptide
  MOD_RES (2)..(36): Xaa is C or S
  MOD_RES (16)..(17)..(18)..(19)..(20): Xaa is A or G
  MOD_RES (21)..(22)..(23)..(24): Xaa is A or G or is absent
EXVPTEESNITMQIMXXXXXXXXXIGEMSFLQHNKXE

SEQ ID NO: 19682 - protein, 41 aa, Artificial Sequence
  GFR-binding peptide
  MOD_RES (7)..(41): Xaa is C or S
  MOD_RES (21)..(22)..(23)..(24)..(25): Xaa is A or G
  MOD_RES (26)..(27)..(28)..(29): Xaa is A or G or is absent
NDEGLEXVPTGQSNITMQIMXXXXXXXXXLGEMSLEEHSQX

SEQ ID NO: 19683 - protein, 38 aa, Artificial Sequence
  GFR-binding peptide
  MOD_RES (4)..(4): Xaa is C or S
NVQXRPTQVQLSNITVQIMEIVRKKPIFIGEMSTLEDH

SEQ ID NO: 19684 - protein, 37 aa, Artificial Sequence
  GFR-binding peptide
  MOD_RES (37)..(37): Xaa is C or S
  MOD_RES (16)..(17)..(18)..(19)..(20): Xaa is A or G
  MOD_RES (21)..(22)..(23)..(24): Xaa is A or G or is absent
RPTQVQLRPVQVRKIXXXXXXXXXKKATVTLEDHLAX

SEQ ID NO: 19685 - protein, 36 aa, Artificial Sequence
  GFR-binding peptide
  MOD_RES (2)..(36): Xaa is C or S
  MOD_RES (16)..(17)..(18)..(19)..(20): Xaa is A or G
  MOD_RES (21)..(22)..(23)..(24): Xaa is A or G or is absent
EXVPTGQRPVQMRKIXXXXXXXXXKKATVLEEHSQX

SEQ ID NO: 19686 - protein, 36 aa, Artificial Sequence
  GFR-binding peptide
  MOD_RES (1)..(35): Xaa is C or S
  MOD_RES (15)..(16)..(17)..(18)..(19): Xaa is A or G
  MOD_RES (20)..(21)..(22)..(23): Xaa is A or G or is absent
XVPTEESNITMQIMXXXXXXXXXLGEMSFLQHNKXE

SEQ ID NO: 19687 - protein, 35 aa, Artificial Sequence
  GFR-binding peptide
  MOD_RES (35)..(35): Xaa is C or S
SRVHHSNITVQIMEYVRKKPKLLGEMSRLEEHLEX

SEQ ID NO: 19688 - protein, 41 aa, Artificial Sequence
  GFR-binding peptide
  MOD_RES (5)..(39)..(41): Xaa is C or S
EGLEXVPTGQSNITMQIMRIKPHQGQHIGEMSLEEHSQXEX

SEQ ID NO: 19689 - protein, 38 aa, Artificial Sequence
  GFR-binding peptide
  MOD_RES (35)..(37): Xaa is C or S
  MOD_RES (14)..(15)..(16)..(17)..(18): Xaa is A or G
  MOD_RES (19)..(20)..(21)..(22): Xaa is A or G or is absent
TQVQLSNITVQIMXXXXXXXXXLGEMSTLEDHLAXKXE

SEQ ID NO: 19690 - protein, 39 aa, Artificial Sequence
  GFR-binding peptide
  MOD_RES (5)..(5): Xaa is C or S
RNVQXRPTQVQLSNITVQIMEIVRKKPIFIGEMSTLEDH

SEQ ID NO: 19691 - protein, 40 aa, Artificial Sequence
  GFR-binding peptide
  MOD_RES (2)..(39): Xaa is C or S
QXRPTQVQLSNITVQIMEIVRKKPIFLGEMSTLEDHLAXK

SEQ ID NO: 19692 - protein, 38 aa, Artificial Sequence
  GFR-binding peptide
  MOD_RES (37)..(37): Xaa is C or S
QPSRVHHSNITVQIMEYVRKKPKLIGEMSRLEEHLEXA

SEQ ID NO: 19693 - protein, 38 aa, Artificial Sequence
  GFR-binding peptide
  MOD_RES (2)..(36)..(38): Xaa is C or S
  MOD_RES (16)..(17)..(18)..(19)..(20): Xaa is A or G
  MOD_RES (21)..(22)..(23)..(24): Xaa is A or G or is absent
EXVPTGQSNITMQIMXXXXXXXXXIGEMSLEEHSQXEX

SEQ ID NO: 19694 - protein, 39 aa, Artificial Sequence
  GFR-binding peptide
  MOD_RES (2)..(39): Xaa is C or S
  MOD_RES (18)..(19)..(20)..(21)..(22): Xaa is A or G
  MOD_RES (23)..(24)..(25)..(26): Xaa is A or G or is absent
QXRPTQVQLRSVKVAKVXXXXXXXXXKEVQVTLEDHLAX

SEQ ID NO: 19695 - protein, 35 aa, Artificial Sequence
  GFR-binding peptide
  MOD_RES (1)..(35): Xaa is C or S
  MOD_RES (15)..(16)..(17)..(18)..(19): Xaa is A or G
  MOD_RES (20)..(21)..(22)..(23): Xaa is A or G or is absent
XVPTEESNITMQIMXXXXXXXXXIGEMSFLQHNKX

SEQ ID NO: 19696 - protein, 39 aa, Artificial Sequence
  GFR-binding peptide
  MOD_RES (5)..(5): Xaa is C or S
SSVKXQPSRVHHSNITVQIMEYVRKKPKLIGEMSRLEEH

SEQ ID NO: 19697 - protein, 40 aa, Artificial Sequence
  GFR-binding peptide
  MOD_RES (5)..(5): Xaa is C or S
SSVKXQPSRVHHSNITVQIMEYVRKKPKLLGEMSRLEEHL

SEQ ID NO: 19698 - protein, 40 aa, Artificial Sequence
  GFR-binding peptide
  MOD_RES (1)..(38)..(40): Xaa is C or S
XRPTQVQLSNITVQIMEIVRKKPIFLGEMSTLEDHLAXKX

SEQ ID NO: 19699 - protein, 38 aa, Artificial Sequence
  GFR-binding peptide
  MOD_RES (1)..(38): Xaa is C or S
  MOD_RES (17)..(18)..(19)..(20)..(21): Xaa is A or G
  MOD_RES (22)..(23)..(24)..(25): Xaa is A or G or is absent
XRPTQVQLSNITVQIMXXXXXXXXXLGEMSTLEDHLAX

SEQ ID NO: 19700 - protein, 41 aa, Artificial Sequence
  GFR-binding peptide
  MOD_RES (1)..(38)..(40): Xaa is C or S
XRPTQVQLSNITVQIMEIVRKKPIFLGEMSTLEDHLAXKXE

SEQ ID NO: 19701 - protein, 37 aa, Artificial Sequence
  GFR-binding peptide
  MOD_RES (1)..(35)..(37): Xaa is C or S
  MOD_RES (15)..(16)..(17)..(18)..(19): Xaa is A or G
  MOD_RES (20)..(21)..(22)..(23): Xaa is A or G or is absent
XVPTGQSNITMQIMXXXXXXXXXIGEMSLEEHSQXEX

SEQ ID NO: 19702 - protein, 42 aa, Artificial Sequence
  GFR-binding peptide
  MOD_RES (5)..(39)..(41): Xaa is C or S
  MOD_RES (19)..(20)..(21)..(22)..(23): Xaa is A or G
  MOD_RES (24)..(25)..(26)..(27): Xaa is A or G or is absent
EGLEXVPTGQSNITMQIMXXXXXXXXXLGEMSLEEHSQXEXR

SEQ ID NO: 19703 - protein, 37 aa, Artificial Sequence
  GFR-binding peptide
  MOD_RES (1)..(1): Xaa is C or S
XRPTQVQLSNITVQIMEIVRKKPIFLGEMSTLEDHLA

SEQ ID NO: 19704 - protein, 33 aa, Artificial Sequence
  GFR-binding peptide
  MOD_RES (14)..(15)..(16)..(17)..(18): Xaa is A or G
  MOD_RES (19)..(20)..(21)..(22): Xaa is A or G or is absent
VPTEESNITMQIMXXXXXXXXXLGEMSFLQHNK

SEQ ID NO: 19705 - protein, 42 aa, Artificial Sequence
  GFR-binding peptide
  MOD_RES (7)..(41): Xaa is C or S
NDEGLEXVPTEERPVQMRKIRIKPHQGQHKKATVFLQHNKXE

SEQ ID NO: 19706 - protein, 39 aa, Artificial Sequence
  GFR-binding peptide
  MOD_RES (36)..(38): Xaa is C or S
  MOD_RES (15)..(16)..(17)..(18)..(19): Xaa is A or G
  MOD_RES (20)..(21)..(22)..(23): Xaa is A or G or is absent
PSRVHHSNITVQIMXXXXXXXXXLGEMSRLEEHLEXAXA

SEQ ID NO: 19707 - protein, 36 aa, Artificial Sequence
  GFR-binding peptide
  MOD_RES (35)..(35): Xaa is C or S
SRVHHSNITVQIMEYVRKKPKLIGEMSRLEEHLEXA

SEQ ID NO: 19708 - protein, 33 aa, Artificial Sequence
  GFR-binding peptide
  MOD_RES (14)..(15)..(16)..(17)..(18): Xaa is A or G
  MOD_RES (19)..(20)..(21)..(22): Xaa is A or G or is absent
SRVHHSNITVQIMXXXXXXXXXLGEMSRLEEHL

SEQ ID NO: 19709 - protein, 37 aa, Artificial Sequence
  GFR-binding peptide
  MOD_RES (4)..(4): Xaa is C or S
  MOD_RES (18)..(19)..(20)..(21)..(22): Xaa is A or G
  MOD_RES (23)..(24)..(25)..(26): Xaa is A or G or is absent
GLEXVPTEESNITMQIMXXXXXXXXXIGEMSFLQHNK

SEQ ID NO: 19710 - protein, 44 aa, Artificial Sequence
  GFR-binding peptide
  MOD_RES (4)..(41)..(43): Xaa is C or S
  MOD_RES (20)..(21)..(22)..(23)..(24): Xaa is A or G
  MOD_RES (25)..(26)..(27)..(28): Xaa is A or G or is absent
NVQXRPTQVQLRPVQVRKIXXXXXXXXXKKATVTLEDHLAXKXE

SEQ ID NO: 19711 - protein, 38 aa, Artificial Sequence
  GFR-binding peptide
  MOD_RES (2)..(2): Xaa is C or S
  MOD_RES (18)..(19)..(20)..(21)..(22): Xaa is A or G
  MOD_RES (23)..(24)..(25)..(26): Xaa is A or G or is absent
QXRPTQVQLSNITVQIMXXXXXXXXXLGEMSTLEDHLA

SEQ ID NO: 19712 - protein, 41 aa, Artificial Sequence
  GFR-binding peptide
  MOD_RES (2)..(39)..(41): Xaa is C or S
QXRPTQVQLSNITVQIMEIVRKKPIFIGEMSTLEDHLAXKX

SEQ ID NO: 19713 - protein, 39 aa, Artificial Sequence
  GFR-binding peptide
  MOD_RES (2)..(39): Xaa is C or S
  MOD_RES (18)..(19)..(20)..(21)..(22): Xaa is A or G
  MOD_RES (23)..(24)..(25)..(26): Xaa is A or G or is absent
KXQPSRVHHRSVKVAKVXXXXXXXXXKEVQVRLEEHLEX

SEQ ID NO: 19714 - protein, 34 aa, Artificial Sequence
  GFR-binding peptide
  MOD_RES (34)..(34): Xaa is C or S
VPTEESNITMQIMRIKPHQGQHLGEMSFLQHNKX

SEQ ID NO: 19715 - protein, 39 aa, Artificial Sequence
  GFR-binding peptide
  MOD_RES (5)..(5): Xaa is C or S
RNVQXRPTQVQLRSVKVAKVEIVRKKPIFKEVQVTLEDH

SEQ ID NO: 19716 - protein, 42 aa, Artificial Sequence
  GFR-binding peptide
  MOD_RES (6)..(40)..(42): Xaa is C or S
  MOD_RES (20)..(21)..(22)..(23)..(24): Xaa is A or G
  MOD_RES (25)..(26)..(27)..(28): Xaa is A or G or is absent
DEGLEXVPTGQSNITMQIMXXXXXXXXXIGEMSLEEHSQXEX

SEQ ID NO: 19717 - protein, 39 aa, Artificial Sequence
  GFR-binding peptide
  MOD_RES (36)..(38): Xaa is C or S
PTQVQLSNITVQIMEIVRKKPIFLGEMSTLEDHLAXKXE

SEQ ID NO: 19718 - protein, 34 aa, Artificial Sequence
  GFR-binding peptide
RPTQVQLRSVKVAKVEIVRKKPIFKEVQVTLEDH

SEQ ID NO: 19719 - protein, 38 aa, Artificial Sequence
  GFR-binding peptide
  MOD_RES (6)..(6): Xaa is C or S
  MOD_RES (20)..(21)..(22)..(23)..(24): Xaa is A or G
  MOD_RES (25)..(26)..(27)..(28): Xaa is A or G or is absent
DEGLEXVPTEESNITMQIMXXXXXXXXXIGEMSFLQHN

SEQ ID NO: 19720 - protein, 42 aa, Artificial Sequence
  GFR-binding peptide
  MOD_RES (2)..(39)..(41): Xaa is C or S
  MOD_RES (18)..(19)..(20)..(21)..(22): Xaa is A or G
  MOD_RES (23)..(24)..(25)..(26): Xaa is A or G or is absent
QXRPTQVQLRSVKVAKVXXXXXXXXXKEVQVTLEDHLAXKXE

SEQ ID NO: 19721 - protein, 34 aa, Artificial Sequence
  GFR-binding peptide
  MOD_RES (1)..(1): Xaa is C or S
XVPTEESNITMQIMRIKPHQGQHLGEMSFLQHNK

SEQ ID NO: 19722 - protein, 38 aa, Artificial Sequence
  GFR-binding peptide
  MOD_RES (1)..(38): Xaa is C or S
XQPSRVHHSNITVQIMEYVRKKPKLIGEMSRLEEHLEX

SEQ ID NO: 19723 - protein, 38 aa, Artificial Sequence
  GFR-binding peptide
  MOD_RES (4)..(38): Xaa is C or S
GLEXVPTGQSNITMQIMRIKPHQGQHIGEMSLEEHSQX

SEQ ID NO: 19724 - protein, 40 aa, Artificial Sequence
  GFR-binding peptide
  MOD_RES (4)..(38)..(40): Xaa is C or S
  MOD_RES (18)..(19)..(20)..(21)..(22): Xaa is A or G
  MOD_RES (23)..(24)..(25)..(26): Xaa is A or G or is absent
GLEXVPTEESNITMQIMXXXXXXXXXIGEMSFLQHNKXEX

SEQ ID NO: 19725 - protein, 39 aa, Artificial Sequence
  GFR-binding peptide
  MOD_RES (1)..(38): Xaa is C or S
XRPTQVQLRSVKVAKVEIVRKKPIFKEVQVTLEDHLAXK

SEQ ID NO: 19726 - protein, 37 aa, Artificial Sequence
  GFR-binding peptide
  MOD_RES (4)..(4): Xaa is C or S
GLEXVPTGQRSVKMAKVRIKPHQGQHKEVQVLEEHSQ

SEQ ID NO: 19727 - protein, 34 aa, Artificial Sequence
  GFR-binding peptide
  MOD_RES (2)..(2): Xaa is C or S
EXVPTGQSNITMQIMRIKPHQGQHIGEMSLEEHS

SEQ ID NO: 19728 - protein, 42 aa, Artificial Sequence
  GFR-binding peptide
  MOD_RES (5)..(39)..(41): Xaa is C or S
EGLEXVPTEERPVQMRKIRIKPHQGQHKKATVFLQHNKXEXR

SEQ ID NO: 19729 - protein, 36 aa, Artificial Sequence
  GFR-binding peptide
  MOD_RES (2)..(2): Xaa is C or S
  MOD_RES (18)..(19)..(20)..(21)..(22): Xaa is A or G
  MOD_RES (23)..(24)..(25)..(26): Xaa is A or G or is absent
KXQPSRVHHRPVQVRKIXXXXXXXXXKKATVRLEEH

SEQ ID NO: 19730 - protein, 40 aa, Artificial Sequence
  GFR-binding peptide
  MOD_RES (5)..(5): Xaa is C or S
  MOD_RES (21)..(22)..(23)..(24)..(25): Xaa is A or G
  MOD_RES (26)..(27)..(28)..(29): Xaa is A or G or is absent
SSVKXQPSRVHHSNITVQIMXXXXXXXXXIGEMSRLEEHL

SEQ ID NO: 19731 - protein, 39 aa, Artificial Sequence
  GFR-binding peptide
  MOD_RES (7)..(7): Xaa is C or S
  MOD_RES (21)..(22)..(23)..(24)..(25): Xaa is A or G
  MOD_RES (26)..(27)..(28)..(29): Xaa is A or G or is absent
NDEGLEXVPTEESNITMQIMXXXXXXXXXLGEMSFLQHN

SEQ ID NO: 19732 - protein, 41 aa, Artificial Sequence
  GFR-binding peptide
  MOD_RES (2)..(39)..(41): Xaa is C or S
KXQPSRVHHSNITVQIMEYVRKKPKLIGEMSRLEEHLEXAX

SEQ ID NO: 19733 - protein, 37 aa, Artificial Sequence
  GFR-binding peptide
  MOD_RES (3)..(37): Xaa is C or S
LEXVPTGQSNITMQIMRIKPHQGQHIGEMSLEEHSQX

SEQ ID NO: 19734 - protein, 35 aa, Artificial Sequence
  GFR-binding peptide
  MOD_RES (1)..(35): Xaa is C or S
XVPTEESNITMQIMRIKPHQGQHLGEMSFLQHNKX

SEQ ID NO: 19735 - protein, 35 aa, Artificial Sequence
  GFR-binding peptide
  MOD_RES (3)..(3): Xaa is C or S
  MOD_RES (17)..(18)..(19)..(20)..(21): Xaa is A or G
  MOD_RES (22)..(23)..(24)..(25): Xaa is A or G or is absent
LEXVPTGQSNITMQIMXXXXXXXXXIGEMSLEEHS

SEQ ID NO: 19736 - protein, 39 aa, Artificial Sequence
  GFR-binding peptide
  MOD_RES (4)..(38): Xaa is C or S
GLEXVPTGQSNITMQIMRIKPHQGQHIGEMSLEEHSQXE

SEQ ID NO: 19737 - protein, 34 aa, Artificial Sequence
  GFR-binding peptide
  MOD_RES (34)..(34): Xaa is C or S
  MOD_RES (14)..(15)..(16)..(17)..(18): Xaa is A or G
  MOD_RES (19)..(20)..(21)..(22): Xaa is A or G or is absent
VPTEESNITMQIMXXXXXXXXXIGEMSFLQHNKX

SEQ ID NO: 19738 - protein, 41 aa, Artificial Sequence
  GFR-binding peptide
  MOD_RES (7)..(41): Xaa is C or S
  MOD_RES (21)..(22)..(23)..(24)..(25): Xaa is A or G
  MOD_RES (26)..(27)..(28)..(29): Xaa is A or G or is absent
NDEGLEXVPTEESNITMQIMXXXXXXXXXIGEMSFLQHNKX

SEQ ID NO: 19739 - protein, 37 aa, Artificial Sequence
  GFR-binding peptide
  MOD_RES (2)..(36): Xaa is C or S
  MOD_RES (16)..(17)..(18)..(19)..(20): Xaa is A or G
  MOD_RES (21)..(22)..(23)..(24): Xaa is A or G or is absent
EXVPTGQSNITMQIMXXXXXXXXXLGEMSLEEHSQXE

SEQ ID NO: 19740 - protein, 38 aa, Artificial Sequence
  GFR-binding peptide
  MOD_RES (2)..(36)..(38): Xaa is C or S
EXVPTEERPVQMRKIRIKPHQGQHKKATVFLQHNKXEX

SEQ ID NO: 19741 - protein, 43 aa, Artificial Sequence
  GFR-binding peptide
  MOD_RES (5)..(42): Xaa is C or S
  MOD_RES (21)..(22)..(23)..(24)..(25): Xaa is A or G
  MOD_RES (26)..(27)..(28)..(29): Xaa is A or G or is absent
SSVKXQPSRVHHSNITVQIMXXXXXXXXXIGEMSRLEEHLEXA

SEQ ID NO: 19742 - protein, 42 aa, Artificial Sequence
  GFR-binding peptide
  MOD_RES (3)..(40)..(42): Xaa is C or S
  MOD_RES (19)..(20)..(21)..(22)..(23): Xaa is A or G
  MOD_RES (24)..(25)..(26)..(27): Xaa is A or G or is absent
VQXRPTQVQLRSVKVAKVXXXXXXXXXKEVQVTLEDHLAXKX

SEQ ID NO: 19743 - protein, 42 aa, Artificial Sequence
  GFR-binding peptide
  MOD_RES (5)..(42): Xaa is C or S
RNVQXRPTQVQLRSVKVAKVEIVRKKPIFKEVQVTLEDHLAX

SEQ ID NO: 19744 - protein, 45 aa, Artificial Sequence
  GFR-binding peptide
  MOD_RES (5)..(42)..(44): Xaa is C or S
  MOD_RES (21)..(22)..(23)..(24)..(25): Xaa is A or G
  MOD_RES (26)..(27)..(28)..(29): Xaa is A or G or is absent
RNVQXRPTQVQLSNITVQIMXXXXXXXXXIGEMSTLEDHLAXKXE

SEQ ID NO: 19745 - protein, 37 aa, Artificial Sequence
  GFR-binding peptide
  MOD_RES (37)..(37): Xaa is C or S
  MOD_RES (16)..(17)..(18)..(19)..(20): Xaa is A or G
  MOD_RES (21)..(22)..(23)..(24): Xaa is A or G or is absent
QPSRVHHSNITVQIMXXXXXXXXXIGEMSRLEEHLEX

SEQ ID NO: 19746 - protein, 41 aa, Artificial Sequence
  GFR-binding peptide
  MOD_RES (6)..(40): Xaa is C or S
  MOD_RES (20)..(21)..(22)..(23)..(24): Xaa is A or G
  MOD_RES (25)..(26)..(27)..(28): Xaa is A or G or is absent
DEGLEXVPTEESNITMQIMXXXXXXXXXLGEMSFLQHNKXE

SEQ ID NO: 19747 - protein, 42 aa, Artificial Sequence
  GFR-binding peptide
  MOD_RES (5)..(39)..(41): Xaa is C or S
EGLEXVPTEESNITMQIMRIKPHQGQHLGEMSFLQHNKXEXR

SEQ ID NO: 19748 - protein, 41 aa, Artificial Sequence
  GFR-binding peptide
  MOD_RES (5)..(39)..(41): Xaa is C or S
  MOD_RES (19)..(20)..(21)..(22)..(23): Xaa is A or G
  MOD_RES (24)..(25)..(26)..(27): Xaa is A or G or is absent
EGLEXVPTEESNITMQIMXXXXXXXXXIGEMSFLQHNKXEX

SEQ ID NO: 19749 - protein, 41 aa, Artificial Sequence
  GFR-binding peptide
  MOD_RES (3)..(40): Xaa is C or S
  MOD_RES (19)..(20)..(21)..(22)..(23): Xaa is A or G
  MOD_RES (24)..(25)..(26)..(27): Xaa is A or G or is absent
VQXRPTQVQLRPVQVRKIXXXXXXXXXKKATVTLEDHLAXK

SEQ ID NO: 19750 - protein, 39 aa, Artificial Sequence
  GFR-binding peptide
  MOD_RES (3)..(3): Xaa is C or S
VKXQPSRVHHSNITVQIMEYVRKKPKLLGEMSRLEEHLE

SEQ ID NO: 19751 - protein, 35 aa, Artificial Sequence
  GFR-binding peptide
  MOD_RES (15)..(16)..(17)..(18)..(19): Xaa is A or G
  MOD_RES (20)..(21)..(22)..(23): Xaa is A or G or is absent
PSRVHHRPVQVRKIXXXXXXXXXKKATVRLEEHLE

SEQ ID NO: 19752 - protein, 41 aa, Artificial Sequence
  GFR-binding peptide
  MOD_RES (4)..(38)..(40): Xaa is C or S
  MOD_RES (18)..(19)..(20)..(21)..(22): Xaa is A or G
  MOD_RES (23)..(24)..(25)..(26): Xaa is A or G or is absent
GLEXVPTEESNITMQIMXXXXXXXXXIGEMSFLQHNKXEXR

SEQ ID NO: 19753 - protein, 39 aa, Artificial Sequence
  GFR-binding peptide
  MOD_RES (5)..(39): Xaa is C or S
  MOD_RES (19)..(20)..(21)..(22)..(23): Xaa is A or G
  MOD_RES (24)..(25)..(26)..(27): Xaa is A or G or is absent
EGLEXVPTEERPVQMRKIXXXXXXXXXKKATVFLQHNKX

SEQ ID NO: 19754 - protein, 36 aa, Artificial Sequence
  GFR-binding peptide
  MOD_RES (3)..(3): Xaa is C or S
LEXVPTEERPVQMRKIRIKPHQGQHKKATVFLQHNK

SEQ ID NO: 19755 - protein, 34 aa, Artificial Sequence
  GFR-binding peptide
RPTQVQLSNITVQIMEIVRKKPIFLGEMSTLEDH

SEQ ID NO: 19756 - protein, 42 aa, Artificial Sequence
  GFR-binding peptide
  MOD_RES (7)..(41): Xaa is C or S
  MOD_RES (21)..(22)..(23)..(24)..(25): Xaa is A or G
  MOD_RES (26)..(27)..(28)..(29): Xaa is A or G or is absent
NDEGLEXVPTGQRPVQMRKIXXXXXXXXXKKATVLEEHSQXE

SEQ ID NO: 19757 - protein, 36 aa, Artificial Sequence
  GFR-binding peptide
  MOD_RES (1)..(35): Xaa is C or S
XVPTGQRPVQMRKIRIKPHQGQHKKATVLEEHSQXE

SEQ ID NO: 19758 - protein, 40 aa, Artificial Sequence
  GFR-binding peptide
  MOD_RES (4)..(4): Xaa is C or S
NVQXRPTQVQLSNITVQIMEIVRKKPIFIGEMSTLEDHLA

SEQ ID NO: 19759 - protein, 42 aa, Artificial Sequence
  GFR-binding peptide
  MOD_RES (2)..(39)..(41): Xaa is C or S
QXRPTQVQLSNITVQIMEIVRKKPIFLGEMSTLEDHLAXKXE

SEQ ID NO: 19760 - protein, 35 aa, Artificial Sequence
  GFR-binding peptide
  MOD_RES (35)..(35): Xaa is C or S
TQVQLSNITVQIMEIVRKKPIFIGEMSTLEDHLAX

SEQ ID NO: 19761 - protein, 38 aa, Artificial Sequence
  GFR-binding peptide
  MOD_RES (5)..(5): Xaa is C or S
EGLEXVPTEERPVQMRKIRIKPHQGQHKKATVFLQHNK

SEQ ID NO: 19762 - protein, 35 aa, Artificial Sequence
  GFR-binding peptide
  MOD_RES (34)..(34): Xaa is C or S
VPTGQRSVKMAKVRIKPHQGQHKEVQVLEEHSQXE

SEQ ID NO: 19763 - protein, 39 aa, Artificial Sequence
  GFR-binding peptide
  MOD_RES (36)..(38): Xaa is C or S
  MOD_RES (15)..(16)..(17)..(18)..(19): Xaa is A or G
  MOD_RES (20)..(21)..(22)..(23): Xaa is A or G or is absent
PTQVQLRSVKVAKVXXXXXXXXXKEVQVTLEDHLAXKXE

SEQ ID NO: 19764 - protein, 44 aa, Artificial Sequence
  GFR-binding peptide
  MOD_RES (4)..(41)..(43): Xaa is C or S
  MOD_RES (20)..(21)..(22)..(23)..(24): Xaa is A or G
  MOD_RES (25)..(26)..(27)..(28): Xaa is A or G or is absent
NVQXRPTQVQLSNITVQIMXXXXXXXXXLGEMSTLEDHLAXKXE

SEQ ID NO: 19765 - protein, 37 aa, Artificial Sequence
  GFR-binding peptide
  MOD_RES (5)..(5): Xaa is C or S
  MOD_RES (19)..(20)..(21)..(22)..(23): Xaa is A or G
  MOD_RES (24)..(25)..(26)..(27): Xaa is A or G or is absent
EGLEXVPTEERPVQMRKIXXXXXXXXXKKATVFLQHN

SEQ ID NO: 19766 - protein, 39 aa, Artificial Sequence
  GFR-binding peptide
  MOD_RES (2)..(36)..(38): Xaa is C or S
  MOD_RES (16)..(17)..(18)..(19)..(20): Xaa is A or G
  MOD_RES (21)..(22)..(23)..(24): Xaa is A or G or is absent
EXVPTEERSVKMAKVXXXXXXXXXKEVQVFLQHNKXEXR

SEQ ID NO: 19767 - protein, 40 aa, Artificial Sequence
  GFR-binding peptide
  MOD_RES (7)..(7): Xaa is C or S
NDEGLEXVPTEERSVKMAKVRIKPHQGQHKEVQVFLQHNK

SEQ ID NO: 19768 - protein, 37 aa, Artificial Sequence
  GFR-binding peptide
  MOD_RES (34)..(36): Xaa is C or S
  MOD_RES (14)..(15)..(16)..(17)..(18): Xaa is A or G
  MOD_RES (19)..(20)..(21)..(22): Xaa is A or G or is absent
VPTEESNITMQIMXXXXXXXXXIGEMSFLQHNKXEXR

SEQ ID NO: 19769 - protein, 35 aa, Artificial Sequence
  GFR-binding peptide
  MOD_RES (2)..(2): Xaa is C or S
EXVPTEERPVQMRKIRIKPHQGQHKKATVFLQHNK

SEQ ID NO: 19770 - protein, 41 aa, Artificial Sequence
  GFR-binding peptide
  MOD_RES (3)..(40): Xaa is C or S
  MOD_RES (19)..(20)..(21)..(22)..(23): Xaa is A or G
  MOD_RES (24)..(25)..(26)..(27): Xaa is A or G or is absent
VQXRPTQVQLSNITVQIMXXXXXXXXXLGEMSTLEDHLAXK

SEQ ID NO: 19771 - protein, 38 aa, Artificial Sequence
  GFR-binding peptide
  MOD_RES (4)..(38): Xaa is C or S
GLEXVPTEERSVKMAKVRIKPHQGQHKEVQVFLQHNKX

SEQ ID NO: 19772 - protein, 38 aa, Artificial Sequence
  GFR-binding peptide
  MOD_RES (4)..(4): Xaa is C or S
  MOD_RES (20)..(21)..(22)..(23)..(24): Xaa is A or G
  MOD_RES (25)..(26)..(27)..(28): Xaa is A or G or is absent
SVKXQPSRVHHSNITVQIMXXXXXXXXXIGEMSRLEEH

SEQ ID NO: 19773 - protein, 38 aa, Artificial Sequence
  GFR-binding peptide
  MOD_RES (35)..(37): Xaa is C or S
  MOD_RES (14)..(15)..(16)..(17)..(18): Xaa is A or G
  MOD_RES (19)..(20)..(21)..(22): Xaa is A or G or is absent
SRVHHRSVKVAKVXXXXXXXXXKEVQVRLEEHLEXAXA

SEQ ID NO: 19774 - protein, 35 aa, Artificial Sequence
  GFR-binding peptide
  MOD_RES (1)..(1): Xaa is C or S
XRPTQVQLRSVKVAKVEIVRKKPIFKEVQVTLEDH

SEQ ID NO: 19775 - protein, 37 aa, Artificial Sequence
  GFR-binding peptide
  MOD_RES (36)..(36): Xaa is C or S
  MOD_RES (15)..(16)..(17)..(18)..(19): Xaa is A or G
  MOD_RES (20)..(21)..(22)..(23): Xaa is A or G or is absent
PSRVHHSNITVQIMXXXXXXXXXIGEMSRLEEHLEXA

SEQ ID NO: 19776 - protein, 39 aa, Artificial Sequence
  GFR-binding peptide
  MOD_RES (7)..(7): Xaa is C or S
  MOD_RES (21)..(22)..(23)..(24)..(25): Xaa is A or G
  MOD_RES (26)..(27)..(28)..(29): Xaa is A or G or is absent
NDEGLEXVPTGQRPVQMRKIXXXXXXXXXKKATVLEEHS

SEQ ID NO: 19777 - protein, 36 aa, Artificial Sequence
  GFR-binding peptide
  MOD_RES (1)..(35): Xaa is C or S
XVPTGQRSVKMAKVRIKPHQGQHKEVQVLEEHSQXE

SEQ ID NO: 19778 - protein, 35 aa, Artificial Sequence
  GFR-binding peptide
  MOD_RES (2)..(2): Xaa is C or S
EXVPTGQRPVQMRKIRIKPHQGQHKKATVLEEHSQ

SEQ ID NO: 19779 - protein, 38 aa, Artificial Sequence
  GFR-binding peptide
  MOD_RES (5)..(5): Xaa is C or S
  MOD_RES (19)..(20)..(21)..(22)..(23): Xaa is A or G
  MOD_RES (24)..(25)..(26)..(27): Xaa is A or G or is absent
EGLEXVPTEESNITMQIMXXXXXXXXXLGEMSFLQHNK

SEQ ID NO: 19780 - protein, 36 aa, Artificial Sequence
  GFR-binding peptide
  MOD_RES (35)..(35): Xaa is C or S
SRVHHSNITVQIMEYVRKKPKLLGEMSRLEEHLEXA

SEQ ID NO: 19781 - protein, 41 aa, Artificial Sequence
  GFR-binding peptide
  MOD_RES (5)..(5): Xaa is C or S
  MOD_RES (21)..(22)..(23)..(24)..(25): Xaa is A or G
  MOD_RES (26)..(27)..(28)..(29): Xaa is A or G or is absent
SSVKXQPSRVHHSNITVQIMXXXXXXXXXLGEMSRLEEHLE

SEQ ID NO: 19782 - protein, 39 aa, Artificial Sequence
  GFR-binding peptide
  MOD_RES (3)..(3): Xaa is C or S
  MOD_RES (19)..(20)..(21)..(22)..(23): Xaa is A or G
  MOD_RES (24)..(25)..(26)..(27): Xaa is A or G or is absent
VQXRPTQVQLSNITVQIMXXXXXXXXXLGEMSTLEDHLA

SEQ ID NO: 19783 - protein, 38 aa, Artificial Sequence
  GFR-binding peptide
  MOD_RES (3)..(3): Xaa is C or S
  MOD_RES (19)..(20)..(21)..(22)..(23): Xaa is A or G
  MOD_RES (24)..(25)..(26)..(27): Xaa is A or G or is absent
VKXQPSRVHHSNITVQIMXXXXXXXXXLGEMSRLEEHL

SEQ ID NO: 19784 - protein, 38 aa, Artificial Sequence
  GFR-binding peptide
  MOD_RES (2)..(2): Xaa is C or S
  MOD_RES (18)..(19)..(20)..(21)..(22): Xaa is A or G
  MOD_RES (23)..(24)..(25)..(26): Xaa is A or G or is absent
QXRPTQVQLSNITVQIMXXXXXXXXXIGEMSTLEDHLA

SEQ ID NO: 19785 - protein, 35 aa, Artificial Sequence
  GFR-binding peptide
  MOD_RES (3)..(3): Xaa is C or S
LEXVPTGQRPVQMRKIRIKPHQGQHKKATVLEEHS

SEQ ID NO: 19786 - protein, 41 aa, Artificial Sequence
  GFR-binding peptide
  MOD_RES (5)..(5): Xaa is C or S
RNVQXRPTQVQLSNITVQIMEIVRKKPIFIGEMSTLEDHLA

SEQ ID NO: 19787 - protein, 35 aa, Artificial Sequence
  GFR-binding peptide
  MOD_RES (2)..(2): Xaa is C or S
  MOD_RES (16)..(17)..(18)..(19)..(20): Xaa is A or G
  MOD_RES (21)..(22)..(23)..(24): Xaa is A or G or is absent
EXVPTGQSNITMQIMXXXXXXXXXLGEMSLEEHSQ

SEQ ID NO: 19788 - protein, 32 aa, Artificial Sequence
  GFR-binding peptide
  MOD_RES (14)..(15)..(16)..(17)..(18): Xaa is A or G
  MOD_RES (19)..(20)..(21)..(22): Xaa is A or G or is absent
SRVHHRPVQVRKIXXXXXXXXXKKATVRLEEH

SEQ ID NO: 19789 - protein, 36 aa, Artificial Sequence
  GFR-binding peptide
  MOD_RES (1)..(1): Xaa is C or S
XRPTQVQLRSVKVAKVEIVRKKPIFKEVQVTLEDHL

SEQ ID NO: 19790 - protein, 36 aa, Artificial Sequence
  GFR-binding peptide
  MOD_RES (35)..(35): Xaa is C or S
  MOD_RES (14)..(15)..(16)..(17)..(18): Xaa is A or G
  MOD_RES (19)..(20)..(21)..(22): Xaa is A or G or is absent
SRVHHSNITVQIMXXXXXXXXXIGEMSRLEEHLEXA

SEQ ID NO: 19791 - protein, 44 aa, Artificial Sequence
  GFR-binding peptide
  MOD_RES (4)..(41)..(43): Xaa is C or S
  MOD_RES (20)..(21)..(22)..(23)..(24): Xaa is A or G
  MOD_RES (25)..(26)..(27)..(28): Xaa is A or G or is absent
SVKXQPSRVHHRPVQVRKIXXXXXXXXXKKATVRLEEHLEXAXA

SEQ ID NO: 19792 - protein, 44 aa, Artificial Sequence
  GFR-binding peptide
  MOD_RES (7)..(41)..(43): Xaa is C or S
  MOD_RES (21)..(22)..(23)..(24)..(25): Xaa is A or G
  MOD_RES (26)..(27)..(28)..(29): Xaa is A or G or is absent
NDEGLEXVPTGQSNITMQIMXXXXXXXXXLGEMSLEEHSQXEXR

SEQ ID NO: 19793 - protein, 39 aa, Artificial Sequence
  GFR-binding peptide
  MOD_RES (2)..(36)..(38): Xaa is C or S
  MOD_RES (16)..(17)..(18)..(19)..(20): Xaa is A or G
  MOD_RES (21)..(22)..(23)..(24): Xaa is A or G or is absent
EXVPTGQRPVQMRKIXXXXXXXXXKKATVLEEHSQXEXR

SEQ ID NO: 19794 - protein, 42 aa, Artificial Sequence
  GFR-binding peptide
  MOD_RES (3)..(40)..(42): Xaa is C or S
VKXQPSRVHHSNITVQIMEYVRKKPKLLGEMSRLEEHLEXAX

SEQ ID NO: 19795 - protein, 39 aa, Artificial Sequence
  GFR-binding peptide
  MOD_RES (4)..(4): Xaa is C or S
  MOD_RES (20)..(21)..(22)..(23)..(24): Xaa is A or G
  MOD_RES (25)..(26)..(27)..(28): Xaa is A or G or is absent
NVQXRPTQVQLRPVQVRKIXXXXXXXXXKKATVTLEDHL

SEQ ID NO: 19796 - protein, 34 aa, Artificial Sequence
  GFR-binding peptide
  MOD_RES (2)..(2): Xaa is C or S
  MOD_RES (16)..(17)..(18)..(19)..(20): Xaa is A or G
  MOD_RES (21)..(22)..(23)..(24): Xaa is A or G or is absent
EXVPTEERSVKMAKVXXXXXXXXXKEVQVFLQHN

SEQ ID NO: 19797 - protein, 35 aa, Artificial Sequence
  GFR-binding peptide
  MOD_RES (16)..(17)..(18)..(19)..(20): Xaa is A or G
  MOD_RES (21)..(22)..(23)..(24): Xaa is A or G or is absent
QPSRVHHRSVKVAKVXXXXXXXXXKEVQVRLEEHL

SEQ ID NO: 19798 - protein, 43 aa, Artificial Sequence
  GFR-binding peptide
  MOD_RES (3)..(40)..(42): Xaa is C or S
  MOD_RES (19)..(20)..(21)..(22)..(23): Xaa is A or G
  MOD_RES (24)..(25)..(26)..(27): Xaa is A or G or is absent
VKXQPSRVHHRPVQVRKIXXXXXXXXXKKATVRLEEHLEXAXA

SEQ ID NO: 19799 - protein, 40 aa, Artificial Sequence
  GFR-binding peptide
  MOD_RES (5)..(39): Xaa is C or S
  MOD_RES (19)..(20)..(21)..(22)..(23): Xaa is A or G
  MOD_RES (24)..(25)..(26)..(27): Xaa is A or G or is absent
EGLEXVPTEESNITMQIMXXXXXXXXXIGEMSFLQHNKXE

SEQ ID NO: 19800 - protein, 36 aa, Artificial Sequence
  GFR-binding peptide
  MOD_RES (2)..(2): Xaa is C or S
QXRPTQVQLSNITVQIMEIVRKKPIFIGEMSTLEDH

SEQ ID NO: 19801 - protein, 40 aa, Artificial Sequence
  GFR-binding peptide
  MOD_RES (5)..(39): Xaa is C or S
  MOD_RES (19)..(20)..(21)..(22)..(23): Xaa is A or G
  MOD_RES (24)..(25)..(26)..(27): Xaa is A or G or is absent
EGLEXVPTEERPVQMRKIXXXXXXXXXKKATVFLQHNKXE

SEQ ID NO: 19802 - protein, 35 aa, Artificial Sequence
  GFR-binding peptide
  MOD_RES (34)..(34): Xaa is C or S
  MOD_RES (14)..(15)..(16)..(17)..(18): Xaa is A or G
  MOD_RES (19)..(20)..(21)..(22): Xaa is A or G or is absent
VPTEERSVKMAKVXXXXXXXXXKEVQVFLQHNKXE

SEQ ID NO: 19803 - protein, 40 aa, Artificial Sequence
  GFR-binding peptide
  MOD_RES (5)..(39): Xaa is C or S
  MOD_RES (19)..(20)..(21)..(22)..(23): Xaa is A or G
  MOD_RES (24)..(25)..(26)..(27): Xaa is A or G or is absent
EGLEXVPTGQRSVKMAKVXXXXXXXXXKEVQVLEEHSQXE

SEQ ID NO: 19804 - protein, 39 aa, Artificial Sequence
  GFR-binding peptide
  MOD_RES (37)..(39): Xaa is C or S
  MOD_RES (16)..(17)..(18)..(19)..(20): Xaa is A or G
  MOD_RES (21)..(22)..(23)..(24): Xaa is A or G or is absent
RPTQVQLRSVKVAKVXXXXXXXXXKEVQVTLEDHLAXKX

SEQ ID NO: 19805 - protein, 36 aa, Artificial Sequence
  GFR-binding peptide
  MOD_RES (16)..(17)..(18)..(19)..(20): Xaa is A or G
  MOD_RES (21)..(22)..(23)..(24): Xaa is A or G or is absent
QPSRVHHRSVKVAKVXXXXXXXXXKEVQVRLEEHLE

SEQ ID NO: 19806 - protein, 36 aa, Artificial Sequence
  GFR-binding peptide
  MOD_RES (2)..(36): Xaa is C or S
  MOD_RES (16)..(17)..(18)..(19)..(20): Xaa is A or G
  MOD_RES (21)..(22)..(23)..(24): Xaa is A or G or is absent
EXVPTEERSVKMAKVXXXXXXXXXKEVQVFLQHNKX

SEQ ID NO: 19807 - protein, 39 aa, Artificial Sequence
  GFR-binding peptide
  MOD_RES (6)..(6): Xaa is C or S
DEGLEXVPTGQRSVKMAKVRIKPHQGQHKEVQVLEEHSQ

SEQ ID NO: 19808 - protein, 38 aa, Artificial Sequence
  GFR-binding peptide
  MOD_RES (1)..(35)..(37): Xaa is C or S
XVPTEESNITMQIMRIKPHQGQHLGEMSFLQHNKXEXR

SEQ ID NO: 19809 - protein, 34 aa, Artificial Sequence
  GFR-binding peptide
  MOD_RES (1)..(1): Xaa is C or S
  MOD_RES (15)..(16)..(17)..(18)..(19): Xaa is A or G
  MOD_RES (20)..(21)..(22)..(23): Xaa is A or G or is absent
XVPTEERPVQMRKIXXXXXXXXXKKATVFLQHNK

SEQ ID NO: 19810 - protein, 35 aa, Artificial Sequence
  GFR-binding peptide
  MOD_RES (16)..(17)..(18)..(19)..(20): Xaa is A or G
  MOD_RES (21)..(22)..(23)..(24): Xaa is A or G or is absent
RPTQVQLRSVKVAKVXXXXXXXXXKEVQVTLEDHL

SEQ ID NO: 19811 - protein, 40 aa, Artificial Sequence
  GFR-binding peptide
  MOD_RES (2)..(39): Xaa is C or S
  MOD_RES (18)..(19)..(20)..(21)..(22): Xaa is A or G
  MOD_RES (23)..(24)..(25)..(26): Xaa is A or G or is absent
KXQPSRVHHSNITVQIMXXXXXXXXXLGEMSRLEEHLEXA

SEQ ID NO: 19812 - protein, 44 aa, Artificial Sequence
  GFR-binding peptide
  MOD_RES (7)..(41)..(43): Xaa is C or S
NDEGLEXVPTEERSVKMAKVRIKPHQGQHKEVQVFLQHNKXEXR

SEQ ID NO: 19813 - protein, 36 aa, Artificial Sequence
  GFR-binding peptide
  MOD_RES (1)..(1): Xaa is C or S
XQPSRVHHRPVQVRKIEYVRKKPKLKKATVRLEEHL

SEQ ID NO: 19814 - protein, 39 aa, Artificial Sequence
  GFR-binding peptide
  MOD_RES (37)..(39): Xaa is C or S
  MOD_RES (16)..(17)..(18)..(19)..(20): Xaa is A or G
  MOD_RES (21)..(22)..(23)..(24): Xaa is A or G or is absent
RPTQVQLRPVQVRKIXXXXXXXXXKKATVTLEDHLAXKX

SEQ ID NO: 19815 - protein, 39 aa, Artificial Sequence
  GFR-binding peptide
  MOD_RES (4)..(38): Xaa is C or S
GLEXVPTEESNITMQIMRIKPHQGQHLGEMSFLQHNKXE

SEQ ID NO: 19816 - protein, 43 aa, Artificial Sequence
  GFR-binding peptide
  MOD_RES (3)..(40)..(42): Xaa is C or S
VQXRPTQVQLSNITVQIMEIVRKKPIFIGEMSTLEDHLAXKXE

SEQ ID NO: 19817 - protein, 36 aa, Artificial Sequence
  GFR-binding peptide
  MOD_RES (2)..(36): Xaa is C or S
EXVPTGQSNITMQIMRIKPHQGQHIGEMSLEEHSQX

SEQ ID NO: 19818 - protein, 42 aa, Artificial Sequence
  GFR-binding peptide
  MOD_RES (5)..(39)..(41): Xaa is C or S
EGLEXVPTGQSNITMQIMRIKPHQGQHIGEMSLEEHSQXEXR

SEQ ID NO: 19819 - protein, 41 aa, Artificial Sequence
  GFR-binding peptide
  MOD_RES (4)..(41): Xaa is C or S
  MOD_RES (20)..(21)..(22)..(23)..(24): Xaa is A or G
  MOD_RES (25)..(26)..(27)..(28): Xaa is A or G or is absent
SVKXQPSRVHHSNITVQIMXXXXXXXXXIGEMSRLEEHLEX

SEQ ID NO: 19820 - protein, 43 aa, Artificial Sequence
  GFR-binding peptide
  MOD_RES (4)..(41)..(43): Xaa is C or S
  MOD_RES (20)..(21)..(22)..(23)..(24): Xaa is A or G
  MOD_RES (25)..(26)..(27)..(28): Xaa is A or G or is absent
NVQXRPTQVQLRPVQVRKIXXXXXXXXXKKATVTLEDHLAXKX

SEQ ID NO: 19821 - protein, 34 aa, Artificial Sequence
  GFR-binding peptide
  MOD_RES (2)..(2): Xaa is C or S
  MOD_RES (16)..(17)..(18)..(19)..(20): Xaa is A or G
  MOD_RES (21)..(22)..(23)..(24): Xaa is A or G or is absent
EXVPTGQSNITMQIMXXXXXXXXXLGEMSLEEHS

SEQ ID NO: 19822 - protein, 40 aa, Artificial Sequence
  GFR-binding peptide
  MOD_RES (5)..(39): Xaa is C or S
  MOD_RES (19)..(20)..(21)..(22)..(23): Xaa is A or G
  MOD_RES (24)..(25)..(26)..(27): Xaa is A or G or is absent
EGLEXVPTEESNITMQIMXXXXXXXXXLGEMSFLQHNKXE

SEQ ID NO: 19823 - protein, 44 aa, Artificial Sequence
  GFR-binding peptide
  MOD_RES (7)..(41)..(43): Xaa is C or S
NDEGLEXVPTEERPVQMRKIRIKPHQGQHKKATVFLQHNKXEXR

SEQ ID NO: 19824 - protein, 39 aa, Artificial Sequence
  GFR-binding peptide
  MOD_RES (1)..(38): Xaa is C or S
  MOD_RES (17)..(18)..(19)..(20)..(21): Xaa is A or G
  MOD_RES (22)..(23)..(24)..(25): Xaa is A or G or is absent
XRPTQVQLRPVQVRKIXXXXXXXXXKKATVTLEDHLAXK

SEQ ID NO: 19825 - protein, 37 aa, Artificial Sequence
  GFR-binding peptide
  MOD_RES (36)..(36): Xaa is C or S
PTQVQLSNITVQIMEIVRKKPIFLGEMSTLEDHLAXK

SEQ ID NO: 19826 - protein, 36 aa, Artificial Sequence
  GFR-binding peptide
  MOD_RES (36)..(36): Xaa is C or S
  MOD_RES (15)..(16)..(17)..(18)..(19): Xaa is A or G
  MOD_RES (20)..(21)..(22)..(23): Xaa is A or G or is absent
PSRVHHRSVKVAKVXXXXXXXXXKEVQVRLEEHLEX

SEQ ID NO: 19827 - protein, 38 aa, Artificial Sequence
  GFR-binding peptide
  MOD_RES (3)..(37): Xaa is C or S
  MOD_RES (17)..(18)..(19)..(20)..(21): Xaa is A or G
  MOD_RES (22)..(23)..(24)..(25): Xaa is A or G or is absent
LEXVPTGQRSVKMAKVXXXXXXXXXKEVQVLEEHSQXE

SEQ ID NO: 19828 - protein, 43 aa, Artificial Sequence
  GFR-binding peptide
  MOD_RES (4)..(41)..(43): Xaa is C or S
  MOD_RES (20)..(21)..(22)..(23)..(24): Xaa is A or G
  MOD_RES (25)..(26)..(27)..(28): Xaa is A or G or is absent
NVQXRPTQVQLRSVKVAKVXXXXXXXXXKEVQVTLEDHLAXKX

SEQ ID NO: 19829 - protein, 38 aa, Artificial Sequence
  GFR-binding peptide
  MOD_RES (4)..(38): Xaa is C or S
  MOD_RES (18)..(19)..(20)..(21)..(22): Xaa is A or G
  MOD_RES (23)..(24)..(25)..(26): Xaa is A or G or is absent
GLEXVPTEERSVKMAKVXXXXXXXXXKEVQVFLQHNKX

SEQ ID NO: 19830 - protein, 38 aa, Artificial Sequence
  GFR-binding peptide
  MOD_RES (3)..(37): Xaa is C or S
  MOD_RES (17)..(18)..(19)..(20)..(21): Xaa is A or G
  MOD_RES (22)..(23)..(24)..(25): Xaa is A or G or is absent
LEXVPTEESNITMQIMXXXXXXXXXIGEMSFLQHNKXE

SEQ ID NO: 19831 - protein, 34 aa, Artificial Sequence
  GFR-binding peptide
  MOD_RES (2)..(2): Xaa is C or S
EXVPTGQRSVKMAKVRIKPHQGQHKEVQVLEEHS

SEQ ID NO: 19832 - protein, 39 aa, Artificial Sequence
  GFR-binding peptide
  MOD_RES (1)..(38): Xaa is C or S
XRPTQVQLSNITVQIMEIVRKKPIFLGEMSTLEDHLAXK

SEQ ID NO: 19833 - protein, 38 aa, Artificial Sequence
  GFR-binding peptide
  MOD_RES (4)..(4): Xaa is C or S
  MOD_RES (20)..(21)..(22)..(23)..(24): Xaa is A or G
  MOD_RES (25)..(26)..(27)..(28): Xaa is A or G or is absent
NVQXRPTQVQLSNITVQIMXXXXXXXXXLGEMSTLEDH

SEQ ID NO: 19834 - protein, 36 aa, Artificial Sequence
  GFR-binding peptide
  MOD_RES (2)..(2): Xaa is C or S
  MOD_RES (18)..(19)..(20)..(21)..(22): Xaa is A or G
  MOD_RES (23)..(24)..(25)..(26): Xaa is A or G or is absent
QXRPTQVQLRPVQVRKIXXXXXXXXXKKATVTLEDH

SEQ ID NO: 19835 - protein, 34 aa, Artificial Sequence
  GFR-binding peptide
  MOD_RES (14)..(15)..(16)..(17)..(18): Xaa is A or G
  MOD_RES (19)..(20)..(21)..(22): Xaa is A or G or is absent
TQVQLSNITVQIMXXXXXXXXXIGEMSTLEDHLA

SEQ ID NO: 19836 - protein, 42 aa, Artificial Sequence
  GFR-binding peptide
  MOD_RES (6)..(40)..(42): Xaa is C or S
  MOD_RES (20)..(21)..(22)..(23)..(24): Xaa is A or G
  MOD_RES (25)..(26)..(27)..(28): Xaa is A or G or is absent
DEGLEXVPTEERSVKMAKVXXXXXXXXXKEVQVFLQHNKXEX

SEQ ID NO: 19837 - protein, 38 aa, Artificial Sequence
  GFR-binding peptide
  MOD_RES (5)..(5): Xaa is C or S
EGLEXVPTGQRSVKMAKVRIKPHQGQHKEVQVLEEHSQ

SEQ ID NO: 19838 - protein, 40 aa, Artificial Sequence
  GFR-binding peptide
  MOD_RES (2)..(39): Xaa is C or S
  MOD_RES (18)..(19)..(20)..(21)..(22): Xaa is A or G
  MOD_RES (23)..(24)..(25)..(26): Xaa is A or G or is absent
QXRPTQVQLRPVQVRKIXXXXXXXXXKKATVTLEDHLAXK

SEQ ID NO: 19839 - protein, 42 aa, Artificial Sequence
  GFR-binding peptide
  MOD_RES (3)..(40)..(42): Xaa is C or S
  MOD_RES (19)..(20)..(21)..(22)..(23): Xaa is A or G
  MOD_RES (24)..(25)..(26)..(27): Xaa is A or G or is absent
VKXQPSRVHHRPVQVRKIXXXXXXXXXKKATVRLEEHLEXAX

SEQ ID NO: 19840 - protein, 44 aa, Artificial Sequence
  GFR-binding peptide
  MOD_RES (5)..(42)..(44): Xaa is C or S
  MOD_RES (21)..(22)..(23)..(24)..(25): Xaa is A or G
  MOD_RES (26)..(27)..(28)..(29): Xaa is A or G or is absent
RNVQXRPTQVQLRPVQVRKIXXXXXXXXXKKATVTLEDHLAXKX

SEQ ID NO: 19841 - protein, 41 aa, Artificial Sequence
  GFR-binding peptide
  MOD_RES (4)..(41): Xaa is C or S
  MOD_RES (20)..(21)..(22)..(23)..(24): Xaa is A or G
  MOD_RES (25)..(26)..(27)..(28): Xaa is A or G or is absent
SVKXQPSRVHHSNITVQIMXXXXXXXXXLGEMSRLEEHLEX

SEQ ID NO: 19842 - protein, 37 aa, Artificial Sequence
  GFR-binding peptide
  MOD_RES (35)..(37): Xaa is C or S
  MOD_RES (14)..(15)..(16)..(17)..(18): Xaa is A or G
  MOD_RES (19)..(20)..(21)..(22): Xaa is A or G or is absent
SRVHHSNITVQIMXXXXXXXXXIGEMSRLEEHLEXAX

SEQ ID NO: 19843 - protein, 38 aa, Artificial Sequence
  GFR-binding peptide
  MOD_RES (6)..(6): Xaa is C or S
  MOD_RES (20)..(21)..(22)..(23)..(24): Xaa is A or G
  MOD_RES (25)..(26)..(27)..(28): Xaa is A or G or is absent
DEGLEXVPTGQRPVQMRKIXXXXXXXXXKKATVLEEHS

SEQ ID NO: 19844 - protein, 43 aa, Artificial Sequence
  GFR-binding peptide
  MOD_RES (4)..(41)..(43): Xaa is C or S
NVQXRPTQVQLSNITVQIMEIVRKKPIFLGEMSTLEDHLAXKX

SEQ ID NO: 19845 - protein, 39 aa, Artificial Sequence
  GFR-binding peptide
  MOD_RES (2)..(36)..(38): Xaa is C or S
  MOD_RES (16)..(17)..(18)..(19)..(20): Xaa is A or G
  MOD_RES (21)..(22)..(23)..(24): Xaa is A or G or is absent
EXVPTGQRSVKMAKVXXXXXXXXXKEVQVLEEHSQXEXR

SEQ ID NO: 19846 - protein, 35 aa, Artificial Sequence
  GFR-binding peptide
  MOD_RES (3)..(3): Xaa is C or S
  MOD_RES (17)..(18)..(19)..(20)..(21): Xaa is A or G
  MOD_RES (22)..(23)..(24)..(25): Xaa is A or G or is absent
LEXVPTGQRSVKMAKVXXXXXXXXXKEVQVLEEHS

SEQ ID NO: 19847 - protein, 37 aa, Artificial Sequence
  GFR-binding peptide
  MOD_RES (1)..(35)..(37): Xaa is C or S
  MOD_RES (15)..(16)..(17)..(18)..(19): Xaa is A or G
  MOD_RES (20)..(21)..(22)..(23): Xaa is A or G or is absent
XVPTEESNITMQIMXXXXXXXXXIGEMSFLQHNKXEX

SEQ ID NO: 19848 - protein, 34 aa, Artificial Sequence
  GFR-binding peptide
  MOD_RES (1)..(1): Xaa is C or S
XVPTEERSVKMAKVRIKPHQGQHKEVQVFLQHNK

SEQ ID NO: 19849 - protein, 39 aa, Artificial Sequence
  GFR-binding peptide
  MOD_RES (3)..(3): Xaa is C or S
VKXQPSRVHHRPVQVRKIEYVRKKPKLKKATVRLEEHLE

SEQ ID NO: 19850 - protein, 37 aa, Artificial Sequence
  GFR-binding peptide
  MOD_RES (3)..(3): Xaa is C or S
  MOD_RES (19)..(20)..(21)..(22)..(23): Xaa is A or G
  MOD_RES (24)..(25)..(26)..(27): Xaa is A or G or is absent
VQXRPTQVQLSNITVQIMXXXXXXXXXLGEMSTLEDH

SEQ ID NO: 19851 - protein, 35 aa, Artificial Sequence
  GFR-binding peptide
  MOD_RES (2)..(2): Xaa is C or S
EXVPTEESNITMQIMRIKPHQGQHLGEMSFLQHNK

SEQ ID NO: 19852 - protein, 38 aa, Artificial Sequence
  GFR-binding peptide
  MOD_RES (4)..(4): Xaa is C or S
  MOD_RES (20)..(21)..(22)..(23)..(24): Xaa is A or G
  MOD_RES (25)..(26)..(27)..(28): Xaa is A or G or is absent
NVQXRPTQVQLSNITVQIMXXXXXXXXXIGEMSTLEDH

SEQ ID NO: 19853 - protein, 42 aa, Artificial Sequence
  GFR-binding peptide
  MOD_RES (3)..(40)..(42): Xaa is C or S
  MOD_RES (19)..(20)..(21)..(22)..(23): Xaa is A or G
  MOD_RES (24)..(25)..(26)..(27): Xaa is A or G or is absent
VKXQPSRVHHRSVKVAKVXXXXXXXXXKEVQVRLEEHLEXAX

SEQ ID NO: 19854 - protein, 37 aa, Artificial Sequence
  GFR-binding peptide
  MOD_RES (37)..(37): Xaa is C or S
RPTQVQLRSVKVAKVEIVRKKPIFKEVQVTLEDHLAX

SEQ ID NO: 19855 - protein, 36 aa, Artificial Sequence
  GFR-binding peptide
  MOD_RES (1)..(35): Xaa is C or S
XVPTEERPVQMRKIRIKPHQGQHKKATVFLQHNKXE

SEQ ID NO: 19856 - protein, 39 aa, Artificial Sequence
  GFR-binding peptide
  MOD_RES (1)..(38): Xaa is C or S
  MOD_RES (17)..(18)..(19)..(20)..(21): Xaa is A or G
  MOD_RES (22)..(23)..(24)..(25): Xaa is A or G or is absent
XQPSRVHHRSVKVAKVXXXXXXXXXKEVQVRLEEHLEXA

SEQ ID NO: 19857 - protein, 35 aa, Artificial Sequence
  GFR-binding peptide
  MOD_RES (2)..(2): Xaa is C or S
  MOD_RES (16)..(17)..(18)..(19)..(20): Xaa is A or G
  MOD_RES (21)..(22)..(23)..(24): Xaa is A or G or is absent
EXVPTEERSVKMAKVXXXXXXXXXKEVQVFLQHNK

SEQ ID NO: 19858 - protein, 39 aa, Artificial Sequence
  GFR-binding peptide
  MOD_RES (4)..(4): Xaa is C or S
  MOD_RES (20)..(21)..(22)..(23)..(24): Xaa is A or G
  MOD_RES (25)..(26)..(27)..(28): Xaa is A or G or is absent
SVKXQPSRVHHSNITVQIMXXXXXXXXXIGEMSRLEEHL

SEQ ID NO: 19859 - protein, 40 aa, Artificial Sequence
  GFR-binding peptide
  MOD_RES (37)..(39): Xaa is C or S
QPSRVHHSNITVQIMEYVRKKPKLLGEMSRLEEHLEXAXA

SEQ ID NO: 19860 - protein, 40 aa, Artificial Sequence
  GFR-binding peptide
  MOD_RES (3)..(40): Xaa is C or S
VKXQPSRVHHRPVQVRKIEYVRKKPKLKKATVRLEEHLEX

SEQ ID NO: 19861 - protein, 36 aa, Artificial Sequence
  GFR-binding peptide
  MOD_RES (2)..(2): Xaa is C or S
KXQPSRVHHRPVQVRKIEYVRKKPKLKKATVRLEEH

SEQ ID NO: 19862 - protein, 35 aa, Artificial Sequence
  GFR-binding peptide
QPSRVHHSNITVQIMEYVRKKPKLIGEMSRLEEHL

SEQ ID NO: 19863 - protein, 39 aa, Artificial Sequence
  GFR-binding peptide
  MOD_RES (6)..(6): Xaa is C or S
DEGLEXVPTGQSNITMQIMRIKPHQGQHIGEMSLEEHSQ

SEQ ID NO: 19864 - protein, 38 aa, Artificial Sequence
  GFR-binding peptide
  MOD_RES (35)..(37): Xaa is C or S
  MOD_RES (14)..(15)..(16)..(17)..(18): Xaa is A or G
  MOD_RES (19)..(20)..(21)..(22): Xaa is A or G or is absent
SRVHHSNITVQIMXXXXXXXXXLGEMSRLEEHLEXAXA

SEQ ID NO: 19865 - protein, 43 aa, Artificial Sequence
  GFR-binding peptide
  MOD_RES (7)..(41)..(43): Xaa is C or S
NDEGLEXVPTGQRPVQMRKIRIKPHQGQHKKATVLEEHSQXEX

SEQ ID NO: 19866 - protein, 40 aa, Artificial Sequence
  GFR-binding peptide
  MOD_RES (1)..(38)..(40): Xaa is C or S
XQPSRVHHSNITVQIMEYVRKKPKLLGEMSRLEEHLEXAX

SEQ ID NO: 19867 - protein, 40 aa, Artificial Sequence
  GFR-binding peptide
  MOD_RES (1)..(38)..(40): Xaa is C or S
XQPSRVHHSNITVQIMEYVRKKPKLIGEMSRLEEHLEXAX

SEQ ID NO: 19868 - protein, 44 aa, Artificial Sequence
  GFR-binding peptide
  MOD_RES (7)..(41)..(43): Xaa is C or S
  MOD_RES (21)..(22)..(23)..(24)..(25): Xaa is A or G
  MOD_RES (26)..(27)..(28)..(29): Xaa is A or G or is absent
NDEGLEXVPTEERPVQMRKIXXXXXXXXXKKATVFLQHNKXEXR

SEQ ID NO: 19869 - protein, 33 aa, Artificial Sequence
  GFR-binding peptide
PTQVQLSNITVQIMEIVRKKPIFIGEMSTLEDH

SEQ ID NO: 19870 - protein, 36 aa, Artificial Sequence
  GFR-binding peptide
  MOD_RES (1)..(1): Xaa is C or S
XRPTQVQLSNITVQIMEIVRKKPIFIGEMSTLEDHL

SEQ ID NO: 19871 - protein, 34 aa, Artificial Sequence
  GFR-binding peptide
  MOD_RES (14)..(15)..(16)..(17)..(18): Xaa is A or G
  MOD_RES (19)..(20)..(21)..(22): Xaa is A or G or is absent
SRVHHRSVKVAKVXXXXXXXXXKEVQVRLEEHLE

SEQ ID NO: 19872 - protein, 33 aa, Artificial Sequence
  GFR-binding peptide
TQVQLRSVKVAKVEIVRKKPIFKEVQVTLEDHL

SEQ ID NO: 19873 - protein, 34 aa, Artificial Sequence
  GFR-binding peptide
PSRVHHSNITVQIMEYVRKKPKLLGEMSRLEEHL

SEQ ID NO: 19874 - protein, 40 aa, Artificial Sequence
  GFR-binding peptide
  MOD_RES (4)..(4): Xaa is C or S
SVKXQPSRVHHSNITVQIMEYVRKKPKLIGEMSRLEEHLE

SEQ ID NO: 19875 - protein, 35 aa, Artificial Sequence
  GFR-binding peptide
  MOD_RES (15)..(16)..(17)..(18)..(19): Xaa is A or G
  MOD_RES (20)..(21)..(22)..(23): Xaa is A or G or is absent
PTQVQLSNITVQIMXXXXXXXXXIGEMSTLEDHLA

SEQ ID NO: 19876 - protein, 43 aa, Artificial Sequence
  GFR-binding peptide
  MOD_RES (4)..(41)..(43): Xaa is C or S
  MOD_RES (20)..(21)..(22)..(23)..(24): Xaa is A or G
  MOD_RES (25)..(26)..(27)..(28): Xaa is A or G or is absent
SVKXQPSRVHHRSVKVAKVXXXXXXXXXKEVQVRLEEHLEXAX

SEQ ID NO: 19877 - protein, 41 aa, Artificial Sequence
  GFR-binding peptide
  MOD_RES (5)..(39)..(41): Xaa is C or S
  MOD_RES (19)..(20)..(21)..(22)..(23): Xaa is A or G
  MOD_RES (24)..(25)..(26)..(27): Xaa is A or G or is absent
EGLEXVPTEERSVKMAKVXXXXXXXXXKEVQVFLQHNKXEX

SEQ ID NO: 19878 - protein, 34 aa, Artificial Sequence
  GFR-binding peptide
  MOD_RES (34)..(34): Xaa is C or S
VPTGQSNITMQIMRIKPHQGQHIGEMSLEEHSQX

SEQ ID NO: 19879 - protein, 36 aa, Artificial Sequence
  GFR-binding peptide
  MOD_RES (2)..(2): Xaa is C or S
KXQPSRVHHSNITVQIMEYVRKKPKLIGEMSRLEEH

SEQ ID NO: 19880 - protein, 40 aa, Artificial Sequence
  GFR-binding peptide
  MOD_RES (7)..(7): Xaa is C or S
NDEGLEXVPTEERPVQMRKIRIKPHQGQHKKATVFLQHNK

SEQ ID NO: 19881 - protein, 37 aa, Artificial Sequence
  GFR-binding peptide
  MOD_RES (36)..(36): Xaa is C or S
  MOD_RES (15)..(16)..(17)..(18)..(19): Xaa is A or G
  MOD_RES (20)..(21)..(22)..(23): Xaa is A or G or is absent
PSRVHHRSVKVAKVXXXXXXXXXKEVQVRLEEHLEXA

SEQ ID NO: 19882 - protein, 36 aa, Artificial Sequence
  GFR-binding peptide
RPTQVQLRSVKVAKVEIVRKKPIFKEVQVTLEDHLA

SEQ ID NO: 19883 - protein, 37 aa, Artificial Sequence
  GFR-binding peptide
  MOD_RES (37)..(37): Xaa is C or S
  MOD_RES (16)..(17)..(18)..(19)..(20): Xaa is A or G
  MOD_RES (21)..(22)..(23)..(24): Xaa is A or G or is absent
RPTQVQLSNITVQIMXXXXXXXXXIGEMSTLEDHLAX

SEQ ID NO: 19884 - protein, 34 aa, Artificial Sequence
  GFR-binding peptide
  MOD_RES (34)..(34): Xaa is C or S
  MOD_RES (14)..(15)..(16)..(17)..(18): Xaa is A or G
  MOD_RES (19)..(20)..(21)..(22): Xaa is A or G or is absent
VPTGQSNITMQIMXXXXXXXXXLGEMSLEEHSQX

SEQ ID NO: 19885 - protein, 34 aa, Artificial Sequence
  GFR-binding peptide
  MOD_RES (15)..(16)..(17)..(18)..(19): Xaa is A or G
  MOD_RES (20)..(21)..(22)..(23): Xaa is A or G or is absent
PTQVQLSNITVQIMXXXXXXXXXIGEMSTLEDHL

SEQ ID NO: 19886 - protein, 35 aa, Artificial Sequence
  GFR-binding peptide
  MOD_RES (3)..(3): Xaa is C or S
  MOD_RES (17)..(18)..(19)..(20)..(21): Xaa is A or G
  MOD_RES (22)..(23)..(24)..(25): Xaa is A or G or is absent
LEXVPTEERPVQMRKIXXXXXXXXXKKATVFLQHN

SEQ ID NO: 19887 - protein, 40 aa, Artificial Sequence
  GFR-binding peptide
  MOD_RES (2)..(39): Xaa is C or S
KXQPSRVHHSNITVQIMEYVRKKPKLLGEMSRLEEHLEXA

SEQ ID NO: 19888 - protein, 34 aa, Artificial Sequence
  GFR-binding peptide
  MOD_RES (14)..(15)..(16)..(17)..(18): Xaa is A or G
  MOD_RES (19)..(20)..(21)..(22): Xaa is A or G or is absent
TQVQLRPVQVRKIXXXXXXXXXKKATVTLEDHLA

SEQ ID NO: 19889 - protein, 38 aa, Artificial Sequence
  GFR-binding peptide
  MOD_RES (3)..(3): Xaa is C or S
  MOD_RES (19)..(20)..(21)..(22)..(23): Xaa is A or G
  MOD_RES (24)..(25)..(26)..(27): Xaa is A or G or is absent
VQXRPTQVQLRPVQVRKIXXXXXXXXXKKATVTLEDHL

SEQ ID NO: 19890 - protein, 38 aa, Artificial Sequence
  GFR-binding peptide
  MOD_RES (3)..(3): Xaa is C or S
VKXQPSRVHHRPVQVRKIEYVRKKPKLKKATVRLEEHL

SEQ ID NO: 19891 - protein, 40 aa, Artificial Sequence
  GFR-binding peptide
  MOD_RES (37)..(39): Xaa is C or S
  MOD_RES (16)..(17)..(18)..(19)..(20): Xaa is A or G
  MOD_RES (21)..(22)..(23)..(24): Xaa is A or G or is absent
RPTQVQLRPVQVRKIXXXXXXXXXKKATVTLEDHLAXKXE

SEQ ID NO: 19892 - protein, 44 aa, Artificial Sequence
  GFR-binding peptide
  MOD_RES (5)..(42)..(44): Xaa is C or S
  MOD_RES (21)..(22)..(23)..(24)..(25): Xaa is A or G
  MOD_RES (26)..(27)..(28)..(29): Xaa is A or G or is absent
RNVQXRPTQVQLRSVKVAKVXXXXXXXXXKEVQVTLEDHLAXKX

SEQ ID NO: 19893 - protein, 38 aa, Artificial Sequence
  GFR-binding peptide
  MOD_RES (1)..(35)..(37): Xaa is C or S
XVPTGQSNITMQIMRIKPHQGQHIGEMSLEEHSQXEXR

SEQ ID NO: 19894 - protein, 43 aa, Artificial Sequence
  GFR-binding peptide
  MOD_RES (4)..(41)..(43): Xaa is C or S
SVKXQPSRVHHSNITVQIMEYVRKKPKLIGEMSRLEEHLEXAX

SEQ ID NO: 19895 - protein, 40 aa, Artificial Sequence
  GFR-binding peptide
  MOD_RES (2)..(39): Xaa is C or S
KXQPSRVHHRPVQVRKIEYVRKKPKLKKATVRLEEHLEXA

SEQ ID NO: 19896 - protein, 43 aa, Artificial Sequence
  GFR-binding peptide
  MOD_RES (4)..(41)..(43): Xaa is C or S
SVKXQPSRVHHSNITVQIMEYVRKKPKLLGEMSRLEEHLEXAX

SEQ ID NO: 19897 - protein, 34 aa, Artificial Sequence
  GFR-binding peptide
  MOD_RES (34)..(34): Xaa is C or S
  MOD_RES (14)..(15)..(16)..(17)..(18): Xaa is A or G
  MOD_RES (19)..(20)..(21)..(22): Xaa is A or G or is absent
VPTGQSNITMQIMXXXXXXXXXIGEMSLEEHSQX

SEQ ID NO: 19898 - protein, 37 aa, Artificial Sequence
  GFR-binding peptide
  MOD_RES (1)..(35)..(37): Xaa is C or S
  MOD_RES (15)..(16)..(17)..(18)..(19): Xaa is A or G
  MOD_RES (20)..(21)..(22)..(23): Xaa is A or G or is absent
XVPTGQRPVQMRKIXXXXXXXXXKKATVLEEHSQXEX

SEQ ID NO: 19899 - protein, 43 aa, Artificial Sequence
  GFR-binding peptide
  MOD_RES (3)..(40)..(42): Xaa is C or S
VQXRPTQVQLRSVKVAKVEIVRKKPIFKEVQVTLEDHLAXKXE

SEQ ID NO: 19900 - protein, 38 aa, Artificial Sequence
  GFR-binding peptide
  MOD_RES (6)..(6): Xaa is C or S
  MOD_RES (20)..(21)..(22)..(23)..(24): Xaa is A or G
  MOD_RES (25)..(26)..(27)..(28): Xaa is A or G or is absent
DEGLEXVPTEERPVQMRKIXXXXXXXXXKKATVFLQHN

SEQ ID NO: 19901 - protein, 40 aa, Artificial Sequence
  GFR-binding peptide
  MOD_RES (7)..(7): Xaa is C or S
  MOD_RES (21)..(22)..(23)..(24)..(25): Xaa is A or G
  MOD_RES (26)..(27)..(28)..(29): Xaa is A or G or is absent
NDEGLEXVPTEESNITMQIMXXXXXXXXXLGEMSFLQHNK

SEQ ID NO: 19902 - protein, 40 aa, Artificial Sequence
  GFR-binding peptide
  MOD_RES (4)..(38)..(40): Xaa is C or S
  MOD_RES (18)..(19)..(20)..(21)..(22): Xaa is A or G
  MOD_RES (23)..(24)..(25)..(26): Xaa is A or G or is absent
GLEXVPTGQSNITMQIMXXXXXXXXXLGEMSLEEHSQXEX

SEQ ID NO: 19903 - protein, 41 aa, Artificial Sequence
  GFR-binding peptide
  MOD_RES (5)..(39)..(41): Xaa is C or S
  MOD_RES (19)..(20)..(21)..(22)..(23): Xaa is A or G
  MOD_RES (24)..(25)..(26)..(27): Xaa is A or G or is absent
EGLEXVPTGQRSVKMAKVXXXXXXXXXKEVQVLEEHSQXEX

SEQ ID NO: 19904 - protein, 41 aa, Artificial Sequence
  GFR-binding peptide
  MOD_RES (4)..(38)..(40): Xaa is C or S
GLEXVPTEERPVQMRKIRIKPHQGQHKKATVFLQHNKXEXR

SEQ ID NO: 19905 - protein, 38 aa, Artificial Sequence
  GFR-binding peptide
  MOD_RES (2)..(36)..(38): Xaa is C or S
  MOD_RES (16)..(17)..(18)..(19)..(20): Xaa is A or G
  MOD_RES (21)..(22)..(23)..(24): Xaa is A or G or is absent
EXVPTEERSVKMAKVXXXXXXXXXKEVQVFLQHNKXEX

SEQ ID NO: 19906 - protein, 35 aa, Artificial Sequence
  GFR-binding peptide
  MOD_RES (1)..(1): Xaa is C or S
  MOD_RES (17)..(18)..(19)..(20)..(21): Xaa is A or G
  MOD_RES (22)..(23)..(24)..(25): Xaa is A or G or is absent
XQPSRVHHSNITVQIMXXXXXXXXXIGEMSRLEEH

SEQ ID NO: 19907 - protein, 37 aa, Artificial Sequence
  GFR-binding peptide
  MOD_RES (36)..(36): Xaa is C or S
  MOD_RES (15)..(16)..(17)..(18)..(19): Xaa is A or G
  MOD_RES (20)..(21)..(22)..(23): Xaa is A or G or is absent
PTQVQLRPVQVRKIXXXXXXXXXKKATVTLEDHLAXK

SEQ ID NO: 19908 - protein, 36 aa, Artificial Sequence
  GFR-binding peptide
  MOD_RES (1)..(35): Xaa is C or S
XVPTEESNITMQIMRIKPHQGQHLGEMSFLQHNKXE

SEQ ID NO: 19909 - protein, 36 aa, Artificial Sequence
  GFR-binding peptide
  MOD_RES (3)..(3): Xaa is C or S
LEXVPTGQRSVKMAKVRIKPHQGQHKEVQVLEEHSQ

SEQ ID NO: 19910 - protein, 39 aa, Artificial Sequence
  GFR-binding peptide
  MOD_RES (4)..(38): Xaa is C or S
GLEXVPTEERPVQMRKIRIKPHQGQHKKATVFLQHNKXE

SEQ ID NO: 19911 - protein, 37 aa, Artificial Sequence
  GFR-binding peptide
  MOD_RES (1)..(1): Xaa is C or S
  MOD_RES (17)..(18)..(19)..(20)..(21): Xaa is A or G
  MOD_RES (22)..(23)..(24)..(25): Xaa is A or G or is absent
XRPTQVQLSNITVQIMXXXXXXXXXLGEMSTLEDHLA

SEQ ID NO: 19912 - protein, 35 aa, Artificial Sequence
  GFR-binding peptide
  MOD_RES (3)..(3): Xaa is C or S
  MOD_RES (17)..(18)..(19)..(20)..(21): Xaa is A or G
  MOD_RES (22)..(23)..(24)..(25): Xaa is A or G or is absent
LEXVPTEERSVKMAKVXXXXXXXXXKEVQVFLQHN

SEQ ID NO: 19913 - protein, 37 aa, Artificial Sequence
  GFR-binding peptide
  MOD_RES (3)..(3): Xaa is C or S
VQXRPTQVQLRSVKVAKVEIVRKKPIFKEVQVTLEDH

SEQ ID NO: 19914 - protein, 33 aa, Artificial Sequence
  GFR-binding peptide
  MOD_RES (14)..(15)..(16)..(17)..(18): Xaa is A or G
  MOD_RES (19)..(20)..(21)..(22): Xaa is A or G or is absent
TQVQLSNITVQIMXXXXXXXXXIGEMSTLEDHL

SEQ ID NO: 19915 - protein, 40 aa, Artificial Sequence
  GFR-binding peptide
  MOD_RES (4)..(4): Xaa is C or S
  MOD_RES (20)..(21)..(22)..(23)..(24): Xaa is A or G
  MOD_RES (25)..(26)..(27)..(28): Xaa is A or G or is absent
NVQXRPTQVQLSNITVQIMXXXXXXXXXIGEMSTLEDHLA

SEQ ID NO: 19916 - protein, 40 aa, Artificial Sequence
  GFR-binding peptide
  MOD_RES (3)..(37)..(39): Xaa is C or S
LEXVPTGQRPVQMRKIRIKPHQGQHKKATVLEEHSQXEXR

SEQ ID NO: 19917 - protein, 41 aa, Artificial Sequence
  GFR-binding peptide
  MOD_RES (5)..(39)..(41): Xaa is C or S
EGLEXVPTEESNITMQIMRIKPHQGQHLGEMSFLQHNKXEX

SEQ ID NO: 19918 - protein, 40 aa, Artificial Sequence
  GFR-binding peptide
  MOD_RES (1)..(38)..(40): Xaa is C or S
  MOD_RES (17)..(18)..(19)..(20)..(21): Xaa is A or G
  MOD_RES (22)..(23)..(24)..(25): Xaa is A or G or is absent
XQPSRVHHRSVKVAKVXXXXXXXXXKEVQVRLEEHLEXAX

SEQ ID NO: 19919 - protein, 40 aa, Artificial Sequence
  GFR-binding peptide
  MOD_RES (4)..(4): Xaa is C or S
  MOD_RES (20)..(21)..(22)..(23)..(24): Xaa is A or G
  MOD_RES (25)..(26)..(27)..(28): Xaa is A or G or is absent
SVKXQPSRVHHRSVKVAKVXXXXXXXXXKEVQVRLEEHLE

SEQ ID NO: 19920 - protein, 38 aa, Artificial Sequence
  GFR-binding peptide
  MOD_RES (3)..(37): Xaa is C or S
  MOD_RES (17)..(18)..(19)..(20)..(21): Xaa is A or G
  MOD_RES (22)..(23)..(24)..(25): Xaa is A or G or is absent
LEXVPTEERPVQMRKIXXXXXXXXXKKATVFLQHNKXE

SEQ ID NO: 19921 - protein, 38 aa, Artificial Sequence
  GFR-binding peptide
  MOD_RES (1)..(38): Xaa is C or S
  MOD_RES (17)..(18)..(19)..(20)..(21): Xaa is A or G
  MOD_RES (22)..(23)..(24)..(25): Xaa is A or G or is absent
XQPSRVHHRPVQVRKIXXXXXXXXXKKATVRLEEHLEX

SEQ ID NO: 19922 - protein, 36 aa, Artificial Sequence
  GFR-binding peptide
  MOD_RES (2)..(36): Xaa is C or S
EXVPTEERSVKMAKVRIKPHQGQHKEVQVFLQHNKX

SEQ ID NO: 19923 - protein, 35 aa, Artificial Sequence
  GFR-binding peptide
  MOD_RES (15)..(16)..(17)..(18)..(19): Xaa is A or G
  MOD_RES (20)..(21)..(22)..(23): Xaa is A or G or is absent
PSRVHHRSVKVAKVXXXXXXXXXKEVQVRLEEHLE

SEQ ID NO: 19924 - protein, 37 aa, Artificial Sequence
  GFR-binding peptide
  MOD_RES (1)..(1): Xaa is C or S
  MOD_RES (17)..(18)..(19)..(20)..(21): Xaa is A or G
  MOD_RES (22)..(23)..(24)..(25): Xaa is A or G or is absent
XRPTQVQLRSVKVAKVXXXXXXXXXKEVQVTLEDHLA

SEQ ID NO: 19925 - protein, 40 aa, Artificial Sequence
  GFR-binding peptide
  MOD_RES (1)..(38)..(40): Xaa is C or S
XRPTQVQLRSVKVAKVEIVRKKPIFKEVQVTLEDHLAXKX

SEQ ID NO: 19926 - protein, 40 aa, Artificial Sequence
  GFR-binding peptide
  MOD_RES (5)..(5): Xaa is C or S
SSVKXQPSRVHHSNITVQIMEYVRKKPKLIGEMSRLEEHL

SEQ ID NO: 19927 - protein, 37 aa, Artificial Sequence
  GFR-binding peptide
  MOD_RES (4)..(4): Xaa is C or S
GLEXVPTGQRPVQMRKIRIKPHQGQHKKATVLEEHSQ

SEQ ID NO: 19928 - protein, 40 aa, Artificial Sequence
  GFR-binding peptide
  MOD_RES (7)..(7): Xaa is C or S
NDEGLEXVPTGQRPVQMRKIRIKPHQGQHKKATVLEEHSQ

SEQ ID NO: 19929 - protein, 37 aa, Artificial Sequence
  GFR-binding peptide
  MOD_RES (1)..(35)..(37): Xaa is C or S
XVPTEERPVQMRKIRIKPHQGQHKKATVFLQHNKXEX

SEQ ID NO: 19930 - protein, 42 aa, Artificial Sequence
  GFR-binding peptide
  MOD_RES (5)..(39)..(41): Xaa is C or S
  MOD_RES (19)..(20)..(21)..(22)..(23): Xaa is A or G
  MOD_RES (24)..(25)..(26)..(27): Xaa is A or G or is absent
EGLEXVPTEESNITMQIMXXXXXXXXXLGEMSFLQHNKXEXR

SEQ ID NO: 19931 - protein, 34 aa, Artificial Sequence
  GFR-binding peptide
  MOD_RES (2)..(2): Xaa is C or S
EXVPTEERPVQMRKIRIKPHQGQHKKATVFLQHN

SEQ ID NO: 19932 - protein, 35 aa, Artificial Sequence
  GFR-binding peptide
  MOD_RES (1)..(1): Xaa is C or S
  MOD_RES (17)..(18)..(19)..(20)..(21): Xaa is A or G
  MOD_RES (22)..(23)..(24)..(25): Xaa is A or G or is absent
XQPSRVHHSNITVQIMXXXXXXXXXLGEMSRLEEH

SEQ ID NO: 19933 - protein, 38 aa, Artificial Sequence
  GFR-binding peptide
  MOD_RES (1)..(38): Xaa is C or S
  MOD_RES (17)..(18)..(19)..(20)..(21): Xaa is A or G
  MOD_RES (22)..(23)..(24)..(25): Xaa is A or G or is absent
XQPSRVHHSNITVQIMXXXXXXXXXLGEMSRLEEHLEX

SEQ ID NO: 19934 - protein, 42 aa, Artificial Sequence
  GFR-binding peptide
  MOD_RES (2)..(39)..(41): Xaa is C or S
KXQPSRVHHSNITVQIMEYVRKKPKLIGEMSRLEEHLEXAXA

SEQ ID NO: 19935 - protein, 34 aa, Artificial Sequence
  GFR-binding peptide
PTQVQLRSVKVAKVEIVRKKPIFKEVQVTLEDHL

SEQ ID NO: 19936 - protein, 41 aa, Artificial Sequence
  GFR-binding peptide
  MOD_RES (1)..(38)..(40): Xaa is C or S
XQPSRVHHRPVQVRKIEYVRKKPKLKKATVRLEEHLEXAXA

SEQ ID NO: 19937 - protein, 34 aa, Artificial Sequence
  GFR-binding peptide
  MOD_RES (1)..(1): Xaa is C or S
  MOD_RES (15)..(16)..(17)..(18)..(19): Xaa is A or G
  MOD_RES (20)..(21)..(22)..(23): Xaa is A or G or is absent
XVPTGQSNITMQIMXXXXXXXXXIGEMSLEEHSQ

SEQ ID NO: 19938 - protein, 37 aa, Artificial Sequence
  GFR-binding peptide
  MOD_RES (1)..(35)..(37): Xaa is C or S
  MOD_RES (15)..(16)..(17)..(18)..(19): Xaa is A or G
  MOD_RES (20)..(21)..(22)..(23): Xaa is A or G or is absent
XVPTEERPVQMRKIXXXXXXXXXKKATVFLQHNKXEX

SEQ ID NO: 19939 - protein, 40 aa, Artificial Sequence
  GFR-binding peptide
  MOD_RES (3)..(37)..(39): Xaa is C or S
LEXVPTGQSNITMQIMRIKPHQGQHIGEMSLEEHSQXEXR

SEQ ID NO: 19940 - protein, 41 aa, Artificial Sequence
  GFR-binding peptide
  MOD_RES (3)..(40): Xaa is C or S
  MOD_RES (19)..(20)..(21)..(22)..(23): Xaa is A or G
  MOD_RES (24)..(25)..(26)..(27): Xaa is A or G or is absent
VKXQPSRVHHSNITVQIMXXXXXXXXXIGEMSRLEEHLEXA

SEQ ID NO: 19941 - protein, 42 aa, Artificial Sequence
  GFR-binding peptide
  MOD_RES (3)..(40)..(42): Xaa is C or S
  MOD_RES (19)..(20)..(21)..(22)..(23): Xaa is A or G
  MOD_RES (24)..(25)..(26)..(27): Xaa is A or G or is absent
VQXRPTQVQLSNITVQIMXXXXXXXXXIGEMSTLEDHLAXKX

SEQ ID NO: 19942 - protein, 42 aa, Artificial Sequence
  GFR-binding peptide
  MOD_RES (3)..(40)..(42): Xaa is C or S
  MOD_RES (19)..(20)..(21)..(22)..(23): Xaa is A or G
  MOD_RES (24)..(25)..(26)..(27): Xaa is A or G or is absent
VQXRPTQVQLSNITVQIMXXXXXXXXXLGEMSTLEDHLAXKX

SEQ ID NO: 19943 - protein, 40 aa, Artificial Sequence
  GFR-binding peptide
  MOD_RES (6)..(40): Xaa is C or S
  MOD_RES (20)..(21)..(22)..(23)..(24): Xaa is A or G
  MOD_RES (25)..(26)..(27)..(28): Xaa is A or G or is absent
DEGLEXVPTEESNITMQIMXXXXXXXXXLGEMSFLQHNKX

SEQ ID NO: 19944 - protein, 38 aa, Artificial Sequence
  GFR-binding peptide
  MOD_RES (35)..(37): Xaa is C or S
  MOD_RES (14)..(15)..(16)..(17)..(18): Xaa is A or G
  MOD_RES (19)..(20)..(21)..(22): Xaa is A or G or is absent
SRVHHSNITVQIMXXXXXXXXXIGEMSRLEEHLEXAXA

SEQ ID NO: 19945 - protein, 38 aa, Artificial Sequence
  GFR-binding peptide
  MOD_RES (2)..(2): Xaa is C or S
KXQPSRVHHRPVQVRKIEYVRKKPKLKKATVRLEEHLE

SEQ ID NO: 19946 - protein, 41 aa, Artificial Sequence
  GFR-binding peptide
  MOD_RES (2)..(39)..(41): Xaa is C or S
  MOD_RES (18)..(19)..(20)..(21)..(22): Xaa is A or G
  MOD_RES (23)..(24)..(25)..(26): Xaa is A or G or is absent
KXQPSRVHHSNITVQIMXXXXXXXXXLGEMSRLEEHLEXAX

SEQ ID NO: 19947 - protein, 39 aa, Artificial Sequence
  GFR-binding peptide
  MOD_RES (37)..(39): Xaa is C or S
  MOD_RES (16)..(17)..(18)..(19)..(20): Xaa is A or G
  MOD_RES (21)..(22)..(23)..(24): Xaa is A or G or is absent
QPSRVHHSNITVQIMXXXXXXXXXLGEMSRLEEHLEXAX

SEQ ID NO: 19948 - protein, 41 aa, Artificial Sequence
  GFR-binding peptide
  MOD_RES (5)..(39)..(41): Xaa is C or S
  MOD_RES (19)..(20)..(21)..(22)..(23): Xaa is A or G
  MOD_RES (24)..(25)..(26)..(27): Xaa is A or G or is absent
EGLEXVPTEESNITMQIMXXXXXXXXXLGEMSFLQHNKXEX

SEQ ID NO: 19949 - protein, 33 aa, Artificial Sequence
  GFR-binding peptide
  MOD_RES (14)..(15)..(16)..(17)..(18): Xaa is A or G
  MOD_RES (19)..(20)..(21)..(22): Xaa is A or G or is absent
VPTGQRSVKMAKVXXXXXXXXXKEVQVLEEHSQ

SEQ ID NO: 19950 - protein, 40 aa, Artificial Sequence
  GFR-binding peptide
  MOD_RES (7)..(7): Xaa is C or S
  MOD_RES (21)..(22)..(23)..(24)..(25): Xaa is A or G
  MOD_RES (26)..(27)..(28)..(29): Xaa is A or G or is absent
NDEGLEXVPTGQSNITMQIMXXXXXXXXXLGEMSLEEHSQ

SEQ ID NO: 19951 - protein, 37 aa, Artificial Sequence
  GFR-binding peptide
  MOD_RES (35)..(37): Xaa is C or S
  MOD_RES (14)..(15)..(16)..(17)..(18): Xaa is A or G
  MOD_RES (19)..(20)..(21)..(22): Xaa is A or G or is absent
TQVQLRPVQVRKIXXXXXXXXXKKATVTLEDHLAXKX

SEQ ID NO: 19952 - protein, 40 aa, Artificial Sequence
  GFR-binding peptide
  MOD_RES (3)..(40): Xaa is C or S
VQXRPTQVQLSNITVQIMEIVRKKPIFIGEMSTLEDHLAX

SEQ ID NO: 19953 - protein, 42 aa, Artificial Sequence
  GFR-binding peptide
  MOD_RES (5)..(42): Xaa is C or S
  MOD_RES (21)..(22)..(23)..(24)..(25): Xaa is A or G
  MOD_RES (26)..(27)..(28)..(29): Xaa is A or G or is absent
SSVKXQPSRVHHRSVKVAKVXXXXXXXXXKEVQVRLEEHLEX

SEQ ID NO: 19954 - protein, 37 aa, Artificial Sequence
  GFR-binding peptide
  MOD_RES (4)..(4): Xaa is C or S
  MOD_RES (18)..(19)..(20)..(21)..(22): Xaa is A or G
  MOD_RES (23)..(24)..(25)..(26): Xaa is A or G or is absent
GLEXVPTGQSNITMQIMXXXXXXXXXLGEMSLEEHSQ

SEQ ID NO: 19955 - protein, 39 aa, Artificial Sequence
  GFR-binding peptide
  MOD_RES (2)..(39): Xaa is C or S
  MOD_RES (18)..(19)..(20)..(21)..(22): Xaa is A or G
  MOD_RES (23)..(24)..(25)..(26): Xaa is A or G or is absent
KXQPSRVHHSNITVQIMXXXXXXXXXLGEMSRLEEHLEX

SEQ ID NO: 19956 - protein, 33 aa, Artificial Sequence
  GFR-binding peptide
SRVHHSNITVQIMEYVRKKPKLLGEMSRLEEHL

SEQ ID NO: 19957 - protein, 40 aa, Artificial Sequence
  GFR-binding peptide
  MOD_RES (5)..(5): Xaa is C or S
RNVQXRPTQVQLSNITVQIMEIVRKKPIFIGEMSTLEDHL

SEQ ID NO: 19958 - protein, 36 aa, Artificial Sequence
  GFR-binding peptide
  MOD_RES (36)..(36): Xaa is C or S
PTQVQLSNITVQIMEIVRKKPIFIGEMSTLEDHLAX

SEQ ID NO: 19959 - protein, 43 aa, Artificial Sequence
  GFR-binding peptide
  MOD_RES (7)..(41)..(43): Xaa is C or S
NDEGLEXVPTGQRSVKMAKVRIKPHQGQHKEVQVLEEHSQXEX

SEQ ID NO: 19960 - protein, 42 aa, Artificial Sequence
  GFR-binding peptide
  MOD_RES (3)..(40)..(42): Xaa is C or S
  MOD_RES (19)..(20)..(21)..(22)..(23): Xaa is A or G
  MOD_RES (24)..(25)..(26)..(27): Xaa is A or G or is absent
VKXQPSRVHHSNITVQIMXXXXXXXXXIGEMSRLEEHLEXAX

SEQ ID NO: 19961 - protein, 40 aa, Artificial Sequence
  GFR-binding peptide
  MOD_RES (6)..(40): Xaa is C or S
  MOD_RES (20)..(21)..(22)..(23)..(24): Xaa is A or G
  MOD_RES (25)..(26)..(27)..(28): Xaa is A or G or is absent
DEGLEXVPTGQRPVQMRKIXXXXXXXXXKKATVLEEHSQX

SEQ ID NO: 19962 - protein, 38 aa, Artificial Sequence
  GFR-binding peptide
  MOD_RES (4)..(4): Xaa is C or S
  MOD_RES (20)..(21)..(22)..(23)..(24): Xaa is A or G
  MOD_RES (25)..(26)..(27)..(28): Xaa is A or G or is absent
SVKXQPSRVHHRPVQVRKIXXXXXXXXXKKATVRLEEH

SEQ ID NO: 19963 - protein, 37 aa, Artificial Sequence
  GFR-binding peptide
  MOD_RES (4)..(4): Xaa is C or S
  MOD_RES (18)..(19)..(20)..(21)..(22): Xaa is A or G
  MOD_RES (23)..(24)..(25)..(26): Xaa is A or G or is absent
GLEXVPTEERSVKMAKVXXXXXXXXXKEVQVFLQHNK

SEQ ID NO: 19964 - protein, 43 aa, Artificial Sequence
  GFR-binding peptide
  MOD_RES (5)..(42): Xaa is C or S
  MOD_RES (21)..(22)..(23)..(24)..(25): Xaa is A or G
  MOD_RES (26)..(27)..(28)..(29): Xaa is A or G or is absent
RNVQXRPTQVQLRPVQVRKIXXXXXXXXXKKATVTLEDHLAXK

SEQ ID NO: 19965 - protein, 37 aa, Artificial Sequence
  GFR-binding peptide
  MOD_RES (35)..(37): Xaa is C or S
  MOD_RES (14)..(15)..(16)..(17)..(18): Xaa is A or G
  MOD_RES (19)..(20)..(21)..(22): Xaa is A or G or is absent
SRVHHRSVKVAKVXXXXXXXXXKEVQVRLEEHLEXAX

SEQ ID NO: 19966 - protein, 37 aa, Artificial Sequence
  GFR-binding peptide
  MOD_RES (35)..(37): Xaa is C or S
  MOD_RES (14)..(15)..(16)..(17)..(18): Xaa is A or G
  MOD_RES (19)..(20)..(21)..(22): Xaa is A or G or is absent
SRVHHRPVQVRKIXXXXXXXXXKKATVRLEEHLEXAX

SEQ ID NO: 19967 - protein, 32 aa, Artificial Sequence
  GFR-binding peptide
  MOD_RES (14)..(15)..(16)..(17)..(18): Xaa is A or G
  MOD_RES (19)..(20)..(21)..(22): Xaa is A or G or is absent
SRVHHSNITVQIMXXXXXXXXXIGEMSRLEEH

SEQ ID NO: 19968 - protein, 41 aa, Artificial Sequence
  GFR-binding peptide
  MOD_RES (5)..(5): Xaa is C or S
  MOD_RES (21)..(22)..(23)..(24)..(25): Xaa is A or G
  MOD_RES (26)..(27)..(28)..(29): Xaa is A or G or is absent
RNVQXRPTQVQLSNITVQIMXXXXXXXXXIGEMSTLEDHLA

SEQ ID NO: 19969 - protein, 37 aa, Artificial Sequence
  GFR-binding peptide
  MOD_RES (35)..(37): Xaa is C or S
  MOD_RES (14)..(15)..(16)..(17)..(18): Xaa is A or G
  MOD_RES (19)..(20)..(21)..(22): Xaa is A or G or is absent
TQVQLSNITVQIMXXXXXXXXXIGEMSTLEDHLAXKX

SEQ ID NO: 19970 - protein, 36 aa, Artificial Sequence
  GFR-binding peptide
  MOD_RES (34)..(36): Xaa is C or S
  MOD_RES (14)..(15)..(16)..(17)..(18): Xaa is A or G
  MOD_RES (19)..(20)..(21)..(22): Xaa is A or G or is absent
VPTGQSNITMQIMXXXXXXXXXIGEMSLEEHSQXEX

SEQ ID NO: 19971 - protein, 38 aa, Artificial Sequence
  GFR-binding peptide
  MOD_RES (36)..(38): Xaa is C or S
PSRVHHSNITVQIMEYVRKKPKLIGEMSRLEEHLEXAX

SEQ ID NO: 19972 - protein, 40 aa, Artificial Sequence
  GFR-binding peptide
  MOD_RES (4)..(38)..(40): Xaa is C or S
  MOD_RES (18)..(19)..(20)..(21)..(22): Xaa is A or G
  MOD_RES (23)..(24)..(25)..(26): Xaa is A or G or is absent
GLEXVPTEESNITMQIMXXXXXXXXXLGEMSFLQHNKXEX

SEQ ID NO: 19973 - protein, 35 aa, Artificial Sequence
  GFR-binding peptide
  MOD_RES (15)..(16)..(17)..(18)..(19): Xaa is A or G
  MOD_RES (20)..(21)..(22)..(23): Xaa is A or G or is absent
PTQVQLRPVQVRKIXXXXXXXXXKKATVTLEDHLA

SEQ ID NO: 19974 - protein, 41 aa, Artificial Sequence
  GFR-binding peptide
  MOD_RES (6)..(40): Xaa is C or S
  MOD_RES (20)..(21)..(22)..(23)..(24): Xaa is A or G
  MOD_RES (25)..(26)..(27)..(28): Xaa is A or G or is absent
DEGLEXVPTEESNITMQIMXXXXXXXXXIGEMSFLQHNKXE

SEQ ID NO: 19975 - protein, 37 aa, Artificial Sequence
  GFR-binding peptide
  MOD_RES (3)..(3): Xaa is C or S
VQXRPTQVQLSNITVQIMEIVRKKPIFLGEMSTLEDH

SEQ ID NO: 19976 - protein, 34 aa, Artificial Sequence
  GFR-binding peptide
  MOD_RES (15)..(16)..(17)..(18)..(19): Xaa is A or G
  MOD_RES (20)..(21)..(22)..(23): Xaa is A or G or is absent
PTQVQLRSVKVAKVXXXXXXXXXKEVQVTLEDHL

SEQ ID NO: 19977 - protein, 35 aa, Artificial Sequence
  GFR-binding peptide
  MOD_RES (16)..(17)..(18)..(19)..(20): Xaa is A or G
  MOD_RES (21)..(22)..(23)..(24): Xaa is A or G or is absent
RPTQVQLRPVQVRKIXXXXXXXXXKKATVTLEDHL

SEQ ID NO: 19978 - protein, 38 aa, Artificial Sequence
  GFR-binding peptide
  MOD_RES (5)..(5): Xaa is C or S
  MOD_RES (19)..(20)..(21)..(22)..(23): Xaa is A or G
  MOD_RES (24)..(25)..(26)..(27): Xaa is A or G or is absent
EGLEXVPTGQSNITMQIMXXXXXXXXXLGEMSLEEHSQ

SEQ ID NO: 19979 - protein, 39 aa, Artificial Sequence
  GFR-binding peptide
  MOD_RES (36)..(38): Xaa is C or S
  MOD_RES (15)..(16)..(17)..(18)..(19): Xaa is A or G
  MOD_RES (20)..(21)..(22)..(23): Xaa is A or G or is absent
PSRVHHRSVKVAKVXXXXXXXXXKEVQVRLEEHLEXAXA

SEQ ID NO: 19980 - protein, 35 aa, Artificial Sequence
  GFR-binding peptide
  MOD_RES (35)..(35): Xaa is C or S
SRVHHSNITVQIMEYVRKKPKLIGEMSRLEEHLEX

SEQ ID NO: 19981 - protein, 38 aa, Artificial Sequence
  GFR-binding peptide
  MOD_RES (3)..(3): Xaa is C or S
VQXRPTQVQLSNITVQIMEIVRKKPIFIGEMSTLEDHL

SEQ ID NO: 19982 - protein, 34 aa, Artificial Sequence
  GFR-binding peptide
  MOD_RES (2)..(2): Xaa is C or S
  MOD_RES (16)..(17)..(18)..(19)..(20): Xaa is A or G
  MOD_RES (21)..(22)..(23)..(24): Xaa is A or G or is absent
EXVPTEERPVQMRKIXXXXXXXXXKKATVFLQHN

SEQ ID NO: 19983 - protein, 42 aa, Artificial Sequence
  GFR-binding peptide
  MOD_RES (6)..(40)..(42): Xaa is C or S
  MOD_RES (20)..(21)..(22)..(23)..(24): Xaa is A or G
  MOD_RES (25)..(26)..(27)..(28): Xaa is A or G or is absent
DEGLEXVPTEERPVQMRKIXXXXXXXXXKKATVFLQHNKXEX

SEQ ID NO: 19984 - protein, 42 aa, Artificial Sequence
  GFR-binding peptide
  MOD_RES (4)..(41): Xaa is C or S
NVQXRPTQVQLSNITVQIMEIVRKKPIFIGEMSTLEDHLAXK

SEQ ID NO: 19985 - protein, 38 aa, Artificial Sequence
  GFR-binding peptide
  MOD_RES (5)..(5): Xaa is C or S
EGLEXVPTGQSNITMQIMRIKPHQGQHIGEMSLEEHSQ

SEQ ID NO: 19986 - protein, 38 aa, Artificial Sequence
  GFR-binding peptide
  MOD_RES (36)..(38): Xaa is C or S
  MOD_RES (15)..(16)..(17)..(18)..(19): Xaa is A or G
  MOD_RES (20)..(21)..(22)..(23): Xaa is A or G or is absent
PSRVHHRPVQVRKIXXXXXXXXXKKATVRLEEHLEXAX

SEQ ID NO: 19987 - protein, 36 aa, Artificial Sequence
  GFR-binding peptide
  MOD_RES (36)..(36): Xaa is C or S
PSRVHHSNITVQIMEYVRKKPKLIGEMSRLEEHLEX

SEQ ID NO: 19988 - protein, 35 aa, Artificial Sequence
  GFR-binding peptide
  MOD_RES (35)..(35): Xaa is C or S
SRVHHRPVQVRKIEYVRKKPKLKKATVRLEEHLEX

SEQ ID NO: 19989 - protein, 38 aa, Artificial Sequence
  GFR-binding peptide
  MOD_RES (5)..(5): Xaa is C or S
EGLEXVPTGQRPVQMRKIRIKPHQGQHKKATVLEEHSQ

SEQ ID NO: 19990 - protein, 36 aa, Artificial Sequence
  GFR-binding peptide
  MOD_RES (2)..(2): Xaa is C or S
QXRPTQVQLSNITVQIMEIVRKKPIFLGEMSTLEDH

SEQ ID NO: 19991 - protein, 37 aa, Artificial Sequence
  GFR-binding peptide
  MOD_RES (36)..(36): Xaa is C or S
  MOD_RES (15)..(16)..(17)..(18)..(19): Xaa is A or G
  MOD_RES (20)..(21)..(22)..(23): Xaa is A or G or is absent
PTQVQLSNITVQIMXXXXXXXXXLGEMSTLEDHLAXK

SEQ ID NO: 19992 - protein, 33 aa, Artificial Sequence
  GFR-binding peptide
TQVQLSNITVQIMEIVRKKPIFIGEMSTLEDHL

SEQ ID NO: 19993 - protein, 34 aa, Artificial Sequence
  GFR-binding peptide
TQVQLSNITVQIMEIVRKKPIFIGEMSTLEDHLA

SEQ ID NO: 19994 - protein, 37 aa, Artificial Sequence
  GFR-binding peptide
  MOD_RES (3)..(37): Xaa is C or S
LEXVPTEERPVQMRKIRIKPHQGQHKKATVFLQHNKX

SEQ ID NO: 19995 - protein, 36 aa, Artificial Sequence
  GFR-binding peptide
  MOD_RES (2)..(2): Xaa is C or S
KXQPSRVHHSNITVQIMEYVRKKPKLLGEMSRLEEH

SEQ ID NO: 19996 - protein, 37 aa, Artificial Sequence
  GFR-binding peptide
  MOD_RES (3)..(37): Xaa is C or S
  MOD_RES (17)..(18)..(19)..(20)..(21): Xaa is A or G
  MOD_RES (22)..(23)..(24)..(25): Xaa is A or G or is absent
LEXVPTEERPVQMRKIXXXXXXXXXKKATVFLQHNKX

SEQ ID NO: 19997 - protein, 38 aa, Artificial Sequence
  GFR-binding peptide
  MOD_RES (2)..(2): Xaa is C or S
QXRPTQVQLRSVKVAKVEIVRKKPIFKEVQVTLEDHLA

SEQ ID NO: 19998 - protein, 38 aa, Artificial Sequence
  GFR-binding peptide
  MOD_RES (4)..(4): Xaa is C or S
  MOD_RES (20)..(21)..(22)..(23)..(24): Xaa is A or G
  MOD_RES (25)..(26)..(27)..(28): Xaa is A or G or is absent
SVKXQPSRVHHSNITVQIMXXXXXXXXXLGEMSRLEEH

SEQ ID NO: 19999 - protein, 36 aa, Artificial Sequence
  GFR-binding peptide
  MOD_RES (34)..(36): Xaa is C or S
  MOD_RES (14)..(15)..(16)..(17)..(18): Xaa is A or G
  MOD_RES (19)..(20)..(21)..(22): Xaa is A or G or is absent
VPTGQRSVKMAKVXXXXXXXXXKEVQVLEEHSQXEX

SEQ ID NO: 20000 - protein, 36 aa, Artificial Sequence
  GFR-binding peptide
  MOD_RES (1)..(1): Xaa is C or S
  MOD_RES (17)..(18)..(19)..(20)..(21): Xaa is A or G
  MOD_RES (22)..(23)..(24)..(25): Xaa is A or G or is absent
XRPTQVQLRPVQVRKIXXXXXXXXXKKATVTLEDHL

SEQ ID NO: 20001 - protein, 40 aa, Artificial Sequence
  GFR-binding peptide
  MOD_RES (6)..(40): Xaa is C or S
DEGLEXVPTEERSVKMAKVRIKPHQGQHKEVQVFLQHNKX

SEQ ID NO: 20002 - protein, 38 aa, Artificial Sequence
  GFR-binding peptide
  MOD_RES (1)..(35)..(37): Xaa is C or S
  MOD_RES (15)..(16)..(17)..(18)..(19): Xaa is A or G
  MOD_RES (20)..(21)..(22)..(23): Xaa is A or G or is absent
XVPTEESNITMQIMXXXXXXXXXLGEMSFLQHNKXEXR

SEQ ID NO: 20003 - protein, 37 aa, Artificial Sequence
  GFR-binding peptide
  MOD_RES (1)..(35)..(37): Xaa is C or S
  MOD_RES (15)..(16)..(17)..(18)..(19): Xaa is A or G
  MOD_RES (20)..(21)..(22)..(23): Xaa is A or G or is absent
XVPTEERSVKMAKVXXXXXXXXXKEVQVFLQHNKXEX

SEQ ID NO: 20004 - protein, 40 aa, Artificial Sequence
  GFR-binding peptide
  MOD_RES (6)..(40): Xaa is C or S
DEGLEXVPTGQRPVQMRKIRIKPHQGQHKKATVLEEHSQX

SEQ ID NO: 20005 - protein, 36 aa, Artificial Sequence
  GFR-binding peptide
  MOD_RES (2)..(2): Xaa is C or S
  MOD_RES (18)..(19)..(20)..(21)..(22): Xaa is A or G
  MOD_RES (23)..(24)..(25)..(26): Xaa is A or G or is absent
QXRPTQVQLRSVKVAKVXXXXXXXXXKEVQVTLEDH

SEQ ID NO: 20006 - protein, 40 aa, Artificial Sequence
  GFR-binding peptide
  MOD_RES (3)..(37)..(39): Xaa is C or S
  MOD_RES (17)..(18)..(19)..(20)..(21): Xaa is A or G
  MOD_RES (22)..(23)..(24)..(25): Xaa is A or G or is absent
LEXVPTEESNITMQIMXXXXXXXXXLGEMSFLQHNKXEXR

SEQ ID NO: 20007 - protein, 40 aa, Artificial Sequence
  GFR-binding peptide
  MOD_RES (3)..(40): Xaa is C or S
  MOD_RES (19)..(20)..(21)..(22)..(23): Xaa is A or G
  MOD_RES (24)..(25)..(26)..(27): Xaa is A or G or is absent
VQXRPTQVQLRSVKVAKVXXXXXXXXXKEVQVTLEDHLAX

SEQ ID NO: 20008 - protein, 41 aa, Artificial Sequence
  GFR-binding peptide
  MOD_RES (4)..(38)..(40): Xaa is C or S
  MOD_RES (18)..(19)..(20)..(21)..(22): Xaa is A or G
  MOD_RES (23)..(24)..(25)..(26): Xaa is A or G or is absent
GLEXVPTGQSNITMQIMXXXXXXXXXLGEMSLEEHSQXEXR

SEQ ID NO: 20009 - protein, 34 aa, Artificial Sequence
  GFR-binding peptide
  MOD_RES (16)..(17)..(18)..(19)..(20): Xaa is A or G
  MOD_RES (21)..(22)..(23)..(24): Xaa is A or G or is absent
RPTQVQLRSVKVAKVXXXXXXXXXKEVQVTLEDH

SEQ ID NO: 20010 - protein, 41 aa, Artificial Sequence
  GFR-binding peptide
  MOD_RES (6)..(40): Xaa is C or S
DEGLEXVPTEESNITMQIMRIKPHQGQHLGEMSFLQHNKXE

SEQ ID NO: 20011 - protein, 40 aa, Artificial Sequence
  GFR-binding peptide
  MOD_RES (37)..(39): Xaa is C or S
QPSRVHHRPVQVRKIEYVRKKPKLKKATVRLEEHLEXAXA

SEQ ID NO: 20012 - protein, 36 aa, Artificial Sequence
  GFR-binding peptide
  MOD_RES (35)..(35): Xaa is C or S
SRVHHRPVQVRKIEYVRKKPKLKKATVRLEEHLEXA

SEQ ID NO: 20013 - protein, 36 aa, Artificial Sequence
  GFR-binding peptide
  MOD_RES (1)..(1): Xaa is C or S
  MOD_RES (17)..(18)..(19)..(20)..(21): Xaa is A or G
  MOD_RES (22)..(23)..(24)..(25): Xaa is A or G or is absent
XRPTQVQLSNITVQIMXXXXXXXXXIGEMSTLEDHL

SEQ ID NO: 20014 - protein, 37 aa, Artificial Sequence
  GFR-binding peptide
  MOD_RES (35)..(37): Xaa is C or S
SRVHHSNITVQIMEYVRKKPKLLGEMSRLEEHLEXAX

SEQ ID NO: 20015 - protein, 33 aa, Artificial Sequence
  GFR-binding peptide
VPTEERSVKMAKVRIKPHQGQHKEVQVFLQHNK

SEQ ID NO: 20016 - protein, 43 aa, Artificial Sequence
  GFR-binding peptide
  MOD_RES (7)..(41)..(43): Xaa is C or S
NDEGLEXVPTGQSNITMQIMRIKPHQGQHIGEMSLEEHSQXEX

SEQ ID NO: 20017 - protein, 45 aa, Artificial Sequence
  GFR-binding peptide
  MOD_RES (5)..(42)..(44): Xaa is C or S
RNVQXRPTQVQLSNITVQIMEIVRKKPIFIGEMSTLEDHLAXKXE

SEQ ID NO: 20018 - protein, 38 aa, Artificial Sequence
  GFR-binding peptide
  MOD_RES (1)..(38): Xaa is C or S
  MOD_RES (17)..(18)..(19)..(20)..(21): Xaa is A or G
  MOD_RES (22)..(23)..(24)..(25): Xaa is A or G or is absent
XQPSRVHHSNITVQIMXXXXXXXXXIGEMSRLEEHLEX

SEQ ID NO: 20019 - protein, 36 aa, Artificial Sequence
  GFR-binding peptide
  MOD_RES (36)..(36): Xaa is C or S
  MOD_RES (15)..(16)..(17)..(18)..(19): Xaa is A or G
  MOD_RES (20)..(21)..(22)..(23): Xaa is A or G or is absent
PTQVQLRSVKVAKVXXXXXXXXXKEVQVTLEDHLAX

SEQ ID NO: 20020 - protein, 39 aa, Artificial Sequence
  GFR-binding peptide
  MOD_RES (4)..(38): Xaa is C or S
  MOD_RES (18)..(19)..(20)..(21)..(22): Xaa is A or G
  MOD_RES (23)..(24)..(25)..(26): Xaa is A or G or is absent
GLEXVPTGQRSVKMAKVXXXXXXXXXKEVQVLEEHSQXE

SEQ ID NO: 20021 - protein, 34 aa, Artificial Sequence
  GFR-binding peptide
QPSRVHHSNITVQIMEYVRKKPKLLGEMSRLEEH

SEQ ID NO: 20022 - protein, 37 aa, Artificial Sequence
  GFR-binding peptide
  MOD_RES (4)..(4): Xaa is C or S
GLEXVPTEESNITMQIMRIKPHQGQHLGEMSFLQHNK

SEQ ID NO: 20023 - protein, 41 aa, Artificial Sequence
  GFR-binding peptide
  MOD_RES (5)..(5): Xaa is C or S
  MOD_RES (21)..(22)..(23)..(24)..(25): Xaa is A or G
  MOD_RES (26)..(27)..(28)..(29): Xaa is A or G or is absent
SSVKXQPSRVHHRSVKVAKVXXXXXXXXXKEVQVRLEEHLE

SEQ ID NO: 20024 - protein, 42 aa, Artificial Sequence
  GFR-binding peptide
  MOD_RES (2)..(39)..(41): Xaa is C or S
  MOD_RES (18)..(19)..(20)..(21)..(22): Xaa is A or G
  MOD_RES (23)..(24)..(25)..(26): Xaa is A or G or is absent
KXQPSRVHHRSVKVAKVXXXXXXXXXKEVQVRLEEHLEXAXA

SEQ ID NO: 20025 - protein, 42 aa, Artificial Sequence
  GFR-binding peptide
  MOD_RES (6)..(40)..(42): Xaa is C or S
  MOD_RES (20)..(21)..(22)..(23)..(24): Xaa is A or G
  MOD_RES (25)..(26)..(27)..(28): Xaa is A or G or is absent
DEGLEXVPTEESNITMQIMXXXXXXXXXIGEMSFLQHNKXEX

SEQ ID NO: 20026 - protein, 39 aa, Artificial Sequence
  GFR-binding peptide
  MOD_RES (2)..(36)..(38): Xaa is C or S
EXVPTGQRSVKMAKVRIKPHQGQHKEVQVLEEHSQXEXR

SEQ ID NO: 20027 - protein, 34 aa, Artificial Sequence
  GFR-binding peptide
  MOD_RES (14)..(15)..(16)..(17)..(18): Xaa is A or G
  MOD_RES (19)..(20)..(21)..(22): Xaa is A or G or is absent
SRVHHSNITVQIMXXXXXXXXXLGEMSRLEEHLE

SEQ ID NO: 20028 - protein, 44 aa, Artificial Sequence
  GFR-binding peptide
  MOD_RES (4)..(41)..(43): Xaa is C or S
  MOD_RES (20)..(21)..(22)..(23)..(24): Xaa is A or G
  MOD_RES (25)..(26)..(27)..(28): Xaa is A or G or is absent
SVKXQPSRVHHSNITVQIMXXXXXXXXXLGEMSRLEEHLEXAXA

SEQ ID NO: 20029 - protein, 42 aa, Artificial Sequence
  GFR-binding peptide
  MOD_RES (6)..(40)..(42): Xaa is C or S
  MOD_RES (20)..(21)..(22)..(23)..(24): Xaa is A or G
  MOD_RES (25)..(26)..(27)..(28): Xaa is A or G or is absent
DEGLEXVPTEESNITMQIMXXXXXXXXXLGEMSFLQHNKXEX

SEQ ID NO: 20030 - protein, 42 aa, Artificial Sequence
  GFR-binding peptide
  MOD_RES (7)..(41): Xaa is C or S
  MOD_RES (21)..(22)..(23)..(24)..(25): Xaa is A or G
  MOD_RES (26)..(27)..(28)..(29): Xaa is A or G or is absent
NDEGLEXVPTEERPVQMRKIXXXXXXXXXKKATVFLQHNKXE

SEQ ID NO: 20031 - protein, 41 aa, Artificial Sequence
  GFR-binding peptide
  MOD_RES (6)..(40): Xaa is C or S
  MOD_RES (20)..(21)..(22)..(23)..(24): Xaa is A or G
  MOD_RES (25)..(26)..(27)..(28): Xaa is A or G or is absent
DEGLEXVPTGQRSVKMAKVXXXXXXXXXKEVQVLEEHSQXE

SEQ ID NO: 20032 - protein, 35 aa, Artificial Sequence
  GFR-binding peptide
  MOD_RES (16)..(17)..(18)..(19)..(20): Xaa is A or G
  MOD_RES (21)..(22)..(23)..(24): Xaa is A or G or is absent
RPTQVQLSNITVQIMXXXXXXXXXIGEMSTLEDHL

SEQ ID NO: 20033 - protein, 39 aa, Artificial Sequence
  GFR-binding peptide
  MOD_RES (37)..(39): Xaa is C or S
  MOD_RES (16)..(17)..(18)..(19)..(20): Xaa is A or G
  MOD_RES (21)..(22)..(23)..(24): Xaa is A or G or is absent
RPTQVQLSNITVQIMXXXXXXXXXIGEMSTLEDHLAXKX

SEQ ID NO: 20034 - protein, 39 aa, Artificial Sequence
  GFR-binding peptide
  MOD_RES (1)..(38): Xaa is C or S
XRPTQVQLSNITVQIMEIVRKKPIFIGEMSTLEDHLAXK

SEQ ID NO: 20035 - protein, 41 aa, Artificial Sequence
  GFR-binding peptide
  MOD_RES (3)..(40): Xaa is C or S
VKXQPSRVHHSNITVQIMEYVRKKPKLIGEMSRLEEHLEXA

SEQ ID NO: 20036 - protein, 39 aa, Artificial Sequence
  GFR-binding peptide
  MOD_RES (6)..(6): Xaa is C or S
  MOD_RES (20)..(21)..(22)..(23)..(24): Xaa is A or G
  MOD_RES (25)..(26)..(27)..(28): Xaa is A or G or is absent
DEGLEXVPTGQSNITMQIMXXXXXXXXXLGEMSLEEHSQ

SEQ ID NO: 20037 - protein, 39 aa, Artificial Sequence
  GFR-binding peptide
  MOD_RES (3)..(37)..(39): Xaa is C or S
LEXVPTEESNITMQIMRIKPHQGQHLGEMSFLQHNKXEX

SEQ ID NO: 20038 - protein, 39 aa, Artificial Sequence
  GFR-binding peptide
  MOD_RES (4)..(38): Xaa is C or S
  MOD_RES (18)..(19)..(20)..(21)..(22): Xaa is A or G
  MOD_RES (23)..(24)..(25)..(26): Xaa is A or G or is absent
GLEXVPTEESNITMQIMXXXXXXXXXIGEMSFLQHNKXE

SEQ ID NO: 20039 - protein, 38 aa, Artificial Sequence
  GFR-binding peptide
  MOD_RES (37)..(37): Xaa is C or S
QPSRVHHSNITVQIMEYVRKKPKLLGEMSRLEEHLEXA

SEQ ID NO: 20040 - protein, 35 aa, Artificial Sequence
  GFR-binding peptide
  MOD_RES (15)..(16)..(17)..(18)..(19): Xaa is A or G
  MOD_RES (20)..(21)..(22)..(23): Xaa is A or G or is absent
PSRVHHSNITVQIMXXXXXXXXXLGEMSRLEEHLE

SEQ ID NO: 20041 - protein, 39 aa, Artificial Sequence
  GFR-binding peptide
  MOD_RES (2)..(36)..(38): Xaa is C or S
EXVPTGQRPVQMRKIRIKPHQGQHKKATVLEEHSQXEXR

SEQ ID NO: 20042 - protein, 40 aa, Artificial Sequence
  GFR-binding peptide
  MOD_RES (1)..(38)..(40): Xaa is C or S
  MOD_RES (17)..(18)..(19)..(20)..(21): Xaa is A or G
  MOD_RES (22)..(23)..(24)..(25): Xaa is A or G or is absent
XRPTQVQLSNITVQIMXXXXXXXXXLGEMSTLEDHLAXKX

SEQ ID NO: 20043 - protein, 39 aa, Artificial Sequence
  GFR-binding peptide
  MOD_RES (36)..(38): Xaa is C or S
  MOD_RES (15)..(16)..(17)..(18)..(19): Xaa is A or G
  MOD_RES (20)..(21)..(22)..(23): Xaa is A or G or is absent
PTQVQLSNITVQIMXXXXXXXXXLGEMSTLEDHLAXKXE

SEQ ID NO: 20044 - protein, 39 aa, Artificial Sequence
  GFR-binding peptide
  MOD_RES (5)..(5): Xaa is C or S
  MOD_RES (21)..(22)..(23)..(24)..(25): Xaa is A or G
  MOD_RES (26)..(27)..(28)..(29): Xaa is A or G or is absent
RNVQXRPTQVQLRPVQVRKIXXXXXXXXXKKATVTLEDH

SEQ ID NO: 20045 - protein, 40 aa, Artificial Sequence
  GFR-binding peptide
  MOD_RES (4)..(38)..(40): Xaa is C or S
GLEXVPTEERPVQMRKIRIKPHQGQHKKATVFLQHNKXEX

SEQ ID NO: 20046 - protein, 34 aa, Artificial Sequence
  GFR-binding peptide
QPSRVHHRPVQVRKIEYVRKKPKLKKATVRLEEH

SEQ ID NO: 20047 - protein, 38 aa, Artificial Sequence
  GFR-binding peptide
  MOD_RES (1)..(35)..(37): Xaa is C or S
  MOD_RES (15)..(16)..(17)..(18)..(19): Xaa is A or G
  MOD_RES (20)..(21)..(22)..(23): Xaa is A or G or is absent
XVPTGQRPVQMRKIXXXXXXXXXKKATVLEEHSQXEXR

SEQ ID NO: 20048 - protein, 34 aa, Artificial Sequence
  GFR-binding peptide
  MOD_RES (15)..(16)..(17)..(18)..(19): Xaa is A or G
  MOD_RES (20)..(21)..(22)..(23): Xaa is A or G or is absent
PSRVHHSNITVQIMXXXXXXXXXLGEMSRLEEHL

SEQ ID NO: 20049 - protein, 39 aa, Artificial Sequence
  GFR-binding peptide
  MOD_RES (2)..(39): Xaa is C or S
QXRPTQVQLSNITVQIMEIVRKKPIFLGEMSTLEDHLAX

SEQ ID NO: 20050 - protein, 42 aa, Artificial Sequence
  GFR-binding peptide
  MOD_RES (5)..(42): Xaa is C or S
SSVKXQPSRVHHSNITVQIMEYVRKKPKLLGEMSRLEEHLEX

SEQ ID NO: 20051 - protein, 38 aa, Artificial Sequence
  GFR-binding peptide
  MOD_RES (4)..(38): Xaa is C or S
GLEXVPTGQRPVQMRKIRIKPHQGQHKKATVLEEHSQX

SEQ ID NO: 20052 - protein, 42 aa, Artificial Sequence
  GFR-binding peptide
  MOD_RES (3)..(40)..(42): Xaa is C or S
VQXRPTQVQLRSVKVAKVEIVRKKPIFKEVQVTLEDHLAXKX

SEQ ID NO: 20053 - protein, 41 aa, Artificial Sequence
  GFR-binding peptide
  MOD_RES (7)..(41): Xaa is C or S
NDEGLEXVPTEERPVQMRKIRIKPHQGQHKKATVFLQHNKX

SEQ ID NO: 20054 - protein, 40 aa, Artificial Sequence
  GFR-binding peptide
  MOD_RES (5)..(5): Xaa is C or S
  MOD_RES (21)..(22)..(23)..(24)..(25): Xaa is A or G
  MOD_RES (26)..(27)..(28)..(29): Xaa is A or G or is absent
RNVQXRPTQVQLRPVQVRKIXXXXXXXXXKKATVTLEDHL

SEQ ID NO: 20055 - protein, 39 aa, Artificial Sequence
  GFR-binding peptide
  MOD_RES (4)..(4): Xaa is C or S
  MOD_RES (20)..(21)..(22)..(23)..(24): Xaa is A or G
  MOD_RES (25)..(26)..(27)..(28): Xaa is A or G or is absent
SVKXQPSRVHHRSVKVAKVXXXXXXXXXKEVQVRLEEHL

SEQ ID NO: 20056 - protein, 33 aa, Artificial Sequence
  GFR-binding peptide
  MOD_RES (14)..(15)..(16)..(17)..(18): Xaa is A or G
  MOD_RES (19)..(20)..(21)..(22): Xaa is A or G or is absent
VPTGQSNITMQIMXXXXXXXXXIGEMSLEEHSQ

SEQ ID NO: 20057 - protein, 36 aa, Artificial Sequence
  GFR-binding peptide
  MOD_RES (2)..(36): Xaa is C or S
  MOD_RES (16)..(17)..(18)..(19)..(20): Xaa is A or G
  MOD_RES (21)..(22)..(23)..(24): Xaa is A or G or is absent
EXVPTGQSNITMQIMXXXXXXXXXLGEMSLEEHSQX

SEQ ID NO: 20058 - protein, 40 aa, Artificial Sequence
  GFR-binding peptide
  MOD_RES (3)..(37)..(39): Xaa is C or S
LEXVPTEESNITMQIMRIKPHQGQHLGEMSFLQHNKXEXR

SEQ ID NO: 20059 - protein, 42 aa, Artificial Sequence
  GFR-binding peptide
  MOD_RES (5)..(39)..(41): Xaa is C or S
  MOD_RES (19)..(20)..(21)..(22)..(23): Xaa is A or G
  MOD_RES (24)..(25)..(26)..(27): Xaa is A or G or is absent
EGLEXVPTGQSNITMQIMXXXXXXXXXIGEMSLEEHSQXEXR

SEQ ID NO: 20060 - protein, 34 aa, Artificial Sequence
  GFR-binding peptide
  MOD_RES (16)..(17)..(18)..(19)..(20): Xaa is A or G
  MOD_RES (21)..(22)..(23)..(24): Xaa is A or G or is absent
RPTQVQLSNITVQIMXXXXXXXXXLGEMSTLEDH

SEQ ID NO: 20061 - protein, 35 aa, Artificial Sequence
  GFR-binding peptide
  MOD_RES (16)..(17)..(18)..(19)..(20): Xaa is A or G
  MOD_RES (21)..(22)..(23)..(24): Xaa is A or G or is absent
QPSRVHHSNITVQIMXXXXXXXXXIGEMSRLEEHL

SEQ ID NO: 20062 - protein, 43 aa, Artificial Sequence
  GFR-binding peptide
  MOD_RES (3)..(40)..(42): Xaa is C or S
  MOD_RES (19)..(20)..(21)..(22)..(23): Xaa is A or G
  MOD_RES (24)..(25)..(26)..(27): Xaa is A or G or is absent
VKXQPSRVHHSNITVQIMXXXXXXXXXIGEMSRLEEHLEXAXA

SEQ ID NO: 20063 - protein, 35 aa, Artificial Sequence
  GFR-binding peptide
  MOD_RES (1)..(35): Xaa is C or S
XVPTEERSVKMAKVRIKPHQGQHKEVQVFLQHNKX

SEQ ID NO: 20064 - protein, 39 aa, Artificial Sequence
  GFR-binding peptide
  MOD_RES (2)..(36)..(38): Xaa is C or S
EXVPTEESNITMQIMRIKPHQGQHLGEMSFLQHNKXEXR

SEQ ID NO: 20065 - protein, 36 aa, Artificial Sequence
  GFR-binding peptide
  MOD_RES (2)..(36): Xaa is C or S
  MOD_RES (16)..(17)..(18)..(19)..(20): Xaa is A or G
  MOD_RES (21)..(22)..(23)..(24): Xaa is A or G or is absent
EXVPTGQSNITMQIMXXXXXXXXXIGEMSLEEHSQX

SEQ ID NO: 20066 - protein, 41 aa, Artificial Sequence
  GFR-binding peptide
  MOD_RES (2)..(39)..(41): Xaa is C or S
KXQPSRVHHRPVQVRKIEYVRKKPKLKKATVRLEEHLEXAX

SEQ ID NO: 20067 - protein, 37 aa, Artificial Sequence
  GFR-binding peptide
  MOD_RES (34)..(36): Xaa is C or S
VPTEERSVKMAKVRIKPHQGQHKEVQVFLQHNKXEXR

SEQ ID NO: 20068 - protein, 37 aa, Artificial Sequence
  GFR-binding peptide
  MOD_RES (2)..(36): Xaa is C or S
EXVPTEERPVQMRKIRIKPHQGQHKKATVFLQHNKXE

SEQ ID NO: 20069 - protein, 39 aa, Artificial Sequence
  GFR-binding peptide
  MOD_RES (3)..(37)..(39): Xaa is C or S
  MOD_RES (17)..(18)..(19)..(20)..(21): Xaa is A or G
  MOD_RES (22)..(23)..(24)..(25): Xaa is A or G or is absent
LEXVPTGQSNITMQIMXXXXXXXXXLGEMSLEEHSQXEX

SEQ ID NO: 20070 - protein, 40 aa, Artificial Sequence
  GFR-binding peptide
  MOD_RES (1)..(38)..(40): Xaa is C or S
XRPTQVQLSNITVQIMEIVRKKPIFIGEMSTLEDHLAXKX

SEQ ID NO: 20071 - protein, 33 aa, Artificial Sequence
  GFR-binding peptide
  MOD_RES (14)..(15)..(16)..(17)..(18): Xaa is A or G
  MOD_RES (19)..(20)..(21)..(22): Xaa is A or G or is absent
VPTGQRPVQMRKIXXXXXXXXXKKATVLEEHSQ

SEQ ID NO: 20072 - protein, 44 aa, Artificial Sequence
  GFR-binding peptide
  MOD_RES (5)..(42)..(44): Xaa is C or S
SSVKXQPSRVHHSNITVQIMEYVRKKPKLIGEMSRLEEHLEXAX

SEQ ID NO: 20073 - protein, 42 aa, Artificial Sequence
  GFR-binding peptide
  MOD_RES (7)..(41): Xaa is C or S
  MOD_RES (21)..(22)..(23)..(24)..(25): Xaa is A or G
  MOD_RES (26)..(27)..(28)..(29): Xaa is A or G or is absent
NDEGLEXVPTEESNITMQIMXXXXXXXXXIGEMSFLQHNKXE

SEQ ID NO: 20074 - protein, 37 aa, Artificial Sequence
  GFR-binding peptide
  MOD_RES (3)..(3): Xaa is C or S
VKXQPSRVHHSNITVQIMEYVRKKPKLLGEMSRLEEH

SEQ ID NO: 20075 - protein, 39 aa, Artificial Sequence
  GFR-binding peptide
  MOD_RES (36)..(38): Xaa is C or S
  MOD_RES (15)..(16)..(17)..(18)..(19): Xaa is A or G
  MOD_RES (20)..(21)..(22)..(23): Xaa is A or G or is absent
PTQVQLRPVQVRKIXXXXXXXXXKKATVTLEDHLAXKXE

SEQ ID NO: 20076 - protein, 37 aa, Artificial Sequence
  GFR-binding peptide
  MOD_RES (3)..(3): Xaa is C or S
VKXQPSRVHHSNITVQIMEYVRKKPKLIGEMSRLEEH

SEQ ID NO: 20077 - protein, 36 aa, Artificial Sequence
  GFR-binding peptide
  MOD_RES (35)..(35): Xaa is C or S
  MOD_RES (14)..(15)..(16)..(17)..(18): Xaa is A or G
  MOD_RES (19)..(20)..(21)..(22): Xaa is A or G or is absent
SRVHHSNITVQIMXXXXXXXXXLGEMSRLEEHLEXA

SEQ ID NO: 20078 - protein, 41 aa, Artificial Sequence
  GFR-binding peptide
  MOD_RES (2)..(39)..(41): Xaa is C or S
QXRPTQVQLSNITVQIMEIVRKKPIFLGEMSTLEDHLAXKX

SEQ ID NO: 20079 - protein, 37 aa, Artificial Sequence
  GFR-binding peptide
  MOD_RES (2)..(36): Xaa is C or S
EXVPTGQRSVKMAKVRIKPHQGQHKEVQVLEEHSQXE

SEQ ID NO: 20080 - protein, 43 aa, Artificial Sequence
  GFR-binding peptide
  MOD_RES (3)..(40)..(42): Xaa is C or S
  MOD_RES (19)..(20)..(21)..(22)..(23): Xaa is A or G
  MOD_RES (24)..(25)..(26)..(27): Xaa is A or G or is absent
VKXQPSRVHHRSVKVAKVXXXXXXXXXKEVQVRLEEHLEXAXA

SEQ ID NO: 20081 - protein, 41 aa, Artificial Sequence
  GFR-binding peptide
  MOD_RES (3)..(40): Xaa is C or S
VQXRPTQVQLSNITVQIMEIVRKKPIFIGEMSTLEDHLAXK

SEQ ID NO: 20082 - protein, 41 aa, Artificial Sequence
  GFR-binding peptide
  MOD_RES (4)..(38)..(40): Xaa is C or S
GLEXVPTEERSVKMAKVRIKPHQGQHKEVQVFLQHNKXEXR

SEQ ID NO: 20083 - protein, 37 aa, Artificial Sequence
  GFR-binding peptide
  MOD_RES (2)..(2): Xaa is C or S
  MOD_RES (18)..(19)..(20)..(21)..(22): Xaa is A or G
  MOD_RES (23)..(24)..(25)..(26): Xaa is A or G or is absent
QXRPTQVQLSNITVQIMXXXXXXXXXLGEMSTLEDHL

SEQ ID NO: 20084 - protein, 40 aa, Artificial Sequence
  GFR-binding peptide
  MOD_RES (3)..(37)..(39): Xaa is C or S
LEXVPTGQRSVKMAKVRIKPHQGQHKEVQVLEEHSQXEXR

SEQ ID NO: 20085 - protein, 39 aa, Artificial Sequence
  GFR-binding peptide
  MOD_RES (37)..(39): Xaa is C or S
QPSRVHHRPVQVRKIEYVRKKPKLKKATVRLEEHLEXAX

SEQ ID NO: 20086 - protein, 38 aa, Artificial Sequence
  GFR-binding peptide
  MOD_RES (4)..(38): Xaa is C or S
GLEXVPTEESNITMQIMRIKPHQGQHLGEMSFLQHNKX

SEQ ID NO: 20087 - protein, 39 aa, Artificial Sequence
  GFR-binding peptide
  MOD_RES (3)..(3): Xaa is C or S
VQXRPTQVQLRSVKVAKVEIVRKKPIFKEVQVTLEDHLA

SEQ ID NO: 20088 - protein, 40 aa, Artificial Sequence
  GFR-binding peptide
  MOD_RES (7)..(7): Xaa is C or S
NDEGLEXVPTGQRSVKMAKVRIKPHQGQHKEVQVLEEHSQ

SEQ ID NO: 20089 - protein, 38 aa, Artificial Sequence
  GFR-binding peptide
  MOD_RES (2)..(36)..(38): Xaa is C or S
  MOD_RES (16)..(17)..(18)..(19)..(20): Xaa is A or G
  MOD_RES (21)..(22)..(23)..(24): Xaa is A or G or is absent
EXVPTEESNITMQIMXXXXXXXXXIGEMSFLQHNKXEX

SEQ ID NO: 20090 - protein, 39 aa, Artificial Sequence
  GFR-binding peptide
  MOD_RES (3)..(37)..(39): Xaa is C or S
  MOD_RES (17)..(18)..(19)..(20)..(21): Xaa is A or G
  MOD_RES (22)..(23)..(24)..(25): Xaa is A or G or is absent
LEXVPTGQRSVKMAKVXXXXXXXXXKEVQVLEEHSQXEX

SEQ ID NO: 20091 - protein, 36 aa, Artificial Sequence
  GFR-binding peptide
  MOD_RES (34)..(36): Xaa is C or S
  MOD_RES (14)..(15)..(16)..(17)..(18): Xaa is A or G
  MOD_RES (19)..(20)..(21)..(22): Xaa is A or G or is absent
VPTGQSNITMQIMXXXXXXXXXLGEMSLEEHSQXEX

SEQ ID NO: 20092 - protein, 41 aa, Artificial Sequence
  GFR-binding peptide
  MOD_RES (5)..(39)..(41): Xaa is C or S
  MOD_RES (19)..(20)..(21)..(22)..(23): Xaa is A or G
  MOD_RES (24)..(25)..(26)..(27): Xaa is A or G or is absent
EGLEXVPTGQSNITMQIMXXXXXXXXXIGEMSLEEHSQXEX

SEQ ID NO: 20093 - protein, 35 aa, Artificial Sequence
  GFR-binding peptide
  MOD_RES (16)..(17)..(18)..(19)..(20): Xaa is A or G
  MOD_RES (21)..(22)..(23)..(24): Xaa is A or G or is absent
QPSRVHHRPVQVRKIXXXXXXXXXKKATVRLEEHL

SEQ ID NO: 20094 - protein, 41 aa, Artificial Sequence
  GFR-binding peptide
  MOD_RES (3)..(40): Xaa is C or S
  MOD_RES (19)..(20)..(21)..(22)..(23): Xaa is A or G
  MOD_RES (24)..(25)..(26)..(27): Xaa is A or G or is absent
VKXQPSRVHHRSVKVAKVXXXXXXXXXKEVQVRLEEHLEXA

SEQ ID NO: 20095 - protein, 43 aa, Artificial Sequence
  GFR-binding peptide
  MOD_RES (4)..(41)..(43): Xaa is C or S
  MOD_RES (20)..(21)..(22)..(23)..(24): Xaa is A or G
  MOD_RES (25)..(26)..(27)..(28): Xaa is A or G or is absent
SVKXQPSRVHHRPVQVRKIXXXXXXXXXKKATVRLEEHLEXAX

SEQ ID NO: 20096 - protein, 39 aa, Artificial Sequence
  GFR-binding peptide
  MOD_RES (36)..(38): Xaa is C or S
  MOD_RES (15)..(16)..(17)..(18)..(19): Xaa is A or G
  MOD_RES (20)..(21)..(22)..(23): Xaa is A or G or is absent
PSRVHHSNITVQIMXXXXXXXXXIGEMSRLEEHLEXAXA

SEQ ID NO: 20097 - protein, 35 aa, Artificial Sequence
  GFR-binding peptide
PTQVQLSNITVQIMEIVRKKPIFIGEMSTLEDHLA

SEQ ID NO: 20098 - protein, 40 aa, Artificial Sequence
  GFR-binding peptide
  MOD_RES (5)..(5): Xaa is C or S
  MOD_RES (21)..(22)..(23)..(24)..(25): Xaa is A or G
  MOD_RES (26)..(27)..(28)..(29): Xaa is A or G or is absent
RNVQXRPTQVQLSNITVQIMXXXXXXXXXIGEMSTLEDHL

SEQ ID NO: 20099 - protein, 38 aa, Artificial Sequence
  GFR-binding peptide
  MOD_RES (3)..(37): Xaa is C or S
LEXVPTEERPVQMRKIRIKPHQGQHKKATVFLQHNKXE

SEQ ID NO: 20100 - protein, 43 aa, Artificial Sequence
  GFR-binding peptide
  MOD_RES (5)..(42): Xaa is C or S
  MOD_RES (21)..(22)..(23)..(24)..(25): Xaa is A or G
  MOD_RES (26)..(27)..(28)..(29): Xaa is A or G or is absent
RNVQXRPTQVQLSNITVQIMXXXXXXXXXLGEMSTLEDHLAXK

SEQ ID NO: 20101 - protein, 41 aa, Artificial Sequence
  GFR-binding peptide
  MOD_RES (4)..(41): Xaa is C or S
  MOD_RES (20)..(21)..(22)..(23)..(24): Xaa is A or G
  MOD_RES (25)..(26)..(27)..(28): Xaa is A or G or is absent
NVQXRPTQVQLSNITVQIMXXXXXXXXXIGEMSTLEDHLAX

SEQ ID NO: 20102 - protein, 41 aa, Artificial Sequence
  GFR-binding peptide
  MOD_RES (1)..(38)..(40): Xaa is C or S
  MOD_RES (17)..(18)..(19)..(20)..(21): Xaa is A or G
  MOD_RES (22)..(23)..(24)..(25): Xaa is A or G or is absent
XRPTQVQLRPVQVRKIXXXXXXXXXKKATVTLEDHLAXKXE

SEQ ID NO: 20103 - protein, 38 aa, Artificial Sequence
  GFR-binding peptide
  MOD_RES (37)..(37): Xaa is C or S
  MOD_RES (16)..(17)..(18)..(19)..(20): Xaa is A or G
  MOD_RES (21)..(22)..(23)..(24): Xaa is A or G or is absent
QPSRVHHSNITVQIMXXXXXXXXXLGEMSRLEEHLEXA

SEQ ID NO: 20104 - protein, 34 aa, Artificial Sequence
  GFR-binding peptide
  MOD_RES (1)..(1): Xaa is C or S
  MOD_RES (15)..(16)..(17)..(18)..(19): Xaa is A or G
  MOD_RES (20)..(21)..(22)..(23): Xaa is A or G or is absent
XVPTGQRSVKMAKVXXXXXXXXXKEVQVLEEHSQ

SEQ ID NO: 20105 - protein, 41 aa, Artificial Sequence
  GFR-binding peptide
  MOD_RES (4)..(38)..(40): Xaa is C or S
  MOD_RES (18)..(19)..(20)..(21)..(22): Xaa is A or G
  MOD_RES (23)..(24)..(25)..(26): Xaa is A or G or is absent
GLEXVPTEERPVQMRKIXXXXXXXXXKKATVFLQHNKXEXR

SEQ ID NO: 20106 - protein, 41 aa, Artificial Sequence
  GFR-binding peptide
  MOD_RES (3)..(40): Xaa is C or S
  MOD_RES (19)..(20)..(21)..(22)..(23): Xaa is A or G
  MOD_RES (24)..(25)..(26)..(27): Xaa is A or G or is absent
VQXRPTQVQLSNITVQIMXXXXXXXXXIGEMSTLEDHLAXK

SEQ ID NO: 20107 - protein, 35 aa, Artificial Sequence
  GFR-binding peptide
  MOD_RES (1)..(35): Xaa is C or S
  MOD_RES (15)..(16)..(17)..(18)..(19): Xaa is A or G
  MOD_RES (20)..(21)..(22)..(23): Xaa is A or G or is absent
XVPTEERSVKMAKVXXXXXXXXXKEVQVFLQHNKX

SEQ ID NO: 20108 - protein, 39 aa, Artificial Sequence
  GFR-binding peptide
  MOD_RES (4)..(4): Xaa is C or S
NVQXRPTQVQLSNITVQIMEIVRKKPIFIGEMSTLEDHL

SEQ ID NO: 20109 - protein, 38 aa, Artificial Sequence
  GFR-binding peptide
  MOD_RES (4)..(38): Xaa is C or S
  MOD_RES (18)..(19)..(20)..(21)..(22): Xaa is A or G
  MOD_RES (23)..(24)..(25)..(26): Xaa is A or G or is absent
GLEXVPTGQRPVQMRKIXXXXXXXXXKKATVLEEHSQX

SEQ ID NO: 20110 - protein, 40 aa, Artificial Sequence
  GFR-binding peptide
  MOD_RES (5)..(5): Xaa is C or S
RNVQXRPTQVQLRSVKVAKVEIVRKKPIFKEVQVTLEDHL

SEQ ID NO: 20111 - protein, 37 aa, Artificial Sequence
  GFR-binding peptide
  MOD_RES (36)..(36): Xaa is C or S
PSRVHHSNITVQIMEYVRKKPKLIGEMSRLEEHLEXA

SEQ ID NO: 20112 - protein, 42 aa, Artificial Sequence
  GFR-binding peptide
  MOD_RES (7)..(41): Xaa is C or S
NDEGLEXVPTEESNITMQIMRIKPHQGQHLGEMSFLQHNKXE

SEQ ID NO: 20113 - protein, 41 aa, Artificial Sequence
  GFR-binding peptide
  MOD_RES (1)..(38)..(40): Xaa is C or S
  MOD_RES (17)..(18)..(19)..(20)..(21): Xaa is A or G
  MOD_RES (22)..(23)..(24)..(25): Xaa is A or G or is absent
XRPTQVQLSNITVQIMXXXXXXXXXLGEMSTLEDHLAXKXE

SEQ ID NO: 20114 - protein, 36 aa, Artificial Sequence
  GFR-binding peptide
  MOD_RES (34)..(36): Xaa is C or S
VPTEESNITMQIMRIKPHQGQHLGEMSFLQHNKXEX

SEQ ID NO: 20115 - protein, 37 aa, Artificial Sequence
  GFR-binding peptide
  MOD_RES (1)..(1): Xaa is C or S
  MOD_RES (17)..(18)..(19)..(20)..(21): Xaa is A or G
  MOD_RES (22)..(23)..(24)..(25): Xaa is A or G or is absent
XQPSRVHHSNITVQIMXXXXXXXXXIGEMSRLEEHLE

SEQ ID NO: 20116 - protein, 41 aa, Artificial Sequence
  GFR-binding peptide
  MOD_RES (4)..(41): Xaa is C or S
SVKXQPSRVHHRPVQVRKIEYVRKKPKLKKATVRLEEHLEX

SEQ ID NO: 20117 - protein, 36 aa, Artificial Sequence
  GFR-binding peptide
  MOD_RES (3)..(3): Xaa is C or S
LEXVPTGQRPVQMRKIRIKPHQGQHKKATVLEEHSQ

SEQ ID NO: 20118 - protein, 40 aa, Artificial Sequence
  GFR-binding peptide
  MOD_RES (1)..(38)..(40): Xaa is C or S
  MOD_RES (17)..(18)..(19)..(20)..(21): Xaa is A or G
  MOD_RES (22)..(23)..(24)..(25): Xaa is A or G or is absent
XQPSRVHHRPVQVRKIXXXXXXXXXKKATVRLEEHLEXAX

SEQ ID NO: 20119 - protein, 43 aa, Artificial Sequence
  GFR-binding peptide
  MOD_RES (5)..(42): Xaa is C or S
RNVQXRPTQVQLSNITVQIMEIVRKKPIFLGEMSTLEDHLAXK

SEQ ID NO: 20120 - protein, 37 aa, Artificial Sequence
  GFR-binding peptide
  MOD_RES (34)..(36): Xaa is C or S
  MOD_RES (14)..(15)..(16)..(17)..(18): Xaa is A or G
  MOD_RES (19)..(20)..(21)..(22): Xaa is A or G or is absent
VPTEERPVQMRKIXXXXXXXXXKKATVFLQHNKXEXR

SEQ ID NO: 20121 - protein, 32 aa, Artificial Sequence
  GFR-binding peptide
  MOD_RES (14)..(15)..(16)..(17)..(18): Xaa is A or G
  MOD_RES (19)..(20)..(21)..(22): Xaa is A or G or is absent
SRVHHRSVKVAKVXXXXXXXXXKEVQVRLEEH

SEQ ID NO: 20122 - protein, 37 aa, Artificial Sequence
  GFR-binding peptide
  MOD_RES (35)..(37): Xaa is C or S
  MOD_RES (14)..(15)..(16)..(17)..(18): Xaa is A or G
  MOD_RES (19)..(20)..(21)..(22): Xaa is A or G or is absent
TQVQLRSVKVAKVXXXXXXXXXKEVQVTLEDHLAXKX

SEQ ID NO: 20123 - protein, 40 aa, Artificial Sequence
  GFR-binding peptide
  MOD_RES (4)..(38)..(40): Xaa is C or S
  MOD_RES (18)..(19)..(20)..(21)..(22): Xaa is A or G
  MOD_RES (23)..(24)..(25)..(26): Xaa is A or G or is absent
GLEXVPTGQRPVQMRKIXXXXXXXXXKKATVLEEHSQXEX

SEQ ID NO: 20124 - protein, 39 aa, Artificial Sequence
  GFR-binding peptide
  MOD_RES (5)..(5): Xaa is C or S
  MOD_RES (21)..(22)..(23)..(24)..(25): Xaa is A or G
  MOD_RES (26)..(27)..(28)..(29): Xaa is A or G or is absent
RNVQXRPTQVQLSNITVQIMXXXXXXXXXIGEMSTLEDH

SEQ ID NO: 20125 - protein, 34 aa, Artificial Sequence
  GFR-binding peptide
  MOD_RES (34)..(34): Xaa is C or S
  MOD_RES (14)..(15)..(16)..(17)..(18): Xaa is A or G
  MOD_RES (19)..(20)..(21)..(22): Xaa is A or G or is absent
VPTEERSVKMAKVXXXXXXXXXKEVQVFLQHNKX

SEQ ID NO: 20126 - protein, 36 aa, Artificial Sequence
  GFR-binding peptide
  MOD_RES (3)..(3): Xaa is C or S
LEXVPTGQSNITMQIMRIKPHQGQHIGEMSLEEHSQ

SEQ ID NO: 20127 - protein, 37 aa, Artificial Sequence
  GFR-binding peptide
  MOD_RES (37)..(37): Xaa is C or S
  MOD_RES (16)..(17)..(18)..(19)..(20): Xaa is A or G
  MOD_RES (21)..(22)..(23)..(24): Xaa is A or G or is absent
RPTQVQLSNITVQIMXXXXXXXXXLGEMSTLEDHLAX

SEQ ID NO: 20128 - protein, 39 aa, Artificial Sequence
  GFR-binding peptide
  MOD_RES (5)..(5): Xaa is C or S
  MOD_RES (21)..(22)..(23)..(24)..(25): Xaa is A or G
  MOD_RES (26)..(27)..(28)..(29): Xaa is A or G or is absent
RNVQXRPTQVQLSNITVQIMXXXXXXXXXLGEMSTLEDH

SEQ ID NO: 20129 - protein, 38 aa, Artificial Sequence
  GFR-binding peptide
  MOD_RES (2)..(36)..(38): Xaa is C or S
  MOD_RES (16)..(17)..(18)..(19)..(20): Xaa is A or G
  MOD_RES (21)..(22)..(23)..(24): Xaa is A or G or is absent
EXVPTEERPVQMRKIXXXXXXXXXKKATVFLQHNKXEX

SEQ ID NO: 20130 - protein, 36 aa, Artificial Sequence
  GFR-binding peptide
QPSRVHHSNITVQIMEYVRKKPKLLGEMSRLEEHLE

SEQ ID NO: 20131 - protein, 39 aa, Artificial Sequence
  GFR-binding peptide
  MOD_RES (4)..(38): Xaa is C or S
  MOD_RES (18)..(19)..(20)..(21)..(22): Xaa is A or G
  MOD_RES (23)..(24)..(25)..(26): Xaa is A or G or is absent
GLEXVPTEERPVQMRKIXXXXXXXXXKKATVFLQHNKXE

SEQ ID NO: 20132 - protein, 36 aa, Artificial Sequence
  GFR-binding peptide
  MOD_RES (1)..(1): Xaa is C or S
  MOD_RES (17)..(18)..(19)..(20)..(21): Xaa is A or G
  MOD_RES (22)..(23)..(24)..(25): Xaa is A or G or is absent
XQPSRVHHRPVQVRKIXXXXXXXXXKKATVRLEEHL

SEQ ID NO: 20133 - protein, 42 aa, Artificial Sequence
  GFR-binding peptide
  MOD_RES (2)..(39)..(41): Xaa is C or S
QXRPTQVQLSNITVQIMEIVRKKPIFIGEMSTLEDHLAXKXE

SEQ ID NO: 20134 - protein, 41 aa, Artificial Sequence
  GFR-binding peptide
  MOD_RES (6)..(40): Xaa is C or S
  MOD_RES (20)..(21)..(22)..(23)..(24): Xaa is A or G
  MOD_RES (25)..(26)..(27)..(28): Xaa is A or G or is absent
DEGLEXVPTEERPVQMRKIXXXXXXXXXKKATVFLQHNKXE

SEQ ID NO: 20135 - protein, 34 aa, Artificial Sequence
  GFR-binding peptide
  MOD_RES (16)..(17)..(18)..(19)..(20): Xaa is A or G
  MOD_RES (21)..(22)..(23)..(24): Xaa is A or G or is absent
RPTQVQLSNITVQIMXXXXXXXXXIGEMSTLEDH

SEQ ID NO: 20136 - protein, 34 aa, Artificial Sequence
  GFR-binding peptide
  MOD_RES (34)..(34): Xaa is C or S
VPTEERSVKMAKVRIKPHQGQHKEVQVFLQHNKX

SEQ ID NO: 20137 - protein, 36 aa, Artificial Sequence
  GFR-binding peptide
  MOD_RES (1)..(1): Xaa is C or S
  MOD_RES (17)..(18)..(19)..(20)..(21): Xaa is A or G
  MOD_RES (22)..(23)..(24)..(25): Xaa is A or G or is absent
XQPSRVHHSNITVQIMXXXXXXXXXIGEMSRLEEHL

SEQ ID NO: 20138 - protein, 41 aa, Artificial Sequence
  GFR-binding peptide
  MOD_RES (5)..(39)..(41): Xaa is C or S
  MOD_RES (19)..(20)..(21)..(22)..(23): Xaa is A or G
  MOD_RES (24)..(25)..(26)..(27): Xaa is A or G or is absent
EGLEXVPTGQRPVQMRKIXXXXXXXXXKKATVLEEHSQXEX

SEQ ID NO: 20139 - protein, 36 aa, Artificial Sequence
  GFR-binding peptide
  MOD_RES (3)..(3): Xaa is C or S
  MOD_RES (17)..(18)..(19)..(20)..(21): Xaa is A or G
  MOD_RES (22)..(23)..(24)..(25): Xaa is A or G or is absent
LEXVPTGQSNITMQIMXXXXXXXXXLGEMSLEEHSQ

SEQ ID NO: 20140 - protein, 39 aa, Artificial Sequence
  GFR-binding peptide
  MOD_RES (3)..(3): Xaa is C or S
VQXRPTQVQLSNITVQIMEIVRKKPIFLGEMSTLEDHLA

SEQ ID NO: 20141 - protein, 40 aa, Artificial Sequence
  GFR-binding peptide
  MOD_RES (3)..(40): Xaa is C or S
  MOD_RES (19)..(20)..(21)..(22)..(23): Xaa is A or G
  MOD_RES (24)..(25)..(26)..(27): Xaa is A or G or is absent
VKXQPSRVHHSNITVQIMXXXXXXXXXIGEMSRLEEHLEX

SEQ ID NO: 20142 - protein, 35 aa, Artificial Sequence
  GFR-binding peptide
  MOD_RES (35)..(35): Xaa is C or S
  MOD_RES (14)..(15)..(16)..(17)..(18): Xaa is A or G
  MOD_RES (19)..(20)..(21)..(22): Xaa is A or G or is absent
SRVHHSNITVQIMXXXXXXXXXLGEMSRLEEHLEX

SEQ ID NO: 20143 - protein, 37 aa, Artificial Sequence
  GFR-binding peptide
  MOD_RES (3)..(37): Xaa is C or S
LEXVPTGQRSVKMAKVRIKPHQGQHKEVQVLEEHSQX

SEQ ID NO: 20144 - protein, 41 aa, Artificial Sequence
  GFR-binding peptide
  MOD_RES (7)..(41): Xaa is C or S
  MOD_RES (21)..(22)..(23)..(24)..(25): Xaa is A or G
  MOD_RES (26)..(27)..(28)..(29): Xaa is A or G or is absent
NDEGLEXVPTEERPVQMRKIXXXXXXXXXKKATVFLQHNKX

SEQ ID NO: 20145 - protein, 37 aa, Artificial Sequence
  GFR-binding peptide
  MOD_RES (3)..(37): Xaa is C or S
  MOD_RES (17)..(18)..(19)..(20)..(21): Xaa is A or G
  MOD_RES (22)..(23)..(24)..(25): Xaa is A or G or is absent
LEXVPTGQRSVKMAKVXXXXXXXXXKEVQVLEEHSQX

SEQ ID NO: 20146 - protein, 35 aa, Artificial Sequence
  GFR-binding peptide
  MOD_RES (34)..(34): Xaa is C or S
  MOD_RES (14)..(15)..(16)..(17)..(18): Xaa is A or G
  MOD_RES (19)..(20)..(21)..(22): Xaa is A or G or is absent
VPTGQSNITMQIMXXXXXXXXXLGEMSLEEHSQXE

SEQ ID NO: 20147 - protein, 39 aa, Artificial Sequence
  GFR-binding peptide
  MOD_RES (5)..(39): Xaa is C or S
  MOD_RES (19)..(20)..(21)..(22)..(23): Xaa is A or G
  MOD_RES (24)..(25)..(26)..(27): Xaa is A or G or is absent
EGLEXVPTEESNITMQIMXXXXXXXXXIGEMSFLQHNKX

SEQ ID NO: 20148 - protein, 38 aa, Artificial Sequence
  GFR-binding peptide
  MOD_RES (4)..(4): Xaa is C or S
  MOD_RES (20)..(21)..(22)..(23)..(24): Xaa is A or G
  MOD_RES (25)..(26)..(27)..(28): Xaa is A or G or is absent
SVKXQPSRVHHRSVKVAKVXXXXXXXXXKEVQVRLEEH

SEQ ID NO: 20149 - protein, 40 aa, Artificial Sequence
  GFR-binding peptide
  MOD_RES (3)..(37)..(39): Xaa is C or S
  MOD_RES (17)..(18)..(19)..(20)..(21): Xaa is A or G
  MOD_RES (22)..(23)..(24)..(25): Xaa is A or G or is absent
LEXVPTGQRPVQMRKIXXXXXXXXXKKATVLEEHSQXEXR

SEQ ID NO: 20150 - protein, 38 aa, Artificial Sequence
  GFR-binding peptide
  MOD_RES (37)..(37): Xaa is C or S
  MOD_RES (16)..(17)..(18)..(19)..(20): Xaa is A or G
  MOD_RES (21)..(22)..(23)..(24): Xaa is A or G or is absent
QPSRVHHRPVQVRKIXXXXXXXXXKKATVRLEEHLEXA

SEQ ID NO: 20151 - protein, 42 aa, Artificial Sequence; identical to SEQ ID NO: 17047
  GFR-binding peptide
  MOD_RES (2)..(36): Xaa is C or S
  MOD_RES (14)..(15)..(16)..(17)..(18): Xaa is A or G
  MOD_RES (19)..(20)..(21)..(22): Xaa is A or G or is absent

SEQ ID NO: 20152 - protein, 37 aa, Artificial Sequence; identical to SEQ ID NO: 17048
  GFR-binding peptide
  MOD_RES (1)..(1): Xaa is C or S
  MOD_RES (14)..(15)..(16)..(17)..(18): Xaa is A or G
  MOD_RES (19)..(20)..(21)..(22): Xaa is A or G or is absent

SEQ ID NO: 20153 - protein, 36 aa, Artificial Sequence; identical to SEQ ID NO: 17049
  GFR-binding peptide
  MOD_RES (1)..(3): Xaa is C or S

SEQ ID NO: 20154 - protein, 40 aa, Artificial Sequence; identical to SEQ ID NO: 17050
  GFR-binding peptide
  MOD_RES (1)..(35): Xaa is C or S
  MOD_RES (13)..(14)..(15)..(16)..(17): Xaa is A or G
  MOD_RES (18)..(19)..(20)..(21): Xaa is A or G or is absent

SEQ ID NO: 20155 - protein, 43 aa, Artificial Sequence; identical to SEQ ID NO: 17051
  GFR-binding peptide
  MOD_RES (1)..(3)..(37): Xaa is C or S

SEQ ID NO: 20156 - protein, 35 aa, Artificial Sequence; identical to SEQ ID NO: 17052
  GFR-binding peptide
  MOD_RES (1)..(35): Xaa is C or S

SEQ ID NO: 20157 - protein, 42 aa, Artificial Sequence; identical to SEQ ID NO: 17053
  GFR-binding peptide
  MOD_RES (2)..(4)..(41): Xaa is C or S
  MOD_RES (17)..(18)..(19)..(20)..(21): Xaa is A or G
  MOD_RES (22)..(23)..(24)..(25): Xaa is A or G or is absent

SEQ ID NO: 20158 - protein, 38 aa, Artificial Sequence; identical to SEQ ID NO: 17054
  GFR-binding peptide
  MOD_RES (1)..(3): Xaa is C or S
  MOD_RES (16)..(17)..(18)..(19)..(20): Xaa is A or G
  MOD_RES (21)..(22)..(23)..(24): Xaa is A or G or is absent

SEQ ID NO: 20159 - protein, 41 aa, Artificial Sequence; identical to SEQ ID NO: 17055
  GFR-binding peptide
  MOD_RES (1)..(3)..(40): Xaa is C or S
  MOD_RES (16)..(17)..(18)..(19)..(20): Xaa is A or G
  MOD_RES (21)..(22)..(23)..(24): Xaa is A or G or is absent

SEQ ID NO: 20160 - protein, 39 aa, Artificial Sequence; identical to SEQ ID NO: 17056
  GFR-binding peptide
  MOD_RES (2)..(36): Xaa is C or S
  MOD_RES (14)..(15)..(16)..(17)..(18): Xaa is A or G
  MOD_RES (19)..(20)..(21)..(22): Xaa is A or G or is absent

SEQ ID NO: 20161 - protein, 32 aa, Artificial Sequence; identical to SEQ ID NO: 17057
  GFR-binding peptide

SEQ ID NO: 20162 - protein, 42 aa, Artificial Sequence; identical to SEQ ID NO: 17058
  GFR-binding peptide
  MOD_RES (1)..(38): Xaa is C or S

SEQ ID NO: 20163 - protein, 34 aa, Artificial Sequence; identical to SEQ ID NO: 17059
  GFR-binding peptide
  MOD_RES (33)..(33): Xaa is C or S
  MOD_RES (11)..(12)..(13)..(14)..(15): Xaa is A or G
  MOD_RES (16)..(17)..(18)..(19): Xaa is A or G or is absent

SEQ ID NO: 20164 - protein, 35 aa, Artificial Sequence; identical to SEQ ID NO: 17060
  GFR-binding peptide
  MOD_RES (35)..(35): Xaa is C or S
  MOD_RES (11)..(12)..(13)..(14)..(15): Xaa is A or G
  MOD_RES (16)..(17)..(18)..(19): Xaa is A or G or is absent

SEQ ID NO: 20165 - protein, 36 aa, Artificial Sequence; identical to SEQ ID NO: 17061
  GFR-binding peptide
  MOD_RES (35)..(35): Xaa is C or S
  MOD_RES (11)..(12)..(13)..(14)..(15): Xaa is A or G
  MOD_RES (16)..(17)..(18)..(19): Xaa is A or G or is absent

SEQ ID NO: 20166 - protein, 43 aa, Artificial Sequence; identical to SEQ ID NO: 17062
  GFR-binding peptide
  MOD_RES (1)..(3)..(37): Xaa is C or S
  MOD_RES (15)..(16)..(17)..(18)..(19): Xaa is A or G
  MOD_RES (20)..(21)..(22)..(23): Xaa is A or G or is absent

SEQ ID NO: 20167 - protein, 40 aa, Artificial Sequence; identical to SEQ ID NO: 17063
  GFR-binding peptide
  MOD_RES (34)..(34): Xaa is C or S
  MOD_RES (12)..(13)..(14)..(15)..(16): Xaa is A or G
  MOD_RES (17)..(18)..(19)..(20): Xaa is A or G or is absent

SEQ ID NO: 20168 - protein, 38 aa, Artificial Sequence; identical to SEQ ID NO: 17064
  GFR-binding peptide
  MOD_RES (37)..(37): Xaa is C or S
  MOD_RES (13)..(14)..(15)..(16)..(17): Xaa is A or G
  MOD_RES (18)..(19)..(20)..(21): Xaa is A or G or is absent

SEQ ID NO: 20169 - protein, 41 aa, Artificial Sequence; identical to SEQ ID NO: 17065
  GFR-binding peptide
  MOD_RES (2)..(4)..(38): Xaa is C or S
  MOD_RES (16)..(17)..(18)..(19)..(20): Xaa is A or G
  MOD_RES (21)..(22)..(23)..(24): Xaa is A or G or is absent

SEQ ID NO: 20170 - protein, 36 aa, Artificial Sequence; identical to SEQ ID NO: 17066
  GFR-binding peptide
  MOD_RES (2)..(36): Xaa is C or S
  MOD_RES (14)..(15)..(16)..(17)..(18): Xaa is A or G
  MOD_RES (19)..(20)..(21)..(22): Xaa is A or G or is absent

SEQ ID NO: 20171 - protein, 36 aa, Artificial Sequence; identical to SEQ ID NO: 17067
  GFR-binding peptide
  MOD_RES (2)..(36): Xaa is C or S
  MOD_RES (14)..(15)..(16)..(17)..(18): Xaa is A or G
  MOD_RES (19)..(20)..(21)..(22): Xaa is A or G or is absent

SEQ ID NO: 20172 - protein, 35 aa, Artificial Sequence; identical to SEQ ID NO: 17068
  GFR-binding peptide
  MOD_RES (2)..(2): Xaa is C or S

SEQ ID NO: 20173 - protein, 39 aa, Artificial Sequence; identical to SEQ ID NO: 17069
  GFR-binding peptide
  MOD_RES (1)..(38): Xaa is C or S

SEQ ID NO: 20174 - protein, 38 aa, Artificial Sequence; identical to SEQ ID NO: 17070
  GFR-binding peptide
  MOD_RES (1)..(35): Xaa is C or S
  MOD_RES (13)..(14)..(15)..(16)..(17): Xaa is A or G
  MOD_RES (18)..(19)..(20)..(21): Xaa is A or G or is absent

SEQ ID NO: 20175 - protein, 36 aa, Artificial Sequence; identical to SEQ ID NO: 17071
  GFR-binding peptide
  MOD_RES (1)..(3): Xaa is C or S

SEQ ID NO: 20176 - protein, 40 aa, Artificial Sequence; identical to SEQ ID NO: 17072
  GFR-binding peptide
  MOD_RES (2)..(39): Xaa is C or S
  MOD_RES (15)..(16)..(17)..(18)..(19): Xaa is A or G
  MOD_RES (20)..(21)..(22)..(23): Xaa is A or G or is absent

SEQ ID NO: 20177 - protein, 37 aa, Artificial Sequence; identical to SEQ ID NO: 17073
  GFR-binding peptide
  MOD_RES (34)..(34): Xaa is C or S
  MOD_RES (12)..(13)..(14)..(15)..(16): Xaa is A or G
  MOD_RES (17)..(18)..(19)..(20): Xaa is A or G or is absent

SEQ ID NO: 20178 - protein, 37 aa, Artificial Sequence; identical to SEQ ID NO: 17074
  GFR-binding peptide
  MOD_RES (36)..(36): Xaa is C or S
  MOD_RES (12)..(13)..(14)..(15)..(16): Xaa is A or G
  MOD_RES (17)..(18)..(19)..(20): Xaa is A or G or is absent

SEQ ID NO: 20179 - protein, 40 aa, Artificial Sequence; identical to SEQ ID NO: 17075
  GFR-binding peptide
  MOD_RES (2)..(4): Xaa is C or S
  MOD_RES (17)..(18)..(19)..(20)..(21): Xaa is A or G
  MOD_RES (22)..(23)..(24)..(25): Xaa is A or G or is absent

SEQ ID NO: 20180 - protein, 37 aa, Artificial Sequence; identical to SEQ ID NO: 17076
  GFR-binding peptide
  MOD_RES (37)..(37): Xaa is C or S

SEQ ID NO: 20181 - protein, 42 aa, Artificial Sequence; identical to SEQ ID NO: 17077
  GFR-binding peptide
  MOD_RES (1)..(38): Xaa is C or S
  MOD_RES (14)..(15)..(16)..(17)..(18): Xaa is A or G
  MOD_RES (19)..(20)..(21)..(22): Xaa is A or G or is absent

SEQ ID NO: 20182 - protein, 36 aa, Artificial Sequence; identical to SEQ ID NO: 17078
  GFR-binding peptide
  MOD_RES (2)..(2): Xaa is C or S
  MOD_RES (15)..(16)..(17)..(18)..(19): Xaa is A or G
  MOD_RES (20)..(21)..(22)..(23): Xaa is A or G or is absent

SEQ ID NO: 20183 - protein, 36 aa, Artificial Sequence; identical to SEQ ID NO: 17079
  GFR-binding peptide
  MOD_RES (36)..(36): Xaa is C or S

SEQ ID NO: 20184 - protein, 45 aa, Artificial Sequence; identical to SEQ ID NO: 17080
  GFR-binding peptide
  MOD_RES (2)..(4)..(41): Xaa is C or S

SEQ ID NO: 20185 - protein, 34 aa, Artificial Sequence; identical to SEQ ID NO: 17081
  GFR-binding peptide

SEQ ID NO: 20186 - protein, 37 aa, Artificial Sequence; identical to SEQ ID NO: 17082
  GFR-binding peptide
  MOD_RES (2)..(4): Xaa is C or S

SEQ ID NO: 20187 - protein, 35 aa, Artificial Sequence; identical to SEQ ID NO: 17083
  GFR-binding peptide
  MOD_RES (35)..(35): Xaa is C or S

SEQ ID NO: 20188 - protein, 37 aa, Artificial Sequence; identical to SEQ ID NO: 17084
  GFR-binding peptide
  MOD_RES (1)..(1): Xaa is C or S
  MOD_RES (14)..(15)..(16)..(17)..(18): Xaa is A or G
  MOD_RES (19)..(20)..(21)..(22): Xaa is A or G or is absent

SEQ ID NO: 20189 - protein, 34 aa, Artificial Sequence; identical to SEQ ID NO: 17085
  GFR-binding peptide
  MOD_RES (1)..(1): Xaa is C or S
  MOD_RES (13)..(14)..(15)..(16)..(17): Xaa is A or G
  MOD_RES (18)..(19)..(20)..(21): Xaa is A or G or is absent

SEQ ID NO: 20190 - protein, 33 aa, Artificial Sequence; identical to SEQ ID NO: 17086
  GFR-binding peptide

SEQ ID NO: 20191 - protein, 44 aa, Artificial Sequence; identical to SEQ ID NO: 17087
  GFR-binding peptide
  MOD_RES (2)..(4)..(41): Xaa is C or S

SEQ ID NO: 20192 - protein, 40 aa, Artificial Sequence; identical to SEQ ID NO: 17088
  GFR-binding peptide
  MOD_RES (1)..(3)..(37): Xaa is C or S
  MOD_RES (15)..(16)..(17)..(18)..(19): Xaa is A or G
  MOD_RES (20)..(21)..(22)..(23): Xaa is A or G or is absent

SEQ ID NO: 20193 - protein, 39 aa, Artificial Sequence; identical to SEQ ID NO: 17089
  GFR-binding peptide
  MOD_RES (2)..(36): Xaa is C or S
  MOD_RES (14)..(15)..(16)..(17)..(18): Xaa is A or G
  MOD_RES (19)..(20)..(21)..(22): Xaa is A or G or is absent

SEQ ID NO: 20194 - protein, 38 aa, Artificial Sequence; identical to SEQ ID NO: 17090
  GFR-binding peptide
  MOD_RES (1)..(3)..(37): Xaa is C or S
  MOD_RES (15)..(16)..(17)..(18)..(19): Xaa is A or G
  MOD_RES (20)..(21)..(22)..(23): Xaa is A or G or is absent

SEQ ID NO: 20195 - protein, 41 aa, Artificial Sequence; identical to SEQ ID NO: 17091
  GFR-binding peptide
  MOD_RES (1)..(35): Xaa is C or S
  MOD_RES (13)..(14)..(15)..(16)..(17): Xaa is A or G
  MOD_RES (18)..(19)..(20)..(21): Xaa is A or G or is absent

SEQ ID NO: 20196 - protein, 40 aa, Artificial Sequence; identical to SEQ ID NO: 17092
  GFR-binding peptide
  MOD_RES (2)..(39): Xaa is C or S

SEQ ID NO: 20197 - protein, 42 aa, Artificial Sequence; identical to SEQ ID NO: 17093
  GFR-binding peptide
  MOD_RES (2)..(39): Xaa is C or S
  MOD_RES (15)..(16)..(17)..(18)..(19): Xaa is A or G
  MOD_RES (20)..(21)..(22)..(23): Xaa is A or G or is absent

SEQ ID NO: 20198 - protein, 36 aa, Artificial Sequence; identical to SEQ ID NO: 17094
  GFR-binding peptide
  MOD_RES (33)..(33): Xaa is C or S
  MOD_RES (11)..(12)..(13)..(14)..(15): Xaa is A or G
  MOD_RES (16)..(17)..(18)..(19): Xaa is A or G or is absent

SEQ ID NO: 20199 - protein, 38 aa, Artificial Sequence; identical to SEQ ID NO: 17095
  GFR-binding peptide
  MOD_RES (2)..(36): Xaa is C or S

SEQ ID NO: 20200 - protein, 38 aa, Artificial Sequence; identical to SEQ ID NO: 17096
  GFR-binding peptide
  MOD_RES (2)..(2): Xaa is C or S

SEQ ID NO: 20201 - protein, 40 aa, Artificial Sequence; identical to SEQ ID NO: 17097
  GFR-binding peptide
  MOD_RES (1)..(35): Xaa is C or S

SEQ ID NO: 20202 - protein, 37 aa, Artificial Sequence; identical to SEQ ID NO: 17098
  GFR-binding peptide
  MOD_RES (2)..(4): Xaa is C or S
  MOD_RES (16)..(17)..(18)..(19)..(20): Xaa is A or G
  MOD_RES (21)..(22)..(23)..(24): Xaa is A or G or is absent

SEQ ID NO: 20203 - protein, 39 aa, Artificial Sequence; identical to SEQ ID NO: 17099
  GFR-binding peptide
  MOD_RES (35)..(35): Xaa is C or S
  MOD_RES (11)..(12)..(13)..(14)..(15): Xaa is A or G
  MOD_RES (16)..(17)..(18)..(19): Xaa is A or G or is absent

SEQ ID NO: 20204 - protein, 37 aa, Artificial Sequence; identical to SEQ ID NO: 17100
  GFR-binding peptide
  MOD_RES (35)..(35): Xaa is C or S

SEQ ID NO: 20205 - protein, 38 aa, Artificial Sequence; identical to SEQ ID NO: 17101
  GFR-binding peptide
  MOD_RES (36)..(36): Xaa is C or S

SEQ ID NO: 20206 - protein, 39 aa, Artificial Sequence; identical to SEQ ID NO: 17102
  GFR-binding peptide
  MOD_RES (37)..(37): Xaa is C or S

SEQ ID NO: 20207 - protein, 43 aa, Artificial Sequence; identical to SEQ ID NO: 17103
  GFR-binding peptide
  MOD_RES (2)..(39): Xaa is C or S
  MOD_RES (15)..(16)..(17)..(18)..(19): Xaa is A or G
  MOD_RES (20)..(21)..(22)..(23): Xaa is A or G or is absent

SEQ ID NO: 20208 - protein, 42 aa, Artificial Sequence; identical to SEQ ID NO: 17104
  GFR-binding peptide
  MOD_RES (1)..(3)..(37): Xaa is C or S

SEQ ID NO: 20209 - protein, 41 aa, Artificial Sequence; identical to SEQ ID NO: 17105
  GFR-binding peptide
  MOD_RES (1)..(38): Xaa is C or S

SEQ ID NO: 20210 - protein, 35 aa, Artificial Sequence; identical to SEQ ID NO: 17106
  GFR-binding peptide
  MOD_RES (13)..(14)..(15)..(16)..(17): Xaa is A or G
  MOD_RES (18)..(19)..(20)..(21): Xaa is A or G or is absent

SEQ ID NO: 20211 - protein, 38 aa, Artificial Sequence; identical to SEQ ID NO: 17107
  GFR-binding peptide
  MOD_RES (35)..(35): Xaa is C or S

SEQ ID NO: 20212 - protein, 37 aa, Artificial Sequence; identical to SEQ ID NO: 17108
  GFR-binding peptide
  MOD_RES (33)..(33): Xaa is C or S

SEQ ID NO: 20213 - protein, 38 aa, Artificial Sequence; identical to SEQ ID NO: 17109
  GFR-binding peptide
  MOD_RES (2)..(4)..(38): Xaa is C or S

SEQ ID NO: 20214 - protein, 40 aa, Artificial Sequence; identical to SEQ ID NO: 17110
  GFR-binding peptide
  MOD_RES (1)..(3)..(37): Xaa is C or S
  MOD_RES (15)..(16)..(17)..(18)..(19): Xaa is A or G
  MOD_RES (20)..(21)..(22)..(23): Xaa is A or G or is absent

SEQ ID NO: 20215 - protein, 43 aa, Artificial Sequence; identical to SEQ ID NO: 17111
  GFR-binding peptide
  MOD_RES (2)..(4)..(38): Xaa is C or S
  MOD_RES (16)..(17)..(18)..(19)..(20): Xaa is A or G
  MOD_RES (21)..(22)..(23)..(24): Xaa is A or G or is absent

SEQ ID NO: 20216 - protein, 35 aa, Artificial Sequence; identical to SEQ ID NO: 17112
  GFR-binding peptide
  MOD_RES (35)..(35): Xaa is C or S

SEQ ID NO: 20217 - protein, 39 aa, Artificial Sequence; identical to SEQ ID NO: 17113
  GFR-binding peptide
  MOD_RES (2)..(4)..(38): Xaa is C or S

SEQ ID NO: 20218 - protein, 35 aa, Artificial Sequence; identical to SEQ ID NO: 17114
  GFR-binding peptide
  MOD_RES (33)..(33): Xaa is C or S

SEQ ID NO: 20219 - protein, 40 aa, Artificial Sequence; identical to SEQ ID NO: 17115
  GFR-binding peptide
  MOD_RES (37)..(37): Xaa is C or S
  MOD_RES (13)..(14)..(15)..(16)..(17): Xaa is A or G
  MOD_RES (18)..(19)..(20)..(21): Xaa is A or G or is absent

SEQ ID NO: 20220 - protein, 34 aa, Artificial Sequence; identical to SEQ ID NO: 17116
  GFR-binding peptide
  MOD_RES (34)..(34): Xaa is C or S
  MOD_RES (12)..(13)..(14)..(15)..(16): Xaa is A or G
  MOD_RES (17)..(18)..(19)..(20): Xaa is A or G or is absent

SEQ ID NO: 20221 - protein, 40 aa, Artificial Sequence; identical to SEQ ID NO: 17117
  GFR-binding peptide
  MOD_RES (37)..(37): Xaa is C or S

SEQ ID NO: 20222 - protein, 38 aa, Artificial Sequence; identical to SEQ ID NO: 17118
  GFR-binding peptide
  MOD_RES (2)..(4)..(38): Xaa is C or S

SEQ ID NO: 20223 - protein, 42 aa, Artificial Sequence; identical to SEQ ID NO: 17119
  GFR-binding peptide
  MOD_RES (2)..(36): Xaa is C or S
  MOD_RES (14)..(15)..(16)..(17)..(18): Xaa is A or G
  MOD_RES (19)..(20)..(21)..(22): Xaa is A or G or is absent

SEQ ID NO: 20224 - protein, 39 aa, Artificial Sequence; identical to SEQ ID NO: 17120
  GFR-binding peptide
  MOD_RES (1)..(3)..(37): Xaa is C or S

SEQ ID NO: 20225 - protein, 45 aa, Artificial Sequence; identical to SEQ ID NO: 17121
  GFR-binding peptide
  MOD_RES (2)..(4)..(41): Xaa is C or S

SEQ ID NO: 20226 - protein, 42 aa, Artificial Sequence; identical to SEQ ID NO: 17122
  GFR-binding peptide
  MOD_RES (2)..(4)..(38): Xaa is C or S
  MOD_RES (16)..(17)..(18)..(19)..(20): Xaa is A or G
  MOD_RES (21)..(22)..(23)..(24): Xaa is A or G or is absent

SEQ ID NO: 20227 - protein, 39 aa, Artificial Sequence; identical to SEQ ID NO: 17123
  GFR-binding peptide
  MOD_RES (34)..(34): Xaa is C or S

SEQ ID NO: 20228 - protein, 39 aa, Artificial Sequence; identical to SEQ ID NO: 17124
  GFR-binding peptide
  MOD_RES (1)..(35): Xaa is C or S

SEQ ID NO: 20229 - protein, 36 aa, Artificial Sequence; identical to SEQ ID NO: 17125
  GFR-binding peptide
  MOD_RES (1)..(35): Xaa is C or S
  MOD_RES (13)..(14)..(15)..(16)..(17): Xaa is A or G
  MOD_RES (18)..(19)..(20)..(21): Xaa is A or G or is absent

SEQ ID NO: 20230 - protein, 32 aa, Artificial Sequence; identical to SEQ ID NO: 17126
  GFR-binding peptide

SEQ ID NO: 20231 - protein, 42 aa, Artificial Sequence; identical to SEQ ID NO: 17127
  GFR-binding peptide
  MOD_RES (1)..(38): Xaa is C or S

SEQ ID NO: 20232 - protein, 37 aa, Artificial Sequence; identical to SEQ ID NO: 17128
  GFR-binding peptide
  MOD_RES (2)..(36): Xaa is C or S
  MOD_RES (14)..(15)..(16)..(17)..(18): Xaa is A or G
  MOD_RES (19)..(20)..(21)..(22): Xaa is A or G or is absent

SEQ ID NO: 20233 - protein, 41 aa, Artificial Sequence; identical to SEQ ID NO: 17129
  GFR-binding peptide
  MOD_RES (2)..(4)..(38): Xaa is C or S
  MOD_RES (16)..(17)..(18)..(19)..(20): Xaa is A or G
  MOD_RES (21)..(22)..(23)..(24): Xaa is A or G or is absent

SEQ ID NO: 20234 - protein, 35 aa, Artificial Sequence; identical to SEQ ID NO: 17130
  GFR-binding peptide
  MOD_RES (34)..(34): Xaa is C or S
  MOD_RES (12)..(13)..(14)..(15)..(16): Xaa is A or G
  MOD_RES (17)..(18)..(19)..(20): Xaa is A or G or is absent

SEQ ID NO: 20235 - protein, 38 aa, Artificial Sequence; identical to SEQ ID NO: 17131
  GFR-binding peptide
  MOD_RES (34)..(34): Xaa is C or S
  MOD_RES (12)..(13)..(14)..(15)..(16): Xaa is A or G
  MOD_RES (17)..(18)..(19)..(20): Xaa is A or G or is absent

SEQ ID NO: 20236 - protein, 37 aa, Artificial Sequence; identical to SEQ ID NO: 17132
  GFR-binding peptide
  MOD_RES (1)..(3)..(37): Xaa is C or S
  MOD_RES (15)..(16)..(17)..(18)..(19): Xaa is A or G
  MOD_RES (20)..(21)..(22)..(23): Xaa is A or G or is absent

SEQ ID NO: 20237 - protein, 39 aa, Artificial Sequence; identical to SEQ ID NO: 17133
  GFR-binding peptide
  MOD_RES (2)..(4): Xaa is C or S
  MOD_RES (17)..(18)..(19)..(20)..(21): Xaa is A or G
  MOD_RES (22)..(23)..(24)..(25): Xaa is A or G or is absent

SEQ ID NO: 20238 - protein, 33 aa, Artificial Sequence; identical to SEQ ID NO: 17134
  GFR-binding peptide

SEQ ID NO: 20239 - protein, 36 aa, Artificial Sequence; identical to SEQ ID NO: 17135
  GFR-binding peptide
  MOD_RES (34)..(34): Xaa is C or S
  MOD_RES (12)..(13)..(14)..(15)..(16): Xaa is A or G
  MOD_RES (17)..(18)..(19)..(20): Xaa is A or G or is absent

SEQ ID NO: 20240 - protein, 38 aa, Artificial Sequence; identical to SEQ ID NO: 17136
  GFR-binding peptide
  MOD_RES (2)..(36): Xaa is C or S

SEQ ID NO: 20241 - protein, 40 aa, Artificial Sequence; identical to SEQ ID NO: 17137
  GFR-binding peptide
  MOD_RES (36)..(36): Xaa is C or S

SEQ ID NO: 20242 - protein, 35 aa, Artificial Sequence; identical to SEQ ID NO: 17138
  GFR-binding peptide

SEQ ID NO: 20243 - protein, 39 aa, Artificial Sequence; identical to SEQ ID NO: 17139
  GFR-binding peptide
  MOD_RES (1)..(3)..(37): Xaa is C or S

SEQ ID NO: 20244 - protein, 41 aa, Artificial Sequence; identical to SEQ ID NO: 17140
  GFR-binding peptide
  MOD_RES (37)..(37): Xaa is C or S

SEQ ID NO: 20245 - protein, 35 aa, Artificial Sequence; identical to SEQ ID NO: 17141
  GFR-binding peptide
  MOD_RES (2)..(2): Xaa is C or S

SEQ ID NO: 20246 - protein, 37 aa, Artificial Sequence; identical to SEQ ID NO: 17142
  GFR-binding peptide
  MOD_RES (2)..(36): Xaa is C or S
  MOD_RES (14)..(15)..(16)..(17)..(18): Xaa is A or G
  MOD_RES (19)..(20)..(21)..(22): Xaa is A or G or is absent

SEQ ID NO: 20247 - protein, 38 aa, Artificial Sequence; identical to SEQ ID NO: 17143
  GFR-binding peptide
  MOD_RES (37)..(37): Xaa is C or S
  MOD_RES (13)..(14)..(15)..(16)..(17): Xaa is A or G
  MOD_RES (18)..(19)..(20)..(21): Xaa is A or G or is absent

SEQ ID NO: 20248 - protein, 39 aa, Artificial Sequence; identical to SEQ ID NO: 17144
  GFR-binding peptide
  MOD_RES (2)..(39): Xaa is C or S
  MOD_RES (15)..(16)..(17)..(18)..(19): Xaa is A or G
  MOD_RES (20)..(21)..(22)..(23): Xaa is A or G or is absent

SEQ ID NO: 20249 - protein, 34 aa, Artificial Sequence; identical to SEQ ID NO: 17145
  GFR-binding peptide
  MOD_RES (11)..(12)..(13)..(14)..(15): Xaa is A or G
  MOD_RES (16)..(17)..(18)..(19): Xaa is A or G or is absent

SEQ ID NO: 20250 - protein, 44 aa, Artificial Sequence; identical to SEQ ID NO: 17146
  GFR-binding peptide
  MOD_RES (1)..(3)..(40): Xaa is C or S
  MOD_RES (16)..(17)..(18)..(19)..(20): Xaa is A or G
  MOD_RES (21)..(22)..(23)..(24): Xaa is A or G or is absent

SEQ ID NO: 20251 - protein, 42 aa, Artificial Sequence; identical to SEQ ID NO: 17147
  GFR-binding peptide
  MOD_RES (2)..(4)..(38): Xaa is C or S
  MOD_RES (16)..(17)..(18)..(19)..(20): Xaa is A or G
  MOD_RES (21)..(22)..(23)..(24): Xaa is A or G or is absent

SEQ ID NO: 20252 - protein, 41 aa, Artificial Sequence; identical to SEQ ID NO: 17148
  GFR-binding peptide
  MOD_RES (1)..(38): Xaa is C or S

SEQ ID NO: 20253 - protein, 38 aa, Artificial Sequence; identical to SEQ ID NO: 17149
  GFR-binding peptide
  MOD_RES (33)..(33): Xaa is C or S
  MOD_RES (11)..(12)..(13)..(14)..(15): Xaa is A or G
  MOD_RES (16)..(17)..(18)..(19): Xaa is A or G or is absent

SEQ ID NO: 20254 - protein, 40 aa, Artificial Sequence; identical to SEQ ID NO: 17150
  GFR-binding peptide
  MOD_RES (2)..(4): Xaa is C or S
  MOD_RES (17)..(18)..(19)..(20)..(21): Xaa is A or G
  MOD_RES (22)..(23)..(24)..(25): Xaa is A or G or is absent

SEQ ID NO: 20255 - protein, 36 aa, Artificial Sequence; identical to SEQ ID NO: 17151
  GFR-binding peptide
  MOD_RES (13)..(14)..(15)..(16)..(17): Xaa is A or G
  MOD_RES (18)..(19)..(20)..(21): Xaa is A or G or is absent

SEQ ID NO: 20256 - protein, 36 aa, Artificial Sequence; identical to SEQ ID NO: 17152
  GFR-binding peptide
  MOD_RES (1)..(35): Xaa is C or S

SEQ ID NO: 20257 - protein, 37 aa, Artificial Sequence; identical to SEQ ID NO: 17153
  GFR-binding peptide
  MOD_RES (37)..(37): Xaa is C or S

SEQ ID NO: 20258 - protein, 40 aa, Artificial Sequence; identical to SEQ ID NO: 17154
  GFR-binding peptide
  MOD_RES (1)..(38): Xaa is C or S

SEQ ID NO: 20259 - protein, 45 aa, Artificial Sequence; identical to SEQ ID NO: 17155
  GFR-binding peptide
  MOD_RES (2)..(4)..(41): Xaa is C or S
  MOD_RES (17)..(18)..(19)..(20)..(21): Xaa is A or G
  MOD_RES (22)..(23)..(24)..(25): Xaa is A or G or is absent

SEQ ID NO: 20260 - protein, 39 aa, Artificial Sequence; identical to SEQ ID NO: 17156
  GFR-binding peptide
  MOD_RES (1)..(3): Xaa is C or S

SEQ ID NO: 20261 - protein, 43 aa, Artificial Sequence; identical to SEQ ID NO: 17157
  GFR-binding peptide
  MOD_RES (2)..(4)..(38): Xaa is C or S

SEQ ID NO: 20262 - protein, 39 aa, Artificial Sequence; identical to SEQ ID NO: 17158
  GFR-binding peptide
  MOD_RES (1)..(3): Xaa is C or S
  MOD_RES (16)..(17)..(18)..(19)..(20): Xaa is A or G
  MOD_RES (21)..(22)..(23)..(24): Xaa is A or G or is absent

SEQ ID NO: 20263 - protein, 40 aa, Artificial Sequence; identical to SEQ ID NO: 17159
  GFR-binding peptide
  MOD_RES (1)..(3)..(37): Xaa is C or S

SEQ ID NO: 20264 - protein, 33 aa, Artificial Sequence; identical to SEQ ID NO: 17160
  GFR-binding peptide
  MOD_RES (11)..(12)..(13)..(14)..(15): Xaa is A or G
  MOD_RES (16)..(17)..(18)..(19): Xaa is A or G or is absent

SEQ ID NO: 20265 - protein, 40 aa, Artificial Sequence; identical to SEQ ID NO: 17161
  GFR-binding peptide
  MOD_RES (2)..(39): Xaa is C or S

SEQ ID NO: 20266 - protein, 35 aa, Artificial Sequence; identical to SEQ ID NO: 17162
  GFR-binding peptide
  MOD_RES (34)..(34): Xaa is C or S

SEQ ID NO: 20267 - protein, 37 aa, Artificial Sequence; identical to SEQ ID NO: 17163
  GFR-binding peptide
  MOD_RES (37)..(37): Xaa is C or S

SEQ ID NO: 20268 - protein, 40 aa, Artificial Sequence; identical to SEQ ID NO: 17164
  GFR-binding peptide
  MOD_RES (2)..(4): Xaa is C or S
  MOD_RES (17)..(18)..(19)..(20)..(21): Xaa is A or G
  MOD_RES (22)..(23)..(24)..(25): Xaa is A or G or is absent

SEQ ID NO: 20269 - protein, 35 aa, Artificial Sequence; identical to SEQ ID NO: 17165
  GFR-binding peptide

SEQ ID NO: 20270 - protein, 36 aa, Artificial Sequence; identical to SEQ ID NO: 17166
  GFR-binding peptide
  MOD_RES (1)..(35): Xaa is C or S

SEQ ID NO: 20271 - protein, 38 aa, Artificial Sequence; identical to SEQ ID NO: 17167
  GFR-binding peptide
  MOD_RES (36)..(36): Xaa is C or S
  MOD_RES (12)..(13)..(14)..(15)..(16): Xaa is A or G
  MOD_RES (17)..(18)..(19)..(20): Xaa is A or G or is absent

SEQ ID NO: 20272 - protein, 39 aa, Artificial Sequence; identical to SEQ ID NO: 17168
  GFR-binding peptide
  MOD_RES (1)..(3): Xaa is C or S

SEQ ID NO: 20273 - protein, 40 aa, Artificial Sequence; identical to SEQ ID NO: 17169
  GFR-binding peptide
  MOD_RES (2)..(4): Xaa is C or S
  MOD_RES (17)..(18)..(19)..(20)..(21): Xaa is A or G
  MOD_RES (22)..(23)..(24)..(25): Xaa is A or G or is absent

SEQ ID NO: 20274 - protein, 36 aa, Artificial Sequence; identical to SEQ ID NO: 17170
  GFR-binding peptide
  MOD_RES (2)..(36): Xaa is C or S
  MOD_RES (14)..(15)..(16)..(17)..(18): Xaa is A or G
  MOD_RES (19)..(20)..(21)..(22): Xaa is A or G or is absent

SEQ ID NO: 20275 - protein, 44 aa, Artificial Sequence; identical to SEQ ID NO: 17171
  GFR-binding peptide
  MOD_RES (2)..(4)..(41): Xaa is C or S

SEQ ID NO: 20276 - protein, 43 aa, Artificial Sequence; identical to SEQ ID NO: 17172
  GFR-binding peptide
  MOD_RES (2)..(39): Xaa is C or S

SEQ ID NO: 20277 - protein, 40 aa, Artificial Sequence; identical to SEQ ID NO: 17173
  GFR-binding peptide
  MOD_RES (2)..(36): Xaa is C or S

SEQ ID NO: 20278 - protein, 40 aa, Artificial Sequence; identical to SEQ ID NO: 17174
  GFR-binding peptide
  MOD_RES (34)..(34): Xaa is C or S

SEQ ID NO: 20279 - protein, 34 aa, Artificial Sequence; identical to SEQ ID NO: 17175
  GFR-binding peptide
  MOD_RES (1)..(1): Xaa is C or S
  MOD_RES (13)..(14)..(15)..(16)..(17): Xaa is A or G
  MOD_RES (18)..(19)..(20)..(21): Xaa is A or G or is absent

SEQ ID NO: 20280 - protein, 38 aa, Artificial Sequence; identical to SEQ ID NO: 17176
  GFR-binding peptide
  MOD_RES (34)..(34): Xaa is C or S

SEQ ID NO: 20281 - protein, 36 aa, Artificial Sequence; identical to SEQ ID NO: 17177
  GFR-binding peptide
  MOD_RES (36)..(36): Xaa is C or S

SEQ ID NO: 20282 - protein, 38 aa, Artificial Sequence; identical to SEQ ID NO: 17178
  GFR-binding peptide
  MOD_RES (34)..(34): Xaa is C or S

SEQ ID NO: 20283 - protein, 35 aa, Artificial Sequence; identical to SEQ ID NO: 17179
  GFR-binding peptide

SEQ ID NO: 20284 - protein, 36 aa, Artificial Sequence; identical to SEQ ID NO: 17180
  GFR-binding peptide
  MOD_RES (1)..(3): Xaa is C or S
  MOD_RES (15)..(16)..(17)..(18)..(19): Xaa is A or G
  MOD_RES (20)..(21)..(22)..(23): Xaa is A or G or is absent

SEQ ID NO: 20285 - protein, 38 aa, Artificial Sequence; identical to SEQ ID NO: 17181
  GFR-binding peptide
  MOD_RES (1)..(35): Xaa is C or S

SEQ ID NO: 20286 - protein, 37 aa, Artificial Sequence; identical to SEQ ID NO: 17182
  GFR-binding peptide
  MOD_RES (35)..(35): Xaa is C or S

SEQ ID NO: 20287 - protein, 41 aa, Artificial Sequence; identical to SEQ ID NO: 17183
  GFR-binding peptide
  MOD_RES (2)..(39): Xaa is C or S

SEQ ID NO: 20288 - protein, 37 aa, Artificial Sequence; identical to SEQ ID NO: 17184
  GFR-binding peptide
  MOD_RES (1)..(1): Xaa is C or S
  MOD_RES (14)..(15)..(16)..(17)..(18): Xaa is A or G
  MOD_RES (19)..(20)..(21)..(22): Xaa is A or G or is absent

SEQ ID NO: 20289 - protein, 39 aa, Artificial Sequence; identical to SEQ ID NO: 17185
  GFR-binding peptide
  MOD_RES (2)..(4)..(38): Xaa is C or S
  MOD_RES (16)..(17)..(18)..(19)..(20): Xaa is A or G
  MOD_RES (21)..(22)..(23)..(24): Xaa is A or G or is absent

SEQ ID NO: 20290 - protein, 34 aa, Artificial Sequence; identical to SEQ ID NO: 17186
  GFR-binding peptide

SEQ ID NO: 20291 - protein, 38 aa, Artificial Sequence; identical to SEQ ID NO: 17187
  GFR-binding peptide
  MOD_RES (2)..(4)..(38): Xaa is C or S
  MOD_RES (16)..(17)..(18)..(19)..(20): Xaa is A or G
  MOD_RES (21)..(22)..(23)..(24): Xaa is A or G or is absent

SEQ ID NO: 20292 - protein, 39 aa, Artificial Sequence; identical to SEQ ID NO: 17188
  GFR-binding peptide
  MOD_RES (2)..(36): Xaa is C or S

SEQ ID NO: 20293 - protein, 40 aa, Artificial Sequence; identical to SEQ ID NO: 17189
  GFR-binding peptide
  MOD_RES (37)..(37): Xaa is C or S
  MOD_RES (13)..(14)..(15)..(16)..(17): Xaa is A or G
  MOD_RES (18)..(19)..(20)..(21): Xaa is A or G or is absent

SEQ ID NO: 20294 - protein, 36 aa, Artificial Sequence; identical to SEQ ID NO: 17190
  GFR-binding peptide
  MOD_RES (33)..(33): Xaa is C or S
  MOD_RES (11)..(12)..(13)..(14)..(15): Xaa is A or G
  MOD_RES (16)..(17)..(18)..(19): Xaa is A or G or is absent

SEQ ID NO: 20295 - protein, 36 aa, Artificial Sequence; identical to SEQ ID NO: 17191
  GFR-binding peptide
  MOD_RES (1)..(3): Xaa is C or S
  MOD_RES (15)..(16)..(17)..(18)..(19): Xaa is A or G
  MOD_RES (20)..(21)..(22)..(23): Xaa is A or G or is absent

SEQ ID NO: 20296 - protein, 40 aa, Artificial Sequence; identical to SEQ ID NO: 17192
  GFR-binding peptide
  MOD_RES (34)..(34): Xaa is C or S

SEQ ID NO: 20297 - protein, 36 aa, Artificial Sequence; identical to SEQ ID NO: 17193
  GFR-binding peptide
  MOD_RES (1)..(1): Xaa is C or S
  MOD_RES (14)..(15)..(16)..(17)..(18): Xaa is A or G
  MOD_RES (19)..(20)..(21)..(22): Xaa is A or G or is absent

SEQ ID NO: 20298 - protein, 35 aa, Artificial Sequence; identical to SEQ ID NO: 17194
  GFR-binding peptide
  MOD_RES (1)..(35): Xaa is C or S
  MOD_RES (13)..(14)..(15)..(16)..(17): Xaa is A or G
  MOD_RES (18)..(19)..(20)..(21): Xaa is A or G or is absent

SEQ ID NO: 20299 - protein, 41 aa, Artificial Sequence; identical to SEQ ID NO: 17195
  GFR-binding peptide
  MOD_RES (2)..(39): Xaa is C or S
  MOD_RES (15)..(16)..(17)..(18)..(19): Xaa is A or G
  MOD_RES (20)..(21)..(22)..(23): Xaa is A or G or is absent

SEQ ID NO: 20300 - protein, 40 aa, Artificial Sequence; identical to SEQ ID NO: 17196
  GFR-binding peptide
  MOD_RES (2)..(39): Xaa is C or S
  MOD_RES (15)..(16)..(17)..(18)..(19): Xaa is A or G
  MOD_RES (20)..(21)..(22)..(23): Xaa is A or G or is absent

SEQ ID NO: 20301 - protein, 43 aa, Artificial Sequence; identical to SEQ ID NO: 17197
  GFR-binding peptide
  MOD_RES (2)..(39): Xaa is C or S

SEQ ID NO: 20302 - protein, 39 aa, Artificial Sequence; identical to SEQ ID NO: 17198
  GFR-binding peptide
  MOD_RES (1)..(35): Xaa is C or S

SEQ ID NO: 20303 - protein, 37 aa, Artificial Sequence; identical to SEQ ID NO: 17199
  GFR-binding peptide
  MOD_RES (35)..(35): Xaa is C or S

SEQ ID NO: 20304 - protein, 35 aa, Artificial Sequence; identical to SEQ ID NO: 17200
  GFR-binding peptide
  MOD_RES (1)..(1): Xaa is C or S
  MOD_RES (14)..(15)..(16)..(17)..(18): Xaa is A or G
  MOD_RES (19)..(20)..(21)..(22): Xaa is A or G or is absent

SEQ ID NO: 20305 - protein, 38 aa, Artificial Sequence; identical to SEQ ID NO: 17201
  GFR-binding peptide
  MOD_RES (1)..(38): Xaa is C or S

SEQ ID NO: 20306 - protein, 37 aa, Artificial Sequence; identical to SEQ ID NO: 17202
  GFR-binding peptide
  MOD_RES (34)..(34): Xaa is C or S

SEQ ID NO: 20307 - protein, 34 aa, Artificial Sequence; identical to SEQ ID NO: 17203
  GFR-binding peptide
  MOD_RES (34)..(34): Xaa is C or S
  MOD_RES (12)..(13)..(14)..(15)..(16): Xaa is A or G
  MOD_RES (17)..(18)..(19)..(20): Xaa is A or G or is absent

SEQ ID NO: 20308 - protein, 41 aa, Artificial Sequence; identical to SEQ ID NO: 17204
  GFR-binding peptide
  MOD_RES (2)..(39): Xaa is C or S
  MOD_RES (15)..(16)..(17)..(18)..(19): Xaa is A or G
  MOD_RES (20)..(21)..(22)..(23): Xaa is A or G or is absent

SEQ ID NO: 20309 - protein, 36 aa, Artificial Sequence; identical to SEQ ID NO: 17205
  GFR-binding peptide
  MOD_RES (36)..(36): Xaa is C or S
  MOD_RES (12)..(13)..(14)..(15)..(16): Xaa is A or G
  MOD_RES (17)..(18)..(19)..(20): Xaa is A or G or is absent

SEQ ID NO: 20310 - protein, 35 aa, Artificial Sequence; identical to SEQ ID NO: 17206
  GFR-binding peptide
  MOD_RES (1)..(1): Xaa is C or S

SEQ ID NO: 20311 - protein, 43 aa, Artificial Sequence; identical to SEQ ID NO: 17207
  GFR-binding peptide
  MOD_RES (1)..(3)..(37): Xaa is C or S
  MOD_RES (15)..(16)..(17)..(18)..(19): Xaa is A or G
  MOD_RES (20)..(21)..(22)..(23): Xaa is A or G or is absent

SEQ ID NO: 20312 - protein, 33 aa, Artificial Sequence; identical to SEQ ID NO: 17208
  GFR-binding peptide
  MOD_RES (33)..(33): Xaa is C or S

SEQ ID NO: 20313 - protein, 37 aa, Artificial Sequence; identical to SEQ ID NO: 17209
  GFR-binding peptide
  MOD_RES (37)..(37): Xaa is C or S
  MOD_RES (13)..(14)..(15)..(16)..(17): Xaa is A or G
  MOD_RES (18)..(19)..(20)..(21): Xaa is A or G or is absent

SEQ ID NO: 20314 - protein, 34 aa, Artificial Sequence; identical to SEQ ID NO: 17210
  GFR-binding peptide
  MOD_RES (33)..(33): Xaa is C or S
  MOD_RES (11)..(12)..(13)..(14)..(15): Xaa is A or G
  MOD_RES (16)..(17)..(18)..(19): Xaa is A or G or is absent

SEQ ID NO: 20315 - protein, 42 aa, Artificial Sequence; identical to SEQ ID NO: 17211
  GFR-binding peptide
  MOD_RES (1)..(38): Xaa is C or S

SEQ ID NO: 20316 - protein, 41 aa, Artificial Sequence; identical to SEQ ID NO: 17212
  GFR-binding peptide
  MOD_RES (2)..(36): Xaa is C or S

SEQ ID NO: 20317 - protein, 34 aa, Artificial Sequence; identical to SEQ ID NO: 17213
  GFR-binding peptide

SEQ ID NO: 20318 - protein, 43 aa, Artificial Sequence; identical to SEQ ID NO: 17214
  GFR-binding peptide
  MOD_RES (2)..(39): Xaa is C or S

SEQ ID NO: 20319 - protein, 42 aa, Artificial Sequence; identical to SEQ ID NO: 17215
  GFR-binding peptide
  MOD_RES (2)..(36): Xaa is C or S

SEQ ID NO: 20320 - protein, 40 aa, Artificial Sequence; identical to SEQ ID NO: 17216
  GFR-binding peptide
  MOD_RES (2)..(36): Xaa is C or S

SEQ ID NO: 20321 - protein, 37 aa, Artificial Sequence; identical to SEQ ID NO: 17217
  GFR-binding peptide
  MOD_RES (34)..(34): Xaa is C or S

SEQ ID NO: 20322 - protein, 38 aa, Artificial Sequence; identical to SEQ ID NO: 17218
  GFR-binding peptide
  MOD_RES (37)..(37): Xaa is C or S
  MOD_RES (13)..(14)..(15)..(16)..(17): Xaa is A or G
  MOD_RES (18)..(19)..(20)..(21): Xaa is A or G or is absent

SEQ ID NO: 20323 - protein, 43 aa, Artificial Sequence; identical to SEQ ID NO: 17219
  GFR-binding peptide
  MOD_RES (2)..(4)..(38): Xaa is C or S
  MOD_RES (16)..(17)..(18)..(19)..(20): Xaa is A or G
  MOD_RES (21)..(22)..(23)..(24): Xaa is A or G or is absent

SEQ ID NO: 20324 - protein, 44 aa, Artificial Sequence; identical to SEQ ID NO: 17220
  GFR-binding peptide
  MOD_RES (2)..(4)..(41): Xaa is C or S
  MOD_RES (17)..(18)..(19)..(20)..(21): Xaa is A or G
  MOD_RES (22)..(23)..(24)..(25): Xaa is A or G or is absent

SEQ ID NO: 20325 - protein, 36 aa, Artificial Sequence; identical to SEQ ID NO: 17221
  GFR-binding peptide
  MOD_RES (1)..(3): Xaa is C or S

SEQ ID NO: 20326 - protein, 38 aa, Artificial Sequence; identical to SEQ ID NO: 17222
  GFR-binding peptide
  MOD_RES (37)..(37): Xaa is C or S

SEQ ID NO: 20327 - protein, 32 aa, Artificial Sequence; identical to SEQ ID NO: 17223
  GFR-binding peptide
  MOD_RES (11)..(12)..(13)..(14)..(15): Xaa is A or G
  MOD_RES (16)..(17)..(18)..(19): Xaa is A or G or is absent

SEQ ID NO: 20328 - protein, 37 aa, Artificial Sequence; identical to SEQ ID NO: 17224
  GFR-binding peptide
  MOD_RES (36)..(36): Xaa is C or S

SEQ ID NO: 20329 - protein, 43 aa, Artificial Sequence; identical to SEQ ID NO: 17225
  GFR-binding peptide
  MOD_RES (1)..(3)..(37): Xaa is C or S
  MOD_RES (15)..(16)..(17)..(18)..(19): Xaa is A or G
  MOD_RES (20)..(21)..(22)..(23): Xaa is A or G or is absent

SEQ ID NO: 20330 - protein, 35 aa, Artificial Sequence; identical to SEQ ID NO: 17226
  GFR-binding peptide
  MOD_RES (12)..(13)..(14)..(15)..(16): Xaa is A or G
  MOD_RES (17)..(18)..(19)..(20): Xaa is A or G or is absent

SEQ ID NO: 20331 - protein, 38 aa, Artificial Sequence; identical to SEQ ID NO: 17227
  GFR-binding peptide
  MOD_RES (2)..(2): Xaa is C or S
  MOD_RES (15)..(16)..(17)..(18)..(19): Xaa is A or G
  MOD_RES (20)..(21)..(22)..(23): Xaa is A or G or is absent

SEQ ID NO: 20332 - protein, 37 aa, Artificial Sequence; identical to SEQ ID NO: 17228
  GFR-binding peptide
  MOD_RES (35)..(35): Xaa is C or S
  MOD_RES (11)..(12)..(13)..(14)..(15): Xaa is A or G
  MOD_RES (16)..(17)..(18)..(19): Xaa is A or G or is absent

SEQ ID NO: 20333 - protein, 38 aa, Artificial Sequence; identical to SEQ ID NO: 17229
  GFR-binding peptide
  MOD_RES (1)..(38): Xaa is C or S

SEQ ID NO: 20334 - protein, 37 aa, Artificial Sequence; identical to SEQ ID NO: 17230
  GFR-binding peptide
  MOD_RES (35)..(35): Xaa is C or S
  MOD_RES (11)..(12)..(13)..(14)..(15): Xaa is A or G
  MOD_RES (16)..(17)..(18)..(19): Xaa is A or G or is absent

SEQ ID NO: 20335 - protein, 33 aa, Artificial Sequence; identical to SEQ ID NO: 17231
  GFR-binding peptide

SEQ ID NO: 20336 - protein, 33 aa, Artificial Sequence; identical to SEQ ID NO: 17232
  GFR-binding peptide
  MOD_RES (33)..(33): Xaa is C or S
  MOD_RES (11)..(12)..(13)..(14)..(15): Xaa is A or G
  MOD_RES (16)..(17)..(18)..(19): Xaa is A or G or is absent

SEQ ID NO: 20337 - protein, 41 aa, Artificial Sequence; identical to SEQ ID NO: 17233
  GFR-binding peptide
  MOD_RES (2)..(39): Xaa is C or S

SEQ ID NO: 20338 - protein, 34 aa, Artificial Sequence; identical to SEQ ID NO: 17234
  GFR-binding peptide
  MOD_RES (33)..(33): Xaa is C or S
  MOD_RES (11)..(12)..(13)..(14)..(15): Xaa is A or G
  MOD_RES (16)..(17)..(18)..(19): Xaa is A or G or is absent

SEQ ID NO: 20339 - protein, 36 aa, Artificial Sequence; identical to SEQ ID NO: 17235
  GFR-binding peptide
  MOD_RES (2)..(36): Xaa is C or S
  MOD_RES (14)..(15)..(16)..(17)..(18): Xaa is A or G
  MOD_RES (19)..(20)..(21)..(22): Xaa is A or G or is absent

SEQ ID NO: 20340 - protein, 36 aa, Artificial Sequence; identical to SEQ ID NO: 17236
  GFR-binding peptide
  MOD_RES (13)..(14)..(15)..(16)..(17): Xaa is A or G
  MOD_RES (18)..(19)..(20)..(21): Xaa is A or G or is absent

SEQ ID NO: 20341 - protein, 40 aa, Artificial Sequence; identical to SEQ ID NO: 17237
  GFR-binding peptide
  MOD_RES (36)..(36): Xaa is C or S

SEQ ID NO: 20342 - protein, 40 aa, Artificial Sequence; identical to SEQ ID NO: 17238
  GFR-binding peptide
  MOD_RES (2)..(36): Xaa is C or S

SEQ ID NO: 20343 - protein, 42 aa, Artificial Sequence; identical to SEQ ID NO: 17239
  GFR-binding peptide
  MOD_RES (1)..(3)..(40): Xaa is C or S

SEQ ID NO: 20344 - protein, 40 aa, Artificial Sequence; identical to SEQ ID NO: 17240
  GFR-binding peptide
  MOD_RES (2)..(4): Xaa is C or S

SEQ ID NO: 20345 - protein, 39 aa, Artificial Sequence; identical to SEQ ID NO: 17241
  GFR-binding peptide
  MOD_RES (34)..(34): Xaa is C or S
  MOD_RES (12)..(13)..(14)..(15)..(16): Xaa is A or G
  MOD_RES (17)..(18)..(19)..(20): Xaa is A or G or is absent

SEQ ID NO: 20346 - protein, 37 aa, Artificial Sequence; identical to SEQ ID NO: 17242
  GFR-binding peptide
  MOD_RES (1)..(35): Xaa is C or S
  MOD_RES (13)..(14)..(15)..(16)..(17): Xaa is A or G
  MOD_RES (18)..(19)..(20)..(21): Xaa is A or G or is absent

SEQ ID NO: 20347 - protein, 39 aa, Artificial Sequence; identical to SEQ ID NO: 17243
  GFR-binding peptide
  MOD_RES (37)..(37): Xaa is C or S
  MOD_RES (13)..(14)..(15)..(16)..(17): Xaa is A or G
  MOD_RES (18)..(19)..(20)..(21): Xaa is A or G or is absent

SEQ ID NO: 20348 - protein, 34 aa, Artificial Sequence; identical to SEQ ID NO: 17244
  GFR-binding peptide
  MOD_RES (1)..(1): Xaa is C or S
  MOD_RES (13)..(14)..(15)..(16)..(17): Xaa is A or G
  MOD_RES (18)..(19)..(20)..(21): Xaa is A or G or is absent

SEQ ID NO: 20349 - protein, 39 aa, Artificial Sequence; identical to SEQ ID NO: 17245
  GFR-binding peptide
  MOD_RES (1)..(35): Xaa is C or S

SEQ ID NO: 20350 - protein, 39 aa, Artificial Sequence; identical to SEQ ID NO: 17246
  GFR-binding peptide
  MOD_RES (36)..(36): Xaa is C or S

SEQ ID NO: 20351 - protein, 34 aa, Artificial Sequence; identical to SEQ ID NO: 17247
  GFR-binding peptide
  MOD_RES (33)..(33): Xaa is C or S
  MOD_RES (11)..(12)..(13)..(14)..(15): Xaa is A or G
  MOD_RES (16)..(17)..(18)..(19): Xaa is A or G or is absent

SEQ ID NO: 20352 - protein, 37 aa, Artificial Sequence; identical to SEQ ID NO: 17248
  GFR-binding peptide
  MOD_RES (2)..(36): Xaa is C or S

SEQ ID NO: 20353 - protein, 42 aa, Artificial Sequence; identical to SEQ ID NO: 17249
  GFR-binding peptide
  MOD_RES (1)..(3)..(40): Xaa is C or S
  MOD_RES (16)..(17)..(18)..(19)..(20): Xaa is A or G
  MOD_RES (21)..(22)..(23)..(24): Xaa is A or G or is absent

SEQ ID NO: 20354 - protein, 39 aa, Artificial Sequence; identical to SEQ ID NO: 17250
  GFR-binding peptide
  MOD_RES (1)..(3)..(37): Xaa is C or S
  MOD_RES (15)..(16)..(17)..(18)..(19): Xaa is A or G
  MOD_RES (20)..(21)..(22)..(23): Xaa is A or G or is absent

SEQ ID NO: 20355 - protein, 37 aa, Artificial Sequence; identical to SEQ ID NO: 17251
  GFR-binding peptide
  MOD_RES (2)..(36): Xaa is C or S
  MOD_RES (14)..(15)..(16)..(17)..(18): Xaa is A or G
  MOD_RES (19)..(20)..(21)..(22): Xaa is A or G or is absent

SEQ ID NO: 20356 - protein, 35 aa, Artificial Sequence; identical to SEQ ID NO: 17252
  GFR-binding peptide
  MOD_RES (33)..(33): Xaa is C or S

SEQ ID NO: 20357 - protein, 35 aa, Artificial Sequence; identical to SEQ ID NO: 17253
  GFR-binding peptide
  MOD_RES (33)..(33): Xaa is C or S
  MOD_RES (11)..(12)..(13)..(14)..(15): Xaa is A or G
  MOD_RES (16)..(17)..(18)..(19): Xaa is A or G or is absent

SEQ ID NO: 20358 - protein, 37 aa, Artificial Sequence; identical to SEQ ID NO: 17254
  GFR-binding peptide
  MOD_RES (1)..(3)..(37): Xaa is C or S

SEQ ID NO: 20359 - protein, 39 aa, Artificial Sequence; identical to SEQ ID NO: 17255
  GFR-binding peptide
  MOD_RES (33)..(33): Xaa is C or S
  MOD_RES (11)..(12)..(13)..(14)..(15): Xaa is A or G
  MOD_RES (16)..(17)..(18)..(19): Xaa is A or G or is absent

SEQ ID NO: 20360 - protein, 40 aa, Artificial Sequence; identical to SEQ ID NO: 17256
  GFR-binding peptide
  MOD_RES (34)..(34): Xaa is C or S
  MOD_RES (12)..(13)..(14)..(15)..(16): Xaa is A or G
  MOD_RES (17)..(18)..(19)..(20): Xaa is A or G or is absent

SEQ ID NO: 20361 - protein, 34 aa, Artificial Sequence; identical to SEQ ID NO: 17257
  GFR-binding peptide

SEQ ID NO: 20362 - protein, 37 aa, Artificial Sequence; identical to SEQ ID NO: 17258
  GFR-binding peptide
  MOD_RES (1)..(35): Xaa is C or S
  MOD_RES (13)..(14)..(15)..(16)..(17): Xaa is A or G
  MOD_RES (18)..(19)..(20)..(21): Xaa is A or G or is absent

SEQ ID NO: 20363 - protein, 39 aa, Artificial Sequence; identical to SEQ ID NO: 17259
  GFR-binding peptide
  MOD_RES (37)..(37): Xaa is C or S

SEQ ID NO: 20364 - protein, 40 aa, Artificial Sequence; identical to SEQ ID NO: 17260
  GFR-binding peptide
  MOD_RES (37)..(37): Xaa is C or S

SEQ ID NO: 20365 - protein, 34 aa, Artificial Sequence; identical to SEQ ID NO: 17261
  GFR-binding peptide
  MOD_RES (34)..(34): Xaa is C or S
  MOD_RES (12)..(13)..(14)..(15)..(16): Xaa is A or G
  MOD_RES (17)..(18)..(19)..(20): Xaa is A or G or is absent

SEQ ID NO: 20366 - protein, 39 aa, Artificial Sequence; identical to SEQ ID NO: 17262
  GFR-binding peptide
  MOD_RES (2)..(39): Xaa is C or S
  MOD_RES (15)..(16)..(17)..(18)..(19): Xaa is A or G
  MOD_RES (20)..(21)..(22)..(23): Xaa is A or G or is absent

SEQ ID NO: 20367 - protein, 40 aa, Artificial Sequence; identical to SEQ ID NO: 17263
  GFR-binding peptide
  MOD_RES (37)..(37): Xaa is C or S

SEQ ID NO: 20368 - protein, 37 aa, Artificial Sequence; identical to SEQ ID NO: 17264
  GFR-binding peptide
  MOD_RES (1)..(3): Xaa is C or S
  MOD_RES (16)..(17)..(18)..(19)..(20): Xaa is A or G
  MOD_RES (21)..(22)..(23)..(24): Xaa is A or G or is absent

SEQ ID NO: 20369 - protein, 35 aa, Artificial Sequence; identical to SEQ ID NO: 17265
  GFR-binding peptide
  MOD_RES (2)..(2): Xaa is C or S

SEQ ID NO: 20370 - protein, 40 aa, Artificial Sequence; identical to SEQ ID NO: 17266
  GFR-binding peptide
  MOD_RES (1)..(38): Xaa is C or S
  MOD_RES (14)..(15)..(16)..(17)..(18): Xaa is A or G
  MOD_RES (19)..(20)..(21)..(22): Xaa is A or G or is absent

SEQ ID NO: 20371 - protein, 34 aa, Artificial Sequence; identical to SEQ ID NO: 17267
  GFR-binding peptide
  MOD_RES (13)..(14)..(15)..(16)..(17): Xaa is A or G
  MOD_RES (18)..(19)..(20)..(21): Xaa is A or G or is absent

SEQ ID NO: 20372 - protein, 39 aa, Artificial Sequence; identical to SEQ ID NO: 17268
  GFR-binding peptide
  MOD_RES (1)..(3)..(37): Xaa is C or S
  MOD_RES (15)..(16)..(17)..(18)..(19): Xaa is A or G
  MOD_RES (20)..(21)..(22)..(23): Xaa is A or G or is absent

SEQ ID NO: 20373 - protein, 43 aa, Artificial Sequence; identical to SEQ ID NO: 17269
  GFR-binding peptide
  MOD_RES (2)..(4)..(41): Xaa is C or S
  MOD_RES (17)..(18)..(19)..(20)..(21): Xaa is A or G
  MOD_RES (22)..(23)..(24)..(25): Xaa is A or G or is absent

SEQ ID NO: 20374 - protein, 41 aa, Artificial Sequence; identical to SEQ ID NO: 17270
  GFR-binding peptide
  MOD_RES (1)..(3)..(37): Xaa is C or S
  MOD_RES (15)..(16)..(17)..(18)..(19): Xaa is A or G
  MOD_RES (20)..(21)..(22)..(23): Xaa is A or G or is absent

SEQ ID NO: 20375 - protein, 32 aa, Artificial Sequence; identical to SEQ ID NO: 17271
  GFR-binding peptide

SEQ ID NO: 20376 - protein, 35 aa, Artificial Sequence; identical to SEQ ID NO: 17272
  GFR-binding peptide
  MOD_RES (35)..(35): Xaa is C or S
  MOD_RES (11)..(12)..(13)..(14)..(15): Xaa is A or G
  MOD_RES (16)..(17)..(18)..(19): Xaa is A or G or is absent

SEQ ID NO: 20377 - protein, 38 aa, Artificial Sequence; identical to SEQ ID NO: 17273
  GFR-binding peptide
  MOD_RES (2)..(4): Xaa is C or S

SEQ ID NO: 20378 - protein, 35 aa, Artificial Sequence; identical to SEQ ID NO: 17274
  GFR-binding peptide
  MOD_RES (34)..(34): Xaa is C or S
  MOD_RES (12)..(13)..(14)..(15)..(16): Xaa is A or G
  MOD_RES (17)..(18)..(19)..(20): Xaa is A or G or is absent

SEQ ID NO: 20379 - protein, 37 aa, Artificial Sequence; identical to SEQ ID NO: 17275
  GFR-binding peptide
  MOD_RES (1)..(3)..(37): Xaa is C or S
  MOD_RES (15)..(16)..(17)..(18)..(19): Xaa is A or G
  MOD_RES (20)..(21)..(22)..(23): Xaa is A or G or is absent

SEQ ID NO: 20380 - protein, 42 aa, Artificial Sequence; identical to SEQ ID NO: 17276
  GFR-binding peptide
  MOD_RES (2)..(4)..(38): Xaa is C or S

SEQ ID NO: 20381 - protein, 41 aa, Artificial Sequence; identical to SEQ ID NO: 17277
  GFR-binding peptide
  MOD_RES (1)..(3)..(40): Xaa is C or S
  MOD_RES (16)..(17)..(18)..(19)..(20): Xaa is A or G
  MOD_RES (21)..(22)..(23)..(24): Xaa is A or G or is absent

SEQ ID NO: 20382 - protein, 38 aa, Artificial Sequence; identical to SEQ ID NO: 17278
  GFR-binding peptide
  MOD_RES (2)..(2): Xaa is C or S
  MOD_RES (15)..(16)..(17)..(18)..(19): Xaa is A or G
  MOD_RES (20)..(21)..(22)..(23): Xaa is A or G or is absent

SEQ ID NO: 20383 - protein, 38 aa, Artificial Sequence; identical to SEQ ID NO: 17279
  GFR-binding peptide
  MOD_RES (33)..(33): Xaa is C or S

SEQ ID NO: 20384 - protein, 36 aa, Artificial Sequence; identical to SEQ ID NO: 17280
  GFR-binding peptide
  MOD_RES (35)..(35): Xaa is C or S
  MOD_RES (11)..(12)..(13)..(14)..(15): Xaa is A or G
  MOD_RES (16)..(17)..(18)..(19): Xaa is A or G or is absent

SEQ ID NO: 20385 - protein, 33 aa, Artificial Sequence; identical to SEQ ID NO: 17281
  GFR-binding peptide
  MOD_RES (33)..(33): Xaa is C or S

SEQ ID NO: 20386 - protein, 39 aa, Artificial Sequence; identical to SEQ ID NO: 17282
  GFR-binding peptide
  MOD_RES (36)..(36): Xaa is C or S

SEQ ID NO: 20387 - protein, 39 aa, Artificial Sequence; identical to SEQ ID NO: 17283
  GFR-binding peptide
  MOD_RES (1)..(38): Xaa is C or S
  MOD_RES (14)..(15)..(16)..(17)..(18): Xaa is A or G
  MOD_RES (19)..(20)..(21)..(22): Xaa is A or G or is absent

SEQ ID NO: 20388 - protein, 41 aa, Artificial Sequence; identical to SEQ ID NO: 17284
  GFR-binding peptide
  MOD_RES (2)..(4)..(38): Xaa is C or S

SEQ ID NO: 20389 - protein, 33 aa, Artificial Sequence; identical to SEQ ID NO: 17285
  GFR-binding peptide
  MOD_RES (12)..(13)..(14)..(15)..(16): Xaa is A or G
  MOD_RES (17)..(18)..(19)..(20): Xaa is A or G or is absent

SEQ ID NO: 20390 - protein, 38 aa, Artificial Sequence; identical to SEQ ID NO: 17286
  GFR-binding peptide
  MOD_RES (33)..(33): Xaa is C or S

SEQ ID NO: 20391 - protein, 43 aa, Artificial Sequence; identical to SEQ ID NO: 17287
  GFR-binding peptide
  MOD_RES (1)..(3)..(37): Xaa is C or S
  MOD_RES (15)..(16)..(17)..(18)..(19): Xaa is A or G
  MOD_RES (20)..(21)..(22)..(23): Xaa is A or G or is absent

SEQ ID NO: 20392 - protein, 41 aa, Artificial Sequence; identical to SEQ ID NO: 17288
  GFR-binding peptide
  MOD_RES (1)..(3)..(40): Xaa is C or S
  MOD_RES (16)..(17)..(18)..(19)..(20): Xaa is A or G
  MOD_RES (21)..(22)..(23)..(24): Xaa is A or G or is absent

SEQ ID NO: 20393 - protein, 39 aa, Artificial Sequence; identical to SEQ ID NO: 17289
  GFR-binding peptide
  MOD_RES (1)..(38): Xaa is C or S

SEQ ID NO: 20394 - protein, 39 aa, Artificial Sequence; identical to SEQ ID NO: 17290
  GFR-binding peptide
  MOD_RES (2)..(39): Xaa is C or S

SEQ ID NO: 20395 - protein, 39 aa, Artificial Sequence; identical to SEQ ID NO: 17291
  GFR-binding peptide
  MOD_RES (34)..(34): Xaa is C or S
  MOD_RES (12)..(13)..(14)..(15)..(16): Xaa is A or G
  MOD_RES (17)..(18)..(19)..(20): Xaa is A or G or is absent

SEQ ID NO: 20396 - protein, 39 aa, Artificial Sequence; identical to SEQ ID NO: 17292
  GFR-binding peptide
  MOD_RES (36)..(36): Xaa is C or S

SEQ ID NO: 20397 - protein, 38 aa, Artificial Sequence; identical to SEQ ID NO: 17293
  GFR-binding peptide
  MOD_RES (1)..(3): Xaa is C or S
  MOD_RES (16)..(17)..(18)..(19)..(20): Xaa is A or G
  MOD_RES (21)..(22)..(23)..(24): Xaa is A or G or is absent

SEQ ID NO: 20398 - protein, 35 aa, Artificial Sequence; identical to SEQ ID NO: 17294
  GFR-binding peptide
  MOD_RES (2)..(2): Xaa is C or S
  MOD_RES (14)..(15)..(16)..(17)..(18): Xaa is A or G
  MOD_RES (19)..(20)..(21)..(22): Xaa is A or G or is absent

SEQ ID NO: 20399 - protein, 40 aa, Artificial Sequence; identical to SEQ ID NO: 17295
  GFR-binding peptide
  MOD_RES (2)..(36): Xaa is C or S
  MOD_RES (14)..(15)..(16)..(17)..(18): Xaa is A or G
  MOD_RES (19)..(20)..(21)..(22): Xaa is A or G or is absent

SEQ ID NO: 20400 - protein, 42 aa, Artificial Sequence; identical to SEQ ID NO: 17296
  GFR-binding peptide
  MOD_RES (2)..(4)..(38): Xaa is C or S

SEQ ID NO: 20401 - protein, 41 aa, Artificial Sequence; identical to SEQ ID NO: 17297
  GFR-binding peptide
  MOD_RES (1)..(3)..(37): Xaa is C or S
  MOD_RES (15)..(16)..(17)..(18)..(19): Xaa is A or G
  MOD_RES (20)..(21)..(22)..(23): Xaa is A or G or is absent

SEQ ID NO: 20402 - protein, 42 aa, Artificial Sequence; identical to SEQ ID NO: 17298
  GFR-binding peptide
  MOD_RES (2)..(39): Xaa is C or S

SEQ ID NO: 20403 - protein, 43 aa, Artificial Sequence; identical to SEQ ID NO: 17299
  GFR-binding peptide
  MOD_RES (1)..(3)..(37): Xaa is C or S

SEQ ID NO: 20404 - protein, 35 aa, Artificial Sequence; identical to SEQ ID NO: 17300
  GFR-binding peptide
  MOD_RES (1)..(1): Xaa is C or S
  MOD_RES (14)..(15)..(16)..(17)..(18): Xaa is A or G
  MOD_RES (19)..(20)..(21)..(22): Xaa is A or G or is absent

SEQ ID NO: 20405 - protein, 40 aa, Artificial Sequence; identical to SEQ ID NO: 17301
  GFR-binding peptide
  MOD_RES (36)..(36): Xaa is C or S

SEQ ID NO: 20406 - protein, 34 aa, Artificial Sequence; identical to SEQ ID NO: 17302
  GFR-binding peptide

SEQ ID NO: 20407 - protein, 39 aa, Artificial Sequence; identical to SEQ ID NO: 17303
  GFR-binding peptide
  MOD_RES (2)..(4)..(38): Xaa is C or S
  MOD_RES (16)..(17)..(18)..(19)..(20): Xaa is A or G
  MOD_RES (21)..(22)..(23)..(24): Xaa is A or G or is absent

SEQ ID NO: 20408 - protein, 38 aa, Artificial Sequence; identical to SEQ ID NO: 17304
  GFR-binding peptide
  MOD_RES (36)..(36): Xaa is C or S

SEQ ID NO: 20409 - protein, 34 aa, Artificial Sequence; identical to SEQ ID NO: 17305
  GFR-binding peptide
  MOD_RES (34)..(34): Xaa is C or S

SEQ ID NO: 20410 - protein, 40 aa, Artificial Sequence; identical to SEQ ID NO: 17306
  GFR-binding peptide
  MOD_RES (37)..(37): Xaa is C or S
  MOD_RES (13)..(14)..(15)..(16)..(17): Xaa is A or G
  MOD_RES (18)..(19)..(20)..(21): Xaa is A or G or is absent

SEQ ID NO: 20411 - protein, 34 aa, Artificial Sequence; identical to SEQ ID NO: 17307
  GFR-binding peptide

SEQ ID NO: 20412 - protein, 33 aa, Artificial Sequence; identical to SEQ ID NO: 17308
  GFR-binding peptide
  MOD_RES (12)..(13)..(14)..(15)..(16): Xaa is A or G
  MOD_RES (17)..(18)..(19)..(20): Xaa is A or G or is absent

SEQ ID NO: 20413 - protein, 38 aa, Artificial Sequence; identical to SEQ ID NO: 17309
  GFR-binding peptide
  MOD_RES (34)..(34): Xaa is C or S
  MOD_RES (12)..(13)..(14)..(15)..(16): Xaa is A or G
  MOD_RES (17)..(18)..(19)..(20): Xaa is A or G or is absent

SEQ ID NO: 20414 - protein, 33 aa, Artificial Sequence; identical to SEQ ID NO: 17310
  GFR-binding peptide
  MOD_RES (12)..(13)..(14)..(15)..(16): Xaa is A or G
  MOD_RES (17)..(18)..(19)..(20): Xaa is A or G or is absent

SEQ ID NO: 20415 - protein, 39 aa, Artificial Sequence; identical to SEQ ID NO: 17311
  GFR-binding peptide
  MOD_RES (36)..(36): Xaa is C or S
  MOD_RES (12)..(13)..(14)..(15)..(16): Xaa is A or G
  MOD_RES (17)..(18)..(19)..(20): Xaa is A or G or is absent

SEQ ID NO: 20416 - protein, 41 aa, Artificial Sequence; identical to SEQ ID NO: 17312
  GFR-binding peptide
  MOD_RES (2)..(4)..(38): Xaa is C or S
  MOD_RES (16)..(17)..(18)..(19)..(20): Xaa is A or G
  MOD_RES (21)..(22)..(23)..(24): Xaa is A or G or is absent

SEQ ID NO: 20417 - protein, 42 aa, Artificial Sequence; identical to SEQ ID NO: 17313
  GFR-binding peptide
  MOD_RES (2)..(36): Xaa is C or S

SEQ ID NO: 20418 - protein, 37 aa, Artificial Sequence; identical to SEQ ID NO: 17314
  GFR-binding peptide
  MOD_RES (1)..(35): Xaa is C or S

SEQ ID NO: 20419 - protein, 35 aa, Artificial Sequence; identical to SEQ ID NO: 17315
  GFR-binding peptide
  MOD_RES (1)..(35): Xaa is C or S

SEQ ID NO: 20420 - protein, 38 aa, Artificial Sequence; identical to SEQ ID NO: 17316
  GFR-binding peptide
  MOD_RES (35)..(35): Xaa is C or S

SEQ ID NO: 20421 - protein, 35 aa, Artificial Sequence; identical to SEQ ID NO: 17317
  GFR-binding peptide
  MOD_RES (34)..(34): Xaa is C or S

SEQ ID NO: 20422 - protein, 34 aa, Artificial Sequence; identical to SEQ ID NO: 17318
  GFR-binding peptide
  MOD_RES (33)..(33): Xaa is C or S

SEQ ID NO: 20423 - protein, 37 aa, Artificial Sequence; identical to SEQ ID NO: 17319
  GFR-binding peptide
  MOD_RES (35)..(35): Xaa is C or S
  MOD_RES (11)..(12)..(13)..(14)..(15): Xaa is A or G
  MOD_RES (16)..(17)..(18)..(19): Xaa is A or G or is absent

SEQ ID NO: 20424 - protein, 37 aa, Artificial Sequence; identical to SEQ ID NO: 17320
  GFR-binding peptide
  MOD_RES (36)..(36): Xaa is C or S
  MOD_RES (12)..(13)..(14)..(15)..(16): Xaa is A or G
  MOD_RES (17)..(18)..(19)..(20): Xaa is A or G or is absent

SEQ ID NO: 20425 - protein, 36 aa, Artificial Sequence; identical to SEQ ID NO: 17321
  GFR-binding peptide
  MOD_RES (1)..(35): Xaa is C or S

SEQ ID NO: 20426 - protein, 41 aa, Artificial Sequence; identical to SEQ ID NO: 17322
  GFR-binding peptide
  MOD_RES (1)..(35): Xaa is C or S

SEQ ID NO: 20427 - protein, 42 aa, Artificial Sequence; identical to SEQ ID NO: 17323
  GFR-binding peptide
  MOD_RES (1)..(3)..(37): Xaa is C or S

SEQ ID NO: 20428 - protein, 38 aa, Artificial Sequence; identical to SEQ ID NO: 17324
  GFR-binding peptide
  MOD_RES (2)..(36): Xaa is C or S

SEQ ID NO: 20429 - protein, 33 aa, Artificial Sequence; identical to SEQ ID NO: 17325
  GFR-binding peptide
  MOD_RES (12)..(13)..(14)..(15)..(16): Xaa is A or G
  MOD_RES (17)..(18)..(19)..(20): Xaa is A or G or is absent

SEQ ID NO: 20430 - protein, 37 aa, Artificial Sequence; identical to SEQ ID NO: 17326
  GFR-binding peptide
  MOD_RES (33)..(33): Xaa is C or S

SEQ ID NO: 20431 - protein, 35 aa, Artificial Sequence; identical to SEQ ID NO: 17327
  GFR-binding peptide
  MOD_RES (1)..(35): Xaa is C or S
  MOD_RES (13)..(14)..(15)..(16)..(17): Xaa is A or G
  MOD_RES (18)..(19)..(20)..(21): Xaa is A or G or is absent

SEQ ID NO: 20432 - protein, 39 aa, Artificial Sequence; identical to SEQ ID NO: 17328
  GFR-binding peptide
  MOD_RES (33)..(33): Xaa is C or S

SEQ ID NO: 20433 - protein, 38 aa, Artificial Sequence; identical to SEQ ID NO: 17329
  GFR-binding peptide
  MOD_RES (33)..(33): Xaa is C or S
  MOD_RES (11)..(12)..(13)..(14)..(15): Xaa is A or G
  MOD_RES (16)..(17)..(18)..(19): Xaa is A or G or is absent

SEQ ID NO: 20434 - protein, 35 aa, Artificial Sequence; identical to SEQ ID NO: 17330
  GFR-binding peptide
  MOD_RES (33)..(33): Xaa is C or S

SEQ ID NO: 20435 - protein, 37 aa, Artificial Sequence; identical to SEQ ID NO: 17331
  GFR-binding peptide
  MOD_RES (33)..(33): Xaa is C or S
  MOD_RES (11)..(12)..(13)..(14)..(15): Xaa is A or G
  MOD_RES (16)..(17)..(18)..(19): Xaa is A or G or is absent

SEQ ID NO: 20436 - protein, 35 aa, Artificial Sequence; identical to SEQ ID NO: 17332
  GFR-binding peptide
  MOD_RES (1)..(1): Xaa is C or S

SEQ ID NO: 20437 - protein, 42 aa, Artificial Sequence; identical to SEQ ID NO: 17333
  GFR-binding peptide
  MOD_RES (2)..(36): Xaa is C or S
  MOD_RES (14)..(15)..(16)..(17)..(18): Xaa is A or G
  MOD_RES (19)..(20)..(21)..(22): Xaa is A or G or is absent

SEQ ID NO: 20438 - protein, 42 aa, Artificial Sequence; identical to SEQ ID NO: 17334
  GFR-binding peptide
  MOD_RES (1)..(3)..(37): Xaa is C or S
  MOD_RES (15)..(16)..(17)..(18)..(19): Xaa is A or G
  MOD_RES (20)..(21)..(22)..(23): Xaa is A or G or is absent

SEQ ID NO: 20439 - protein, 37 aa, Artificial Sequence; identical to SEQ ID NO: 17335
  GFR-binding peptide
  MOD_RES (2)..(2): Xaa is C or S
  MOD_RES (15)..(16)..(17)..(18)..(19): Xaa is A or G
  MOD_RES (20)..(21)..(22)..(23): Xaa is A or G or is absent

SEQ ID NO: 20440 - protein, 33 aa, Artificial Sequence; identical to SEQ ID NO: 17336
  GFR-binding peptide
  MOD_RES (11)..(12)..(13)..(14)..(15): Xaa is A or G
  MOD_RES (16)..(17)..(18)..(19): Xaa is A or G or is absent

SEQ ID NO: 20441 - protein, 33 aa, Artificial Sequence; identical to SEQ ID NO: 17337
  GFR-binding peptide
  MOD_RES (11)..(12)..(13)..(14)..(15): Xaa is A or G
  MOD_RES (16)..(17)..(18)..(19): Xaa is A or G or is absent

SEQ ID NO: 20442 - protein, 43 aa, Artificial Sequence; identical to SEQ ID NO: 17338
  GFR-binding peptide
  MOD_RES (2)..(4)..(41): Xaa is C or S
  MOD_RES (17)..(18)..(19)..(20)..(21): Xaa is A or G
  MOD_RES (22)..(23)..(24)..(25): Xaa is A or G or is absent

SEQ ID NO: 20443 - protein, 40 aa, Artificial Sequence; identical to SEQ ID NO: 17339
  GFR-binding peptide
  MOD_RES (1)..(35): Xaa is C or S

SEQ ID NO: 20444 - protein, 40 aa, Artificial Sequence; identical to SEQ ID NO: 17340
  GFR-binding peptide
  MOD_RES (2)..(4): Xaa is C or S

SEQ ID NO: 20445 - protein, 37 aa, Artificial Sequence; identical to SEQ ID NO: 17341
  GFR-binding peptide
  MOD_RES (2)..(2): Xaa is C or S

SEQ ID NO: 20446 - protein, 38 aa, Artificial Sequence; identical to SEQ ID NO: 17342
  GFR-binding peptide
  MOD_RES (37)..(37): Xaa is C or S

SEQ ID NO: 20447 - protein, 38 aa, Artificial Sequence; identical to SEQ ID NO: 17343
  GFR-binding peptide
  MOD_RES (34)..(34): Xaa is C or S
  MOD_RES (12)..(13)..(14)..(15)..(16): Xaa is A or G
  MOD_RES (17)..(18)..(19)..(20): Xaa is A or G or is absent

SEQ ID NO: 20448 - protein, 33 aa, Artificial Sequence; identical to SEQ ID NO: 17344
  GFR-binding peptide
  MOD_RES (33)..(33): Xaa is C or S

SEQ ID NO: 20449 - protein, 35 aa, Artificial Sequence; identical to SEQ ID NO: 17345
  GFR-binding peptide
  MOD_RES (2)..(2): Xaa is C or S

SEQ ID NO: 20450 - protein, 41 aa, Artificial Sequence; identical to SEQ ID NO: 17346
  GFR-binding peptide
  MOD_RES (1)..(35): Xaa is C or S
  MOD_RES (13)..(14)..(15)..(16)..(17): Xaa is A or G
  MOD_RES (18)..(19)..(20)..(21): Xaa is A or G or is absent

SEQ ID NO: 20451 - protein, 39 aa, Artificial Sequence; identical to SEQ ID NO: 17347
  GFR-binding peptide
  MOD_RES (35)..(35): Xaa is C or S

SEQ ID NO: 20452 - protein, 42 aa, Artificial Sequence; identical to SEQ ID NO: 17348
  GFR-binding peptide
  MOD_RES (2)..(39): Xaa is C or S
  MOD_RES (15)..(16)..(17)..(18)..(19): Xaa is A or G
  MOD_RES (20)..(21)..(22)..(23): Xaa is A or G or is absent

SEQ ID NO: 20453 - protein, 37 aa, Artificial Sequence; identical to SEQ ID NO: 17349
  GFR-binding peptide
  MOD_RES (2)..(2): Xaa is C or S
  MOD_RES (15)..(16)..(17)..(18)..(19): Xaa is A or G
  MOD_RES (20)..(21)..(22)..(23): Xaa is A or G or is absent

SEQ ID NO: 20454 - protein, 42 aa, Artificial Sequence; identical to SEQ ID NO: 17350
  GFR-binding peptide
  MOD_RES (2)..(39): Xaa is C or S

SEQ ID NO: 20455 - protein, 42 aa, Artificial Sequence; identical to SEQ ID NO: 17351
  GFR-binding peptide
  MOD_RES (2)..(39): Xaa is C or S

SEQ ID NO: 20456 - protein, 38 aa, Artificial Sequence; identical to SEQ ID NO: 17352
  GFR-binding peptide
  MOD_RES (34)..(34): Xaa is C or S

SEQ ID NO: 20457 - protein, 42 aa, Artificial Sequence; identical to SEQ ID NO: 17353
  GFR-binding peptide
  MOD_RES (2)..(39): Xaa is C or S
  MOD_RES (15)..(16)..(17)..(18)..(19): Xaa is A or G
  MOD_RES (20)..(21)..(22)..(23): Xaa is A or G or is absent

SEQ ID NO: 20458 - protein, 37 aa, Artificial Sequence; identical to SEQ ID NO: 17354
  GFR-binding peptide
  MOD_RES (33)..(33): Xaa is C or S
  MOD_RES (11)..(12)..(13)..(14)..(15): Xaa is A or G
  MOD_RES (16)..(17)..(18)..(19): Xaa is A or G or is absent

SEQ ID NO: 20459 - protein, 41 aa, Artificial Sequence; identical to SEQ ID NO: 17355
  GFR-binding peptide
  MOD_RES (1)..(35): Xaa is C or S

SEQ ID NO: 20460 - protein, 41 aa, Artificial Sequence; identical to SEQ ID NO: 17356
  GFR-binding peptide
  MOD_RES (2)..(4)..(41): Xaa is C or S
  MOD_RES (17)..(18)..(19)..(20)..(21): Xaa is A or G
  MOD_RES (22)..(23)..(24)..(25): Xaa is A or G or is absent

SEQ ID NO: 20461 - protein, 39 aa, Artificial Sequence; identical to SEQ ID NO: 17357
  GFR-binding peptide
  MOD_RES (1)..(3): Xaa is C or S

SEQ ID NO: 20462 - protein, 34 aa, Artificial Sequence; identical to SEQ ID NO: 17358
  GFR-binding peptide
  MOD_RES (33)..(33): Xaa is C or S

SEQ ID NO: 20463 - protein, 39 aa, Artificial Sequence; identical to SEQ ID NO: 17359
  GFR-binding peptide
  MOD_RES (37)..(37): Xaa is C or S
  MOD_RES (13)..(14)..(15)..(16)..(17): Xaa is A or G
  MOD_RES (18)..(19)..(20)..(21): Xaa is A or G or is absent

SEQ ID NO: 20464 - protein, 42 aa, Artificial Sequence; identical to SEQ ID NO: 17360
  GFR-binding peptide
  MOD_RES (2)..(4)..(41): Xaa is C or S
  MOD_RES (17)..(18)..(19)..(20)..(21): Xaa is A or G
  MOD_RES (22)..(23)..(24)..(25): Xaa is A or G or is absent

SEQ ID NO: 20465 - protein, 38 aa, Artificial Sequence; identical to SEQ ID NO: 17361
  GFR-binding peptide
  MOD_RES (1)..(38): Xaa is C or S

SEQ ID NO: 20466 - protein, 40 aa, Artificial Sequence; identical to SEQ ID NO: 17362
  GFR-binding peptide
  MOD_RES (36)..(36): Xaa is C or S
  MOD_RES (12)..(13)..(14)..(15)..(16): Xaa is A or G
  MOD_RES (17)..(18)..(19)..(20): Xaa is A or G or is absent

SEQ ID NO: 20467 - protein, 42 aa, Artificial Sequence; identical to SEQ ID NO: 17363
  GFR-binding peptide
  MOD_RES (1)..(38): Xaa is C or S
  MOD_RES (14)..(15)..(16)..(17)..(18): Xaa is A or G
  MOD_RES (19)..(20)..(21)..(22): Xaa is A or G or is absent

SEQ ID NO: 20468 - protein, 39 aa, Artificial Sequence; identical to SEQ ID NO: 17364
  GFR-binding peptide
  MOD_RES (1)..(3)..(37): Xaa is C or S

SEQ ID NO: 20469 - protein, 41 aa, Artificial Sequence; identical to SEQ ID NO: 17365
  GFR-binding peptide
  MOD_RES (37)..(37): Xaa is C or S
  MOD_RES (13)..(14)..(15)..(16)..(17): Xaa is A or G
  MOD_RES (18)..(19)..(20)..(21): Xaa is A or G or is absent

SEQ ID NO: 20470 - protein, 35 aa, Artificial Sequence; identical to SEQ ID NO: 17366
  GFR-binding peptide
  MOD_RES (1)..(35): Xaa is C or S
  MOD_RES (13)..(14)..(15)..(16)..(17): Xaa is A or G
  MOD_RES (18)..(19)..(20)..(21): Xaa is A or G or is absent

SEQ ID NO: 20471 - protein, 34 aa, Artificial Sequence; identical to SEQ ID NO: 17367
  GFR-binding peptide
  MOD_RES (34)..(34): Xaa is C or S
  MOD_RES (12)..(13)..(14)..(15)..(16): Xaa is A or G
  MOD_RES (17)..(18)..(19)..(20): Xaa is A or G or is absent

SEQ ID NO: 20472 - protein, 37 aa, Artificial Sequence; identical to SEQ ID NO: 17368
  GFR-binding peptide
  MOD_RES (37)..(37): Xaa is C or S
  MOD_RES (13)..(14)..(15)..(16)..(17): Xaa is A or G
  MOD_RES (18)..(19)..(20)..(21): Xaa is A or G or is absent

SEQ ID NO: 20473 - protein, 36 aa, Artificial Sequence; identical to SEQ ID NO: 17369
  GFR-binding peptide

SEQ ID NO: 20474 - protein, 41 aa, Artificial Sequence; identical to SEQ ID NO: 17370
  GFR-binding peptide
  MOD_RES (2)..(4)..(41): Xaa is C or S
  MOD_RES (17)..(18)..(19)..(20)..(21): Xaa is A or G
  MOD_RES (22)..(23)..(24)..(25): Xaa is A or G or is absent

SEQ ID NO: 20475 - protein, 35 aa, Artificial Sequence; identical to SEQ ID NO: 17371
  GFR-binding peptide
  MOD_RES (1)..(1): Xaa is C or S

SEQ ID NO: 20476 - protein, 36 aa, Artificial Sequence; identical to SEQ ID NO: 17372
  GFR-binding peptide
  MOD_RES (1)..(1): Xaa is C or S
  MOD_RES (14)..(15)..(16)..(17)..(18): Xaa is A or G
  MOD_RES (19)..(20)..(21)..(22): Xaa is A or G or is absent

SEQ ID NO: 20477 - protein, 44 aa, Artificial Sequence; identical to SEQ ID NO: 17373
  GFR-binding peptide
  MOD_RES (1)..(3)..(40): Xaa is C or S

SEQ ID NO: 20478 - protein, 44 aa, Artificial Sequence; identical to SEQ ID NO: 17374
  GFR-binding peptide
  MOD_RES (2)..(4)..(38): Xaa is C or S
  MOD_RES (16)..(17)..(18)..(19)..(20): Xaa is A or G
  MOD_RES (21)..(22)..(23)..(24): Xaa is A or G or is absent

SEQ ID NO: 20479 - protein, 40 aa, Artificial Sequence; identical to SEQ ID NO: 17375
  GFR-binding peptide
  MOD_RES (2)..(4)..(38): Xaa is C or S
  MOD_RES (16)..(17)..(18)..(19)..(20): Xaa is A or G
  MOD_RES (21)..(22)..(23)..(24): Xaa is A or G or is absent

SEQ ID NO: 20480 - protein, 42 aa, Artificial Sequence; identical to SEQ ID NO: 17376
  GFR-binding peptide
  MOD_RES (2)..(36): Xaa is C or S

SEQ ID NO: 20481 - protein, 34 aa, Artificial Sequence; identical to SEQ ID NO: 17377
  GFR-binding peptide

SEQ ID NO: 20482 - protein, 39 aa, Artificial Sequence; identical to SEQ ID NO: 17378
  GFR-binding peptide
  MOD_RES (1)..(3)..(37): Xaa is C or S

SEQ ID NO: 20483 - protein, 34 aa, Artificial Sequence; identical to SEQ ID NO: 17379
  GFR-binding peptide
  MOD_RES (1)..(1): Xaa is C or S

SEQ ID NO: 20484 - protein, 34 aa, Artificial Sequence; identical to SEQ ID NO: 17380
  GFR-binding peptide

SEQ ID NO: 20485 - protein, 36 aa, Artificial Sequence; identical to SEQ ID NO: 17381
  GFR-binding peptide
  MOD_RES (1)..(35): Xaa is C or S

SEQ ID NO: 20486 - protein, 38 aa, Artificial Sequence; identical to SEQ ID NO: 17382
  GFR-binding peptide
  MOD_RES (1)..(3)..(37): Xaa is C or S

SEQ ID NO: 20487 - protein, 34 aa, Artificial Sequence; identical to SEQ ID NO: 17383
  GFR-binding peptide

SEQ ID NO: 20488 - protein, 39 aa, Artificial Sequence; identical to SEQ ID NO: 17384
  GFR-binding peptide
  MOD_RES (2)..(36): Xaa is C or S

SEQ ID NO: 20489 - protein, 36 aa, Artificial Sequence; identical to SEQ ID NO: 17385
  GFR-binding peptide
  MOD_RES (35)..(35): Xaa is C or S
  MOD_RES (11)..(12)..(13)..(14)..(15): Xaa is A or G
  MOD_RES (16)..(17)..(18)..(19): Xaa is A or G or is absent

SEQ ID NO: 20490 - protein, 39 aa, Artificial Sequence; identical to SEQ ID NO: 17386
  GFR-binding peptide
  MOD_RES (33)..(33): Xaa is C or S
  MOD_RES (11)..(12)..(13)..(14)..(15): Xaa is A or G
  MOD_RES (16)..(17)..(18)..(19): Xaa is A or G or is absent

SEQ ID NO: 20491 - protein, 38 aa, Artificial Sequence; identical to SEQ ID NO: 17387
  GFR-binding peptide
  MOD_RES (1)..(35): Xaa is C or S
  MOD_RES (13)..(14)..(15)..(16)..(17): Xaa is A or G
  MOD_RES (18)..(19)..(20)..(21): Xaa is A or G or is absent

SEQ ID NO: 20492 - protein, 41 aa, Artificial Sequence; identical to SEQ ID NO: 17388
  GFR-binding peptide
  MOD_RES (1)..(38): Xaa is C or S
  MOD_RES (14)..(15)..(16)..(17)..(18): Xaa is A or G
  MOD_RES (19)..(20)..(21)..(22): Xaa is A or G or is absent

SEQ ID NO: 20493 - protein, 35 aa, Artificial Sequence; identical to SEQ ID NO: 17389
  GFR-binding peptide
  MOD_RES (33)..(33): Xaa is C or S
  MOD_RES (11)..(12)..(13)..(14)..(15): Xaa is A or G
  MOD_RES (16)..(17)..(18)..(19): Xaa is A or G or is absent

SEQ ID NO: 20494 - protein, 43 aa, Artificial Sequence; identical to SEQ ID NO: 17390
  GFR-binding peptide
  MOD_RES (2)..(4)..(38): Xaa is C or S

SEQ ID NO: 20495 - protein, 40 aa, Artificial Sequence; identical to SEQ ID NO: 17391
  GFR-binding peptide
  MOD_RES (1)..(3)..(40): Xaa is C or S

SEQ ID NO: 20496 - protein, 40 aa, Artificial Sequence; identical to SEQ ID NO: 17392
  GFR-binding peptide
  MOD_RES (1)..(38): Xaa is C or S

SEQ ID NO: 20497 - protein, 33 aa, Artificial Sequence; identical to SEQ ID NO: 17393
  GFR-binding peptide

SEQ ID NO: 20498 - protein, 39 aa, Artificial Sequence; identical to SEQ ID NO: 17394
  GFR-binding peptide
  MOD_RES (36)..(36): Xaa is C or S
  MOD_RES (12)..(13)..(14)..(15)..(16): Xaa is A or G
  MOD_RES (17)..(18)..(19)..(20): Xaa is A or G or is absent

SEQ ID NO: 20499 - protein, 36 aa, Artificial Sequence; identical to SEQ ID NO: 17395
  GFR-binding peptide
  MOD_RES (2)..(2): Xaa is C or S

SEQ ID NO: 20500 - protein, 38 aa, Artificial Sequence; identical to SEQ ID NO: 17396
  GFR-binding peptide
  MOD_RES (36)..(36): Xaa is C or S
  MOD_RES (12)..(13)..(14)..(15)..(16): Xaa is A or G
  MOD_RES (17)..(18)..(19)..(20): Xaa is A or G or is absent

SEQ ID NO: 20501 - protein, 40 aa, Artificial Sequence; identical to SEQ ID NO: 17397
  GFR-binding peptide
  MOD_RES (1)..(3)..(37): Xaa is C or S

SEQ ID NO: 20502 - protein, 40 aa, Artificial Sequence; identical to SEQ ID NO: 17398
  GFR-binding peptide
  MOD_RES (2)..(36): Xaa is C or S

SEQ ID NO: 20503 - protein, 36 aa, Artificial Sequence; identical to SEQ ID NO: 17399
  GFR-binding peptide
  MOD_RES (1)..(3): Xaa is C or S
  MOD_RES (15)..(16)..(17)..(18)..(19): Xaa is A or G
  MOD_RES (20)..(21)..(22)..(23): Xaa is A or G or is absent

SEQ ID NO: 20504 - protein, 36 aa, Artificial Sequence; identical to SEQ ID NO: 17400
  GFR-binding peptide
  MOD_RES (34)..(34): Xaa is C or S
  MOD_RES (12)..(13)..(14)..(15)..(16): Xaa is A or G
  MOD_RES (17)..(18)..(19)..(20): Xaa is A or G or is absent

SEQ ID NO: 20505 - protein, 39 aa, Artificial Sequence; identical to SEQ ID NO: 17401
  GFR-binding peptide
  MOD_RES (33)..(33): Xaa is C or S

SEQ ID NO: 20506 - protein, 33 aa, Artificial Sequence; identical to SEQ ID NO: 17402
  GFR-binding peptide
  MOD_RES (11)..(12)..(13)..(14)..(15): Xaa is A or G
  MOD_RES (16)..(17)..(18)..(19): Xaa is A or G or is absent

SEQ ID NO: 20507 - protein, 38 aa, Artificial Sequence; identical to SEQ ID NO: 17403
  GFR-binding peptide
  MOD_RES (1)..(38): Xaa is C or S

SEQ ID NO: 20508 - protein, 41 aa, Artificial Sequence; identical to SEQ ID NO: 17404
  GFR-binding peptide
  MOD_RES (37)..(37): Xaa is C or S

SEQ ID NO: 20509 - protein, 37 aa, Artificial Sequence; identical to SEQ ID NO: 17405
  GFR-binding peptide
  MOD_RES (2)..(36): Xaa is C or S

SEQ ID NO: 20510 - protein, 38 aa, Artificial Sequence; identical to SEQ ID NO: 17406
  GFR-binding peptide
  MOD_RES (36)..(36): Xaa is C or S
  MOD_RES (12)..(13)..(14)..(15)..(16): Xaa is A or G
  MOD_RES (17)..(18)..(19)..(20): Xaa is A or G or is absent

SEQ ID NO: 20511 - protein, 39 aa, Artificial Sequence; identical to SEQ ID NO: 17407
  GFR-binding peptide
  MOD_RES (33)..(33): Xaa is C or S

SEQ ID NO: 20512 - protein, 39 aa, Artificial Sequence; identical to SEQ ID NO: 17408
  GFR-binding peptide
  MOD_RES (1)..(3): Xaa is C or S

SEQ ID NO: 20513 - protein, 36 aa, Artificial Sequence; identical to SEQ ID NO: 17409
  GFR-binding peptide
  MOD_RES (34)..(34): Xaa is C or S

SEQ ID NO: 20514 - protein, 37 aa, Artificial Sequence; identical to SEQ ID NO: 17410
  GFR-binding peptide
  MOD_RES (37)..(37): Xaa is C or S
  MOD_RES (13)..(14)..(15)..(16)..(17): Xaa is A or G
  MOD_RES (18)..(19)..(20)..(21): Xaa is A or G or is absent

SEQ ID NO: 20515 - protein, 38 aa, Artificial Sequence; identical to SEQ ID NO: 17411
  GFR-binding peptide
  MOD_RES (33)..(33): Xaa is C or S

SEQ ID NO: 20516 - protein, 40 aa, Artificial Sequence; identical to SEQ ID NO: 17412
  GFR-binding peptide
  MOD_RES (2)..(4)..(38): Xaa is C or S
  MOD_RES (16)..(17)..(18)..(19)..(20): Xaa is A or G
  MOD_RES (21)..(22)..(23)..(24): Xaa is A or G or is absent

SEQ ID NO: 20517 - protein, 33 aa, Artificial Sequence; identical to SEQ ID NO: 17413
  GFR-binding peptide
  MOD_RES (11)..(12)..(13)..(14)..(15): Xaa is A or G
  MOD_RES (16)..(17)..(18)..(19): Xaa is A or G or is absent

SEQ ID NO: 20518 - protein, 43 aa, Artificial Sequence; identical to SEQ ID NO: 17414
  GFR-binding peptide
  MOD_RES (1)..(3)..(40): Xaa is C or S
  MOD_RES (16)..(17)..(18)..(19)..(20): Xaa is A or G
  MOD_RES (21)..(22)..(23)..(24): Xaa is A or G or is absent

SEQ ID NO: 20519 - protein, 37 aa, Artificial Sequence; identical to SEQ ID NO: 17415
  GFR-binding peptide
  MOD_RES (2)..(2): Xaa is C or S

SEQ ID NO: 20520 - protein, 38 aa, Artificial Sequence; identical to SEQ ID NO: 17416
  GFR-binding peptide
  MOD_RES (2)..(36): Xaa is C or S
  MOD_RES (14)..(15)..(16)..(17)..(18): Xaa is A or G
  MOD_RES (19)..(20)..(21)..(22): Xaa is A or G or is absent

SEQ ID NO: 20521 - protein, 36 aa, Artificial Sequence; identical to SEQ ID NO: 17417
  GFR-binding peptide
  MOD_RES (13)..(14)..(15)..(16)..(17): Xaa is A or G
  MOD_RES (18)..(19)..(20)..(21): Xaa is A or G or is absent

SEQ ID NO: 20522 - protein, 38 aa, Artificial Sequence; identical to SEQ ID NO: 17418
  GFR-binding peptide
  MOD_RES (1)..(3)..(37): Xaa is C or S
  MOD_RES (15)..(16)..(17)..(18)..(19): Xaa is A or G
  MOD_RES (20)..(21)..(22)..(23): Xaa is A or G or is absent

SEQ ID NO: 20523 - protein, 36 aa, Artificial Sequence; identical to SEQ ID NO: 17419
  GFR-binding peptide
  MOD_RES (2)..(2): Xaa is C or S
  MOD_RES (15)..(16)..(17)..(18)..(19): Xaa is A or G
  MOD_RES (20)..(21)..(22)..(23): Xaa is A or G or is absent

SEQ ID NO: 20524 - protein, 43 aa, Artificial Sequence; identical to SEQ ID NO: 17420
  GFR-binding peptide
  MOD_RES (2)..(4)..(41): Xaa is C or S

SEQ ID NO: 20525 - protein, 37 aa, Artificial Sequence; identical to SEQ ID NO: 17421
  GFR-binding peptide
  MOD_RES (2)..(2): Xaa is C or S

SEQ ID NO: 20526 - protein, 40 aa, Artificial Sequence; identical to SEQ ID NO: 17422
  GFR-binding peptide
  MOD_RES (2)..(4): Xaa is C or S

SEQ ID NO: 20527 - protein, 40 aa, Artificial Sequence; identical to SEQ ID NO: 17423
  GFR-binding peptide
  MOD_RES (1)..(38): Xaa is C or S

SEQ ID NO: 20528 - protein, 38 aa, Artificial Sequence; identical to SEQ ID NO: 17424
  GFR-binding peptide
  MOD_RES (2)..(4)..(38): Xaa is C or S
  MOD_RES (16)..(17)..(18)..(19)..(20): Xaa is A or G
  MOD_RES (21)..(22)..(23)..(24): Xaa is A or G or is absent

SEQ ID NO: 20529 - protein, 38 aa, Artificial Sequence; identical to SEQ ID NO: 17425
  GFR-binding peptide
  MOD_RES (33)..(33): Xaa is C or S
  MOD_RES (11)..(12)..(13)..(14)..(15): Xaa is A or G
  MOD_RES (16)..(17)..(18)..(19): Xaa is A or G or is absent

SEQ ID NO: 20530 - protein, 40 aa, Artificial Sequence; identical to SEQ ID NO: 17426
  GFR-binding peptide
  MOD_RES (1)..(3)..(37): Xaa is C or S
  MOD_RES (15)..(16)..(17)..(18)..(19): Xaa is A or G
  MOD_RES (20)..(21)..(22)..(23): Xaa is A or G or is absent

SEQ ID NO: 20531 - protein, 43 aa, Artificial Sequence; identical to SEQ ID NO: 17427
  GFR-binding peptide
  MOD_RES (2)..(4)..(38): Xaa is C or S
  MOD_RES (16)..(17)..(18)..(19)..(20): Xaa is A or G
  MOD_RES (21)..(22)..(23)..(24): Xaa is A or G or is absent

SEQ ID NO: 20532 - protein, 35 aa, Artificial Sequence; identical to SEQ ID NO: 17428
  GFR-binding peptide
  MOD_RES (1)..(1): Xaa is C or S
  MOD_RES (14)..(15)..(16)..(17)..(18): Xaa is A or G
  MOD_RES (19)..(20)..(21)..(22): Xaa is A or G or is absent

SEQ ID NO: 20533 - protein, 39 aa, Artificial Sequence; identical to SEQ ID NO: 17429
  GFR-binding peptide
  MOD_RES (35)..(35): Xaa is C or S

SEQ ID NO: 20534 - protein, 41 aa, Artificial Sequence; identical to SEQ ID NO: 17430
  GFR-binding peptide
  MOD_RES (2)..(36): Xaa is C or S

SEQ ID NO: 20535 - protein, 38 aa, Artificial Sequence; identical to SEQ ID NO: 17431
  GFR-binding peptide
  MOD_RES (33)..(33): Xaa is C or S

SEQ ID NO: 20536 - protein, 40 aa, Artificial Sequence; identical to SEQ ID NO: 17432
  GFR-binding peptide
  MOD_RES (36)..(36): Xaa is C or S
  MOD_RES (12)..(13)..(14)..(15)..(16): Xaa is A or G
  MOD_RES (17)..(18)..(19)..(20): Xaa is A or G or is absent

SEQ ID NO: 20537 - protein, 40 aa, Artificial Sequence; identical to SEQ ID NO: 17433
  GFR-binding peptide
  MOD_RES (1)..(3)..(40): Xaa is C or S
  MOD_RES (16)..(17)..(18)..(19)..(20): Xaa is A or G
  MOD_RES (21)..(22)..(23)..(24): Xaa is A or G or is absent

SEQ ID NO: 20538 - protein, 35 aa, Artificial Sequence; identical to SEQ ID NO: 17434
  GFR-binding peptide
  MOD_RES (33)..(33): Xaa is C or S

SEQ ID NO: 20539 - protein, 39 aa, Artificial Sequence; identical to SEQ ID NO: 17435
  GFR-binding peptide
  MOD_RES (1)..(35): Xaa is C or S

SEQ ID NO: 20540 - protein, 41 aa, Artificial Sequence; identical to SEQ ID NO: 17436
  GFR-binding peptide
  MOD_RES (1)..(3)..(37): Xaa is C or S

SEQ ID NO: 20541 - protein, 37 aa, Artificial Sequence; identical to SEQ ID NO: 17437
  GFR-binding peptide
  MOD_RES (37)..(37): Xaa is C or S

SEQ ID NO: 20542 - protein, 42 aa, Artificial Sequence; identical to SEQ ID NO: 17438
  GFR-binding peptide
  MOD_RES (1)..(3)..(37): Xaa is C or S

SEQ ID NO: 20543 - protein, 38 aa, Artificial Sequence; identical to SEQ ID NO: 17439
  GFR-binding peptide
  MOD_RES (35)..(35): Xaa is C or S

SEQ ID NO: 20544 - protein, 38 aa, Artificial Sequence; identical to SEQ ID NO: 17440
  GFR-binding peptide
  MOD_RES (1)..(3): Xaa is C or S

SEQ ID NO: 20545 - protein, 39 aa, Artificial Sequence; identical to SEQ ID NO: 17441
  GFR-binding peptide
  MOD_RES (33)..(33): Xaa is C or S
  MOD_RES (11)..(12)..(13)..(14)..(15): Xaa is A or G
  MOD_RES (16)..(17)..(18)..(19): Xaa is A or G or is absent

SEQ ID NO: 20546 - protein, 41 aa, Artificial Sequence; identical to SEQ ID NO: 17442
  GFR-binding peptide
  MOD_RES (2)..(39): Xaa is C or S

SEQ ID NO: 20547 - protein, 41 aa, Artificial Sequence; identical to SEQ ID NO: 17443
  GFR-binding peptide
  MOD_RES (1)..(3)..(37): Xaa is C or S

SEQ ID NO: 20548 - protein, 40 aa, Artificial Sequence; identical to SEQ ID NO: 17444
  GFR-binding peptide
  MOD_RES (2)..(4): Xaa is C or S

SEQ ID NO: 20549 - protein, 37 aa, Artificial Sequence; identical to SEQ ID NO: 17445
  GFR-binding peptide
  MOD_RES (1)..(1): Xaa is C or S

SEQ ID NO: 20550 - protein, 40 aa, Artificial Sequence; identical to SEQ ID NO: 17446
  GFR-binding peptide
  MOD_RES (1)..(35): Xaa is C or S

SEQ ID NO: 20551 - protein, 39 aa, Artificial Sequence; identical to SEQ ID NO: 17447
  GFR-binding peptide
  MOD_RES (37)..(37): Xaa is C or S
  MOD_RES (13)..(14)..(15)..(16)..(17): Xaa is A or G
  MOD_RES (18)..(19)..(20)..(21): Xaa is A or G or is absent

SEQ ID NO: 20552 - protein, 36 aa, Artificial Sequence; identical to SEQ ID NO: 17448
  GFR-binding peptide
  MOD_RES (36)..(36): Xaa is C or S
  MOD_RES (12)..(13)..(14)..(15)..(16): Xaa is A or G
  MOD_RES (17)..(18)..(19)..(20): Xaa is A or G or is absent

SEQ ID NO: 20553 - protein, 38 aa, Artificial Sequence; identical to SEQ ID NO: 17449
  GFR-binding peptide
  MOD_RES (1)..(3)..(37): Xaa is C or S

SEQ ID NO: 20554 - protein, 32 aa, Artificial Sequence; identical to SEQ ID NO: 17450
  GFR-binding peptide
  MOD_RES (11)..(12)..(13)..(14)..(15): Xaa is A or G
  MOD_RES (16)..(17)..(18)..(19): Xaa is A or G or is absent

SEQ ID NO: 20555 - protein, 41 aa, Artificial Sequence; identical to SEQ ID NO: 17451
  GFR-binding peptide
  MOD_RES (2)..(4)..(38): Xaa is C or S

SEQ ID NO: 20556 - protein, 42 aa, Artificial Sequence; identical to SEQ ID NO: 17452
  GFR-binding peptide
  MOD_RES (1)..(3)..(40): Xaa is C or S

SEQ ID NO: 20557 - protein, 37 aa, Artificial Sequence; identical to SEQ ID NO: 17453
  GFR-binding peptide
  MOD_RES (1)..(35): Xaa is C or S

SEQ ID NO: 20558 - protein, 39 aa, Artificial Sequence; identical to SEQ ID NO: 17454
  GFR-binding peptide
  MOD_RES (35)..(35): Xaa is C or S
  MOD_RES (11)..(12)..(13)..(14)..(15): Xaa is A or G
  MOD_RES (16)..(17)..(18)..(19): Xaa is A or G or is absent

SEQ ID NO: 20559 - protein, 41 aa, Artificial Sequence; identical to SEQ ID NO: 17455
  GFR-binding peptide
  MOD_RES (37)..(37): Xaa is C or S
  MOD_RES (13)..(14)..(15)..(16)..(17): Xaa is A or G
  MOD_RES (18)..(19)..(20)..(21): Xaa is A or G or is absent

SEQ ID NO: 20560 - protein, 37 aa, Artificial Sequence; identical to SEQ ID NO: 17456
  GFR-binding peptide
  MOD_RES (1)..(3)..(37): Xaa is C or S

SEQ ID NO: 20561 - protein, 39 aa, Artificial Sequence; identical to SEQ ID NO: 17457
  GFR-binding peptide
  MOD_RES (36)..(36): Xaa is C or S

SEQ ID NO: 20562 - protein, 45 aa, Artificial Sequence; identical to SEQ ID NO: 17458
  GFR-binding peptide
  MOD_RES (2)..(4)..(41): Xaa is C or S
  MOD_RES (17)..(18)..(19)..(20)..(21): Xaa is A or G
  MOD_RES (22)..(23)..(24)..(25): Xaa is A or G or is absent

SEQ ID NO: 20563 - protein, 38 aa, Artificial Sequence; identical to SEQ ID NO: 17459
  GFR-binding peptide
  MOD_RES (2)..(4): Xaa is C or S
  MOD_RES (17)..(18)..(19)..(20)..(21): Xaa is A or G
  MOD_RES (22)..(23)..(24)..(25): Xaa is A or G or is absent

SEQ ID NO: 20564 - protein, 42 aa, Artificial Sequence; identical to SEQ ID NO: 17460
  GFR-binding peptide
  MOD_RES (2)..(4)..(41): Xaa is C or S

SEQ ID NO: 20565 - protein, 44 aa, Artificial Sequence; identical to SEQ ID NO: 17461
  GFR-binding peptide
  MOD_RES (2)..(4)..(38): Xaa is C or S
  MOD_RES (16)..(17)..(18)..(19)..(20): Xaa is A or G
  MOD_RES (21)..(22)..(23)..(24): Xaa is A or G or is absent

SEQ ID NO: 20566 - protein, 35 aa, Artificial Sequence; identical to SEQ ID NO: 17462
  GFR-binding peptide
  MOD_RES (33)..(33): Xaa is C or S

SEQ ID NO: 20567 - protein, 38 aa, Artificial Sequence; identical to SEQ ID NO: 17463
  GFR-binding peptide
  MOD_RES (2)..(2): Xaa is C or S

SEQ ID NO: 20568 - protein, 42 aa, Artificial Sequence; identical to SEQ ID NO: 17464
  GFR-binding peptide
  MOD_RES (2)..(39): Xaa is C or S
  MOD_RES (15)..(16)..(17)..(18)..(19): Xaa is A or G
  MOD_RES (20)..(21)..(22)..(23): Xaa is A or G or is absent

SEQ ID NO: 20569 - protein, 42 aa, Artificial Sequence; identical to SEQ ID NO: 17465
  GFR-binding peptide
  MOD_RES (2)..(36): Xaa is C or S

SEQ ID NO: 20570 - protein, 37 aa, Artificial Sequence; identical to SEQ ID NO: 17466
  GFR-binding peptide
  MOD_RES (1)..(35): Xaa is C or S
  MOD_RES (13)..(14)..(15)..(16)..(17): Xaa is A or G
  MOD_RES (18)..(19)..(20)..(21): Xaa is A or G or is absent

SEQ ID NO: 20571 - protein, 37 aa, Artificial Sequence; identical to SEQ ID NO: 17467
  GFR-binding peptide
  MOD_RES (1)..(1): Xaa is C or S

SEQ ID NO: 20572 - protein, 37 aa, Artificial Sequence; identical to SEQ ID NO: 17468
  GFR-binding peptide
  MOD_RES (1)..(35): Xaa is C or S
  MOD_RES (13)..(14)..(15)..(16)..(17): Xaa is A or G
  MOD_RES (18)..(19)..(20)..(21): Xaa is A or G or is absent

SEQ ID NO: 20573 - protein, 33 aa, Artificial Sequence; identical to SEQ ID NO: 17469
  GFR-binding peptide
  MOD_RES (33)..(33): Xaa is C or S

SEQ ID NO: 20574 - protein, 38 aa, Artificial Sequence; identical to SEQ ID NO: 17470
  GFR-binding peptide
  MOD_RES (1)..(3): Xaa is C or S

SEQ ID NO: 20575 - protein, 38 aa, Artificial Sequence; identical to SEQ ID NO: 17471
  GFR-binding peptide
  MOD_RES (33)..(33): Xaa is C or S

SEQ ID NO: 20576 - protein, 39 aa, Artificial Sequence; identical to SEQ ID NO: 17472
  GFR-binding peptide
  MOD_RES (1)..(38): Xaa is C or S
  MOD_RES (14)..(15)..(16)..(17)..(18): Xaa is A or G
  MOD_RES (19)..(20)..(21)..(22): Xaa is A or G or is absent

SEQ ID NO: 20577 - protein, 40 aa, Artificial Sequence; identical to SEQ ID NO: 17473
  GFR-binding peptide
  MOD_RES (1)..(35): Xaa is C or S

SEQ ID NO: 20578 - protein, 39 aa, Artificial Sequence; identical to SEQ ID NO: 17474
  GFR-binding peptide
  MOD_RES (1)..(35): Xaa is C or S
  MOD_RES (13)..(14)..(15)..(16)..(17): Xaa is A or G
  MOD_RES (18)..(19)..(20)..(21): Xaa is A or G or is absent

SEQ ID NO: 20579 - protein, 42 aa, Artificial Sequence; identical to SEQ ID NO: 17475
  GFR-binding peptide
  MOD_RES (1)..(3)..(37): Xaa is C or S
  MOD_RES (15)..(16)..(17)..(18)..(19): Xaa is A or G
  MOD_RES (20)..(21)..(22)..(23): Xaa is A or G or is absent

SEQ ID NO: 20580 - protein, 39 aa, Artificial Sequence; identical to SEQ ID NO: 17476
  GFR-binding peptide
  MOD_RES (2)..(4): Xaa is C or S

SEQ ID NO: 20581 - protein, 33 aa, Artificial Sequence; identical to SEQ ID NO: 17477
  GFR-binding peptide

SEQ ID NO: 20582 - protein, 39 aa, Artificial Sequence; identical to SEQ ID NO: 17478
  GFR-binding peptide
  MOD_RES (2)..(39): Xaa is C or S

SEQ ID NO: 20583 - protein, 37 aa, Artificial Sequence; identical to SEQ ID NO: 17479
  GFR-binding peptide
  MOD_RES (1)..(35): Xaa is C or S

SEQ ID NO: 20584 - protein, 43 aa, Artificial Sequence; identical to SEQ ID NO: 17480
  GFR-binding peptide
  MOD_RES (2)..(4)..(41): Xaa is C or S

SEQ ID NO: 20585 - protein, 37 aa, Artificial Sequence; identical to SEQ ID NO: 17481
  GFR-binding peptide
  MOD_RES (1)..(1): Xaa is C or S
  MOD_RES (14)..(15)..(16)..(17)..(18): Xaa is A or G
  MOD_RES (19)..(20)..(21)..(22): Xaa is A or G or is absent

SEQ ID NO: 20586 - protein, 33 aa, Artificial Sequence; identical to SEQ ID NO: 17482
  GFR-binding peptide
  MOD_RES (12)..(13)..(14)..(15)..(16): Xaa is A or G
  MOD_RES (17)..(18)..(19)..(20): Xaa is A or G or is absent

SEQ ID NO: 20587 - protein, 37 aa, Artificial Sequence; identical to SEQ ID NO: 17483
  GFR-binding peptide
  MOD_RES (33)..(33): Xaa is C or S
  MOD_RES (11)..(12)..(13)..(14)..(15): Xaa is A or G
  MOD_RES (16)..(17)..(18)..(19): Xaa is A or G or is absent

SEQ ID NO: 20588 - protein, 39 aa, Artificial Sequence; identical to SEQ ID NO: 17484
  GFR-binding peptide
  MOD_RES (1)..(35): Xaa is C or S

SEQ ID NO: 20589 - protein, 38 aa, Artificial Sequence; identical to SEQ ID NO: 17485
  GFR-binding peptide
  MOD_RES (2)..(4)..(38): Xaa is C or S

SEQ ID NO: 20590 - protein, 39 aa, Artificial Sequence; identical to SEQ ID NO: 17486
  GFR-binding peptide
  MOD_RES (36)..(36): Xaa is C or S

SEQ ID NO: 20591 - protein, 39 aa, Artificial Sequence; identical to SEQ ID NO: 17487
  GFR-binding peptide
  MOD_RES (1)..(38): Xaa is C or S
  MOD_RES (14)..(15)..(16)..(17)..(18): Xaa is A or G
  MOD_RES (19)..(20)..(21)..(22): Xaa is A or G or is absent

SEQ ID NO: 20592 - protein, 37 aa, Artificial Sequence; identical to SEQ ID NO: 17488
  GFR-binding peptide
  MOD_RES (1)..(35): Xaa is C or S
  MOD_RES (13)..(14)..(15)..(16)..(17): Xaa is A or G
  MOD_RES (18)..(19)..(20)..(21): Xaa is A or G or is absent

SEQ ID NO: 20593 - protein, 38 aa, Artificial Sequence; identical to SEQ ID NO: 17489
  GFR-binding peptide
  MOD_RES (1)..(3)..(37): Xaa is C or S

SEQ ID NO: 20594 - protein, 38 aa, Artificial Sequence; identical to SEQ ID NO: 17490
  GFR-binding peptide
  MOD_RES (2)..(2): Xaa is C or S

SEQ ID NO: 20595 - protein, 36 aa, Artificial Sequence; identical to SEQ ID NO: 17491
  GFR-binding peptide
  MOD_RES (2)..(36): Xaa is C or S

SEQ ID NO: 20596 - protein, 39 aa, Artificial Sequence; identical to SEQ ID NO: 17492
  GFR-binding peptide
  MOD_RES (2)..(36): Xaa is C or S

SEQ ID NO: 20597 - protein, 37 aa, Artificial Sequence; identical to SEQ ID NO: 17493
  GFR-binding peptide
  MOD_RES (2)..(36): Xaa is C or S

SEQ ID NO: 20598 - protein, 38 aa, Artificial Sequence; identical to SEQ ID NO: 17494
  GFR-binding peptide
  MOD_RES (2)..(4): Xaa is C or S

SEQ ID NO: 20599 - protein, 40 aa, Artificial Sequence; identical to SEQ ID NO: 17495
  GFR-binding peptide
  MOD_RES (1)..(38): Xaa is C or S

SEQ ID NO: 20600 - protein, 42 aa, Artificial Sequence; identical to SEQ ID NO: 17496
  GFR-binding peptide
  MOD_RES (1)..(3)..(37): Xaa is C or S

SEQ ID NO: 20601 - protein, 37 aa, Artificial Sequence; identical to SEQ ID NO: 17497
  GFR-binding peptide
  MOD_RES (1)..(3)..(37): Xaa is C or S

SEQ ID NO: 20602 - protein, 39 aa, Artificial Sequence; identical to SEQ ID NO: 17498
  GFR-binding peptide
  MOD_RES (34)..(34): Xaa is C or S

SEQ ID NO: 20603 - protein, 41 aa, Artificial Sequence; identical to SEQ ID NO: 17499
  GFR-binding peptide
  MOD_RES (2)..(36): Xaa is C or S
  MOD_RES (14)..(15)..(16)..(17)..(18): Xaa is A or G
  MOD_RES (19)..(20)..(21)..(22): Xaa is A or G or is absent

SEQ ID NO: 20604 - protein, 41 aa, Artificial Sequence; identical to SEQ ID NO: 17500
  GFR-binding peptide
  MOD_RES (2)..(39): Xaa is C or S

SEQ ID NO: 20605 - protein, 39 aa, Artificial Sequence; identical to SEQ ID NO: 17501
  GFR-binding peptide
  MOD_RES (1)..(3)..(37): Xaa is C or S
  MOD_RES (15)..(16)..(17)..(18)..(19): Xaa is A or G
  MOD_RES (20)..(21)..(22)..(23): Xaa is A or G or is absent

SEQ ID NO: 20606 - protein, 42 aa, Artificial Sequence; identical to SEQ ID NO: 17502
  GFR-binding peptide
  MOD_RES (1)..(38): Xaa is C or S
  MOD_RES (14)..(15)..(16)..(17)..(18): Xaa is A or G
  MOD_RES (19)..(20)..(21)..(22): Xaa is A or G or is absent

SEQ ID NO: 20607 - protein, 39 aa, Artificial Sequence; identical to SEQ ID NO: 17503
  GFR-binding peptide
  MOD_RES (1)..(3): Xaa is C or S

SEQ ID NO: 20608 - protein, 43 aa, Artificial Sequence; identical to SEQ ID NO: 17504
  GFR-binding peptide
  MOD_RES (1)..(3)..(40): Xaa is C or S

SEQ ID NO: 20609 - protein, 33 aa, Artificial Sequence; identical to SEQ ID NO: 17505
  GFR-binding peptide

SEQ ID NO: 20610 - protein, 39 aa, Artificial Sequence; identical to SEQ ID NO: 17506
  GFR-binding peptide
  MOD_RES (34)..(34): Xaa is C or S
  MOD_RES (12)..(13)..(14)..(15)..(16): Xaa is A or G
  MOD_RES (17)..(18)..(19)..(20): Xaa is A or G or is absent

SEQ ID NO: 20611 - protein, 44 aa, Artificial Sequence; identical to SEQ ID NO: 17507
  GFR-binding peptide
  MOD_RES (1)..(3)..(40): Xaa is C or S

SEQ ID NO: 20612 - protein, 44 aa, Artificial Sequence; identical to SEQ ID NO: 17508
  GFR-binding peptide
  MOD_RES (1)..(3)..(40): Xaa is C or S

SEQ ID NO: 20613 - protein, 38 aa, Artificial Sequence; identical to SEQ ID NO: 17509
  GFR-binding peptide
  MOD_RES (2)..(4): Xaa is C or S

SEQ ID NO: 20614 - protein, 38 aa, Artificial Sequence; identical to SEQ ID NO: 17510
  GFR-binding peptide
  MOD_RES (34)..(34): Xaa is C or S
  MOD_RES (12)..(13)..(14)..(15)..(16): Xaa is A or G
  MOD_RES (17)..(18)..(19)..(20): Xaa is A or G or is absent

SEQ ID NO: 20615 - protein, 35 aa, Artificial Sequence; identical to SEQ ID NO: 17511
  GFR-binding peptide
  MOD_RES (34)..(34): Xaa is C or S
  MOD_RES (12)..(13)..(14)..(15)..(16): Xaa is A or G
  MOD_RES (17)..(18)..(19)..(20): Xaa is A or G or is absent

SEQ ID NO: 20616 - protein, 32 aa, Artificial Sequence; identical to SEQ ID NO: 17512
  GFR-binding peptide
  MOD_RES (11)..(12)..(13)..(14)..(15): Xaa is A or G
  MOD_RES (16)..(17)..(18)..(19): Xaa is A or G or is absent

SEQ ID NO: 20617 - protein, 40 aa, Artificial Sequence; identical to SEQ ID NO: 17513
  GFR-binding peptide
  MOD_RES (1)..(35): Xaa is C or S
  MOD_RES (13)..(14)..(15)..(16)..(17): Xaa is A or G
  MOD_RES (18)..(19)..(20)..(21): Xaa is A or G or is absent

SEQ ID NO: 20618 - protein, 33 aa, Artificial Sequence; identical to SEQ ID NO: 17514
  GFR-binding peptide

SEQ ID NO: 20619 - protein, 35 aa, Artificial Sequence; identical to SEQ ID NO: 17515
  GFR-binding peptide
  MOD_RES (1)..(35): Xaa is C or S

SEQ ID NO: 20620 - protein, 40 aa, Artificial Sequence; identical to SEQ ID NO: 17516
  GFR-binding peptide
  MOD_RES (1)..(35): Xaa is C or S
  MOD_RES (13)..(14)..(15)..(16)..(17): Xaa is A or G
  MOD_RES (18)..(19)..(20)..(21): Xaa is A or G or is absent

SEQ ID NO: 20621 - protein, 39 aa, Artificial Sequence; identical to SEQ ID NO: 17517
  GFR-binding peptide
  MOD_RES (2)..(4): Xaa is C or S

SEQ ID NO: 20622 - protein, 43 aa, Artificial Sequence; identical to SEQ ID NO: 17518
  GFR-binding peptide
  MOD_RES (2)..(39): Xaa is C or S
  MOD_RES (15)..(16)..(17)..(18)..(19): Xaa is A or G
  MOD_RES (20)..(21)..(22)..(23): Xaa is A or G or is absent

SEQ ID NO: 20623 - protein, 37 aa, Artificial Sequence; identical to SEQ ID NO: 17519
  GFR-binding peptide
  MOD_RES (2)..(36): Xaa is C or S

SEQ ID NO: 20624 - protein, 36 aa, Artificial Sequence; identical to SEQ ID NO: 17520
  GFR-binding peptide
  MOD_RES (36)..(36): Xaa is C or S
  MOD_RES (12)..(13)..(14)..(15)..(16): Xaa is A or G
  MOD_RES (17)..(18)..(19)..(20): Xaa is A or G or is absent

SEQ ID NO: 20625 - protein, 33 aa, Artificial Sequence; identical to SEQ ID NO: 17521
  GFR-binding peptide
  MOD_RES (33)..(33): Xaa is C or S
  MOD_RES (11)..(12)..(13)..(14)..(15): Xaa is A or G
  MOD_RES (16)..(17)..(18)..(19): Xaa is A or G or is absent

SEQ ID NO: 20626 - protein, 34 aa, Artificial Sequence; identical to SEQ ID NO: 17522
  GFR-binding peptide
  MOD_RES (34)..(34): Xaa is C or S

SEQ ID NO: 20627 - protein, 33 aa, Artificial Sequence; identical to SEQ ID NO: 17523
  GFR-binding peptide
  MOD_RES (11)..(12)..(13)..(14)..(15): Xaa is A or G
  MOD_RES (16)..(17)..(18)..(19): Xaa is A or G or is absent

SEQ ID NO: 20628 - protein, 37 aa, Artificial Sequence; identical to SEQ ID NO: 17524
  GFR-binding peptide
  MOD_RES (37)..(37): Xaa is C or S
  MOD_RES (13)..(14)..(15)..(16)..(17): Xaa is A or G
  MOD_RES (18)..(19)..(20)..(21): Xaa is A or G or is absent

SEQ ID NO: 20629 - protein, 37 aa, Artificial Sequence; identical to SEQ ID NO: 17525
  GFR-binding peptide
  MOD_RES (33)..(33): Xaa is C or S

SEQ ID NO: 20630 - protein, 40 aa, Artificial Sequence; identical to SEQ ID NO: 17526
  GFR-binding peptide
  MOD_RES (2)..(4)..(38): Xaa is C or S
  MOD_RES (16)..(17)..(18)..(19)..(20): Xaa is A or G
  MOD_RES (21)..(22)..(23)..(24): Xaa is A or G or is absent

SEQ ID NO: 20631 - protein, 38 aa, Artificial Sequence; identical to SEQ ID NO: 17527
  GFR-binding peptide
  MOD_RES (2)..(4): Xaa is C or S

SEQ ID NO: 20632 - protein, 37 aa, Artificial Sequence; identical to SEQ ID NO: 17528
  GFR-binding peptide
  MOD_RES (37)..(37): Xaa is C or S

SEQ ID NO: 20633 - protein, 37 aa, Artificial Sequence; identical to SEQ ID NO: 17529
  GFR-binding peptide
  MOD_RES (1)..(3): Xaa is C or S
  MOD_RES (16)..(17)..(18)..(19)..(20): Xaa is A or G
  MOD_RES (21)..(22)..(23)..(24): Xaa is A or G or is absent

SEQ ID NO: 20634 - protein, 45 aa, Artificial Sequence; identical to SEQ ID NO: 17530
  GFR-binding peptide
  MOD_RES (2)..(4)..(41): Xaa is C or S
  MOD_RES (17)..(18)..(19)..(20)..(21): Xaa is A or G
  MOD_RES (22)..(23)..(24)..(25): Xaa is A or G or is absent

SEQ ID NO: 20635 - protein, 38 aa, Artificial Sequence; identical to SEQ ID NO: 17531
  GFR-binding peptide
  MOD_RES (1)..(3)..(37): Xaa is C or S

SEQ ID NO: 20636 - protein, 39 aa, Artificial Sequence; identical to SEQ ID NO: 17532
  GFR-binding peptide
  MOD_RES (37)..(37): Xaa is C or S

SEQ ID NO: 20637 - protein, 42 aa, Artificial Sequence; identical to SEQ ID NO: 17533
  GFR-binding peptide
  MOD_RES (2)..(39): Xaa is C or S
  MOD_RES (15)..(16)..(17)..(18)..(19): Xaa is A or G
  MOD_RES (20)..(21)..(22)..(23): Xaa is A or G or is absent

SEQ ID NO: 20638 - protein, 45 aa, Artificial Sequence; identical to SEQ ID NO: 17534
  GFR-binding peptide
  MOD_RES (2)..(4)..(41): Xaa is C or S
  MOD_RES (17)..(18)..(19)..(20)..(21): Xaa is A or G
  MOD_RES (22)..(23)..(24)..(25): Xaa is A or G or is absent

SEQ ID NO: 20639 - protein, 36 aa, Artificial Sequence; identical to SEQ ID NO: 17535
  GFR-binding peptide
  MOD_RES (33)..(33): Xaa is C or S

SEQ ID NO: 20640 - protein, 39 aa, Artificial Sequence; identical to SEQ ID NO: 17536
  GFR-binding peptide
  MOD_RES (1)..(35): Xaa is C or S

SEQ ID NO: 20641 - protein, 37 aa, Artificial Sequence; identical to SEQ ID NO: 17537
  GFR-binding peptide
  MOD_RES (36)..(36): Xaa is C or S

SEQ ID NO: 20642 - protein, 37 aa, Artificial Sequence; identical to SEQ ID NO: 17538
  GFR-binding peptide
  MOD_RES (1)..(1): Xaa is C or S

SEQ ID NO: 20643 - protein, 35 aa, Artificial Sequence; identical to SEQ ID NO: 17539
  GFR-binding peptide
  MOD_RES (2)..(2): Xaa is C or S
  MOD_RES (14)..(15)..(16)..(17)..(18): Xaa is A or G
  MOD_RES (19)..(20)..(21)..(22): Xaa is A or G or is absent

SEQ ID NO: 20644 - protein, 37 aa, Artificial Sequence; identical to SEQ ID NO: 17540
  GFR-binding peptide
  MOD_RES (1)..(3)..(37): Xaa is C or S

SEQ ID NO: 20645 - protein, 34 aa, Artificial Sequence; identical to SEQ ID NO: 17541
  GFR-binding peptide
  MOD_RES (12)..(13)..(14)..(15)..(16): Xaa is A or G
  MOD_RES (17)..(18)..(19)..(20): Xaa is A or G or is absent

SEQ ID NO: 20646 - protein, 39 aa, Artificial Sequence; identical to SEQ ID NO: 17542
  GFR-binding peptide
  MOD_RES (33)..(33): Xaa is C or S

SEQ ID NO: 20647 - protein, 36 aa, Artificial Sequence; identical to SEQ ID NO: 17543
  GFR-binding peptide
  MOD_RES (2)..(36): Xaa is C or S

SEQ ID NO: 20648 - protein, 41 aa, Artificial Sequence; identical to SEQ ID NO: 17544
  GFR-binding peptide
  MOD_RES (1)..(35): Xaa is C or S

SEQ ID NO: 20649 - protein, 36 aa, Artificial Sequence; identical to SEQ ID NO: 17545
  GFR-binding peptide
  MOD_RES (33)..(33): Xaa is C or S

SEQ ID NO: 20650 - protein, 41 aa, Artificial Sequence; identical to SEQ ID NO: 17546
  GFR-binding peptide
  MOD_RES (1)..(35): Xaa is C or S
  MOD_RES (13)..(14)..(15)..(16)..(17): Xaa is A or G
  MOD_RES (18)..(19)..(20)..(21): Xaa is A or G or is absent

SEQ ID NO: 20651 - protein, 35 aa, Artificial Sequence; identical to SEQ ID NO: 17547
  GFR-binding peptide
  MOD_RES (2)..(2): Xaa is C or S
  MOD_RES (14)..(15)..(16)..(17)..(18): Xaa is A or G
  MOD_RES (19)..(20)..(21)..(22): Xaa is A or G or is absent

SEQ ID NO: 20652 - protein, 36 aa, Artificial Sequence; identical to SEQ ID NO: 17548
  GFR-binding peptide
  MOD_RES (33)..(33): Xaa is C or S
  MOD_RES (11)..(12)..(13)..(14)..(15): Xaa is A or G
  MOD_RES (16)..(17)..(18)..(19): Xaa is A or G or is absent

SEQ ID NO: 20653 - protein, 42 aa, Artificial Sequence; identical to SEQ ID NO: 17549
  GFR-binding peptide
  MOD_RES (2)..(39): Xaa is C or S
  MOD_RES (15)..(16)..(17)..(18)..(19): Xaa is A or G
  MOD_RES (20)..(21)..(22)..(23): Xaa is A or G or is absent

SEQ ID NO: 20654 - protein, 41 aa, Artificial Sequence; identical to SEQ ID NO: 17550
  GFR-binding peptide
  MOD_RES (37)..(37): Xaa is C or S
  MOD_RES (13)..(14)..(15)..(16)..(17): Xaa is A or G
  MOD_RES (18)..(19)..(20)..(21): Xaa is A or G or is absent

SEQ ID NO: 20655 - protein, 39 aa, Artificial Sequence; identical to SEQ ID NO: 17551
  GFR-binding peptide
  MOD_RES (33)..(33): Xaa is C or S

SEQ ID NO: 20656 - protein, 40 aa, Artificial Sequence; identical to SEQ ID NO: 17552
  GFR-binding peptide
  MOD_RES (2)..(39): Xaa is C or S
  MOD_RES (15)..(16)..(17)..(18)..(19): Xaa is A or G
  MOD_RES (20)..(21)..(22)..(23): Xaa is A or G or is absent

SEQ ID NO: 20657 - protein, 43 aa, Artificial Sequence; identical to SEQ ID NO: 17553
  GFR-binding peptide
  MOD_RES (2)..(39): Xaa is C or S

SEQ ID NO: 20658 - protein, 37 aa, Artificial Sequence; identical to SEQ ID NO: 17554
  GFR-binding peptide
  MOD_RES (34)..(34): Xaa is C or S

SEQ ID NO: 20659 - protein, 37 aa, Artificial Sequence; identical to SEQ ID NO: 17555
  GFR-binding peptide
  MOD_RES (1)..(3)..(37): Xaa is C or S

SEQ ID NO: 20660 - protein, 38 aa, Artificial Sequence; identical to SEQ ID NO: 17556
  GFR-binding peptide
  MOD_RES (2)..(2): Xaa is C or S

SEQ ID NO: 20661 - protein, 41 aa, Artificial Sequence; identical to SEQ ID NO: 17557
  GFR-binding peptide
  MOD_RES (2)..(4)..(41): Xaa is C or S

SEQ ID NO: 20662 - protein, 41 aa, Artificial Sequence; identical to SEQ ID NO: 17558
  GFR-binding peptide
  MOD_RES (37)..(37): Xaa is C or S

SEQ ID NO: 20663 - protein, 37 aa, Artificial Sequence; identical to SEQ ID NO: 17559
  GFR-binding peptide
  MOD_RES (2)..(4): Xaa is C or S

SEQ ID NO: 20664 - protein, 39 aa, Artificial Sequence; identical to SEQ ID NO: 17560
  GFR-binding peptide
  MOD_RES (2)..(4): Xaa is C or S

SEQ ID NO: 20665 - protein, 35 aa, Artificial Sequence; identical to SEQ ID NO: 17561
  GFR-binding peptide
  MOD_RES (1)..(35): Xaa is C or S
  MOD_RES (13)..(14)..(15)..(16)..(17): Xaa is A or G
  MOD_RES (18)..(19)..(20)..(21): Xaa is A or G or is absent

SEQ ID NO: 20666 - protein, 44 aa, Artificial Sequence; identical to SEQ ID NO: 17562
  GFR-binding peptide
  MOD_RES (2)..(4)..(38): Xaa is C or S

SEQ ID NO: 20667 - protein, 41 aa, Artificial Sequence; identical to SEQ ID NO: 17563
  GFR-binding peptide
  MOD_RES (2)..(4)..(38): Xaa is C or S

SEQ ID NO: 20668 - protein, 39 aa, Artificial Sequence; identical to SEQ ID NO: 17564
  GFR-binding peptide
  MOD_RES (2)..(4)..(38): Xaa is C or S
  MOD_RES (16)..(17)..(18)..(19)..(20): Xaa is A or G
  MOD_RES (21)..(22)..(23)..(24): Xaa is A or G or is absent

SEQ ID NO: 20669 - protein, 36 aa, Artificial Sequence; identical to SEQ ID NO: 17565
  GFR-binding peptide
  MOD_RES (2)..(2): Xaa is C or S
  MOD_RES (15)..(16)..(17)..(18)..(19): Xaa is A or G
  MOD_RES (20)..(21)..(22)..(23): Xaa is A or G or is absent

SEQ ID NO: 20670 - protein, 41 aa, Artificial Sequence; identical to SEQ ID NO: 17566
  GFR-binding peptide
  MOD_RES (2)..(39): Xaa is C or S
  MOD_RES (15)..(16)..(17)..(18)..(19): Xaa is A or G
  MOD_RES (20)..(21)..(22)..(23): Xaa is A or G or is absent

SEQ ID NO: 20671 - protein, 38 aa, Artificial Sequence; identical to SEQ ID NO: 17567
  GFR-binding peptide
  MOD_RES (2)..(36): Xaa is C or S
  MOD_RES (14)..(15)..(16)..(17)..(18): Xaa is A or G
  MOD_RES (19)..(20)..(21)..(22): Xaa is A or G or is absent

SEQ ID NO: 20672 - protein, 35 aa, Artificial Sequence; identical to SEQ ID NO: 17568
  GFR-binding peptide
  MOD_RES (1)..(35): Xaa is C or S

SEQ ID NO: 20673 - protein, 37 aa, Artificial Sequence; identical to SEQ ID NO: 17569
  GFR-binding peptide
  MOD_RES (1)..(1): Xaa is C or S

SEQ ID NO: 20674 - protein, 45 aa, Artificial Sequence; identical to SEQ ID NO: 17570
  GFR-binding peptide
  MOD_RES (2)..(4)..(41): Xaa is C or S

SEQ ID NO: 20675 - protein, 44 aa, Artificial Sequence; identical to SEQ ID NO: 17571
  GFR-binding peptide
  MOD_RES (1)..(3)..(40): Xaa is C or S
  MOD_RES (16)..(17)..(18)..(19)..(20): Xaa is A or G
  MOD_RES (21)..(22)..(23)..(24): Xaa is A or G or is absent

SEQ ID NO: 20676 - protein, 40 aa, Artificial Sequence; identical to SEQ ID NO: 17572
  GFR-binding peptide
  MOD_RES (1)..(38): Xaa is C or S
  MOD_RES (14)..(15)..(16)..(17)..(18): Xaa is A or G
  MOD_RES (19)..(20)..(21)..(22): Xaa is A or G or is absent

SEQ ID NO: 20677 - protein, 40 aa, Artificial Sequence; identical to SEQ ID NO: 17573
  GFR-binding peptide
  MOD_RES (1)..(3)..(40): Xaa is C or S

SEQ ID NO: 20678 - protein, 37 aa, Artificial Sequence; identical to SEQ ID NO: 17574
  GFR-binding peptide
  MOD_RES (35)..(35): Xaa is C or S
  MOD_RES (11)..(12)..(13)..(14)..(15): Xaa is A or G
  MOD_RES (16)..(17)..(18)..(19): Xaa is A or G or is absent

SEQ ID NO: 20679 - protein, 36 aa, Artificial Sequence; identical to SEQ ID NO: 17575
  GFR-binding peptide
  MOD_RES (34)..(34): Xaa is C or S
  MOD_RES (12)..(13)..(14)..(15)..(16): Xaa is A or G
  MOD_RES (17)..(18)..(19)..(20): Xaa is A or G or is absent

SEQ ID NO: 20680 - protein, 33 aa, Artificial Sequence; identical to SEQ ID NO: 17576
  GFR-binding peptide
  MOD_RES (33)..(33): Xaa is C or S
  MOD_RES (11)..(12)..(13)..(14)..(15): Xaa is A or G
  MOD_RES (16)..(17)..(18)..(19): Xaa is A or G or is absent

SEQ ID NO: 20681 - protein, 45 aa, Artificial Sequence; identical to SEQ ID NO: 17577
  GFR-binding peptide
  MOD_RES (2)..(4)..(41): Xaa is C or S
  MOD_RES (17)..(18)..(19)..(20)..(21): Xaa is A or G
  MOD_RES (22)..(23)..(24)..(25): Xaa is A or G or is absent

SEQ ID NO: 20682 - protein, 44 aa, Artificial Sequence; identical to SEQ ID NO: 17578
  GFR-binding peptide
  MOD_RES (1)..(3)..(40): Xaa is C or S
  MOD_RES (16)..(17)..(18)..(19)..(20): Xaa is A or G
  MOD_RES (21)..(22)..(23)..(24): Xaa is A or G or is absent

SEQ ID NO: 20683 - protein, 37 aa, Artificial Sequence; identical to SEQ ID NO: 17579
  GFR-binding peptide
  MOD_RES (34)..(34): Xaa is C or S
  MOD_RES (12)..(13)..(14)..(15)..(16): Xaa is A or G
  MOD_RES (17)..(18)..(19)..(20): Xaa is A or G or is absent

SEQ ID NO: 20684 - protein, 38 aa, Artificial Sequence; identical to SEQ ID NO: 17580
  GFR-binding peptide
  MOD_RES (2)..(4)..(38): Xaa is C or S

SEQ ID NO: 20685 - protein, 38 aa, Artificial Sequence; identical to SEQ ID NO: 17581
  GFR-binding peptide
  MOD_RES (2)..(2): Xaa is C or S
  MOD_RES (15)..(16)..(17)..(18)..(19): Xaa is A or G
  MOD_RES (20)..(21)..(22)..(23): Xaa is A or G or is absent

SEQ ID NO: 20686 - protein, 37 aa, Artificial Sequence; identical to SEQ ID NO: 17582
  GFR-binding peptide
  MOD_RES (36)..(36): Xaa is C or S
  MOD_RES (12)..(13)..(14)..(15)..(16): Xaa is A or G
  MOD_RES (17)..(18)..(19)..(20): Xaa is A or G or is absent

SEQ ID NO: 20687 - protein, 39 aa, Artificial Sequence; identical to SEQ ID NO: 17583
  GFR-binding peptide
  MOD_RES (1)..(3): Xaa is C or S

SEQ ID NO: 20688 - protein, 38 aa, Artificial Sequence; identical to SEQ ID NO: 17584
  GFR-binding peptide
  MOD_RES (37)..(37): Xaa is C or S
  MOD_RES (13)..(14)..(15)..(16)..(17): Xaa is A or G
  MOD_RES (18)..(19)..(20)..(21): Xaa is A or G or is absent

SEQ ID NO: 20689 - protein, 38 aa, Artificial Sequence; identical to SEQ ID NO: 17585
  GFR-binding peptide
  MOD_RES (35)..(35): Xaa is C or S

SEQ ID NO: 20690 - protein, 43 aa, Artificial Sequence; identical to SEQ ID NO: 17586
  GFR-binding peptide
  MOD_RES (1)..(3)..(37): Xaa is C or S

SEQ ID NO: 20691 - protein, 38 aa, Artificial Sequence; identical to SEQ ID NO: 17587
  GFR-binding peptide
  MOD_RES (1)..(35): Xaa is C or S
  MOD_RES (13)..(14)..(15)..(16)..(17): Xaa is A or G
  MOD_RES (18)..(19)..(20)..(21): Xaa is A or G or is absent

SEQ ID NO: 20692 - protein, 37 aa, Artificial Sequence; identical to SEQ ID NO: 17588
  GFR-binding peptide
  MOD_RES (33)..(33): Xaa is C or S

SEQ ID NO: 20693 - protein, 40 aa, Artificial Sequence; identical to SEQ ID NO: 17589
  GFR-binding peptide
  MOD_RES (2)..(4)..(38): Xaa is C or S

SEQ ID NO: 20694 - protein, 38 aa, Artificial Sequence; identical to SEQ ID NO: 17590
  GFR-binding peptide
  MOD_RES (2)..(2): Xaa is C or S
  MOD_RES (15)..(16)..(17)..(18)..(19): Xaa is A or G
  MOD_RES (20)..(21)..(22)..(23): Xaa is A or G or is absent

SEQ ID NO: 20695 - protein, 35 aa, Artificial Sequence; identical to SEQ ID NO: 17591
  GFR-binding peptide
  MOD_RES (1)..(1): Xaa is C or S
  MOD_RES (14)..(15)..(16)..(17)..(18): Xaa is A or G
  MOD_RES (19)..(20)..(21)..(22): Xaa is A or G or is absent

SEQ ID NO: 20696 - protein, 41 aa, Artificial Sequence; identical to SEQ ID NO: 17592
  GFR-binding peptide
  MOD_RES (1)..(38): Xaa is C or S
  MOD_RES (14)..(15)..(16)..(17)..(18): Xaa is A or G
  MOD_RES (19)..(20)..(21)..(22): Xaa is A or G or is absent

SEQ ID NO: 20697 - protein, 36 aa, Artificial Sequence; identical to SEQ ID NO: 17593
  GFR-binding peptide
  MOD_RES (1)..(1): Xaa is C or S

SEQ ID NO: 20698 - protein, 40 aa, Artificial Sequence; identical to SEQ ID NO: 17594
  GFR-binding peptide
  MOD_RES (2)..(36): Xaa is C or S
  MOD_RES (14)..(15)..(16)..(17)..(18): Xaa is A or G
  MOD_RES (19)..(20)..(21)..(22): Xaa is A or G or is absent

SEQ ID NO: 20699 - protein, 39 aa, Artificial Sequence; identical to SEQ ID NO: 17595
  GFR-binding peptide
  MOD_RES (2)..(4): Xaa is C or S

SEQ ID NO: 20700 - protein, 35 aa, Artificial Sequence; identical to SEQ ID NO: 17596
  GFR-binding peptide
  MOD_RES (1)..(1): Xaa is C or S

SEQ ID NO: 20701 - protein, 41 aa, Artificial Sequence; identical to SEQ ID NO: 17597
  GFR-binding peptide
  MOD_RES (37)..(37): Xaa is C or S

SEQ ID NO: 20702 - protein, 42 aa, Artificial Sequence; identical to SEQ ID NO: 17598
  GFR-binding peptide
  MOD_RES (2)..(4)..(38): Xaa is C or S

SEQ ID NO: 20703 - protein, 39 aa, Artificial Sequence; identical to SEQ ID NO: 17599
  GFR-binding peptide
  MOD_RES (1)..(38): Xaa is C or S

SEQ ID NO: 20704 - protein, 38 aa, Artificial Sequence; identical to SEQ ID NO: 17600
  GFR-binding peptide
  MOD_RES (1)..(35): Xaa is C or S

SEQ ID NO: 20705 - protein, 36 aa, Artificial Sequence; identical to SEQ ID NO: 17601
  GFR-binding peptide
  MOD_RES (2)..(2): Xaa is C or S
  MOD_RES (15)..(16)..(17)..(18)..(19): Xaa is A or G
  MOD_RES (20)..(21)..(22)..(23): Xaa is A or G or is absent

SEQ ID NO: 20706 - protein, 36 aa, Artificial Sequence; identical to SEQ ID NO: 17602
  GFR-binding peptide
  MOD_RES (2)..(2): Xaa is C or S

SEQ ID NO: 20707 - protein, 32 aa, Artificial Sequence; identical to SEQ ID NO: 17603
  GFR-binding peptide
  MOD_RES (11)..(12)..(13)..(14)..(15): Xaa is A or G
  MOD_RES (16)..(17)..(18)..(19): Xaa is A or G or is absent

SEQ ID NO: 20708 - protein, 39 aa, Artificial Sequence; identical to SEQ ID NO: 17604
  GFR-binding peptide
  MOD_RES (2)..(39): Xaa is C or S
  MOD_RES (15)..(16)..(17)..(18)..(19): Xaa is A or G
  MOD_RES (20)..(21)..(22)..(23): Xaa is A or G or is absent

SEQ ID NO: 20709 - protein, 43 aa, Artificial Sequence; identical to SEQ ID NO: 17605
  GFR-binding peptide
  MOD_RES (1)..(3)..(37): Xaa is C or S

SEQ ID NO: 20710 - protein, 38 aa, Artificial Sequence; identical to SEQ ID NO: 17606
  GFR-binding peptide
  MOD_RES (35)..(35): Xaa is C or S

SEQ ID NO: 20711 - protein, 40 aa, Artificial Sequence; identical to SEQ ID NO: 17607
  GFR-binding peptide
  MOD_RES (36)..(36): Xaa is C or S
  MOD_RES (12)..(13)..(14)..(15)..(16): Xaa is A or G
  MOD_RES (17)..(18)..(19)..(20): Xaa is A or G or is absent

SEQ ID NO: 20712 - protein, 32 aa, Artificial Sequence; identical to SEQ ID NO: 17608
  GFR-binding peptide

SEQ ID NO: 20713 - protein, 40 aa, Artificial Sequence; identical to SEQ ID NO: 17609
  GFR-binding peptide
  MOD_RES (2)..(36): Xaa is C or S
  MOD_RES (14)..(15)..(16)..(17)..(18): Xaa is A or G
  MOD_RES (19)..(20)..(21)..(22): Xaa is A or G or is absent

SEQ ID NO: 20714 - protein, 39 aa, Artificial Sequence; identical to SEQ ID NO: 17610
  GFR-binding peptide
  MOD_RES (33)..(33): Xaa is C or S

SEQ ID NO: 20715 - protein, 42 aa, Artificial Sequence; identical to SEQ ID NO: 17611
  GFR-binding peptide
  MOD_RES (2)..(4)..(38): Xaa is C or S
  MOD_RES (16)..(17)..(18)..(19)..(20): Xaa is A or G
  MOD_RES (21)..(22)..(23)..(24): Xaa is A or G or is absent

SEQ ID NO: 20716 - protein, 37 aa, Artificial Sequence; identical to SEQ ID NO: 17612
  GFR-binding peptide
  MOD_RES (2)..(36): Xaa is C or S

SEQ ID NO: 20717 - protein, 37 aa, Artificial Sequence; identical to SEQ ID NO: 17613
  GFR-binding peptide
  MOD_RES (36)..(36): Xaa is C or S
  MOD_RES (12)..(13)..(14)..(15)..(16): Xaa is A or G
  MOD_RES (17)..(18)..(19)..(20): Xaa is A or G or is absent

SEQ ID NO: 20718 - protein, 36 aa, Artificial Sequence; identical to SEQ ID NO: 17614
  GFR-binding peptide
  MOD_RES (33)..(33): Xaa is C or S
  MOD_RES (11)..(12)..(13)..(14)..(15): Xaa is A or G
  MOD_RES (16)..(17)..(18)..(19): Xaa is A or G or is absent

SEQ ID NO: 20719 - protein, 40 aa, Artificial Sequence; identical to SEQ ID NO: 17615
  GFR-binding peptide
  MOD_RES (36)..(36): Xaa is C or S
  MOD_RES (12)..(13)..(14)..(15)..(16): Xaa is A or G
  MOD_RES (17)..(18)..(19)..(20): Xaa is A or G or is absent

SEQ ID NO: 20720 - protein, 37 aa, Artificial Sequence; identical to SEQ ID NO: 17616
  GFR-binding peptide
  MOD_RES (33)..(33): Xaa is C or S

SEQ ID NO: 20721 - protein, 40 aa, Artificial Sequence; identical to SEQ ID NO: 17617
  GFR-binding peptide
  MOD_RES (37)..(37): Xaa is C or S
  MOD_RES (13)..(14)..(15)..(16)..(17): Xaa is A or G
  MOD_RES (18)..(19)..(20)..(21): Xaa is A or G or is absent

SEQ ID NO: 20722 - protein, 36 aa, Artificial Sequence; identical to SEQ ID NO: 17618
  GFR-binding peptide
  MOD_RES (1)..(1): Xaa is C or S
  MOD_RES (14)..(15)..(16)..(17)..(18): Xaa is A or G
  MOD_RES (19)..(20)..(21)..(22): Xaa is A or G or is absent

SEQ ID NO: 20723 - protein, 41 aa, Artificial Sequence; identical to SEQ ID NO: 17619
  GFR-binding peptide
  MOD_RES (1)..(3)..(40): Xaa is C or S

SEQ ID NO: 20724 - protein, 39 aa, Artificial Sequence; identical to SEQ ID NO: 17620
  GFR-binding peptide
  MOD_RES (1)..(38): Xaa is C or S
  MOD_RES (14)..(15)..(16)..(17)..(18): Xaa is A or G
  MOD_RES (19)..(20)..(21)..(22): Xaa is A or G or is absent

SEQ ID NO: 20725 - protein, 38 aa, Artificial Sequence; identical to SEQ ID NO: 17621
  GFR-binding peptide
  MOD_RES (2)..(36): Xaa is C or S
  MOD_RES (14)..(15)..(16)..(17)..(18): Xaa is A or G
  MOD_RES (19)..(20)..(21)..(22): Xaa is A or G or is absent

SEQ ID NO: 20726 - protein, 41 aa, Artificial Sequence; identical to SEQ ID NO: 17622
  GFR-binding peptide
  MOD_RES (1)..(35): Xaa is C or S

SEQ ID NO: 20727 - protein, 38 aa, Artificial Sequence; identical to SEQ ID NO: 17623
  GFR-binding peptide
  MOD_RES (2)..(4): Xaa is C or S

SEQ ID NO: 20728 - protein, 41 aa, Artificial Sequence; identical to SEQ ID NO: 17624
  GFR-binding peptide
  MOD_RES (2)..(36): Xaa is C or S
  MOD_RES (14)..(15)..(16)..(17)..(18): Xaa is A or G
  MOD_RES (19)..(20)..(21)..(22): Xaa is A or G or is absent

SEQ ID NO: 20729 - protein, 39 aa, Artificial Sequence; identical to SEQ ID NO: 17625
  GFR-binding peptide
  MOD_RES (1)..(35): Xaa is C or S
  MOD_RES (13)..(14)..(15)..(16)..(17): Xaa is A or G
  MOD_RES (18)..(19)..(20)..(21): Xaa is A or G or is absent

SEQ ID NO: 20730 - protein, 37 aa, Artificial Sequence; identical to SEQ ID NO: 17626
  GFR-binding peptide
  MOD_RES (35)..(35): Xaa is C or S
  MOD_RES (11)..(12)..(13)..(14)..(15): Xaa is A or G
  MOD_RES (16)..(17)..(18)..(19): Xaa is A or G or is absent

SEQ ID NO: 20731 - protein, 43 aa, Artificial Sequence; identical to SEQ ID NO: 17627
  GFR-binding peptide
  MOD_RES (2)..(39): Xaa is C or S
  MOD_RES (15)..(16)..(17)..(18)..(19): Xaa is A or G
  MOD_RES (20)..(21)..(22)..(23): Xaa is A or G or is absent

SEQ ID NO: 20732 - protein, 37 aa, Artificial Sequence; identical to SEQ ID NO: 17628
  GFR-binding peptide
  MOD_RES (1)..(3): Xaa is C or S

SEQ ID NO: 20733 - protein, 37 aa, Artificial Sequence; identical to SEQ ID NO: 17629
  GFR-binding peptide
  MOD_RES (33)..(33): Xaa is C or S

SEQ ID NO: 20734 - protein, 40 aa, Artificial Sequence; identical to SEQ ID NO: 17630
  GFR-binding peptide
  MOD_RES (2)..(4)..(38): Xaa is C or S

SEQ ID NO: 20735 - protein, 34 aa, Artificial Sequence; identical to SEQ ID NO: 17631
  GFR-binding peptide
  MOD_RES (13)..(14)..(15)..(16)..(17): Xaa is A or G
  MOD_RES (18)..(19)..(20)..(21): Xaa is A or G or is absent

SEQ ID NO: 20736 - protein, 39 aa, Artificial Sequence; identical to SEQ ID NO: 17632
  GFR-binding peptide
  MOD_RES (2)..(36): Xaa is C or S

SEQ ID NO: 20737 - protein, 38 aa, Artificial Sequence; identical to SEQ ID NO: 17633
  GFR-binding peptide
  MOD_RES (2)..(2): Xaa is C or S
  MOD_RES (15)..(16)..(17)..(18)..(19): Xaa is A or G
  MOD_RES (20)..(21)..(22)..(23): Xaa is A or G or is absent

SEQ ID NO: 20738 - protein, 41 aa, Artificial Sequence; identical to SEQ ID NO: 17634
  GFR-binding peptide
  MOD_RES (1)..(35): Xaa is C or S

SEQ ID NO: 20739 - protein, 41 aa, Artificial Sequence; identical to SEQ ID NO: 17635
  GFR-binding peptide
  MOD_RES (2)..(4)..(41): Xaa is C or S
  MOD_RES (17)..(18)..(19)..(20)..(21): Xaa is A or G
  MOD_RES (22)..(23)..(24)..(25): Xaa is A or G or is absent

SEQ ID NO: 20740 - protein, 43 aa, Artificial Sequence; identical to SEQ ID NO: 17636
  GFR-binding peptide
  MOD_RES (2)..(4)..(38): Xaa is C or S

SEQ ID NO: 20741 - protein, 36 aa, Artificial Sequence; identical to SEQ ID NO: 17637
  GFR-binding peptide
  MOD_RES (2)..(2): Xaa is C or S

SEQ ID NO: 20742 - protein, 43 aa, Artificial Sequence; identical to SEQ ID NO: 17638
  GFR-binding peptide
  MOD_RES (2)..(4)..(38): Xaa is C or S

SEQ ID NO: 20743 - protein, 36 aa, Artificial Sequence; identical to SEQ ID NO: 17639
  GFR-binding peptide
  MOD_RES (34)..(34): Xaa is C or S

SEQ ID NO: 20744 - protein, 33 aa, Artificial Sequence; identical to SEQ ID NO: 17640
  GFR-binding peptide
  MOD_RES (33)..(33): Xaa is C or S

SEQ ID NO: 20745 - protein, 39 aa, Artificial Sequence; identical to SEQ ID NO: 17641
  GFR-binding peptide
  MOD_RES (36)..(36): Xaa is C or S
  MOD_RES (12)..(13)..(14)..(15)..(16): Xaa is A or G
  MOD_RES (17)..(18)..(19)..(20): Xaa is A or G or is absent

SEQ ID NO: 20746 - protein, 39 aa, Artificial Sequence; identical to SEQ ID NO: 17642
  GFR-binding peptide
  MOD_RES (1)..(3): Xaa is C or S
  MOD_RES (16)..(17)..(18)..(19)..(20): Xaa is A or G
  MOD_RES (21)..(22)..(23)..(24): Xaa is A or G or is absent

SEQ ID NO: 20747 - protein, 32 aa, Artificial Sequence; identical to SEQ ID NO: 17643
  GFR-binding peptide

SEQ ID NO: 20748 - protein, 45 aa, Artificial Sequence; identical to SEQ ID NO: 17644
  GFR-binding peptide
  MOD_RES (2)..(4)..(41): Xaa is C or S
  MOD_RES (17)..(18)..(19)..(20)..(21): Xaa is A or G
  MOD_RES (22)..(23)..(24)..(25): Xaa is A or G or is absent

SEQ ID NO: 20749 - protein, 41 aa, Artificial Sequence; identical to SEQ ID NO: 17645
  GFR-binding peptide
  MOD_RES (1)..(3)..(40): Xaa is C or S
  MOD_RES (16)..(17)..(18)..(19)..(20): Xaa is A or G
  MOD_RES (21)..(22)..(23)..(24): Xaa is A or G or is absent

SEQ ID NO: 20750 - protein, 35 aa, Artificial Sequence; identical to SEQ ID NO: 17646
  GFR-binding peptide
  MOD_RES (13)..(14)..(15)..(16)..(17): Xaa is A or G
  MOD_RES (18)..(19)..(20)..(21): Xaa is A or G or is absent

SEQ ID NO: 20751 - protein, 38 aa, Artificial Sequence; identical to SEQ ID NO: 17647
  GFR-binding peptide
  MOD_RES (37)..(37): Xaa is C or S

SEQ ID NO: 20752 - protein, 39 aa, Artificial Sequence; identical to SEQ ID NO: 17648
  GFR-binding peptide
  MOD_RES (2)..(36): Xaa is C or S
  MOD_RES (14)..(15)..(16)..(17)..(18): Xaa is A or G
  MOD_RES (19)..(20)..(21)..(22): Xaa is A or G or is absent

SEQ ID NO: 20753 - protein, 39 aa, Artificial Sequence; identical to SEQ ID NO: 17649
  GFR-binding peptide
  MOD_RES (1)..(35): Xaa is C or S

SEQ ID NO: 20754 - protein, 33 aa, Artificial Sequence; identical to SEQ ID NO: 17650
  GFR-binding peptide
  MOD_RES (33)..(33): Xaa is C or S

SEQ ID NO: 20755 - protein, 33 aa, Artificial Sequence; identical to SEQ ID NO: 17651
  GFR-binding peptide
  MOD_RES (33)..(33): Xaa is C or S
  MOD_RES (11)..(12)..(13)..(14)..(15): Xaa is A or G
  MOD_RES (16)..(17)..(18)..(19): Xaa is A or G or is absent

SEQ ID NO: 20756 - protein, 41 aa, Artificial Sequence; identical to SEQ ID NO: 17652
  GFR-binding peptide
  MOD_RES (1)..(35): Xaa is C or S
  MOD_RES (13)..(14)..(15)..(16)..(17): Xaa is A or G
  MOD_RES (18)..(19)..(20)..(21): Xaa is A or G or is absent

SEQ ID NO: 20757 - protein, 32 aa, Artificial Sequence; identical to SEQ ID NO: 17653
  GFR-binding peptide
  MOD_RES (11)..(12)..(13)..(14)..(15): Xaa is A or G
  MOD_RES (16)..(17)..(18)..(19): Xaa is A or G or is absent

SEQ ID NO: 20758 - protein, 43 aa, Artificial Sequence; identical to SEQ ID NO: 17654
  GFR-binding peptide
  MOD_RES (2)..(4)..(41): Xaa is C or S
  MOD_RES (17)..(18)..(19)..(20)..(21): Xaa is A or G
  MOD_RES (22)..(23)..(24)..(25): Xaa is A or G or is absent

SEQ ID NO: 20759 - protein, 42 aa, Artificial Sequence; identical to SEQ ID NO: 17655
  GFR-binding peptide
  MOD_RES (2)..(4)..(38): Xaa is C or S
  MOD_RES (16)..(17)..(18)..(19)..(20): Xaa is A or G
  MOD_RES (21)..(22)..(23)..(24): Xaa is A or G or is absent

SEQ ID NO: 20760 - protein, 39 aa, Artificial Sequence; identical to SEQ ID NO: 17656
  GFR-binding peptide
  MOD_RES (35)..(35): Xaa is C or S
  MOD_RES (11)..(12)..(13)..(14)..(15): Xaa is A or G
  MOD_RES (16)..(17)..(18)..(19): Xaa is A or G or is absent

SEQ ID NO: 20761 - protein, 37 aa, Artificial Sequence; identical to SEQ ID NO: 17657
  GFR-binding peptide
  MOD_RES (1)..(3): Xaa is C or S

SEQ ID NO: 20762 - protein, 35 aa, Artificial Sequence; identical to SEQ ID NO: 17658
  GFR-binding peptide
  MOD_RES (2)..(2): Xaa is C or S

SEQ ID NO: 20763 - protein, 36 aa, Artificial Sequence; identical to SEQ ID NO: 17659
  GFR-binding peptide
  MOD_RES (2)..(2): Xaa is C or S
  MOD_RES (15)..(16)..(17)..(18)..(19): Xaa is A or G
  MOD_RES (20)..(21)..(22)..(23): Xaa is A or G or is absent

SEQ ID NO: 20764 - protein, 35 aa, Artificial Sequence; identical to SEQ ID NO: 17660
  GFR-binding peptide
  MOD_RES (35)..(35): Xaa is C or S
  MOD_RES (11)..(12)..(13)..(14)..(15): Xaa is A or G
  MOD_RES (16)..(17)..(18)..(19): Xaa is A or G or is absent

SEQ ID NO: 20765 - protein, 42 aa, Artificial Sequence; identical to SEQ ID NO: 17661
  GFR-binding peptide
  MOD_RES (2)..(4)..(38): Xaa is C or S
  MOD_RES (16)..(17)..(18)..(19)..(20): Xaa is A or G
  MOD_RES (21)..(22)..(23)..(24): Xaa is A or G or is absent

SEQ ID NO: 20766 - protein, 35 aa, Artificial Sequence; identical to SEQ ID NO: 17662
  GFR-binding peptide
  MOD_RES (35)..(35): Xaa is C or S
  MOD_RES (11)..(12)..(13)..(14)..(15): Xaa is A or G
  MOD_RES (16)..(17)..(18)..(19): Xaa is A or G or is absent

SEQ ID NO: 20767 - protein, 32 aa, Artificial Sequence; identical to SEQ ID NO: 17663
  GFR-binding peptide

SEQ ID NO: 20768 - protein, 38 aa, Artificial Sequence; identical to SEQ ID NO: 17664
  GFR-binding peptide
  MOD_RES (1)..(35): Xaa is C or S
  MOD_RES (13)..(14)..(15)..(16)..(17): Xaa is A or G
  MOD_RES (18)..(19)..(20)..(21): Xaa is A or G or is absent

SEQ ID NO: 20769 - protein, 38 aa, Artificial Sequence; identical to SEQ ID NO: 17665
  GFR-binding peptide
  MOD_RES (1)..(3)..(37): Xaa is C or S

SEQ ID NO: 20770 - protein, 41 aa, Artificial Sequence; identical to SEQ ID NO: 17666
  GFR-binding peptide
  MOD_RES (2)..(4)..(41): Xaa is C or S

SEQ ID NO: 20771 - protein, 42 aa, Artificial Sequence; identical to SEQ ID NO: 17667
  GFR-binding peptide
  MOD_RES (1)..(3)..(37): Xaa is C or S

SEQ ID NO: 20772 - protein, 32 aa, Artificial Sequence; identical to SEQ ID NO: 17668
  GFR-binding peptide
  MOD_RES (11)..(12)..(13)..(14)..(15): Xaa is A or G
  MOD_RES (16)..(17)..(18)..(19): Xaa is A or G or is absent

SEQ ID NO: 20773 - protein, 33 aa, Artificial Sequence; identical to SEQ ID NO: 17669
  GFR-binding peptide

SEQ ID NO: 20774 - protein, 42 aa, Artificial Sequence; identical to SEQ ID NO: 17670
  GFR-binding peptide
  MOD_RES (2)..(4)..(41): Xaa is C or S

SEQ ID NO: 20775 - protein, 45 aa, Artificial Sequence; identical to SEQ ID NO: 17671
  GFR-binding peptide
  MOD_RES (2)..(4)..(41): Xaa is C or S
  MOD_RES (17)..(18)..(19)..(20)..(21): Xaa is A or G
  MOD_RES (22)..(23)..(24)..(25): Xaa is A or G or is absent

SEQ ID NO: 20776 - protein, 32 aa, Artificial Sequence; identical to SEQ ID NO: 17672
  GFR-binding peptide

SEQ ID NO: 20777 - protein, 39 aa, Artificial Sequence; identical to SEQ ID NO: 17673
  GFR-binding peptide
  MOD_RES (34)..(34): Xaa is C or S

SEQ ID NO: 20778 - protein, 39 aa, Artificial Sequence; identical to SEQ ID NO: 17674
  GFR-binding peptide
  MOD_RES (37)..(37): Xaa is C or S
  MOD_RES (13)..(14)..(15)..(16)..(17): Xaa is A or G
  MOD_RES (18)..(19)..(20)..(21): Xaa is A or G or is absent

SEQ ID NO: 20779 - protein, 32 aa, Artificial Sequence; identical to SEQ ID NO: 17675
  GFR-binding peptide

SEQ ID NO: 20780 - protein, 37 aa, Artificial Sequence; identical to SEQ ID NO: 17676
  GFR-binding peptide
  MOD_RES (37)..(37): Xaa is C or S
  MOD_RES (13)..(14)..(15)..(16)..(17): Xaa is A or G
  MOD_RES (18)..(19)..(20)..(21): Xaa is A or G or is absent

SEQ ID NO: 20781 - protein, 35 aa, Artificial Sequence; identical to SEQ ID NO: 17677
  GFR-binding peptide

SEQ ID NO: 20782 - protein, 36 aa, Artificial Sequence; identical to SEQ ID NO: 17678
  GFR-binding peptide

SEQ ID NO: 20783 - protein, 36 aa, Artificial Sequence; identical to SEQ ID NO: 17679
  GFR-binding peptide
  MOD_RES (34)..(34): Xaa is C or S

SEQ ID NO: 20784 - protein, 40 aa, Artificial Sequence; identical to SEQ ID NO: 17680
  GFR-binding peptide
  MOD_RES (2)..(39): Xaa is C or S
  MOD_RES (15)..(16)..(17)..(18)..(19): Xaa is A or G
  MOD_RES (20)..(21)..(22)..(23): Xaa is A or G or is absent

SEQ ID NO: 20785 - protein, 37 aa, Artificial Sequence; identical to SEQ ID NO: 17681
  GFR-binding peptide
  MOD_RES (2)..(4): Xaa is C or S
  MOD_RES (16)..(17)..(18)..(19)..(20): Xaa is A or G
  MOD_RES (21)..(22)..(23)..(24): Xaa is A or G or is absent

SEQ ID NO: 20786 - protein, 41 aa, Artificial Sequence; identical to SEQ ID NO: 17682
  GFR-binding peptide
  MOD_RES (2)..(4)..(41): Xaa is C or S
  MOD_RES (17)..(18)..(19)..(20)..(21): Xaa is A or G
  MOD_RES (22)..(23)..(24)..(25): Xaa is A or G or is absent

SEQ ID NO: 20787 - protein, 43 aa, Artificial Sequence; identical to SEQ ID NO: 17683
  GFR-binding peptide
  MOD_RES (2)..(4)..(38): Xaa is C or S
  MOD_RES (16)..(17)..(18)..(19)..(20): Xaa is A or G
  MOD_RES (21)..(22)..(23)..(24): Xaa is A or G or is absent

SEQ ID NO: 20788 - protein, 40 aa, Artificial Sequence; identical to SEQ ID NO: 17684
  GFR-binding peptide
  MOD_RES (2)..(39): Xaa is C or S

SEQ ID NO: 20789 - protein, 32 aa, Artificial Sequence; identical to SEQ ID NO: 17685
  GFR-binding peptide
  MOD_RES (11)..(12)..(13)..(14)..(15): Xaa is A or G
  MOD_RES (16)..(17)..(18)..(19): Xaa is A or G or is absent

SEQ ID NO: 20790 - protein, 35 aa, Artificial Sequence; identical to SEQ ID NO: 17686
  GFR-binding peptide
  MOD_RES (13)..(14)..(15)..(16)..(17): Xaa is A or G
  MOD_RES (18)..(19)..(20)..(21): Xaa is A or G or is absent

SEQ ID NO: 20791 - protein, 37 aa, Artificial Sequence; identical to SEQ ID NO: 17687
  GFR-binding peptide
  MOD_RES (2)..(4): Xaa is C or S

SEQ ID NO: 20792 - protein, 34 aa, Artificial Sequence; identical to SEQ ID NO: 17688
  GFR-binding peptide
  MOD_RES (34)..(34): Xaa is C or S

SEQ ID NO: 20793 - protein, 39 aa, Artificial Sequence; identical to SEQ ID NO: 17689
  GFR-binding peptide
  MOD_RES (2)..(4): Xaa is C or S

SEQ ID NO: 20794 - protein, 38 aa, Artificial Sequence; identical to SEQ ID NO: 17690
  GFR-binding peptide
  MOD_RES (1)..(3): Xaa is C or S
  MOD_RES (16)..(17)..(18)..(19)..(20): Xaa is A or G
  MOD_RES (21)..(22)..(23)..(24): Xaa is A or G or is absent

SEQ ID NO: 20795 - protein, 38 aa, Artificial Sequence; identical to SEQ ID NO: 17691
  GFR-binding peptide
  MOD_RES (2)..(4): Xaa is C or S

SEQ ID NO: 20796 - protein, 34 aa, Artificial Sequence; identical to SEQ ID NO: 17692
  GFR-binding peptide
  MOD_RES (12)..(13)..(14)..(15)..(16): Xaa is A or G
  MOD_RES (17)..(18)..(19)..(20): Xaa is A or G or is absent

SEQ ID NO: 20797 - protein, 37 aa, Artificial Sequence; identical to SEQ ID NO: 17693
  GFR-binding peptide
  MOD_RES (2)..(36): Xaa is C or S
  MOD_RES (14)..(15)..(16)..(17)..(18): Xaa is A or G
  MOD_RES (19)..(20)..(21)..(22): Xaa is A or G or is absent

SEQ ID NO: 20798 - protein, 43 aa, Artificial Sequence; identical to SEQ ID NO: 17694
  GFR-binding peptide
  MOD_RES (2)..(39): Xaa is C or S
  MOD_RES (15)..(16)..(17)..(18)..(19): Xaa is A or G
  MOD_RES (20)..(21)..(22)..(23): Xaa is A or G or is absent

SEQ ID NO: 20799 - protein, 33 aa, Artificial Sequence; identical to SEQ ID NO: 17695
  GFR-binding peptide
  MOD_RES (33)..(33): Xaa is C or S

SEQ ID NO: 20800 - protein, 42 aa, Artificial Sequence; identical to SEQ ID NO: 17696
  GFR-binding peptide
  MOD_RES (2)..(4)..(41): Xaa is C or S
  MOD_RES (17)..(18)..(19)..(20)..(21): Xaa is A or G
  MOD_RES (22)..(23)..(24)..(25): Xaa is A or G or is absent

SEQ ID NO: 20801 - protein, 41 aa, Artificial Sequence; identical to SEQ ID NO: 17697
  GFR-binding peptide
  MOD_RES (2)..(4)..(38): Xaa is C or S

SEQ ID NO: 20802 - protein, 39 aa, Artificial Sequence; identical to SEQ ID NO: 17698
  GFR-binding peptide
  MOD_RES (2)..(36): Xaa is C or S
  MOD_RES (14)..(15)..(16)..(17)..(18): Xaa is A or G
  MOD_RES (19)..(20)..(21)..(22): Xaa is A or G or is absent

SEQ ID NO: 20803 - protein, 38 aa, Artificial Sequence; identical to SEQ ID NO: 17699
  GFR-binding peptide
  MOD_RES (2)..(4): Xaa is C or S
  MOD_RES (17)..(18)..(19)..(20)..(21): Xaa is A or G
  MOD_RES (22)..(23)..(24)..(25): Xaa is A or G or is absent

SEQ ID NO: 20804 - protein, 41 aa, Artificial Sequence; identical to SEQ ID NO: 17700
  GFR-binding peptide
  MOD_RES (1)..(35): Xaa is C or S

SEQ ID NO: 20805 - protein, 41 aa, Artificial Sequence; identical to SEQ ID NO: 17701
  GFR-binding peptide
  MOD_RES (1)..(35): Xaa is C or S
  MOD_RES (13)..(14)..(15)..(16)..(17): Xaa is A or G
  MOD_RES (18)..(19)..(20)..(21): Xaa is A or G or is absent

SEQ ID NO: 20806 - protein, 39 aa, Artificial Sequence; identical to SEQ ID NO: 17702
  GFR-binding peptide
  MOD_RES (2)..(4): Xaa is C or S

SEQ ID NO: 20807 - protein, 39 aa, Artificial Sequence; identical to SEQ ID NO: 17703
  GFR-binding peptide
  MOD_RES (2)..(4)..(38): Xaa is C or S
  MOD_RES (16)..(17)..(18)..(19)..(20): Xaa is A or G
  MOD_RES (21)..(22)..(23)..(24): Xaa is A or G or is absent

SEQ ID NO: 20808 - protein, 40 aa, Artificial Sequence; identical to SEQ ID NO: 17704
  GFR-binding peptide
  MOD_RES (2)..(4): Xaa is C or S
  MOD_RES (17)..(18)..(19)..(20)..(21): Xaa is A or G
  MOD_RES (22)..(23)..(24)..(25): Xaa is A or G or is absent

SEQ ID NO: 20809 - protein, 34 aa, Artificial Sequence; identical to SEQ ID NO: 17705
  GFR-binding peptide
  MOD_RES (1)..(1): Xaa is C or S
  MOD_RES (13)..(14)..(15)..(16)..(17): Xaa is A or G
  MOD_RES (18)..(19)..(20)..(21): Xaa is A or G or is absent

SEQ ID NO: 20810 - protein, 37 aa, Artificial Sequence; identical to SEQ ID NO: 17706
  GFR-binding peptide
  MOD_RES (36)..(36): Xaa is C or S
  MOD_RES (12)..(13)..(14)..(15)..(16): Xaa is A or G
  MOD_RES (17)..(18)..(19)..(20): Xaa is A or G or is absent

SEQ ID NO: 20811 - protein, 40 aa, Artificial Sequence; identical to SEQ ID NO: 17707
  GFR-binding peptide
  MOD_RES (1)..(3)..(37): Xaa is C or S

SEQ ID NO: 20812 - protein, 39 aa, Artificial Sequence; identical to SEQ ID NO: 17708
  GFR-binding peptide
  MOD_RES (1)..(3)..(37): Xaa is C or S
  MOD_RES (15)..(16)..(17)..(18)..(19): Xaa is A or G
  MOD_RES (20)..(21)..(22)..(23): Xaa is A or G or is absent

SEQ ID NO: 20813 - protein, 38 aa, Artificial Sequence; identical to SEQ ID NO: 17709
  GFR-binding peptide
  MOD_RES (2)..(2): Xaa is C or S

SEQ ID NO: 20814 - protein, 42 aa, Artificial Sequence; identical to SEQ ID NO: 17710
  GFR-binding peptide
  MOD_RES (2)..(39): Xaa is C or S
  MOD_RES (15)..(16)..(17)..(18)..(19): Xaa is A or G
  MOD_RES (20)..(21)..(22)..(23): Xaa is A or G or is absent

SEQ ID NO: 20815 - protein, 37 aa, Artificial Sequence; identical to SEQ ID NO: 17711
  GFR-binding peptide
  MOD_RES (36)..(36): Xaa is C or S
  MOD_RES (12)..(13)..(14)..(15)..(16): Xaa is A or G
  MOD_RES (17)..(18)..(19)..(20): Xaa is A or G or is absent

SEQ ID NO: 20816 - protein, 32 aa, Artificial Sequence; identical to SEQ ID NO: 17712
  GFR-binding peptide
  MOD_RES (11)..(12)..(13)..(14)..(15): Xaa is A or G
  MOD_RES (16)..(17)..(18)..(19): Xaa is A or G or is absent

SEQ ID NO: 20817 - protein, 32 aa, Artificial Sequence; identical to SEQ ID NO: 17713
  GFR-binding peptide
  MOD_RES (11)..(12)..(13)..(14)..(15): Xaa is A or G
  MOD_RES (16)..(17)..(18)..(19): Xaa is A or G or is absent

SEQ ID NO: 20818 - protein, 35 aa, Artificial Sequence; identical to SEQ ID NO: 17714
  GFR-binding peptide
  MOD_RES (12)..(13)..(14)..(15)..(16): Xaa is A or G
  MOD_RES (17)..(18)..(19)..(20): Xaa is A or G or is absent

SEQ ID NO: 20819 - protein, 36 aa, Artificial Sequence; identical to SEQ ID NO: 17715
  GFR-binding peptide
  MOD_RES (33)..(33): Xaa is C or S
  MOD_RES (11)..(12)..(13)..(14)..(15): Xaa is A or G
  MOD_RES (16)..(17)..(18)..(19): Xaa is A or G or is absent

SEQ ID NO: 20820 - protein, 35 aa, Artificial Sequence; identical to SEQ ID NO: 17716
  GFR-binding peptide
  MOD_RES (34)..(34): Xaa is C or S

SEQ ID NO: 20821 - protein, 41 aa, Artificial Sequence; identical to SEQ ID NO: 17717
  GFR-binding peptide
  MOD_RES (1)..(3)..(37): Xaa is C or S

SEQ ID NO: 20822 - protein, 36 aa, Artificial Sequence; identical to SEQ ID NO: 17718
  GFR-binding peptide
  MOD_RES (34)..(34): Xaa is C or S
  MOD_RES (12)..(13)..(14)..(15)..(16): Xaa is A or G
  MOD_RES (17)..(18)..(19)..(20): Xaa is A or G or is absent

SEQ ID NO: 20823 - protein, 36 aa, Artificial Sequence; identical to SEQ ID NO: 17719
  GFR-binding peptide
  MOD_RES (36)..(36): Xaa is C or S

SEQ ID NO: 20824 - protein, 41 aa, Artificial Sequence; identical to SEQ ID NO: 17720
  GFR-binding peptide
  MOD_RES (2)..(36): Xaa is C or S
  MOD_RES (14)..(15)..(16)..(17)..(18): Xaa is A or G
  MOD_RES (19)..(20)..(21)..(22): Xaa is A or G or is absent

SEQ ID NO: 20825 - protein, 34 aa, Artificial Sequence; identical to SEQ ID NO: 17721
  GFR-binding peptide
  MOD_RES (11)..(12)..(13)..(14)..(15): Xaa is A or G
  MOD_RES (16)..(17)..(18)..(19): Xaa is A or G or is absent

SEQ ID NO: 20826 - protein, 38 aa, Artificial Sequence; identical to SEQ ID NO: 17722
  GFR-binding peptide
  MOD_RES (2)..(4): Xaa is C or S

SEQ ID NO: 20827 - protein, 41 aa, Artificial Sequence; identical to SEQ ID NO: 17723
  GFR-binding peptide
  MOD_RES (1)..(38): Xaa is C or S
  MOD_RES (14)..(15)..(16)..(17)..(18): Xaa is A or G
  MOD_RES (19)..(20)..(21)..(22): Xaa is A or G or is absent

SEQ ID NO: 20828 - protein, 38 aa, Artificial Sequence; identical to SEQ ID NO: 17724
  GFR-binding peptide
  MOD_RES (1)..(38): Xaa is C or S
  MOD_RES (14)..(15)..(16)..(17)..(18): Xaa is A or G
  MOD_RES (19)..(20)..(21)..(22): Xaa is A or G or is absent

SEQ ID NO: 20829 - protein, 38 aa, Artificial Sequence; identical to SEQ ID NO: 17725
  GFR-binding peptide
  MOD_RES (35)..(35): Xaa is C or S

SEQ ID NO: 20830 - protein, 35 aa, Artificial Sequence; identical to SEQ ID NO: 17726
  GFR-binding peptide
  MOD_RES (34)..(34): Xaa is C or S
  MOD_RES (12)..(13)..(14)..(15)..(16): Xaa is A or G
  MOD_RES (17)..(18)..(19)..(20): Xaa is A or G or is absent

SEQ ID NO: 20831 - protein, 33 aa, Artificial Sequence; identical to SEQ ID NO: 17727
  GFR-binding peptide
  MOD_RES (33)..(33): Xaa is C or S
  MOD_RES (11)..(12)..(13)..(14)..(15): Xaa is A or G
  MOD_RES (16)..(17)..(18)..(19): Xaa is A or G or is absent

SEQ ID NO: 20832 - protein, 39 aa, Artificial Sequence; identical to SEQ ID NO: 17728
  GFR-binding peptide
  MOD_RES (2)..(39): Xaa is C or S
  MOD_RES (15)..(16)..(17)..(18)..(19): Xaa is A or G
  MOD_RES (20)..(21)..(22)..(23): Xaa is A or G or is absent

SEQ ID NO: 20833 - protein, 35 aa, Artificial Sequence; identical to SEQ ID NO: 17729
  GFR-binding peptide
  MOD_RES (35)..(35): Xaa is C or S

SEQ ID NO: 20834 - protein, 37 aa, Artificial Sequence; identical to SEQ ID NO: 17730
  GFR-binding peptide
  MOD_RES (2)..(4): Xaa is C or S
  MOD_RES (16)..(17)..(18)..(19)..(20): Xaa is A or G
  MOD_RES (21)..(22)..(23)..(24): Xaa is A or G or is absent

SEQ ID NO: 20835 - protein, 33 aa, Artificial Sequence; identical to SEQ ID NO: 17731
  GFR-binding peptide

SEQ ID NO: 20836 - protein, 43 aa, Artificial Sequence; identical to SEQ ID NO: 17732
  GFR-binding peptide
  MOD_RES (1)..(3)..(40): Xaa is C or S
  MOD_RES (16)..(17)..(18)..(19)..(20): Xaa is A or G
  MOD_RES (21)..(22)..(23)..(24): Xaa is A or G or is absent

SEQ ID NO: 20837 - protein, 39 aa, Artificial Sequence; identical to SEQ ID NO: 17733
  GFR-binding peptide
  MOD_RES (1)..(35): Xaa is C or S
  MOD_RES (13)..(14)..(15)..(16)..(17): Xaa is A or G
  MOD_RES (18)..(19)..(20)..(21): Xaa is A or G or is absent

SEQ ID NO: 20838 - protein, 41 aa, Artificial Sequence; identical to SEQ ID NO: 17734
  GFR-binding peptide
  MOD_RES (37)..(37): Xaa is C or S
  MOD_RES (13)..(14)..(15)..(16)..(17): Xaa is A or G
  MOD_RES (18)..(19)..(20)..(21): Xaa is A or G or is absent

SEQ ID NO: 20839 - protein, 44 aa, Artificial Sequence; identical to SEQ ID NO: 17735
  GFR-binding peptide
  MOD_RES (2)..(4)..(38): Xaa is C or S
  MOD_RES (16)..(17)..(18)..(19)..(20): Xaa is A or G
  MOD_RES (21)..(22)..(23)..(24): Xaa is A or G or is absent

SEQ ID NO: 20840 - protein, 36 aa, Artificial Sequence; identical to SEQ ID NO: 17736
  GFR-binding peptide
  MOD_RES (2)..(36): Xaa is C or S

SEQ ID NO: 20841 - protein, 35 aa, Artificial Sequence; identical to SEQ ID NO: 17737
  GFR-binding peptide

SEQ ID NO: 20842 - protein, 38 aa, Artificial Sequence; identical to SEQ ID NO: 17738
  GFR-binding peptide
  MOD_RES (1)..(3)..(37): Xaa is C or S
  MOD_RES (15)..(16)..(17)..(18)..(19): Xaa is A or G
  MOD_RES (20)..(21)..(22)..(23): Xaa is A or G or is absent

SEQ ID NO: 20843 - protein, 36 aa, Artificial Sequence; identical to SEQ ID NO: 17739
  GFR-binding peptide
  MOD_RES (1)..(1): Xaa is C or S
  MOD_RES (14)..(15)..(16)..(17)..(18): Xaa is A or G
  MOD_RES (19)..(20)..(21)..(22): Xaa is A or G or is absent

SEQ ID NO: 20844 - protein, 35 aa, Artificial Sequence; identical to SEQ ID NO: 17740
  GFR-binding peptide
  MOD_RES (34)..(34): Xaa is C or S
  MOD_RES (12)..(13)..(14)..(15)..(16): Xaa is A or G
  MOD_RES (17)..(18)..(19)..(20): Xaa is A or G or is absent

SEQ ID NO: 20845 - protein, 36 aa, Artificial Sequence; identical to SEQ ID NO: 17741
  GFR-binding peptide
  MOD_RES (2)..(2): Xaa is C or S

SEQ ID NO: 20846 - protein, 42 aa, Artificial Sequence; identical to SEQ ID NO: 17742
  GFR-binding peptide
  MOD_RES (1)..(3)..(40): Xaa is C or S

SEQ ID NO: 20847 - protein, 38 aa, Artificial Sequence; identical to SEQ ID NO: 17743
  GFR-binding peptide
  MOD_RES (2)..(36): Xaa is C or S
  MOD_RES (14)..(15)..(16)..(17)..(18): Xaa is A or G
  MOD_RES (19)..(20)..(21)..(22): Xaa is A or G or is absent

SEQ ID NO: 20848 - protein, 36 aa, Artificial Sequence; identical to SEQ ID NO: 17744
  GFR-binding peptide
  MOD_RES (1)..(1): Xaa is C or S
  MOD_RES (14)..(15)..(16)..(17)..(18): Xaa is A or G
  MOD_RES (19)..(20)..(21)..(22): Xaa is A or G or is absent

SEQ ID NO: 20849 - protein, 37 aa, Artificial Sequence; identical to SEQ ID NO: 17745
  GFR-binding peptide
  MOD_RES (34)..(34): Xaa is C or S
  MOD_RES (12)..(13)..(14)..(15)..(16): Xaa is A or G
  MOD_RES (17)..(18)..(19)..(20): Xaa is A or G or is absent

SEQ ID NO: 20850 - protein, 34 aa, Artificial Sequence; identical to SEQ ID NO: 17746
  GFR-binding peptide

SEQ ID NO: 20851 - protein, 38 aa, Artificial Sequence; identical to SEQ ID NO: 17747
  GFR-binding peptide
  MOD_RES (1)..(35): Xaa is C or S

SEQ ID NO: 20852 - protein, 44 aa, Artificial Sequence; identical to SEQ ID NO: 17748
  GFR-binding peptide
  MOD_RES (2)..(4)..(41): Xaa is C or S

SEQ ID NO: 20853 - protein, 33 aa, Artificial Sequence; identical to SEQ ID NO: 17749
  GFR-binding peptide
  MOD_RES (33)..(33): Xaa is C or S
  MOD_RES (11)..(12)..(13)..(14)..(15): Xaa is A or G
  MOD_RES (16)..(17)..(18)..(19): Xaa is A or G or is absent

SEQ ID NO: 20854 - protein, 39 aa, Artificial Sequence; identical to SEQ ID NO: 17750
  GFR-binding peptide
  MOD_RES (35)..(35): Xaa is C or S
  MOD_RES (11)..(12)..(13)..(14)..(15): Xaa is A or G
  MOD_RES (16)..(17)..(18)..(19): Xaa is A or G or is absent

SEQ ID NO: 20855 - protein, 42 aa, Artificial Sequence; identical to SEQ ID NO: 17751
  GFR-binding peptide
  MOD_RES (1)..(3)..(40): Xaa is C or S

SEQ ID NO: 20856 - protein, 36 aa, Artificial Sequence; identical to SEQ ID NO: 17752
  GFR-binding peptide
  MOD_RES (34)..(34): Xaa is C or S
  MOD_RES (12)..(13)..(14)..(15)..(16): Xaa is A or G
  MOD_RES (17)..(18)..(19)..(20): Xaa is A or G or is absent

SEQ ID NO: 20857 - protein, 43 aa, Artificial Sequence; identical to SEQ ID NO: 17753
  GFR-binding peptide
  MOD_RES (2)..(4)..(41): Xaa is C or S
  MOD_RES (17)..(18)..(19)..(20)..(21): Xaa is A or G
  MOD_RES (22)..(23)..(24)..(25): Xaa is A or G or is absent

SEQ ID NO: 20858 - protein, 42 aa, Artificial Sequence; identical to SEQ ID NO: 17754
  GFR-binding peptide
  MOD_RES (1)..(3)..(37): Xaa is C or S

SEQ ID NO: 20859 - protein, 37 aa, Artificial Sequence; identical to SEQ ID NO: 17755
  GFR-binding peptide
  MOD_RES (1)..(3)..(37): Xaa is C or S

SEQ ID NO: 20860 - protein, 41 aa, Artificial Sequence; identical to SEQ ID NO: 17756
  GFR-binding peptide
  MOD_RES (37)..(37): Xaa is C or S

SEQ ID NO: 20861 - protein, 38 aa, Artificial Sequence; identical to SEQ ID NO: 17757
  GFR-binding peptide
  MOD_RES (1)..(3): Xaa is C or S

SEQ ID NO: 20862 - protein, 36 aa, Artificial Sequence; identical to SEQ ID NO: 17758
  GFR-binding peptide
  MOD_RES (33)..(33): Xaa is C or S

SEQ ID NO: 20863 - protein, 37 aa, Artificial Sequence; identical to SEQ ID NO: 17759
  GFR-binding peptide
  MOD_RES (36)..(36): Xaa is C or S

SEQ ID NO: 20864 - protein, 41 aa, Artificial Sequence; identical to SEQ ID NO: 17760
  GFR-binding peptide
  MOD_RES (37)..(37): Xaa is C or S
  MOD_RES (13)..(14)..(15)..(16)..(17): Xaa is A or G
  MOD_RES (18)..(19)..(20)..(21): Xaa is A or G or is absent

SEQ ID NO: 20865 - protein, 39 aa, Artificial Sequence; identical to SEQ ID NO: 17761
  GFR-binding peptide
  MOD_RES (1)..(3): Xaa is C or S
  MOD_RES (16)..(17)..(18)..(19)..(20): Xaa is A or G
  MOD_RES (21)..(22)..(23)..(24): Xaa is A or G or is absent

SEQ ID NO: 20866 - protein, 43 aa, Artificial Sequence; identical to SEQ ID NO: 17762
  GFR-binding peptide
  MOD_RES (1)..(3)..(40): Xaa is C or S

SEQ ID NO: 20867 - protein, 36 aa, Artificial Sequence; identical to SEQ ID NO: 17763
  GFR-binding peptide
  MOD_RES (33)..(33): Xaa is C or S

SEQ ID NO: 20868 - protein, 41 aa, Artificial Sequence; identical to SEQ ID NO: 17764
  GFR-binding peptide
  MOD_RES (1)..(3)..(40): Xaa is C or S
  MOD_RES (16)..(17)..(18)..(19)..(20): Xaa is A or G
  MOD_RES (21)..(22)..(23)..(24): Xaa is A or G or is absent

SEQ ID NO: 20869 - protein, 36 aa, Artificial Sequence; identical to SEQ ID NO: 17765
  GFR-binding peptide
  MOD_RES (34)..(34): Xaa is C or S
  MOD_RES (12)..(13)..(14)..(15)..(16): Xaa is A or G
  MOD_RES (17)..(18)..(19)..(20): Xaa is A or G or is absent

SEQ ID NO: 20870 - protein, 35 aa, Artificial Sequence; identical to SEQ ID NO: 17766
  GFR-binding peptide
  MOD_RES (2)..(2): Xaa is C or S
  MOD_RES (14)..(15)..(16)..(17)..(18): Xaa is A or G
  MOD_RES (19)..(20)..(21)..(22): Xaa is A or G or is absent

SEQ ID NO: 20871 - protein, 36 aa, Artificial Sequence; identical to SEQ ID NO: 17767
  GFR-binding peptide
  MOD_RES (2)..(36): Xaa is C or S
  MOD_RES (14)..(15)..(16)..(17)..(18): Xaa is A or G
  MOD_RES (19)..(20)..(21)..(22): Xaa is A or G or is absent

SEQ ID NO: 20872 - protein, 39 aa, Artificial Sequence; identical to SEQ ID NO: 17768
  GFR-binding peptide
  MOD_RES (37)..(37): Xaa is C or S

SEQ ID NO: 20873 - protein, 41 aa, Artificial Sequence; identical to SEQ ID NO: 17769
  GFR-binding peptide
  MOD_RES (2)..(36): Xaa is C or S

SEQ ID NO: 20874 - protein, 38 aa, Artificial Sequence; identical to SEQ ID NO: 17770
  GFR-binding peptide
  MOD_RES (37)..(37): Xaa is C or S
  MOD_RES (13)..(14)..(15)..(16)..(17): Xaa is A or G
  MOD_RES (18)..(19)..(20)..(21): Xaa is A or G or is absent

SEQ ID NO: 20875 - protein, 36 aa, Artificial Sequence; identical to SEQ ID NO: 17771
  GFR-binding peptide
  MOD_RES (33)..(33): Xaa is C or S

SEQ ID NO: 20876 - protein, 36 aa, Artificial Sequence; identical to SEQ ID NO: 17772
  GFR-binding peptide
  MOD_RES (33)..(33): Xaa is C or S
  MOD_RES (11)..(12)..(13)..(14)..(15): Xaa is A or G
  MOD_RES (16)..(17)..(18)..(19): Xaa is A or G or is absent

SEQ ID NO: 20877 - protein, 35 aa, Artificial Sequence; identical to SEQ ID NO: 17773
  GFR-binding peptide
  MOD_RES (1)..(35): Xaa is C or S
  MOD_RES (13)..(14)..(15)..(16)..(17): Xaa is A or G
  MOD_RES (18)..(19)..(20)..(21): Xaa is A or G or is absent

SEQ ID NO: 20878 - protein, 40 aa, Artificial Sequence; identical to SEQ ID NO: 17774
  GFR-binding peptide
  MOD_RES (1)..(38): Xaa is C or S
  MOD_RES (14)..(15)..(16)..(17)..(18): Xaa is A or G
  MOD_RES (19)..(20)..(21)..(22): Xaa is A or G or is absent

SEQ ID NO: 20879 - protein, 43 aa, Artificial Sequence; identical to SEQ ID NO: 17775
  GFR-binding peptide
  MOD_RES (1)..(3)..(40): Xaa is C or S
  MOD_RES (16)..(17)..(18)..(19)..(20): Xaa is A or G
  MOD_RES (21)..(22)..(23)..(24): Xaa is A or G or is absent

SEQ ID NO: 20880 - protein, 38 aa, Artificial Sequence; identical to SEQ ID NO: 17776
  GFR-binding peptide
  MOD_RES (1)..(3)..(37): Xaa is C or S

SEQ ID NO: 20881 - protein, 34 aa, Artificial Sequence; identical to SEQ ID NO: 17777
  GFR-binding peptide
  MOD_RES (13)..(14)..(15)..(16)..(17): Xaa is A or G
  MOD_RES (18)..(19)..(20)..(21): Xaa is A or G or is absent

SEQ ID NO: 20882 - protein, 34 aa, Artificial Sequence; identical to SEQ ID NO: 17778
  GFR-binding peptide
  MOD_RES (1)..(1): Xaa is C or S

SEQ ID NO: 20883 - protein, 37 aa, Artificial Sequence; identical to SEQ ID NO: 17779
  GFR-binding peptide
  MOD_RES (36)..(36): Xaa is C or S

SEQ ID NO: 20884 - protein, 39 aa, Artificial Sequence; identical to SEQ ID NO: 17780
  GFR-binding peptide
  MOD_RES (1)..(38): Xaa is C or S

SEQ ID NO: 20885 - protein, 36 aa, Artificial Sequence; identical to SEQ ID NO: 17781
  GFR-binding peptide

SEQ ID NO: 20886 - protein, 35 aa, Artificial Sequence; identical to SEQ ID NO: 17782
  GFR-binding peptide
  MOD_RES (1)..(1): Xaa is C or S
  MOD_RES (14)..(15)..(16)..(17)..(18): Xaa is A or G
  MOD_RES (19)..(20)..(21)..(22): Xaa is A or G or is absent

SEQ ID NO: 20887 - protein, 44 aa, Artificial Sequence; identical to SEQ ID NO: 17783
  GFR-binding peptide
  MOD_RES (2)..(4)..(41): Xaa is C or S

SEQ ID NO: 20888 - protein, 36 aa, Artificial Sequence; identical to SEQ ID NO: 17784
  GFR-binding peptide
  MOD_RES (33)..(33): Xaa is C or S

SEQ ID NO: 20889 - protein, 40 aa, Artificial Sequence; identical to SEQ ID NO: 17785
  GFR-binding peptide
  MOD_RES (2)..(4)..(38): Xaa is C or S

SEQ ID NO: 20890 - protein, 43 aa, Artificial Sequence; identical to SEQ ID NO: 17786
  GFR-binding peptide
  MOD_RES (1)..(3)..(37): Xaa is C or S
  MOD_RES (15)..(16)..(17)..(18)..(19): Xaa is A or G
  MOD_RES (20)..(21)..(22)..(23): Xaa is A or G or is absent

SEQ ID NO: 20891 - protein, 38 aa, Artificial Sequence; identical to SEQ ID NO: 17787
  GFR-binding peptide
  MOD_RES (2)..(36): Xaa is C or S

SEQ ID NO: 20892 - protein, 37 aa, Artificial Sequence; identical to SEQ ID NO: 17788
  GFR-binding peptide
  MOD_RES (36)..(36): Xaa is C or S

SEQ ID NO: 20893 - protein, 37 aa, Artificial Sequence; identical to SEQ ID NO: 17789
  GFR-binding peptide
  MOD_RES (2)..(2): Xaa is C or S

SEQ ID NO: 20894 - protein, 34 aa, Artificial Sequence; identical to SEQ ID NO: 17790
  GFR-binding peptide
  MOD_RES (12)..(13)..(14)..(15)..(16): Xaa is A or G
  MOD_RES (17)..(18)..(19)..(20): Xaa is A or G or is absent

SEQ ID NO: 20895 - protein, 44 aa, Artificial Sequence; identical to SEQ ID NO: 17791
  GFR-binding peptide
  MOD_RES (2)..(4)..(38): Xaa is C or S

SEQ ID NO: 20896 - protein, 39 aa, Artificial Sequence; identical to SEQ ID NO: 17792
  GFR-binding peptide
  MOD_RES (1)..(3)..(37): Xaa is C or S
  MOD_RES (15)..(16)..(17)..(18)..(19): Xaa is A or G
  MOD_RES (20)..(21)..(22)..(23): Xaa is A or G or is absent

SEQ ID NO: 20897 - protein, 36 aa, Artificial Sequence; identical to SEQ ID NO: 17793
  GFR-binding peptide
  MOD_RES (36)..(36): Xaa is C or S

SEQ ID NO: 20898 - protein, 35 aa, Artificial Sequence; identical to SEQ ID NO: 17794
  GFR-binding peptide
  MOD_RES (35)..(35): Xaa is C or S

SEQ ID NO: 20899 - protein, 35 aa, Artificial Sequence; identical to SEQ ID NO: 17795
  GFR-binding peptide
  MOD_RES (2)..(2): Xaa is C or S
  MOD_RES (14)..(15)..(16)..(17)..(18): Xaa is A or G
  MOD_RES (19)..(20)..(21)..(22): Xaa is A or G or is absent

SEQ ID NO: 20900 - protein, 36 aa, Artificial Sequence; identical to SEQ ID NO: 17796
  GFR-binding peptide
  MOD_RES (33)..(33): Xaa is C or S
  MOD_RES (11)..(12)..(13)..(14)..(15): Xaa is A or G
  MOD_RES (16)..(17)..(18)..(19): Xaa is A or G or is absent

SEQ ID NO: 20901 - protein, 40 aa, Artificial Sequence; identical to SEQ ID NO: 17797
  GFR-binding peptide
  MOD_RES (34)..(34): Xaa is C or S
  MOD_RES (12)..(13)..(14)..(15)..(16): Xaa is A or G
  MOD_RES (17)..(18)..(19)..(20): Xaa is A or G or is absent

SEQ ID NO: 20902 - protein, 42 aa, Artificial Sequence; identical to SEQ ID NO: 17798
  GFR-binding peptide
  MOD_RES (2)..(36): Xaa is C or S
  MOD_RES (14)..(15)..(16)..(17)..(18): Xaa is A or G
  MOD_RES (19)..(20)..(21)..(22): Xaa is A or G or is absent

SEQ ID NO: 20903 - protein, 37 aa, Artificial Sequence; identical to SEQ ID NO: 17799
  GFR-binding peptide
  MOD_RES (1)..(1): Xaa is C or S

SEQ ID NO: 20904 - protein, 43 aa, Artificial Sequence; identical to SEQ ID NO: 17800
  GFR-binding peptide
  MOD_RES (2)..(4)..(41): Xaa is C or S

SEQ ID NO: 20905 - protein, 41 aa, Artificial Sequence; identical to SEQ ID NO: 17801
  GFR-binding peptide
  MOD_RES (1)..(3)..(40): Xaa is C or S

SEQ ID NO: 20906 - protein, 34 aa, Artificial Sequence; identical to SEQ ID NO: 17802
  GFR-binding peptide

SEQ ID NO: 20907 - protein, 37 aa, Artificial Sequence; identical to SEQ ID NO: 17803
  GFR-binding peptide
  MOD_RES (34)..(34): Xaa is C or S

SEQ ID NO: 20908 - protein, 37 aa, Artificial Sequence; identical to SEQ ID NO: 17804
  GFR-binding peptide
  MOD_RES (1)..(35): Xaa is C or S

SEQ ID NO: 20909 - protein, 37 aa, Artificial Sequence; identical to SEQ ID NO: 17805
  GFR-binding peptide
  MOD_RES (2)..(4): Xaa is C or S

SEQ ID NO: 20910 - protein, 40 aa, Artificial Sequence; identical to SEQ ID NO: 17806
  GFR-binding peptide
  MOD_RES (1)..(38): Xaa is C or S
  MOD_RES (14)..(15)..(16)..(17)..(18): Xaa is A or G
  MOD_RES (19)..(20)..(21)..(22): Xaa is A or G or is absent

SEQ ID NO: 20911 - protein, 42 aa, Artificial Sequence; identical to SEQ ID NO: 17807
  GFR-binding peptide
  MOD_RES (1)..(3)..(37): Xaa is C or S

SEQ ID NO: 20912 - protein, 34 aa, Artificial Sequence; identical to SEQ ID NO: 17808
  GFR-binding peptide

SEQ ID NO: 20913 - protein, 39 aa, Artificial Sequence; identical to SEQ ID NO: 17809
  GFR-binding peptide
  MOD_RES (1)..(3): Xaa is C or S

SEQ ID NO: 20914 - protein, 35 aa, Artificial Sequence; identical to SEQ ID NO: 17810
  GFR-binding peptide
  MOD_RES (35)..(35): Xaa is C or S

SEQ ID NO: 20915 - protein, 36 aa, Artificial Sequence; identical to SEQ ID NO: 17811
  GFR-binding peptide
  MOD_RES (33)..(33): Xaa is C or S

SEQ ID NO: 20916 - protein, 34 aa, Artificial Sequence; identical to SEQ ID NO: 17812
  GFR-binding peptide
  MOD_RES (11)..(12)..(13)..(14)..(15): Xaa is A or G
  MOD_RES (16)..(17)..(18)..(19): Xaa is A or G or is absent

SEQ ID NO: 20917 - protein, 38 aa, Artificial Sequence; identical to SEQ ID NO: 17813
  GFR-binding peptide
  MOD_RES (2)..(4)..(38): Xaa is C or S

SEQ ID NO: 20918 - protein, 38 aa, Artificial Sequence; identical to SEQ ID NO: 17814
  GFR-binding peptide
  MOD_RES (2)..(36): Xaa is C or S
  MOD_RES (14)..(15)..(16)..(17)..(18): Xaa is A or G
  MOD_RES (19)..(20)..(21)..(22): Xaa is A or G or is absent

SEQ ID NO: 20919 - protein, 43 aa, Artificial Sequence; identical to SEQ ID NO: 17815
  GFR-binding peptide
  MOD_RES (2)..(4)..(41): Xaa is C or S

SEQ ID NO: 20920 - protein, 42 aa, Artificial Sequence; identical to SEQ ID NO: 17816
  GFR-binding peptide
  MOD_RES (2)..(4)..(41): Xaa is C or S
  MOD_RES (17)..(18)..(19)..(20)..(21): Xaa is A or G
  MOD_RES (22)..(23)..(24)..(25): Xaa is A or G or is absent

SEQ ID NO: 20921 - protein, 38 aa, Artificial Sequence; identical to SEQ ID NO: 17817
  GFR-binding peptide
  MOD_RES (36)..(36): Xaa is C or S

SEQ ID NO: 20922 - protein, 40 aa, Artificial Sequence; identical to SEQ ID NO: 17818
  GFR-binding peptide
  MOD_RES (2)..(4)..(38): Xaa is C or S
  MOD_RES (16)..(17)..(18)..(19)..(20): Xaa is A or G
  MOD_RES (21)..(22)..(23)..(24): Xaa is A or G or is absent

SEQ ID NO: 20923 - protein, 35 aa, Artificial Sequence; identical to SEQ ID NO: 17819
  GFR-binding peptide

SEQ ID NO: 20924 - protein, 42 aa, Artificial Sequence; identical to SEQ ID NO: 17820
  GFR-binding peptide
  MOD_RES (2)..(39): Xaa is C or S

SEQ ID NO: 20925 - protein, 42 aa, Artificial Sequence; identical to SEQ ID NO: 17821
  GFR-binding peptide
  MOD_RES (1)..(38): Xaa is C or S
  MOD_RES (14)..(15)..(16)..(17)..(18): Xaa is A or G
  MOD_RES (19)..(20)..(21)..(22): Xaa is A or G or is absent

SEQ ID NO: 20926 - protein, 39 aa, Artificial Sequence; identical to SEQ ID NO: 17822
  GFR-binding peptide
  MOD_RES (2)..(39): Xaa is C or S

SEQ ID NO: 20927 - protein, 38 aa, Artificial Sequence; identical to SEQ ID NO: 17823
  GFR-binding peptide
  MOD_RES (1)..(38): Xaa is C or S
  MOD_RES (14)..(15)..(16)..(17)..(18): Xaa is A or G
  MOD_RES (19)..(20)..(21)..(22): Xaa is A or G or is absent

SEQ ID NO: 20928 - protein, 43 aa, Artificial Sequence; identical to SEQ ID NO: 17824
  GFR-binding peptide
  MOD_RES (1)..(3)..(37): Xaa is C or S
  MOD_RES (15)..(16)..(17)..(18)..(19): Xaa is A or G
  MOD_RES (20)..(21)..(22)..(23): Xaa is A or G or is absent

SEQ ID NO: 20929 - protein, 41 aa, Artificial Sequence; identical to SEQ ID NO: 17825
  GFR-binding peptide
  MOD_RES (2)..(4)..(41): Xaa is C or S

SEQ ID NO: 20930 - protein, 44 aa, Artificial Sequence; identical to SEQ ID NO: 17826
  GFR-binding peptide
  MOD_RES (2)..(4)..(41): Xaa is C or S
  MOD_RES (17)..(18)..(19)..(20)..(21): Xaa is A or G
  MOD_RES (22)..(23)..(24)..(25): Xaa is A or G or is absent

SEQ ID NO: 20931 - protein, 40 aa, Artificial Sequence; identical to SEQ ID NO: 17827
  GFR-binding peptide
  MOD_RES (2)..(36): Xaa is C or S
  MOD_RES (14)..(15)..(16)..(17)..(18): Xaa is A or G
  MOD_RES (19)..(20)..(21)..(22): Xaa is A or G or is absent

SEQ ID NO: 20932 - protein, 39 aa, Artificial Sequence; identical to SEQ ID NO: 17828
  GFR-binding peptide
  MOD_RES (2)..(39): Xaa is C or S

SEQ ID NO: 20933 - protein, 38 aa, Artificial Sequence; identical to SEQ ID NO: 17829
  GFR-binding peptide
  MOD_RES (1)..(38): Xaa is C or S
  MOD_RES (14)..(15)..(16)..(17)..(18): Xaa is A or G
  MOD_RES (19)..(20)..(21)..(22): Xaa is A or G or is absent

SEQ ID NO: 20934 - protein, 42 aa, Artificial Sequence; identical to SEQ ID NO: 17830
  GFR-binding peptide
  MOD_RES (2)..(39): Xaa is C or S

SEQ ID NO: 20935 - protein, 41 aa, Artificial Sequence; identical to SEQ ID NO: 17831
  GFR-binding peptide
  MOD_RES (2)..(4)..(38): Xaa is C or S
  MOD_RES (16)..(17)..(18)..(19)..(20): Xaa is A or G
  MOD_RES (21)..(22)..(23)..(24): Xaa is A or G or is absent

SEQ ID NO: 20936 - protein, 42 aa, Artificial Sequence; identical to SEQ ID NO: 17832
  GFR-binding peptide
  MOD_RES (2)..(4)..(38): Xaa is C or S

SEQ ID NO: 20937 - protein, 38 aa, Artificial Sequence; identical to SEQ ID NO: 17833
  GFR-binding peptide
  MOD_RES (2)..(4)..(38): Xaa is C or S
  MOD_RES (16)..(17)..(18)..(19)..(20): Xaa is A or G
  MOD_RES (21)..(22)..(23)..(24): Xaa is A or G or is absent

SEQ ID NO: 20938 - protein, 37 aa, Artificial Sequence; identical to SEQ ID NO: 17834
  GFR-binding peptide
  MOD_RES (1)..(1): Xaa is C or S

SEQ ID NO: 20939 - protein, 36 aa, Artificial Sequence; identical to SEQ ID NO: 17835
  GFR-binding peptide
  MOD_RES (33)..(33): Xaa is C or S

SEQ ID NO: 20940 - protein, 39 aa, Artificial Sequence; identical to SEQ ID NO: 17836
  GFR-binding peptide
  MOD_RES (34)..(34): Xaa is C or S
  MOD_RES (12)..(13)..(14)..(15)..(16): Xaa is A or G
  MOD_RES (17)..(18)..(19)..(20): Xaa is A or G or is absent

SEQ ID NO: 20941 - protein, 39 aa, Artificial Sequence; identical to SEQ ID NO: 17837
  GFR-binding peptide
  MOD_RES (2)..(4)..(38): Xaa is C or S

SEQ ID NO: 20942 - protein, 41 aa, Artificial Sequence; identical to SEQ ID NO: 17838
  GFR-binding peptide
  MOD_RES (1)..(3)..(40): Xaa is C or S

SEQ ID NO: 20943 - protein, 34 aa, Artificial Sequence; identical to SEQ ID NO: 17839
  GFR-binding peptide
  MOD_RES (11)..(12)..(13)..(14)..(15): Xaa is A or G
  MOD_RES (16)..(17)..(18)..(19): Xaa is A or G or is absent

SEQ ID NO: 20944 - protein, 37 aa, Artificial Sequence; identical to SEQ ID NO: 17840
  GFR-binding peptide
  MOD_RES (2)..(36): Xaa is C or S
  MOD_RES (14)..(15)..(16)..(17)..(18): Xaa is A or G
  MOD_RES (19)..(20)..(21)..(22): Xaa is A or G or is absent

SEQ ID NO: 20945 - protein, 44 aa, Artificial Sequence; identical to SEQ ID NO: 17841
  GFR-binding peptide
  MOD_RES (2)..(4)..(38): Xaa is C or S
  MOD_RES (16)..(17)..(18)..(19)..(20): Xaa is A or G
  MOD_RES (21)..(22)..(23)..(24): Xaa is A or G or is absent

SEQ ID NO: 20946 - protein, 40 aa, Artificial Sequence; identical to SEQ ID NO: 17842
  GFR-binding peptide
  MOD_RES (1)..(3)..(40): Xaa is C or S
  MOD_RES (16)..(17)..(18)..(19)..(20): Xaa is A or G
  MOD_RES (21)..(22)..(23)..(24): Xaa is A or G or is absent

SEQ ID NO: 20947 - protein, 40 aa, Artificial Sequence; identical to SEQ ID NO: 17843
  GFR-binding peptide
  MOD_RES (37)..(37): Xaa is C or S

SEQ ID NO: 20948 - protein, 39 aa, Artificial Sequence; identical to SEQ ID NO: 17844
  GFR-binding peptide
  MOD_RES (34)..(34): Xaa is C or S
  MOD_RES (12)..(13)..(14)..(15)..(16): Xaa is A or G
  MOD_RES (17)..(18)..(19)..(20): Xaa is A or G or is absent

SEQ ID NO: 20949 - protein, 37 aa, Artificial Sequence; identical to SEQ ID NO: 17845
  GFR-binding peptide
  MOD_RES (2)..(4): Xaa is C or S
  MOD_RES (16)..(17)..(18)..(19)..(20): Xaa is A or G
  MOD_RES (21)..(22)..(23)..(24): Xaa is A or G or is absent

SEQ ID NO: 20950 - protein, 34 aa, Artificial Sequence; identical to SEQ ID NO: 17846
  GFR-binding peptide
  MOD_RES (13)..(14)..(15)..(16)..(17): Xaa is A or G
  MOD_RES (18)..(19)..(20)..(21): Xaa is A or G or is absent

SEQ ID NO: 20951 - protein, 36 aa, Artificial Sequence; identical to SEQ ID NO: 17847
  GFR-binding peptide
  MOD_RES (13)..(14)..(15)..(16)..(17): Xaa is A or G
  MOD_RES (18)..(19)..(20)..(21): Xaa is A or G or is absent

SEQ ID NO: 20952 - protein, 34 aa, Artificial Sequence; identical to SEQ ID NO: 17848
  GFR-binding peptide
  MOD_RES (34)..(34): Xaa is C or S
  MOD_RES (12)..(13)..(14)..(15)..(16): Xaa is A or G
  MOD_RES (17)..(18)..(19)..(20): Xaa is A or G or is absent

SEQ ID NO: 20953 - protein, 40 aa, Artificial Sequence; identical to SEQ ID NO: 17849
  GFR-binding peptide
  MOD_RES (1)..(3)..(40): Xaa is C or S
  MOD_RES (16)..(17)..(18)..(19)..(20): Xaa is A or G
  MOD_RES (21)..(22)..(23)..(24): Xaa is A or G or is absent

SEQ ID NO: 20954 - protein, 38 aa, Artificial Sequence; identical to SEQ ID NO: 17850
  GFR-binding peptide
  MOD_RES (34)..(34): Xaa is C or S

SEQ ID NO: 20955 - protein, 37 aa, Artificial Sequence; identical to SEQ ID NO: 17851
  GFR-binding peptide
  MOD_RES (34)..(34): Xaa is C or S

SEQ ID NO: 20956 - protein, 35 aa, Artificial Sequence; identical to SEQ ID NO: 17852
  GFR-binding peptide

SEQ ID NO: 20957 - protein, 36 aa, Artificial Sequence; identical to SEQ ID NO: 17853
  GFR-binding peptide
  MOD_RES (13)..(14)..(15)..(16)..(17): Xaa is A or G
  MOD_RES (18)..(19)..(20)..(21): Xaa is A or G or is absent

SEQ ID NO: 20958 - protein, 32 aa, Artificial Sequence; identical to SEQ ID NO: 17854
  GFR-binding peptide

SEQ ID NO: 20959 - protein, 38 aa, Artificial Sequence; identical to SEQ ID NO: 17855
  GFR-binding peptide
  MOD_RES (1)..(3): Xaa is C or S
  MOD_RES (16)..(17)..(18)..(19)..(20): Xaa is A or G
  MOD_RES (21)..(22)..(23)..(24): Xaa is A or G or is absent

SEQ ID NO: 20960 - protein, 40 aa, Artificial Sequence; identical to SEQ ID NO: 17856
  GFR-binding peptide
  MOD_RES (34)..(34): Xaa is C or S

SEQ ID NO: 20961 - protein, 41 aa, Artificial Sequence; identical to SEQ ID NO: 17857
  GFR-binding peptide
  MOD_RES (1)..(3)..(40): Xaa is C or S
  MOD_RES (16)..(17)..(18)..(19)..(20): Xaa is A or G
  MOD_RES (21)..(22)..(23)..(24): Xaa is A or G or is absent

SEQ ID NO: 20962 - protein, 39 aa, Artificial Sequence; identical to SEQ ID NO: 17858
  GFR-binding peptide
  MOD_RES (36)..(36): Xaa is C or S
  MOD_RES (12)..(13)..(14)..(15)..(16): Xaa is A or G
  MOD_RES (17)..(18)..(19)..(20): Xaa is A or G or is absent

SEQ ID NO: 20963 - protein, 41 aa, Artificial Sequence; identical to SEQ ID NO: 17859
  GFR-binding peptide
  MOD_RES (1)..(3)..(37): Xaa is C or S

SEQ ID NO: 20964 - protein, 36 aa, Artificial Sequence; identical to SEQ ID NO: 17860
  GFR-binding peptide
  MOD_RES (2)..(36): Xaa is C or S
  MOD_RES (14)..(15)..(16)..(17)..(18): Xaa is A or G
  MOD_RES (19)..(20)..(21)..(22): Xaa is A or G or is absent

SEQ ID NO: 20965 - protein, 35 aa, Artificial Sequence; identical to SEQ ID NO: 17861
  GFR-binding peptide
  MOD_RES (1)..(35): Xaa is C or S

SEQ ID NO: 20966 - protein, 32 aa, Artificial Sequence; identical to SEQ ID NO: 17862
  GFR-binding peptide

SEQ ID NO: 20967 - protein, 42 aa, Artificial Sequence; identical to SEQ ID NO: 17863
  GFR-binding peptide
  MOD_RES (1)..(38): Xaa is C or S

SEQ ID NO: 20968 - protein, 36 aa, Artificial Sequence; identical to SEQ ID NO: 17864
  GFR-binding peptide
  MOD_RES (34)..(34): Xaa is C or S

SEQ ID NO: 20969 - protein, 35 aa, Artificial Sequence; identical to SEQ ID NO: 17865
  GFR-binding peptide
  MOD_RES (34)..(34): Xaa is C or S

SEQ ID NO: 20970 - protein, 33 aa, Artificial Sequence; identical to SEQ ID NO: 17866
  GFR-binding peptide
  MOD_RES (12)..(13)..(14)..(15)..(16): Xaa is A or G
  MOD_RES (17)..(18)..(19)..(20): Xaa is A or G or is absent

SEQ ID NO: 20971 - protein, 35 aa, Artificial Sequence; identical to SEQ ID NO: 17867
  GFR-binding peptide
  MOD_RES (33)..(33): Xaa is C or S
  MOD_RES (11)..(12)..(13)..(14)..(15): Xaa is A or G
  MOD_RES (16)..(17)..(18)..(19): Xaa is A or G or is absent

SEQ ID NO: 20972 - protein, 40 aa, Artificial Sequence; identical to SEQ ID NO: 17868
  GFR-binding peptide
  MOD_RES (1)..(3)..(40): Xaa is C or S
  MOD_RES (16)..(17)..(18)..(19)..(20): Xaa is A or G
  MOD_RES (21)..(22)..(23)..(24): Xaa is A or G or is absent

SEQ ID NO: 20973 - protein, 37 aa, Artificial Sequence; identical to SEQ ID NO: 17869
  GFR-binding peptide
  MOD_RES (1)..(3): Xaa is C or S

SEQ ID NO: 20974 - protein, 37 aa, Artificial Sequence; identical to SEQ ID NO: 17870
  GFR-binding peptide
  MOD_RES (33)..(33): Xaa is C or S
  MOD_RES (11)..(12)..(13)..(14)..(15): Xaa is A or G
  MOD_RES (16)..(17)..(18)..(19): Xaa is A or G or is absent

SEQ ID NO: 20975 - protein, 43 aa, Artificial Sequence; identical to SEQ ID NO: 17871
  GFR-binding peptide
  MOD_RES (2)..(4)..(38): Xaa is C or S

SEQ ID NO: 20976 - protein, 38 aa, Artificial Sequence; identical to SEQ ID NO: 17872
  GFR-binding peptide
  MOD_RES (33)..(33): Xaa is C or S
  MOD_RES (11)..(12)..(13)..(14)..(15): Xaa is A or G
  MOD_RES (16)..(17)..(18)..(19): Xaa is A or G or is absent

SEQ ID NO: 20977 - protein, 33 aa, Artificial Sequence; identical to SEQ ID NO: 17873
  GFR-binding peptide

SEQ ID NO: 20978 - protein, 42 aa, Artificial Sequence; identical to SEQ ID NO: 17874
  GFR-binding peptide
  MOD_RES (1)..(38): Xaa is C or S

SEQ ID NO: 20979 - protein, 40 aa, Artificial Sequence; identical to SEQ ID NO: 17875
  GFR-binding peptide
  MOD_RES (36)..(36): Xaa is C or S

SEQ ID NO: 20980 - protein, 38 aa, Artificial Sequence; identical to SEQ ID NO: 17876
  GFR-binding peptide
  MOD_RES (2)..(4)..(38): Xaa is C or S
  MOD_RES (16)..(17)..(18)..(19)..(20): Xaa is A or G
  MOD_RES (21)..(22)..(23)..(24): Xaa is A or G or is absent

SEQ ID NO: 20981 - protein, 35 aa, Artificial Sequence; identical to SEQ ID NO: 17877
  GFR-binding peptide

SEQ ID NO: 20982 - protein, 36 aa, Artificial Sequence; identical to SEQ ID NO: 17878
  GFR-binding peptide
  MOD_RES (35)..(35): Xaa is C or S

SEQ ID NO: 20983 - protein, 38 aa, Artificial Sequence; identical to SEQ ID NO: 17879
  GFR-binding peptide
  MOD_RES (2)..(4)..(38): Xaa is C or S
  MOD_RES (16)..(17)..(18)..(19)..(20): Xaa is A or G
  MOD_RES (21)..(22)..(23)..(24): Xaa is A or G or is absent

SEQ ID NO: 20984 - protein, 41 aa, Artificial Sequence; identical to SEQ ID NO: 17880
  GFR-binding peptide
  MOD_RES (1)..(38): Xaa is C or S

SEQ ID NO: 20985 - protein, 33 aa, Artificial Sequence; identical to SEQ ID NO: 17881
  GFR-binding peptide
  MOD_RES (33)..(33): Xaa is C or S
  MOD_RES (11)..(12)..(13)..(14)..(15): Xaa is A or G
  MOD_RES (16)..(17)..(18)..(19): Xaa is A or G or is absent

SEQ ID NO: 20986 - protein, 35 aa, Artificial Sequence; identical to SEQ ID NO: 17882
  GFR-binding peptide

SEQ ID NO: 20987 - protein, 38 aa, Artificial Sequence; identical to SEQ ID NO: 17883
  GFR-binding peptide
  MOD_RES (1)..(35): Xaa is C or S
  MOD_RES (13)..(14)..(15)..(16)..(17): Xaa is A or G
  MOD_RES (18)..(19)..(20)..(21): Xaa is A or G or is absent

SEQ ID NO: 20988 - protein, 39 aa, Artificial Sequence; identical to SEQ ID NO: 17884
  GFR-binding peptide
  MOD_RES (1)..(3)..(37): Xaa is C or S

SEQ ID NO: 20989 - protein, 33 aa, Artificial Sequence; identical to SEQ ID NO: 17885
  GFR-binding peptide

SEQ ID NO: 20990 - protein, 37 aa, Artificial Sequence; identical to SEQ ID NO: 17886
  GFR-binding peptide
  MOD_RES (1)..(3): Xaa is C or S

SEQ ID NO: 20991 - protein, 34 aa, Artificial Sequence; identical to SEQ ID NO: 17887
  GFR-binding peptide
  MOD_RES (33)..(33): Xaa is C or S
  MOD_RES (11)..(12)..(13)..(14)..(15): Xaa is A or G
  MOD_RES (16)..(17)..(18)..(19): Xaa is A or G or is absent

SEQ ID NO: 20992 - protein, 39 aa, Artificial Sequence; identical to SEQ ID NO: 17888
  GFR-binding peptide
  MOD_RES (2)..(39): Xaa is C or S
  MOD_RES (15)..(16)..(17)..(18)..(19): Xaa is A or G
  MOD_RES (20)..(21)..(22)..(23): Xaa is A or G or is absent

SEQ ID NO: 20993 - protein, 37 aa, Artificial Sequence; identical to SEQ ID NO: 17889
  GFR-binding peptide
  MOD_RES (2)..(2): Xaa is C or S
  MOD_RES (15)..(16)..(17)..(18)..(19): Xaa is A or G
  MOD_RES (20)..(21)..(22)..(23): Xaa is A or G or is absent

SEQ ID NO: 20994 - protein, 39 aa, Artificial Sequence; identical to SEQ ID NO: 17890
  GFR-binding peptide
  MOD_RES (1)..(38): Xaa is C or S

SEQ ID NO: 20995 - protein, 38 aa, Artificial Sequence; identical to SEQ ID NO: 17891
  GFR-binding peptide
  MOD_RES (2)..(36): Xaa is C or S

SEQ ID NO: 20996 - protein, 36 aa, Artificial Sequence; identical to SEQ ID NO: 17892
  GFR-binding peptide
  MOD_RES (1)..(3): Xaa is C or S

SEQ ID NO: 20997 - protein, 37 aa, Artificial Sequence; identical to SEQ ID NO: 17893
  GFR-binding peptide
  MOD_RES (1)..(3): Xaa is C or S

SEQ ID NO: 20998 - protein, 43 aa, Artificial Sequence; identical to SEQ ID NO: 17894
  GFR-binding peptide
  MOD_RES (2)..(4)..(38): Xaa is C or S

SEQ ID NO: 20999 - protein, 37 aa, Artificial Sequence; identical to SEQ ID NO: 17895
  GFR-binding peptide
  MOD_RES (37)..(37): Xaa is C or S

SEQ ID NO: 21000 - protein, 33 aa, Artificial Sequence; identical to SEQ ID NO: 17896
  GFR-binding peptide
  MOD_RES (12)..(13)..(14)..(15)..(16): Xaa is A or G
  MOD_RES (17)..(18)..(19)..(20): Xaa is A or G or is absent

SEQ ID NO: 21001 - protein, 37 aa, Artificial Sequence; identical to SEQ ID NO: 17897
  GFR-binding peptide
  MOD_RES (1)..(3)..(37): Xaa is C or S
  MOD_RES (15)..(16)..(17)..(18)..(19): Xaa is A or G
  MOD_RES (20)..(21)..(22)..(23): Xaa is A or G or is absent

SEQ ID NO: 21002 - protein, 42 aa, Artificial Sequence; identical to SEQ ID NO: 17898
  GFR-binding peptide
  MOD_RES (1)..(38): Xaa is C or S
  MOD_RES (14)..(15)..(16)..(17)..(18): Xaa is A or G
  MOD_RES (19)..(20)..(21)..(22): Xaa is A or G or is absent

SEQ ID NO: 21003 - protein, 43 aa, Artificial Sequence; identical to SEQ ID NO: 17899
  GFR-binding peptide
  MOD_RES (1)..(3)..(37): Xaa is C or S

SEQ ID NO: 21004 - protein, 39 aa, Artificial Sequence; identical to SEQ ID NO: 17900
  GFR-binding peptide
  MOD_RES (33)..(33): Xaa is C or S
  MOD_RES (11)..(12)..(13)..(14)..(15): Xaa is A or G
  MOD_RES (16)..(17)..(18)..(19): Xaa is A or G or is absent

SEQ ID NO: 21005 - protein, 38 aa, Artificial Sequence; identical to SEQ ID NO: 17901
  GFR-binding peptide
  MOD_RES (1)..(38): Xaa is C or S

SEQ ID NO: 21006 - protein, 35 aa, Artificial Sequence; identical to SEQ ID NO: 17902
  GFR-binding peptide

SEQ ID NO: 21007 - protein, 37 aa, Artificial Sequence; identical to SEQ ID NO: 17903
  GFR-binding peptide
  MOD_RES (2)..(4): Xaa is C or S
  MOD_RES (16)..(17)..(18)..(19)..(20): Xaa is A or G
  MOD_RES (21)..(22)..(23)..(24): Xaa is A or G or is absent

SEQ ID NO: 21008 - protein, 32 aa, Artificial Sequence; identical to SEQ ID NO: 17904
  GFR-binding peptide
  MOD_RES (11)..(12)..(13)..(14)..(15): Xaa is A or G
  MOD_RES (16)..(17)..(18)..(19): Xaa is A or G or is absent

SEQ ID NO: 21009 - protein, 43 aa, Artificial Sequence; identical to SEQ ID NO: 17905
  GFR-binding peptide
  MOD_RES (2)..(39): Xaa is C or S

SEQ ID NO: 21010 - protein, 38 aa, Artificial Sequence; identical to SEQ ID NO: 17906
  GFR-binding peptide
  MOD_RES (36)..(36): Xaa is C or S

SEQ ID NO: 21011 - protein, 42 aa, Artificial Sequence; identical to SEQ ID NO: 17907
  GFR-binding peptide
  MOD_RES (1)..(38): Xaa is C or S
  MOD_RES (14)..(15)..(16)..(17)..(18): Xaa is A or G
  MOD_RES (19)..(20)..(21)..(22): Xaa is A or G or is absent

SEQ ID NO: 21012 - protein, 34 aa, Artificial Sequence; identical to SEQ ID NO: 17908
  GFR-binding peptide

SEQ ID NO: 21013 - protein, 38 aa, Artificial Sequence; identical to SEQ ID NO: 17909
  GFR-binding peptide
  MOD_RES (37)..(37): Xaa is C or S
  MOD_RES (13)..(14)..(15)..(16)..(17): Xaa is A or G
  MOD_RES (18)..(19)..(20)..(21): Xaa is A or G or is absent

SEQ ID NO: 21014 - protein, 35 aa, Artificial Sequence; identical to SEQ ID NO: 17910
  GFR-binding peptide
  MOD_RES (1)..(35): Xaa is C or S
  MOD_RES (13)..(14)..(15)..(16)..(17): Xaa is A or G
  MOD_RES (18)..(19)..(20)..(21): Xaa is A or G or is absent

SEQ ID NO: 21015 - protein, 44 aa, Artificial Sequence; identical to SEQ ID NO: 17911
  GFR-binding peptide
  MOD_RES (2)..(4)..(41): Xaa is C or S
  MOD_RES (17)..(18)..(19)..(20)..(21): Xaa is A or G
  MOD_RES (22)..(23)..(24)..(25): Xaa is A or G or is absent

SEQ ID NO: 21016 - protein, 39 aa, Artificial Sequence; identical to SEQ ID NO: 17912
  GFR-binding peptide
  MOD_RES (35)..(35): Xaa is C or S
  MOD_RES (11)..(12)..(13)..(14)..(15): Xaa is A or G
  MOD_RES (16)..(17)..(18)..(19): Xaa is A or G or is absent

SEQ ID NO: 21017 - protein, 40 aa, Artificial Sequence; identical to SEQ ID NO: 17913
  GFR-binding peptide
  MOD_RES (34)..(34): Xaa is C or S
  MOD_RES (12)..(13)..(14)..(15)..(16): Xaa is A or G
  MOD_RES (17)..(18)..(19)..(20): Xaa is A or G or is absent

SEQ ID NO: 21018 - protein, 34 aa, Artificial Sequence; identical to SEQ ID NO: 17914
  GFR-binding peptide
  MOD_RES (12)..(13)..(14)..(15)..(16): Xaa is A or G
  MOD_RES (17)..(18)..(19)..(20): Xaa is A or G or is absent

SEQ ID NO: 21019 - protein, 39 aa, Artificial Sequence; identical to SEQ ID NO: 17915
  GFR-binding peptide
  MOD_RES (33)..(33): Xaa is C or S

SEQ ID NO: 21020 - protein, 42 aa, Artificial Sequence; identical to SEQ ID NO: 17916
  GFR-binding peptide
  MOD_RES (2)..(39): Xaa is C or S
  MOD_RES (15)..(16)..(17)..(18)..(19): Xaa is A or G
  MOD_RES (20)..(21)..(22)..(23): Xaa is A or G or is absent

SEQ ID NO: 21021 - protein, 33 aa, Artificial Sequence; identical to SEQ ID NO: 17917
  GFR-binding peptide
  MOD_RES (33)..(33): Xaa is C or S

SEQ ID NO: 21022 - protein, 44 aa, Artificial Sequence; identical to SEQ ID NO: 17918
  GFR-binding peptide
  MOD_RES (1)..(3)..(40): Xaa is C or S

SEQ ID NO: 21023 - protein, 32 aa, Artificial Sequence; identical to SEQ ID NO: 17919
  GFR-binding peptide
  MOD_RES (11)..(12)..(13)..(14)..(15): Xaa is A or G
  MOD_RES (16)..(17)..(18)..(19): Xaa is A or G or is absent

SEQ ID NO: 21024 - protein, 40 aa, Artificial Sequence; identical to SEQ ID NO: 17920
  GFR-binding peptide
  MOD_RES (2)..(36): Xaa is C or S

SEQ ID NO: 21025 - protein, 39 aa, Artificial Sequence; identical to SEQ ID NO: 17921
  GFR-binding peptide
  MOD_RES (1)..(3)..(37): Xaa is C or S

SEQ ID NO: 21026 - protein, 37 aa, Artificial Sequence; identical to SEQ ID NO: 17922
  GFR-binding peptide
  MOD_RES (2)..(2): Xaa is C or S
  MOD_RES (15)..(16)..(17)..(18)..(19): Xaa is A or G
  MOD_RES (20)..(21)..(22)..(23): Xaa is A or G or is absent

SEQ ID NO: 21027 - protein, 33 aa, Artificial Sequence; identical to SEQ ID NO: 17923
  GFR-binding peptide
  MOD_RES (12)..(13)..(14)..(15)..(16): Xaa is A or G
  MOD_RES (17)..(18)..(19)..(20): Xaa is A or G or is absent

SEQ ID NO: 21028 - protein, 37 aa, Artificial Sequence; identical to SEQ ID NO: 17924
  GFR-binding peptide
  MOD_RES (33)..(33): Xaa is C or S
  MOD_RES (11)..(12)..(13)..(14)..(15): Xaa is A or G
  MOD_RES (16)..(17)..(18)..(19): Xaa is A or G or is absent

SEQ ID NO: 21029 - protein, 41 aa, Artificial Sequence; identical to SEQ ID NO: 17925
  GFR-binding peptide
  MOD_RES (2)..(4)..(41): Xaa is C or S
  MOD_RES (17)..(18)..(19)..(20)..(21): Xaa is A or G
  MOD_RES (22)..(23)..(24)..(25): Xaa is A or G or is absent

SEQ ID NO: 21030 - protein, 38 aa, Artificial Sequence; identical to SEQ ID NO: 17926
  GFR-binding peptide
  MOD_RES (2)..(2): Xaa is C or S
  MOD_RES (15)..(16)..(17)..(18)..(19): Xaa is A or G
  MOD_RES (20)..(21)..(22)..(23): Xaa is A or G or is absent

SEQ ID NO: 21031 - protein, 38 aa, Artificial Sequence; identical to SEQ ID NO: 17927
  GFR-binding peptide
  MOD_RES (1)..(3): Xaa is C or S
  MOD_RES (16)..(17)..(18)..(19)..(20): Xaa is A or G
  MOD_RES (21)..(22)..(23)..(24): Xaa is A or G or is absent

SEQ ID NO: 21032 - protein, 33 aa, Artificial Sequence; identical to SEQ ID NO: 17928
  GFR-binding peptide

SEQ ID NO: 21033 - protein, 41 aa, Artificial Sequence; identical to SEQ ID NO: 17929
  GFR-binding peptide
  MOD_RES (1)..(38): Xaa is C or S
  MOD_RES (14)..(15)..(16)..(17)..(18): Xaa is A or G
  MOD_RES (19)..(20)..(21)..(22): Xaa is A or G or is absent

SEQ ID NO: 21034 - protein, 37 aa, Artificial Sequence; identical to SEQ ID NO: 17930
  GFR-binding peptide
  MOD_RES (34)..(34): Xaa is C or S
  MOD_RES (12)..(13)..(14)..(15)..(16): Xaa is A or G
  MOD_RES (17)..(18)..(19)..(20): Xaa is A or G or is absent

SEQ ID NO: 21035 - protein, 40 aa, Artificial Sequence; identical to SEQ ID NO: 17931
  GFR-binding peptide
  MOD_RES (2)..(36): Xaa is C or S

SEQ ID NO: 21036 - protein, 36 aa, Artificial Sequence; identical to SEQ ID NO: 17932
  GFR-binding peptide
  MOD_RES (1)..(1): Xaa is C or S

SEQ ID NO: 21037 - protein, 40 aa, Artificial Sequence; identical to SEQ ID NO: 17933
  GFR-binding peptide
  MOD_RES (37)..(37): Xaa is C or S
  MOD_RES (13)..(14)..(15)..(16)..(17): Xaa is A or G
  MOD_RES (18)..(19)..(20)..(21): Xaa is A or G or is absent

SEQ ID NO: 21038 - protein, 39 aa, Artificial Sequence; identical to SEQ ID NO: 17934
  GFR-binding peptide
  MOD_RES (1)..(3)..(37): Xaa is C or S

SEQ ID NO: 21039 - protein, 39 aa, Artificial Sequence; identical to SEQ ID NO: 17935
  GFR-binding peptide
  MOD_RES (2)..(4)..(38): Xaa is C or S

SEQ ID NO: 21040 - protein, 38 aa, Artificial Sequence; identical to SEQ ID NO: 17936
  GFR-binding peptide
  MOD_RES (33)..(33): Xaa is C or S

SEQ ID NO: 21041 - protein, 39 aa, Artificial Sequence; identical to SEQ ID NO: 17937
  GFR-binding peptide
  MOD_RES (37)..(37): Xaa is C or S
  MOD_RES (13)..(14)..(15)..(16)..(17): Xaa is A or G
  MOD_RES (18)..(19)..(20)..(21): Xaa is A or G or is absent

SEQ ID NO: 21042 - protein, 43 aa, Artificial Sequence; identical to SEQ ID NO: 17938
  GFR-binding peptide
  MOD_RES (2)..(4)..(38): Xaa is C or S
  MOD_RES (16)..(17)..(18)..(19)..(20): Xaa is A or G
  MOD_RES (21)..(22)..(23)..(24): Xaa is A or G or is absent

SEQ ID NO: 21043 - protein, 41 aa, Artificial Sequence; identical to SEQ ID NO: 17939
  GFR-binding peptide
  MOD_RES (2)..(36): Xaa is C or S

SEQ ID NO: 21044 - protein, 34 aa, Artificial Sequence; identical to SEQ ID NO: 17940
  GFR-binding peptide
  MOD_RES (11)..(12)..(13)..(14)..(15): Xaa is A or G
  MOD_RES (16)..(17)..(18)..(19): Xaa is A or G or is absent

SEQ ID NO: 21045 - protein, 41 aa, Artificial Sequence; identical to SEQ ID NO: 17941
  GFR-binding peptide
  MOD_RES (2)..(4)..(41): Xaa is C or S
  MOD_RES (17)..(18)..(19)..(20)..(21): Xaa is A or G
  MOD_RES (22)..(23)..(24)..(25): Xaa is A or G or is absent

SEQ ID NO: 21046 - protein, 36 aa, Artificial Sequence; identical to SEQ ID NO: 17942
  GFR-binding peptide
  MOD_RES (1)..(3): Xaa is C or S

SEQ ID NO: 21047 - protein, 40 aa, Artificial Sequence; identical to SEQ ID NO: 17943
  GFR-binding peptide
  MOD_RES (2)..(39): Xaa is C or S
  MOD_RES (15)..(16)..(17)..(18)..(19): Xaa is A or G
  MOD_RES (20)..(21)..(22)..(23): Xaa is A or G or is absent

SEQ ID NO: 21048 - protein, 40 aa, Artificial Sequence; identical to SEQ ID NO: 17944
  GFR-binding peptide
  MOD_RES (1)..(38): Xaa is C or S
  MOD_RES (14)..(15)..(16)..(17)..(18): Xaa is A or G
  MOD_RES (19)..(20)..(21)..(22): Xaa is A or G or is absent

SEQ ID NO: 21049 - protein, 39 aa, Artificial Sequence; identical to SEQ ID NO: 17945
  GFR-binding peptide
  MOD_RES (36)..(36): Xaa is C or S
  MOD_RES (12)..(13)..(14)..(15)..(16): Xaa is A or G
  MOD_RES (17)..(18)..(19)..(20): Xaa is A or G or is absent

SEQ ID NO: 21050 - protein, 32 aa, Artificial Sequence; identical to SEQ ID NO: 17946
  GFR-binding peptide
  MOD_RES (11)..(12)..(13)..(14)..(15): Xaa is A or G
  MOD_RES (16)..(17)..(18)..(19): Xaa is A or G or is absent

SEQ ID NO: 21051 - protein, 37 aa, Artificial Sequence; identical to SEQ ID NO: 17947
  GFR-binding peptide
  MOD_RES (36)..(36): Xaa is C or S

SEQ ID NO: 21052 - protein, 40 aa, Artificial Sequence; identical to SEQ ID NO: 17948
  GFR-binding peptide
  MOD_RES (37)..(37): Xaa is C or S
  MOD_RES (13)..(14)..(15)..(16)..(17): Xaa is A or G
  MOD_RES (18)..(19)..(20)..(21): Xaa is A or G or is absent

SEQ ID NO: 21053 - protein, 40 aa, Artificial Sequence; identical to SEQ ID NO: 17949
  GFR-binding peptide
  MOD_RES (1)..(3)..(37): Xaa is C or S
  MOD_RES (15)..(16)..(17)..(18)..(19): Xaa is A or G
  MOD_RES (20)..(21)..(22)..(23): Xaa is A or G or is absent

SEQ ID NO: 21054 - protein, 38 aa, Artificial Sequence; identical to SEQ ID NO: 17950
  GFR-binding peptide
  MOD_RES (37)..(37): Xaa is C or S

SEQ ID NO: 21055 - protein, 42 aa, Artificial Sequence; identical to SEQ ID NO: 17951
  GFR-binding peptide
  MOD_RES (2)..(39): Xaa is C or S

SEQ ID NO: 21056 - protein, 40 aa, Artificial Sequence; identical to SEQ ID NO: 17952
  GFR-binding peptide
  MOD_RES (2)..(36): Xaa is C or S

SEQ ID NO: 21057 - protein, 36 aa, Artificial Sequence; identical to SEQ ID NO: 17953
  GFR-binding peptide
  MOD_RES (1)..(1): Xaa is C or S

SEQ ID NO: 21058 - protein, 42 aa, Artificial Sequence; identical to SEQ ID NO: 17954
  GFR-binding peptide
  MOD_RES (2)..(4)..(41): Xaa is C or S

SEQ ID NO: 21059 - protein, 40 aa, Artificial Sequence; identical to SEQ ID NO: 17955
  GFR-binding peptide
  MOD_RES (1)..(35): Xaa is C or S
  MOD_RES (13)..(14)..(15)..(16)..(17): Xaa is A or G
  MOD_RES (18)..(19)..(20)..(21): Xaa is A or G or is absent

SEQ ID NO: 21060 - protein, 34 aa, Artificial Sequence; identical to SEQ ID NO: 17956
  GFR-binding peptide
  MOD_RES (34)..(34): Xaa is C or S

SEQ ID NO: 21061 - protein, 39 aa, Artificial Sequence; identical to SEQ ID NO: 17957
  GFR-binding peptide
  MOD_RES (2)..(4): Xaa is C or S
  MOD_RES (17)..(18)..(19)..(20)..(21): Xaa is A or G
  MOD_RES (22)..(23)..(24)..(25): Xaa is A or G or is absent

SEQ ID NO: 21062 - protein, 36 aa, Artificial Sequence; identical to SEQ ID NO: 17958
  GFR-binding peptide
  MOD_RES (13)..(14)..(15)..(16)..(17): Xaa is A or G
  MOD_RES (18)..(19)..(20)..(21): Xaa is A or G or is absent

SEQ ID NO: 21063 - protein, 39 aa, Artificial Sequence; identical to SEQ ID NO: 17959
  GFR-binding peptide
  MOD_RES (1)..(35): Xaa is C or S
  MOD_RES (13)..(14)..(15)..(16)..(17): Xaa is A or G
  MOD_RES (18)..(19)..(20)..(21): Xaa is A or G or is absent

SEQ ID NO: 21064 - protein, 44 aa, Artificial Sequence; identical to SEQ ID NO: 17960
  GFR-binding peptide
  MOD_RES (1)..(3)..(40): Xaa is C or S
  MOD_RES (16)..(17)..(18)..(19)..(20): Xaa is A or G
  MOD_RES (21)..(22)..(23)..(24): Xaa is A or G or is absent

SEQ ID NO: 21065 - protein, 44 aa, Artificial Sequence; identical to SEQ ID NO: 17961
  GFR-binding peptide
  MOD_RES (1)..(3)..(40): Xaa is C or S

SEQ ID NO: 21066 - protein, 38 aa, Artificial Sequence; identical to SEQ ID NO: 17962
  GFR-binding peptide
  MOD_RES (2)..(4): Xaa is C or S
  MOD_RES (17)..(18)..(19)..(20)..(21): Xaa is A or G
  MOD_RES (22)..(23)..(24)..(25): Xaa is A or G or is absent

SEQ ID NO: 21067 - protein, 37 aa, Artificial Sequence; identical to SEQ ID NO: 17963
  GFR-binding peptide
  MOD_RES (34)..(34): Xaa is C or S
  MOD_RES (12)..(13)..(14)..(15)..(16): Xaa is A or G
  MOD_RES (17)..(18)..(19)..(20): Xaa is A or G or is absent

SEQ ID NO: 21068 - protein, 38 aa, Artificial Sequence; identical to SEQ ID NO: 17964
  GFR-binding peptide
  MOD_RES (1)..(3): Xaa is C or S
  MOD_RES (16)..(17)..(18)..(19)..(20): Xaa is A or G
  MOD_RES (21)..(22)..(23)..(24): Xaa is A or G or is absent

SEQ ID NO: 21069 - protein, 41 aa, Artificial Sequence; identical to SEQ ID NO: 17965
  GFR-binding peptide
  MOD_RES (37)..(37): Xaa is C or S

SEQ ID NO: 21070 - protein, 34 aa, Artificial Sequence; identical to SEQ ID NO: 17966
  GFR-binding peptide
  MOD_RES (33)..(33): Xaa is C or S

SEQ ID NO: 21071 - protein, 37 aa, Artificial Sequence; identical to SEQ ID NO: 17967
  GFR-binding peptide
  MOD_RES (36)..(36): Xaa is C or S
  MOD_RES (12)..(13)..(14)..(15)..(16): Xaa is A or G
  MOD_RES (17)..(18)..(19)..(20): Xaa is A or G or is absent

SEQ ID NO: 21072 - protein, 39 aa, Artificial Sequence; identical to SEQ ID NO: 17968
  GFR-binding peptide
  MOD_RES (35)..(35): Xaa is C or S

SEQ ID NO: 21073 - protein, 42 aa, Artificial Sequence; identical to SEQ ID NO: 17969
  GFR-binding peptide
  MOD_RES (1)..(38): Xaa is C or S

SEQ ID NO: 21074 - protein, 36 aa, Artificial Sequence; identical to SEQ ID NO: 17970
  GFR-binding peptide
  MOD_RES (1)..(3): Xaa is C or S
  MOD_RES (15)..(16)..(17)..(18)..(19): Xaa is A or G
  MOD_RES (20)..(21)..(22)..(23): Xaa is A or G or is absent

SEQ ID NO: 21075 - protein, 35 aa, Artificial Sequence; identical to SEQ ID NO: 17971
  GFR-binding peptide
  MOD_RES (2)..(2): Xaa is C or S

SEQ ID NO: 21076 - protein, 36 aa, Artificial Sequence; identical to SEQ ID NO: 17972
  GFR-binding peptide
  MOD_RES (34)..(34): Xaa is C or S
  MOD_RES (12)..(13)..(14)..(15)..(16): Xaa is A or G
  MOD_RES (17)..(18)..(19)..(20): Xaa is A or G or is absent

SEQ ID NO: 21077 - protein, 38 aa, Artificial Sequence; identical to SEQ ID NO: 17973
  GFR-binding peptide
  MOD_RES (35)..(35): Xaa is C or S

SEQ ID NO: 21078 - protein, 38 aa, Artificial Sequence; identical to SEQ ID NO: 17974
  GFR-binding peptide
  MOD_RES (34)..(34): Xaa is C or S
  MOD_RES (12)..(13)..(14)..(15)..(16): Xaa is A or G
  MOD_RES (17)..(18)..(19)..(20): Xaa is A or G or is absent

SEQ ID NO: 21079 - protein, 39 aa, Artificial Sequence; identical to SEQ ID NO: 17975
  GFR-binding peptide
  MOD_RES (1)..(38): Xaa is C or S

SEQ ID NO: 21080 - protein, 43 aa, Artificial Sequence; identical to SEQ ID NO: 17976
  GFR-binding peptide
  MOD_RES (1)..(3)..(40): Xaa is C or S

SEQ ID NO: 21081 - protein, 43 aa, Artificial Sequence; identical to SEQ ID NO: 17977
  GFR-binding peptide
  MOD_RES (1)..(3)..(40): Xaa is C or S

SEQ ID NO: 21082 - protein, 41 aa, Artificial Sequence; identical to SEQ ID NO: 17978
  GFR-binding peptide
  MOD_RES (1)..(3)..(40): Xaa is C or S
  MOD_RES (16)..(17)..(18)..(19)..(20): Xaa is A or G
  MOD_RES (21)..(22)..(23)..(24): Xaa is A or G or is absent

SEQ ID NO: 21083 - protein, 34 aa, Artificial Sequence; identical to SEQ ID NO: 17979
  GFR-binding peptide
  MOD_RES (1)..(1): Xaa is C or S

SEQ ID NO: 21084 - protein, 41 aa, Artificial Sequence; identical to SEQ ID NO: 17980
  GFR-binding peptide
  MOD_RES (2)..(36): Xaa is C or S
  MOD_RES (14)..(15)..(16)..(17)..(18): Xaa is A or G
  MOD_RES (19)..(20)..(21)..(22): Xaa is A or G or is absent

SEQ ID NO: 21085 - protein, 37 aa, Artificial Sequence; identical to SEQ ID NO: 17981
  GFR-binding peptide
  MOD_RES (35)..(35): Xaa is C or S
  MOD_RES (11)..(12)..(13)..(14)..(15): Xaa is A or G
  MOD_RES (16)..(17)..(18)..(19): Xaa is A or G or is absent

SEQ ID NO: 21086 - protein, 36 aa, Artificial Sequence; identical to SEQ ID NO: 17982
  GFR-binding peptide
  MOD_RES (1)..(35): Xaa is C or S

SEQ ID NO: 21087 - protein, 41 aa, Artificial Sequence; identical to SEQ ID NO: 17983
  GFR-binding peptide
  MOD_RES (1)..(38): Xaa is C or S

SEQ ID NO: 21088 - protein, 43 aa, Artificial Sequence; identical to SEQ ID NO: 17984
  GFR-binding peptide
  MOD_RES (1)..(3)..(37): Xaa is C or S
  MOD_RES (15)..(16)..(17)..(18)..(19): Xaa is A or G
  MOD_RES (20)..(21)..(22)..(23): Xaa is A or G or is absent

SEQ ID NO: 21089 - protein, 41 aa, Artificial Sequence; identical to SEQ ID NO: 17985
  GFR-binding peptide
  MOD_RES (1)..(3)..(37): Xaa is C or S

SEQ ID NO: 21090 - protein, 36 aa, Artificial Sequence; identical to SEQ ID NO: 17986
  GFR-binding peptide
  MOD_RES (35)..(35): Xaa is C or S

SEQ ID NO: 21091 - protein, 39 aa, Artificial Sequence; identical to SEQ ID NO: 17987
  GFR-binding peptide
  MOD_RES (34)..(34): Xaa is C or S

SEQ ID NO: 21092 - protein, 39 aa, Artificial Sequence; identical to SEQ ID NO: 17988
  GFR-binding peptide
  MOD_RES (34)..(34): Xaa is C or S

SEQ ID NO: 21093 - protein, 37 aa, Artificial Sequence; identical to SEQ ID NO: 17989
  GFR-binding peptide
  MOD_RES (35)..(35): Xaa is C or S
  MOD_RES (11)..(12)..(13)..(14)..(15): Xaa is A or G
  MOD_RES (16)..(17)..(18)..(19): Xaa is A or G or is absent

SEQ ID NO: 21094 - protein, 39 aa, Artificial Sequence; identical to SEQ ID NO: 17990
  GFR-binding peptide
  MOD_RES (2)..(39): Xaa is C or S
  MOD_RES (15)..(16)..(17)..(18)..(19): Xaa is A or G
  MOD_RES (20)..(21)..(22)..(23): Xaa is A or G or is absent

SEQ ID NO: 21095 - protein, 40 aa, Artificial Sequence; identical to SEQ ID NO: 17991
  GFR-binding peptide
  MOD_RES (1)..(35): Xaa is C or S
  MOD_RES (13)..(14)..(15)..(16)..(17): Xaa is A or G
  MOD_RES (18)..(19)..(20)..(21): Xaa is A or G or is absent

SEQ ID NO: 21096 - protein, 39 aa, Artificial Sequence; identical to SEQ ID NO: 17992
  GFR-binding peptide
  MOD_RES (36)..(36): Xaa is C or S

SEQ ID NO: 21097 - protein, 43 aa, Artificial Sequence; identical to SEQ ID NO: 17993
  GFR-binding peptide
  MOD_RES (2)..(4)..(41): Xaa is C or S
  MOD_RES (17)..(18)..(19)..(20)..(21): Xaa is A or G
  MOD_RES (22)..(23)..(24)..(25): Xaa is A or G or is absent

SEQ ID NO: 21098 - protein, 37 aa, Artificial Sequence; identical to SEQ ID NO: 17994
  GFR-binding peptide
  MOD_RES (36)..(36): Xaa is C or S

SEQ ID NO: 21099 - protein, 41 aa, Artificial Sequence; identical to SEQ ID NO: 17995
  GFR-binding peptide
  MOD_RES (1)..(35): Xaa is C or S

SEQ ID NO: 21100 - protein, 41 aa, Artificial Sequence; identical to SEQ ID NO: 17996
  GFR-binding peptide
  MOD_RES (2)..(36): Xaa is C or S

SEQ ID NO: 21101 - protein, 44 aa, Artificial Sequence; identical to SEQ ID NO: 17997
  GFR-binding peptide
  MOD_RES (1)..(3)..(40): Xaa is C or S

SEQ ID NO: 21102 - protein, 42 aa, Artificial Sequence; identical to SEQ ID NO: 17998
  GFR-binding peptide
  MOD_RES (1)..(38): Xaa is C or S
  MOD_RES (14)..(15)..(16)..(17)..(18): Xaa is A or G
  MOD_RES (19)..(20)..(21)..(22): Xaa is A or G or is absent

SEQ ID NO: 21103 - protein, 38 aa, Artificial Sequence; identical to SEQ ID NO: 17999
  GFR-binding peptide
  MOD_RES (36)..(36): Xaa is C or S

SEQ ID NO: 21104 - protein, 38 aa, Artificial Sequence; identical to SEQ ID NO: 18000
  GFR-binding peptide
  MOD_RES (2)..(4): Xaa is C or S
  MOD_RES (17)..(18)..(19)..(20)..(21): Xaa is A or G
  MOD_RES (22)..(23)..(24)..(25): Xaa is A or G or is absent

SEQ ID NO: 21105 - protein, 40 aa, Artificial Sequence; identical to SEQ ID NO: 18001
  GFR-binding peptide
  MOD_RES (1)..(38): Xaa is C or S
  MOD_RES (14)..(15)..(16)..(17)..(18): Xaa is A or G
  MOD_RES (19)..(20)..(21)..(22): Xaa is A or G or is absent

SEQ ID NO: 21106 - protein, 34 aa, Artificial Sequence; identical to SEQ ID NO: 18002
  GFR-binding peptide

SEQ ID NO: 21107 - protein, 35 aa, Artificial Sequence; identical to SEQ ID NO: 18003
  GFR-binding peptide
  MOD_RES (34)..(34): Xaa is C or S
  MOD_RES (12)..(13)..(14)..(15)..(16): Xaa is A or G
  MOD_RES (17)..(18)..(19)..(20): Xaa is A or G or is absent

SEQ ID NO: 21108 - protein, 37 aa, Artificial Sequence; identical to SEQ ID NO: 18004
  GFR-binding peptide
  MOD_RES (2)..(4): Xaa is C or S

SEQ ID NO: 21109 - protein, 37 aa, Artificial Sequence; identical to SEQ ID NO: 18005
  GFR-binding peptide
  MOD_RES (2)..(4): Xaa is C or S
  MOD_RES (16)..(17)..(18)..(19)..(20): Xaa is A or G
  MOD_RES (21)..(22)..(23)..(24): Xaa is A or G or is absent

SEQ ID NO: 21110 - protein, 35 aa, Artificial Sequence; identical to SEQ ID NO: 18006
  GFR-binding peptide
  MOD_RES (35)..(35): Xaa is C or S
  MOD_RES (11)..(12)..(13)..(14)..(15): Xaa is A or G
  MOD_RES (16)..(17)..(18)..(19): Xaa is A or G or is absent

SEQ ID NO: 21111 - protein, 36 aa, Artificial Sequence; identical to SEQ ID NO: 18007
  GFR-binding peptide
  MOD_RES (2)..(2): Xaa is C or S
  MOD_RES (15)..(16)..(17)..(18)..(19): Xaa is A or G
  MOD_RES (20)..(21)..(22)..(23): Xaa is A or G or is absent

SEQ ID NO: 21112 - protein, 38 aa, Artificial Sequence; identical to SEQ ID NO: 18008
  GFR-binding peptide
  MOD_RES (36)..(36): Xaa is C or S
  MOD_RES (12)..(13)..(14)..(15)..(16): Xaa is A or G
  MOD_RES (17)..(18)..(19)..(20): Xaa is A or G or is absent

SEQ ID NO: 21113 - protein, 41 aa, Artificial Sequence; identical to SEQ ID NO: 18009
  GFR-binding peptide
  MOD_RES (1)..(3)..(40): Xaa is C or S

SEQ ID NO: 21114 - protein, 34 aa, Artificial Sequence; identical to SEQ ID NO: 18010
  GFR-binding peptide
  MOD_RES (12)..(13)..(14)..(15)..(16): Xaa is A or G
  MOD_RES (17)..(18)..(19)..(20): Xaa is A or G or is absent

SEQ ID NO: 21115 - protein, 35 aa, Artificial Sequence; identical to SEQ ID NO: 18011
  GFR-binding peptide
  MOD_RES (35)..(35): Xaa is C or S
  MOD_RES (11)..(12)..(13)..(14)..(15): Xaa is A or G
  MOD_RES (16)..(17)..(18)..(19): Xaa is A or G or is absent

SEQ ID NO: 21116 - protein, 38 aa, Artificial Sequence; identical to SEQ ID NO: 18012
  GFR-binding peptide
  MOD_RES (1)..(38): Xaa is C or S

SEQ ID NO: 21117 - protein, 38 aa, Artificial Sequence; identical to SEQ ID NO: 18013
  GFR-binding peptide
  MOD_RES (1)..(35): Xaa is C or S

SEQ ID NO: 21118 - protein, 33 aa, Artificial Sequence; identical to SEQ ID NO: 18014
  GFR-binding peptide

SEQ ID NO: 21119 - protein, 42 aa, Artificial Sequence; identical to SEQ ID NO: 18015
  GFR-binding peptide
  MOD_RES (1)..(3)..(40): Xaa is C or S
  MOD_RES (16)..(17)..(18)..(19)..(20): Xaa is A or G
  MOD_RES (21)..(22)..(23)..(24): Xaa is A or G or is absent

SEQ ID NO: 21120 - protein, 41 aa, Artificial Sequence; identical to SEQ ID NO: 18016
  GFR-binding peptide
  MOD_RES (2)..(4)..(41): Xaa is C or S

SEQ ID NO: 21121 - protein, 41 aa, Artificial Sequence; identical to SEQ ID NO: 18017
  GFR-binding peptide
  MOD_RES (1)..(38): Xaa is C or S

SEQ ID NO: 21122 - protein, 38 aa, Artificial Sequence; identical to SEQ ID NO: 18018
  GFR-binding peptide
  MOD_RES (1)..(38): Xaa is C or S
  MOD_RES (14)..(15)..(16)..(17)..(18): Xaa is A or G
  MOD_RES (19)..(20)..(21)..(22): Xaa is A or G or is absent

SEQ ID NO: 21123 - protein, 42 aa, Artificial Sequence; identical to SEQ ID NO: 18019
  GFR-binding peptide
  MOD_RES (2)..(39): Xaa is C or S

SEQ ID NO: 21124 - protein, 36 aa, Artificial Sequence; identical to SEQ ID NO: 18020
  GFR-binding peptide
  MOD_RES (33)..(33): Xaa is C or S
  MOD_RES (11)..(12)..(13)..(14)..(15): Xaa is A or G
  MOD_RES (16)..(17)..(18)..(19): Xaa is A or G or is absent

SEQ ID NO: 21125 - protein, 40 aa, Artificial Sequence; identical to SEQ ID NO: 18021
  GFR-binding peptide
  MOD_RES (2)..(4): Xaa is C or S

SEQ ID NO: 21126 - protein, 39 aa, Artificial Sequence; identical to SEQ ID NO: 18022
  GFR-binding peptide
  MOD_RES (2)..(4)..(38): Xaa is C or S
  MOD_RES (16)..(17)..(18)..(19)..(20): Xaa is A or G
  MOD_RES (21)..(22)..(23)..(24): Xaa is A or G or is absent

SEQ ID NO: 21127 - protein, 42 aa, Artificial Sequence; identical to SEQ ID NO: 18023
  GFR-binding peptide
  MOD_RES (2)..(4)..(41): Xaa is C or S
  MOD_RES (17)..(18)..(19)..(20)..(21): Xaa is A or G
  MOD_RES (22)..(23)..(24)..(25): Xaa is A or G or is absent

SEQ ID NO: 21128 - protein, 45 aa, Artificial Sequence; identical to SEQ ID NO: 18024
  GFR-binding peptide
  MOD_RES (2)..(4)..(41): Xaa is C or S

SEQ ID NO: 21129 - protein, 34 aa, Artificial Sequence; identical to SEQ ID NO: 18025
  GFR-binding peptide
  MOD_RES (1)..(1): Xaa is C or S

SEQ ID NO: 21130 - protein, 41 aa, Artificial Sequence; identical to SEQ ID NO: 18026
  GFR-binding peptide
  MOD_RES (2)..(4)..(38): Xaa is C or S
  MOD_RES (16)..(17)..(18)..(19)..(20): Xaa is A or G
  MOD_RES (21)..(22)..(23)..(24): Xaa is A or G or is absent

SEQ ID NO: 21131 - protein, 35 aa, Artificial Sequence; identical to SEQ ID NO: 18027
  GFR-binding peptide
  MOD_RES (2)..(2): Xaa is C or S

SEQ ID NO: 21132 - protein, 38 aa, Artificial Sequence; identical to SEQ ID NO: 18028
  GFR-binding peptide
  MOD_RES (2)..(36): Xaa is C or S

SEQ ID NO: 21133 - protein, 38 aa, Artificial Sequence; identical to SEQ ID NO: 18029
  GFR-binding peptide
  MOD_RES (2)..(4)..(38): Xaa is C or S

SEQ ID NO: 21134 - protein, 37 aa, Artificial Sequence; identical to SEQ ID NO: 18030
  GFR-binding peptide
  MOD_RES (2)..(2): Xaa is C or S

SEQ ID NO: 21135 - protein, 35 aa, Artificial Sequence; identical to SEQ ID NO: 18031
  GFR-binding peptide
  MOD_RES (1)..(1): Xaa is C or S
  MOD_RES (14)..(15)..(16)..(17)..(18): Xaa is A or G
  MOD_RES (19)..(20)..(21)..(22): Xaa is A or G or is absent

SEQ ID NO: 21136 - protein, 40 aa, Artificial Sequence; identical to SEQ ID NO: 18032
  GFR-binding peptide
  MOD_RES (2)..(4): Xaa is C or S
  MOD_RES (17)..(18)..(19)..(20)..(21): Xaa is A or G
  MOD_RES (22)..(23)..(24)..(25): Xaa is A or G or is absent

SEQ ID NO: 21137 - protein, 35 aa, Artificial Sequence; identical to SEQ ID NO: 18033
  GFR-binding peptide
  MOD_RES (35)..(35): Xaa is C or S

SEQ ID NO: 21138 - protein, 40 aa, Artificial Sequence; identical to SEQ ID NO: 18034
  GFR-binding peptide
  MOD_RES (1)..(3)..(37): Xaa is C or S

SEQ ID NO: 21139 - protein, 38 aa, Artificial Sequence; identical to SEQ ID NO: 18035
  GFR-binding peptide
  MOD_RES (2)..(36): Xaa is C or S

SEQ ID NO: 21140 - protein, 39 aa, Artificial Sequence; identical to SEQ ID NO: 18036
  GFR-binding peptide
  MOD_RES (34)..(34): Xaa is C or S

SEQ ID NO: 21141 - protein, 43 aa, Artificial Sequence; identical to SEQ ID NO: 18037
  GFR-binding peptide
  MOD_RES (1)..(3)..(37): Xaa is C or S
  MOD_RES (15)..(16)..(17)..(18)..(19): Xaa is A or G
  MOD_RES (20)..(21)..(22)..(23): Xaa is A or G or is absent

SEQ ID NO: 21142 - protein, 37 aa, Artificial Sequence; identical to SEQ ID NO: 18038
  GFR-binding peptide
  MOD_RES (1)..(3): Xaa is C or S

SEQ ID NO: 21143 - protein, 33 aa, Artificial Sequence; identical to SEQ ID NO: 18039
  GFR-binding peptide
  MOD_RES (33)..(33): Xaa is C or S
  MOD_RES (11)..(12)..(13)..(14)..(15): Xaa is A or G
  MOD_RES (16)..(17)..(18)..(19): Xaa is A or G or is absent

SEQ ID NO: 21144 - protein, 33 aa, Artificial Sequence; identical to SEQ ID NO: 18040
  GFR-binding peptide

SEQ ID NO: 21145 - protein, 39 aa, Artificial Sequence; identical to SEQ ID NO: 18041
  GFR-binding peptide
  MOD_RES (37)..(37): Xaa is C or S
  MOD_RES (13)..(14)..(15)..(16)..(17): Xaa is A or G
  MOD_RES (18)..(19)..(20)..(21): Xaa is A or G or is absent

SEQ ID NO: 21146 - protein, 38 aa, Artificial Sequence; identical to SEQ ID NO: 18042
  GFR-binding peptide
  MOD_RES (36)..(36): Xaa is C or S
  MOD_RES (12)..(13)..(14)..(15)..(16): Xaa is A or G
  MOD_RES (17)..(18)..(19)..(20): Xaa is A or G or is absent

SEQ ID NO: 21147 - protein, 39 aa, Artificial Sequence; identical to SEQ ID NO: 18043
  GFR-binding peptide
  MOD_RES (2)..(4)..(38): Xaa is C or S

SEQ ID NO: 21148 - protein, 40 aa, Artificial Sequence; identical to SEQ ID NO: 18044
  GFR-binding peptide
  MOD_RES (2)..(39): Xaa is C or S

SEQ ID NO: 21149 - protein, 36 aa, Artificial Sequence; identical to SEQ ID NO: 18045
  GFR-binding peptide
  MOD_RES (1)..(3): Xaa is C or S

SEQ ID NO: 21150 - protein, 37 aa, Artificial Sequence; identical to SEQ ID NO: 18046
  GFR-binding peptide
  MOD_RES (33)..(33): Xaa is C or S

SEQ ID NO: 21151 - protein, 35 aa, Artificial Sequence; identical to SEQ ID NO: 18047
  GFR-binding peptide

SEQ ID NO: 21152 - protein, 38 aa, Artificial Sequence; identical to SEQ ID NO: 18048
  GFR-binding peptide
  MOD_RES (35)..(35): Xaa is C or S
  MOD_RES (11)..(12)..(13)..(14)..(15): Xaa is A or G
  MOD_RES (16)..(17)..(18)..(19): Xaa is A or G or is absent

SEQ ID NO: 21153 - protein, 38 aa, Artificial Sequence; identical to SEQ ID NO: 18049
  GFR-binding peptide
  MOD_RES (37)..(37): Xaa is C or S

SEQ ID NO: 21154 - protein, 36 aa, Artificial Sequence; identical to SEQ ID NO: 18050
  GFR-binding peptide
  MOD_RES (35)..(35): Xaa is C or S
  MOD_RES (11)..(12)..(13)..(14)..(15): Xaa is A or G
  MOD_RES (16)..(17)..(18)..(19): Xaa is A or G or is absent

SEQ ID NO: 21155 - protein, 39 aa, Artificial Sequence; identical to SEQ ID NO: 18051
  GFR-binding peptide
  MOD_RES (37)..(37): Xaa is C or S
  MOD_RES (13)..(14)..(15)..(16)..(17): Xaa is A or G
  MOD_RES (18)..(19)..(20)..(21): Xaa is A or G or is absent

SEQ ID NO: 21156 - protein, 39 aa, Artificial Sequence; identical to SEQ ID NO: 18052
  GFR-binding peptide
  MOD_RES (1)..(35): Xaa is C or S
  MOD_RES (13)..(14)..(15)..(16)..(17): Xaa is A or G
  MOD_RES (18)..(19)..(20)..(21): Xaa is A or G or is absent

SEQ ID NO: 21157 - protein, 44 aa, Artificial Sequence; identical to SEQ ID NO: 18053
  GFR-binding peptide
  MOD_RES (2)..(4)..(38): Xaa is C or S
  MOD_RES (16)..(17)..(18)..(19)..(20): Xaa is A or G
  MOD_RES (21)..(22)..(23)..(24): Xaa is A or G or is absent

SEQ ID NO: 21158 - protein, 42 aa, Artificial Sequence; identical to SEQ ID NO: 18054
  GFR-binding peptide
  MOD_RES (2)..(36): Xaa is C or S
  MOD_RES (14)..(15)..(16)..(17)..(18): Xaa is A or G
  MOD_RES (19)..(20)..(21)..(22): Xaa is A or G or is absent

SEQ ID NO: 21159 - protein, 39 aa, Artificial Sequence; identical to SEQ ID NO: 18055
  GFR-binding peptide
  MOD_RES (1)..(38): Xaa is C or S
  MOD_RES (14)..(15)..(16)..(17)..(18): Xaa is A or G
  MOD_RES (19)..(20)..(21)..(22): Xaa is A or G or is absent

SEQ ID NO: 21160 - protein, 32 aa, Artificial Sequence; identical to SEQ ID NO: 18056
  GFR-binding peptide

SEQ ID NO: 21161 - protein, 44 aa, Artificial Sequence; identical to SEQ ID NO: 18057
  GFR-binding peptide
  MOD_RES (2)..(4)..(41): Xaa is C or S

SEQ ID NO: 21162 - protein, 36 aa, Artificial Sequence; identical to SEQ ID NO: 18058
  GFR-binding peptide
  MOD_RES (1)..(35): Xaa is C or S
  MOD_RES (13)..(14)..(15)..(16)..(17): Xaa is A or G
  MOD_RES (18)..(19)..(20)..(21): Xaa is A or G or is absent

SEQ ID NO: 21163 - protein, 33 aa, Artificial Sequence; identical to SEQ ID NO: 18059
  GFR-binding peptide
  MOD_RES (12)..(13)..(14)..(15)..(16): Xaa is A or G
  MOD_RES (17)..(18)..(19)..(20): Xaa is A or G or is absent

SEQ ID NO: 21164 - protein, 38 aa, Artificial Sequence; identical to SEQ ID NO: 18060
  GFR-binding peptide
  MOD_RES (1)..(3)..(37): Xaa is C or S
  MOD_RES (15)..(16)..(17)..(18)..(19): Xaa is A or G
  MOD_RES (20)..(21)..(22)..(23): Xaa is A or G or is absent

SEQ ID NO: 21165 - protein, 36 aa, Artificial Sequence; identical to SEQ ID NO: 18061
  GFR-binding peptide
  MOD_RES (13)..(14)..(15)..(16)..(17): Xaa is A or G
  MOD_RES (18)..(19)..(20)..(21): Xaa is A or G or is absent

SEQ ID NO: 21166 - protein, 33 aa, Artificial Sequence; identical to SEQ ID NO: 18062
  GFR-binding peptide
  MOD_RES (11)..(12)..(13)..(14)..(15): Xaa is A or G
  MOD_RES (16)..(17)..(18)..(19): Xaa is A or G or is absent

SEQ ID NO: 21167 - protein, 38 aa, Artificial Sequence; identical to SEQ ID NO: 18063
  GFR-binding peptide
  MOD_RES (1)..(38): Xaa is C or S

SEQ ID NO: 21168 - protein, 42 aa, Artificial Sequence; identical to SEQ ID NO: 18064
  GFR-binding peptide
  MOD_RES (1)..(3)..(40): Xaa is C or S

SEQ ID NO: 21169 - protein, 40 aa, Artificial Sequence; identical to SEQ ID NO: 18065
  GFR-binding peptide
  MOD_RES (1)..(35): Xaa is C or S

SEQ ID NO: 21170 - protein, 37 aa, Artificial Sequence; identical to SEQ ID NO: 18066
  GFR-binding peptide
  MOD_RES (2)..(36): Xaa is C or S
  MOD_RES (14)..(15)..(16)..(17)..(18): Xaa is A or G
  MOD_RES (19)..(20)..(21)..(22): Xaa is A or G or is absent

SEQ ID NO: 21171 - protein, 36 aa, Artificial Sequence; identical to SEQ ID NO: 18067
  GFR-binding peptide
  MOD_RES (2)..(2): Xaa is C or S

SEQ ID NO: 21172 - protein, 42 aa, Artificial Sequence; identical to SEQ ID NO: 18068
  GFR-binding peptide
  MOD_RES (2)..(4)..(41): Xaa is C or S
  MOD_RES (17)..(18)..(19)..(20)..(21): Xaa is A or G
  MOD_RES (22)..(23)..(24)..(25): Xaa is A or G or is absent

SEQ ID NO: 21173 - protein, 38 aa, Artificial Sequence; identical to SEQ ID NO: 18069
  GFR-binding peptide
  MOD_RES (35)..(35): Xaa is C or S
  MOD_RES (11)..(12)..(13)..(14)..(15): Xaa is A or G
  MOD_RES (16)..(17)..(18)..(19): Xaa is A or G or is absent

SEQ ID NO: 21174 - protein, 37 aa, Artificial Sequence; identical to SEQ ID NO: 18070
  GFR-binding peptide
  MOD_RES (1)..(35): Xaa is C or S

SEQ ID NO: 21175 - protein, 40 aa, Artificial Sequence; identical to SEQ ID NO: 18071
  GFR-binding peptide
  MOD_RES (2)..(4)..(38): Xaa is C or S
  MOD_RES (16)..(17)..(18)..(19)..(20): Xaa is A or G
  MOD_RES (21)..(22)..(23)..(24): Xaa is A or G or is absent

SEQ ID NO: 21176 - protein, 37 aa, Artificial Sequence; identical to SEQ ID NO: 18072
  GFR-binding peptide
  MOD_RES (33)..(33): Xaa is C or S
  MOD_RES (11)..(12)..(13)..(14)..(15): Xaa is A or G
  MOD_RES (16)..(17)..(18)..(19): Xaa is A or G or is absent

SEQ ID NO: 21177 - protein, 35 aa, Artificial Sequence; identical to SEQ ID NO: 18073
  GFR-binding peptide
  MOD_RES (34)..(34): Xaa is C or S

SEQ ID NO: 21178 - protein, 41 aa, Artificial Sequence; identical to SEQ ID NO: 18074
  GFR-binding peptide
  MOD_RES (1)..(38): Xaa is C or S

SEQ ID NO: 21179 - protein, 43 aa, Artificial Sequence; identical to SEQ ID NO: 18075
  GFR-binding peptide
  MOD_RES (2)..(4)..(41): Xaa is C or S

SEQ ID NO: 21180 - protein, 39 aa, Artificial Sequence; identical to SEQ ID NO: 18076
  GFR-binding peptide
  MOD_RES (33)..(33): Xaa is C or S
  MOD_RES (11)..(12)..(13)..(14)..(15): Xaa is A or G
  MOD_RES (16)..(17)..(18)..(19): Xaa is A or G or is absent

SEQ ID NO: 21181 - protein, 40 aa, Artificial Sequence; identical to SEQ ID NO: 18077
  GFR-binding peptide
  MOD_RES (1)..(3)..(37): Xaa is C or S

SEQ ID NO: 21182 - protein, 39 aa, Artificial Sequence; identical to SEQ ID NO: 18078
  GFR-binding peptide
  MOD_RES (1)..(35): Xaa is C or S
  MOD_RES (13)..(14)..(15)..(16)..(17): Xaa is A or G
  MOD_RES (18)..(19)..(20)..(21): Xaa is A or G or is absent

SEQ ID NO: 21183 - protein, 43 aa, Artificial Sequence; identical to SEQ ID NO: 18079
  GFR-binding peptide
  MOD_RES (2)..(4)..(38): Xaa is C or S
  MOD_RES (16)..(17)..(18)..(19)..(20): Xaa is A or G
  MOD_RES (21)..(22)..(23)..(24): Xaa is A or G or is absent

SEQ ID NO: 21184 - protein, 37 aa, Artificial Sequence; identical to SEQ ID NO: 18080
  GFR-binding peptide
  MOD_RES (2)..(4): Xaa is C or S

SEQ ID NO: 21185 - protein, 35 aa, Artificial Sequence; identical to SEQ ID NO: 18081
  GFR-binding peptide
  MOD_RES (1)..(35): Xaa is C or S

SEQ ID NO: 21186 - protein, 38 aa, Artificial Sequence; identical to SEQ ID NO: 18082
  GFR-binding peptide
  MOD_RES (2)..(2): Xaa is C or S

SEQ ID NO: 21187 - protein, 40 aa, Artificial Sequence; identical to SEQ ID NO: 18083
  GFR-binding peptide
  MOD_RES (2)..(39): Xaa is C or S
  MOD_RES (15)..(16)..(17)..(18)..(19): Xaa is A or G
  MOD_RES (20)..(21)..(22)..(23): Xaa is A or G or is absent

SEQ ID NO: 21188 - protein, 39 aa, Artificial Sequence; identical to SEQ ID NO: 18084
  GFR-binding peptide
  MOD_RES (33)..(33): Xaa is C or S
  MOD_RES (11)..(12)..(13)..(14)..(15): Xaa is A or G
  MOD_RES (16)..(17)..(18)..(19): Xaa is A or G or is absent

SEQ ID NO: 21189 - protein, 40 aa, Artificial Sequence; identical to SEQ ID NO: 18085
  GFR-binding peptide
  MOD_RES (2)..(4): Xaa is C or S
  MOD_RES (17)..(18)..(19)..(20)..(21): Xaa is A or G
  MOD_RES (22)..(23)..(24)..(25): Xaa is A or G or is absent

SEQ ID NO: 21190 - protein, 38 aa, Artificial Sequence; identical to SEQ ID NO: 18086
  GFR-binding peptide
  MOD_RES (1)..(3): Xaa is C or S

SEQ ID NO: 21191 - protein, 39 aa, Artificial Sequence; identical to SEQ ID NO: 18087
  GFR-binding peptide
  MOD_RES (34)..(34): Xaa is C or S
  MOD_RES (12)..(13)..(14)..(15)..(16): Xaa is A or G
  MOD_RES (17)..(18)..(19)..(20): Xaa is A or G or is absent

SEQ ID NO: 21192 - protein, 42 aa, Artificial Sequence; identical to SEQ ID NO: 18088
  GFR-binding peptide
  MOD_RES (1)..(3)..(37): Xaa is C or S
  MOD_RES (15)..(16)..(17)..(18)..(19): Xaa is A or G
  MOD_RES (20)..(21)..(22)..(23): Xaa is A or G or is absent

SEQ ID NO: 21193 - protein, 34 aa, Artificial Sequence; identical to SEQ ID NO: 18089
  GFR-binding peptide
  MOD_RES (33)..(33): Xaa is C or S

SEQ ID NO: 21194 - protein, 38 aa, Artificial Sequence; identical to SEQ ID NO: 18090
  GFR-binding peptide
  MOD_RES (1)..(3): Xaa is C or S
  MOD_RES (16)..(17)..(18)..(19)..(20): Xaa is A or G
  MOD_RES (21)..(22)..(23)..(24): Xaa is A or G or is absent

SEQ ID NO: 21195 - protein, 35 aa, Artificial Sequence; identical to SEQ ID NO: 18091
  GFR-binding peptide
  MOD_RES (2)..(2): Xaa is C or S
  MOD_RES (14)..(15)..(16)..(17)..(18): Xaa is A or G
  MOD_RES (19)..(20)..(21)..(22): Xaa is A or G or is absent

SEQ ID NO: 21196 - protein, 36 aa, Artificial Sequence; identical to SEQ ID NO: 18092
  GFR-binding peptide

SEQ ID NO: 21197 - protein, 36 aa, Artificial Sequence; identical to SEQ ID NO: 18093
  GFR-binding peptide
  MOD_RES (1)..(1): Xaa is C or S

SEQ ID NO: 21198 - protein, 38 aa, Artificial Sequence; identical to SEQ ID NO: 18094
  GFR-binding peptide
  MOD_RES (1)..(35): Xaa is C or S
  MOD_RES (13)..(14)..(15)..(16)..(17): Xaa is A or G
  MOD_RES (18)..(19)..(20)..(21): Xaa is A or G or is absent

SEQ ID NO: 21199 - protein, 33 aa, Artificial Sequence; identical to SEQ ID NO: 18095
  GFR-binding peptide

SEQ ID NO: 21200 - protein, 39 aa, Artificial Sequence; identical to SEQ ID NO: 18096
  GFR-binding peptide
  MOD_RES (34)..(34): Xaa is C or S
  MOD_RES (12)..(13)..(14)..(15)..(16): Xaa is A or G
  MOD_RES (17)..(18)..(19)..(20): Xaa is A or G or is absent

SEQ ID NO: 21201 - protein, 35 aa, Artificial Sequence; identical to SEQ ID NO: 18097
  GFR-binding peptide
  MOD_RES (33)..(33): Xaa is C or S

SEQ ID NO: 21202 - protein, 32 aa, Artificial Sequence; identical to SEQ ID NO: 18098
  GFR-binding peptide
  MOD_RES (11)..(12)..(13)..(14)..(15): Xaa is A or G
  MOD_RES (16)..(17)..(18)..(19): Xaa is A or G or is absent

SEQ ID NO: 21203 - protein, 36 aa, Artificial Sequence; identical to SEQ ID NO: 18099
  GFR-binding peptide
  MOD_RES (35)..(35): Xaa is C or S

SEQ ID NO: 21204 - protein, 34 aa, Artificial Sequence; identical to SEQ ID NO: 18100
  GFR-binding peptide
  MOD_RES (34)..(34): Xaa is C or S

SEQ ID NO: 21205 - protein, 35 aa, Artificial Sequence; identical to SEQ ID NO: 18101
  GFR-binding peptide
  MOD_RES (1)..(1): Xaa is C or S
  MOD_RES (14)..(15)..(16)..(17)..(18): Xaa is A or G
  MOD_RES (19)..(20)..(21)..(22): Xaa is A or G or is absent

SEQ ID NO: 21206 - protein, 36 aa, Artificial Sequence; identical to SEQ ID NO: 18102
  GFR-binding peptide

SEQ ID NO: 21207 - protein, 44 aa, Artificial Sequence; identical to SEQ ID NO: 18103
  GFR-binding peptide
  MOD_RES (2)..(4)..(41): Xaa is C or S

SEQ ID NO: 21208 - protein, 37 aa, Artificial Sequence; identical to SEQ ID NO: 18104
  GFR-binding peptide
  MOD_RES (33)..(33): Xaa is C or S
  MOD_RES (11)..(12)..(13)..(14)..(15): Xaa is A or G
  MOD_RES (16)..(17)..(18)..(19): Xaa is A or G or is absent

SEQ ID NO: 21209 - protein, 43 aa, Artificial Sequence; identical to SEQ ID NO: 18105
  GFR-binding peptide
  MOD_RES (2)..(39): Xaa is C or S
  MOD_RES (15)..(16)..(17)..(18)..(19): Xaa is A or G
  MOD_RES (20)..(21)..(22)..(23): Xaa is A or G or is absent

SEQ ID NO: 21210 - protein, 36 aa, Artificial Sequence; identical to SEQ ID NO: 18106
  GFR-binding peptide
  MOD_RES (1)..(35): Xaa is C or S
  MOD_RES (13)..(14)..(15)..(16)..(17): Xaa is A or G
  MOD_RES (18)..(19)..(20)..(21): Xaa is A or G or is absent

SEQ ID NO: 21211 - protein, 44 aa, Artificial Sequence; identical to SEQ ID NO: 18107
  GFR-binding peptide
  MOD_RES (2)..(4)..(41): Xaa is C or S

SEQ ID NO: 21212 - protein, 40 aa, Artificial Sequence; identical to SEQ ID NO: 18108
  GFR-binding peptide
  MOD_RES (37)..(37): Xaa is C or S

SEQ ID NO: 21213 - protein, 37 aa, Artificial Sequence; identical to SEQ ID NO: 18109
  GFR-binding peptide
  MOD_RES (1)..(35): Xaa is C or S
  MOD_RES (13)..(14)..(15)..(16)..(17): Xaa is A or G
  MOD_RES (18)..(19)..(20)..(21): Xaa is A or G or is absent

SEQ ID NO: 21214 - protein, 38 aa, Artificial Sequence; identical to SEQ ID NO: 18110
  GFR-binding peptide
  MOD_RES (36)..(36): Xaa is C or S
  MOD_RES (12)..(13)..(14)..(15)..(16): Xaa is A or G
  MOD_RES (17)..(18)..(19)..(20): Xaa is A or G or is absent

SEQ ID NO: 21215 - protein, 38 aa, Artificial Sequence; identical to SEQ ID NO: 18111
  GFR-binding peptide
  MOD_RES (1)..(3)..(37): Xaa is C or S

SEQ ID NO: 21216 - protein, 36 aa, Artificial Sequence; identical to SEQ ID NO: 18112
  GFR-binding peptide
  MOD_RES (1)..(3): Xaa is C or S
  MOD_RES (15)..(16)..(17)..(18)..(19): Xaa is A or G
  MOD_RES (20)..(21)..(22)..(23): Xaa is A or G or is absent

SEQ ID NO: 21217 - protein, 41 aa, Artificial Sequence; identical to SEQ ID NO: 18113
  GFR-binding peptide
  MOD_RES (2)..(39): Xaa is C or S

SEQ ID NO: 21218 - protein, 39 aa, Artificial Sequence; identical to SEQ ID NO: 18114
  GFR-binding peptide
  MOD_RES (1)..(38): Xaa is C or S

SEQ ID NO: 21219 - protein, 36 aa, Artificial Sequence; identical to SEQ ID NO: 18115
  GFR-binding peptide
  MOD_RES (35)..(35): Xaa is C or S
  MOD_RES (11)..(12)..(13)..(14)..(15): Xaa is A or G
  MOD_RES (16)..(17)..(18)..(19): Xaa is A or G or is absent

SEQ ID NO: 21220 - protein, 41 aa, Artificial Sequence; identical to SEQ ID NO: 18116
  GFR-binding peptide
  MOD_RES (2)..(4)..(41): Xaa is C or S

SEQ ID NO: 21221 - protein, 44 aa, Artificial Sequence; identical to SEQ ID NO: 18117
  GFR-binding peptide
  MOD_RES (1)..(3)..(40): Xaa is C or S
  MOD_RES (16)..(17)..(18)..(19)..(20): Xaa is A or G
  MOD_RES (21)..(22)..(23)..(24): Xaa is A or G or is absent

SEQ ID NO: 21222 - protein, 39 aa, Artificial Sequence; identical to SEQ ID NO: 18118
  GFR-binding peptide
  MOD_RES (2)..(36): Xaa is C or S
  MOD_RES (14)..(15)..(16)..(17)..(18): Xaa is A or G
  MOD_RES (19)..(20)..(21)..(22): Xaa is A or G or is absent

SEQ ID NO: 21223 - protein, 38 aa, Artificial Sequence; identical to SEQ ID NO: 18119
  GFR-binding peptide
  MOD_RES (33)..(33): Xaa is C or S

SEQ ID NO: 21224 - protein, 39 aa, Artificial Sequence; identical to SEQ ID NO: 18120
  GFR-binding peptide
  MOD_RES (33)..(33): Xaa is C or S

SEQ ID NO: 21225 - protein, 43 aa, Artificial Sequence; identical to SEQ ID NO: 18121
  GFR-binding peptide
  MOD_RES (2)..(4)..(41): Xaa is C or S

SEQ ID NO: 21226 - protein, 38 aa, Artificial Sequence; identical to SEQ ID NO: 18122
  GFR-binding peptide
  MOD_RES (2)..(4)..(38): Xaa is C or S
  MOD_RES (16)..(17)..(18)..(19)..(20): Xaa is A or G
  MOD_RES (21)..(22)..(23)..(24): Xaa is A or G or is absent

SEQ ID NO: 21227 - protein, 34 aa, Artificial Sequence; identical to SEQ ID NO: 18123
  GFR-binding peptide
  MOD_RES (33)..(33): Xaa is C or S

SEQ ID NO: 21228 - protein, 44 aa, Artificial Sequence; identical to SEQ ID NO: 18124
  GFR-binding peptide
  MOD_RES (2)..(4)..(41): Xaa is C or S
  MOD_RES (17)..(18)..(19)..(20)..(21): Xaa is A or G
  MOD_RES (22)..(23)..(24)..(25): Xaa is A or G or is absent

SEQ ID NO: 21229 - protein, 45 aa, Artificial Sequence; identical to SEQ ID NO: 18125
  GFR-binding peptide
  MOD_RES (2)..(4)..(41): Xaa is C or S

SEQ ID NO: 21230 - protein, 35 aa, Artificial Sequence; identical to SEQ ID NO: 18126
  GFR-binding peptide
  MOD_RES (33)..(33): Xaa is C or S
  MOD_RES (11)..(12)..(13)..(14)..(15): Xaa is A or G
  MOD_RES (16)..(17)..(18)..(19): Xaa is A or G or is absent

SEQ ID NO: 21231 - protein, 37 aa, Artificial Sequence; identical to SEQ ID NO: 18127
  GFR-binding peptide
  MOD_RES (1)..(3): Xaa is C or S

SEQ ID NO: 21232 - protein, 40 aa, Artificial Sequence; identical to SEQ ID NO: 18128
  GFR-binding peptide
  MOD_RES (2)..(4)..(38): Xaa is C or S
  MOD_RES (16)..(17)..(18)..(19)..(20): Xaa is A or G
  MOD_RES (21)..(22)..(23)..(24): Xaa is A or G or is absent

SEQ ID NO: 21233 - protein, 36 aa, Artificial Sequence; identical to SEQ ID NO: 18129
  GFR-binding peptide
  MOD_RES (1)..(1): Xaa is C or S
  MOD_RES (14)..(15)..(16)..(17)..(18): Xaa is A or G
  MOD_RES (19)..(20)..(21)..(22): Xaa is A or G or is absent

SEQ ID NO: 21234 - protein, 44 aa, Artificial Sequence; identical to SEQ ID NO: 18130
  GFR-binding peptide
  MOD_RES (2)..(4)..(38): Xaa is C or S
  MOD_RES (16)..(17)..(18)..(19)..(20): Xaa is A or G
  MOD_RES (21)..(22)..(23)..(24): Xaa is A or G or is absent

SEQ ID NO: 21235 - protein, 40 aa, Artificial Sequence; identical to SEQ ID NO: 18131
  GFR-binding peptide
  MOD_RES (2)..(39): Xaa is C or S

SEQ ID NO: 21236 - protein, 36 aa, Artificial Sequence; identical to SEQ ID NO: 18132
  GFR-binding peptide
  MOD_RES (2)..(36): Xaa is C or S
  MOD_RES (14)..(15)..(16)..(17)..(18): Xaa is A or G
  MOD_RES (19)..(20)..(21)..(22): Xaa is A or G or is absent

SEQ ID NO: 21237 - protein, 40 aa, Artificial Sequence; identical to SEQ ID NO: 18133
  GFR-binding peptide
  MOD_RES (34)..(34): Xaa is C or S

SEQ ID NO: 21238 - protein, 37 aa, Artificial Sequence; identical to SEQ ID NO: 18134
  GFR-binding peptide
  MOD_RES (33)..(33): Xaa is C or S

SEQ ID NO: 21239 - protein, 40 aa, Artificial Sequence; identical to SEQ ID NO: 18135
  GFR-binding peptide
  MOD_RES (2)..(36): Xaa is C or S

SEQ ID NO: 21240 - protein, 41 aa, Artificial Sequence; identical to SEQ ID NO: 18136
  GFR-binding peptide
  MOD_RES (2)..(36): Xaa is C or S

SEQ ID NO: 21241 - protein, 41 aa, Artificial Sequence; identical to SEQ ID NO: 18137
  GFR-binding peptide
  MOD_RES (1)..(38): Xaa is C or S

SEQ ID NO: 21242 - protein, 43 aa, Artificial Sequence; identical to SEQ ID NO: 18138
  GFR-binding peptide
  MOD_RES (1)..(3)..(40): Xaa is C or S
  MOD_RES (16)..(17)..(18)..(19)..(20): Xaa is A or G
  MOD_RES (21)..(22)..(23)..(24): Xaa is A or G or is absent

SEQ ID NO: 21243 - protein, 41 aa, Artificial Sequence; identical to SEQ ID NO: 18139
  GFR-binding peptide
  MOD_RES (1)..(38): Xaa is C or S
  MOD_RES (14)..(15)..(16)..(17)..(18): Xaa is A or G
  MOD_RES (19)..(20)..(21)..(22): Xaa is A or G or is absent

SEQ ID NO: 21244 - protein, 43 aa, Artificial Sequence; identical to SEQ ID NO: 18140
  GFR-binding peptide
  MOD_RES (2)..(4)..(38): Xaa is C or S
  MOD_RES (16)..(17)..(18)..(19)..(20): Xaa is A or G
  MOD_RES (21)..(22)..(23)..(24): Xaa is A or G or is absent

SEQ ID NO: 21245 - protein, 32 aa, Artificial Sequence; identical to SEQ ID NO: 18141
  GFR-binding peptide

SEQ ID NO: 21246 - protein, 36 aa, Artificial Sequence; identical to SEQ ID NO: 18142
  GFR-binding peptide
  MOD_RES (36)..(36): Xaa is C or S
  MOD_RES (12)..(13)..(14)..(15)..(16): Xaa is A or G
  MOD_RES (17)..(18)..(19)..(20): Xaa is A or G or is absent

SEQ ID NO: 21247 - protein, 33 aa, Artificial Sequence; identical to SEQ ID NO: 18143
  GFR-binding peptide
  MOD_RES (11)..(12)..(13)..(14)..(15): Xaa is A or G
  MOD_RES (16)..(17)..(18)..(19): Xaa is A or G or is absent

SEQ ID NO: 21248 - protein, 38 aa, Artificial Sequence; identical to SEQ ID NO: 18144
  GFR-binding peptide
  MOD_RES (34)..(34): Xaa is C or S
  MOD_RES (12)..(13)..(14)..(15)..(16): Xaa is A or G
  MOD_RES (17)..(18)..(19)..(20): Xaa is A or G or is absent

SEQ ID NO: 21249 - protein, 44 aa, Artificial Sequence; identical to SEQ ID NO: 18145
  GFR-binding peptide
  MOD_RES (2)..(4)..(38): Xaa is C or S

SEQ ID NO: 21250 - protein, 36 aa, Artificial Sequence; identical to SEQ ID NO: 18146
  GFR-binding peptide
  MOD_RES (1)..(1): Xaa is C or S

SEQ ID NO: 21251 - protein, 40 aa, Artificial Sequence; identical to SEQ ID NO: 18147
  GFR-binding peptide
  MOD_RES (1)..(35): Xaa is C or S
  MOD_RES (13)..(14)..(15)..(16)..(17): Xaa is A or G
  MOD_RES (18)..(19)..(20)..(21): Xaa is A or G or is absent

SEQ ID NO: 21252 - protein, 42 aa, Artificial Sequence; identical to SEQ ID NO: 18148
  GFR-binding peptide
  MOD_RES (2)..(36): Xaa is C or S

SEQ ID NO: 21253 - protein, 40 aa, Artificial Sequence; identical to SEQ ID NO: 18149
  GFR-binding peptide
  MOD_RES (36)..(36): Xaa is C or S
  MOD_RES (12)..(13)..(14)..(15)..(16): Xaa is A or G
  MOD_RES (17)..(18)..(19)..(20): Xaa is A or G or is absent

SEQ ID NO: 21254 - protein, 39 aa, Artificial Sequence; identical to SEQ ID NO: 18150
  GFR-binding peptide
  MOD_RES (1)..(3): Xaa is C or S
  MOD_RES (16)..(17)..(18)..(19)..(20): Xaa is A or G
  MOD_RES (21)..(22)..(23)..(24): Xaa is A or G or is absent

SEQ ID NO: 21255 - protein, 38 aa, Artificial Sequence; identical to SEQ ID NO: 18151
  GFR-binding peptide
  MOD_RES (1)..(3): Xaa is C or S

SEQ ID NO: 21256 - protein, 39 aa, Artificial Sequence; identical to SEQ ID NO: 18152
  GFR-binding peptide
  MOD_RES (1)..(3)..(37): Xaa is C or S
  MOD_RES (15)..(16)..(17)..(18)..(19): Xaa is A or G
  MOD_RES (20)..(21)..(22)..(23): Xaa is A or G or is absent

SEQ ID NO: 21257 - protein, 43 aa, Artificial Sequence; identical to SEQ ID NO: 18153
  GFR-binding peptide
  MOD_RES (2)..(4)..(38): Xaa is C or S
  MOD_RES (16)..(17)..(18)..(19)..(20): Xaa is A or G
  MOD_RES (21)..(22)..(23)..(24): Xaa is A or G or is absent

SEQ ID NO: 21258 - protein, 40 aa, Artificial Sequence; identical to SEQ ID NO: 18154
  GFR-binding peptide
  MOD_RES (1)..(3)..(40): Xaa is C or S
  MOD_RES (16)..(17)..(18)..(19)..(20): Xaa is A or G
  MOD_RES (21)..(22)..(23)..(24): Xaa is A or G or is absent

SEQ ID NO: 21259 - protein, 44 aa, Artificial Sequence; identical to SEQ ID NO: 18155
  GFR-binding peptide
  MOD_RES (1)..(3)..(40): Xaa is C or S
  MOD_RES (16)..(17)..(18)..(19)..(20): Xaa is A or G
  MOD_RES (21)..(22)..(23)..(24): Xaa is A or G or is absent

SEQ ID NO: 21260 - protein, 38 aa, Artificial Sequence; identical to SEQ ID NO: 18156
  GFR-binding peptide
  MOD_RES (33)..(33): Xaa is C or S
  MOD_RES (11)..(12)..(13)..(14)..(15): Xaa is A or G
  MOD_RES (16)..(17)..(18)..(19): Xaa is A or G or is absent

SEQ ID NO: 21261 - protein, 36 aa, Artificial Sequence; identical to SEQ ID NO: 18157
  GFR-binding peptide
  MOD_RES (1)..(35): Xaa is C or S
  MOD_RES (13)..(14)..(15)..(16)..(17): Xaa is A or G
  MOD_RES (18)..(19)..(20)..(21): Xaa is A or G or is absent

SEQ ID NO: 21262 - protein, 40 aa, Artificial Sequence; identical to SEQ ID NO: 18158
  GFR-binding peptide
  MOD_RES (1)..(3)..(37): Xaa is C or S

SEQ ID NO: 21263 - protein, 33 aa, Artificial Sequence; identical to SEQ ID NO: 18159
  GFR-binding peptide
  MOD_RES (12)..(13)..(14)..(15)..(16): Xaa is A or G
  MOD_RES (17)..(18)..(19)..(20): Xaa is A or G or is absent

SEQ ID NO: 21264 - protein, 43 aa, Artificial Sequence; identical to SEQ ID NO: 18160
  GFR-binding peptide
  MOD_RES (2)..(4)..(38): Xaa is C or S

SEQ ID NO: 21265 - protein, 40 aa, Artificial Sequence; identical to SEQ ID NO: 18161
  GFR-binding peptide
  MOD_RES (34)..(34): Xaa is C or S
  MOD_RES (12)..(13)..(14)..(15)..(16): Xaa is A or G
  MOD_RES (17)..(18)..(19)..(20): Xaa is A or G or is absent

SEQ ID NO: 21266 - protein, 37 aa, Artificial Sequence; identical to SEQ ID NO: 18162
  GFR-binding peptide
  MOD_RES (36)..(36): Xaa is C or S

SEQ ID NO: 21267 - protein, 40 aa, Artificial Sequence; identical to SEQ ID NO: 18163
  GFR-binding peptide
  MOD_RES (34)..(34): Xaa is C or S
  MOD_RES (12)..(13)..(14)..(15)..(16): Xaa is A or G
  MOD_RES (17)..(18)..(19)..(20): Xaa is A or G or is absent

SEQ ID NO: 21268 - protein, 37 aa, Artificial Sequence; identical to SEQ ID NO: 18164
  GFR-binding peptide
  MOD_RES (2)..(36): Xaa is C or S
  MOD_RES (14)..(15)..(16)..(17)..(18): Xaa is A or G
  MOD_RES (19)..(20)..(21)..(22): Xaa is A or G or is absent

SEQ ID NO: 21269 - protein, 41 aa, Artificial Sequence; identical to SEQ ID NO: 18165
  GFR-binding peptide
  MOD_RES (1)..(35): Xaa is C or S
  MOD_RES (13)..(14)..(15)..(16)..(17): Xaa is A or G
  MOD_RES (18)..(19)..(20)..(21): Xaa is A or G or is absent

SEQ ID NO: 21270 - protein, 43 aa, Artificial Sequence; identical to SEQ ID NO: 18166
  GFR-binding peptide
  MOD_RES (1)..(3)..(40): Xaa is C or S

SEQ ID NO: 21271 - protein, 38 aa, Artificial Sequence; identical to SEQ ID NO: 18167
  GFR-binding peptide
  MOD_RES (35)..(35): Xaa is C or S

SEQ ID NO: 21272 - protein, 37 aa, Artificial Sequence; identical to SEQ ID NO: 18168
  GFR-binding peptide
  MOD_RES (1)..(1): Xaa is C or S
  MOD_RES (14)..(15)..(16)..(17)..(18): Xaa is A or G
  MOD_RES (19)..(20)..(21)..(22): Xaa is A or G or is absent

SEQ ID NO: 21273 - protein, 36 aa, Artificial Sequence; identical to SEQ ID NO: 18169
  GFR-binding peptide
  MOD_RES (1)..(35): Xaa is C or S
  MOD_RES (13)..(14)..(15)..(16)..(17): Xaa is A or G
  MOD_RES (18)..(19)..(20)..(21): Xaa is A or G or is absent

SEQ ID NO: 21274 - protein, 36 aa, Artificial Sequence; identical to SEQ ID NO: 18170
  GFR-binding peptide
  MOD_RES (2)..(36): Xaa is C or S
  MOD_RES (14)..(15)..(16)..(17)..(18): Xaa is A or G
  MOD_RES (19)..(20)..(21)..(22): Xaa is A or G or is absent

SEQ ID NO: 21275 - protein, 35 aa, Artificial Sequence; identical to SEQ ID NO: 18171
  GFR-binding peptide
  MOD_RES (1)..(1): Xaa is C or S

SEQ ID NO: 21276 - protein, 40 aa, Artificial Sequence; identical to SEQ ID NO: 18172
  GFR-binding peptide
  MOD_RES (2)..(4)..(38): Xaa is C or S

SEQ ID NO: 21277 - protein, 41 aa, Artificial Sequence; identical to SEQ ID NO: 18173
  GFR-binding peptide
  MOD_RES (1)..(3)..(37): Xaa is C or S

SEQ ID NO: 21278 - protein, 38 aa, Artificial Sequence; identical to SEQ ID NO: 18174
  GFR-binding peptide
  MOD_RES (2)..(4): Xaa is C or S
  MOD_RES (17)..(18)..(19)..(20)..(21): Xaa is A or G
  MOD_RES (22)..(23)..(24)..(25): Xaa is A or G or is absent

SEQ ID NO: 21279 - protein, 39 aa, Artificial Sequence; identical to SEQ ID NO: 18175
  GFR-binding peptide
  MOD_RES (35)..(35): Xaa is C or S

SEQ ID NO: 21280 - protein, 40 aa, Artificial Sequence; identical to SEQ ID NO: 18176
  GFR-binding peptide
  MOD_RES (2)..(39): Xaa is C or S

SEQ ID NO: 21281 - protein, 38 aa, Artificial Sequence; identical to SEQ ID NO: 18177
  GFR-binding peptide
  MOD_RES (2)..(2): Xaa is C or S

SEQ ID NO: 21282 - protein, 38 aa, Artificial Sequence; identical to SEQ ID NO: 18178
  GFR-binding peptide
  MOD_RES (1)..(3)..(37): Xaa is C or S
  MOD_RES (15)..(16)..(17)..(18)..(19): Xaa is A or G
  MOD_RES (20)..(21)..(22)..(23): Xaa is A or G or is absent

SEQ ID NO: 21283 - protein, 39 aa, Artificial Sequence; identical to SEQ ID NO: 18179
  GFR-binding peptide
  MOD_RES (1)..(38): Xaa is C or S
  MOD_RES (14)..(15)..(16)..(17)..(18): Xaa is A or G
  MOD_RES (19)..(20)..(21)..(22): Xaa is A or G or is absent

SEQ ID NO: 21284 - protein, 39 aa, Artificial Sequence; identical to SEQ ID NO: 18180
  GFR-binding peptide
  MOD_RES (2)..(4)..(38): Xaa is C or S

SEQ ID NO: 21285 - protein, 35 aa, Artificial Sequence; identical to SEQ ID NO: 18181
  GFR-binding peptide
  MOD_RES (1)..(35): Xaa is C or S
  MOD_RES (13)..(14)..(15)..(16)..(17): Xaa is A or G
  MOD_RES (18)..(19)..(20)..(21): Xaa is A or G or is absent

SEQ ID NO: 21286 - protein, 40 aa, Artificial Sequence; identical to SEQ ID NO: 18182
  GFR-binding peptide
  MOD_RES (37)..(37): Xaa is C or S

SEQ ID NO: 21287 - protein, 39 aa, Artificial Sequence; identical to SEQ ID NO: 18183
  GFR-binding peptide
  MOD_RES (35)..(35): Xaa is C or S

SEQ ID NO: 21288 - protein, 42 aa, Artificial Sequence; identical to SEQ ID NO: 18184
  GFR-binding peptide
  MOD_RES (1)..(3)..(37): Xaa is C or S

SEQ ID NO: 21289 - protein, 39 aa, Artificial Sequence; identical to SEQ ID NO: 18185
  GFR-binding peptide
  MOD_RES (35)..(35): Xaa is C or S

SEQ ID NO: 21290 - protein, 40 aa, Artificial Sequence; identical to SEQ ID NO: 18186
  GFR-binding peptide
  MOD_RES (36)..(36): Xaa is C or S

SEQ ID NO: 21291 - protein, 40 aa, Artificial Sequence; identical to SEQ ID NO: 18187
  GFR-binding peptide
  MOD_RES (1)..(3)..(40): Xaa is C or S

SEQ ID NO: 21292 - protein, 38 aa, Artificial Sequence; identical to SEQ ID NO: 18188
  GFR-binding peptide
  MOD_RES (1)..(38): Xaa is C or S
  MOD_RES (14)..(15)..(16)..(17)..(18): Xaa is A or G
  MOD_RES (19)..(20)..(21)..(22): Xaa is A or G or is absent

SEQ ID NO: 21293 - protein, 41 aa, Artificial Sequence; identical to SEQ ID NO: 18189
  GFR-binding peptide
  MOD_RES (2)..(4)..(41): Xaa is C or S

SEQ ID NO: 21294 - protein, 37 aa, Artificial Sequence; identical to SEQ ID NO: 18190
  GFR-binding peptide
  MOD_RES (1)..(3)..(37): Xaa is C or S
  MOD_RES (15)..(16)..(17)..(18)..(19): Xaa is A or G
  MOD_RES (20)..(21)..(22)..(23): Xaa is A or G or is absent

SEQ ID NO: 21295 - protein, 42 aa, Artificial Sequence; identical to SEQ ID NO: 18191
  GFR-binding peptide
  MOD_RES (2)..(4)..(38): Xaa is C or S
  MOD_RES (16)..(17)..(18)..(19)..(20): Xaa is A or G
  MOD_RES (21)..(22)..(23)..(24): Xaa is A or G or is absent

SEQ ID NO: 21296 - protein, 37 aa, Artificial Sequence; identical to SEQ ID NO: 18192
  GFR-binding peptide
  MOD_RES (37)..(37): Xaa is C or S

SEQ ID NO: 21297 - protein, 33 aa, Artificial Sequence; identical to SEQ ID NO: 18193
  GFR-binding peptide
  MOD_RES (12)..(13)..(14)..(15)..(16): Xaa is A or G
  MOD_RES (17)..(18)..(19)..(20): Xaa is A or G or is absent

SEQ ID NO: 21298 - protein, 42 aa, Artificial Sequence; identical to SEQ ID NO: 18194
  GFR-binding peptide
  MOD_RES (2)..(36): Xaa is C or S

SEQ ID NO: 21299 - protein, 39 aa, Artificial Sequence; identical to SEQ ID NO: 18195
  GFR-binding peptide
  MOD_RES (2)..(4): Xaa is C or S
  MOD_RES (17)..(18)..(19)..(20)..(21): Xaa is A or G
  MOD_RES (22)..(23)..(24)..(25): Xaa is A or G or is absent

SEQ ID NO: 21300 - protein, 36 aa, Artificial Sequence; identical to SEQ ID NO: 18196
  GFR-binding peptide
  MOD_RES (2)..(2): Xaa is C or S

SEQ ID NO: 21301 - protein, 33 aa, Artificial Sequence; identical to SEQ ID NO: 18197
  GFR-binding peptide
  MOD_RES (12)..(13)..(14)..(15)..(16): Xaa is A or G
  MOD_RES (17)..(18)..(19)..(20): Xaa is A or G or is absent

SEQ ID NO: 21302 - protein, 42 aa, Artificial Sequence; identical to SEQ ID NO: 18198
  GFR-binding peptide
  MOD_RES (2)..(4)..(41): Xaa is C or S

SEQ ID NO: 21303 - protein, 37 aa, Artificial Sequence; identical to SEQ ID NO: 18199
  GFR-binding peptide
  MOD_RES (34)..(34): Xaa is C or S
  MOD_RES (12)..(13)..(14)..(15)..(16): Xaa is A or G
  MOD_RES (17)..(18)..(19)..(20): Xaa is A or G or is absent

SEQ ID NO: 21304 - protein, 42 aa, Artificial Sequence; identical to SEQ ID NO: 18200
  GFR-binding peptide
  MOD_RES (2)..(4)..(41): Xaa is C or S

SEQ ID NO: 21305 - protein, 44 aa, Artificial Sequence; identical to SEQ ID NO: 18201
  GFR-binding peptide
  MOD_RES (2)..(4)..(41): Xaa is C or S
  MOD_RES (17)..(18)..(19)..(20)..(21): Xaa is A or G
  MOD_RES (22)..(23)..(24)..(25): Xaa is A or G or is absent

SEQ ID NO: 21306 - protein, 38 aa, Artificial Sequence; identical to SEQ ID NO: 18202
  GFR-binding peptide
  MOD_RES (37)..(37): Xaa is C or S
  MOD_RES (13)..(14)..(15)..(16)..(17): Xaa is A or G
  MOD_RES (18)..(19)..(20)..(21): Xaa is A or G or is absent

SEQ ID NO: 21307 - protein, 41 aa, Artificial Sequence; identical to SEQ ID NO: 18203
  GFR-binding peptide
  MOD_RES (2)..(4)..(41): Xaa is C or S

SEQ ID NO: 21308 - protein, 41 aa, Artificial Sequence; identical to SEQ ID NO: 18204
  GFR-binding peptide
  MOD_RES (1)..(3)..(40): Xaa is C or S

SEQ ID NO: 21309 - protein, 39 aa, Artificial Sequence; identical to SEQ ID NO: 18205
  GFR-binding peptide
  MOD_RES (1)..(38): Xaa is C or S
  MOD_RES (14)..(15)..(16)..(17)..(18): Xaa is A or G
  MOD_RES (19)..(20)..(21)..(22): Xaa is A or G or is absent

SEQ ID NO: 21310 - protein, 34 aa, Artificial Sequence; identical to SEQ ID NO: 18206
  GFR-binding peptide
  MOD_RES (1)..(1): Xaa is C or S

SEQ ID NO: 21311 - protein, 39 aa, Artificial Sequence; identical to SEQ ID NO: 18207
  GFR-binding peptide
  MOD_RES (35)..(35): Xaa is C or S

SEQ ID NO: 21312 - protein, 33 aa, Artificial Sequence; identical to SEQ ID NO: 18208
  GFR-binding peptide

SEQ ID NO: 21313 - protein, 42 aa, Artificial Sequence; identical to SEQ ID NO: 18209
  GFR-binding peptide
  MOD_RES (1)..(3)..(37): Xaa is C or S
  MOD_RES (15)..(16)..(17)..(18)..(19): Xaa is A or G
  MOD_RES (20)..(21)..(22)..(23): Xaa is A or G or is absent

SEQ ID NO: 21314 - protein, 39 aa, Artificial Sequence; identical to SEQ ID NO: 18210
  GFR-binding peptide
  MOD_RES (2)..(4): Xaa is C or S

SEQ ID NO: 21315 - protein, 34 aa, Artificial Sequence; identical to SEQ ID NO: 18211
  GFR-binding peptide

SEQ ID NO: 21316 - protein, 38 aa, Artificial Sequence; identical to SEQ ID NO: 18212
  GFR-binding peptide
  MOD_RES (33)..(33): Xaa is C or S
  MOD_RES (11)..(12)..(13)..(14)..(15): Xaa is A or G
  MOD_RES (16)..(17)..(18)..(19): Xaa is A or G or is absent

SEQ ID NO: 21317 - protein, 42 aa, Artificial Sequence; identical to SEQ ID NO: 18213
  GFR-binding peptide
  MOD_RES (2)..(4)..(41): Xaa is C or S
  MOD_RES (17)..(18)..(19)..(20)..(21): Xaa is A or G
  MOD_RES (22)..(23)..(24)..(25): Xaa is A or G or is absent

SEQ ID NO: 21318 - protein, 44 aa, Artificial Sequence; identical to SEQ ID NO: 18214
  GFR-binding peptide
  MOD_RES (1)..(3)..(40): Xaa is C or S

SEQ ID NO: 21319 - protein, 40 aa, Artificial Sequence; identical to SEQ ID NO: 18215
  GFR-binding peptide
  MOD_RES (1)..(3)..(40): Xaa is C or S

SEQ ID NO: 21320 - protein, 34 aa, Artificial Sequence; identical to SEQ ID NO: 18216
  GFR-binding peptide
  MOD_RES (34)..(34): Xaa is C or S

SEQ ID NO: 21321 - protein, 36 aa, Artificial Sequence; identical to SEQ ID NO: 18217
  GFR-binding peptide
  MOD_RES (1)..(3): Xaa is C or S

SEQ ID NO: 21322 - protein, 38 aa, Artificial Sequence; identical to SEQ ID NO: 18218
  GFR-binding peptide
  MOD_RES (1)..(38): Xaa is C or S

SEQ ID NO: 21323 - protein, 38 aa, Artificial Sequence; identical to SEQ ID NO: 18219
  GFR-binding peptide
  MOD_RES (1)..(35): Xaa is C or S

SEQ ID NO: 21324 - protein, 38 aa, Artificial Sequence; identical to SEQ ID NO: 18220
  GFR-binding peptide
  MOD_RES (37)..(37): Xaa is C or S

SEQ ID NO: 21325 - protein, 40 aa, Artificial Sequence; identical to SEQ ID NO: 18221
  GFR-binding peptide
  MOD_RES (1)..(3)..(37): Xaa is C or S
  MOD_RES (15)..(16)..(17)..(18)..(19): Xaa is A or G
  MOD_RES (20)..(21)..(22)..(23): Xaa is A or G or is absent

SEQ ID NO: 21326 - protein, 39 aa, Artificial Sequence; identical to SEQ ID NO: 18222
  GFR-binding peptide
  MOD_RES (2)..(39): Xaa is C or S

SEQ ID NO: 21327 - protein, 37 aa, Artificial Sequence; identical to SEQ ID NO: 18223
  GFR-binding peptide
  MOD_RES (34)..(34): Xaa is C or S

SEQ ID NO: 21328 - protein, 34 aa, Artificial Sequence; identical to SEQ ID NO: 18224
  GFR-binding peptide
  MOD_RES (33)..(33): Xaa is C or S

SEQ ID NO: 21329 - protein, 42 aa, Artificial Sequence; identical to SEQ ID NO: 18225
  GFR-binding peptide
  MOD_RES (2)..(4)..(38): Xaa is C or S

SEQ ID NO: 21330 - protein, 39 aa, Artificial Sequence; identical to SEQ ID NO: 18226
  GFR-binding peptide
  MOD_RES (2)..(4): Xaa is C or S

SEQ ID NO: 21331 - protein, 36 aa, Artificial Sequence; identical to SEQ ID NO: 18227
  GFR-binding peptide
  MOD_RES (35)..(35): Xaa is C or S
  MOD_RES (11)..(12)..(13)..(14)..(15): Xaa is A or G
  MOD_RES (16)..(17)..(18)..(19): Xaa is A or G or is absent

SEQ ID NO: 21332 - protein, 40 aa, Artificial Sequence; identical to SEQ ID NO: 18228
  GFR-binding peptide
  MOD_RES (1)..(35): Xaa is C or S

SEQ ID NO: 21333 - protein, 40 aa, Artificial Sequence; identical to SEQ ID NO: 18229
  GFR-binding peptide
  MOD_RES (36)..(36): Xaa is C or S
  MOD_RES (12)..(13)..(14)..(15)..(16): Xaa is A or G
  MOD_RES (17)..(18)..(19)..(20): Xaa is A or G or is absent

SEQ ID NO: 21334 - protein, 39 aa, Artificial Sequence; identical to SEQ ID NO: 18230
  GFR-binding peptide
  MOD_RES (33)..(33): Xaa is C or S
  MOD_RES (11)..(12)..(13)..(14)..(15): Xaa is A or G
  MOD_RES (16)..(17)..(18)..(19): Xaa is A or G or is absent

SEQ ID NO: 21335 - protein, 41 aa, Artificial Sequence; identical to SEQ ID NO: 18231
  GFR-binding peptide
  MOD_RES (1)..(3)..(40): Xaa is C or S

SEQ ID NO: 21336 - protein, 37 aa, Artificial Sequence; identical to SEQ ID NO: 18232
  GFR-binding peptide
  MOD_RES (1)..(35): Xaa is C or S

SEQ ID NO: 21337 - protein, 35 aa, Artificial Sequence; identical to SEQ ID NO: 18233
  GFR-binding peptide
  MOD_RES (1)..(35): Xaa is C or S

SEQ ID NO: 21338 - protein, 35 aa, Artificial Sequence; identical to SEQ ID NO: 18234
  GFR-binding peptide
  MOD_RES (33)..(33): Xaa is C or S

SEQ ID NO: 21339 - protein, 35 aa, Artificial Sequence; identical to SEQ ID NO: 18235
  GFR-binding peptide
  MOD_RES (33)..(33): Xaa is C or S
  MOD_RES (11)..(12)..(13)..(14)..(15): Xaa is A or G
  MOD_RES (16)..(17)..(18)..(19): Xaa is A or G or is absent

SEQ ID NO: 21340 - protein, 39 aa, Artificial Sequence; identical to SEQ ID NO: 18236
  GFR-binding peptide
  MOD_RES (2)..(36): Xaa is C or S

SEQ ID NO: 21341 - protein, 34 aa, Artificial Sequence; identical to SEQ ID NO: 18237
  GFR-binding peptide
  MOD_RES (1)..(1): Xaa is C or S
  MOD_RES (13)..(14)..(15)..(16)..(17): Xaa is A or G
  MOD_RES (18)..(19)..(20)..(21): Xaa is A or G or is absent

SEQ ID NO: 21342 - protein, 41 aa, Artificial Sequence; identical to SEQ ID NO: 18238
  GFR-binding peptide
  MOD_RES (1)..(35): Xaa is C or S
  MOD_RES (13)..(14)..(15)..(16)..(17): Xaa is A or G
  MOD_RES (18)..(19)..(20)..(21): Xaa is A or G or is absent

SEQ ID NO: 21343 - protein, 37 aa, Artificial Sequence; identical to SEQ ID NO: 18239
  GFR-binding peptide
  MOD_RES (2)..(36): Xaa is C or S
  MOD_RES (14)..(15)..(16)..(17)..(18): Xaa is A or G
  MOD_RES (19)..(20)..(21)..(22): Xaa is A or G or is absent

SEQ ID NO: 21344 - protein, 38 aa, Artificial Sequence; identical to SEQ ID NO: 18240
  GFR-binding peptide
  MOD_RES (1)..(3)..(37): Xaa is C or S

SEQ ID NO: 21345 - protein, 43 aa, Artificial Sequence; identical to SEQ ID NO: 18241
  GFR-binding peptide
  MOD_RES (2)..(39): Xaa is C or S
  MOD_RES (15)..(16)..(17)..(18)..(19): Xaa is A or G
  MOD_RES (20)..(21)..(22)..(23): Xaa is A or G or is absent

SEQ ID NO: 21346 - protein, 38 aa, Artificial Sequence; identical to SEQ ID NO: 18242
  GFR-binding peptide
  MOD_RES (33)..(33): Xaa is C or S

SEQ ID NO: 21347 - protein, 42 aa, Artificial Sequence; identical to SEQ ID NO: 18243
  GFR-binding peptide
  MOD_RES (1)..(3)..(40): Xaa is C or S
  MOD_RES (16)..(17)..(18)..(19)..(20): Xaa is A or G
  MOD_RES (21)..(22)..(23)..(24): Xaa is A or G or is absent

SEQ ID NO: 21348 - protein, 42 aa, Artificial Sequence; identical to SEQ ID NO: 18244
  GFR-binding peptide
  MOD_RES (1)..(38): Xaa is C or S

SEQ ID NO: 21349 - protein, 45 aa, Artificial Sequence; identical to SEQ ID NO: 18245
  GFR-binding peptide
  MOD_RES (2)..(4)..(41): Xaa is C or S
  MOD_RES (17)..(18)..(19)..(20)..(21): Xaa is A or G
  MOD_RES (22)..(23)..(24)..(25): Xaa is A or G or is absent

SEQ ID NO: 21350 - protein, 37 aa, Artificial Sequence; identical to SEQ ID NO: 18246
  GFR-binding peptide
  MOD_RES (1)..(1): Xaa is C or S
  MOD_RES (14)..(15)..(16)..(17)..(18): Xaa is A or G
  MOD_RES (19)..(20)..(21)..(22): Xaa is A or G or is absent

SEQ ID NO: 21351 - protein, 41 aa, Artificial Sequence; identical to SEQ ID NO: 18247
  GFR-binding peptide
  MOD_RES (2)..(36): Xaa is C or S
  MOD_RES (14)..(15)..(16)..(17)..(18): Xaa is A or G
  MOD_RES (19)..(20)..(21)..(22): Xaa is A or G or is absent

SEQ ID NO: 21352 - protein, 42 aa, Artificial Sequence; identical to SEQ ID NO: 18248
  GFR-binding peptide
  MOD_RES (2)..(4)..(38): Xaa is C or S

SEQ ID NO: 21353 - protein, 41 aa, Artificial Sequence; identical to SEQ ID NO: 18249
  GFR-binding peptide
  MOD_RES (1)..(3)..(37): Xaa is C or S
  MOD_RES (15)..(16)..(17)..(18)..(19): Xaa is A or G
  MOD_RES (20)..(21)..(22)..(23): Xaa is A or G or is absent

SEQ ID NO: 21354 - protein, 41 aa, Artificial Sequence; identical to SEQ ID NO: 18250
  GFR-binding peptide
  MOD_RES (2)..(39): Xaa is C or S
  MOD_RES (15)..(16)..(17)..(18)..(19): Xaa is A or G
  MOD_RES (20)..(21)..(22)..(23): Xaa is A or G or is absent

SEQ ID NO: 21355 - protein, 39 aa, Artificial Sequence; identical to SEQ ID NO: 18251
  GFR-binding peptide
  MOD_RES (37)..(37): Xaa is C or S

SEQ ID NO: 21356 - protein, 35 aa, Artificial Sequence; identical to SEQ ID NO: 18252
  GFR-binding peptide
  MOD_RES (13)..(14)..(15)..(16)..(17): Xaa is A or G
  MOD_RES (18)..(19)..(20)..(21): Xaa is A or G or is absent

SEQ ID NO: 21357 - protein, 41 aa, Artificial Sequence; identical to SEQ ID NO: 18253
  GFR-binding peptide
  MOD_RES (2)..(4)..(38): Xaa is C or S
  MOD_RES (16)..(17)..(18)..(19)..(20): Xaa is A or G
  MOD_RES (21)..(22)..(23)..(24): Xaa is A or G or is absent

SEQ ID NO: 21358 - protein, 39 aa, Artificial Sequence; identical to SEQ ID NO: 18254
  GFR-binding peptide
  MOD_RES (1)..(35): Xaa is C or S
  MOD_RES (13)..(14)..(15)..(16)..(17): Xaa is A or G
  MOD_RES (18)..(19)..(20)..(21): Xaa is A or G or is absent

SEQ ID NO: 21359 - protein, 38 aa, Artificial Sequence; identical to SEQ ID NO: 18255
  GFR-binding peptide
  MOD_RES (2)..(4): Xaa is C or S

SEQ ID NO: 21360 - protein, 36 aa, Artificial Sequence; identical to SEQ ID NO: 18256
  GFR-binding peptide
  MOD_RES (34)..(34): Xaa is C or S

SEQ ID NO: 21361 - protein, 34 aa, Artificial Sequence; identical to SEQ ID NO: 18257
  GFR-binding peptide

SEQ ID NO: 21362 - protein, 42 aa, Artificial Sequence; identical to SEQ ID NO: 18258
  GFR-binding peptide
  MOD_RES (2)..(36): Xaa is C or S
  MOD_RES (14)..(15)..(16)..(17)..(18): Xaa is A or G
  MOD_RES (19)..(20)..(21)..(22): Xaa is A or G or is absent

SEQ ID NO: 21363 - protein, 36 aa, Artificial Sequence; identical to SEQ ID NO: 18259
  GFR-binding peptide
  MOD_RES (2)..(36): Xaa is C or S

SEQ ID NO: 21364 - protein, 40 aa, Artificial Sequence; identical to SEQ ID NO: 18260
  GFR-binding peptide
  MOD_RES (37)..(37): Xaa is C or S

SEQ ID NO: 21365 - protein, 42 aa, Artificial Sequence; identical to SEQ ID NO: 18261
  GFR-binding peptide
  MOD_RES (2)..(4)..(41): Xaa is C or S

SEQ ID NO: 21366 - protein, 35 aa, Artificial Sequence; identical to SEQ ID NO: 18262
  GFR-binding peptide
  MOD_RES (1)..(1): Xaa is C or S

SEQ ID NO: 21367 - protein, 38 aa, Artificial Sequence; identical to SEQ ID NO: 18263
  GFR-binding peptide
  MOD_RES (34)..(34): Xaa is C or S

SEQ ID NO: 21368 - protein, 41 aa, Artificial Sequence; identical to SEQ ID NO: 18264
  GFR-binding peptide
  MOD_RES (2)..(39): Xaa is C or S

SEQ ID NO: 21369 - protein, 35 aa, Artificial Sequence; identical to SEQ ID NO: 18265
  GFR-binding peptide
  MOD_RES (2)..(2): Xaa is C or S

SEQ ID NO: 21370 - protein, 39 aa, Artificial Sequence; identical to SEQ ID NO: 18266
  GFR-binding peptide
  MOD_RES (2)..(4): Xaa is C or S
  MOD_RES (17)..(18)..(19)..(20)..(21): Xaa is A or G
  MOD_RES (22)..(23)..(24)..(25): Xaa is A or G or is absent

SEQ ID NO: 21371 - protein, 44 aa, Artificial Sequence; identical to SEQ ID NO: 18267
  GFR-binding peptide
  MOD_RES (2)..(4)..(41): Xaa is C or S
  MOD_RES (17)..(18)..(19)..(20)..(21): Xaa is A or G
  MOD_RES (22)..(23)..(24)..(25): Xaa is A or G or is absent

SEQ ID NO: 21372 - protein, 34 aa, Artificial Sequence; identical to SEQ ID NO: 18268
  GFR-binding peptide

SEQ ID NO: 21373 - protein, 37 aa, Artificial Sequence; identical to SEQ ID NO: 18269
  GFR-binding peptide
  MOD_RES (33)..(33): Xaa is C or S
  MOD_RES (11)..(12)..(13)..(14)..(15): Xaa is A or G
  MOD_RES (16)..(17)..(18)..(19): Xaa is A or G or is absent

SEQ ID NO: 21374 - protein, 39 aa, Artificial Sequence; identical to SEQ ID NO: 18270
  GFR-binding peptide
  MOD_RES (2)..(4)..(38): Xaa is C or S
  MOD_RES (16)..(17)..(18)..(19)..(20): Xaa is A or G
  MOD_RES (21)..(22)..(23)..(24): Xaa is A or G or is absent

SEQ ID NO: 21375 - protein, 40 aa, Artificial Sequence; identical to SEQ ID NO: 18271
  GFR-binding peptide
  MOD_RES (34)..(34): Xaa is C or S

SEQ ID NO: 21376 - protein, 37 aa, Artificial Sequence; identical to SEQ ID NO: 18272
  GFR-binding peptide
  MOD_RES (2)..(4): Xaa is C or S
  MOD_RES (16)..(17)..(18)..(19)..(20): Xaa is A or G
  MOD_RES (21)..(22)..(23)..(24): Xaa is A or G or is absent

SEQ ID NO: 21377 - protein, 35 aa, Artificial Sequence; identical to SEQ ID NO: 18273
  GFR-binding peptide
  MOD_RES (34)..(34): Xaa is C or S

SEQ ID NO: 21378 - protein, 41 aa, Artificial Sequence; identical to SEQ ID NO: 18274
  GFR-binding peptide
  MOD_RES (2)..(39): Xaa is C or S
  MOD_RES (15)..(16)..(17)..(18)..(19): Xaa is A or G
  MOD_RES (20)..(21)..(22)..(23): Xaa is A or G or is absent

SEQ ID NO: 21379 - protein, 38 aa, Artificial Sequence; identical to SEQ ID NO: 18275
  GFR-binding peptide
  MOD_RES (1)..(35): Xaa is C or S

SEQ ID NO: 21380 - protein, 38 aa, Artificial Sequence; identical to SEQ ID NO: 18276
  GFR-binding peptide
  MOD_RES (35)..(35): Xaa is C or S
  MOD_RES (11)..(12)..(13)..(14)..(15): Xaa is A or G
  MOD_RES (16)..(17)..(18)..(19): Xaa is A or G or is absent

SEQ ID NO: 21381 - protein, 38 aa, Artificial Sequence; identical to SEQ ID NO: 18277
  GFR-binding peptide
  MOD_RES (2)..(4): Xaa is C or S
  MOD_RES (17)..(18)..(19)..(20)..(21): Xaa is A or G
  MOD_RES (22)..(23)..(24)..(25): Xaa is A or G or is absent

SEQ ID NO: 21382 - protein, 35 aa, Artificial Sequence; identical to SEQ ID NO: 18278
  GFR-binding peptide
  MOD_RES (35)..(35): Xaa is C or S

SEQ ID NO: 21383 - protein, 37 aa, Artificial Sequence; identical to SEQ ID NO: 18279
  GFR-binding peptide
  MOD_RES (2)..(2): Xaa is C or S
  MOD_RES (15)..(16)..(17)..(18)..(19): Xaa is A or G
  MOD_RES (20)..(21)..(22)..(23): Xaa is A or G or is absent

SEQ ID NO: 21384 - protein, 39 aa, Artificial Sequence; identical to SEQ ID NO: 18280
  GFR-binding peptide
  MOD_RES (33)..(33): Xaa is C or S
  MOD_RES (11)..(12)..(13)..(14)..(15): Xaa is A or G
  MOD_RES (16)..(17)..(18)..(19): Xaa is A or G or is absent

SEQ ID NO: 21385 - protein, 36 aa, Artificial Sequence; identical to SEQ ID NO: 18281
  GFR-binding peptide
  MOD_RES (2)..(36): Xaa is C or S

SEQ ID NO: 21386 - protein, 35 aa, Artificial Sequence; identical to SEQ ID NO: 18282
  GFR-binding peptide
  MOD_RES (34)..(34): Xaa is C or S

SEQ ID NO: 21387 - protein, 38 aa, Artificial Sequence; identical to SEQ ID NO: 18283
  GFR-binding peptide
  MOD_RES (34)..(34): Xaa is C or S
  MOD_RES (12)..(13)..(14)..(15)..(16): Xaa is A or G
  MOD_RES (17)..(18)..(19)..(20): Xaa is A or G or is absent

SEQ ID NO: 21388 - protein, 36 aa, Artificial Sequence; identical to SEQ ID NO: 18284
  GFR-binding peptide
  MOD_RES (2)..(2): Xaa is C or S

SEQ ID NO: 21389 - protein, 41 aa, Artificial Sequence; identical to SEQ ID NO: 18285
  GFR-binding peptide
  MOD_RES (37)..(37): Xaa is C or S
  MOD_RES (13)..(14)..(15)..(16)..(17): Xaa is A or G
  MOD_RES (18)..(19)..(20)..(21): Xaa is A or G or is absent

SEQ ID NO: 21390 - protein, 39 aa, Artificial Sequence; identical to SEQ ID NO: 18286
  GFR-binding peptide
  MOD_RES (37)..(37): Xaa is C or S
  MOD_RES (13)..(14)..(15)..(16)..(17): Xaa is A or G
  MOD_RES (18)..(19)..(20)..(21): Xaa is A or G or is absent

SEQ ID NO: 21391 - protein, 41 aa, Artificial Sequence; identical to SEQ ID NO: 18287
  GFR-binding peptide
  MOD_RES (2)..(4)..(38): Xaa is C or S

SEQ ID NO: 21392 - protein, 38 aa, Artificial Sequence; identical to SEQ ID NO: 18288
  GFR-binding peptide
  MOD_RES (36)..(36): Xaa is C or S
  MOD_RES (12)..(13)..(14)..(15)..(16): Xaa is A or G
  MOD_RES (17)..(18)..(19)..(20): Xaa is A or G or is absent

SEQ ID NO: 21393 - protein, 38 aa, Artificial Sequence; identical to SEQ ID NO: 18289
  GFR-binding peptide
  MOD_RES (37)..(37): Xaa is C or S
  MOD_RES (13)..(14)..(15)..(16)..(17): Xaa is A or G
  MOD_RES (18)..(19)..(20)..(21): Xaa is A or G or is absent

SEQ ID NO: 21394 - protein, 35 aa, Artificial Sequence; identical to SEQ ID NO: 18290
  GFR-binding peptide
  MOD_RES (33)..(33): Xaa is C or S

SEQ ID NO: 21395 - protein, 41 aa, Artificial Sequence; identical to SEQ ID NO: 18291
  GFR-binding peptide
  MOD_RES (37)..(37): Xaa is C or S

SEQ ID NO: 21396 - protein, 38 aa, Artificial Sequence; identical to SEQ ID NO: 18292
  GFR-binding peptide
  MOD_RES (1)..(3): Xaa is C or S

SEQ ID NO: 21397 - protein, 35 aa, Artificial Sequence; identical to SEQ ID NO: 18293
  GFR-binding peptide
  MOD_RES (34)..(34): Xaa is C or S
  MOD_RES (12)..(13)..(14)..(15)..(16): Xaa is A or G
  MOD_RES (17)..(18)..(19)..(20): Xaa is A or G or is absent

SEQ ID NO: 21398 - protein, 32 aa, Artificial Sequence; identical to SEQ ID NO: 18294
  GFR-binding peptide
  MOD_RES (11)..(12)..(13)..(14)..(15): Xaa is A or G
  MOD_RES (16)..(17)..(18)..(19): Xaa is A or G or is absent

SEQ ID NO: 21399 - protein, 36 aa, Artificial Sequence; identical to SEQ ID NO: 18295
  GFR-binding peptide
  MOD_RES (36)..(36): Xaa is C or S

SEQ ID NO: 21400 - protein, 36 aa, Artificial Sequence; identical to SEQ ID NO: 18296
  GFR-binding peptide
  MOD_RES (2)..(2): Xaa is C or S
  MOD_RES (15)..(16)..(17)..(18)..(19): Xaa is A or G
  MOD_RES (20)..(21)..(22)..(23): Xaa is A or G or is absent

SEQ ID NO: 21401 - protein, 44 aa, Artificial Sequence; identical to SEQ ID NO: 18297
  GFR-binding peptide
  MOD_RES (2)..(4)..(41): Xaa is C or S
  MOD_RES (17)..(18)..(19)..(20)..(21): Xaa is A or G
  MOD_RES (22)..(23)..(24)..(25): Xaa is A or G or is absent

SEQ ID NO: 21402 - protein, 44 aa, Artificial Sequence; identical to SEQ ID NO: 18298
  GFR-binding peptide
  MOD_RES (2)..(4)..(38): Xaa is C or S
  MOD_RES (16)..(17)..(18)..(19)..(20): Xaa is A or G
  MOD_RES (21)..(22)..(23)..(24): Xaa is A or G or is absent

SEQ ID NO: 21403 - protein, 39 aa, Artificial Sequence; identical to SEQ ID NO: 18299
  GFR-binding peptide
  MOD_RES (2)..(4)..(38): Xaa is C or S
  MOD_RES (16)..(17)..(18)..(19)..(20): Xaa is A or G
  MOD_RES (21)..(22)..(23)..(24): Xaa is A or G or is absent

SEQ ID NO: 21404 - protein, 42 aa, Artificial Sequence; identical to SEQ ID NO: 18300
  GFR-binding peptide
  MOD_RES (1)..(3)..(40): Xaa is C or S

SEQ ID NO: 21405 - protein, 39 aa, Artificial Sequence; identical to SEQ ID NO: 18301
  GFR-binding peptide
  MOD_RES (36)..(36): Xaa is C or S
  MOD_RES (12)..(13)..(14)..(15)..(16): Xaa is A or G
  MOD_RES (17)..(18)..(19)..(20): Xaa is A or G or is absent

SEQ ID NO: 21406 - protein, 34 aa, Artificial Sequence; identical to SEQ ID NO: 18302
  GFR-binding peptide
  MOD_RES (33)..(33): Xaa is C or S
  MOD_RES (11)..(12)..(13)..(14)..(15): Xaa is A or G
  MOD_RES (16)..(17)..(18)..(19): Xaa is A or G or is absent

SEQ ID NO: 21407 - protein, 35 aa, Artificial Sequence; identical to SEQ ID NO: 18303
  GFR-binding peptide
  MOD_RES (12)..(13)..(14)..(15)..(16): Xaa is A or G
  MOD_RES (17)..(18)..(19)..(20): Xaa is A or G or is absent

SEQ ID NO: 21408 - protein, 43 aa, Artificial Sequence; identical to SEQ ID NO: 18304
  GFR-binding peptide
  MOD_RES (2)..(4)..(41): Xaa is C or S
  MOD_RES (17)..(18)..(19)..(20)..(21): Xaa is A or G
  MOD_RES (22)..(23)..(24)..(25): Xaa is A or G or is absent

SEQ ID NO: 21409 - protein, 40 aa, Artificial Sequence; identical to SEQ ID NO: 18305
  GFR-binding peptide
  MOD_RES (2)..(36): Xaa is C or S
  MOD_RES (14)..(15)..(16)..(17)..(18): Xaa is A or G
  MOD_RES (19)..(20)..(21)..(22): Xaa is A or G or is absent

SEQ ID NO: 21410 - protein, 36 aa, Artificial Sequence; identical to SEQ ID NO: 18306
  GFR-binding peptide
  MOD_RES (35)..(35): Xaa is C or S

SEQ ID NO: 21411 - protein, 40 aa, Artificial Sequence; identical to SEQ ID NO: 18307
  GFR-binding peptide
  MOD_RES (2)..(36): Xaa is C or S
  MOD_RES (14)..(15)..(16)..(17)..(18): Xaa is A or G
  MOD_RES (19)..(20)..(21)..(22): Xaa is A or G or is absent

SEQ ID NO: 21412 - protein, 35 aa, Artificial Sequence; identical to SEQ ID NO: 18308
  GFR-binding peptide
  MOD_RES (2)..(2): Xaa is C or S
  MOD_RES (14)..(15)..(16)..(17)..(18): Xaa is A or G
  MOD_RES (19)..(20)..(21)..(22): Xaa is A or G or is absent

SEQ ID NO: 21413 - protein, 40 aa, Artificial Sequence; identical to SEQ ID NO: 18309
  GFR-binding peptide
  MOD_RES (2)..(36): Xaa is C or S
  MOD_RES (14)..(15)..(16)..(17)..(18): Xaa is A or G
  MOD_RES (19)..(20)..(21)..(22): Xaa is A or G or is absent

SEQ ID NO: 21414 - protein, 39 aa, Artificial Sequence; identical to SEQ ID NO: 18310
  GFR-binding peptide
  MOD_RES (1)..(3): Xaa is C or S
  MOD_RES (16)..(17)..(18)..(19)..(20): Xaa is A or G
  MOD_RES (21)..(22)..(23)..(24): Xaa is A or G or is absent

SEQ ID NO: 21415 - protein, 41 aa, Artificial Sequence; identical to SEQ ID NO: 18311
  GFR-binding peptide
  MOD_RES (37)..(37): Xaa is C or S

SEQ ID NO: 21416 - protein, 36 aa, Artificial Sequence; identical to SEQ ID NO: 18312
  GFR-binding peptide
  MOD_RES (13)..(14)..(15)..(16)..(17): Xaa is A or G
  MOD_RES (18)..(19)..(20)..(21): Xaa is A or G or is absent

SEQ ID NO: 21417 - protein, 36 aa, Artificial Sequence; identical to SEQ ID NO: 18313
  GFR-binding peptide
  MOD_RES (1)..(35): Xaa is C or S
  MOD_RES (13)..(14)..(15)..(16)..(17): Xaa is A or G
  MOD_RES (18)..(19)..(20)..(21): Xaa is A or G or is absent

SEQ ID NO: 21418 - protein, 39 aa, Artificial Sequence; identical to SEQ ID NO: 18314
  GFR-binding peptide
  MOD_RES (34)..(34): Xaa is C or S

SEQ ID NO: 21419 - protein, 38 aa, Artificial Sequence; identical to SEQ ID NO: 18315
  GFR-binding peptide
  MOD_RES (2)..(4)..(38): Xaa is C or S

SEQ ID NO: 21420 - protein, 34 aa, Artificial Sequence; identical to SEQ ID NO: 18316
  GFR-binding peptide
  MOD_RES (34)..(34): Xaa is C or S
  MOD_RES (12)..(13)..(14)..(15)..(16): Xaa is A or G
  MOD_RES (17)..(18)..(19)..(20): Xaa is A or G or is absent

SEQ ID NO: 21421 - protein, 35 aa, Artificial Sequence; identical to SEQ ID NO: 18317
  GFR-binding peptide
  MOD_RES (12)..(13)..(14)..(15)..(16): Xaa is A or G
  MOD_RES (17)..(18)..(19)..(20): Xaa is A or G or is absent

SEQ ID NO: 21422 - protein, 40 aa, Artificial Sequence; identical to SEQ ID NO: 18318
  GFR-binding peptide
  MOD_RES (2)..(39): Xaa is C or S
  MOD_RES (15)..(16)..(17)..(18)..(19): Xaa is A or G
  MOD_RES (20)..(21)..(22)..(23): Xaa is A or G or is absent

SEQ ID NO: 21423 - protein, 44 aa, Artificial Sequence; identical to SEQ ID NO: 18319
  GFR-binding peptide
  MOD_RES (2)..(4)..(38): Xaa is C or S

SEQ ID NO: 21424 - protein, 36 aa, Artificial Sequence; identical to SEQ ID NO: 18320
  GFR-binding peptide
  MOD_RES (36)..(36): Xaa is C or S

SEQ ID NO: 21425 - protein, 39 aa, Artificial Sequence; identical to SEQ ID NO: 18321
  GFR-binding peptide
  MOD_RES (1)..(3): Xaa is C or S
  MOD_RES (16)..(17)..(18)..(19)..(20): Xaa is A or G
  MOD_RES (21)..(22)..(23)..(24): Xaa is A or G or is absent

SEQ ID NO: 21426 - protein, 42 aa, Artificial Sequence; identical to SEQ ID NO: 18322
  GFR-binding peptide
  MOD_RES (2)..(4)..(38): Xaa is C or S

SEQ ID NO: 21427 - protein, 39 aa, Artificial Sequence; identical to SEQ ID NO: 18323
  GFR-binding peptide
  MOD_RES (2)..(36): Xaa is C or S

SEQ ID NO: 21428 - protein, 43 aa, Artificial Sequence; identical to SEQ ID NO: 18324
  GFR-binding peptide
  MOD_RES (2)..(4)..(41): Xaa is C or S

SEQ ID NO: 21429 - protein, 36 aa, Artificial Sequence; identical to SEQ ID NO: 18325
  GFR-binding peptide
  MOD_RES (1)..(35): Xaa is C or S

SEQ ID NO: 21430 - protein, 42 aa, Artificial Sequence; identical to SEQ ID NO: 18326
  GFR-binding peptide
  MOD_RES (2)..(4)..(38): Xaa is C or S

SEQ ID NO: 21431 - protein, 41 aa, Artificial Sequence; identical to SEQ ID NO: 18327
  GFR-binding peptide
  MOD_RES (1)..(38): Xaa is C or S
  MOD_RES (14)..(15)..(16)..(17)..(18): Xaa is A or G
  MOD_RES (19)..(20)..(21)..(22): Xaa is A or G or is absent

SEQ ID NO: 21432 - protein, 43 aa, Artificial Sequence; identical to SEQ ID NO: 18328
  GFR-binding peptide
  MOD_RES (1)..(3)..(40): Xaa is C or S
  MOD_RES (16)..(17)..(18)..(19)..(20): Xaa is A or G
  MOD_RES (21)..(22)..(23)..(24): Xaa is A or G or is absent

SEQ ID NO: 21433 - protein, 34 aa, Artificial Sequence; identical to SEQ ID NO: 18329
  GFR-binding peptide
  MOD_RES (33)..(33): Xaa is C or S
  MOD_RES (11)..(12)..(13)..(14)..(15): Xaa is A or G
  MOD_RES (16)..(17)..(18)..(19): Xaa is A or G or is absent

SEQ ID NO: 21434 - protein, 40 aa, Artificial Sequence; identical to SEQ ID NO: 18330
  GFR-binding peptide
  MOD_RES (2)..(36): Xaa is C or S
  MOD_RES (14)..(15)..(16)..(17)..(18): Xaa is A or G
  MOD_RES (19)..(20)..(21)..(22): Xaa is A or G or is absent

SEQ ID NO: 21435 - protein, 44 aa, Artificial Sequence; identical to SEQ ID NO: 18331
  GFR-binding peptide
  MOD_RES (2)..(4)..(38): Xaa is C or S

SEQ ID NO: 21436 - protein, 39 aa, Artificial Sequence; identical to SEQ ID NO: 18332
  GFR-binding peptide
  MOD_RES (2)..(39): Xaa is C or S
  MOD_RES (15)..(16)..(17)..(18)..(19): Xaa is A or G
  MOD_RES (20)..(21)..(22)..(23): Xaa is A or G or is absent

SEQ ID NO: 21437 - protein, 37 aa, Artificial Sequence; identical to SEQ ID NO: 18333
  GFR-binding peptide
  MOD_RES (2)..(2): Xaa is C or S

SEQ ID NO: 21438 - protein, 36 aa, Artificial Sequence; identical to SEQ ID NO: 18334
  GFR-binding peptide
  MOD_RES (1)..(1): Xaa is C or S
  MOD_RES (14)..(15)..(16)..(17)..(18): Xaa is A or G
  MOD_RES (19)..(20)..(21)..(22): Xaa is A or G or is absent

SEQ ID NO: 21439 - protein, 38 aa, Artificial Sequence; identical to SEQ ID NO: 18335
  GFR-binding peptide
  MOD_RES (2)..(36): Xaa is C or S
  MOD_RES (14)..(15)..(16)..(17)..(18): Xaa is A or G
  MOD_RES (19)..(20)..(21)..(22): Xaa is A or G or is absent

SEQ ID NO: 21440 - protein, 43 aa, Artificial Sequence; identical to SEQ ID NO: 18336
  GFR-binding peptide
  MOD_RES (1)..(3)..(40): Xaa is C or S
  MOD_RES (16)..(17)..(18)..(19)..(20): Xaa is A or G
  MOD_RES (21)..(22)..(23)..(24): Xaa is A or G or is absent

SEQ ID NO: 21441 - protein, 38 aa, Artificial Sequence; identical to SEQ ID NO: 18337
  GFR-binding peptide
  MOD_RES (1)..(35): Xaa is C or S
  MOD_RES (13)..(14)..(15)..(16)..(17): Xaa is A or G
  MOD_RES (18)..(19)..(20)..(21): Xaa is A or G or is absent

SEQ ID NO: 21442 - protein, 38 aa, Artificial Sequence; identical to SEQ ID NO: 18338
  GFR-binding peptide
  MOD_RES (2)..(36): Xaa is C or S
  MOD_RES (14)..(15)..(16)..(17)..(18): Xaa is A or G
  MOD_RES (19)..(20)..(21)..(22): Xaa is A or G or is absent

SEQ ID NO: 21443 - protein, 34 aa, Artificial Sequence; identical to SEQ ID NO: 18339
  GFR-binding peptide
  MOD_RES (33)..(33): Xaa is C or S

SEQ ID NO: 21444 - protein, 39 aa, Artificial Sequence; identical to SEQ ID NO: 18340
  GFR-binding peptide
  MOD_RES (2)..(39): Xaa is C or S

SEQ ID NO: 21445 - protein, 38 aa, Artificial Sequence; identical to SEQ ID NO: 18341
  GFR-binding peptide
  MOD_RES (35)..(35): Xaa is C or S
  MOD_RES (11)..(12)..(13)..(14)..(15): Xaa is A or G
  MOD_RES (16)..(17)..(18)..(19): Xaa is A or G or is absent

SEQ ID NO: 21446 - protein, 38 aa, Artificial Sequence; identical to SEQ ID NO: 18342
  GFR-binding peptide
  MOD_RES (1)..(3): Xaa is C or S

SEQ ID NO: 21447 - protein, 36 aa, Artificial Sequence; identical to SEQ ID NO: 18343
  GFR-binding peptide
  MOD_RES (35)..(35): Xaa is C or S
  MOD_RES (11)..(12)..(13)..(14)..(15): Xaa is A or G
  MOD_RES (16)..(17)..(18)..(19): Xaa is A or G or is absent

SEQ ID NO: 21448 - protein, 34 aa, Artificial Sequence; identical to SEQ ID NO: 18344
  GFR-binding peptide
  MOD_RES (13)..(14)..(15)..(16)..(17): Xaa is A or G
  MOD_RES (18)..(19)..(20)..(21): Xaa is A or G or is absent

SEQ ID NO: 21449 - protein, 42 aa, Artificial Sequence; identical to SEQ ID NO: 18345
  GFR-binding peptide
  MOD_RES (1)..(3)..(37): Xaa is C or S
  MOD_RES (15)..(16)..(17)..(18)..(19): Xaa is A or G
  MOD_RES (20)..(21)..(22)..(23): Xaa is A or G or is absent

SEQ ID NO: 21450 - protein, 38 aa, Artificial Sequence; identical to SEQ ID NO: 18346
  GFR-binding peptide
  MOD_RES (34)..(34): Xaa is C or S

SEQ ID NO: 21451 - protein, 35 aa, Artificial Sequence; identical to SEQ ID NO: 18347
  GFR-binding peptide

SEQ ID NO: 21452 - protein, 37 aa, Artificial Sequence; identical to SEQ ID NO: 18348
  GFR-binding peptide
  MOD_RES (1)..(1): Xaa is C or S

SEQ ID NO: 21453 - protein, 40 aa, Artificial Sequence; identical to SEQ ID NO: 18349
  GFR-binding peptide
  MOD_RES (2)..(39): Xaa is C or S
  MOD_RES (15)..(16)..(17)..(18)..(19): Xaa is A or G
  MOD_RES (20)..(21)..(22)..(23): Xaa is A or G or is absent

SEQ ID NO: 21454 - protein, 42 aa, Artificial Sequence; identical to SEQ ID NO: 18350
  GFR-binding peptide
  MOD_RES (1)..(3)..(40): Xaa is C or S
  MOD_RES (16)..(17)..(18)..(19)..(20): Xaa is A or G
  MOD_RES (21)..(22)..(23)..(24): Xaa is A or G or is absent

SEQ ID NO: 21455 - protein, 44 aa, Artificial Sequence; identical to SEQ ID NO: 18351
  GFR-binding peptide
  MOD_RES (1)..(3)..(40): Xaa is C or S
  MOD_RES (16)..(17)..(18)..(19)..(20): Xaa is A or G
  MOD_RES (21)..(22)..(23)..(24): Xaa is A or G or is absent

SEQ ID NO: 21456 - protein, 41 aa, Artificial Sequence; identical to SEQ ID NO: 18352
  GFR-binding peptide
  MOD_RES (1)..(38): Xaa is C or S
  MOD_RES (14)..(15)..(16)..(17)..(18): Xaa is A or G
  MOD_RES (19)..(20)..(21)..(22): Xaa is A or G or is absent

SEQ ID NO: 21457 - protein, 37 aa, Artificial Sequence; identical to SEQ ID NO: 18353
  GFR-binding peptide
  MOD_RES (1)..(3): Xaa is C or S
  MOD_RES (16)..(17)..(18)..(19)..(20): Xaa is A or G
  MOD_RES (21)..(22)..(23)..(24): Xaa is A or G or is absent

SEQ ID NO: 21458 - protein, 38 aa, Artificial Sequence; identical to SEQ ID NO: 18354
  GFR-binding peptide
  MOD_RES (33)..(33): Xaa is C or S
  MOD_RES (11)..(12)..(13)..(14)..(15): Xaa is A or G
  MOD_RES (16)..(17)..(18)..(19): Xaa is A or G or is absent

SEQ ID NO: 21459 - protein, 43 aa, Artificial Sequence; identical to SEQ ID NO: 18355
  GFR-binding peptide
  MOD_RES (1)..(3)..(40): Xaa is C or S

SEQ ID NO: 21460 - protein, 39 aa, Artificial Sequence; identical to SEQ ID NO: 18356
  GFR-binding peptide
  MOD_RES (2)..(4)..(38): Xaa is C or S
  MOD_RES (16)..(17)..(18)..(19)..(20): Xaa is A or G
  MOD_RES (21)..(22)..(23)..(24): Xaa is A or G or is absent

SEQ ID NO: 21461 - protein, 35 aa, Artificial Sequence; identical to SEQ ID NO: 18357
  GFR-binding peptide
  MOD_RES (33)..(33): Xaa is C or S
  MOD_RES (11)..(12)..(13)..(14)..(15): Xaa is A or G
  MOD_RES (16)..(17)..(18)..(19): Xaa is A or G or is absent

SEQ ID NO: 21462 - protein, 37 aa, Artificial Sequence; identical to SEQ ID NO: 18358
  GFR-binding peptide
  MOD_RES (1)..(3)..(37): Xaa is C or S
  MOD_RES (15)..(16)..(17)..(18)..(19): Xaa is A or G
  MOD_RES (20)..(21)..(22)..(23): Xaa is A or G or is absent

SEQ ID NO: 21463 - protein, 34 aa, Artificial Sequence; identical to SEQ ID NO: 18359
  GFR-binding peptide
  MOD_RES (34)..(34): Xaa is C or S

SEQ ID NO: 21464 - protein, 39 aa, Artificial Sequence; identical to SEQ ID NO: 18360
  GFR-binding peptide
  MOD_RES (37)..(37): Xaa is C or S

SEQ ID NO: 21465 - protein, 40 aa, Artificial Sequence; identical to SEQ ID NO: 18361
  GFR-binding peptide
  MOD_RES (1)..(38): Xaa is C or S

SEQ ID NO: 21466 - protein, 37 aa, Artificial Sequence; identical to SEQ ID NO: 18362
  GFR-binding peptide
  MOD_RES (35)..(35): Xaa is C or S
  MOD_RES (11)..(12)..(13)..(14)..(15): Xaa is A or G
  MOD_RES (16)..(17)..(18)..(19): Xaa is A or G or is absent

SEQ ID NO: 21467 - protein, 35 aa, Artificial Sequence; identical to SEQ ID NO: 18363
  GFR-binding peptide
  MOD_RES (34)..(34): Xaa is C or S

SEQ ID NO: 21468 - protein, 38 aa, Artificial Sequence; identical to SEQ ID NO: 18364
  GFR-binding peptide
  MOD_RES (35)..(35): Xaa is C or S
  MOD_RES (11)..(12)..(13)..(14)..(15): Xaa is A or G
  MOD_RES (16)..(17)..(18)..(19): Xaa is A or G or is absent

SEQ ID NO: 21469 - protein, 42 aa, Artificial Sequence; identical to SEQ ID NO: 18365
  GFR-binding peptide
  MOD_RES (1)..(3)..(40): Xaa is C or S
  MOD_RES (16)..(17)..(18)..(19)..(20): Xaa is A or G
  MOD_RES (21)..(22)..(23)..(24): Xaa is A or G or is absent

SEQ ID NO: 21470 - protein, 37 aa, Artificial Sequence; identical to SEQ ID NO: 18366
  GFR-binding peptide
  MOD_RES (1)..(1): Xaa is C or S

SEQ ID NO: 21471 - protein, 36 aa, Artificial Sequence; identical to SEQ ID NO: 18367
  GFR-binding peptide
  MOD_RES (2)..(36): Xaa is C or S

SEQ ID NO: 21472 - protein, 39 aa, Artificial Sequence; identical to SEQ ID NO: 18368
  GFR-binding peptide
  MOD_RES (2)..(39): Xaa is C or S
  MOD_RES (15)..(16)..(17)..(18)..(19): Xaa is A or G
  MOD_RES (20)..(21)..(22)..(23): Xaa is A or G or is absent

SEQ ID NO: 21473 - protein, 35 aa, Artificial Sequence; identical to SEQ ID NO: 18369
  GFR-binding peptide
  MOD_RES (34)..(34): Xaa is C or S
  MOD_RES (12)..(13)..(14)..(15)..(16): Xaa is A or G
  MOD_RES (17)..(18)..(19)..(20): Xaa is A or G or is absent

SEQ ID NO: 21474 - protein, 39 aa, Artificial Sequence; identical to SEQ ID NO: 18370
  GFR-binding peptide
  MOD_RES (36)..(36): Xaa is C or S
  MOD_RES (12)..(13)..(14)..(15)..(16): Xaa is A or G
  MOD_RES (17)..(18)..(19)..(20): Xaa is A or G or is absent

SEQ ID NO: 21475 - protein, 40 aa, Artificial Sequence; identical to SEQ ID NO: 18371
  GFR-binding peptide
  MOD_RES (2)..(4): Xaa is C or S

SEQ ID NO: 21476 - protein, 40 aa, Artificial Sequence; identical to SEQ ID NO: 18372
  GFR-binding peptide
  MOD_RES (1)..(38): Xaa is C or S

SEQ ID NO: 21477 - protein, 36 aa, Artificial Sequence; identical to SEQ ID NO: 18373
  GFR-binding peptide
  MOD_RES (35)..(35): Xaa is C or S

SEQ ID NO: 21478 - protein, 35 aa, Artificial Sequence; identical to SEQ ID NO: 18374
  GFR-binding peptide

SEQ ID NO: 21479 - protein, 39 aa, Artificial Sequence; identical to SEQ ID NO: 18375
  GFR-binding peptide
  MOD_RES (34)..(34): Xaa is C or S

SEQ ID NO: 21480 - protein, 38 aa, Artificial Sequence; identical to SEQ ID NO: 18376
  GFR-binding peptide
  MOD_RES (2)..(4): Xaa is C or S
  MOD_RES (17)..(18)..(19)..(20)..(21): Xaa is A or G
  MOD_RES (22)..(23)..(24)..(25): Xaa is A or G or is absent

SEQ ID NO: 21481 - protein, 43 aa, Artificial Sequence; identical to SEQ ID NO: 18377
  GFR-binding peptide
  MOD_RES (1)..(3)..(37): Xaa is C or S

SEQ ID NO: 21482 - protein, 40 aa, Artificial Sequence; identical to SEQ ID NO: 18378
  GFR-binding peptide
  MOD_RES (1)..(3)..(40): Xaa is C or S

SEQ ID NO: 21483 - protein, 40 aa, Artificial Sequence; identical to SEQ ID NO: 18379
  GFR-binding peptide
  MOD_RES (1)..(3)..(40): Xaa is C or S

SEQ ID NO: 21484 - protein, 44 aa, Artificial Sequence; identical to SEQ ID NO: 18380
  GFR-binding peptide
  MOD_RES (2)..(4)..(38): Xaa is C or S
  MOD_RES (16)..(17)..(18)..(19)..(20): Xaa is A or G
  MOD_RES (21)..(22)..(23)..(24): Xaa is A or G or is absent

SEQ ID NO: 21485 - protein, 37 aa, Artificial Sequence; identical to SEQ ID NO: 18381
  GFR-binding peptide
  MOD_RES (1)..(3)..(37): Xaa is C or S

SEQ ID NO: 21486 - protein, 37 aa, Artificial Sequence; identical to SEQ ID NO: 18382
  GFR-binding peptide
  MOD_RES (37)..(37): Xaa is C or S

SEQ ID NO: 21487 - protein, 33 aa, Artificial Sequence; identical to SEQ ID NO: 18383
  GFR-binding peptide

SEQ ID NO: 21488 - protein, 33 aa, Artificial Sequence; identical to SEQ ID NO: 18384
  GFR-binding peptide

SEQ ID NO: 21489 - protein, 36 aa, Artificial Sequence; identical to SEQ ID NO: 18385
  GFR-binding peptide
  MOD_RES (36)..(36): Xaa is C or S

SEQ ID NO: 21490 - protein, 37 aa, Artificial Sequence; identical to SEQ ID NO: 18386
  GFR-binding peptide
  MOD_RES (2)..(36): Xaa is C or S

SEQ ID NO: 21491 - protein, 34 aa, Artificial Sequence; identical to SEQ ID NO: 18387
  GFR-binding peptide
  MOD_RES (13)..(14)..(15)..(16)..(17): Xaa is A or G
  MOD_RES (18)..(19)..(20)..(21): Xaa is A or G or is absent

SEQ ID NO: 21492 - protein, 33 aa, Artificial Sequence; identical to SEQ ID NO: 18388
  GFR-binding peptide

SEQ ID NO: 21493 - protein, 34 aa, Artificial Sequence; identical to SEQ ID NO: 18389
  GFR-binding peptide

SEQ ID NO: 21494 - protein, 44 aa, Artificial Sequence; identical to SEQ ID NO: 18390
  GFR-binding peptide
  MOD_RES (2)..(4)..(41): Xaa is C or S

SEQ ID NO: 21495 - protein, 40 aa, Artificial Sequence; identical to SEQ ID NO: 18391
  GFR-binding peptide
  MOD_RES (37)..(37): Xaa is C or S

SEQ ID NO: 21496 - protein, 35 aa, Artificial Sequence; identical to SEQ ID NO: 18392
  GFR-binding peptide
  MOD_RES (13)..(14)..(15)..(16)..(17): Xaa is A or G
  MOD_RES (18)..(19)..(20)..(21): Xaa is A or G or is absent

SEQ ID NO: 21497 - protein, 34 aa, Artificial Sequence; identical to SEQ ID NO: 18393
  GFR-binding peptide
  MOD_RES (1)..(1): Xaa is C or S

SEQ ID NO: 21498 - protein, 43 aa, Artificial Sequence; identical to SEQ ID NO: 18394
  GFR-binding peptide
  MOD_RES (1)..(3)..(40): Xaa is C or S
  MOD_RES (16)..(17)..(18)..(19)..(20): Xaa is A or G
  MOD_RES (21)..(22)..(23)..(24): Xaa is A or G or is absent

SEQ ID NO: 21499 - protein, 41 aa, Artificial Sequence; identical to SEQ ID NO: 18395
  GFR-binding peptide
  MOD_RES (1)..(3)..(37): Xaa is C or S
  MOD_RES (15)..(16)..(17)..(18)..(19): Xaa is A or G
  MOD_RES (20)..(21)..(22)..(23): Xaa is A or G or is absent

SEQ ID NO: 21500 - protein, 34 aa, Artificial Sequence; identical to SEQ ID NO: 18396
  GFR-binding peptide
  MOD_RES (1)..(1): Xaa is C or S

SEQ ID NO: 21501 - protein, 36 aa, Artificial Sequence; identical to SEQ ID NO: 18397
  GFR-binding peptide
  MOD_RES (35)..(35): Xaa is C or S

SEQ ID NO: 21502 - protein, 37 aa, Artificial Sequence; identical to SEQ ID NO: 18398
  GFR-binding peptide
  MOD_RES (2)..(4): Xaa is C or S

SEQ ID NO: 21503 - protein, 40 aa, Artificial Sequence; identical to SEQ ID NO: 18399
  GFR-binding peptide
  MOD_RES (34)..(34): Xaa is C or S

SEQ ID NO: 21504 - protein, 35 aa, Artificial Sequence; identical to SEQ ID NO: 18400
  GFR-binding peptide

SEQ ID NO: 21505 - protein, 39 aa, Artificial Sequence; identical to SEQ ID NO: 18401
  GFR-binding peptide
  MOD_RES (35)..(35): Xaa is C or S

SEQ ID NO: 21506 - protein, 42 aa, Artificial Sequence; identical to SEQ ID NO: 18402
  GFR-binding peptide
  MOD_RES (1)..(3)..(40): Xaa is C or S

SEQ ID NO: 21507 - protein, 37 aa, Artificial Sequence; identical to SEQ ID NO: 18403
  GFR-binding peptide
  MOD_RES (2)..(2): Xaa is C or S
  MOD_RES (15)..(16)..(17)..(18)..(19): Xaa is A or G
  MOD_RES (20)..(21)..(22)..(23): Xaa is A or G or is absent

SEQ ID NO: 21508 - protein, 36 aa, Artificial Sequence; identical to SEQ ID NO: 18404
  GFR-binding peptide

SEQ ID NO: 21509 - protein, 37 aa, Artificial Sequence; identical to SEQ ID NO: 18405
  GFR-binding peptide
  MOD_RES (1)..(1): Xaa is C or S
  MOD_RES (14)..(15)..(16)..(17)..(18): Xaa is A or G
  MOD_RES (19)..(20)..(21)..(22): Xaa is A or G or is absent

SEQ ID NO: 21510 - protein, 34 aa, Artificial Sequence; identical to SEQ ID NO: 18406
  GFR-binding peptide
  MOD_RES (1)..(1): Xaa is C or S
  MOD_RES (13)..(14)..(15)..(16)..(17): Xaa is A or G
  MOD_RES (18)..(19)..(20)..(21): Xaa is A or G or is absent

SEQ ID NO: 21511 - protein, 34 aa, Artificial Sequence; identical to SEQ ID NO: 18407
  GFR-binding peptide
  MOD_RES (12)..(13)..(14)..(15)..(16): Xaa is A or G
  MOD_RES (17)..(18)..(19)..(20): Xaa is A or G or is absent

SEQ ID NO: 21512 - protein, 35 aa, Artificial Sequence; identical to SEQ ID NO: 18408
  GFR-binding peptide
  MOD_RES (33)..(33): Xaa is C or S
  MOD_RES (11)..(12)..(13)..(14)..(15): Xaa is A or G
  MOD_RES (16)..(17)..(18)..(19): Xaa is A or G or is absent

SEQ ID NO: 21513 - protein, 40 aa, Artificial Sequence; identical to SEQ ID NO: 18409
  GFR-binding peptide
  MOD_RES (2)..(39): Xaa is C or S

SEQ ID NO: 21514 - protein, 34 aa, Artificial Sequence; identical to SEQ ID NO: 18410
  GFR-binding peptide
  MOD_RES (13)..(14)..(15)..(16)..(17): Xaa is A or G
  MOD_RES (18)..(19)..(20)..(21): Xaa is A or G or is absent

SEQ ID NO: 21515 - protein, 38 aa, Artificial Sequence; identical to SEQ ID NO: 18411
  GFR-binding peptide
  MOD_RES (36)..(36): Xaa is C or S
  MOD_RES (12)..(13)..(14)..(15)..(16): Xaa is A or G
  MOD_RES (17)..(18)..(19)..(20): Xaa is A or G or is absent

SEQ ID NO: 21516 - protein, 38 aa, Artificial Sequence; identical to SEQ ID NO: 18412
  GFR-binding peptide
  MOD_RES (36)..(36): Xaa is C or S

SEQ ID NO: 21517 - protein, 40 aa, Artificial Sequence; identical to SEQ ID NO: 18413
  GFR-binding peptide
  MOD_RES (2)..(4): Xaa is C or S
  MOD_RES (17)..(18)..(19)..(20)..(21): Xaa is A or G
  MOD_RES (22)..(23)..(24)..(25): Xaa is A or G or is absent

SEQ ID NO: 21518 - protein, 44 aa, Artificial Sequence; identical to SEQ ID NO: 18414
  GFR-binding peptide
  MOD_RES (1)..(3)..(40): Xaa is C or S
  MOD_RES (16)..(17)..(18)..(19)..(20): Xaa is A or G
  MOD_RES (21)..(22)..(23)..(24): Xaa is A or G or is absent

SEQ ID NO: 21519 - protein, 38 aa, Artificial Sequence; identical to SEQ ID NO: 18415
  GFR-binding peptide
  MOD_RES (2)..(4)..(38): Xaa is C or S

SEQ ID NO: 21520 - protein, 43 aa, Artificial Sequence; identical to SEQ ID NO: 18416
  GFR-binding peptide
  MOD_RES (1)..(3)..(40): Xaa is C or S

SEQ ID NO: 21521 - protein, 40 aa, Artificial Sequence; identical to SEQ ID NO: 18417
  GFR-binding peptide
  MOD_RES (2)..(39): Xaa is C or S

SEQ ID NO: 21522 - protein, 43 aa, Artificial Sequence; identical to SEQ ID NO: 18418
  GFR-binding peptide
  MOD_RES (1)..(3)..(40): Xaa is C or S

SEQ ID NO: 21523 - protein, 34 aa, Artificial Sequence; identical to SEQ ID NO: 18419
  GFR-binding peptide
  MOD_RES (1)..(1): Xaa is C or S
  MOD_RES (13)..(14)..(15)..(16)..(17): Xaa is A or G
  MOD_RES (18)..(19)..(20)..(21): Xaa is A or G or is absent

SEQ ID NO: 21524 - protein, 39 aa, Artificial Sequence; identical to SEQ ID NO: 18420
  GFR-binding peptide
  MOD_RES (2)..(36): Xaa is C or S

SEQ ID NO: 21525 - protein, 37 aa, Artificial Sequence; identical to SEQ ID NO: 18421
  GFR-binding peptide
  MOD_RES (1)..(3)..(37): Xaa is C or S
  MOD_RES (15)..(16)..(17)..(18)..(19): Xaa is A or G
  MOD_RES (20)..(21)..(22)..(23): Xaa is A or G or is absent

SEQ ID NO: 21526 - protein, 43 aa, Artificial Sequence; identical to SEQ ID NO: 18422
  GFR-binding peptide
  MOD_RES (2)..(4)..(41): Xaa is C or S

SEQ ID NO: 21527 - protein, 38 aa, Artificial Sequence; identical to SEQ ID NO: 18423
  GFR-binding peptide
  MOD_RES (33)..(33): Xaa is C or S
  MOD_RES (11)..(12)..(13)..(14)..(15): Xaa is A or G
  MOD_RES (16)..(17)..(18)..(19): Xaa is A or G or is absent

SEQ ID NO: 21528 - protein, 40 aa, Artificial Sequence; identical to SEQ ID NO: 18424
  GFR-binding peptide
  MOD_RES (34)..(34): Xaa is C or S
  MOD_RES (12)..(13)..(14)..(15)..(16): Xaa is A or G
  MOD_RES (17)..(18)..(19)..(20): Xaa is A or G or is absent

SEQ ID NO: 21529 - protein, 40 aa, Artificial Sequence; identical to SEQ ID NO: 18425
  GFR-binding peptide
  MOD_RES (1)..(3)..(37): Xaa is C or S
  MOD_RES (15)..(16)..(17)..(18)..(19): Xaa is A or G
  MOD_RES (20)..(21)..(22)..(23): Xaa is A or G or is absent

SEQ ID NO: 21530 - protein, 41 aa, Artificial Sequence; identical to SEQ ID NO: 18426
  GFR-binding peptide
  MOD_RES (1)..(3)..(37): Xaa is C or S
  MOD_RES (15)..(16)..(17)..(18)..(19): Xaa is A or G
  MOD_RES (20)..(21)..(22)..(23): Xaa is A or G or is absent

SEQ ID NO: 21531 - protein, 41 aa, Artificial Sequence; identical to SEQ ID NO: 18427
  GFR-binding peptide
  MOD_RES (2)..(4)..(38): Xaa is C or S

SEQ ID NO: 21532 - protein, 38 aa, Artificial Sequence; identical to SEQ ID NO: 18428
  GFR-binding peptide
  MOD_RES (1)..(3)..(37): Xaa is C or S
  MOD_RES (15)..(16)..(17)..(18)..(19): Xaa is A or G
  MOD_RES (20)..(21)..(22)..(23): Xaa is A or G or is absent

SEQ ID NO: 21533 - protein, 35 aa, Artificial Sequence; identical to SEQ ID NO: 18429
  GFR-binding peptide
  MOD_RES (35)..(35): Xaa is C or S
  MOD_RES (11)..(12)..(13)..(14)..(15): Xaa is A or G
  MOD_RES (16)..(17)..(18)..(19): Xaa is A or G or is absent

SEQ ID NO: 21534 - protein, 37 aa, Artificial Sequence; identical to SEQ ID NO: 18430
  GFR-binding peptide
  MOD_RES (2)..(2): Xaa is C or S
  MOD_RES (15)..(16)..(17)..(18)..(19): Xaa is A or G
  MOD_RES (20)..(21)..(22)..(23): Xaa is A or G or is absent

SEQ ID NO: 21535 - protein, 36 aa, Artificial Sequence; identical to SEQ ID NO: 18431
  GFR-binding peptide
  MOD_RES (2)..(36): Xaa is C or S

SEQ ID NO: 21536 - protein, 36 aa, Artificial Sequence; identical to SEQ ID NO: 18432
  GFR-binding peptide
  MOD_RES (34)..(34): Xaa is C or S

SEQ ID NO: 21537 - protein, 39 aa, Artificial Sequence; identical to SEQ ID NO: 18433
  GFR-binding peptide
  MOD_RES (2)..(36): Xaa is C or S

SEQ ID NO: 21538 - protein, 37 aa, Artificial Sequence; identical to SEQ ID NO: 18434
  GFR-binding peptide
  MOD_RES (37)..(37): Xaa is C or S
  MOD_RES (13)..(14)..(15)..(16)..(17): Xaa is A or G
  MOD_RES (18)..(19)..(20)..(21): Xaa is A or G or is absent

SEQ ID NO: 21539 - protein, 35 aa, Artificial Sequence; identical to SEQ ID NO: 18435
  GFR-binding peptide
  MOD_RES (33)..(33): Xaa is C or S
  MOD_RES (11)..(12)..(13)..(14)..(15): Xaa is A or G
  MOD_RES (16)..(17)..(18)..(19): Xaa is A or G or is absent

SEQ ID NO: 21540 - protein, 37 aa, Artificial Sequence; identical to SEQ ID NO: 18436
  GFR-binding peptide
  MOD_RES (35)..(35): Xaa is C or S

SEQ ID NO: 21541 - protein, 33 aa, Artificial Sequence; identical to SEQ ID NO: 18437
  GFR-binding peptide
  MOD_RES (12)..(13)..(14)..(15)..(16): Xaa is A or G
  MOD_RES (17)..(18)..(19)..(20): Xaa is A or G or is absent

SEQ ID NO: 21542 - protein, 40 aa, Artificial Sequence; identical to SEQ ID NO: 18438
  GFR-binding peptide
  MOD_RES (37)..(37): Xaa is C or S
  MOD_RES (13)..(14)..(15)..(16)..(17): Xaa is A or G
  MOD_RES (18)..(19)..(20)..(21): Xaa is A or G or is absent

SEQ ID NO: 21543 - protein, 40 aa, Artificial Sequence; identical to SEQ ID NO: 18439
  GFR-binding peptide
  MOD_RES (2)..(4)..(38): Xaa is C or S

SEQ ID NO: 21544 - protein, 41 aa, Artificial Sequence; identical to SEQ ID NO: 18440
  GFR-binding peptide
  MOD_RES (1)..(3)..(37): Xaa is C or S

SEQ ID NO: 21545 - protein, 40 aa, Artificial Sequence; identical to SEQ ID NO: 18441
  GFR-binding peptide
  MOD_RES (1)..(3)..(40): Xaa is C or S
  MOD_RES (16)..(17)..(18)..(19)..(20): Xaa is A or G
  MOD_RES (21)..(22)..(23)..(24): Xaa is A or G or is absent

SEQ ID NO: 21546 - protein, 40 aa, Artificial Sequence; identical to SEQ ID NO: 18442
  GFR-binding peptide
  MOD_RES (37)..(37): Xaa is C or S
  MOD_RES (13)..(14)..(15)..(16)..(17): Xaa is A or G
  MOD_RES (18)..(19)..(20)..(21): Xaa is A or G or is absent

SEQ ID NO: 21547 - protein, 38 aa, Artificial Sequence; identical to SEQ ID NO: 18443
  GFR-binding peptide
  MOD_RES (2)..(36): Xaa is C or S
  MOD_RES (14)..(15)..(16)..(17)..(18): Xaa is A or G
  MOD_RES (19)..(20)..(21)..(22): Xaa is A or G or is absent

SEQ ID NO: 21548 - protein, 38 aa, Artificial Sequence; identical to SEQ ID NO: 18444
  GFR-binding peptide
  MOD_RES (1)..(38): Xaa is C or S
  MOD_RES (14)..(15)..(16)..(17)..(18): Xaa is A or G
  MOD_RES (19)..(20)..(21)..(22): Xaa is A or G or is absent

SEQ ID NO: 21549 - protein, 36 aa, Artificial Sequence; identical to SEQ ID NO: 18445
  GFR-binding peptide
  MOD_RES (1)..(35): Xaa is C or S

SEQ ID NO: 21550 - protein, 35 aa, Artificial Sequence; identical to SEQ ID NO: 18446
  GFR-binding peptide
  MOD_RES (13)..(14)..(15)..(16)..(17): Xaa is A or G
  MOD_RES (18)..(19)..(20)..(21): Xaa is A or G or is absent

SEQ ID NO: 21551 - protein, 37 aa, Artificial Sequence; identical to SEQ ID NO: 18447
  GFR-binding peptide
  MOD_RES (37)..(37): Xaa is C or S
  MOD_RES (13)..(14)..(15)..(16)..(17): Xaa is A or G
  MOD_RES (18)..(19)..(20)..(21): Xaa is A or G or is absent

SEQ ID NO: 21552 - protein, 40 aa, Artificial Sequence; identical to SEQ ID NO: 18448
  GFR-binding peptide
  MOD_RES (1)..(3)..(40): Xaa is C or S

SEQ ID NO: 21553 - protein, 40 aa, Artificial Sequence; identical to SEQ ID NO: 18449
  GFR-binding peptide
  MOD_RES (36)..(36): Xaa is C or S

SEQ ID NO: 21554 - protein, 37 aa, Artificial Sequence; identical to SEQ ID NO: 18450
  GFR-binding peptide
  MOD_RES (34)..(34): Xaa is C or S

SEQ ID NO: 21555 - protein, 40 aa, Artificial Sequence; identical to SEQ ID NO: 18451
  GFR-binding peptide
  MOD_RES (34)..(34): Xaa is C or S

SEQ ID NO: 21556 - protein, 37 aa, Artificial Sequence; identical to SEQ ID NO: 18452
  GFR-binding peptide
  MOD_RES (1)..(3)..(37): Xaa is C or S
